United States Patent Application Publication US 2015/0052636 A1 - sequence listing, part 22

SEQ ID NO: 76438 - DNA, 880 bp, Carica papaya
  Intron number 1 from transcript evm.model.supercontig_46.7 0 (locus evm.TU.supercontig_46.70) derived from phytozome v7.0 (chr-ID supercontig_46; pos 617207 to 618086 reverse strand)
gaggaggaacgaactcgcaggcttgccagggtcaagtcggtcttgtttcaactcatcttcactgtttacttttgggttctcaatttttttgatgttgattttcttttcctgggggggtttaaggagcgttctgtgagttgggagaattaaacccgttttacgattggctctcccttgatgactttttggatgtcagctagttaattcatctgggttttagttggactgttattaaagttgctttctattgagcttttatttgaggttgatttggattgaattctgggtttttgctagaaccctgatatcagtgatgaaattgaattgtatagtctatacatgcttaatatgactgtattgttgtttgacctatatataagctggataacttctgcggtaggtatgagatatgtgttcatgatgtgcatgtcagacactggttgatctgcaagtggaggttttgagattatgatataatacgaaaagggtgatgaagacttagaagttgatcagttctattcatcaattagtataatttcttttccttcgctacaaatatgagcatgctatctttttgttctaaggactgtgttttgttctgtatatgatatgtcatatctccctcaaggcttatattagttttagttacttttcatatcaaatgaatccaagtacccatttccaatttgtggactcttattgactcagtccctatatatattgactgtaaaaattattgagctacacacttcgtccatagtggtaacagacacttgcacttgagtctgagcaaagtaggttgtacatgtttaccagcttttaacttgctggcattgctgtcaaattggcagggcagctgctactgcgttgtccaagagac

SEQ ID NO: 76439 - DNA, 303 bp, Carica papaya
  Intron number 2 from transcript evm.model.supercontig_162. 23 (locus evm.TU.supercontig_162.23) derived from phytozom e v7.0 (chr-ID supercontig_162; pos 196335 to 196637)
gagaatttttacaggtacatatacatcattctgaaaattttttcttcatttttccaaaatagatgctaaccccaactcaacccaaaatctttccttcagtctttattccaggatggaaaattttgatctagtccattccaatccgatctgatttagaatatatactagtgaatcggattttttgagataattaagtcaaaaaacatataaaattacatttcacgcctataaataaggtataacccatgttctagattgatttttttctaacatccaaatggttggatatgcagctaatcagta

SEQ ID NO: 76440 - DNA, 430 bp, Carica papaya
  Intron number 2 from transcript evm.model.supercontig_2646 .1 (locus evm.TU.supercontig_2646.1) derived from phytozom e v7.0 (chr-ID supercontig_2646; pos 6884 to 7313)
ccgataagaacagaaagttcatttacgttgaacaggtcaattcttctacctcttatttcttccattttacactttttcttacgttctttttgactgttcgtttgaatcggttaaccggtttgttcggtcagaaaactaattacgttttgtaattttgtagaaccgaaccaaccgaatatattacgttttaagtatagttgaatatattcaaaatgtattgctctaagattcatttcataaattatttacgtaaaaatatatgtagctttatttaattatataaatataatatatgaggtgttaataacattcctttttcctagttttatttatttgttcattaatgtttggagttttgatttcatggaagtgctcttgtcctctgatgaacacaggcctttttccagcgctggtggagggaccagagtga

SEQ ID NO: 76441 - DNA, 419 bp, Carica papaya
  Intron number 3 from transcript evm.model.supercontig_2646 .1 (locus evm.TU.supercontig_2646.1) derived from phytozom e v7.0 (chr-ID supercontig_2646; pos 7333 to 7751)
aggcggcttgtgaactccgggcagctagagttaatgtaatttcaatctcagtacatgtatgcgcgtatatatatatatatatataagtacaatcttcatattagaaaaagaaatggggtttgattatggaagaaatgattttgggtcaacatttagtttgtaacttgaagctcaggtacttaccagtgtgagtaatacagacacattatcactgaaacggaaattggaattttgatacataaactttggtattgaataaatttttcggattttattattaaataattgattgaatccattatcccaaaagtttaaactgataaaaccaaatccaattaattttatatatactctgttatctgttaaaattgaaagtttgtgacttcttatcattgagtattgatttttggtaatcagaa

SEQ ID NO: 76442 - DNA, 540 bp, Carica papaya
  Intron number 2 from transcript evm.model.supercontig_52.1 18 (locus evm.TU.supercontig_52.118) derived from phytozom e v7.0 (chr-ID supercontig_52; pos 980809 to 981348 revers e strand)
cgtgtacacttcaaaagatccttcttacattagcggtgagtttctatccaattgtatatcttactagcttattcattagatttatttgaaactggggtagtttctttttcctttttttcttttttccagtttatgattaattataattccaattgtgatactagttatggtgatcaaaagactcttgctctactcttaattaggccttttattttaaattttttcttgatctgcatttatggcatgtatccactgcatcttcctgctttagtttgatgttcatcatggtcaggtaagtacctgctgaagcagaaagtggacgctttaacctgtggatatgttcatggtatttgattacttgaatgaaccgccaattggattggggatctgaagatagatccctttaattgttttgaggcggctccttatacccgttgttggtaaattatgtttttttcctttataaggagcattccctatatttatgtacacatctctttttcagcacaatttccccagaacgctagaggctttaatact

SEQ ID NO: 76443 - DNA, 496 bp, Carica papaya
  Intron number 1 from transcript evm.model.supercontig_2611 .1 (locus evm.TU.supercontig_2611.1) derived from phytozom e v7.0 (chr-ID supercontig_2611; pos 9248 to 9743)
ggaagaagtttcccggtgagcttcttcaccccttcccccctttttgtcttaatttgcttatctttgccttttttttttcttttctttgttgggtcttgttttttttcctaaatttgtttgttcttttaatagctttcttaggaaatttagaaaagttttgaccttccaatcgtgggtgcgttctctttatttctttttgacatgtctgcatcaaattcttgattttacagtccagtttcaatggtgataataccaagttatctgtggtttgatttttagaaccaaatgttaacgttggtttgggtttcaatttatttacagaaattgttaggacattgatttctaggttgagattacttcatgtttagcttgtaggttgaaggattccactaagttgtctcttcaaagttggagtattaacccttggccatggagtttatgagtgttgttaatgttatcaggaaattatctgagcttggatacaaccgaagtgcaa

SEQ ID NO: 76444 - DNA, 1019 bp, Carica papaya
  Intron number 1 from transcript evm.model.supercontig_1071 .2 (locus evm.TU.supercontig_1071.2) derived from phytozom e v7.0 (chr-ID supercontig_1071; pos 9749 to 10767 reverse strand)
ccttcaatcagtccttgtgggtacaaatcggacgggtaagaaatattttaaattatcaaatttttattttattttttttacttttctgggttttaattatcttagaataaaaaataatttaatttttaaaataaattataattgagaatatttgtatacttttttggaccacatttggctgtcgatttcgttgtatctttttagtgataagcagctttcggccatccttgtttggatttttatcatttttgagactttagggccatacccacagtgctataaattgataattttgtgtgtggaccaaacagagccttgaaaaagtcatctttcctcatatataccagaaaatatcatcaattgtttttgttttctcaaaagatattttaaagattttaatcttgtacaaatcctataccaagtgtaatttgtgcacgccctattacttacaacagtacaagagttagtaccggcaacattcatcgttactcgatatctattcccatttgttctcttaactttcgtttctcggtatcccagtagctccatacttgagtgttagaccaacatcacccatcgataaatatttaattttatgtattttttaattgaattaattcaattttgataacctaattcatgtggatgtttatttgacggactgtccacgtaaatcagaagcaattatagatgctataacaaaatttcgtaagaaaatttatcgagaaatctacgaagatagaattcgatctcaacaggagaatcgttgttttactaccaatcacaaattcttttttgtacgcatattggagattatgatcaagaattactctatcaaccatcatttacttcagagatccctactgaaatattttttaaatacaaaagttcagtctcttctcgtgaatttgtgaattaggctgcgtaaattggagttcatcgtaaacgtgaaatgaaatacttatcttatatatatacaaattcaatatgtatatatgaaatgttacaggtagtgtcag

SEQ ID NO: 76445 - DNA, 436 bp, Carica papaya
  Intron number 4 from transcript evm.model.supercontig_17.2 12 (locus evm.TU.supercontig_17.212) derived from phytozom e v7.0 (chr-ID supercontig_17; pos 2544370 to 2544805)
ttcaacactgactctttgcttacatccctcagcctgtaagcaatatttttttcttttactaacaagaaaaaaaaaacagttatgtgagcgaagaaattaatcgaacagttagcaagcaagaaaaataaatgacatgaaactatacataagttcgccagctacacctattttcacaagagaaattgataaaatattaatccaacagtcagagtgcagtcaaagataaaatattaggcaatgctaagttatgaagcggaattagttctaatatcatattaggttattatccaaatcataggaagtttgcaaacattacctaatagatctataaacaagtagaattcctgttaattggttgacatagaattatcgatccttaacacaaaccttaatcagtgattataacagacgatttgatcttgaaaacgttgcagca

SEQ ID NO: 76446 - DNA, 936 bp, Carica papaya
  Intron number 1 from transcript evm.model.supercontig_127. 22 (locus evm.TU.supercontig_127.22) derived from phytozom e v7.0 (chr-ID supercontig_127; pos 322850 to 323785 rever se strand)
cctgagctctccaagttttttcgctccttctccaagtaattattctcttctttcaactgcaatatcgttttgatgctcacgggtccatgcgcttcagttttgagagagttggagtcgatttgaattctatttatcttcttatggaatttccgcaccttagggtttcttactatcgattactgttgtgcctcgtgacattttaaaaattggagagaagactacattaatattcgaccccattatggcatgcacataaaatcatcttgttaagcgaacaaattcattgtgattgttgaattatccactttccaattatatcgttggtgacttccatggcatgccccataataagcatggaaattctgccgtagacactcgaacttgctgttttgtagttatgaagcgtaggtgaagtgttgtatattttctgattgcactttgtagcctatattatgtctttattctctttgccgccaaccagtggttgagcagactatgtatttttcttactggttacctttcacagctcttcttactttggttattatcagttaattacactatggcggtgctcacttttttctacgaaatgttttgtgaaatcacttctgcttttggtatccattggtctgcagtggtggcaaaaggggtttataacagggatcctgcttttgaatggctcatatgcattttcgtcctaaatagatatggatcttcttgttacctattttttgtcagtaatttgcatccgagtgtgtttactaaatgagtcatgtgaaaaattgcccgcctcacccagattattcgtacagacattcatttctcaaagaacttatgaattgggtataaaagaaccaaattagatacagtacattgaacttatagggactgagtaaggtggccatcttgaatgattattgcttttcagatcagagg

SEQ ID NO: 76447 - DNA, 559 bp, Carica papaya
  Intron number 1 from transcript evm.model.supercontig_43.6 2 (locus evm.TU.supercontig_43.62) derived from phytozome v7.0 (chr-ID supercontig_43; pos 743990 to 744548)
ggtagtatgtttcacttctcttttccgaatttgataatgctaatttccatgattatttcaatttcattagtcttgtgtacgtgcgtgaagcagccacaattttagcatcattattttttttccttgttttttcatctttgttatgcctctgttaatttttaaatttcataaattggtcccatgagttttaaaaaggtatcgattaacaccttaattgagttttgatttgtccattgagaaaatggcattggggaagagcatattgtttgatgaataactaaaacacaactaacaaaaaattgatctgtcaaaattaacagaaaaatgtgattatgttgtgactttaaaacatttacagtgtgcattgatttaattaaaaaatcagctatttgatacaatgatggaaatacaaggaggtttctataagaatgacctttttatcaatgcacatatatatctttttgatattatccaacttgttttctttgagccagtgcgtgtggaactacatatccagtgttttcgctaacgaaacagtaatttttcagtaccaggtgga

SEQ ID NO: 76448 - DNA, 784 bp, Carica papaya
  Intron number 1 from transcript evm.model.supercontig_36.1 1 (locus evm.TU.supercontig_36.11) derived from phytozome v7.0 (chr-ID supercontig_36; pos 113554 to 114337 reverse strand)
tgttcaagccgcctttaagcgccaccgacctctcggtaccgctttctccctctctttccctgcgtttatatgtatttgtcgtgatgggttttgaatatctgttgtccttctgtgaatccagtttagttctgtataatgtgaatcctagggcttttatgcggaggctcgatttcgtaattgattgacatttagggtttcctttgtgcttgttgcggccacgtccgttttcttttgattggaaacatgaaacttatggttttcactcggttctgaaatgcttagggatcatagttttaccttctttaccccgttgtggcgtcaatagtgttagctagttatacttgcctcttgttttttgtattctgcttttttttttttgtagaggtttttgattctgtgacgcattagctaatacgtttgttttgaatcttgctgcgttgcgaacttctggcccttcttagattgatgtgtttgtgtttctcgatcgaaacctggcttagaacccacgaaacaagtatctgttaggatctggatgcaacccttagagaataattcacccagtgaagcttaattaaaattttccaagttattcgatgtgggtagtggctagttattcagttggagttggcatgtcccactttatctgtaaatattattaagcaaaattttaaggttgaagagaagtccaaaattaatgattttaatatttccttgtaacttttccaaattgtggagggtgcacctgaattctttttgtatctacttggaggagcttccaggtaaa

SEQ ID NO: 76449 - DNA, 340 bp, Carica papaya
  Intron number 2 from transcript evm.model.supercontig_278. 2 (locus evm.TU.supercontig_278.2) derived from phytozome v7.0 (chr-ID supercontig_278; pos 127115 to 127454 reverse strand)
tttacttctgggaggcaaaggtaaccaaactgtcttttcacatatttgtaacaattcaatctatattttaacttttacgagttattctttaattgaattgaatggttcatatttcactctctttataagtgattgttttttgaatttataaaataagtatgaatcaggtcgagctttattttgttatgtattttcatcagaagttttataatttatgtatatatgtcatataattaataaaatatgtgaaaataaaactctcttcccttttgaagcattaataatggtttaattacggattgcagggacaagctccattatttcctcgcatatttggtca

SEQ ID NO: 76450 - DNA, 524 bp, Carica papaya
  Intron number 1 from transcript evm.model.supercontig_278. 2 (locus evm.TU.supercontig_278.2) derived from phytozome v7.0 (chr-ID supercontig_278; pos 127562 to 128085 reverse strand)
gtcaagcactgcaggtcaggttatacgttgcaaaggtatatagttaatttgttgtttatttatctattctcgtttggtctgctatttcattttgcttcatttgctttcgtcttctccgctcttcttgttgcagttttgaatcgatcgtatacaaagtatttgttttattatgtgttttactaatctgacattattactaatcctgatttccaatgcgatcattctggaaattgcctttcctttggtcatgtgattttcttgttgctcctatagactcaatcaaaggagaaagggaatttattttcatatggtacaatttcccttttttatcagtaactctgtctccgttagattgataatcactgccatgctaagttataagtctatctaaatcggagacttatttattataagtattacattcagtggctttagaatgaaaaaaaaaatgatagatcaaaatgttttgtaaaactttttggaaatttattttttgggaaatggtgccttgtagctgccgtggc

SEQ ID NO: 76451 - DNA, 948 bp, Carica papaya
  Intron number 1 from transcript evm.model.supercontig_1.10 3 (locus evm.TU.supercontig_1.103) derived from phytozome v7.0 (chr-ID supercontig_1; pos 1694697 to 1695644 reverse strand)
gttgccgagacggataaggatttgagtcgggtaacccttttctccgcccaataaaatttttttctttcctatttttaataaaaacgtataagatgtcaatgttcattatctttaaggtgttgatcctggttggttcctctctctacttatgaaatggaaagtacttgtgacttctttatatgcctttgaactagtttgtccattcattataaaggataaatatatttttgtagtgatgttttgaacttgtggaattcaatctttaagaagtttatcctcgtgcctccgatgcctcaaataggtttttgatgagtttaagcatttgcttatccgacagaaaacaggtatcgtgatgcttatgaaaatgatgagggctataaatatttatctgtatgcattggtcaattgatggattcagaggattttgctgtatcaagaaagagtaagatatagtgaatcaacacttacataatgcaaacagatgtgcataagtactgctcgttcgtcatgatgcgttcacttacctagaagtgctgtttcatcatgttggatgaattagacgatttgcacaatttgcagcatgagaaggaattgttgcttctgaaatagatttttctgagcattatactatgagattaatagacttgcaatgtttaggctatagacacttgtttatacacctatcttcaactcgtgataaaagaaatatagaaacgctttctttttcagttctctttattttctaacaaaatacgggtctgcttgtgttatgaatttttcctacacatggccaggttttaagaagtttcttcttttgaatttccactgtttcttgtcccatggtcctttgtgcttttaacttttaagaagtggattttatagtgattgataacatccttttgaatcttataagctcagggagagaagcttctaaacaatctcggtggc

SEQ ID NO: 76452 - DNA, 603 bp, Carica papaya
  Intron number 1 from transcript evm.model.supercontig_48.4 6 (locus evm.TU.supercontig_48.46) derived from phytozome v7.0 (chr-ID supercontig_48; pos 276827 to 277429)
atcttgattcgggggagcttttggctgtgaagcaggttagtttttctttgctgctaagttttccgtccataccgaacttgctcctgttttcttggagttcgatttctgtgtattgcagttaattttgtgtttgggaccctgactgggttttggttctagtgcggattgttgcatttgggtgggtttttatttttccctgaaatgcgttttggtttattgccactatgaagtttgggtttcagtctgttctcagtaaacctgccaagtttcatggaaagtgtttgcaccatgggtttcagttcgtcgttgttggattttgatatgggttttgaacatattggagatttggttgcaatttctggttctttattgtggataatcaatgagttttggttagttaactggggtaaattccagtttcagaatatgctaatttaagttttttttttttctcctttgaattttgataatattatccaggttcaagtttttccttaattgtggttttgggtttttgatagttttgatgttaatctgactatggatttggtttggaggggagcatcaggtcttggttgcagccaatagtgctttcaaggaaaa

SEQ ID NO: 76453 - DNA, 500 bp, Carica papaya
  Intron number 2 from transcript evm.model.supercontig_6.9 (locus evm.TU.supercontig_6.9) derived from phytozome v7.0 (chr-ID supercontig_6; pos 37609 to 38108 reverse strand)
ggaaggtggaaaatcaattttctgtcaacacaaaagtaagttcatttatcttaatttatatttaatatcgctgaaagaagttgtattggcttcatttttatcctaaaagattcacatgatggtatctatggtcttctgttatgagggtttttgctggcaccgttcttactgcttgggctgcaatttcgttctgcaatgtcattgcattaggttcttgtttagcaacatcattcgtcataacggtgtctgctaatgctagtattaacttcatttgatttgttcaccgtgttttggtttctttgtttccttatcaaagaaaagaaatattagtattatcttcacagcaaatacttccgtttaaaatgtttaactagaagaattttcttggttatttgatcagtttggatttacttgtgaatgttctcatgtaatgaataagatcttaatcatattgaaagtttctttgtcaaccattgtaccataggtgggaaaatcctttg

SEQ ID NO: 76454 - DNA, 607 bp, Carica papaya
  Intron number 1 from transcript evm.model.supercontig_3.61 (locus evm.TU.supercontig_3.61) derived from phytozome v7 .0 (chr-ID supercontig_3; pos 431960 to 432566 reverse str and)
gttctcagtatctcagtcttgcactggtcattatcaaattcttctttctctctctctctctctgtcttgttgtttgtttttttgttgatggtattcatcatttaagtccacacagttcttgaatttaattgacactatcgctgaattgatcccttctttatgcgcacttctctactgcagataaagctaacaaaagcatttacttcaacaaccctatgtggcctggtaagcttgttctgacttaaatattttctgctatgcacatcttttctctccaaaatttgatattatcacattttcattagtgaacttaaagtcatatctattatctgcaaaatcaaagtccttatcatttttctaacaattgtggcctcagtcatttctgtgcctctttttattagagtgaaattgaattgttaacctcttaagagtatgaggaaggagctgtcctgcctctgaaagtacctgtggtaacccttttatgctagagtattttccttgttggatttcattgcttgcttttttgttttaatcagctgatcttcctctaatttgtttaaatatgactgcaggtgaagcacattcactgaaggttgagaaagtttta

SEQ ID NO: 76455 - DNA, 891 bp, Carica papaya
  Intron number 1 from transcript evm.model.supercontig_36.1 42 (locus evm.TU.supercontig_36.142) derived from phytozom e v7.0 (chr-ID supercontig_36; pos 1088927 to 1089817 reve rse strand)
gatctcccaatattattgctgttaccgaggtaagataaaattcatcggatttcccctttgtttggaagttgagatttttaattgctgttttgtgagttttctgggtgattttagtttgtttgttgtaaatactgtccaaggatcgaaaactagtagcttacggagtttgttttagccaatttgattctaatgtagactgtttctgaacttagcacttggagtggtttgtgttagaaattaggtgaagaacataagcgattgcgcatgtttgaacaagcatgttagcgattgcttagttatgtcgtattcaagaaatggaggaatttgctagcaaaaagaacggataaattctcttgactagtcaatttattatcattaagtagaacgtaattccaatagggtttgtccctgcgttttccaggttcagacttgaaaacagacatgcccacaaggtggtattggtggaatgctgattggaacgaaattcttggtttatggattgtttgttttgttgttagtatggctttgtttgtcaggagacttcataacgatgtaatctcctactttgctgttagaacactaaaattttcatgtaaaagtaaagaaaagtatagttatggaggaaaaagaaaagtacccgctataggaactagtgatggttttgttaagttttaaaaattattttactggcattttagcttttcggcagatgcaatttttttattagatagaaccatctttcttgttggataactgtggagatttttgttgaattgtgcatggtagaaatgggaagaatagcctcgaagttaaaataactaaactgaaaagttgctttcattttataactaattgaattttaatgaagtgacttttctactttgaagggaa

SEQ ID NO: 76456 - DNA, 629 bp, Carica papaya
  Intron number 3 from transcript evm.model.supercontig_25.4 (locus evm.TU.supercontig_25.4) derived from phytozome v7 .0 (chr-ID supercontig_25; pos 74043 to 74671)
ctattgctgcactggtataattcttttcttcatttttcttatttggcttcttttaagccaaaaggtatcaaagagatccaatgttgtctttcttatttgcacttcctcttttcgtttattgtacttatgtaatgtttgataacatagtagaattcaactaattctggaattagtgctttccagatcatgtccactttaagctagtctatttggagctatagaaaataactatttattcacagactttattgcaataatctgatctgattttatgaaattttttttgacaaattataattagactttatattgtgatcaagctggattgaaatccatactatcctacaatgtgcataagatttttcatattgtcctatgtggcttgttcacagttttcaatagcaattcatcaactaaatacacatgggacagaaatatattgaccaacagaattttttgaaaaattttaaatttttttcgagaaatatattgaccaacagaatttgaactataagaatccgtttattttgttccagtgaattgcatctagaagttctatttctttctaaaatctacaagatcctttgtgtaccatgatcctaatatgactgatgttatgctctagggtg

SEQ ID NO: 76457 - DNA, 949 bp, Carica papaya
  Intron number 1 from transcript evm.model.supercontig_1017 .1 (locus evm.TU.supercontig_1017.1) derived from phytozom e v7.0 (chr-ID supercontig_1017; pos 6616 to 7564)
aagtcacgcgaggctgcgaagcgtaatcgacgaaggtttaacttttcccccttttttttttctgtttttcctattttctttcttggttggttggtgggaaaacttcagggacaaaaaactgaagggagtttagggtgagtgattatttatgtacatagggaaatgggtagtttggatgcttggttatgtttggtgtgagggaattttttggcagagaaaaacaaagttccgttcttcgtgcctgatcacttcactgttcatctttaaattagggtataaatttaagcttttctgggtttcgtgaccggattttaacacagaaaagataagtcataatgatatgattccagtgatcttcttgatcacaaagcttttatagaataactgaaatatcaagttcttctcctaggatgataagaaagaaaatttgggcatgtataaattaccagtttcatttgttttaagagtatggagttttctggcaatggcgagaaacccccccacgcgctgtgaatggttatcgcctttgaagaaaccaagcaaaaaatatttctttgtttctatttctcgaatttacatgtattttatacctaaattttagaacatggtttcatgaacaatcatgtgcatgtaaagatatgaactaaagaaatcaaaggtagaaatgttgtaatgtgccaaatgtaacttccatgtttcattttttgtggacaaaccaacaatgtgttcttacaaggaaatcctttactcttttcagtaagtcaatataggatccttcttgtgtctttgtattacctgtctatgtcgaacagttttgcggacttcctagtcctttggcttgttctgcttggcttttagttaaaatatttcttggagatgattattgaccattccccattttgcacaatgaccaggcggggccagtttagatcttttcaaaacaagcaag

SEQ ID NO: 76458 - DNA, 863 bp, Carica papaya
  Intron number 1 from transcript evm.model.supercontig_34.3 1 (locus evm.TU.supercontig_34.31) derived from phytozome v7.0 (chr-ID supercontig_34; pos 200588 to 201450)
ttcaggtaagcttaatccatcctttatgctaggtttttttcttttctcgttttgagtttgtgagtgtcgaattcttttggtcgttatgattatggatattcaagtttcacctatttgtacttttggttggagaagattaattgttcaactggtgagaaaattttgagtagtttttttggtatctttgattgcaatgtggacgttttcaattaagtgtttttctttttggtcctacctagataatgtctgaagcatggttacttgtaggtatagttgaactgcttttcgatttcaagctagttaagtttttcttttcttttcctttttaattttaagattaaagctgagattttggataggtgtttgtgcttcctggacctctataagattagttgaaaaagaaaagaaacttatttttgagctggatgcattgctcttttggaactagaatctgtttgcccgtccagtatttcagttcagaggaactacattatccaaataactctgtggatgtttccgagatgtaatctgttactcgatctatctgtttcttatccaaataagttcataggaacttacatattcaatttcccacaccctgatactgaacaatctaacacgattgatataatttggatgcttctagattatttgaaaatcaattcggtaccatttttgtggagaagtttatcctttatatatatatttatttctatttgctttgtgtgattgcttttctgcagcgtgaaattttcagatttttgaacattctgtctgtcgacactcttggtgacttcttctgtaaaataaaatttggttttttctgagattcttttaatgtactgtagattttggggactgga

SEQ ID NO: 76459 - DNA, 556 bp, Carica papaya
  Intron number 3 from transcript evm.model.supercontig_365. 1 (locus evm.TU.supercontig_365.1) derived from phytozome v7.0 (chr-ID supercontig_365; pos 642 to 1197)
ctgggcagcggtttagctgtttgtccttctggcatgtaagttatttctagatcttgaaaaaatatatgttttattttctctctttcctttgctgttttcccctttcattggatttgattaatttcttggccaaatgtgtttttgatcttttttcttctaccaaatatcctgtgtcctttcttaatcatatttaaactgaaatttctcctctttttttttttgctaaccacacaaattgtagtcatcacttttaaagttcacatcatgtcttgacatctaggtggctaattatagttgccgattttctttcaacttccttgatctgccaattttcttttccttaaaatttatattacaaaagccccattgtgatttatctgttgttttatggtgagggatgaatcctttgagcccctcacttttctattttatgttatatggatttcataggcctaggacaagaatttctctcccgatctcctggggaatctatgactcttaagtttacataattcatgttttttcaggtatattttgtatctttcagctctgtgtg

SEQ ID NO: 76460 - DNA, 825 bp, Carica papaya
  Intron number 1 from transcript evm.model.supercontig_2.17 5 (locus evm.TU.supercontig_2.175) derived from phytozome v7.0 (chr-ID supercontig_2; pos 2497309 to 2498133)
gtacttacagctacaccaaaaattcccactatcaggtatgtatacatgactgagaccactttatatataattcacattatacatctactttctacttgttatataacttgcaaaatatgcatggagcatcattttctttgttacccttatcatgtttggatgaatgcagagtgcacccaccactgttagtctatatatagagacatatattgcctatgtgtgtgtatggttaatttcatatggtttcgtagctgcaacctgataaatgaacacaaaacgccggatttacgatcacatagtgtaatactctcgcatgcacgcaccaaattttgagtactcttgtgttcaattatcatcaccgacattaattgtacaataatcgaagaatctagctgggattaaaattacaaacagaaatgaacaagttgcattcaataagatatatatatatatctctatacatatgtatatatagaattaacctcattttgttttagttttcacatctatatatatatatatatatatatataggtaggtgtgtgtatatggtcccaacaatattagttgaattgattattaattcaaagaatattcttcttctttgccaaaccccacttgcccctctacggccctaaccctaatcggatccattagatatataggtagctaaaatgatctaatacctatttttgatgcttttataattcatgtgcatatatatatatatatatatatatttaagcagaaactatttgaattaatgttcaacgattacatcacggatcttatatataattataatatcgcagagacgatcagtgg

SEQ ID NO: 76461 - DNA, 649 bp, Carica papaya
  Intron number 2 from transcript evm.model.supercontig_5.31 2 (locus evm.TU.supercontig_5.312) derived from phytozome v7.0 (chr-ID supercontig_5; pos 2836084 to 2836732 reverse strand)
gtcagcttgtctcttttctcattggtgcaagagtggtatcaactttttattggctaaccagtttgcaggttggtattggttctttttatcatctatttttgctatataaggcaactctattctattctcttttaagattttcttcttcattctcgcttctttccccttactctttttcctcaccttgattaaattctctcttcgcttcctattcttctctttctacccttgtatttttctcatgagcattgttaattccatattagttagtgattgtgtgactgagcggtgtttcagtgatgcaaaacaggaataggctaagatggtttgttttaagtgttagaaaatacttttgtaatatttatgtaattttacagtttatttgttttatattgtataggttatttagaaagtatcgaatagatttacaagtcatttgattttattttcttgttattttctttcttagtagaaggtggcttcttattattaatggaatggtataagaccttattttctattggtccttatagatgctagaattttgattggttcaaagatggtggcagtccgaattggcaaacttgtattgcctctcattggtccataaacagtggcagcccccttgcaaccaacttgtctcaacttt

SEQ ID NO: 76462 - DNA, 977 bp, Carica papaya
  Intron number 1 from transcript evm.model.supercontig_18.9 8 (locus evm.TU.supercontig_18.98) derived from phytozome v7.0 (chr-ID supercontig_18; pos 734270 to 735246)
gtcttttggagatagattgggttattgcagggttggttgggggggagatatggatctggtatggtttatgtgtaaaaaacaagatagcaaatttaatccctttgagtgttttgtgggttatttgaaaagagaagaatagtataacttttgatagtgagaaaagtagtattaatatattaaaaaataggtggatacattattttgggtttatattattaggtcaaaacattattagtgatgtggattttgtgaatattattgatacactaatactattgtaaatcttttgtacacgggctgtatccctgtattggtaccatgttaatatacagattacactttttatttcaaaaaaaaaaaaattactgcttggttaggtttgaaaatcctggtctgttcttttctctcttgcttttcccatttgtttatcgtcatcgtcattatagtgctacatctgtttcagtattattctatttgatttcttccacagattttcaagtagttaataggttatgcagtggaaaatcaaaatttacatgattttgttcggtgtaggtgcagaatgtaaaattatctttatcttttcccaatttcctatcactaggcttagtgcttgactaacattacctgactaataagaaatagaattgtcaattcatagaacactgttctatagatagtagtcaagggtccttataaagtaatttacattcctgtgtctgggtcagctttcttgaggttaaaaaaacatcatttagcaggaaagtggataagagtcttaagcataaaattcctaactgcacagggttttgctggtcatgtgcctgtgtctgccatgcttcttgaaagataaagcttgtagagtttcttcctatttgcaaagcaagaaaaaggaacttgaatgcatgtttaacatattatatcaccacgggaagctaagtaaccgagttaagcttttacttgttggcaataggagc

SEQ ID NO: 76463 - DNA, 853 bp, Carica papaya
  Intron number 1 from transcript evm.model.supercontig_46.3 6 (locus evm.TU.supercontig_46.36) derived from phytozome v7.0 (chr-ID supercontig_46; pos 293041 to 293893 reverse strand)
acgcaggtatctttttctgtttcttttattattattattattatttttttggctttctctcggtttttgttttgttttgtcagatttgcttgtgggtttctatttgaaaatcctttctgtcaagttgaaaatctttatgagattggcttctctgttcttcttatctttatccaatcgaggattttatacttgcaaatgtttgtttatttgttttgggtcctctctctattgattccttgttgcttttcttttgtggtaaatttgaaagttgaatttggtttaatgctctatatgtctcttggttttcgtctttgttcgaatccaagagaatcttaagattggattttctgtgtttggaactattaaaaattgataatctgttcagtagatctcacactttggcgtttctgctgatttgttgagcaaatacccgtttcataaaccagctcattgtgcttcttaaatcttaatatcctgaaaggcacttttctattttcttttttcttatgaagaaattgttagacttgaaaattgatgctagacatcttggtactttatctaaattttttctgtttccaaacatggagtaagacaaagggtgagggagatattgcgcctttttactcagcaatttcctttttttgctattacagttatcagcctgaattttgggtgtgcatagattgaatcaaattagaatctcttggaaagtagaagtttttgtaatgtagtttggtattgtttgtgaaatatctgaagtaaactgaaattacttctcgagacaaaatcatgatcaagatgagttgacttgatatgaacctggttcttgcagctacagagacacggtatctaa

SEQ ID NO: 76464 - DNA, 672 bp, Carica papaya
  Intron number 1 from transcript evm.model.supercontig_46.4 5 (locus evm.TU.supercontig_46.45) derived from phytozome v7.0 (chr-ID supercontig_46; pos 370575 to 371246)
gaagtaagctatctacatttttcttattgctctttttttctttaaattttatttgaattatgattaattgagatttgatcatcattttttacgaaaagatatttttataaaaaaaatttatatgagataataaaatagatgtaagaaaattttgaaaatttaaaaaaactaaattggtttaagtaaataaaattgattagtttataagaaacaaaatcgaaaaattgagtgccctaagttccttttccatatcgaaagtttcgattcttaacaaatatgcccttaaccttctccttttgaggtgacttgaattcttttcttcattcatataattactatattaatgttagttaaatgaataatataaaaattagatgagaataaaaaacttcgagatgccatccaaaaattcaaagtttttaatacaatggatgcacataaaaaaactagaaagtttataataaaagtgagattttgatcttaagaaattcaatttagattcacgataatcatacgagagtttcgatactttttttttttttcaagttatttacgtaaaatatacgaattgaatttttattgactgattaacaaaaaaaatgttaagcttctgtgacaaactttaaattacacgtagggaggattcctttcgcatttcttgaagatattcat

SEQ ID NO: 76465 - DNA, 431 bp, Carica papaya
  Intron number 3 from transcript evm.model.supercontig_38.5 0 (locus evm.TU.supercontig_38.50) derived from phytozome v7.0 (chr-ID supercontig_38; pos 1045327 to 1045757 revers e strand)
tcctactctgttctctggaacttgtatcagatagtgtaagttcatctctctgactcttattaaatcactttctacatttagtcggaaaagaaaagtgaaagaagaagtgtttccaaaacacccattacttgtgtccctggaaattttggttggaatgaaacaaaatccaatctttctcaaataatttcataatttcaagaccgaaacttgattgggagtttaaagaatctgtcatattgccagcgcttcatcctatttctctctctttactttccttttcccctactacttatcacgaatatcggtttggttaaaagtttaattttgacatcaaagtcaacaaagtttgaactgggtccattgagagaaaagaatccaaggggtgatttggttggttttctggaaaatatctggttgcaggttcttcgtcg

SEQ ID NO: 76466 - DNA, 807 bp, Carica papaya
  Intron number 1 from transcript evm.model.supercontig_148. 41 (locus evm.TU.supercontig_148.41) derived from phytozom e v7.0 (chr-ID supercontig_148; pos 539454 to 540260 rever se strand)
gtttacaacagaggtagttgattacattcatgcttaggaagatgactttcattgcttttggatcatatcttaatttgtttctcgtattgtcaagcagcatgaggaatagatgttaggatcttgaaaaactatgatgaggacttgtatagccaggctttgaatagcatcagtattttgtttgatgcattttaagtgttgatcactattttggtgttattgaattattatgatgcacttgagtcaacgtgggtctttcataatggatgagtgctcggctctatgaacacaagtatagagtttcactttcaccatatagacaattccccattgagaccataatgttaactttaatttttcactggagaagagactagaaattttctcctgcaaccacactaaggtttgttatttatggaaaggcaccgtctatcttaaggatgtcaggtcataatcatttctgctacttctttttcatgcacatgcttaccatttagcagaggttatttctttgtgaggtatttaactgacattataatttgaattatattattaaatttttatttttgtaaaaacttctttcatacatttggtagtgtttttcactacttaggaaaccttcattcatttaactgattttcatgtctatttattcagtttcaaggagtaaggaataagaagcttgtactttctaattcaataagatcatagcaatcaatggttttctactaattatgttattatttttctagcttacttactttcaatcatgcagtttttttcaaactctgctttggcaaatactagtgt

SEQ ID NO: 76467 - DNA, 134 bp, Carica papaya
  Intron number 4 from transcript evm.model.supercontig_108. 15 (locus evm.TU.supercontig_108.15) derived from phytozom e v7.0 (chr-ID supercontig_108; pos 217247 to 217380 rever se strand)
catgtgggtggtggtcctataagttacctttttcttctgaagttaatgggttgagtttgattttttgttgtagttgtaattaatgctcaataagttttttgaagaagatagatcatgcgtgtaatttcaggcag

SEQ ID NO: 76468 - DNA, 688 bp, Carica papaya
  Intron number 3 from transcript evm.model.supercontig_107. 34 (locus evm.TU.supercontig_107.34) derived from phytozom e v7.0 (chr-ID supercontig_107; pos 168933 to 169620 rever se strand)
aaggtttgcacaacaattatccttaagttcaccgtttatctaagcatatttgaatctgtttacatgtttaatcatgtgtctggataatttgaaggccacttattacattttcattttcttcattatgattgtttataggacaattgagacatctttccatgaggcatgcctctgagatgtgagactaaatttaatgaaattgagtaggcatagccttctagcatacaagttatctaaattacaattatgtaagaagttagtaaattgaggacacgaagtcagttttgaattagttgaaagttcataaactataggtcatggtaggtactaaatatgagctgaagctaaatgatctttgcttcaccagtaatgtaggagttcctgattctcgttggactccagatctgcctgtcacttccttttttttttcttgtttgaatacagtttctcatctccttcaaagatttgtagtttcttttgcacatctgaggcagctaatgaaaatactactgccgttttacttttctctgcgctggcctactctccttctgccagcatttcctcatttatacgttatcttttgattggttttctttttatcccaatatttatgaggcatttatagtggactccgacttcctttctagtaacagattgtgagacggagaggagtgcaagttttaaggag

SEQ ID NO: 76469 - DNA, 488 bp, Carica papaya
  Intron number 1 from transcript evm.model.supercontig_179. 7 (locus evm.TU.supercontig_179.7) derived from phytozome v7.0 (chr-ID supercontig_179; pos 52434 to 52921 reverse s trand)
aggaggtaattgaacgttcgggtttgatgccaaatgttttgatgatttggccatgtagctctttcaggcataaagtctcataatatcaaaagggaaaggaccctgaagctgcatttgaaaaagaaagttggtgagcatatgctagggagttaagtgtttgagtatttcctgaccaagtgggaccaatgtgttatttcagaatcatgttgaaggatttcaaaatagcctttgtacaggtaggagctaggactaataaggaaaatatcaaaatagtaaaagagaacatcaaagttttaaattctaatggaacttagaatttgaaacaaactgaatgttatcacatattttaaataataataatttagaaaacttccatacagctaaatatattctagtgcgggatctgttcattttgtgtcactttctctttcttttctttcctttaaatgataattcttgttacccatctttcatgcagtgcaggagga

SEQ ID NO: 76470 - DNA, 512 bp, Carica papaya
  Intron number 1 from transcript evm.model.supercontig_195. 25 (locus evm.TU.supercontig_195.25) derived from phytozom e v7.0 (chr-ID supercontig_195; pos 156871 to 157382 rever se strand)
gcagtcaaccacttagcagtgttgcattgttgaaggtagttaaggacttcaaacccaaaccactttcgtagagatgtagatttggtggactcttaatgaaccaaataaataccttgtctgctcaatgatgcctggccaaaggaatgaaccattggatagcttcagcattttttgcagttacatcatggataaggaagaggaatgtaaaataaatttttgtaagtaggagaggatgcttttgatatgttcgagcattcctctcttggtcttttccatcctaacaatctcttctcatccttttcggacaagtatgtttgtattctttccatttagttgcaccaaggtcctgataaatttaggaattcaaattttccaaaaaaatcttgttccttttgctataattttttaattgctacatcctgtagtgttgttttttttttcataattggttcagttaccaaaaacatatatttgtactatttctggcaatcattatatataggttaaggaaa

SEQ ID NO: 76471 - DNA, 638 bp, Carica papaya
  Intron number 1 from transcript evm.model.supercontig_16.1 2 (locus evm.TU.supercontig_16.12) derived from phytozome v7.0 (chr-ID supercontig_16; pos 378099 to 378736)
aaggtactctgctatcttttgcttcaggtgttattttgtaccactgcaatttaaatggttaggaagacaattagtttaatgcaatatttcctggctaacccccaggcaaggccttgattttaaagtcccagatttgattaattttatatgttaagaaacatgtaaaataaaaaactcaggtggttgtatgatcaaaataacgttcttcaaagcggtgattgatttttgaatgatcaagcctctcgggctgcaattcatgcagcgtttggatcatcatgatgtaaagtaaatttttttgtcgtgatttattttgaatatgtcttattagtctaagccccctatatttctattagctctatttccatttttagcatatgtttcttgtgtattcacaagactttttttgcataatttgtattttggtatatatgctttcgcatcaagttttcatatgttgagggctttatcttattttacgaggatcgtttttcttccgtttaatgcccttgatttatctcattagtttacagtaaccaaattcctcctgggagtttcccttgcatatttagttcacttgtattaccaggattttatacaattgttttccccttcatttcttcctgtaatacagattagca

SEQ ID NO: 76472 - DNA, 417 bp, Carica papaya
  Intron number 1 from transcript evm.model.supercontig_3.36 7 (locus evm.TU.supercontig_3.367) derived from phytozome v7.0 (chr-ID supercontig_3; pos 2494140 to 2494556)
cagcggtacgagaagggctcgcgactcgttgttgggtacgtgattgttttgctcatcatctttttgattttatgcctcttctgtttccgcgttgatttctttttttttccttttgaggacaaatatctggaacagtttttcgttttccttttcttaaatcttccttttttttttttttctttttttcttatctgggtttggaaattctgtgctaaccgatgaaaaaattactgttttttcttctttgttagggtagtttttctgaatgatttttgtgaaatcacgtctttttccatgcaactttttgattaataccccatttagcctttcgatttttctcatgttctgatgacaaatttatctttagatttcttgggtgttcatgtttcttatttgttggcttttcaaattttgcag

SEQ ID NO: 76473 - DNA, 686 bp, Carica papaya
  Intron number 2 from transcript evm.model.supercontig_41.4 2 (locus evm.TU.supercontig_41.42) derived from phytozome v7.0 (chr-ID supercontig_41; pos 1009711 to 1010396 revers e strand)
tgtggtggctggcagtgaaggctgatctctttagggtttctttgtttcgaaatgaaggttgaattgggttagtaaaagagtttagaatttcttaccataaaactcggttactatcttaaacatgattaatatatattttattaaatattataactttttatatataggtttctttgaacaaaaaaggaaatagataattaattataattattacgaaaggtgtaatttacctttataccatttaatctagtttttcttttttgtttaacagcatttttttcattttctcttcgattaattcgactggaagacttatcgtatatcttaaatcaaatgactttgatggaacgcatagatagatgttaatcatttgcccaaatcactcaaccttggaatggatagtataaaacgtgaattggaccaaactaaacctcaaaaaataagagagcaagcccaagaaccttaagatcttgtttgaagagttgtgaatcaatctacaggtggctaaactagataaataggactagattctctcaaatcggtttgagctggtcaatactggctttaaaatttagaaacccacctgccttgtccggcacgaaagtcacacgccaagttccagttatatgtcagctttgattttctggtcagcgttataactgggaaggaggacatctagtgtttgc

SEQ ID NO: 76474 - DNA, 648 bp, Carica papaya
  Intron number 1 from transcript evm.model.supercontig_6.60 (locus evm.TU.supercontig_6.60) derived from phytozome v7 .0 (chr-ID supercontig_6; pos 459742 to 460389)
gtgcaggtgggggacacttccaaaattttcttacaggcaaagttcaatctttcttaaactaggatggctagctttcagaactgtgtggtagacagtatgatttcaccttacagattccatccttcttacctttgatttgtttctttcatggtaatccaatataaccattgacatggcataatgctctggtgttatgtataaaatttatcattctatgcaactggttgatcccggcttagaaaaaagggcagagatcgtatacatgaatccaggcacaaacttcgtctttgtttaaggaaaatagcaaatgacagaatatgtcatttacttagagggtcatgtactttttcatctgtgttattatgctataatttatgtttttattgctgtattgttatatttatctattcaaaatggctttttggtttgtactcgcttgatccagattttactcaatggtaataacattcttcttttgtgaagacaattttctttgggacataattacttatgatgaaaaatggtgacttgatgctcttagtttagtttgaaaatcttgttgctggattttgtttattcatcataggggctctaaattatccttctattgcagaaagaggttgctctatatactgcttctaaggctaa

SEQ ID NO: 76475 - DNA, 705 bp, Carica papaya
  Intron number 1 from transcript evm.model.supercontig_198. 22 (locus evm.TU.supercontig_198.22) derived from phytozom e v7.0 (chr-ID supercontig_198; pos 119468 to 120172 rever se strand)
ggtacttcaaatttgagtccttttttttctatttccataatggctgttcatcttgctccccacaacacttccccctcccgcgcgcgcttttgtggttcttaaattgcaattatgtttggtggttaataatttttattagaaaagttgaaattgatggattgttttttaatttgggtgggaaagttctgttttttgagtgcaggggttgaagtgggaagattgataaatcattatttatcaggcttgtacattacctggtgttgtgaaggctagagaaagcaaaagttagtttaagtttgaagtctttttttttttttcaatttttttttttctggcagaagactgaagagatagtgtattgcattttccattttttgcctgtagggactgagatttgttttttctttcgggggttatcaattttgcatttcatatggtagctgtacttgtggggatcaacatttttcttttcctgaaaataataatagttattttattttgccctcaagcttatctttaccaactgattttaagagcttaatagtggtgggatggttctagtataggtctgttatattgtgaattgaggtggttactcaatttttgttgatctttctgtttttagctggtgaccgcatttctggtatattgatctttgaggttttcttcttgtttcagctgccttgagtatcatcgtttacttcc

SEQ ID NO: 76476 - DNA, 849 bp, Carica papaya
  Intron number 2 from transcript evm.model.supercontig_13.5 4 (locus evm.TU.supercontig_13.54) derived from phytozome v7.0 (chr-ID supercontig_13; pos 573302 to 574150 reverse strand)
cagcatttgcattggcaaaaacagcatcagaggtactataatactattttatcttattactgagatttcgtgaatttatttgtcttacccatttcattcacttagtacttttatattttattaaaaaatttccctgaccaatagcagtgaaagctatttagataaagtaatctgatggcaaataccttctgacatcttgtgaatgtttggactaactgaaacgtaagtatttttgtatacgggttgcaccccctttttggtgctgatttaatatatttttcttgttatttaaaaaaaaaaacatgttatgaatgtttggctactacaccaatgcttgcttttgtaagaataatgtactatatatcagaattgggtaatttgtcacaattgctcaattccattgtagtaggttaaggtttgcaaagttggaattttagcatttgaaattgcagttaagagtgcaaaggaaggtttgaaaatgagaaagtacagttcctgaaaaaagaaaagaaagaagaaaattttaggacaggagtatgtccatgtaagttttcagattacctgagaatatttttacttttgaagggattagtgaactgagaattgatattatgtctaggtttccaaactaacaatcttatgctaagccattaaactttgttgggttgtgaaatacatttcatatttgatttattttatctgtttgcatttctaaatgagaacactctgcttccctacctcacctccctttttctcatttgccatgaaaaagtgaatgttgatgtttgggatttcttattttgttggctagcaggaaactgattgggctggattactccatttggtaaa

SEQ ID NO: 76477 - DNA, 439 bp, Carica papaya
  Intron number 1 from transcript evm.model.supercontig_49.6 8 (locus evm.TU.supercontig_49.68) derived from phytozome v7.0 (chr-ID supercontig_49; pos 460395 to 460833 reverse strand)
tctgctgctggtcaggtcatttgttgcagaggtaaatctccaacagcttcaccgttttcactttttttccttttcttttcttttcatccatctcgtttcctcccgctcagtcaggagctgctcgtgtttgatctgcgtcttgcttcctatttattcgttgattcttatgtcggtttattttttcacttgtggcctttgatcttctttcttatgatcatgtgttggtgatgtctctgtgtactcgttgatcaaaatgttgttggtgaagggaaaatcttcatctgcctgagcgtttaatgggaaaatcttcaaatctcttcaagtgtttctttaacttaggatattagagaattttaaaaggaattagtttatgtaattcttgcttgcttgcggttaatttgtctgattggtttgccgtgtcggttgtagctgctgttgc

SEQ ID NO: 76478 - DNA, 605 bp, Carica papaya
  Intron number 1 from transcript evm.model.supercontig_1.65 (locus evm.TU.supercontig_1.65) derived from phytozome v7 .0 (chr-ID supercontig_1; pos 1218329 to 1218933 reverse s trand)
cattggttaatagaactactactgtcaaacaagaggtatagctgatcttcctttcctcttcagcttctttttggttgcaacatcaactgtttttgtcttgattatttctcttaatatctatgtaagaaacaaagtagaggtagaaatattgttctacatcctggcttggcattctcagaaatttgaatgaagagcttcttcataattaaatttgcactagttttctttttgttttttttttaactgaataaaatccctcgatatgtatatttttttcaatttcattttctgctcttgtttattgggcaaggtaatagagcatccttgaaacggttgcagtggctttaaacttgaagtcatcaatgatggtgatattgatgctattcgtagaatgaatctgaccttgcctacatgccatcatatattaacattatttgaatttaaaagttagtttctgataattagccatattgatatatctatgggtgaaagaccagaaagttcagaaacatatgcatggactgctggcagccagcacaattttatttatgtctattcttaaaacaaattgtttcttgtgcagattggtgggattgataacgatt

SEQ ID NO: 76479 - DNA, 597 bp, Carica papaya
  Intron number 1 from transcript evm.model.supercontig_32.2 4 (locus evm.TU.supercontig_32.24) derived from phytozome v7.0 (chr-ID supercontig_32; pos 365696 to 366292)
cagactactcctcctgcttctcatcattttttcaggtactttactttcttcaattctcagcgatctttttctttcttctcattttctgtttgttttccgagaaactgcttgaaagtgaaagggagagttaactgtttcccttttgagttctgcatatcctttattagcgacccgtccgtgggattctaccgtaatattctttttttttttccggtgaataagtgaagtttggagagctcagagtttcaaaacaatggaacaatggagatttgattgattatttgattgcatttaaaaaaatttagctctgagttttccaccagatatcaaccgatcataagttgctaaatcattcaatttattattatcaaactaaatcttattgtaaatctttagagatcttgacagttttaatataattgtttgtttggatgtcattttgatcatatcttactgtaaatatttttggattttggactataattcgtttaatacatatatatataagaaatgatgctcagaacgtatactttctttttttaagaaaaaagaatttccgtttgttgtattttgaaattccagattcagctgaaattg

SEQ ID NO: 76480 - DNA, 1022 bp, Carica papaya
  Intron number 1 from transcript evm.model.supercontig_109. 1 (locus evm.TU.supercontig_109.1) derived from phytozome v7.0 (chr-ID supercontig_109; pos 5631 to 6652)
ttaaagaagccaacaacttttttgtgcaaattgaagtgagtatataattttgccatttgttcaataatttttttttcttcgtctccaaatatcttttctttgaaggaacatactgagtaatttaagtgtgcaaatggagccaaataatcaaggaaagctttttttttttcgccactaaaaaattattgaaatgtatggaaaatgttggtggtttttaactccatgtattttactttgattaccttgaaaactccatgtatttaataaaaacaggttgttgaactagaggaactcttgatccttgcattttttgcttaaggtggttctataaagttataaatttctggaccgtgaacagtaaatggatgtgatatatggcaacgaagtggcaaaattatgatatataacaatattgtggaacaatctagtatagcttctactagtatagtgttgcggctagaattaatatgctttagcaggatttttatagttattatatcttattagaattttgtttcttatttagtcagagttgtgttctgtttgatatttattctaatcatgtggacaccccatagataaatggagtactcatcattatttttaagactggccatggaaaaaaattattaatatctcaatgagtaacagttctgttatttttagttgtgacaaccatataatcgtggttgttgctaatccctgtgattaaggatttgatttttattttctagaccttatctcctctgttcatatcggagaatgttatatttgctaaagatattctggatgataatgtgacgacatgtccatgccatttttttagttgttaaatatgcacaaggttaaattgtgaatcaatgatattggtattctttataacatggtctggtttatgtcaatagtcttctgttttttggtaagagaaaataatcttctcttaggtgtagtgttgttttatttcagtttatgaaacttgttttcaaggcttacttacaaacgctctattcttgtgctttcta

SEQ ID NO: 76481 - DNA, 353 bp, Carica papaya
  Intron number 1 from transcript evm.model.supercontig_126. 14 (locus evm.TU.supercontig_126.14) derived from phytozom e v7.0 (chr-ID supercontig_126; pos 126859 to 127211 rever se strand)
aaagaagctactgttagtaatttacttattctacttcatccgaattgccaatggcttgaattatttttcatctgcttgcatctttgaatgctcaggtgattttggaatatctcgaatccatcacattctattttgtttgaagatagaagggttccaaaaaagttgatcttcttttcgtttatctcttgttcattcatgagtttaggctaaatttttgattacgactcttaattactattagagttagtgaacaaggtaaaaagtctgtgctgaacaaaattggatttaattattagctgaaacaaactgtcagaggaaaatatgtatgtattttgtagaaatagttatagata

SEQ ID NO: 76482 - DNA, 835 bp, Carica papaya
  Intron number 2 from transcript evm.model.supercontig_195. 44 (locus evm.TU.supercontig_195.44) derived from phytozom e v7.0 (chr-ID supercontig_195; pos 382033 to 382867 rever se strand)
cacagaggtacgtaaaggtagcttctttgcaattgcttcgattacctaagagttggaataggtgctacagtgagtcaacagccatatgctatagggttctttaacgagaacttctgtgagtctaaacaagttagttctatctttgagaaaaagtgtatggtgttgtacaatccctttgctagtgattcttcccaaggagttttttattgagttacaggcatattaagttgtttggaattctttaatcagtgaacattttgttcttacacttttatcttaagcatcatctaggtgttgaggatgaggttattgatgcacttaggggaaagttaattttagtttgagggatttgcttgggtgtattgtcaagtcaaaacaagctacttaggctttaattttctctgtaaccgagtttgattatagagtttgttaattaaatccaccaggaaaggttcttttacctttcctcatgggtattcatcacatgcacctagtgaattgatactttgtcctcatcataactgtctttctaagccaactggatcctttgcctaatgcattccaccttcattttgagacacacctcaagagaagcttcaaaacattgcttttttttaatgggcgttcggtactagcttggtacgataacttcatataatacgtttcttaatcagccatcacagatgtagaattgggtaaaagtgcttaatgaactctgtaagaagaatagcattcttgtttgcatgtggaaaagtaagaagaattctagaattcaagcacttctcttttgtatcttattatttttcatttgaattgaagcatttttattgcgtgg

SEQ ID NO: 76483 - DNA, 497 bp, Carica papaya
  Intron number 1 from transcript evm.model.supercontig_452. 1 (locus evm.TU.supercontig_452.1) derived from phytozome v7.0 (chr-ID supercontig_452; pos 5983 to 6479)
cagagctcaggaacgcttataagaaacttgcagtcagacttctctctctctctatctctctctctctatctctctctctctcatcctattctcttctctttttcttgacttttttcttataatttgctttctgggtttctttttttttttttttttctcttttttcaatcgggtgggagtcaaatttaagtatttctctgaaagaggaaagcttttttctcttcatgctcaaagcaaatgaactagtactttcctcaggttgcatgtttattaatttcgattgcatgatttcggtcaactgggttttcttataatcgaatgttttgatccaaacaagctgattaagttcctgggttagagctgctgggtagggtaggaacttgggaacagaaacaggaagaaggaataaaattttctgagaaaatcttgtttggattccacggaaatttgcggtgaaaaaagtgtttttttctttttctttggaactgtggacagag

SEQ ID NO: 76484 - DNA, 546 bp, Carica papaya
  Intron number 3 from transcript evm.model.supercontig_452. 1 (locus evm.TU.supercontig_452.1) derived from phytozome v7.0 (chr-ID supercontig_452; pos 6750 to 7295)
acgacgaaaatgtgagtttctgttttctttttttttgttctcattttatgttttttcctttttttttttttttccttaaactaaaatttgtgtccctccgggttctcctttgtccagctctgtaatcatatgctttcccaagatgtctttattgggatttatatttgggtaccatgttccttttttcgataatgtaattgtttaattatttggccatggtggaaactacagttgaatttctctagggttacttagcttccatactcataatgacttttaacattttttgaattttttaagtaaaaatttatacattcattattactgcaacatatagatactaattatagtataaaaaatactttataaataaagacattttcacgtttcttttccatgtatttatccatttaggtactgatgtaagcaatatttagcttttataatgaatttatgatatacccttttaaagaattttctaattcccttcatgggattggtatatgattgagtaatattgtgattgttttccggttttggcaggga

SEQ ID NO: 76485 - DNA, 708 bp, Carica papaya
  Intron number 1 from transcript evm.model.supercontig_4.14 5 (locus evm.TU.supercontig_4.145) derived from phytozome v7.0 (chr-ID supercontig_4; pos 2805838 to 2806545 reverse strand)
tgcacaaactgcccaaacttgggtccaaaagggtaagggaaaatgtagaggagcatgcctgcagaaatgcaaattctgacgtgtcaaatttaatgtaatgtatccttctcaaaggataataatttattctgagcatgaactattcattagaatattgtttataatactattggcatcttatgttatgtggttggttattttgccaattgacattttctggtagattgtaactcttcactttttcccttgataacatcatggcgagacagcaaaataggcaactgcaaacaattgcaactggtcttttcgcgtacgaaacaaaataaattttaattaattaacaagacaatatacttttgagtgccaatatctatggaagagagagcgcacttaatcccaacagggttagacattagactttaccttgccaaaaatgttctttttttggagttcctgagggttaggactttgatgcctcttgagagctgcaagtatagatgttttaaatccataagaaatccatctagattattcggaagtatgctcccaaaagaaaaactacaggacacagcataaactgcatgttgattctccaaatgatgtttgaaattgcatttgtctttctaaaaccaattttcattttcaatcatcattctctgattattccttgctgactattctcttttactggtcatcttgcttacagat

SEQ ID NO: 76486 - DNA, 341 bp, Carica papaya
  Intron number 3 from transcript evm.model.supercontig_324. 3 (locus evm.TU.supercontig_324.3) derived from phytozome v7.0 (chr-ID supercontig_324; pos 43162 to 43502 reverse s trand)
caggcactgttggcaaaccattccctggagtggaggttcgtacggtaggccaaattgtaggatccaacattaactggcattaaatgtaatgttatgaaggtcataacaaagtctatgcttatgcaactgataacagtgaatcttcatgattcctcgctaaaacatactatgtagtatgataaactatggaaagatttttgtttgaatttattatattactgatcttatcaactgtataatagtctaactttttttttacgtactaatgatctcttttctctgaaaaagtttcttttggtaatgcttctacatttcctgtttgtaggtcaagattgaagaag

SEQ ID NO: 76487 - DNA, 644 bp, Carica papaya
  Intron number 1 from transcript evm.model.supercontig_26.1 81 (locus evm.TU.supercontig_26.181) derived from phytozom e v7.0 (chr-ID supercontig_26; pos 1305725 to 1306368)
agatcaacgccgtccgtcacggatctggtgaagtgatgatcaatttttcctgtgatggttttttatgcgttttttttttttggagtttattaatgtttatctgaaaacaggttttagttcttttttttttctcgatgtttttgttacataaatgggatttgaatgattttgggatttcgcgcgttattgaagacatggccggatcagaagtgagtggatgagtttgacttggtcagggtatttttgtgtgggtatttattaactaactttttttttttgtttttgtggaaatcctgggggttgatttgtttcaatttctccttcttgtttatttcttaatttttgttttccattattattttattgtttgattctttgtatttaatcgtgccggaaataatagacgcactgcatagagaccatgatgtctgaaaagtttggatttgtcttttctttaataattctgagtttattttcactatgtacttcatggccttttactgtgactttcctaattgattcttgataaaatgcctatagtaacaaattttccccttttacaaaattcgggtgattaatgtaactgataatgaactaattttctcgcagggagaaaaggtctcgaaagcaacagacactctgca

SEQ ID NO: 76488 - DNA, 488 bp, Carica papaya
  Intron number 1 from transcript evm.model.supercontig_2216 .1 (locus evm.TU.supercontig_2216.1) derived from phytozom e v7.0 (chr-ID supercontig_2216; pos 2203 to 2690)
aacccaaaccggactcgactaaagttgccgttaaggtttatttcgtttttgaatattttgccaatattaactttcgtccttttctgattgtttctgtagaaggattactgttctatagagaaattgagaagatcgagtattctgggtgtgcttaggaatactaaaaatagggaagtagtacgtatctcgaaaaaaaaaagggaagtactggagcttgtatggttgattggttgaaggattgatttgggttaagagaaattagtttttagtgattttttttgggcgaatcaacttttggtaaactctaccgatttagaactgaattatattctggttgcttatggagtgatttcaaaacaagggagaaactaaatttgcgttttagttattgagtgaattttttataggaatcaagtaagtgagagtgagcaaaaaaatgcttttcgtgaacagaaaaagaaagaggaagagaaggcaagagagaagga

SEQ ID NO: 76489 - DNA, 619 bp, Carica papaya
  Intron number 1 from transcript evm.model.supercontig_116. 44 (locus evm.TU.supercontig_116.44) derived from phytozom e v7.0 (chr-ID supercontig_116; pos 462927 to 463545)
agcttccatcaccattcccaacaggctcggcgactgtcagtcctctttcttctcttttcgtcttcgtcccataagtttaactctgtttagtaaaattttatgaaaatggagaacttaggttcagtaatgaggaaaatttcagttttgtttagaaattaagggttataaaattctgtgatatgtaaatatagatgctcaagaatttttcgcgtaatgctattactacttgcgtttgtattgcttgtttccattggttaattactgaattattcttaatatgttggacaaaattatataccaactcgttttacttactgttgaattgcttataatggatgtatgattcttgcccgagtagttgtcataggaaagcgccatagctttaatcaagaagagaattagaatatcattctcattctaattttatttctcgtctccctctcaaagaaaaagaaaatcctttattctgtatttttattttgatttatgtcaatttacctttgtatggctttggattatttcctcttaaaagaaatggttttgctataattgggtatggggttaatatgttgtctgattgctgtttgtaggtcctttttcccaaagggtcttgctgaca

SEQ ID NO: 76490 - DNA, 315 bp, Carica papaya
  Intron number 2 from transcript evm.model.supercontig_27.9 8 (locus evm.TU.supercontig_27.98) derived from phytozome v7.0 (chr-ID supercontig_27; pos 1129062 to 1129376)
ataagaccacaaatttgcaatatcaacagacagaggtattgcagttccatcgatctttgaatcttactcatggttattcatttcagttcaagtacagcttgacatctacatgttggaaccatatagttcaactgtagttattaatttctgctctcttcttatgctcttaatgtcgatgtcagctgaaatccttgtaaaatctgcatcatatttgtcaactttttgtcattgatgatgcttcttggcccctgcttcttttgttttctttctggtggtgagtttattaactattatttctctctttaatgctttcag

SEQ ID NO: 76491 - DNA, 143 bp, Carica papaya
  Intron number 1 from transcript evm.model.supercontig_129. 14 (locus evm.TU.supercontig_129.14) derived from phytozom e v7.0 (chr-ID supercontig_129; pos 91610 to 91752)
ctacatcgctttattacgttagtttcttgtttttttttttgtgaattgaacaaagggagactcgtctgttatatatatatatatatattattttttttttctttttggattttgattgttttcttcgcagtcttctttgcctg

SEQ ID NO: 76492 - DNA, 665 bp, Carica papaya
  Intron number 1 from transcript evm.model.supercontig_4787 .1 (locus evm.TU.supercontig_4787.1) derived from phytozom e v7.0 (chr-ID supercontig_4787; pos 236 to 900 reverse st rand)
ccggtacatcacagaacgctttttgcctgataaaggtataacaatttataaattcgttgtttcttttatcacgcttataaataagtcatattaagaatttattccaaaatattatagcccatttcttgacattaatagctcgtttctagcctacattaaagagcaaatttttttagttccagtaaaaccaatcagcttcaatttggcctccattagacgcaggacctgatggttgcgagttaaagagaatttgttttttttcatttcatggaaacatgcatatggttgacctttcatgtgtaatgttgacagtagttcacttgttcacttaaatgattgaagtagtcaaggaaaaagataaaaagagagtggtgaagaataagaaggggcagtctaattgcttgtatcatcttttcttgagaataagatatgaattggcagttcaactacaaatctaaacatatgtgtaaatatagtcaaataagtacaagtgaggacaataaattaatattaattttagaattaaagtggaaattcagttggacctgcaatggagtcaagattcattggaagttgacctgaaagggaattgaattgtcagttgagtttggttgctttgaaaattgtaatatttgtttcttcccttgcagccattgatcttgttg

SEQ ID NO: 76493 - DNA, 655 bp, Carica papaya
  Intron number 1 from transcript evm.model.supercontig_131. 90 (locus evm.TU.supercontig_131.90) derived from phytozom e v7.0 (chr-ID supercontig_131; pos 710974 to 711628)
ttttctcctcatcctccgaggtaaaatactccgagcttcctttttagctgttgattaattatggcttccttcctcaccatacccttctggagggggagggtaggttttccctcatcgctatgctctttatcctctttagtgtggtgtaggaagtaagctgctgtcttcataataggtttggagaactaattctcaaagcaagctgtgtaaatttacaaagaaccaagttgtgcagagggttagaactcctcaggggttcactgtatccctctgaattttggtttggtgttccaaaaaataagataaattgtcagatccctgtaaatatgatcggtttattttgaaacctttctcaaaatattgtagaaaccaaattttaattcataatttgtcaacccttttggaattgtgaagcacctaatcaattttttttttttttttttcaatgagaatttcgtatgtcagtttgtgctggttggagaaatacctgtctgtttccattgtaaaggttaacaatttctctgcaaagttttgtatgcttttgatactatctctctctttctctgtatgtatctatatagtcttcgagttcttagggttgagtttcaatttacacaatcctgttcgtgtattactcagttgcttgaaaagttga

SEQ ID NO: 76494 - DNA, 385 bp, Carica papaya
  Intron number 1 from transcript evm.model.supercontig_42.1 54 (locus evm.TU.supercontig_42.154) derived from phytozom e v7.0 (chr-ID supercontig_42; pos 1490087 to 1490471)
aatgtgctgattggtgtctgaatgtttttcttatactcacttgaatggtgtgaaatcgttactgcacattaacttgtccctcattgaacaaattcacttgacagaacatatttagtttgatttgcctatattgtatcgaattggcaagttgtgatttgaagaagaaatttcttcagagtaaattgtgctgctgagtattgattttagattcctttccattatggttaaaatgcatgtccctcatatcatattctacttacttcaataaccgattttgcgtaaacttgcacaaagagcatctgaaccccttttctttttctacttgtttctcagattttgtttacataggcatggatgataaaaaatttggatgttatacaggctt

SEQ ID NO: 76495 - DNA, 689 bp, Carica papaya
  Intron number 3 from transcript evm.model.supercontig_1.41 5 (locus evm.TU.supercontig_1.415) derived from phytozome v7.0 (chr-ID supercontig_1; pos 5130365 to 5131053)
gtggtgagcttcaagttggtttaaaatttacaaaggtatttttctcctaattttattcttttctttctttttattttagttatataaatatatttatgtcgaattctttaaagtttggataaaattataactagcttcttatatatatatatatatatgtacaaagaaaattaattataatattttcatcactttatcattacaaaaactttggaaaaaaaaaatagttcatatacacattttgtatttttttaatatacttttattactattttttctttattgtactagttgaaattacaactctttttgtatctttaaataaaattattttattatattattagtttttgatcatttaattatcacgtaacacatattgaatcactatttaacatctatcgaggaatttgatttaattgacaaataaatctcttaaaacaaagaccatgtaagtacatgttttctaaaaaaatatatatcagagttataactttggaccaatttacttattttgtgtgtacatatatatatatatatatatatatctatgtttgtaatttctaattaattgcatatagatgccaaaatcaaaattaaaatcttgtttgtaaaacactagttgtgtttattaatgttgatgaacaatttcattatgtactaaattttataggtggaaggtgatatta

SEQ ID NO: 76496 - DNA, 960 bp, Carica papaya
  Intron number 2 from transcript evm.model.supercontig_25.1 41 (locus evm.TU.supercontig_25.141) derived from phytozom e v7.0 (chr-ID supercontig_25; pos 1459385 to 1460344)
agagagcaaaaaacacaacgcaatctccacgacccgtaagcttttcatctctgctccttacttttcttcattgtaaatgtttattcataacaagatactacaataattgacattatgaagatacaattgcttaatggagtaaaccttcactcctttttttctgtctgcataatgggattttagaaggtgataagcatgacagattgttattgccttctaaattaagttggattcttgatgtttatattttaaacatctttatggttcagcgcccacctttagtggtgaacatttccgctccttatgtcaatttgtcttattaaatgtaatcaaaatttcttcccgctaaaattggtatcaaggtaataaacaaggaaagtaaattgaacatttttgaataaaaacttcgctctttttctgaccccaggagctattcatggggtcaagatttgttttcgagaaggctctgagtctttggcccaatatttgtttttcttttactttttaagatgtttcttgagtttgtgagtgtgcaattttgtcatgttcttccaaaataatagaagattttgagaggattgtctcctaataagcactagtacttttcttagacttgtacgaggtcatgaaagaactggacagctgggacctgggatcttcaaacctcgattctaggccatttctttcaatggttgttgatgctcccgatctatgttttctggactatcctctaggcattcccttgtggatactttttgcattaaataataaaggtgcaaaaggaaagaaagaaaaattcaactttaaaaaagttcatttcttgattataataatatcctgagttctgtccattcagttattcttcactgctaatttgattggtccatgattataatgtttgatgaatctggcgattttttctgttcgtcatgcaattccttctatcttgttatttagatc

SEQ ID NO: 76497 - DNA, 377 bp, Carica papaya
  Intron number 1 from transcript evm.model.supercontig_103. 28 (locus evm.TU.supercontig_103.28) derived from phytozom e v7.0 (chr-ID supercontig_103; pos 228408 to 228784)
tcaaatattgcggttcgtttcttcgctagtcccttacctcttattcttcttcatcctcctgctatctgtgctgtttgtatttgtctcaaatcacgttttaattctcaatatctctggtctaaatttattggtgatagagatcttaggtttgtgttgtgtttgggttttttaatttggaattaagtggaaatgattgatcggagattttcaagtttctggtctatgcagtttttttgaactttttattatttagtttctttttcttcggtgtaaaatacgtttaatatgcttatttgatactattacaagcctttcgtggactctcctcttgatttttttttttttttttctgttgaattgaaatggaacagacaagg

SEQ ID NO: 76498 - DNA, 513 bp, Carica papaya
  Intron number 1 from transcript evm.model.supercontig_102. 14 (locus evm.TU.supercontig_102.14) derived from phytozom e v7.0 (chr-ID supercontig_102; pos 486908 to 487420 rever se strand)
aaatcgttgttaagcaggttctcttttcgatttcaatgccttcttttatttcaattacttaattttcatgaattcatcttcaactaggaaatttttctattcaaaatttttcaaataaattctacaagcattcaagaagaattgactagctagtttaataaacacttcatttgattcatgtgtttattatttccttttagcatgcgtgaagtttgaaatatttttttaaccaagttagttccgtatcgtatacatttaaatctttagagtaaatatgttgcacctaacaaattaagtaatacacatgtttaagctcatttgttaagcacatgcatgctcacaatcagccctaatgatgtagtgattatcatccaacaaggtgtttgttaattagtatctgtattcagctaatttttcaatagaaatcaaaattaagataagagaaaaaaaaaaagaattaatgagttttcttgattggggtttctttctttaatcttttgagttcacagtttg

SEQ ID NO: 76499 - DNA, 846 bp, Carica papaya
  Intron number 2 from transcript evm.model.supercontig_5.24 7 (locus evm.TU.supercontig_5.247) derived from phytozome v7.0 (chr-ID supercontig_5; pos 2160965 to 2161810)
gaaactcttctctcgtcgacttcttcggagatcaggttggttcatcctttttttgtttttcttaagaatcaattaatgcaaattaaagtcaattagtttgttaaaatgttagtcagctctgacatttattccttcgtttctgtaacttgctttgttttaatcctctagacttgtctagtctttcatgggtgtttgtcagtgtcagaacaacgacacggatcttgattaatacctctactttgtgtgcttggttgactttcgagtatagagggaaaatataacaggaagataatgattatttgcacgaggaagatgtggccatgagcgagtttagatgttaatttgttgaagattagatgatgcatttacaagttaaaaaacttgggctagggaaaagaaataataatataagctatgtgggtcttttatggccccaaggcaacctcccatacagctgttccacgcaattttgcttgccacttctctcaagtagccttcttgccaactctgttttctgaaaagaataaacatttatgatagaaatttatacattttgttactgaggtgagatacatatatatatattaagttataatacaacattctaaaatggagattggaatccataggagagaagtatcaaaacatgtagctaagaaatgattagttgaaaagaataggttattacattagagaagatgaagcttttgagttaggccaattaaataatctgtctgaaattatgaaataaattctcctttactgtaagagaatcttactaagtaaggaaatttgggttattgagctgcagattatagcatacctgttgatatcagcagcatcttc

SEQ ID NO: 76500 - DNA, 596 bp, Carica papaya
  Intron number 1 from transcript evm.model.supercontig_108. 34 (locus evm.TU.supercontig_108.34) derived from phytozom e v7.0 (chr-ID supercontig_108; pos 351148 to 351743 rever se strand)
ggtaaagttatcttttccagaacatatatatattcagtttaattgtgtgcgagtttattgctcgggctttattattcagaattgatgataaaatggaggaaaatgaacgtgcacgtgaatcattttgcgatgtcgtgtattagtttatgctgttatttcatgtaacacttcattgtagagaagcatattgttcagttaaactttgttagtgaaaaagatcaccgtctgttttggttctgaatattaatgattaggatttattatctatttattatctgattctagtgttattctctagggatcgatactgtgaaaaaattgattgtttcttctaggaacttatattcatgttggtgatgcgcaatcagaggttgaaggaatgaaatgagtttttctattggaattttgtgggtgtagttttggtttttcatcaattgcagtccagatttgttgagaacattgctttaccttcggaatccagcgagtcatgccgtggaattttatgttttgattttattccctgcctgtacttgtggggcccacaagaaaccgggatggattttttctgatcctttcctttttttggcaactaggtg

SEQ ID NO: 76501 - DNA, 576 bp, Carica papaya
  Intron number 1 from transcript evm.model.supercontig_117. 75 (locus evm.TU.supercontig_117.75) derived from phytozom e v7.0 (chr-ID supercontig_117; pos 784762 to 785337 rever se strand)
tggttcccagaattttcttgggaacacgtgtcaaggtacttacttacacaatttatatataattcattctgatttgattcacgcatacatatatatataattcacacatacgtagtactgttatttgtcctactttccacctctatcctcctgtacttttctcccaagcacaagtttttaaatcttctgattcaaaatcatcaatcttgaagcctatgtgggctatcttttgggaagatttgatcttgatcttgatcttgatccgacctttatatatatatatacatgactgactttgttgaattatatgtgagatgacataaagagagaaacacatattcgtatatatatatatatacatatatgaataataattattaagttaaaaaaaaatcccatcgtgcacatattttatggctgagagaggatatcagtattatatatatatacatgtgtatatatagtaagatggggaaaaaaaaataaatgctagcgtgcacaggcgttgtgttggtttttatacaattaatggtgggtacaggaagtttgcagagcttggatttaaaagaagtgcag

SEQ ID NO: 76502 - DNA, 648 bp, Carica papaya
  Intron number 2 from transcript evm.model.supercontig_1652 .2 (locus evm.TU.supercontig_1652.2) derived from phytozom e v7.0 (chr-ID supercontig_1652; pos 5175 to 5822 reverse strand)
aattcgggttgccggccagaacggagaacttttaggtaatttttctactttagaactttgttctcataatctcttttatttatttcatagttttgattaacttccttatttacaatttattataaactaacaacgtcatatcttttactttcttaatatgtattaattgattgtaaataagaaatttatcactaacagctcaatattttttaaagtccggtcgaagtaacctagaaacacaatttaataagttagtgaatatggaataataaacctctgaaagtaggaggtccacctggggccattaatctgtattttcagctttaggattattttgctttatatgtacatttcaggttaaaatcatatacatatatggatataatgttttcttattcatattctaattctatttttatagtataattttatagagtgaagaattcataactttccaatatttgtttataactattttatttttttattataataattatgtttatgtaaattaaagtttatggaataactcctctcaaaaataaatgaaggtcattgagaccttgttgaactttttattcacgaattcaagtttacttttctcatattgcaggtgagacctatattttgttcaacaagcaggtcaag

SEQ ID NO: 76503 - DNA, 925 bp, Carica papaya
  Intron number 1 from transcript evm.model.supercontig_57.5 6 (locus evm.TU.supercontig_57.56) derived from phytozome v7.0 (chr-ID supercontig_57; pos 866889 to 867813 reverse strand)
agcggagacgcttgctgacagcttttggcatcatcgtaagtccattctttttataaaaaaaaaaaaaaattcttctttaatttcctttttcttttgctttgagttgataatgggtgctgtctggaagattaccatttcactagtacttttcttcgtaagacgatggaagttgaaccttctaagcacagggtttttctaaccttgaaccatttttcctgcttttgaaatattcagaatggagtttttctcttctttgtgttttcctatttggatcttctttatgcaagttttgtttcccatttaaaaccagtagaaagagatttcattgaccttgataatggcgaaaatgaatccataactccagagaatcaaagagattttgaagactactggacagcgtggaagtgaaaatgagtccgtgctctcatatcattttaagttcatggtatgggactttaggagttttaatatgtgaatgttggtttcgattttgattctgttaattaatttcagtacaaggtagagttggggttacacgcgagtagatgtattaacatataaataataataaattgtgtaattttcatcagtttaaacttttgggataatttactataattaattattttatagattctgataagaatgttagaaacattcaaacattgggacttcaaattgataatagttagaggtatttcttgtttgctggaattgctcattgttctgttgtctctgttcttgtgctaaatttcttataatatccttcagctgccagaataactttttgtttgatcttcactgattgattgcacaactgaggggacttctcgagattgtctgaaaaatacctcatgagtttaggttgtaacgtatcaactgttattgatttaatttatagtcagggtgagtcctagtctgagtg

SEQ ID NO: 76504 - DNA, 574 bp, Carica papaya
  Intron number 2 from transcript evm.model.supercontig_58.6 1 (locus evm.TU.supercontig_58.61) derived from phytozome v7.0 (chr-ID supercontig_58; pos 666536 to 667109 reverse strand)
aggtaattggatcttcgaccttgagcaatatagtttttctttctgtgctttatggttttttccttctcgtgcttttctagtttttgaaattcatcgtcttctacttagttaccggagaattttcttatttactgggggacataccttcgtttccaattatcaaagacaattaagatatgtcccaccttcccctcgaaaactttcgtaaaattattataaatttgagttaatacagaaagcagagttctctccctgatttcaaattcttctcttttaatcagttttttctgcatttcagcatttcttttttttttcttttttaactcaaaattcatattgattttgcttgtgctggtttcttttttagatttttattggtgccagattttcccattgattaactaattgtctgtagtgtgtattctaaccatcactaagtgcgtatgagtagatgttgttacagtttagatctaaaggtattaattagaaaggaaaattatgttcatgcatgatttgttgataaggagatttccctgcaggattcccctgtttttaactacatcaataatctgtc

SEQ ID NO: 76505 - DNA, 1040 bp, Carica papaya
  Intron number 3 from transcript evm.model.supercontig_52.1 51 (locus evm.TU.supercontig_52.151) derived from phytozom e v7.0 (chr-ID supercontig_52; pos 1504795 to 1505834)
ttgcgaatttgagaccggctactgtgttgcctcaggtaaataattctgttttactgggagcatagctgatataatttggatgttttgtgctaaaaatggaatgttgtgagcattgagcattctctttcgcatctagagcttatcaaattcacaagagtctctagaattttgttttttctatcaagtaatccttttcattttttatggtcatagtcattagttatttcgtagcatgtttaagttgattattctgttgtctttctcattggcaaagaagtcgcaagaaaattgagtttatgttacaatgatgtatatacgagctcaacatattgattaagaatttcaacattagttagggggaatatgatcttgaaccattttgttatagttagtccaatgcactatctagcaagtcatatttactagagcccaaacttggaattcaattgtttcttgcttgtagttaataaagtttatgaaatttggagaatatctcgaacaacttatttaaagtctaaaaactgtctcaaaagttgatttgctgaatgttgggctttgaaattggtcatgattgaataacttgcaagttctgcatggtgtgttgatcaaacatcaatcaaacagattgttacaatgattatagttttagattgttacagtgattatgtcagcctgactgagaaaaaccaggtagagactctaataaaattgctctggatagctggtcttttaaaatttgcaactctttagagaaagcttatagctattaaataagtttttatgatgatgaagtcagcctgactgagaaaaacctgctatagactgtaataaaattgctctggataatcaatcttctaaaatttgcgactgttgagagagagctggtcactattaaataaaatttgttacgatgatattgtgttgctttttatagaagtattcatttaaatttgtgtgcttgcctgaatgtatacatgttctgtttctaatcgatcttggtaaaaatgggttattcttcttgtctgctttttagttggttg

SEQ ID NO: 76506 - DNA, 774 bp, Carica papaya
  Intron number 2 from transcript evm.model.supercontig_1127 .2 (locus evm.TU.supercontig_1127.2) derived from phytozom e v7.0 (chr-ID supercontig_1127; pos 7471 to 8244 reverse strand)
aggttttagaagatttgcaaggagtggtaaatcctgtgagtaatttgttgagttttttgtgctatcatgtgtttgtacaaaattttcttctctttagctaggttagggttgaagtaatattcctgctcccgaggaatttttttagataaaaacgaagtctgacgaaaagatatttcactttgactgagtcaaactctggacacatacatatgtatatatatgtatatatatatataatgtcatcttgaaaagaattagttgattctcggtaaaactagcttggaaaatttttcgttactggactaggtaattgttaacttattagtacaggttgaaagctcatattcacggtaattatactgtcctgacactttgactaacatattacaatttggaagctaattcagtcagtcaattttctgtaatttgcttcaagcatttattcttgctgtagtttctatagtcttgttggattcagttctgttgttaattggtccagaaaatcctggtttatagcttttgctttttcctttatttttaaagcttaaataagcgttttgtttagcttcctaaatttatatgtgaaacatacactaatttcactaattggagtagctgtaactgacccttcgatttaactttattgacactttaatttaattttatcggagtcccattcgtcagtaagttgcacaaggaaagataatgctcttgcctgaacatcttatatataatgcagacagactctagtctaattgagggtaggtggcaact

SEQ ID NO: 76507 - DNA, 605 bp, Carica papaya
  Intron number 1 from transcript evm.model.supercontig_285. 7 (locus evm.TU.supercontig_285.7) derived from phytozome v7.0 (chr-ID supercontig_285; pos 54649 to 55253 reverse s trand)
gaggagagaattcagaagttagccaagtacggactttatgctgtcttcttagtttctgatcagtactttttttatatttaagaaactatttttatataagataattggactcgcttttagctattagaattatatctaaggtctctttatcattggctttgaggccaatactttttagcatcctattaaatagagacatcttactgatggtttatggaagcaaagtctgggaattaagatctgaaatgtctggcttttgttctttcacttccccggacatctaatctgtataatttaatagacattggttctgtggactttatagggtttttgacttgtactagctttttctaagaacggcacatccttggtgcgaattccttgtttcctgagtaaatgatgtggttttcagttaacatatccagtttgagggatataaaatcctatttcttaacataattatggtctttgtttgcagtttttttcataagaagttttggatctatgttaatctgcaccttgtttgcattttcgagtttcattgcttgctgtacttattatattctgtctgattcatgttaaatcagtttgttttaataggttga

SEQ ID NO: 76508 - DNA, 639 bp, Carica papaya
  Intron number 2 from transcript evm.model.supercontig_36.1 41 (locus evm.TU.supercontig_36.141) derived from phytozom e v7.0 (chr-ID supercontig_36; pos 1083873 to 1084511)
ttcatctgtgaatcagggacggccttcacaacaaagtaagaagcatattgccttatcaattttatggctctaaatatttgcatggtacttcaaacctgagctcagttcctcttggttgaaagaaactctctgcaattctagtattgtgctcttttgtaagccatgcatcaatgcatttgaattggcaaaatttttactctgggatgaggaaggtgttttaaaatataatatttctaaaattagtgatgcagcatccctttgaatccttgatactggataaacaatgtgttatgtatatcatgtagcattaaatatgattcatcctgagaatgtctatccgacttaagtacttttggcaaagtcttggttttggtatgtcatgcagatattgcttactactgatcatggtagaggttattagttttgccctcacctatggattagttacatgggtctgctgcatgggaatgatatgaagattgctaatcacaatccattatttctggatgccaatggctttttctttcctttggaacactcttaagaatgtaggttgtttgtgcacaattctagcacattcattgatttaactcctttattttggctctaattatttttctaaccttatagtcactagtg

SEQ ID NO: 76509 - DNA, 969 bp, Carica papaya
  Intron number 1 from transcript evm.model.supercontig_3.34 3 (locus evm.TU.supercontig_3.343) derived from phytozome v7.0 (chr-ID supercontig_3; pos 2374117 to 2375085 reverse strand)
ctgcagaactcaagatcgggggtttgttttgctctctcatttttaagctgcacacttctttctttcccccaataggagggttttttttcccctcataaaccagcaatcaattaattaattttgaatgtttattttctagaatttaattgttcctctctaagagacatggagggcccctacttttgctgttatggatttttagaatccctaatgggtcctcctctcttattcttcttctattcatgtatcattctactgtagcatctcattattatttcgtaattgcctcctttttatattcacatgtgaattataaagttattattagttaattatatttaatttgctttccagtgctctgaccaaacatgtcttggaattttgtaacatatcaccgcagtctttgctctggatggaatatctctcattcatgcactcttgttatgtgaattatttgctattattattcaataataaattcataatttattttggtatttattaaaaattttaagaaaaagaaaccatctatatgtgtttataatgaatatgctggaaataattttttctcttccgaaaaaatttttgtattctctattttttggttcttctgaaagtgtatgtatggtgctttattgcctttttttaatatgaaggcagacatcttcaatcaacagagttatgggtcgttctattctcaactatatttttttgtgaattccttctcaattcttggccaacttgctgtccataagatggtgcatattctgtttttcatttcataattttacttggaaattgagcttttaccatgctaaggggcattccttctatgaagataaataataaataattaaaagttaaaggattcgtagttaatatactaaactctagttcagtgtaacattctgcaaaatagtgataggtgatgtattgtttgtgggttatctcagattttttgaaggccaa

SEQ ID NO: 76510 - DNA, 552 bp, Carica papaya
  Intron number 1 from transcript evm.model.supercontig_144. 9 (locus evm.TU.supercontig_144.9) derived from phytozome v7.0 (chr-ID supercontig_144; pos 389332 to 389883)
atcgccgttctctgggtaagaaatcattcttttctttctctttttttttttttttttggttttgttttcccaatctctgtttcagtggttacataagcagcacataattagcatcattatcaaattattgcttttctttttcaagtataaaaagtaagcggtatttgcactttaaaaaattattttcattacctaagaatacaaaattttatactctttatattctagttcttaaatttcacttaaaatacagatcttgttaccttataaatgtaatataaattattaataatcacttaataaaattaagaatttaatttattaatatgcagtaagatgattaagttataatatactctttcattaaaaaaaaaattatcagtattttgttataaaatatattatcaaaaaataaatttataaaaaaagtaacagtaggcagtcggaaaatatgaaaaggcagaaaataaaaatacggacactatttctagtactaagctaagctggtgcatgtactaaatattgacatctatgtgtttgtgggtgtaggaa

SEQ ID NO: 76511 - DNA, 373 bp, Carica papaya
  Intron number 1 from transcript evm.model.supercontig_203. 10 (locus evm.TU.supercontig_203.10) derived from phytozom e v7.0 (chr-ID supercontig_203; pos 218643 to 219015 rever se strand)
gctcaaatcgtgataaacaatgtgagcttcaagtgttgatttttttttctcttttcttattcaaatattgagcttacaatctctaaattgagacaatgaccaggtttgaatatcccttgcatattttcaaaaatgaagaaaaattattcataagaaaatctgatttaagacagactactatggtattgcataatacataaacaatataggttcagaaaaaattcataagaacatcttcaacacttacttttggttcttctttcttgttgtcacaattgggttttagggagttatgtttgtctactgttaaaattttgattaatgaatcatttcatcagttaaggaagacgtcaaagctgttgcagtaccattg

SEQ ID NO: 76512 - DNA, 532 bp, Carica papaya
  Intron number 1 from transcript evm.model.supercontig_163. 16 (locus evm.TU.supercontig_163.16) derived from phytozom e v7.0 (chr-ID supercontig_163; pos 418632 to 419163 rever se strand)
gaaggaacatcaggaagagatatattgaagaagaggtaggcataaggagatccaaacttttattgggtgagagttagaatttagtttcggcgagaagtatattcgtaggaaaatatgtttaactggaattaaagctacctgccaaaagctccttggtattaggagcttctttcattgagttaaaagcttttgagctttcagcacttcttgtgccttgataaacacttcgtagcccttttttagacaaaataagccttgagcacttttgactaaaaaaaaaacaaactgaacaccctctatattttcttgtgcccaacttttttggcgtttttcctttctcttttgtttgttctgtttggaaaaatggtttaattaattatacttcttctgtggttggctaattaagtgtgctattgtctttgtagaatattattttgttgatgctcgtagtaaggacttggctttaccttatacaaaaaattgtttaattcatttagttgttcccaatctacaggcttgagaaaatctttgc

SEQ ID NO: 76513 - DNA, 757 bp, Carica papaya
  Intron number 1 from transcript evm.model.supercontig_33.1 75 (locus evm.TU.supercontig_33.175) derived from phytozom e v7.0 (chr-ID supercontig_33; pos 1792591 to 1793347)
agcaattgttccctgtgatttcaatctcatcaccggtattattcttcttttgtttcgccttgtcttatacttcttttgtttcacttcgttttttctttttctttgaaaaattatttaaataatacatcaatctcaaataaatacaacagattgttaaaatttcaaatcatatattactaataatttaagtttttaaaaattagtgattcgaattcaaaaaattattagatcaatggtatttcgattcgaaatattataaatgatatcaaaatacatgttgtttcgatgatattctaattcgtagtaattttaaattttataaatttttaaaatttaaaaaatatataattattaaattgtatataaatattgaaataaaatattattaataacttgaatttttgaagattaataattttagtttaaaaaattattatctgagtgatccttaaacctaaattgttataaatagtataagagtacgttacaaattcagtgacattagaaagtgcgattttgaaccttgttgatctttcaatttagaaaaatattttcattcttgactttgatataaatatttacttcacaaattatataaataatttgagtttttttataaattttgatgctccatccccagggcattataacatcttcaaatctgtttcttgataaatatatttttgtgttagcatttggttaaaattctcttttatcttcagatattgacttccgccaactagttaaccgcgtgcca

SEQ ID NO: 76514 - DNA, 555 bp, Carica papaya
  Intron number 1 from transcript evm.model.supercontig_48.7 1 (locus evm.TU.supercontig_48.71) derived from phytozome v7.0 (chr-ID supercontig_48; pos 415975 to 416529 reverse strand)
atctctaccttttgccgcctttaaaggcattgaaagtaaaaattaattgcaagtatttgagttacccatcatgccccttgtaatataacggactcttgcataaccatgatgggcaagaagaaatgaatagaagcattaggtgttcattcacgcacaagtaaggaaatgtacatttcggaaactttagatatttactgaattagattttagtttgctcttgtgataggaattttcattttttttcttttttcatttcaatgaaggtatattatgtagtttgttaatgtcaaaagagtttctcgctttgcttccttttgtaagccccaatttatggtgatttatatctagtgatattttgtcaagatcatgattgtaatacttactagggctcagttaaattcttgaatgaggaagatatgtgtcactttgcactgtgcatgaaggctattatgttacaagactgcattattggaaagattctttcattaaactcactttatttagtgtataatatttgcaggatccactttttccataatttcaggtggatttggg

SEQ ID NO: 76515 - DNA, 458 bp, Carica papaya
  Intron number 2 from transcript evm.model.supercontig_25.3 9 (locus evm.TU.supercontig_25.39) derived from phytozome v7.0 (chr-ID supercontig_25; pos 570795 to 571252)
gattggtttgcaggtcttcttcttcgtggaaattggtatctaatatttttggttcaattttttactttcgaacttggttccttttagtttgtatttcttattcgagcatcattgctcttttttagaataaatacatgttcagtccagtgaatgttttttagttcttgtgagagtgatgcaaaaattcagatttccaacttttcctcgccacaagaaggagcatatgttttatcgtacagagttatcatttttcttaaaagaacgaatattgttgttaggaaattcaaaatggtttattggcgtgaaaatgttgtagaaaatctccaatttgtttcattttcttctctgataaatttgaaagggttggtcttcatgcgtataaattatttatgacattttttgttggctgattattcgaatgcgaaaggtgtgcagcagggtcatcagcaacagaaatt

SEQ ID NO: 76516 - DNA, 793 bp, Carica papaya
  Intron number 1 from transcript evm.model.supercontig_1092 .1 (locus evm.TU.supercontig_1092.1) derived from phytozom e v7.0 (chr-ID supercontig_1092; pos 5778 to 6570 reverse strand)
atagttggaagtatgtgcttttacgtatttgcatattttaggttttctattacctgctttatctgtattttcattgcgttttttccttttaaatagaagatttgaagttctttattgttgtagagtatagatgtaatcttaatatagtagatggtgctaatttcccattgacaatatggggcaggactagactagcatttgagttagctagtcttgggattgtgtagcattcaagtctttgcattagcccaagggaataatttcccattagtttatagttccctttttctggtcttacttaatccagctgttagtattttgattactaactaccaatttattaccttatcaacttactctgtggaatcttgtatttataagaattgccagattaacagagttcttagttgttcattagctaaaattgacgatgtttatagacatagttagctccttttaatatttccgagttactatggacggtgtcctctatttcatttggcttagcatgttaagaccaaattggctgctgtaaatatgtgagcaatagtgatgtattctttcatatatctttgatgttgccaagacattctattgcagacatcactttagacatatttggagataatagtgtgtttgtgcatttgtgaatttgtctcactctttgtccacgattgctagcatttccagcatgtcctcatttacatatagatgtgtgtacgatcgcatgcgtgaatgtgttctcactctttttgaaggttggagtgttagcatttcaagattaactgatatt

SEQ ID NO: 76517 - DNA, 745 bp, Carica papaya
  Intron number 2 from transcript evm.model.supercontig_36.1 15 (locus evm.TU.supercontig_36.115) derived from phytozom e v7.0 (chr-ID supercontig_36; pos 913982 to 914726)
tagatacctcaagaggggaaatattacgtgtcaatgtaatgtctattgcccttctgagttagactttcttaatttctttcaggttctaactgcttcaatcaaatttgtgttggaattattgtatatgacaactgataaatttagatatccttgagggcactagtttcttcgacaactgtattcatgttttcaccgatggatagcatttcatatatattacaataggacatgcgatattcaatatgttcttgtttctcataaaaaaactccaatgttcttttgtagtctttcttgtccgttattttgcagtaagttccacgttcaataggtcttttatacttgaataattaaatcatgtgggctccagaactgaaagaataattatcaaatcaagattccaactgtaaattgagaagtaagttgttttgagaaatttatattaagtctatacatatctaataaaacacttgtttttgaaacaagttgtgtacaattgtagcttgtaagtaagtaagagcaagttatttaaatatttgaccagatttaattttaaataaatatgaatgatcacaaatattaatgcaattgtgcagttcactgttattttcaaagtctactcacaatttataattcattgcaactcacttatacaatttgaatcattttattacttaatctaattgaatagtaagattggaatcttgaatcataaggttataacaactgtggttggaagtgcagtttg

SEQ ID NO: 76518 - DNA, 702 bp, Carica papaya
  Intron number 2 from transcript evm.model.supercontig_11.2 1 (locus evm.TU.supercontig_11.21) derived from phytozome v7.0 (chr-ID supercontig_11; pos 345271 to 345972 reverse strand)
gaagaaggtcaagacacctttgaggtatttcgtttattccaaattcacatatcatatgcctctgctttgtctaccttactcttacacaagcaagtttctggttatttggtctatcagagagctcaagagattgaatatgcccatatatagtaaaaagatcaaagctttttgttcttatttgactattttttgttagtattaactttcaactctacaattgttattgtatttccggaaaaataataacaaaatataatcatgtgattgactatagataatcaaattgatggtgatagccaaaacaaaaaaaatgatttatgagatttctatatctctaaacaagcatatttacatcatatcattttaaaaaatttgagaaggaatagttatgtttatggaacttgtattgtttcctaaaacaatcttggcatggattaactaacaaataatgctaccagcaaacttcaatatttctaagtcttaaaacatttttattgggtctagtaattatatagatagtttagtagcttaaagttctgggctagtaaagagcttacaagctcttttatactaaactaaatcaaacaccttataatccatcttatatgaactactttattttacagcccggatcttctttttctcatattctcttttggtattccagttgaaggacttcctattaagtcaaccggaggctta

SEQ ID NO: 76519 - DNA, 779 bp, Carica papaya
  Intron number 1 from transcript evm.model.supercontig_45.4 7 (locus evm.TU.supercontig_45.47) derived from phytozome v7.0 (chr-ID supercontig_45; pos 1319801 to 1320579 revers e strand)
tctccactacataccacccgcagactagtgggcaagtaaaagtttccaacatataagtgaagtcgatctttgaaaaaactgtcaatccttataggaaggattggagcccgtgactagatgatactttatgggcttaccgaactattttcaaaactcccataagaacgttgccacatcatcgggtctttggcaaagcttgtcaccttccttttgaattagagcataaagcctattgggagtttaaagttggaacatgaaattagaagaacttaaggagcacaagaagctatagctgcaagaactcgagaatctataaagaaaagatgaaactttccatgatcggatgatctctaaaaaataattctcaatagggtaaaaagtcttgctttatgattcttgcctgaaggtatttctggagaagctacattcaaagtggttaggcctgttcattgttaccaacacattcctcttggtataatcaagatctaaagcttggacacccataaaatttttaaagtaaatgggcattggctgaaacccttctgtgaagggttctctgtacaataggttgaagaactcaccctgggcattcctgaagaaagcgcctaatagaagtaggaaatgtttagcctaggataataaataagtaatgggaggcaaaccatttagtttttattatgaatattagttatttagttgttagtaatcttgttctgtctattctgactggattgtgttgtccagtgcttgcagatcgccaataaagagaccacgcgtag

SEQ ID NO: 76520 - DNA, 479 bp, Carica papaya
  Intron number 4 from transcript evm.model.supercontig_1210 .1 (locus evm.TU.supercontig_1210.1) derived from phytozom e v7.0 (chr-ID supercontig_1210; pos 7195 to 7673)
gaaaggtacacatcttaatagctcttgtgacaaagtcagtgttttacttgctgaacttctatattgtgaaactagcacgtaaaatctgtacacctgagcagtaattttggattccttgaaaaggaaaagaaacactggcctgcttggaaccagcatgacctgagatacaattcaagtattttgatatttagggtctaattccaaccattttgctgttctcttcctgttgtcttctggagtaattgtttggactagcttaactcaaagaaatagactaaactgcatatagaatcgaatctaatgactaaaaggttgggttcaaattattattatgagctggagtttactataatattctatttagtaaattcttttcactgcatcttcttcgtaagacttaattcgatctcatctttgtatgacatggatgcatttcttgtgcagctcccaatttggaaaaagatactatctcgagtttg

SEQ ID NO: 76521 - DNA, 566 bp, Carica papaya
  Intron number 1 from transcript evm.model.supercontig_4092 .1 (locus evm.TU.supercontig_4092.1) derived from phytozom e v7.0 (chr-ID supercontig_4092; pos 1138 to 1703)
gatctagcacttcaggtcagcagtgtggtcattggaagcagtaaaacaaagtttttcttcatgttgcttttttggatcactaggatcaattcattttcagttagaatttttttaattcatgtttctctcatgtccatattttttattcatttttagaggataacttatcttcttctgaagtcttcatttttgttcttctcactctatatatatatttattatatataaagaccacatgcaatttccacaatttagccttttttagcattttttttacttgcagaacttttgaacttattggaatatcattgcaagaaatggcagcttttgaacttttgtatgagtccttgttttgttcttctcactaatatatatatatatatatatatatttcaaataagtaaagtattatatcaacaatactaagggggtaccgcccatttacaatgcactaatgtatatatatatatatatacatatatatacataagatcacatgcaatctccgcattttatcattttttacttgcacaacttttgaactcattggaatattgttgcaggaa

SEQ ID NO: 76522 - DNA, 393 bp, Carica papaya
  Intron number 4 from transcript evm.model.supercontig_13.2 47 (locus evm.TU.supercontig_13.247) derived from phytozom e v7.0 (chr-ID supercontig_13; pos 2185013 to 2185405)
tagaaaatcaactcggaaggtgatttttggttccctcatagtttgttttgtaggttctttgattttgaaaccacattgatcttttccttttgattacctgttttcttttaattttgacaaaaagaagataattggttttataaattttcttcagtctttcaagaatgcaaaatagaaaaaatacttctagcaaattcgattacaatctcaccctgtaaaatctaaacttacccataaaatgtttgatcaaagaaattcaagaattaccacaactggctgtgggtaataaatttggttaatgaaaaaatggacaccctgattgattaaggattctggcataattttcaagtgattaaaccatcttatagttggaaaaattatttcaggagatcc

SEQ ID NO: 76523 - DNA, 437 bp, Carica papaya
  Intron number 1 from transcript evm.model.supercontig_55.9 9 (locus evm.TU.supercontig_55.99) derived from phytozome v7.0 (chr-ID supercontig_55; pos 604448 to 604884 reverse strand)
aaggttttagtaataagacttttctgacacttgtactcaaggagacatgaggaatcttgttttcttaatcttattttacacgtcatcatcatttcatgaagcaagtggtcaagggtttcctgtaaagaggataagaaacttctaatatcatttttgggcttcttagatccttttggttctaagtgcttagctgacatgttgattcagttatggacagggggcaaatcaaagcatgatgtttgttttatggaacagatgatcatgcactcctcttcaacattaaaattagtcctgtatatattgttcttattacgtttctgagatcattatctatccaaggatctgtctagcattgctatttgaatttgaccgatattagtttccatcttaaaaggtagtttgattaattgtttttcaggttgcctgttttccatttg

SEQ ID NO: 76524 - DNA, 1032 bp, Carica papaya
  Intron number 1 from transcript evm.model.supercontig_139. 63 (locus evm.TU.supercontig_139.63) derived from phytozom e v7.0 (chr-ID supercontig_139; pos 473151 to 474182)
tgaaaagtgtcaacattctctgtggtgactatgtataccaatacgtacgtagttctctctttactcctttactttttctcttaactgtgtttttttaaattaatattctctgataatgacctttttgttttggttgatggaatgaattcaggtgattcctttgtggatattattcggatattaaatttgcttcatataaggttacgggaacatagtatttgtttatggcaactgttatgtaaggtgtatttggaagaaattaatgattatgtgaatgtttagtaagatttctaaatgaattctacagaattttccgagcatccataaaacttgaattgatggcgtttttgtttcttaggaatttggtaaactgtttaataaatttacctttcttttagtcaagttattttctgattagcattgaaatctcttgttcaaattacaattgaatggtattatatcaaactctaagctgtttgggtcaaaagaggtagctgcaacgtcacttggaggtctgctaattcaatattttttatttgccattttaatttctgagatagtctgttgtcttcagacctgggacattcggattgtgatctattcttgtagaatgctgttctttgcttgctgaggctatgcttgaagcaaataaactataatgaaaataatattagaagatggtgaaaattggccttgtaatcaattccctgtggaaatgaaaataatccaaatgttctgtttttcttttttttttaataaaggaataaatattgtttagaaaaagaaaataatataaacgagaattgtgcattgtcttatattttataaattattttactttggcaaagctcaaattcattggctgacagtttttgctgagttcttgtttgtgaattcagaatgattgtcgaatttatgtccagttcaatttgtatttctctatgttcatgtttttagcggttaaaattttgggggagtcacatttttataatttcaggttacaggaagagtggaaccaagagagaggagcat

SEQ ID NO: 76525 - DNA, 494 bp, Carica papaya
  Intron number 1 from transcript evm.model.supercontig_40.2 0 (locus evm.TU.supercontig_40.20) derived from phytozome v7.0 (chr-ID supercontig_40; pos 468800 to 469293)
cctccagtgtgttgactctgcactgaactctactaacgcggttgcaacgcggcacaatttgattggttgtgctgctgaatcagcagtctatgtggcatgtttcttcaaatttgcagagtgacccctaggcgcctaaaatcttttcatttggacccctgcttaattacagaaaggcctgaaattccaaatttgttttcaatttagtgcaaaattaatattttaagttattttcaaggttattactagattttcttaatttccaaaaatgtcccaagttcacacatttaattccaaaatgtatttttactcaatttttcacctaaaattctcacaaaatcaattaatttaaatctcccagaaattactaaattcatcccgtattctttttttcccttaatttctcctgaaaattcttttaagttcacatgtccttttgacttaacatttattgatttgcagcttggacaggccctgagcactagaccagatatatt

SEQ ID NO: 76526 - DNA, 750 bp, Carica papaya
  Intron number 1 from transcript evm.model.supercontig_34.1 98 (locus evm.TU.supercontig_34.198) derived from phytozom e v7.0 (chr-ID supercontig_34; pos 1817128 to 1817877 reve rse strand)
ttgtatttcggacgtcgagagaaaggcaaaaactcgtgagtttaaccttactcgtttcgccgttgacgagcacaactggaaataggtaattactcccctttcttcaattcatacttccgtgattctgttcgtttcctagaaaatttccactagggaattaagattatgttgaaattcaagcacctgatcatgtagttcgatgaaataatcataactatgaacttacaaattatatatcggcaaacagaggagttttgttggcttaattaaatcttcagctgatggcttgtgtatgtatgtatatatgtctcttgcttctccaaaatttttcagcggtttctgttgttcctttcttctgtgatttacttcgagtggtttagcttcatgttttctctaagatctgatgttttttatacatagtgaattcatgttaagtagcttgtgcgtagaaaagggaaatagatcaaaaattaatccatgaacaacctaagagggaaatatttgcaggcaacttatccgtgatttctcaattatattgtcatttgacagctttgatttcatcatcgttctgtgcacgtaacaattgattttgtctaaattacacaatatagaaactcatactgtagaaaagaatagccttaatttacttcactaacaaatataataggctaaactgttcgtcgttatcgggctgctgcaaatcaatttttatcagctgtgaacattgtgtttcaatttgcaacaataaat

SEQ ID NO: 76527 - DNA, 471 bp, Carica papaya
  Intron number 2 from transcript evm.model.supercontig_58.7 4 (locus evm.TU.supercontig_58.74) derived from phytozome v7.0 (chr-ID supercontig_58; pos 776259 to 776729)
atcctgtctgtggaggtgggtacatgattggatgtttaaacggaattctgggttggatttcacattccatcttcacttggttttcaggagtttatgacatttaaaatcaaaccaagaagcgagtttctgttttccctggatttcataaaagattcaaacttgtaaacttttgactttccatacagtttctcgccaaccaaacaaatcattagtgtatattctctttctttcccattttttcctttggaaagcaggcctaatcatcttctctttttttcttcttcttttcttttcctgataccaatccttcaaaaaaaaaaaaaaaaaaagaaaagagaaaaacaacaaaatttgggatgatgtcattggcagtgcgtttgtttgtttgttttttttttcttttttcttttgatgttaattaattctttgatttcaggaaacgaagaggaatataggactagcttctcagag

SEQ ID NO: 76528 - DNA, 868 bp, Carica papaya
  Intron number 1 from transcript evm.model.supercontig_27.2 56 (locus evm.TU.supercontig_27.256) derived from phytozom e v7.0 (chr-ID supercontig_27; pos 2398239 to 2399106)
gtagaactgtaagtttctggttttcatcaatccttataacaattttgaacattgtaattactctgattttttagttttaatcaataaactgttagtaatacatacaattcagattcttttaggtgagcttttcattgacgggttggtgataattgtctgcatcgtaatttaccttattgtttaagatggtgatggaattgttgatgttgaaatgaaaatgctgtcatgtctatacttttccctcatgttcatttacttccgaggtcaaaggtttgatgggaaatatggcatgacagcaattcctaactgttttcttgatcaaagttctttctttggcaaacatgtggtcaattagagaattaaatgcaagcacaaaatttgcatgattgatggtgccaaatagttgtgttgaaagaaaaagaccggttttaaattttcaacaacacttatctgctgcctgttattgatggcaccactttgtcactttttggaaggctctcaatataaaatactgtcctttatgctgatattcaaagctgcaatagaagaacaaagaaagaatattagctgtcttcttgatttccctcttgaacttaatcctgttcctaacaccaatcttcttgagttatgctaattgggattgttgttgggagaagcaaagaatattttaggtgttaagtttccagaattgctaatatttgtgctgcaactgcaagatatagaagctttctttttgtgcttatttttacttgggtagatgttcaaaatatcaagccttttttaaattgtagacatcaaattatgttactagatttacaccatctggctttctgatctcaggttgaggcaaagaaagctgttcctaggg

SEQ ID NO: 76529 - DNA, 160 bp, Carica papaya; identical to SEQ ID NO: 74127
  Intron number 1 from transcript evm.model.supercontig_52.5 4 (locus evm.TU.supercontig_52.54) derived from phytozome v7.0 (chr-ID supercontig_52; pos 507390 to 507549)

SEQ ID NO: 76530 - DNA, 832 bp, Carica papaya
  Intron number 2 from transcript evm.model.supercontig_321. 1 (locus evm.TU.supercontig_321.1) derived from phytozome v7.0 (chr-ID supercontig_321; pos 8168 to 8999)
gcctattattattggcattagcatcttcctagttggtattactaatcctcaacttgtaccttctttatagaccttcaaattattcctttttatatatgtatataaaatatattagtaaacattatttgctaaagaatttttaatttgaataactctatttttttttttgcctaaacatggttcttttccataatatatgtacataaaaaattaacgaaaatatactttagatatgcatgtaaataatatttaattacattattatatatctaattgaagaactataacaactttaattataaaaatcaaataaatcctaacttttgcaacatataataaagttttaaattaaatatcttttatgatttttataatttacatactacagtgtgaatgtgttgaatattccacgtatataacagagttgacatgtatattttcaaggattaaatttataaaataagttatagcaattgaaatcagattggttgtagactttgttgaaacattatttcatttctcctgcctaacaatttattaatggggaaataccaaatttaatttttgaaatacaattaacattacaatttaattttaaatattttttctttatagattagtcttcaaaattttaaaactttttctaaaagtctaaaactattaaaacttagatgaaaaaataaaatatgatttaggatttatttagagaaaattattttttaattattttaatggttataatttttaataaacatcaaattattttcaattaacattaagatttaagatgtttacttttatgaatttggtatcaggtgcgataacatcattc

SEQ ID NO: 76531 - DNA, 1019 bp, Carica papaya
  Intron number 2 from transcript evm.model.supercontig_2.57 (locus evm.TU.supercontig_2.57) derived from phytozome v7 .0 (chr-ID supercontig_2; pos 1039953 to 1040971 reverse s trand)
taagaagtttatgtatgtgcctcttgctatgccttgtgtctcctattgatcatactctcgagcagattgaactttatcctgaagctaaaagctaatgcatccaattcttaccatattattgtgtggagaagcttatcataaagacaagtttcattctgtcttcttatttatcattttaatattcttctttttgcatgcaaacctatgaaatgtgaaatgtgtcttgaaatcctatattcttagaactgggatttttctttattcttttctaacttttctttattcttttctaacttttctttattcttttcctaggtgttaattatgtgccctcatggacttgattgtatgaaatgttggtgccaccagtcactagtaggcagtgtctcatgtccaaatttgttgagttctttttatttcttttttctttgcaaaacctatttacaggaatctttctcaaaattatcgagcaatcctaatggttccttattaggaaggaccttgatgtttgatttgccaaatatattttcacatgatatttgctttgccaaatacattattatttattctttcttatgagtaatgcagccaaatactttttttctctgaaagaaatgttattagaaagagagagaaatgtaattgtggaggctaagggtaagtgatcctcctataaaagggtgaagcgaaaaaaaaagaagtattcttgatacaagaaagcaacttaatctcttagtagggtgaagaaagaaacccccaaatatttgggtttcctgttgctaatcatttactcttttaaactaaaacatctaggtgataattgattcacttcgacattaattaacattgtttgcgtgtgtttcatagaaagaagttatttgcatctgctattagcattataagttgcattcctctttttgtcgaatggttttaatgttaaaaaagaataagttgaaattttggggaagatacaagtttctttttattggtgtcttctacagggcagctcttggagaagc

SEQ ID NO: 76532 - DNA, 676 bp, Carica papaya
  Intron number 1 from transcript evm.model.supercontig_25.2 4 (locus evm.TU.supercontig_25.24) derived from phytozome v7.0 (chr-ID supercontig_25; pos 387147 to 387822)
ccgtcaaaattcaaacttttttcagaggatatttggtaagccagttttcttctttttttccccccctaattaacgctacttgaaatttgaatctcaacagttcattttctcatctgggtattgctagattttcctggttggcttatttcattgatgtattgtatataaggtttggattttatggatttacatttctggggtcttacttttttgcctgttgtttaaagctatagatggatccttggaggtacagattgaaaatggtaatggaacggtacatattttcttttgtttgggaaggtcaatgaaagtacatgatcttttttgtactttatttcttttgacttgataaagctaatagctttcttcttgattttgtctgcttttgcaaaaactgggtgatataatggtaggtccaaatttggttgtaatgaaacagtaaatctgttttcttgggtctatgtaacggttcatgtctcatacttttctttttgacttggctcaattattcgtttatttttcttcacttgttctttcttttttttttttggtcccccaacctgaatttggatttttaaaatttgaaagcttcattcgtgtgtatatgttgacattgattctggttcctgattaattgacagtcccggaaggcacttcgagctttgaggggtctggt

SEQ ID NO: 76533 - DNA, 520 bp, Carica papaya
  Intron number 1 from transcript evm.model.supercontig_107. 115 (locus evm.TU.supercontig_107.115) derived from phytoz ome v7.0 (chr-ID supercontig_107; pos 623889 to 624408 rev erse strand)
tctagtactttagtggaccaacatagaaggtaatattattttaattttctaaatgttagaagtcacagactagacacctttgttggttcttttcatggaaacatgccaaatatgagaattgttcggcaaggctagaggcacagtgtcttttctgaagagttctgaattgcagaaattacccttgagatgaagttggttacatctatcatgtgatcgttgtgaaaggagcactttatactttgaaattgtagtggtaattttgaaaataaaaataactgccttacaaatatcattttgcatgcgtttttgttttttgtttttctctttttgagagttttatttaagattgaaactttcattgctattctcaaagataagtactcttaatacctgtatcttgaagtcaattttgggtattgaagtatatgttttctgaagaatggtttttgaactgatataatttaaattcaattggttcttttcagctttgaccgcgattggaagaagattgaagcatttg

SEQ ID NO: 76534 - DNA, 411 bp, Carica papaya
  Intron number 3 from transcript evm.model.supercontig_18.6 3 (locus evm.TU.supercontig_18.63) derived from phytozome v7.0 (chr-ID supercontig_18; pos 451050 to 451460 reverse strand)
ctgcggtaacttcgattacttttatccatatcgtctcccatcacacacaagcaagcacggacatcttcttcgctcgttttagtctgtaaatattttttacttgagctattttgattggtagttgttaggtttcttgacatatccaaagtagaccaaatagttctccagctgaaattaatgctcacctctattttcaattaagctttttaagtttttgtgataattggaattagtgctttctcataaaataaaaagactgctaggcattaagcaattaaattcaccagttcattgggtattccaattatttgattcatgaggtgatgtacaaaagtgagtattcattcatttgttggtactgctttgttgatggcaggtccggatattgaagtcactattccctccttttct

SEQ ID NO: 76535 - DNA, 923 bp, Carica papaya
  Intron number 2 from transcript evm.model.supercontig_36.1 45 (locus evm.TU.supercontig_36.145) derived from phytozom e v7.0 (chr-ID supercontig_36; pos 1099916 to 1100838 reve rse strand)
tgttcactgagattgatcgcttacttcggcccgaggtatgtgatagtgaaatgttcagatatcccgtaatctgatcttttgcatgctgcctattgttcttaaaatgaaatgctctccccagcttctgctgtctaattcaggcggagatggtctgtgctgataaacttgaataattatgagcaactatacttatgtttgtaaagtagtgactagcacagaaatattaaggcttggtatttggcaaccatcactatgaatttagcttctgtttaggcttgactggatttattgtttgcttttgtcctcatccatctttttggatttcttttcgggtgagggtgttaattctatgaatgctttgatgcaacaaccctttatctgatattaagctttttcccctctgaacagttataagttaatcccaagcaccagtttggtagaattcattttccaaacaaaaaaatcagaatagcttgatcttctacttgttcccagcatattatggagtttttgtatccgcaatttgtcgtaagaagaggatagggtctcatgttatattcacatgataggcttagataattgattaatgatccaatactgcaatctcgttcctgctaaggatgtgctttgtgactgtacattggtagtggatcctgggttggattttttttttttgaggctaggtgattgaatgttatccaaaacttgtctgtagttcttatagtcccccagaatggtcatgctttactactgatgttcagatattttaggcattgtcaactgagtgatgccctaaatctttcttgaaccagtaggaatgtgctgtgttaggtggtgctttgagttgcttggttatgtatgttgttctgatgtcaatggcttgtgcagggttgggtaataatccgtgacacagcacctctaat

SEQ ID NO: 76536 - DNA, 627 bp, Carica papaya
  Intron number 1 from transcript evm.model.supercontig_36.1 45 (locus evm.TU.supercontig_36.145) derived from phytozom e v7.0 (chr-ID supercontig_36; pos 1100911 to 1101537 reve rse strand)
attggtaattccacgtacctagcctcttttgtaacttgtcctcaagctttttccatgttagaacctcatcttttttcgtcatatactttgttgttattcccctttgaatatagacatgtctgacttgtataaactgaaacaatctgccttattcatttccttacctgcatgagagatataaaattcatctgatcagaaaagagttcatgtaattttgaaaatgccatatggacattcttcactgtaaaaaattaggaaccaacttcagcatagaatgaaatcaaaatatgctgcatgctgttcattaccctgttcttccgtaaatttaaatcttaattatttaaagaataaaattatatggaataaaacttttatgctactggtttgtgaataagtgggattttgtctttcacttgattgtatgcacaaagtaatacttttggtcactagtggttgatttgaaaattttataactttactcttgacttaatatgctaatctctagatatcttatgatctttgattacctattattatttttttttttgaggtgtctttgactacttactgattgtatcatctttatcctttttaggtgtgaagcatttccaacatatcctagaagtt

SEQ ID NO: 76537 - DNA, 942 bp, Carica papaya
  Intron number 1 from transcript evm.model.supercontig_39.9 5 (locus evm.TU.supercontig_39.95) derived from phytozome v7.0 (chr-ID supercontig_39; pos 1825846 to 1826787)
gccaagatattgcaggtatttcatatttcctcccttctctccctctctctatgtatacacacataaacaccgaaacacacagacccatttttagaatggagcaatatttatatatggttttaatggaaagagaaaagattaattgattatgggtcaatggagactttccatgaatggtaaatatgttgattgattgacgagggttttcccagttgtaattattatttctttccattttggggtgaagatattttccatttttgagttcttgtatgtgtgcaaatgggctgttaggttgatttcgattgttttctctctgctgcttagaagactcagtgaggtaaagtaggaaaaacagaaagaaaccagtattaactattaataactttaaatttctgtttactccaggctgcaagcaactgataatttgcaagaaaaacaacatgaaatattcgtctgtgattttagtttctgggttgcttagatttgtcaagagtaaaggacaaatatttttccaatttcagaatgtaattttgaatattgtaaatgtagcttactcaaatccgtgattcacgagagtggttgagtttacagttagctgttgttacttcatgtgctctaatttattttgttatttttttcatctcactttttgggagataaaccttaatggatgattttgtagccaaatgggcatttcagcatcacataaagccttgtaattccaactatttttgtttttacctgaattaattctctaattcatctctaatcaatcaatacctacaacaaagtttgtagttataccttgttttattcactcgctgcaattgtaatttcattttcatctcgattttcttttcacgttctgaacttaaaacattttccttttcttcctcatgcttagttaagttacttgactggggggaagagggtcacaga

SEQ ID NO: 76538 - DNA, 345 bp, Carica papaya
  Intron number 2 from transcript evm.model.supercontig_177. 19 (locus evm.TU.supercontig_177.19) derived from phytozom e v7.0 (chr-ID supercontig_177; pos 406283 to 406627)
aatctaacagagggtattgctatcattatttttatataataattagtttgaaaattatgagacctgattatctttcttctcctattaatctttcccttctgttttataagcctgatatttgactcgacatgctgctaaattctaaattaaaaacatgaaaatagtaatcaaattcaaatgaaattttttcttaaaaaattatgagaaaattttaagaaacataatatttagttaccctgcattactatttcctttttttttttttttttttttaaagattgttgaatcaaagtaaatttggaaaatgtagatactgggaccttgtttggagtgcaccaggaagca

SEQ ID NO: 76539 - DNA, 677 bp, Carica papaya
  Intron number 1 from transcript evm.model.supercontig_27.1 16 (locus evm.TU.supercontig_27.116) derived from phytozom e v7.0 (chr-ID supercontig_27; pos 1279433 to 1280109)
gggcagcctgataggaaacggcctgctttagctaggtaaatatttccttcacgttacttattgttccaaattcatcctgaagttgaagggaacttggtttttcttccgtggtagtggatagtttaattgttaattcaactaagtagttgctggttagagctacctgtgtattcttataaacagcattacgttaaatctgacttgtcagcttcattgctgtctctactcttttcacttcaactgaagtacaaagtttctatgtacagtgaagctttgagcaaggaagcatgcgatcaactggtatagtcatgagaatgttctgtgaaagagaaataattctttcctgactgtttcctgaacttaaaacagaaaaggaagaaaataagttggtcttttatttgtttcaaagtttttggacgttcactgattatataagtcgagttcaaaaatagtagtatgataatttaaactcatgaagagcaattggatgaagttttgagtttttgttgcttcagcaggtttttgttttttcatataatccgctattctctttaaggcaaagtcttccattcattttctgtatactacttcatgtggccatgaattatatatgtttttctaagttactcaattctgatgcagtgtaattgtagaagctcttaaggtggatagtctac

SEQ ID NO: 76540 - DNA, 798 bp, Carica papaya
  Intron number 1 from transcript evm.model.supercontig_1539 .2 (locus evm.TU.supercontig_1539.2) derived from phytozom e v7.0 (chr-ID supercontig_1539; pos 4299 to 5096)
gctccagtactgcatccattccaatccttcctggcgttagtctctatctctctctctctctctctctctttccagttttggtttttacttactattgagtagtttatacttatctgattatttaattcgaattgaaagctgggtgaaagtaagaattttatgataaaaggtgaaagatttcttttaatatttcgtctattttttatatatggtttgctgcatgtcactatctatattgtgcggtttaagagattaacagatccaattcatgttgactttataattattaatattcttttaatttttcttttcatgttaatcgtaattttgttgccaacttattttctatccctgattctgattctctctttgattcgaaactgcgacggactttggtctcattttttttttctgaagtccatttcttcttgctatcctgaattttaacataattattactaatagtaattaagtgcttatatcagtgtaatagcaaggaagatataagtattttgtacaggagtacaagtgatttgggttggtatcccgtaaatttttatgctataattttctgataaaaaattgaaattgaccacttaatttatagtgtttttcaactaacttgtgctgtactatggggatggaaatcctaaaaaccaggagtttactcttgtgctgaactgaaatctcaaataaatataatcttgctgtttctgctacaaagtttacgtttttctgatcataaataagttggattctacagctgaagcacttttgctggctttccaacactatatc

SEQ ID NO: 76541 - DNA, 652 bp, Carica papaya
  Intron number 2 from transcript evm.model.supercontig_61.1 2 (locus evm.TU.supercontig_61.12) derived from phytozome v7.0 (chr-ID supercontig_61; pos 343939 to 344590)
tggatatagcattggggactggtggacttccaaaggtattctgtcgttgtcagtttatgcaatgcaggatctccaattttggtttgtgagaaagttctgtgagatttgtagaaaaagttgaatggtgattgaggaaaaggttattgcttctttctgtccatgtattggcaaatattggccagtggttgtagctgatttagctaaaaggcttactaggattcttttttgaaataaaagaagatgtattaatgtgagatgctaagggagcaccatccatatacaaaaatttacatgtcagttagcatatctacaatagaaccaagatcttcaaaacatttagattatgctccaaaacagtagagtcaaaataatgaaaccgtttatctttgatgctattaaaatcttgttcaagcccctcaaaagccctgttgtttctctccttccaaatagctcagaaaatggtaagagggattaatctaggattcttaataccatttgtagtgctttacctttgggtatgtgaggttgatggtgaaagttatgcgtgtttgaaagtgaaaacttagaggcaggcaggatgattgttttcaatgtcttcttccctcatataatttcttttgttgtatttcacagggacgtgtgatagagatat

SEQ ID NO: 76542 - DNA, 883 bp, Carica papaya
  Intron number 1 from transcript evm.model.supercontig_1248 .1 (locus evm.TU.supercontig_1248.1) derived from phytozom e v7.0 (chr-ID supercontig_1248; pos 18630 to 19512 revers e strand)
ttactctgtcaccaccacagtcagatctgtcccaggtaatacgtacgtacacgtatatgtatatagatgtacccacatacacacaaactcatatatgaatcacagcgtgcgtgtagtttctaattaatttaaaacttttctctctttttcatgacccggtggtacattatgtagagaataatgatttacgcttatgacaatgaacgatgaaggttgcgtatgtgtgtgtgtatatatacatataccatatatatattagttcgtcgatcaactttaggtgatgatgatgggtcttcattcacattaattggataataagttctatatattataccaattgcagatttcggtatacgtatgaaaaaagctattttccttaatttgtgagagagtcgtacatggaatctttcaaagaaaatatttgctgccactctgcactttttgataagagccaaaaatctgcattgaaaataagaatttaccgaattaaagaattttttttgtaaattaaaaggattttttatcttataaaaattaatgttataatttatgttttctttggtgattatgcgtcataaattaaattttaatacagtgttttttgaaatttttttaaataattatggtttatgattttgaattagttatgattctgtgtgtttataattttaagaaattgtgttattgcttagttatgatacctgtgaatattattttcaattttagtttttgtgtttttattaatttttaattaaataatctaaaaatttgatatatttatgtccaactcatgctcagagctccagctcttacttaatctatttaaccctgtgaaatgtgaatattagggaagagagatctgagtttcctcaccaacctgccg

SEQ ID NO: 76543 - DNA, 693 bp, Carica papaya
  Intron number 1 from transcript evm.model.supercontig_13.1 26 (locus evm.TU.supercontig_13.126) derived from phytozom e v7.0 (chr-ID supercontig_13; pos 1108906 to 1109598 reve rse strand)
tgtctctgcttttcctcctgctccttctactcaaggtattatatatgcggtatatatgtatatatatatatatatatgtttactgttggtggatgttatacatttttatgtgcgcatccgttgatcgcggaagttgatcgcatcttgatcgtgatctctggtagaattggatgttttcaattatacttgtcaaagagatgattcttcaactgtggaaaaggcggacggttttgcttgtttgttcacttttggcttttaatcccgatggccttctgtttggtttgaaggaaaattaacttgtcttttgctatttgaattttactctcgcttctaggggttagggctgaaccaggcaacaacagattacctccaattggtaaaggtttttcgggtggactttgagatttctctttacatttttcattattgattaggaacacagacagagaatacagtatatgttgaaacgtcgtgtcatatcaacatcttcatcaatatgatttccatgattgagagattttgcatatcttgatttagtttagcatcttcatttcatatttccatgcaagtgttcactgtctttttcggttctcttggttttgccatgatttttggtttgggatcaattatgtagatatttatgaattcttttatccagaaattgagatcaaatcagacactagtttagctgaa

SEQ ID NO: 76544 - DNA, 610 bp, Carica papaya
  Intron number 1 from transcript evm.model.supercontig_29.8 (locus evm.TU.supercontig_29.8) derived from phytozome v7 .0 (chr-ID supercontig_29; pos 59802 to 60411)
gcatctgtgaggtttgtttgatccttatttttgtttaattaatttatttggagtgcacataattcacctcaagtaaatgtgtgtatatattgcttccatgtgtatgtcaagaattttgcttatttctcggctaattaatatggttgtttttattttgattggttggttgattattatttttctgggtctgagttttccactttgcatgtgttggggatgctctctgtttggttgctgagaatatatggaaaaagaaaggaatgggaatttcaagtctcattatgctgttctagttttcaaatgatggttctcgtaaatattgataaggtttgagttgggcagaagtttttacatattcttctcatgatgcctcattttctctgcatccaaaataggggttcaaatatttggcggcataaagctatagttattttacagttgagttaaaataaacatgcacgcgggtctttcattttaggaattgttctaggttactgttttggtctttaaatctccactattaatttctcattgtatgaacaatcataaatttcttatacgtgttggttgtataagattattaacatcattttcaattgattctaggaat

SEQ ID NO: 76545 - DNA, 482 bp, Carica papaya
  Intron number 1 from transcript evm.model.supercontig_2.99 (locus evm.TU.supercontig_2.99) derived from phytozome v7 .0 (chr-ID supercontig_2; pos 1639862 to 1640343)
taactgtagtggagtgcaagggtctagagtttcaggtcagtggtgttttatatttttcctgtactgtaagtcttgcttcagcaatggaatcaattgcttgctctatgtttatcattttcttacaacatgcatattctaatcattacttactcattctcttctctgtttacgttatcgtaatgattttctttcaatagtccttttactgggtagtaaggtgcagcatttacttgttgtcaaagggacgactgttttgttctttttattttcttcctggtgtctttaattttatttttatcaaaatcttggccttttgtcttcacattgttgattatttcacttggggctgtggtatccagtgtgctttttaattccaactgtttgatacttatcagataaacacttacatttaggacctttgttggagcttcccaatgcacatcattctcattccaactttttgtgctttattactctgcagg

SEQ ID NO: 76546 - DNA, 886 bp, Carica papaya
  Intron number 2 from transcript evm.model.supercontig_125. 36 (locus evm.TU.supercontig_125.36) derived from phytozom e v7.0 (chr-ID supercontig_125; pos 685587 to 686472 rever se strand)
cttctcctgtctccttttcaccatctgatccacaggtacttcaaacattcatctctctctctctctctctcttcttctaaccctagtttgatttgtttaaaaaataaagaatgtccctgtaatgtctgaattccaaatagaaaagatgaataactgttaattttcgtataattgtcccaagtctctctccactaataactttagtttaaactgttgaagtacagtaatttgagccttaaacatgttgggtaagtggtacttgatttagatagttagaaataacatcataatatatgtaaatttggtgattctaagttgttctaatcttaaacaattagactgtgatttgtgattgtgatatgatcttaaaacttgatcttattcttttaccaagttagttcaatcttttaactcttatattgtaatttgtgattgtgatacaattttagaacttaattttatttttttaccaagttagttcaatctccaattattagattataatttgtgattgtgagacgattttagaacttgagtttattcttttgtcgaatttattcaatttgaatcattggattatgatttgtgattgtaatgtaattttggaacttgagtttacttttttgctgagttggtagaaacttgaatgagtatatgatttacgattatgatataattttggaactcgatcttgttcttttacggagttggcgcagtcttagacctcagattgtaatctgtgattaccatatgatcttgaaacttgtaattaaacgagaaaaattcatttcgtctccttctaggttttattaatcttgattgctctattttgataataccaaatgtttcaggtggaattaattgagccggcagtaaaaggaacact

SEQ ID NO: 76547 - DNA, 716 bp, Carica papaya
  Intron number 2 from transcript evm.model.supercontig_178. 5 (locus evm.TU.supercontig_178.5) derived from phytozome v7.0 (chr-ID supercontig_178; pos 28909 to 29624)
gaaacgattccactggagtcgtcacaactttctacgtaacatccttaccatctttaatttcttcttttaaatatatatatatatatatattttataaattttatgattatataatattttatatttttattttactttacatacaaaaatattatgttattttatttaattatcaaaatatttcttaggttaatattctattaaataaattattaaattcgtcttataaatatattatttattataatttgattcgtaacgttttttatttatttcaaacgttgggtttatttatattatttaatttaaaaaataacttattttattaattaattaatcaaaaaatcaatcttttaatatattttttaaaacattttagctttttttgttataaaatataagaaaattagactccttaatttctttgattggtcaattatacagtaagtatgttaaattattattattatatgattgactgattatacatgtttaaatatttaaacagtgattaatagaataaggtaaagtaataatcacattttatatcaaataaattaacaatataaatatatagctatacctaattttcaaaaattgcccacatattatatattatatatatatataggattgataaaatataattaatttaacataataaaattatctttggtggctgcagttgagttcagacccaaaaggtggtggcagcc

SEQ ID NO: 76548 - DNA, 719 bp, Carica papaya
  Intron number 3 from transcript evm.model.supercontig_1.32 0 (locus evm.TU.supercontig_1.320) derived from phytozome v7.0 (chr-ID supercontig_1; pos 4378929 to 4379647 reverse strand)
caagagccattaggagaaggctaaccaagcaccaggtaccatgctccttcgatcctctgctctttccgtttttgcttgcactcgttagaagtttttgtattagaattaaaagttttaatcgaataatttacagggttacgttgctttatgttgtgtttttgataattttttaccgtacatgcagctattgatttcttttcgagggagatcaaaaagaacaaaaaaacatttttatgaatactgtcttttccccttgcattttggtcctaagctgttatttaacataactagtttcggttattattttgattctttttaaccacgtccgtgtttgattatccaatttccaatttctgtagtgaccaacaatcgttccagttatgttagtgtagtgcaattggctgctccaatatctaaattttcactttgatgaatcttgttgttttgtatgcttttacaaatataaagaacttttaattgtgctgataatattagagagcctcaatgaagcagagaatccctaaagtctctatcgattgttttgtgaaaaggaagaatggctacacttattgaattcttttggtttccaccagttcttagttcttgcaactgaactgttgtaagtacatgcttgctaaattattcatgttttcctaatgcctgtgacatgttttgacttcacaggcatcattgaagacagtacgtgagacgaagaagga

SEQ ID NO: 76549 - DNA, 474 bp, Carica papaya
  Intron number 3 from transcript evm.model.supercontig_6.20 1 (locus evm.TU.supercontig_6.201) derived from phytozome v7.0 (chr-ID supercontig_6; pos 1595163 to 1595636 reverse strand)
agttctgataatatcaagctggaatttccccttctgtaagttcactccattcttgaatctgggaatttttcttgttgactcgaatatgaaatatagatcatatttggtatttggttagtcataattctgtttataactgctggcctatgagccttaggttttcgaaaagataaatgaaaaatgcctggtttcatagttttttactttaaaaatttactcatagattctaattgatcgatagtgattactaaaataatgtttttaattagagaatcacaaaataaaaaaaaatccagttacattttttaaaaaaataatcaaaacaacctaagattagcttgagtgaaaagaagagtcacaccaaacatccccctaaaattattttatcatacatttggtatcatggagtaagtttttagggtagatactgttagacaagcctactaattatactttttggatacagctctttcc

SEQ ID NO: 76550 - DNA, 602 bp, Carica papaya
  Intron number 3 from transcript evm.model.supercontig_13.1 42 (locus evm.TU.supercontig_13.142) derived from phytozom e v7.0 (chr-ID supercontig_13; pos 1226138 to 1226739 reve rse strand)
ttaattgttggaaaggtaaacttctgactcgtgaatcatatggtttcttttttgctttttaatttttagatgtcttagctttgtttattttgaagagacaaaaattgagaggcaattataaaaagttgaatctgcatttttggaggaccagttatatgattttgtctatatattgtactctagttggattttaacttttaagtgataagttgtattcatcccgaatgggatttctttaataaatgaaagggcttatttcttacaattctcctctctttacatgcttcaatttaaggcttgacatgcataaatgaatgctcgaattcatcattctgtaagacgcttatgtgccttgaggaatagtctctctctatacctattacatgaatttgtatttttataaatgctaatgttgatttaaatcttcaagagactaataggtagtttaggagttttaaatgccaaacttgaagaaaaacaccatttttacctagttaatattttcattaataaccctctgaatacacctctatattggatgtttctaactttctttttccttcttttatctgtatattttgttaggctgaccacaaattacc

SEQ ID NO: 76551 - DNA, 242 bp, Carica papaya
  Intron number 1 from transcript evm.model.supercontig_18.7 4 (locus evm.TU.supercontig_18.74) derived from phytozome v7.0 (chr-ID supercontig_18; pos 495468 to 495709)
gacttttaggtttctgaggttgttatcggcaattggttatttagcaacttttcttatcctcttgttggcttattctgtggattgatagtcaatttaaatagttttctagatctgccatatgaaacaccagggaagttttaggattgtgcatctttggctatttgcaatcatcaaaaagcagaaggaaaaaatcttttttgtgtttctaaatttggttttctttgatttattaacaggaaagt

SEQ ID NO: 76552 - DNA, 417 bp, Carica papaya
  Intron number 2 from transcript evm.model.supercontig_18.7 4 (locus evm.TU.supercontig_18.74) derived from phytozome v7.0 (chr-ID supercontig_18; pos 495797 to 496213)
taattgttccacaaaagtttcaggtaagacaatttcctgcctgactgcgatgaaggtttttctcctttgatggtactaatctgccttgctaacctatctaattttctctcttttttgggaaattggttgctcatatgtgcatacacatatataaatctttaatggaagcacctcttatgtcatatacattgctcatctttgagtttgtagctacttttattatcttcttttactttgaatataagtcggcattttcaacattgttttcatcgtcaaagaacaatattgccattgccagttgtgctgcctgttataaaacacttcaaacagaaatgtcgtttggctacttaaggttcaattaagctcttttatttttgtgtaggttactggattctccatcgggggccgtgtcgtgga

SEQ ID NO: 76553 - DNA, 850 bp, Carica papaya
  Intron number 3 from transcript evm.model.supercontig_18.7 4 (locus evm.TU.supercontig_18.74) derived from phytozome v7.0 (chr-ID supercontig_18; pos 496273 to 497122)
taactgacaaagaaggttattacaagcttgaccaggtatattcagcatttcctctttctcatctgtgtggtatattatctgtttcttatcttttggtttgaccattttcttcctgagaaaaaaaactttctttcgaggtcttctaagtttctgtaccttcaatcttcttttgtttcctttccagtattttttatgtataatttaaatttttcctgtccaatctgctctatgctctgtgcttcaaagcgtgattaaagactttcaactggaaactaaattaacagtttgatgtgagcatcgttgtttgggcttattttgcatatgaagttgaaatgaacatagggctgcttttatacactgtacctgcttcacgagtggagttgatcattttgctcattattgaaggaagtgtagtttgcaaactgatgctgatattcatgaagagtaaattaaagcaattttagttatttttttatccttcttaaatatagtaagagaaagtatttcaaaaaaagaaatctagtaagagaagattgaagctgccattgcttaaactcaaaaattcttaatgctttctgaagttttgttatacttccaattctgttttggaaagcttatttcccctccctcccttggttaggagatctaatttctttaccgttcttgtagttgctaatggtggcagtttttttttttttttttttatatattagatgttgtcaaacagaaatcggaagcaaataaggatattgttgttagttttagatatatacttatccttgaaagttcctattgacttgctgattgctttttaggttacatcaaaccggtacacaatagaggctgtgaa

SEQ ID NO: 76554 - DNA, 727 bp, Carica papaya
  Intron number 1 from transcript evm.model.supercontig_58.4 0 (locus evm.TU.supercontig_58.40) derived from phytozome v7.0 (chr-ID supercontig_58; pos 459324 to 460050)
tctccacacttgtaagtctttctctttatgagagtgtaaatttaaatcaagttgtacatttaatgtgaattctcgttaaaatattataatattattaattatgttgttatttgtacacatatatcatttatttattaaaatgtatgaatttttgtaaattattctcttatataactattaagtggttttaaatttttcttgtttctttaaaatttcatttcatcatatcttatatggtatatatgcattcttagtctcaattaatggattaacagctagagaaaagtcgaaaatttattaaagcttttatctatcttcaattactagtgaacaaagaactcatgcatgtaatcataaatttgttgtctttgtttccttgaatataaaattatttatttaacaacctgatgatattagaagtaacttagttattttcttgaatgcttaatcaaaataataatagtaggaacttgagaagataaatatacatccttgtgttgcttttgacatccctttcacgcatcttctataatatattgaacttgccttgaaccagcagcatcatcaaatgtcaaattatccaaagacaaatattaggtgtttgcttttcctttagaaaaagctttatatttgagattattagtgaataattactgatgcacacacattaattttttttttatctaaatcagtttgtaaaaagtgtatacacaaaaggtttttggaa

SEQ ID NO: 76555 - DNA, 538 bp, Carica papaya
  Intron number 2 from transcript evm.model.supercontig_58.4 0 (locus evm.TU.supercontig_58.40) derived from phytozome v7.0 (chr-ID supercontig_58; pos 460105 to 460642)
aaaaatctcaggtacttcattcttaaatttttaatggttttttactattatataataatatccattattttagatatagaaatgattatttttgcttacatatcttgattcttaacgttagtacacttccatgatataagtctataaatgaatcaaatagctcaagattcttgttgctttggagaacatatgagatgaggactaagataaacatataaaaatgaaaagaaaaagatattaaaagaattattcatgttcatatatcattaatgtgatcttttaagtatcttcacatgataacataaatcttttgttggtatttatatatgtatacattacactcacagaaagtttgtgtatatatacaaccatcctgcatactacatccttgatagtatgatgttgcttgcgacttggaatgtatataccttcttttttatatattttatatggaaaataaattacaacatagaacatgatcctttgattttccctccctataggccagaccatcttttgcaagctttgaggcagaagc

SEQ ID NO: 76556 - DNA, 403 bp, Carica papaya
  Intron number 2 from transcript evm.model.supercontig_150. 42 (locus evm.TU.supercontig_150.42) derived from phytozom e v7.0 (chr-ID supercontig_150; pos 415702 to 416104 rever se strand)
ttgatccttccgctgctttcaattgtttcagtaaggtttgcagtaatccatacattaataattttttatgaaatgaaataattacagtttacatatatacatgtatggcttcaatgattttcaacgaaaaagaagtaaacacatatatacgggttcgattattttctaatctcatacacacagggctttcatgcacatataacgtaagaaaaccagtatctcatttccaacgacgaaaagaaagtaggagggtttttaggttttaacttagatttttagaaaattacataaattatttgaatacccaaaaatttcaattgcatttatattcatcactgtaaaattaggttatgtttttttttctcttacttatatgttttttgtgatttgattttgcagaccc

SEQ ID NO: 76557 - DNA, 516 bp, Carica papaya
  Intron number 1 from transcript evm.model.supercontig_2760 .1 (locus evm.TU.supercontig_2760.1) derived from phytozom e v7.0 (chr-ID supercontig_2760; pos 4721 to 5236 reverse strand)
agacgaagcaagagaggcccgatttactttaccaggttttgtttttcttcttaactagaatttgtacagtttgaaaatacacgcaattttaaaattacgttttgaattttgacaggttattttctagtaaattaattaatacatgcacgtatatatatataacaatgacatgaaacaattttctttttgtacaggtgagaactgtgaacgagatgaacttgattggactttcctacattctatacatatatatatatatatacacatgcatttatatttatacataattttaatatttgtcaattaaatttgaatttgaattataaaatttataataaaaatgttatgttatctgaactaaatatttttgataagttatattaatttattatgattttgatagagaaaatagacaagaaaaattatgtttccctttttttttttttgggtgtttggctgatgagaaaataatgatgaacagggtggaataacaccagagaaaatagaagttccaag

SEQ ID NO: 76558 - DNA, 358 bp, Carica papaya
  Intron number 1 from transcript evm.model.supercontig_473. 3 (locus evm.TU.supercontig_473.3) derived from phytozome v7.0 (chr-ID supercontig_473; pos 34387 to 34744)
ctgccgggcggatcggcaagagcctgattttcaaggtttgccatctttgtatttccttttcttttaataaaaaaaaggatcaattgaacatttttccttcttttgggttgaaatgtaggtttgatttcgataaattcaggagggtttggataatttgtttctggttcttgatcgttgttgggttttaaatgtaggaaatcgtgatgatataatgaaatctagtatttatatatctctgcattagtggaacgattcatgctcatgattagcagtgaaggaaattatcatgaagagaaaaggcttgttcttcaaaaattgcaaattaatagaaatgaattgggtgtaggtaaaagacgtg

SEQ ID NO: 76559 - DNA, 373 bp, Carica papaya
  Intron number 1 from transcript evm.model.supercontig_2824 .1 (locus evm.TU.supercontig_2824.1) derived from phytozom e v7.0 (chr-ID supercontig_2824; pos 6253 to 6625 reverse strand)
tggccagaaggaaacaaacatttctggtaaaacatatttcttttatgcagttaattttaaattatataatgtttttttcacttacttttattagtttgtctattttatttttatttaattcttatatctcagttacttaatacgtaacaatcattcttcatttacatattgatacataacaaaatcaactttactaatatcttcgtatccataaccatagatagtgtttcctaataaggaatcacataaatacttaatttgatagctttgtttaaaactttattaatatttaatttttgatctcatttatgttctatagaattaaatactgaatcaagctcagtgttactgttaacatgtgggttcagtgaaa

SEQ ID NO: 76560 - DNA, 982 bp, Carica papaya
  Intron number 3 from transcript evm.model.supercontig_30.9 3 (locus evm.TU.supercontig_30.93) derived from phytozome v7.0 (chr-ID supercontig_30; pos 1327744 to 1328725)
tggaaccacttcgacgtgccagggtaagtagcttcatctagaatggtctactaatgtaaatcaatggcagtctgctctttctttcacagtattgtggcagttggagtgtgcttaattgctttggttatatttagcagtagcatgtagtgtaatgttcctattataggaaccttttgttataatttctttttttgaaataaaaagtatggtaagactcgtgaattcaaaagcaccaaaggagtgctaacctatgtataaaaaatatttacatatcaatcaaaatatcaataaagtctccaaagtcttctattatataaagaggatgactcataataaaaaaaattagagtttggaaccatctatatctaactatatcaaagtcatctgctaccccttcaaaaactctcttggttctctccttccacaccacccaaaatatagtatggcgaatgagactcacatgttttctctccattaatatctttgcaagcccatatctattccctcactaatccaaacatcacccaactgatccttaataaccagtaagccatgattcataatttatatgcaagtggacaccaaagaaggatgtgattgcaagactcctctttcctcttgcatagaaaacattcattcactaatatttttgtccctcctcatcaacatatcaatagtaaggatacacctacaacctacttcccatgcaagaaaacaactctgggtggagcattaactttccagatttgctgaaatggagaattgatcttcatgtgtcattctctagtattgagtttccaagttagttggttattactcttgttaattgaagtcttttgttataatagttgctagattcaattgtaattattccttccgttataattgttgatggttcttatttgttatgccgatattaattaatttatttgggtttcctcattttacaattatgattgcataattccctgcacaggtaatc

SEQ ID NO: 76561 - DNA, 551 bp, Carica papaya
  Intron number 2 from transcript evm.model.supercontig_46.5 3 (locus evm.TU.supercontig_46.53) derived from phytozome v7.0 (chr-ID supercontig_46; pos 414912 to 415462 reverse strand)
cttttcaccagttgagtttcttttttctttctttatgaatttgccaaacatgccctctctgtgcatcgccaacttcagtttttcaatttcatcttctttgaaaaaaaataaataaataaaattcttatattaaattaacaaattataatatttattataatttaattttcagtattttttattataatttagtcattaatattttctgtttatttacattttattttctaacgtaaaaagttaaaattattagaattaatttgaatactttaagaaacagttcaataaataaatttaactgattaattaaattgataataaaattaatcttatttttattaataatattattaattcaacagtatcagaataaaatttacccaataatttatgcaaaattttaagataattgattaatttaattaatttttcgaaaacaaatatctggaatctccaattccaaaaacacctgttcatcttttgattataaaattcaactgctgaggaagacgaaaacgacgtcgtcgatggctttcaggagccacatagag

SEQ ID NO: 76562 - DNA, 635 bp, Carica papaya
  Intron number 1 from transcript evm.model.supercontig_3.51 7 (locus evm.TU.supercontig_3.517) derived from phytozome v7.0 (chr-ID supercontig_3; pos 3682140 to 3682774 reverse strand)
gagatatactctccgtgccaatttcaggtttggttagtctttcaactcttcgttcattacattatgttcttttttttttttttaaatgatatttttctacagttttttcacttatataaattcatatatataatatctatacaccaaataataaaataatataattaatttcttaataagaatgcaatctaattgggattcaaacccaaaaatacaggaaagagtatgattaatattacagaatacaaagtttaaataatattttattagaaataagaggaaaaaaaaagtaaaaaataatagaaatactaaaattttaaatttagaattgtcaagagaaatcttttaagtacattgttatatatatagatattatcacacttttaaaatatgtatcataattaaatctaatttataaataataattaaatgtaagacaaattattttaaaaaatatacataaaaacaattattttaatgtgtaaagtatttaaatataaatatatttaattttaatacataaatcatatacaaaactcaaaaaattatatatttataatctcaagtagaaaattttcttaatttataaattattatttttaatgttaaaaatgataattattttgtatggcagc

SEQ ID NO: 76563 - DNA, 409 bp, Carica papaya
  Intron number 2 from transcript evm.model.supercontig_41.6 6 (locus evm.TU.supercontig_41.66) derived from phytozome v7.0 (chr-ID supercontig_41; pos 1540957 to 1541365)
gaggtcattgttctgttactaacattccttgctcattttcacatcaatttgagtttcttcccttcccaatcttaccttctaaagcaaaaacaaaaatggggtctccatacattgtttctctgacattaaaaaattacatagcgtttttttgtttgttgtgttttgatctttaacgggttttactttgcaagcaagagtgtgttatttgttttcttcccctttcatctgtttcaactttcaatcccatttatttttgtatgttttaattttagttttttttttttaaaaagaaaaaaatttggttcagcttttgtttcttgtggtgttggaatatgtggaattgattcattttaacagtgggtatagcagaagctttaacaactttatggtacctctttttcaggtggtg

SEQ ID NO: 76564 - DNA, 685 bp, Carica papaya
  Intron number 1 from transcript evm.model.supercontig_2.16 3 (locus evm.TU.supercontig_2.163) derived from phytozome v7.0 (chr-ID supercontig_2; pos 2400992 to 2401676 reverse strand)
gtcgcagcctctttgtgatatttgcagaatcgtgggtgagtgattgattgattctttttgcagtttgttgtttgtttgagaagtcgcaccacccctctttttttggattgggatatttgtagacctttttaacatccgtcttaacttagcaaaactgacgctatcttgttaagtttttcactgaatttgtcagttgggatttgattaattgaaactgttaatatcacgttttttttaaaaatctgatttagatatttttgtctattatagtgaattttgtattggatttcgtgggtgtaccttattatttaggttgtttgtctattttggaatacgtttgggcttctgcagaagttattctataattttgcttatggtttgatcttttggtaaatttttctaaaagattgtcaatcaaataattgtttgtaaaggttgtttctaggtatgctgcaattttgtcttcctacatatgaaattgtcaattcaaaattgtcttgtttaatttgagagtttgatttctattaatagttgatgaattttgtctctgaatgctttctttttcccttccttgatgctagtttgtcattaaccttcctttttgtattggattcttttgttctttctctgttcttttgattattatctgaagtgggttctggtaatctttggtggaacttgaagg

SEQ ID NO: 76565 - DNA, 666 bp, Carica papaya
  Intron number 4 from transcript evm.model.supercontig_2.42 6 (locus evm.TU.supercontig_2.426) derived from phytozome v7.0 (chr-ID supercontig_2; pos 4524484 to 4525149 reverse strand)
ctgataggcccctcaaagaaataccgcacattgaggtaattaatgggataactagatcttgacatcatttactgcacatttttctactgtttgttgcatattttcctatggttcgtgaattacataataaatctgccacacagggttcatttttggcaaaatatggtaggttgtgttgatagaataatggatgtcaattccttattaggtatgcaaatcttgttattggtcttgaagaaactgatataaatttccttttccattgcaatttgcattgaatcacttcttttgaaatctaggctccatttgttacattaaattactttttagttttctatatctattttatacgtagaagtgcttaagttggttaataatgaaaaagtaatagtgaaattgaggataatggtttaaaaattttaaatcgtagtggtcagtattttctaaatacaaatttttcctgtacctttgccacgaacaccccatacatgcttttgactgactccaaaaatttaaatgtcaaaacatatgaaactttcatgagtaaacacatgaatttaggaagtgaaaaagaaaaaatgtttgtaggtacaaaaccaagttttatattctaacattagctttgcaattcttcaggtgccacttcacacaataattgagatacag

SEQ ID NO: 76566 - DNA, 569 bp, Carica papaya
  Intron number 1 from transcript evm.model.supercontig_152. 51 (locus evm.TU.supercontig_152.51) derived from phytozom e v7.0 (chr-ID supercontig_152; pos 467851 to 468419)
cttcaggtaattaaaaaattgctgttatgtcgtgttgtgcattgtttgatcgagatttatgagataaatttttgaagtagtttttagagttttttggattgattgatctcgttattattggtttggttgaggaatggagactggttggtttaaatgtgtttgacttctgcgttttttttttttgaagaagacttctgcgcttctctagaagtgaaggagcgggtgaaggatttttaagatttttttttttttaatgtttctcataaatatggaagttcagtgctataagctgtgtttgtttcccaacatagtgcgggaaaatgatgagaaacgaacaaatttatgctttttccccttttctgaggggagttggtatattatagttgaatagaactaagctgtagttaaaatgatcaagtaataatctataaggattgtactgtttgttcattgcattttattgacagataaatagagagttttacatggatgctggttcgcgttgattggatgaatttggttttgagatatattttctttttcttgttgcagttcaatctcttcaggtt

SEQ ID NO: 76567 - DNA, 484 bp, Carica papaya
  Intron number 1 from transcript evm.model.supercontig_153. 15 (locus evm.TU.supercontig_153.15) derived from phytozom e v7.0 (chr-ID supercontig_153; pos 373513 to 373996 rever se strand)
tcttcgaaacctgtttcggcaaatccaaagttcaggtacctacttgcgttcaattcgatccgtggtgttttgctttatttcggtttgcgtttttctttttttttttttatttgatttatttatgctcttaaagttattcttgaagatttgttttctcacaagaatgttttaatccgagatagaagaaaagacagcatgaggattctgaatccttttactcttagccattttgtttttaataggtaatcatgtttgtaataagagcaaaattgtggtaaatcttcgactttattgtttggttgaaataaattataactacaaattaggattggttaaataattgagtttgataataaacatttactatttcaaaaaataataataaacatttacagtgttttctggagattcacttctgagagtaatacaagctaaagtaaggtgggataatactaatactgtttgatagctttacagagagcta

SEQ ID NO: 76568 - DNA, 797 bp, Carica papaya
  Intron number 1 from transcript evm.model.supercontig_1834 .2 (locus evm.TU.supercontig_1834.2) derived from phytozom e v7.0 (chr-ID supercontig_1834; pos 7321 to 8117)
tgccggtcttggttcccgattaccggtgaattgaggtagcaactttcccctcatccccatccttcgtgttctggttcaggatatagtcggtttggttagtcagggtttttggtagaacgggaaattaagctcggtatcttcttccttttgaggttactgtttgatttaatggtttctgtttcaataaatcaatacgtcaacttttgttttgttctgaattttcaatatcagaactcgcgtagtgagctaactgaaatggttgtgtattttgttattgatttgagtgagagaacttgaaacttcctaacatgagtttaagaaactagagattttagttcgataatagttgatctgtctgttttctgcttaatcgctaattccgagggcatcgtacttggttgctattgattctattcgtcaatacatgtaacttgttcttgttctcgtagttctgctgtttccctttcttttcttttcagttttcttcaagatgtgtcacatatccttcgatttctttagctgttgccttctggaatcgtaaatatacacacatacatatcgtgaaatatgtgtatgcacatatatactgtgtgtgtatgtctacttccaatccaattataacacacaaggaattctttacactactagacgaagtaaggtgctctcttgctgtatgtttgaattttcttctacccgaagatctttatcatgtacatgtcaacctcttttctgcacttcgcatggcttattctaactgatgcaacttcgttgtttcaggggtattttgatcattatac

SEQ ID NO: 76569 - DNA, 505 bp, Carica papaya
  Intron number 1 from transcript evm.model.supercontig_4.16 9 (locus evm.TU.supercontig_4.169) derived from phytozome v7.0 (chr-ID supercontig_4; pos 3085566 to 3086070)
ttgtttctgcactctcttgcaacccttcccttcatgtaagtaattgatgtttattattattgatattaaattctaaccatataatgatcgttttggttgcttagaaaaacatagaaatatattaattgaaattgacggaacttcgagggataagttaaggttattcttttccttttaagtcccatcggaatccgaagatctaaatatgcacaagtgcgacatatttctttatgcttgactaaaaatataactataataaaaacgaaaagaaaacgaactgaaatgcaattttggtatttgacatacaaaaatagactatttcatgcttattcagtagggtaggttctgtttatttaagcgagatgaatattacttgtttctgaaattatattcttaaaatcttcatagagtttctttttagtaataaatagaactaattgaatcttttgatgtgtcctacattctgttagcttgctgtaagagaggttgttgataaggtgctttt

SEQ ID NO: 76570 - DNA, 235 bp, Carica papaya
  Intron number 2 from transcript evm.model.supercontig_4.16 9 (locus evm.TU.supercontig_4.169) derived from phytozome v7.0 (chr-ID supercontig_4; pos 3086109 to 3086343)
gcacacaatttaacttgcaagctgcgcaccaacttgtaatattctacttcataaccttccatctattgcactgcatttttaggagatctggttttgtttttcgatttcatttgttctaatattcttcgtgatattatttgaatatacattttttcaaacaaaaagaagaggctcttggtttgattgtgattttaatgcagatcactgaaagattgggatctagaaccccgaccgt

SEQ ID NO: 76571 - DNA, 353 bp, Carica papaya
  Intron number 1 from transcript evm.model.supercontig_104. 93 (locus evm.TU.supercontig_104.93) derived from phytozom e v7.0 (chr-ID supercontig_104; pos 603174 to 603526)
ggttctttcactgttgaggcatttctctttctcttctccctctcgaccccactctttttttcttttttgccttctgtttggttgctgagaaaaggaaagaataacttttttctaaaacgattcaattagcatttctaggtttagtttggttgagtgattttagtttatctgctccagataatgagttatttagggtagttttactaatgaatgcttaagtgctttgcttccatctacttcctcggttaccaaacttcgagatagacggaaattttgtggctcctcgtttgttttgattgaatttaatgtaattcacagctttattacaagcatacaccaaggacttgcaggaa

SEQ ID NO: 76572 - DNA, 1027 bp, Carica papaya
  Intron number 1 from transcript evm.model.supercontig_131. 36 (locus evm.TU.supercontig_131.36) derived from phytozom e v7.0 (chr-ID supercontig_131; pos 284178 to 285204)
cttacaggtttgtttttctaggtttcgttacttattgttatcctctcttgatagaccgttaatgcttgttactttttatgttcctaaaatctctggttaatgttactcgtagagcttaatttttggtatgttttgaattttgtgaactgagtcacctgcgacgatctcctttttcatgtttgaattatgagattattggatttgatcgtcagattttttatttatagttttttcgttgaggctggttttgttattgtatttcattttttcttagctgttgagttttccgaactatgtttaaatccttattgggtgagataatcgtaacgaagtattattcggaattatcttactaagtcttgcttggatacagtgtagtagtgaacataaataatgtgttactgcatgtaacagatattctttctcaatggaatgttcatctgtcattacaagtgagaggatgccaattgtagttttctgaaattttctgtgcaatatggaaattctaagacatcttttgccttccttttctttaaattcatgaatttgaatacatgcacctgtaggaacgttagtttagaagtttaagtgcgacaaaggttggagctttttttttaaaaaaaatgtataaatccttaatttgaattttacaattctaaacttcaatagaactcaaaggttgtggcttttattctaatttttttaatttgatgaattcaaatgttacaaagttgtgaatttgaagtacatggaagaaaagtaaaatttccaatttaggtctttaaggtataataaaaaagatgctagactttcaaaacttagagggaattttagaagtttttgattcttcaagcttttagattgtattagaaattctgggctgttagtttttttttttagcaataaaaatgatccacttgttgcttgatctaatttcatgcctaatctttggcaaacattttgtcatctggtatcatgtggttttgttgcagtgagtgtaaagtggcaaaaagaagtgtttccagct

SEQ ID NO: 76573 - DNA, 696 bp, Carica papaya
  Intron number 1 from transcript evm.model.supercontig_46.1 16 (locus evm.TU.supercontig_46.116) derived from phytozom e v7.0 (chr-ID supercontig_46; pos 1017803 to 1018498)
aggtttcatctcgtttttgttcttttccttcttcatttaaatcttctgagttcttctatcttgtgcttccttttgtccattttggttgtttagagtttgcatttttttatatattataaatggttcattctgggtcctctctgttcttcattttcttttaatgtttttagtaatacgttgccttttttctttgattgagctgtttttgtttaaggttttgtttctgctttatgatgatgattggtggttatcaggtaaattccttgtatatattttttgtttctccttctctttttttctggcttttgcccgtttatgtatatcttgctttctgcttatgctattattatatatgtgtgtgtgtgtgtgtgtgtgtgtgtgtgcgtgagtgtatatatagatccaataattgttctctatgttgcatgtgtaaggagctttgttgttaataattctacaaatttttcattaatactgtcaattttcaacacaagcccattatcgtcaccagcttcttttaaaaacaaattactcctgtttggaatttgtgcttgttatcttcgtttacctctctgatgtttctccctgcattttttcctctaaattgttctaatggcttaggttaatctcatgtgttatgaggatatcatcatatggtattattcatttacctttttctttcgctttgttgcagtt

SEQ ID NO: 76574 - DNA, 651 bp, Carica papaya
  Intron number 2 from transcript evm.model.supercontig_525. 1 (locus evm.TU.supercontig_525.1) derived from phytozome v7.0 (chr-ID supercontig_525; pos 1266 to 1916 reverse str and)
ttgaaggaacagtcgcactcttaggtattatatatatatataacatcactctttttaaattttcattaattattaattataaacaaaataaagtgtttaattataaacactaatttttaagtcatcaaatagtgatccttaaataataataataataactttttaaagtactaataatttagcacaacattaatattattataaacttaaaattaatcattgtctcacatgcactaatattaatcaaatcacaaaattgactaatttgtatatatatatatataaccaaatgtatgcatgcctaagttcactgaatcattgccctgctggacctatttgaattttggtttgttcttatctgcaattcatcaccttaggaaataaatattttcttacttcaccaaacaattattatcttattttttattttaacgattaataaggttaaaaaaattaatctagctatcattctattaggtttgtaattattcttccacttaatccaccagattaattttgacaactataaattagaattaccaattatattaatccaattcaacaatattaattaattaactcttagtaatatcaaatgagttttgtccatgtacaggagctcactctgtaggtcgagttcattgtgtgaac

SEQ ID NO: 76575 - DNA, 505 bp, Carica papaya
  Intron number 1 from transcript evm.model.supercontig_277. 15 (locus evm.TU.supercontig_277.15) derived from phytozom e v7.0 (chr-ID supercontig_277; pos 69755 to 70259)
gtatgccaatcaaactccaatttctcagagagtagagagagagagtgtgtatgtgtgtaatgaatgatatgtttacatatatagatggagatatttgttattggctgaaagcaaggatgtttaaatgtttttgttgtgaaaattctatttgattttcagattggatgcgtcttttattcaaaactttacttatagattgaatgtttagcactggattcatggtctgacgttggcttagttttgtttatgagaatggatatagaaccgactagtatcatgatttcttaaatccagaagaagaggaaggaaaaactgtcacagaacaaaaatatcaattgggttcgccttgttcaggcagaatagtttgatttttgtcaatattttgcaataaaacttgatatggtttttgttctacatgggagagttaaaattgacatctacttgaactgaagaaatgaatctaatggcaggtccatcactctagttttgtggacgagggaggaat

SEQ ID NO: 76576 - DNA, 297 bp, Carica papaya
  Intron number 1 from transcript evm.model.supercontig_3.22 7 (locus evm.TU.supercontig_3.227) derived from phytozome v7.0 (chr-ID supercontig_3; pos 1633222 to 1633518 reverse strand)
cactgtaatcacctttgaagatttccctttgcccggtaaaaatgctatttttcatcctactgagttgttttgattgccgagaaattgcggcaaaattaaatgcaaattgccgggttttgaaacttttcagtaggaaaaagaataattactatataaaagatcacaattcgcagaaagagaaagaaggccaacttgaaaaattgcattaatttaatggaagaaagtataagcttgaactctattcaaaagcaaaaccgctattggtttcctgactcgtttgagtttgttaatgcacag

SEQ ID NO: 76577 - DNA, 580 bp, Carica papaya
  Intron number 2 from transcript evm.model.supercontig_48.1 28 (locus evm.TU.supercontig_48.128) derived from phytozom e v7.0 (chr-ID supercontig_48; pos 747409 to 747988)
caaaaaggggttgggcttttcgtggcgtgcataaggtatttgatgttagttatggcttcaacatagtcatggtgcatttaagctagttagtgttacatgcagcaagtgttaagaactgcaggccctggattactaaagattttgtaccatggattttgtaatcttggtattatcctgttcggtttgagaattcccaacttttaaagcataggaattcctttatgctataagtcttgttttgtttatgagaatcttggtttagagaaaaagaagtgatgattttgtgtcagctcttttcatgagtctctagaaactaaaaattgctgttcttgctaatacattatcgagtgtgatttagataagcatatgtcaaaaaaatgtcttgtaaggcctttcatatgaagattgcacttttctagtctttttcaaaagaaacttgcatttttttgttcatgttctagaattttggtttcttgatttatataatttagtgttttttattttgactgaagaacttacccactccttgatacggatttgcacaggcaattatttgtggaagagttgggcaatcccctgt

SEQ ID NO: 76578 - DNA, 659 bp, Carica papaya
  Intron number 1 from transcript evm.model.supercontig_5.6 (locus evm.TU.supercontig_5.6) derived from phytozome v7.0 (chr-ID supercontig_5; pos 26912 to 27570)
gagatcaaggtactacgcttctttgtcatttctcttttcaaatttttatcggtcaattttcaatttgatcttaatattttgaaatccgattatataatacttcactctcatttactttgacgaacatatttttcactcacttaaacttcaatttcaatgcaactaattttcacaaaagcctttcagtaaatatgttctacacgaaagaaaaatgatctacgtaattaacttcgtaaaaccaatacatatcatagcatttttatatttgtatcttgacattcgtttgtatatgcagaaaaatttacggtaattccatttacattcaaaacagaacattacgaggtgctggatatcgtcagacttcattaatatagtttaaattttaattacgttagcttttttaataaaaatttaaaatgaactaatcacaattataattcatctacatttctaaccgtaatttctgtttaattcttaaaaattttgttaaaataattaataattaaaaattatttaatatttaataataaaaaaactaatataaggtcttatcaagatattctcgaacatcttcgtaatataacatatatttatttttgttttttgctctgtttgccattgaaggagcaaactgaagctgcagaaattaaaaaagcaaa

SEQ ID NO: 76579 - DNA, 629 bp, Carica papaya
  Intron number 1 from transcript evm.model.supercontig_38.4 4 (locus evm.TU.supercontig_38.44) derived from phytozome v7.0 (chr-ID supercontig_38; pos 817018 to 817646 reverse strand)
tagctaactatcttccgaaccgtgaggccatctcggttgggcctaaaacttggagttgttttttattcttcaagcccattaatcttacttaggccttaagcttccttgggacaaactttgcccattcctgggaataatcccatttaggaaagtgttcatggatgaaattgctttcctattgtggacattcctcattgatgcaagattgcacctttggaactaattttgggatgtctaggatcacatcacccatgttgtgtataagtcatgcaaggtaggtattttgtggataaagttagatgtagatcttattcttttagacctttaaggatttaacgtgatattagatatggattgcttggaagcgatcatgccgtcatagattaatacgataaaacaatgactctttgtgtaacaccacaaacctctgtgttcaaatgttgtgtttttaaacttcatgttttagtgcgtcatgaccttggatgtttattttaaactttagtcaatatttgaaatttatttttcttagccttattttaattttcaaaattatttattttattgtttatttttatttttaattatgttgtactaaaattatttggaaattttagtgcatcacatcacct

SEQ ID NO: 76580 - DNA, 561 bp, Carica papaya
  Intron number 1 from transcript evm.model.supercontig_43.8 8 (locus evm.TU.supercontig_43.88) derived from phytozome v7.0 (chr-ID supercontig_43; pos 1165773 to 1166333 revers e strand)
aggaaacatacaaggtatccatcctgcttcttagccataatatattctttgttttggttctccaaaatgaggtgcaggacattaatttcattggatgaacagtgcctcaaaatttgagcttgattcctttctggtggttcgttaattgaggctctagtctgctttgcttggacttatcatatattattgagccagtcctctctctctcactctccctctttcctcttctttttcttttttttttttttttagtcatccattttcttcaagtggcataatatattttacagattgttaactttttggctaacctctttatgttctgaaatcaagcaatatgagcaaaacatacatatcaatgtaaataaactttatgtttgatgttttagttgttggtggtcctgtcttggaaatggtagaaacagaaccttaagcaatatttgcttggtatatggtatcagttctaatgcagacagttaggtggatataaattttgaacatttctttcttgtttgattaaatccagagcttgaaatcaaggggtatccgctttcctggtcg

SEQ ID NO: 76581 - DNA, 715 bp, Carica papaya
  Intron number 1 from transcript evm.model.supercontig_537. 2 (locus evm.TU.supercontig_537.2) derived from phytozome v7.0 (chr-ID supercontig_537; pos 26562 to 27276)
gcaattttctggtctatttctgctaggcaaccagggtacaaatacttccactttttgctctattttagtatttttttttaaatgtaatattatttgttttcttctctttcatttttgaagaataaaagcattttgaatctttttcaagatctttctcaaattccatcggtctaacaactgctttgtttgtctataatctacatacaggctggttttagcagcaaaatattatttttgcatttttgaaaattttcattgtctattggtggttttcttcctcttactttattggggttatagaagcaattggacttctgtattatcttgtataatatggaacacagactgttgaaactgaactgaagaagtaatctactaaactagcttttggggctttcaaactgcattttggaaatttagagtatctctaaatgggggctcttgcatatttagcacaagatggagaatggttccagtggcaagtactaattacataacttggagggattttttatgcttcattttctctgctttgcaaaaggacagtttataactacgaccaataagggaattcataaatgactaggcagggattctataatatgatctgtgtccaaaactaagccggctttttggggtccagtacttccttatattatatgagagttggcttttatgggagaatatgaatttcacagggtcttagagtggggcg

SEQ ID NO: 76582 - DNA, 735 bp, Carica papaya
  Intron number 1 from transcript evm.model.supercontig_351. 3 (locus evm.TU.supercontig_351.3) derived from phytozome v7.0 (chr-ID supercontig_351; pos 155882 to 156616)
aggaggtagcaacatattacttccttctgttattgatattgaaagttttgtttagttaaacccgatgctgcttggtttgatagctttggcgtatttgtaaaattttgtatgtgaagtaatgttatcatatttgatttcacttattaatcttgtcgtttcttgctgctaatagcagatggaaaagcaaatacattctcttcttttataaacattgctaggattaaagtgccaatagtgctacaatggagatttacagaagacacgggacattatgttcattagcttattgataatatatattttaccttatgtttggaatttttaaaattaaatccatatgaaatctgtttcaaaatgatttcatatagaactgagttaatgtcatttcaatttttatcaagtttaacggaatttggaggaataaaagtctgaaatatgttttgcatttttatttatgtatttggaatataatgtctgtgcctccttttaattccaaaagatcaaaattcatttgcaaatgaattcattgtccaatccaattacatagaaactgaaattttgatgttagtatgtttctgacaaagccttacttcttttaatgttaacataagaagtatgtcaggaactctaaatatgcctgttttctactttaaaaaatgaacgtcttcatgtctttgcttgtctgatgctttactgttgtttatggttttgttttcatgtacagacccttgtttc

SEQ ID NO: 76583 - DNA, 689 bp, Carica papaya
  Intron number 2 from transcript evm.model.supercontig_50.7 0 (locus evm.TU.supercontig_50.70) derived from phytozome v7.0 (chr-ID supercontig_50; pos 736508 to 737196)
agactaattgtaaggagagaccaactttgaagaaggtatgtgatttattttcccataaaatattgtcgattttgttttgtttcgtcactgtttatggtcgaatgctttgattgagagtaaaatagctttttcctttctcaatatttcagtgacgataagatatagttgatgttatttcaatatttagatactgggttattgagcaattgaattttaggcaaaatctttttaagattttatgtgtttttttttgttgtttcttttctttcccatatgtttgttctcccttattgagaaaattcactagtgaataatgataaagctggttaaaagagtctatcatgcgttggggaactgagagcctgcaggtgagcagtgcgcttgtaattgtacttggtatgtgcaatgaggttcagcacaaagaagaaaaaagttaaaaagaagcagaatgggttgagggattttaaggtatgattatgaatgaacgagggggtcatggctttggtgaggtgctccaggctccatctatacagtacttttgtactgctttggtttaacaaatgaagcctaaggttagtgatgatcctgatctcttttgactagtcttgccaacagcattggttgaattgaaagtttggcatctgggttgctcaggatttacacaagacacggtttgtttttggctacat

SEQ ID NO: 76584 - DNA, 617 bp, Carica papaya
  Intron number 1 from transcript evm.model.supercontig_211. 36 (locus evm.TU.supercontig_211.36) derived from phytozom e v7.0 (chr-ID supercontig_211; pos 271966 to 272582)
gttgtttgtgattgtgtgagcattctcaagatttgtctgggtgctattgtggtccacgttgtaatttcatttacttttgtgttgactcttcttcttatataatgtggaaactcttattttgagatttgacaatgagataattcatgatctgagcctatcataccactatttatagttatcctaaaatatcgttgtcagcttcaagatgggggcatgctggttactcttgaagaatttcattttcttcataaggagttgaattttatgtttttaatctctttgtttctgtattcaaatctctaggttggactctctaattgccagtggcataaatctagatgcatattgcagaattagcttgattagcctgagtcttgactcctctctacttaactgtcatatattttcaattactctgctcgttgtttgatagtgagcttaagaaaagagagcactgcttcccaacttactagtaagcaccacgaatgtaccccataaaagattgcactgtttgtccaagccatataattttccagactcaaccatgaaatgattattcttaatttctgaaaaaattgggtacaggacaagggtcgaccattgcccaagtttggtga

SEQ ID NO: 76585 - DNA, 491 bp, Carica papaya
  Intron number 2 from transcript evm.model.supercontig_36.1 29 (locus evm.TU.supercontig_36.129) derived from phytozom e v7.0 (chr-ID supercontig_36; pos 1028183 to 1028673 reve rse strand)
agcaagcttctgtgagaactgacctggaattggcggtattttttaatgcaccggcttcttcctctttctctatctgtttatcggtctttttccctaaaaacgcgcttttgtctatttgcgatttctctgtaaatatgcagtatatgtgcagttatgtactttatgaaacaaatcgctattgtctttgagtatcgacatctgcgtgcatgcgtgtgtatggatctctgtgaacaggcatgtgtctgtgtgtgtatgaatgtgtcctatcatgtgtaaaggcaaaataaaattttacttggataatgtagaaagacagcatgtttcactgaatgtcattacctttttaccttaaaatatttagtgtacggttttgttccgtcgtccccgttattattgaagtctagcttcacctattccatgaggtgtttgatattttttcgtttattgacctgtcgttttaataaatatagaattctaagctgaaaaagtcc

SEQ ID NO: 76586 - DNA, 984 bp, Carica papaya
  Intron number 2 from transcript evm.model.supercontig_110. 34 (locus evm.TU.supercontig_110.34) derived from phytozom e v7.0 (chr-ID supercontig_110; pos 630821 to 631804)
catagggaaaaaactgagggtaaaagcaaaaaagggtaatgacgaatgtgtttgtgtgtgtgttttgaaggttttattattttatttgtctatttaaaaaaatagaaaagaaaagaagagtaggaaacttcataaataatgactgatgcttactcaagcatgaacctcccaaaaaaaatcattttcttttgccaggaacagaacattttacatcacaccctttttacattttatagtaatgtgtgctgggacatctcaggacaaccttaacttctccatcatatggtatcatgtgaagctagatttaccattttgccctcacaaaaagggtcttattcccaaaatactattcggggcacataaagcccaaacaaatcgcaatttctcagctaaacaaatggaaatcagagggcccacatcagaaaatcaaaagtcaaatacccacagatcagtcaaaacacatatcacccctccccacaatctagtccagtccatttcaataaacaagcctcagaccgcataatttccacctaactcaccgccccgtcagcttatcatccctctctgcccagcaccctgcccgatctgcccgaccctgcccgtcctggctcttccaagtaccccagcacacctttccttttgccgtctctctctttgcatctttctcttcgatttctccctctccctctccctctcattctcaatttgctcgattttctctctctaaattttccacttattttctctctctagatcgaaaagcggctactgttaatcaatcgcctctctcaattgatcgctctctatgttgatggatctgggttttgattagatcggacaagtctattttccgtcaaaaccctagaatcgggggattcgattggcttggcggataaactagggttttcgttggggaaatgatgatagatagggttttgtctggatctaggttttgaaaccggtcagaattttcgtgaaagacag

SEQ ID NO: 76587 - DNA, 515 bp, Carica papaya
  Intron number 1 from transcript evm.model.supercontig_139. 7 (locus evm.TU.supercontig_139.7) derived from phytozome v7.0 (chr-ID supercontig_139; pos 40932 to 41446 reverse s trand)
agaagctcgggcacgatcttggtcaggaggtaatttccgtctctgtttatgcttaaacatgtccgtgtaattttgcctatgacaaatggtttagtagaatattgaattacctcaagtgaatttctttgattaatgctacctttttaagacaaatggtggtgatagacctgaaacgtttctgaaattttctatttatgaagagaagtaacgagcctggtttagatgatcagtacttgatgttgcttagatgcctatgatcacatgattgactttacatttgccatttgttattacttgaaatttttctttgctttgttttcacaatcagattaaattttaatttcatgtttttttacccttcaattattagaagatgagtacatttctatataatttgatagttggatgataacaaatataaatatcaaattgaactaatctgttagttgcttgatttgatgatggggatgtgatcaacaggtgacggttacgagaagctgcagttttggatcttc

SEQ ID NO: 76588 - DNA, 318 bp, Carica papaya
  Intron number 1 from transcript evm.model.supercontig_353. 1 (locus evm.TU.supercontig_353.1) derived from phytozome v7.0 (chr-ID supercontig_353; pos 8744 to 9061)
acgacaataaggtattttcttgatcctgttaagttagggcagatttatgatctttcagttgtagtatgttatatatatgtatatttataaatatatggatatatttgtgtgtttatataagagtctactcttctgcgtattacattcctgtcaatgataactgagtggttttgttttcatttgggacgtgaatatgtttctattagaatttgttttttttttttgcttgaatctgtgagtgtcttttgagggtttttcttattgtccttttctcccttctgttttactattgtttttatgatttaaacgttcagctat

SEQ ID NO: 76589 - DNA, 619 bp, Carica papaya
  Intron number 1 from transcript evm.model.supercontig_10.2 01 (locus evm.TU.supercontig_10.201) derived from phytozom e v7.0 (chr-ID supercontig_10; pos 2618818 to 2619436)
tctcgtctcaatcgtcagatctctcataattatctgtacgtatatcatcgttcgtcgtctttcatttctattttgatttgttttctttcttcgctcttttttctccttttagttttctgaatcttttttaaaattttcgtgtttttaactttacttcgtcaaagttctgtgaatgattagcatgttgctggtttgtgaaatgaagcgaagatacattaccccgcgggagtcagggaaatatgtgcttggccggtgggaaattcagttcggagagaagaaagaaaataaacagttcttgatgtttttaagaaaaattagagtatatcgctgtgtatgaggaggacttatctgagtcctgtttcgcgtttcttttgcttttgatcaaaatgttttgaagtaatctttgggttctagttgtaataatcttttcgttggccagatttctcattccgttttaagagaatttattttgacgtacgtttttttgtttgtgaaaattgaaggacgttctttatggcgtcaaattctgtcagttctgtactaaacatgagactgatgattgcggttcaatttctgctgaattaatgtgttcacttactgcataacaggtgtttactcg

SEQ ID NO: 76590 - DNA, 403 bp, Carica papaya
  Intron number 2 from transcript evm.model.supercontig_23.1 63 (locus evm.TU.supercontig_23.163) derived from phytozom e v7.0 (chr-ID supercontig_23; pos 2444443 to 2444845 reve rse strand)
ttgttcctggcactaaggtattttgagctcctctgcattgttctgctgctccttgcattttttgaagtaaattaacttaggaagttcgagagaagaattttattaattatgtttatttaattttacgtggatggcctaactaacaagtccgaatagtcagaacacaaaatatgtaatggatttgttgaatctttcattttaggcagccctattcaaggacttttaaaattcttgccaaagggacaatgtgtaggagtggctgtcctgtgctttggttttttcctcttatttctttgtctatttggaaaacttttggattcttatctacaattaagtattgtttgtatttcctgtttgctggctggcaggtgcgtctggaaaataaagctgcaataaatagtgg

SEQ ID NO: 76591 - DNA, 711 bp, Carica papaya
  Intron number 1 from transcript evm.model.supercontig_16.1 29 (locus evm.TU.supercontig_16.129) derived from phytozom e v7.0 (chr-ID supercontig_16; pos 1953720 to 1954430)
aggttgatttcccgttctaattttttaaatttatgcttattttaagctttccagcttttctgtaggttctgcgagtgacgttgggtggatctgggggtgtttggatttaatttacaattgtcgttgtaggtatcgaattaggttgcaggggccatagtataaggcttggattggtttggagtttttgtttggttgacgagaaatagtttggggtgtagaaggaacattagggttattctaatttgattatacataaatggggaacttactcataagttagatatagtgtcatctagtcctgtggcgacgtgtgaaaatggtatcttgcatcttcctcagctttcacggtgtcaaggcggactaaagttgaaaatcttgtcaagtagggttgcctgggtgcattttacattcattctacttactaagtcatccctcgttagatgcatttcctgttggatggataaactttaatggtttcagtttgtctaggtttttgagaagtcactattggtattgcactccgtatcctttgttttttgttatgttgaacataccatctgataaatgcaggtgcgacgactgatatcttctatatatgcatttcgtaacatgtgtgcatgcatgtaagcatcagttttaactgcttaaaaggttgtattggtgtagcattctttacatgttctcttgtttgtctggtttatttacaggaag

SEQ ID NO: 76592 - DNA, 498 bp, Carica papaya
  Intron number 1 from transcript evm.model.supercontig_162. 11 (locus evm.TU.supercontig_162.11) derived from phytozom e v7.0 (chr-ID supercontig_162; pos 61920 to 62417)
gaagaagaagaaaggaaagcccaagtaagtttttttttttttttttttttttaattttgaaataaattatctgatcgactgtaaataattaattttattattttaattcgaattaaaatttactttaatttaagtttaaattatcataatttaatttccaaatattttttaaaaaattaaatccctataaatttaatattaatattaatattaatattattttccccgctttcttctacttgtgtctgctttctccatttccaagcaaccgggagaaccagaccagagagtagtgtaagcaagatcatgatgcgatacaaagaggtaccattttcttcacatgctcttcgaatttttctactttttggattttggcgcatatgatttaactcatttgatactttcagtagaatatatacagtaatttggttagtggatcttcttcaccatacctataattcaggaaaaagaggcaaagaaggaagcgtttaggaaata

SEQ ID NO: 76593 - DNA, 821 bp, Carica papaya
  Intron number 1 from transcript evm.model.supercontig_11.1 5 (locus evm.TU.supercontig_11.15) derived from phytozome v7.0 (chr-ID supercontig_11; pos 308259 to 309079)
ttcgaaccggaatttccgttcgtttataggctcaggtactattttactgtttgcatttcacattaattcttgttatagtttggtttgcgtgttatttagtttttcgagcagaaaatttagctacattttgaggacttttatttctctagtgattcttcacttgaatgttcattttctttttaatttatcggctttttgatgtttatatgttgattttttttttatttgaattataattctttaactggatatagggaaaaaaaatttattgccttatcctttcatgatactgaattatagaattgagctgcaacaaaattgtttgataatatcaataactacagattgttcaagttagcagtcaactcatatcagaacgattgttgttgttccatttattcattggtttgaattttttcattattttatttcatcttgtttggattaataaaaataaaagacgaatttggcaaccaatatgagtaataaatatctttctcaaacctggaaggatgttttagtttcatttattcattttgttatggccatctaaatccatcttgttcagattaataaaaggaaaagaagaatttggcaaccaatgtgaatgataaatattttccctccaatcaggactctttttcctgctctctttctggttccatgtggattgttgtgtttcctgttataacagttttgccaattgcaatagcgttatgattcatggtgcttgcaaatggtctagttttcagttgaaacaaaattggttttttctttccccatcaggagatttggaaaatctacttggtcagagtagtaaa

SEQ ID NO: 76594 - DNA, 406 bp, Carica papaya
  Intron number 1 from transcript evm.model.supercontig_18.5 (locus evm.TU.supercontig_18.5) derived from phytozome v7 .0 (chr-ID supercontig_18; pos 22825 to 23230 reverse stra nd)
agcttgcggtcttcgcgtcacctccatcaaaatcggttttacctcttcttctttttcgttttcgttctgcggccgcttcttgtttttcatgttgattctctgtgtacattttctcgttgtttttttgattgttgctagcagcgtaaattatttgatttccgaaccgatagtcgaactttgtaattgatgttttcccttttcagacctagttaactttgttatttgtttttgagaaaatattgctcagtaatggcttcgttcactggccatggtgatatgttttttattaaactgaatatgcagtaatggagaaagtaggaatgtttattgttattactccattttcctttattcttggcatataggtgattgtttctgtgtcttgcagatccatatctcaacacag

SEQ ID NO: 76595 - DNA, 839 bp, Carica papaya
  Intron number 1 from transcript evm.model.supercontig_2783 .1 (locus evm.TU.supercontig_2783.1) derived from phytozom e v7.0 (chr-ID supercontig_2783; pos 3015 to 3853)
ggcatcgagcagaggttttgtcagcagtgcagcaggtaggttctactttttgcttcaatttctctaaggcatttgttgcttgaatttaggttttgataggaactctttgttaagtttctataatttcctatcaaatatcagatctaccttaatgcaaacagattctgcttcaaatgaagcagaacatgcaagtgatgaaaaggttgactggccttttggtgttgattgtgtagagtcatataatatgggtaatgtttgaactccatttttcgtatttggctggttttacttataaaaaggttgtattccaagtttctggcatgcctcatgactttccagtttctgatttgatcacatatttatacaaagctatatttgtaacagatcaacaatgtttattggattcatttcggcacaatagtttaactaggagggatgcaaattctaatcagaagattgtaaaattgagctcatataaaattttcaagggaactagtaaaatacattctcaagtccatcaaagtctatggaaatcgaaatttgttttctcaatttcacttgcaactccatatgaactgaatttttattattctagtgagatcttcacacacccctagttaataagttgatatatctataaatgttcaaatcaaacaataattcttgattttttccaataatagcctagatgctataagtatcattttgtgcctttgacttggcctttttttttctcttaaaggaatgtgcccttcccttaacctatttgtggttctcacttgttttattaaatgttactgtcttctggttactcaggttccatttgctggctgaatttg

SEQ ID NO: 76596 - DNA, 706 bp, Carica papaya
  Intron number 1 from transcript evm.model.supercontig_17.2 20 (locus evm.TU.supercontig_17.220) derived from phytozom e v7.0 (chr-ID supercontig_17; pos 2581218 to 2581923)
aagaagaagattcaacaaaagaaaaagcggctaaggtgcgaaagaagatatttacatatatgatatttgttagttttcttccatgaaacattagctctatatacatacatatacatatatatatatatttgatggattagctgatgcttatatatattttttgcaaagatcatatactcggatagttaatgaacgtatatcttaatctaatccatctagttattgcttacgatatcagataatttaatttgaagggatgatccctgcaatagcagagattttaatatcgactacaagacacgggtacatacatatatatgtgtgtatatacatatatattataattaaaattcaaaactcgtgggtgaacagctccaagatttcttgtgtaattgtgttccttccaagttaattagtaattcatggaaagctctttctttttttctttttttttttcagagtttatttacgactacataaatacagatacataaatatatatatatatatgtatgtatagatgtgtgcatatttatctgcatgtgcatgtatgtatggtgggggcatccttatgtttaccgaagactaatattaatatttttgtttatttatgaaattaaaataatcaagttgcatggtttataatattaattatatgaattaaattcctaatttcaggttggaaccaagagaaagaatcccgatc

SEQ ID NO: 76597 - DNA, 488 bp, Carica papaya
  Intron number 2 from transcript evm.model.supercontig_17.2 20 (locus evm.TU.supercontig_17.220) derived from phytozom e v7.0 (chr-ID supercontig_17; pos 2581945 to 2582432)
cacctaatcaaaaagatttaggctgcaataaacaggtaattatatatatatatatgtatatacatattaagaatctttaattattggctccatgtgaattatataaagaaaacgaccgttaggagatacgtgggattaaaatcaatcaaaacaaacaatttgatgaactgcaaatccgatgtttcaaaagtcttactaataattgaattaaacttaattttcttcaaagtcggctcttgatttcgaagactttgaccatgattaactgcatgctgagacacaactgttgatgacttttagatgccgtcgtattccctgctcatcatcaacttacgctcacaacacccagctagtttctcatttgcattgcactatgttatatatatatatatatatatgtatacgtatacatacaagcacagaccctaataaatataatgtgttaaactgcaggaacctattgtgtcaaacacagaaagctcaaccat

SEQ ID NO: 76598 - DNA, 719 bp, Carica papaya
  Intron number 1 from transcript evm.model.supercontig_106. 36 (locus evm.TU.supercontig_106.36) derived from phytozom e v7.0 (chr-ID supercontig_106; pos 475658 to 476376)
tgccattatcacgcaactaaagctcaggtttttggccggatatttcttcaaatgattatttttttactttaaatttctcgaaggttatggatttttcggaattggatatcgtctgttggcaatgattgtttgttttttgaagtaaccagttcatgattcgcatttgtttgctacttttcttcgttgggttttataaagttaacatctttatctgtcattttagggagattaggagaattggatgatgagcaagtaaaaagaaagaaaaggaaaattgggctcttgtatatttgtgcggctgttgaccaagtagaagaagtgtctactggttgacgtttgagatgataaatgaaccctagtgaaagtcttactgcttgctttcagtgtccttttattaaccagaatgggttgaattttgctctgatctgaaagtatgacccagtcaattccagtataatttttcaacttagccctctaattttggttttcaatccaacattttttttaaaaagaaaaaaaaaaaaaaaagagtccacatagaagtaaaacggtaattaagtttgattgtagccatttaattttgactcactagaattgctcggtttgtttcttcaatctgaaactttgttgtctctcttaatcttccccaattttgcttttgggttttgattaattattctttacaagctttcttcttgttacttctgcgtaggagggaa

SEQ ID NO: 76599 - DNA, 850 bp, Carica papaya
  Intron number 1 from transcript evm.model.supercontig_48.1 98 (locus evm.TU.supercontig_48.198) derived from phytozom e v7.0 (chr-ID supercontig_48; pos 1099985 to 1100834 reve rse strand)
tttgccatccttccctttgtctacttcttggagtaattaattttcttcataccttttttcaaaagagctgtcagcttgccatattctctgttttcttttcttggtatcttttttattttctttctttttatttttaaattgaagttagtcccctctatcttatgcctatctctatattgcgaatccttactaggtgaaagatatgggttttccctcttgcatgtctgtgaaaacaggggagacctttgatctcttgatccgctaatgcaaaaagctctgttttctttttcaaccgaagattaatctgagctctagttaattatttgttaatcttccttctctaagtgatttttggaaatgttgattttccctagtcgcatattacgattaactgaagtggactctgtttggttaatgagaaagcggaagatgcatcaataattttctctttcttttcttcttgttgattttctgaaacggtaacatttattaattgcacaacacatgcttcctaaattttgaactaactgcaatcaaattggtgagaaagaaacaaaaaagaaagcataactggttcttattaaagatttaaaaatatttcgtgggaaacgtgtgtaactcctggtcaatgcaaaaaccaagtagtcaaattgaagtggtttgcaaggtgtacacgaaatacatgcatggctgccaattgccaggttcgtttcatttgtcagcttctcctgccaaacacaacgtggcagaagagaaaatgttccagagggtggccatttaatatcggtttaatactaagattagtctcattttgatgcgtaatttcaggaaaactctgcctcgggtgaca

SEQ ID NO: 76600 - DNA, 448 bp, Carica papaya
  Intron number 1 from transcript evm.model.supercontig_59.1 02 (locus evm.TU.supercontig_59.102) derived from phytozom e v7.0 (chr-ID supercontig_59; pos 917597 to 918044)
tgtaagatacataatatatatatataaccataagttatcaaattaattacaccataatcatcgtcatcattttcttcttctcattttctatgaactctttaaacctgcagctattatatattcatatacagacaaaggctgtgtgtttcacccgtgtgatatttttggtttgagctctgagttatagttatctttatcaattaaaacaagggttctccattaactgaatggtaccagtactgagttaaatgataattaatatgaataaatcattgaaatatgagattttttaaagagaaaaatcaacttcatgaagaagtcattcaggaagaaatatatattgagaaatcaaaggaatatatattaccacgcatgcatgcatttgggttaacagttttttcatggatagtttaattttggatcatgaatttgatcaggtgataaatcg

SEQ ID NO: 76601 - DNA, 646 bp, Carica papaya
  Intron number 3 from transcript evm.model.supercontig_3.50 (locus evm.TU.supercontig_3.50) derived from phytozome v7 .0 (chr-ID supercontig_3; pos 290614 to 291259)
gttgcctgagtcactttgaggtactatatagtattatattggagtagaaatatgcctctatatgattgaacaacttattagcttcttggaatatcatattaggctgtcctagtctagtttgttggttctcttggttttcgtatcttggttaaagtatattttgggtttgtattatatataggaaaaattatttggttagttgatccaccatgtctctggacttggtttttcattttaagtttttgattgaatgccatgttgctcggagtctcaaattttgatgctggtttagcatctggataatacgaagatgatcgggaagactcttggagtagaagtgttggtgtgtcagtgttcccaagctcgactcttagtcttagattagatctatacccagactggacaccagcattgaagtcggagtaatgtagattaaatctattttctcttacttgttcctcagattttcttatcagaaacttcatcttgacaaattcatgcttgaagagaattatccttagtttactggtttgatcttgaaatttacattattattttgctaaatatttaattttatgctataaatccctcttttttcttttgcttttcttcattttgatggaaaattgttcaggttcttacagct

SEQ ID NO: 76602 - DNA, 687 bp, Carica papaya
  Intron number 1 from transcript evm.model.supercontig_33.1 70 (locus evm.TU.supercontig_33.170) derived from phytozom e v7.0 (chr-ID supercontig_33; pos 1718959 to 1719645)
gtgctgagaccgaggaatcgcctgatcataaaatcgtaagtcctccatttgcagtttatataagattctttatatggttcatctgttttcttcttcattattgatatattgttgatcttattatttaggcactctatttgataattttctcttttatctaattctctgctttcgttttttgaatctacgagcgtcaaaacatgttattggaaatgtatgaagatcgtctttgcttttagcggggaataagagtatctccttttcctgagaaaaataggctgcagaaattggaatttttcatttttttttcttaatcaccattgggaaaagcaaacagcttgaagtttctattaaaaaaactgacaatggactcaaatttattaggtttgtcattttttttttctctctgaaatttgaagaatatctaggaaatatgttgattctttgtgcagattggctggaaaagaagcataggctatgtctttttgtaatatctaaaacggctatatgcagctagcgccactctgttatcagggggacgatttaattttttttttaatctttagttttgtttggtatagaaattccactcgtgggggtatatgagctgaaaattccagatgcgttgacactctatttgatcttcttacttattttttatattacaacagctagaagatttgcctg

SEQ ID NO: 76603 - DNA, 525 bp, Carica papaya
  Intron number 1 from transcript evm.model.supercontig_32.9 (locus evm.TU.supercontig_32.9) derived from phytozome v7 .0 (chr-ID supercontig_32; pos 172174 to 172698 reverse st rand)
cctctaaaaaagccaggtggtttattctttccatttacaaaataaaatggtcacttcatattcacacaagcttgtaccatactttgaaataaggtctgtgttttacaaaaacatgacttctgcttggtgtaaagaaagtactccataattgacttagcaagtggatctttaagagtttggtgattaattctattgaaatagaaagaacataggtagaaatatgcaatattttaagttacaataaattgcatggtgtggatgactagtttctgttaacggagaggatgtcccctagatttatttgaagtaatcttctttcctacttgcaacttttcttcgaccagatagcgtctgtcatttggactcttttaatatgattttgtgatggcatgggaatttatcaaactgtatgtaggttgccatacatgtttcttgttcaccagtatatcaaatattgtcatgttgttgaagattaaatatcttttgccagggatcgagtaaaaaagctgcgtgaatcaatattca

SEQ ID NO: 76604 - DNA, 494 bp, Carica papaya
  Intron number 2 from transcript evm.model.supercontig_45.5 9 (locus evm.TU.supercontig_45.59) derived from phytozome v7.0 (chr-ID supercontig_45; pos 1634397 to 1634890)
cgactgtggtacactgttttccaggtagtactactactcctgctttaagcgttaattttctgcgctttaatctttttcgtcttttggtttttctttttttttttttttgatctattgtttatatgtttacattgtagaagaaataaatgcttcatgacatatactgcttcacggtttctgggttccaattaaatgcgaccttattaatgattatgtagtaaattaactgatatatgtagaaattagtcatactcagccaattactacttactcaattattagtaagtcattttttctgaaaaagatttctatgtttaaatcaagctgtctttccatgtctcctttgttatgttattattgttgttatgcatcaccttttattagacctatgaatttcttccatacatatatatatgtatactgaaccttaggcttttgattattccttaattcaaacaggaaagacagctttatcacgcacagagctttttgtg

SEQ ID NO: 76605 - DNA, 736 bp, Carica papaya
  Intron number 1 from transcript evm.model.supercontig_12.1 93 (locus evm.TU.supercontig_12.193) derived from phytozom e v7.0 (chr-ID supercontig_12; pos 1737646 to 1738381 reve rse strand)
gtgacgtggcggaagattggccattcgatgtgagttttatctgtttgttttattttaagcagagcaatttttcgcgtatagttttcttctgataatgactgaaagtagtcggattgcattttggaagtaagaatcttggcacttttttttttttttttttcttgaaactgtaaagatggttgattggttagcttacatgtagcttgtttacccatttttgaagtggaaattacttccaccttggtgtaatgattatgaagccaagaacttgagctcttttatctgcgaaaatgatatgaaatgtataattttaggtgtttctagctaaattttgcttgttttattggtgtattgaaagctggatttaatttctgtaagggacagaagcacttatgctctggttggaaatgctttttacggctttaaatagtttatagatagcttttccgaattagactttgaattggcatgtggttgaagaagtgtaaggcttgaattctttgtggtccactaacatttgcttatattcgttcatcttaatctccggctgccagattagtctctttgagtaagttcttgctgttgatatgtttatgtttagtaatgactaacctcaatgagctaactggttatctatgtgcatgctagtgggctcttaggaggatatgacatgtactattaattttccttttatttctcaaatgcttttggtttcattcgataatatttctccagg

SEQ ID NO: 76606 - DNA, 671 bp, Carica papaya
  Intron number 1 from transcript evm.model.supercontig_14.6 2 (locus evm.TU.supercontig_14.62) derived from phytozome v7.0 (chr-ID supercontig_14; pos 654960 to 655630)
gagtgtgctgaggtgagtgttccctgcatcgtttagattgtgaattggggtttgattagcctgcgagtgtgggcgtcatacatcacatgtctgaaggcgaccaacttgactgcttctttgtcagtcttcctctggacagaacaagtggataactcattcaatcggctgctaaaatttcaaactttaatttgtcgtattcccaggtcttcgtggattgtgtcaaaaaattctcaagtatagattctaattcattcataagaattgactcataccaatttgttagggtccatactaacagatctggttatgggacactgaacatagaaatcagcaggaagagaagaattatttttagattttctgcctttaccagggaagactatggaattaactgaaagtgttagtttaagtagcttcagttttacaatgcagacttttgcgtgttgtaaccagggattatgctttacaatgatactgtaatggtttaagtataaaccaagggcgttgactataagaagaaaccagaaaaattttaccttcatgtagggagtgaggttactctagcgaggattaggaaacctctttaatgttttattagacttgtaaatttttttgcattgcacccccttggtgcttcttgagtatatatgctttttcctttcagaaaaaag

SEQ ID NO: 76607 - DNA, 571 bp, Carica papaya
  Intron number 1 from transcript evm.model.supercontig_34.7 0 (locus evm.TU.supercontig_34.70) derived from phytozome v7.0 (chr-ID supercontig_34; pos 630536 to 631106 reverse strand)
cagaatcctggcatattagaggtacatgttttttcaattgatttatttaaaaaaaaatgttttttcaattgatactggtgttacacaagtccaatttaaccgtttgtataagcttgcttttacaaattataacctcttttaagaaatgcactcttttctcatttctttttatcaggttttcaaacaacttctaaaaggttccagtaaatttgctttcttctgcaaactgctacaagttgtgatagacttgtcaatttgtacgaaagtatagtctcaaaactttcatatttttttaacccaaaagttgaaatcactaattcttgttgaagtatatcatctgatttcaccatttgttagaacagaaagcaaatgattgttggctattgtttttaaaaaaaaaaattaaaatgcttcctctttgttgacttttgctctgcgaggttttaaatagttcctagttcattcttgtcaagcttgggcagagaaaggtgtttggtagggttagaaaactgcaattttcttatatgaacctctcacttatttctcttcctcttcgatatattattccagg

SEQ ID NO: 76608 - DNA, 803 bp, Carica papaya
  Intron number 2 from transcript evm.model.supercontig_112. 73 (locus evm.TU.supercontig_112.73) derived from phytozom e v7.0 (chr-ID supercontig_112; pos 596872 to 597674)
agccaatctcgaatttgatcctgacttccgtccaggtttttcttgtgactaacagcccttttgctttctttgataaactgattaaacatctttgaaattttaaaccccgatgtgcatttttttaataattattttagtatgttgggttcaaatgttgagacaattatttatcccaactgatacatgtctaatatatttatctgggatttgatttcaactttttacttaacggggctgaaaaatggcggggccgttcgatttttatttgtcttctctgttatatgagtatgttttcttacgacatatgaaaaatggaggtttatggtaatctaaatggaggggatgttagatttgtaatctaaaattttttgaatggtttatgataggtgattggtgcttctttaaattaactttgtgacatttaatggtgattaaattgtactatttgttattattggggtttatcaaaattagcaaattctttttttttttttttgtcactgtttgggtaaattcgacaaaattggaatttctatgattatgataatgagataaggattcattcttttagttaattgatttaggagaatcttaaatcatttcatcaacctagtacttatgaagactttagaacagttgggcagtttttcatttgattaaaggctatttcattatcatttttctctttcgaaagagtatcttcacctcctgtttattttactgctctgatttatgctaatatttcttggttctttgtggtaaaatactgcttggtagagagcataacttgtttcccctcagct

SEQ ID NO: 76609 - DNA, 744 bp, Carica papaya
  Intron number 1 from transcript evm.model.supercontig_388. 1 (locus evm.TU.supercontig_388.1) derived from phytozome v7.0 (chr-ID supercontig_388; pos 3386 to 4129 reverse str and)
ccacaaatccgggtagacctattccggacagtaaggtagtttcttttatgttgacttcttttttctgtctggtcgaattagaaagtaagaattcgaatcatttctggtttttaggaaacgaaaaatgaaatcacatagttagtaaaatgagttggtagtgtgagagtgagttgtgcaatttgttttaacaaatgtctttggtctgtgagaaaatcaaagaaaatgatagacaaggacagaaaatggtgaagtattggagcatgctttgccatttgtttatatgttttctagtaaggagtataaagatcttgtaatttcatggcacaaagaactaaggcattgtttgtgatgagtcttagttcatttaagcaatgaaaagaagaggtgaaaagggaaccctaatgttcttcggaccttttgttgtgtaaattggatatgatctctggttctagcaaagaagaaagcagtcagttcaagtttgaaccgtagatcaggaaacagaaaccatgagagtctacttcttctatccttacgtttgtgcagtctttgaaaaacatgattcagtgggttagctttaaagtaaatgttaatttttttttcaaccttttttccatcaatatctataattttgtgtactaaggaattagatagagctttatatttgaaaaaaaaaaaaaaaaaagagaattctcatggtgactttgtttatgcaggttaaatcatttagaacaacccaggagatag

SEQ ID NO: 76610 - DNA, 851 bp, Carica papaya
  Intron number 1 from transcript evm.model.supercontig_34.7 6 (locus evm.TU.supercontig_34.76) derived from phytozome v7.0 (chr-ID supercontig_34; pos 656964 to 657814 reverse strand)
cagcgtcgtgctctcgagcggcttgccattgctaggtttgctcgtatttctcttttattttcacaaactgtttccactagcatacctgtgagcatttagttgctgaaaaagaagttactccgctttgctggcgctctttttttgggcttataagtggtaattggtggatgtattgctctgtacgttggcagtgattgtgatgtaaagtgttcagaatatggcttaggattgtgctcgatttcgtgcgatagcagtttgaatgaattcgtttatatttataaaaattaaaataggtggtctttttttgtttagttttcctgcataaaagtcagctttggtggaggttgtgcttctaaatgtaattcgcagatgaagattatagaggcacatttaacttctgtgtttttctggtgatacgtgaaaaaaagtggtacttttcttaggcttgactaggagttggttgactggttgggtgttgatggtaaaggtcgggagctttagttagttggattttatggtaatgtctactaaatgtctcaatctgaaaccttaggtttgattgcgttcagcttgattatacaagtgcagacatgtatctttgtatttatacctatatctacctgcttatgttgattgtatatactaattttattttaagccccaaaactaatgctagttgagcaattttagtcatggatggacgtgatgccaaaacttttaattgttggattgcactcaattattggatcgcaagattttggctgtgcttttaacttgtttcccacagagaaacactggctcaatagaagtgatacagaaactggagatacattttgttatttgcagatcaa

SEQ ID NO: 76611 - DNA, 384 bp, Carica papaya
  Intron number 2 from transcript evm.model.supercontig_107. 89 (locus evm.TU.supercontig_107.89) derived from phytozom e v7.0 (chr-ID supercontig_107; pos 460754 to 461137)
agaagaggatctccgttcaggtattttctttacattttaattaaatatgtttcagcttaccacacttaagtttttgaatttgcatcagtatgtattgtatttgtataaacatatgttttcggatgtagtttgagttcgtttttatgttattgattggtgtttatagatacctgtaacttactttgcggaagaataattgggaattgttttatatataaaaaaattagtgttttgattcagagtttgcatagaactgatcgatgtattgcatgctgagaaaatcatgatcatggaattgcttttgctatgagcaaagaaataactatttttttctgaatttaaaagcatttgattatctgatgtactcgtaatttcatatacaga

SEQ ID NO: 76612 - DNA, 569 bp, Carica papaya
  Intron number 1 from transcript evm.model.supercontig_14.8 0 (locus evm.TU.supercontig_14.80) derived from phytozome v7.0 (chr-ID supercontig_14; pos 960056 to 960624)
tggttggtcgcccagaattcttggggggtcttaaagtataatagtctctttcttactctctaccttcgattttctactatttttatattttatcactttattaagttgattccctgattccggcctttaatggtgctaagtcttgttcccgtcggttcttctctatcccaaattgtagagaggagtgactttgtttgactcgtttctgcttgttaattaaccataataggggagatgatgggcatatatgagaattcgaagcttactgtttatgaatttgcagtgaacaaaagaactgttatttatgaattccaaaactggatgattgtgttcttgtttcctttggtgtcagagcttgcatctgttacttttcttgatgagggttctatgatttatgtcctgtaattgttgttgcttagacgtacattccttcttggtagtgatttggttgataatattacatttctcaataggggataatagatgcctttgttggtggaaaatataagctgatatgctattgtgttcttgcagtaccatatcaagtgagttgggaggagctccttttg

SEQ ID NO: 76613 - DNA, 918 bp, Carica papaya
  Intron number 1 from transcript evm.model.supercontig_17.5 (locus evm.TU.supercontig_17.5) derived from phytozome v7 .0 (chr-ID supercontig_17; pos 84947 to 85864 reverse stra nd)
aacaagaagaggatagaattgttaacattttccaggttctctctttcttttcttcggtaattgttgatatagttagcgcgttacaatttgcttggttaatcttagtagccggttttatgctctaggcactaatcatcggcaatttggcttgttatttaggttgcttttgctacaaaattagataaatagtcaattgcagttgaatctccgatggaatcgaatataaatatacatatatatatgtgtgtgtgtgtgtgtgtgtgttgtatttcactttttatctcgtggttccaggttcttttttttcttttcttcggtaatcattgtcataggtagcttgttacaatttgcttggttaatcttagtaaccggttttgtgctctgagtactaatcatcggcaatttggattgttatttagcttgattttgctacaaaattacataaatagtcaattgcagttgaatctctgatagaatcgaatataaatatacatatatttgtatatgtattgtatttcacttttgatgtattcttgagaatgttcacaagaaatcactacattctccggaataccgtatgattagcataaaaaaactagaagaaaaaatgtttttagctggttaatatacatatatatatgtatatattattattatcattagttttgttgtagcataatccttcctgtatgtaaccatgattcaattaccataatttctagaaatcatgcaattaatattttgtagtttctttttctaggtgtttcacttttttgtttttctttaagtggttttttctctgttaatattataatcttctcttctggtgcttgatgaataagtctatttagtagttcttttttaagtttttgacttactacaggaaacttcgccatcggttgtttttattaaagatat

SEQ ID NO: 76614 - DNA, 501 bp, Carica papaya
  Intron number 1 from transcript evm.model.supercontig_16.6 1 (locus evm.TU.supercontig_16.61) derived from phytozome v7.0 (chr-ID supercontig_16; pos 1105131 to 1105631)
attctcaacagcgtagacgccgtcgtcttttccaggtgtccgtcgcattaacactattacgtgtctgtatatgttcagctgaaaacgaagcttctcgctgtttcttcttcgattacatatttgtgcattatttccaattactccatctacaatctctctccgtctctctttgattattttctttatcgctaaatgatatgattttgaacttgtaggatttcaagttccttggcaccattagatttttttttttttttttaatatgagatagtatctgatgattgcttgacctttttcttttcgtttaaatttaaggaagtaaaaacttgaaaagtaaaacgattttttaagttgaattatttcattttgtttcctgatcaaggttacttcgctttcccctatttttgacattgattcgcaccaccaaacagtttttgatttagttttattttttgaaaaataacaggaggtttcctgtggtggagaagcggtggtgtgctg

SEQ ID NO: 76615 - DNA, 623 bp, Carica papaya
  Intron number 1 from transcript evm.model.supercontig_48.1 18 (locus evm.TU.supercontig_48.118) derived from phytozom e v7.0 (chr-ID supercontig_48; pos 685626 to 686248 revers e strand)
gattctgtagagctcttgcttgacacctgcccagagtgagagtttaattctcatctagcttagaattaatcttactactttggaatttaatgaagttgtttcttagaaatttgttagaggtttttaatttctagtgtcttaataaattgattttcatttgtgattgttcttaccttcttttttgttgagcaaattgggtatcgtgacgaatcacctgttttatctcatatattgatatacggatatatatttagcaaaaaagtggacaattgggtggttgttttttaaaaaaatgatgtcctcgctcagagtctacatataatgttgtgtataaaaactagttactgaactggaggtagtgtaggttgtgaattctattatttcttttgttctttctatttcttatatgtttgtatctctatgcctttatctctctttcttctctctggatctcctagtcttgcctgtgcagtgatttgattcatctggtatgacatttcactcctctgtttgggaatgttatgttggcatatgagttttctatgggcaaattgtgcaagggaaagaacattcttttattttgcagctaatgtgctgctacttttccaggtttttcgattcgc

SEQ ID NO: 76616 - DNA, 443 bp, Carica papaya
  Intron number 1 from transcript evm.model.supercontig_10.1 41 (locus evm.TU.supercontig_10.141) derived from phytozom e v7.0 (chr-ID supercontig_10; pos 1978380 to 1978822)
ccaccataattactgggtttctaggttctggcaaggtaagtgttagacaggtgtatgtgtagctaaagctgaagcttaatatgtgtgagtatgggtaatgcgataattgtgattttggttgattgagatacgaacagggacgttggggttattttggaagaagctttttgggataaataaattcgaatcatatgtttttcttaatcattgtttgacacgaattcttttgatatctgggaatgcgatttccgaaaaatttcaaatttcattaagaacgacttagttctgctgccagcatttttttttatccttctttgcatcttctgtaaaaatcgttccatctgagtgcgtatacaatctgaaagtagtggttggtgtagttatatgccgctgtcttgtgctaaacagacgacgttgctcaaccatattctgacagaaaatca

SEQ ID NO: 76617 - DNA, 263 bp, Carica papaya
  Intron number 2 from transcript evm.model.supercontig_32.9 4 (locus evm.TU.supercontig_32.94) derived from phytozome v7.0 (chr-ID supercontig_32; pos 1207850 to 1208112)
gtcttaccctttaccatctaaagagccatcttcaggtaaataatttctcttttgcttttctaagtacacaaaacattaatctccttcccttattttgatatgagggtcaggttgatttcctttcctttttcttttcctttcttttccttgctcttattatgctttctccttcttttgatttttatatataaatatatgtacacatacttgtttggtttctgggtttagaaattcagactgggaaagcagcctcacaaggaatt

SEQ ID NO: 76618 - DNA, 674 bp, Carica papaya
  Intron number 3 from transcript evm.model.supercontig_42.5 9 (locus evm.TU.supercontig_42.59) derived from phytozome v7.0 (chr-ID supercontig_42; pos 552672 to 553345)
gaaatacagttgccattaaatgtaaggaagacatgatcttacgtgattaatattgcttttcttgggcatctctgtactaaggagttgttgatatcatatatactatatgtttcgaatttagtatatatacagagtataaatctaagaattatttattttacttctcacaatagctatatcctaattagctgtatggcatcaataactgtttaatacgtatcagaatccatgactatactagctgatgtgtgaatctgcaactctatgactccaagaactcttggaggctgttaagatgatgcttagggataaatatcttaccagaatcatgtgagttgccaagattttgttggagcagaaacctgaacattttatttttatgagaaacagtagtctgtctgccatctttgtcagagcatgcaagatcaaagactgaagaagaatcactgatttatgtgaaagagggtgtgagctactttatttgattttcttggtatatagataacttcatcaattttcaatgcattagacattttagacttcataggatgtcagtgtgctagatgagaatctggaattgggttctttcctgtttcaaaatttatttctgaagagagtgggctcagttgaactcttatgttttatgatccctgtttatgtctctgcaggccctc

SEQ ID NO: 76619 - DNA, 553 bp, Carica papaya
  Intron number 1 from transcript evm.model.supercontig_1166 .1 (locus evm.TU.supercontig_1166.1) derived from phytozom e v7.0 (chr-ID supercontig_1166; pos 5049 to 5601 reverse strand)
caaagctatcatccgataaagccaaagctcgagaagtaacttattttctctttttcatttaatttatttctccgtcatgtttgttgcgcaagaaaactcaatgaaatgagtaaaatgcattgttcctgccttgttatctacttttcatttttggctgtaaataaaagtaagatcagttcaatctttcggttgttgcattaagagtgttatccgctgtttggctttttatttcctttcgaaaatgttaaagagtggtggtggatttttcggatgtgtttttcttaaattcgtcggagaaagctttaaaaggaaaactagtttgattaacctattttcttctggtttttccttgtctacactattgcagctaccggaaaactcccctaagaatatccagctcatacttgattggtttctagtctcgtttgagacttcgttcttctttctgattctggtcttctggattaaaaatgaaaagaaaatgaatttagtggagtcatattgttgaattaagggactggtcttgctcatggcagtctttgccaggttgtgg

SEQ ID NO: 76620 - DNA, 949 bp, Carica papaya
  Intron number 3 from transcript evm.model.supercontig_51.1 01 (locus evm.TU.supercontig_51.101) derived from phytozom e v7.0 (chr-ID supercontig_51; pos 1041119 to 1042067)
accttgtaagctgcatttttgtcaatggcttctttatgatttattcttatgtatatttgcttttttggaattctttatgttgattattctatatgatgatttccatatatgactttctccctgtatggtattgaagcttaggctgtaggtatgctttttattgcaccttctgtgagtatgtatttgttgttgagcaaatacggaactgttctagttagcttgatttggttactttcctctccgagaataaggaactggtttgaaattgccctcaggctaggcgcctctttaaaatggctcagaagcaaaaagagaaaaaagcaattgtcttagcatgtggtcgagaagtaacttgacgtcagtttggtttcatctataactgcatgattgtttgacggaaagctttatggttttgccttgctcggaagcaatctaacatcttattaatgtatagcattcacacaaacatgtgtgatagtgaaagttttaggtgtaattagcttctgctggagtcttctttgtttagaggttgaaatctgacaaatttccaggaatttttcttgatgattcagtatgtaattcatgcactcctatctttgaatgctatgctgtagatggcttaaggcatattagttgcatagggtcttgcaccatcaaattttatctggtacaagttacccaaaatttaaggatttggtacattttctctggaatatcttgtaatgttgcattgatatacctaattcttcaggtgaaattctatggcttgttctgtatcatcattcaagcatcataatcctatatcatcagctcaagcacacaaatgcagctgctatggctttattttatgggttcctttttgagcagtgctctgggcttattgcaaccagttataattagtgctaacagaaagtttccattttctggtatctctttcagatagatagcc

SEQ ID NO: 76621 - DNA, 407 bp, Carica papaya
  Intron number 4 from transcript evm.model.supercontig_36.1 76 (locus evm.TU.supercontig_36.176) derived from phytozom e v7.0 (chr-ID supercontig_36; pos 1281978 to 1282384 reve rse strand)
gatcaatacggctcaggtatttgccacattaatcatcatctcaaatgagctagtgtgaattagctacaatctagataccgttttgtttttcaattttctggcttgtaggtaccagttactggttacctgagattccaatatgctacatatatttcctagagagagttaagtaagatcataacaaaataaattcaaagatattcagattcttgtgaatcgtgaattgaacacgttccttaaataatcaacctggtttttgcagggaacaagtttgcttccgcaatcaatttcaggttttcaaagcatgattaatttagtctttttggaaacaaaatttaaaaatttcttttccatcaattttcttgcatgaagctctgagttaagcagacctgagaataaggggcttt

SEQ ID NO: 76622 - DNA, 347 bp, Carica papaya
  Intron number 2 from transcript evm.model.supercontig_104. 87 (locus evm.TU.supercontig_104.87) derived from phytozom e v7.0 (chr-ID supercontig_104; pos 573389 to 573735 rever se strand)
catcttttagagtcaaagcagctttccttcaacaggtttaactttcattttccttacgtttttttttattgagtactttataaacttcacctactgattgctgtgatctgtagcacattcagcttgctcccatttatcagcacccttcttaaaggatggtgagatgaaaagaagattttgttgtggagtgacatttttaactgtgtccatgtatttttacatgcttaaatgttgtgatttttcattgatgaatattcctttgtgttaatgttagttatggtcataatgtaacagttacatagttgaaatttgtgtataaactcaaatttcctttatcaaatagggag

SEQ ID NO: 76623 - DNA, 587 bp, Carica papaya
  Intron number 1 from transcript evm.model.supercontig_104. 87 (locus evm.TU.supercontig_104.87) derived from phytozom e v7.0 (chr-ID supercontig_104; pos 573858 to 574444 rever se strand)
tgacaagtgacaaagaatcagattcatttgacaaggttggctcttttctccttgtactttcaaataagcttgtttcaaaatgcacaccaagtaatttgagggctgaagtaaagacatatgtttcttttttttttttgggattctagttggatccttaagattagcttgtatctcttgttgcaaatgggaccctgaattgtgtgatctatagttcagctgagcaacaggatattcacacacaacataccgtgttaatcatgatgtgaactgctaaaaattgctatgaaaatgatttttaatagagttgttttgaggttgaagcaatataatgtttgataaaacttactgtaatgctgatcatataaaatgtgatattatgtttgtttaattttgttacaaaattagtattaaatatgtattgatgtgttggggtttgaggatacaaatacaagaggtatgcactttgtaagaagaaactttagaaaaatcctaattaaaggacaggccttggagagcctctgattaagcaatgatgctgatatttggtttcaggccttgaagagtgttgaagaagctctgatcagact

SEQ ID NO: 76624 - DNA, 979 bp, Carica papaya
  Intron number 1 from transcript evm.model.supercontig_179. 42 (locus evm.TU.supercontig_179.42) derived from phytozom e v7.0 (chr-ID supercontig_179; pos 297202 to 298180 rever se strand)
atcacttcaagcgcaagttctaccagcgcttcatcgttcgtacactctccaattgctacctcgttcttaatgtcctaatttgtctctgtagatttctgtttttgtgaatagatacttcgtgggttcttcttgctatgctttctccattggtctagaattgatatcctctaaatctcatgtccgtcttctttttggttttttgggataaattcatccggattttccttttcttcggctacatgtgcacatatatacacatttacatattgtttgttgtgaatttttagttgatatttctttttctccaagttggggaaagtggattttgttttcgtcattttttttctttggctcgaatgttagtcccgtatacttttcctcttctggttgctactttcaaattctttctttgattcttgattaccattctatgctgtccagtcgattctgtttagagttgcatatcttatgtgtttatgctattgtaatttgtaagtgtagggtgatgtctgcgggtttgggttttgtttttttgttttttttttttagagttttggtgttggttgttggtcaaatcttagacgatagttcatttggggtgtgttttgcaccttgactttatggaagttcatttgggataaaggattattaaatcctgaattactacttattgctacccgaggattcaaagaagccagaactaggaccttggaatcagactttcccaattatatgaatgcaccaatgacttggaagttggaaggttgtatttttctttccttgggtgaagattgctcattgtctgatgtaattacatcatttcacatcgaaaatttgccatgtttctgcagtatcatatcttctgcagcaaagaactattttctttcctttttttttttttttttctgaaatagcgacggactattttctgatgctggcatatgttcataagcaggatcctgagcttattgtggaggct

SEQ ID NO: 76625 - DNA, 636 bp, Carica papaya
  Intron number 2 from transcript evm.model.supercontig_1199 .3 (locus evm.TU.supercontig_1199.3) derived from phytozom e v7.0 (chr-ID supercontig_1199; pos 12155 to 12790 revers e strand)
ctccaccaacaacgaaagtgcctagagagaagcctgtatgtacatctttttagccataattacttatatctctcatcttcctctcttttcttctttttttctcctgggagatagcggttgggtattaggtatgtttgtccattctgtaaacattttacttctcaacagctgttgctggaagtacttaattatttctcaatgaacaccagacaataagccaaatttaatgaggaacactgttggcactctgggtttctggtgtttcaaacatctggtgctctcgtgctctttttgtaaaatatagtagagttgtacatgattatttaaatggcggcttcaaatggagctgtctgtcaaatttttgaactttagttcagagtctccttttgtgaatggccaagaggctagggtttgggaagtgccttacagtagctctctagcattttaccatgaaacatatatttgaaatgtaacatgtcacacatacaagaaaacaattaattggtgagattccatggaaaccaggataggagatcctataagctaaaagaatggcatggattttcttaattttattatgaaaactcaaatgtttgattttgttttccagctgccaaagcctaaacctcctactaa

SEQ ID NO: 76626 - DNA, 573 bp, Carica papaya
  Intron number 1 from transcript evm.model.supercontig_1199 .3 (locus evm.TU.supercontig_1199.3) derived from phytozom e v7.0 (chr-ID supercontig_1199; pos 12889 to 13461 revers e strand)
ccttatcaccacttcccttctctaccttcttccaggtttgtttatatgcttttctccatctgtatgtatctttgtggagtatttagttaatttttcttggaactcggtgatgttgctttggtaggatattactagcatatagaaaggcttaaggctctactggttttgttctgcaaattttgttatttcggttaagttacttggaagctaaaacttgtctcttagaccattagaagaagatttgctaaaaatttcgataatgttatcttcatgcctgttgctgaacatgctaagacagagtttctgtctgctttttgtagctaatcaccctagaaccaaattggggttttttgtttttagaggggaatataatgtaaagatttgaatgtggctacatgcaaatttcacccattccactctctgcgtttgaatttccttttcaaatagtagtatgtaattattaaagttctatgtttttggcacaagatcataattttgttccatggagaatttgctttagtatcggttatttttatgaacttcattctgatttagggaggagcttgtaaagga

SEQ ID NO: 76627 - DNA, 819 bp, Carica papaya
  Intron number 2 from transcript evm.model.supercontig_266. 4 (locus evm.TU.supercontig_266.4) derived from phytozome v7.0 (chr-ID supercontig_266; pos 48735 to 49553)
ctctcatccttgataccacttattgtaatccccaggttagtatatgtgaaaaacagaatattccttggcaattgcttagccaaagtttactttgaaattcaatataattgccaagccaaagtttactttgaaattcaattatattgaacttgctaatattacctcattttatctctattttgtcattgttaatttcctttatatacatttttttgaggtatatcatatagcaagcactaacaagaaaatgaggaaaaagatttgcacatgcacataattaaccatagttagacccataaaacagtagccatgcagttcgaaatccctagttaagtaatcaaaatcgatgaacaatttgttgaatctttactctgtgggtggttaacttgaaatatttttctttaacttcctacccatgtaatggagggaagaaggaaataacatacaattaaggagaataaggagaactagatgatcaaaggagagcaaacaaataaataaatcataaatacaatcaatcaaatctctaagtgctgtaaataaatgcttcccagttctgatggaggtctgtgatgctaatgaaagagtagtagccatgtgccttgacccagagtgtagtaaaaagagttgcctttcccatggctcatgtaaggatgtagtccaatccttaaatatcatgaggttcctcgctaaccaaatacaccgtaagcctgcaaatatagcccctttccagaagtatcaaatgcaaattgtaagttacttggtttaatgtcatttcctgcagtacgactttccaaagaaggaggccgtaatacaatt

SEQ ID NO: 76628 - DNA, 751 bp, Carica papaya
  Intron number 3 from transcript evm.model.supercontig_179. 17 (locus evm.TU.supercontig_179.17) derived from phytozom e v7.0 (chr-ID supercontig_179; pos 98805 to 99555)
actctcctgatcgagcttgcaatcttgccaagcaggtatttatgttcagttgcttttccctttttttttacgtgctgccgcttatagttaatgcttgccatgatctttctcactacaaatgttatcatgtctaccatgtacagttctgaggtcaatgtcttttttattagaaagttcttgaagatggcaagctggttatgaataaatgttggttatttgattgttgtagtaaatgataattgtgtgatactcccttacacagtaccacctttatcttgtgattatgctctgggattgaattatatggaagataatattattatgttgcgtctaggcaaataattatttgtttttgatagtcaattcaggtatgagtatctttgagttagaggatattgttattgttaagcttagcgcctcagctgtactcaactacaatcctgaatgtgaggtccagttgcataacacttggagccagttctctctacccacagttgccccggcttccactttccaaataaactattaaaaaagccttgttggtgtagcttaatattcttaagcacatttatgccacttgacatccttggtgaatccactagaaaatggtagctgtctgctattggcacgattcacttgatgaaactgatatcttgtgtctatgcccttttattgtattgtatttggatgtgtagaatgatatgtgtctttttcacttacttttcatattattctacttggcaggctttcg

SEQ ID NO: 76629 - DNA, 654 bp, Carica papaya
  Intron number 1 from transcript evm.model.supercontig_19.2 11 (locus evm.TU.supercontig_19.211) derived from phytozom e v7.0 (chr-ID supercontig_19; pos 1576594 to 1577247)
tgctggatcctcctctgttagtcgccaagacctccgtcagtgcttgatttgtgtcagatgtaacttcttctggctatggttctttgatctgcttctgatgtccctgatcttgattgtctgacatgtttaaaagaatcaattggatgtttttggtacttggcaaatccatatctggaattggataactggggtttctctagaaaatctgtcttgtgcaattttttgagatattcaaacaagggagagacttaaactgcaagaagcttttttatcagaggaaaaaatggacactttactcaaacatatgaagttatcagcaaggtctcccccatctcattagtatcaagaggataacccttgaacaaaaaatacagggttcggagccaagagcctttaacattgttgaaagcaaaaaaaaaaaagaaaagaagaaaaatcctcagaagcctattccttcctttccttacacaagtactccacttggtagccaaggggatttctactttgtgatgcttgaggcattaataaatcagtagacaccaatataaattagcatccccgctagttaattttgttcatatttcataggtagtaacttatttcataaatgaagtttatttcttggattctaatttttgcttcttgaataggata

SEQ ID NO: 76630 - DNA, 1006 bp, Carica papaya
  Intron number 1 from transcript evm.model.supercontig_26.3 5 (locus evm.TU.supercontig_26.35) derived from phytozome v7.0 (chr-ID supercontig_26; pos 379667 to 380672 reverse strand)
tagcaactgagctctataccaacaagttcaaggaggtacattcatacatacatacatatacatatatatatatatatatacacacccataagtatctcttctactcatacttacagtaatgcacattatgtctttgatatttcattgaagaaatttaaaacgcatttaataatctcatcatgtgtcgatttctttgacatgttcctggtcttgcattcagaagttatgggagttgacatctctagtaattacttttttcaaaggaaagatgtacacaatataatgtccatgaacatatgggctcttcagtttcttagagtgaagtgttttttccaaattaattgaatcagacagtctatatttagaataaaatctagaatgtaattggaatttgcttgcaatttgatcattcttgtatgttttagaaatacaaattttattagcctgtgataaaattcgaagttctacattaaattttatacggactcagtttaatttttgtcatcttcaagttcaaacaattaataatgtaagaacaaattctatacaaactatgagatatatgcttgattgtggtgagggcaaagtgtcggaccgatcgtatatggagctgtgtgcatgtaagagtaataaagttttgagtttctgtgtgatggaatgaattaaaggtggagattaagattaagttagtaattacccattaattattaattatttaagttaaagtataaaggtttacttagaacaaatgtaaaaagtaaaatattaggatattttatttaatttaattaagaaaatggggtagatttctgtccttgaaactgtttgtgtagaattttgaaagggtaagatgcaagcaagaatccatttgccaccacatgcagatacagtctcccaaaagaagtaacatttgcttgacaatacgtaatctctgcgtaatacatagacatatatgtgtatgtgggtattacttaaatgattatgtatatgtgggtttaacaggtgc

SEQ ID NO: 76631 - DNA, 585 bp, Carica papaya
  Intron number 1 from transcript evm.model.supercontig_109. 3 (locus evm.TU.supercontig_109.3) derived from phytozome v7.0 (chr-ID supercontig_109; pos 20210 to 20794)
aaacacatgtaagagaaatatatagtgaagcaaaatctcagtgctgtaggcacatttagtcatagaattaatgctgatggcttgtttgtttataatttatgcaaaagaatctttactagtttgtctaggcatagcctactttacccttttataggataggcataaggttatgaactttaacaggaaaagtacccacaaaatgattttcactgaaggttttgtcataatgtattctggtcagtggtttttgctacaaagatttctcccaatggattatctgagaaatcaattgaattatcagtcagaaaattctattttaatttgtctgtagtacagaaaattctgtttcctgttttggttttttgacaagaaaagaatgattcatttgtggagcagctcaagcatggtagcttgggttaccttcgcttctaatgaggttaggaaagcagtgtctttgagccagcgaattttaaaaaaaaaatttcttcagcagattgttaatttcttgttccaggccattatgaaatttgaaaaaaaaaaaaaccatttgttcagcagattgttaatgtcttgttgcaggccatt

SEQ ID NO: 76632 - DNA, 220 bp, Carica papaya
  Intron number 1 from transcript evm.model.supercontig_2.23 5 (locus evm.TU.supercontig_2.235) derived from phytozome v7.0 (chr-ID supercontig_2; pos 3169431 to 3169650 reverse strand)
tcaacagcgattacgcagtacccttcatttcttctcatttgtttattttcttttttcctttctttttatctctgttttatcgatatatgtctatgtatctaaaacgactcaaatccttagtttttcgacaactgtatattatagatttgattttaaattttttttgaattaatcttttggtgggttttctttgattcgatgttctataattaggatttgg

SEQ ID NO: 76633 - DNA, 544 bp, Carica papaya
  Intron number 1 from transcript evm.model.supercontig_5.94 (locus evm.TU.supercontig_5.94) derived from phytozome v7 .0 (chr-ID supercontig_5; pos 716760 to 717303 reverse str and)
tggttctggtaactggcagctccttgcttctctaggtgagtcacaacatcagcacccgaagaagaaaaatagttggttttcacgttgattcttgttgttatctatctgtagaattttgtttggtcgccgagaaaatgcaggttgaggagggaacataaaagtttagttagggcttatctttttttttttgtttgggtatttggtaatgaacatagaaagccaggcaagaaaatgttatattctcacgaaaacgggacagaaaatatgtattttcatctatttttcttaccaatcacatggaaggttaggtgatccacagtagattcatttttgttggcttttgaatttgatttcttcagtttatcatttccgtcataaacaagtccagtatcatgaaattaagttaaattatttctaaaaatcgataatcatattgtttaagtgcaaggttaaggatttgcctcaagtttattttgaagcttgattttgtggagtttgaatctgtgaaggtgagttgtttgcaagcacggctggaggagacttt

SEQ ID NO: 76634 - DNA, 516 bp, Carica papaya
  Intron number 1 from transcript evm.model.supercontig_19.1 74 (locus evm.TU.supercontig_19.174) derived from phytozom e v7.0 (chr-ID supercontig_19; pos 1250900 to 1251415 reve rse strand)
gccccatctcttctcaggtatattgcacattcacatctatacatccacccatgcacttgtacgcgcgcgcgcgcgtctatgtatatgcatatatacatacacacgtacgttactggcgatcatgtgcagcattttgattttactgattaatggagtttaattacagtaattatttatatttgtaaagaataaaattatactgagttctgtttttgttcgtctaatgagaaaacaagagggaaaaaagaaaacgaaacttaattaaatttggctaattagggttctatttctttgctggtatttaattttgtgcctttgtttggttttggaaaatgcacctatgttgttatttattaagccatgtatgcatgtctctctctctatatatatattgacatagacatatgatatatcacatacatatatcatatgtatatgatatatgtatgtgttgaatatatacgatcatgtatgtctttgacaattattatattacttcgtcatgtcaggtacacc

SEQ ID NO: 76635 - DNA, 767 bp, Carica papaya
  Intron number 2 from transcript evm.model.supercontig_43.4 6 (locus evm.TU.supercontig_43.46) derived from phytozome v7.0 (chr-ID supercontig_43; pos 576412 to 577178)
aacgactctctgttaacttgacaccagtgcaggtgaggaaactaattcctgatgatacaaatattgaaaagagacatgcaatttttttcctttcttgatttttgctgtgaaattatagattgtatctgaaaagcttaacctcataggacatgactcagtttattatttatattttaatatacttcctcacacaaaagtacatcgggctgaatatgagatccacataggcatattattctgtgcaaaattaaattttaacaagaataggtaaccaaatttgatcactagactttctacactcgtatcatatgaaatagtttactacaaccaattatccaaaaagagctcaatctattatttctattccaatatttacttcctcaatgaccaaaaccaaaaatgttgtatttccttcttcatattttactaggttgattttgtgaattttacctcttacataagttatgtatctggttgtctgacagcaggctacataatgccttccttagctgcagataatctatttttcatatgaagctgaacaagctcttgctcaaagttggctactttactcaaatgtcatgttgcttgtataatttacaagtggagattgaatgcttgttcataaaagtttgtgtttgattatatggcatttggatctattttttattgtttccggttctcttatatctatcatgactgttatgtttattaatacggctatctcaaaatttcaggaagaaagactgaaaagattgaagcaccga

SEQ ID NO: 76636 - DNA, 476 bp, Carica papaya
  Intron number 1 from transcript evm.model.supercontig_6.27 6 (locus evm.TU.supercontig_6.276) derived from phytozome v7.0 (chr-ID supercontig_6; pos 2121373 to 2121848)
gagatcagtccggagacattggcgaggattcagaggtatgtaggatgtgaacatgttactacctttctgcttccccgtctccccggatttcatttgtgaaattttgattttgattttttttctgtttgaatttttgttatttgatatttacaggcgattagggcttttgatgcttataattttgtaatttcgtgtcctttttttctcatcaaagaaaactggaactgttgaaacagttcttcagtttcttttctagacgatctcttttcaccagttggagctgtggccctatttctttactccattccttcaagggttatgcttaggcattggaaatgttcaaattgcttatggaacaggatatcagttttcttgacgtagtttcaacatataacataatcgtcgcaaaagggggtttcttatgaagcctgcattaagtaattttttggtttgactattgatatagggttaagaag

SEQ ID NO: 76637 - DNA, 1043 bp, Carica papaya
  Intron number 2 from transcript evm.model.supercontig_3.45 0 (locus evm.TU.supercontig_3.450) derived from phytozome v7.0 (chr-ID supercontig_3; pos 3286182 to 3287224 reverse strand)
taatattcttgtacaagtattctattatctcaaagtctataaatcacttcaagactccttacatgtccaaaataatctttattatttacctaaaaaataattaatcataatattttaaaataattttgtaaattaaaataaaaaatttggatataaagtaccatataatgaacaatttaagaattaaatttacgaccgtaacatataagaaataaatagacttaactaattcaaactaaactaagtaaggagaccaattggaataaattgattaacgggttagaaaaccaaataattgattttttggatattatatggtatccaataacaagccgataattttttaatatttttgatatactgtatattataataaattaaaaagatagcctaaaatctttaatctaaccagctccttgtcactcgtgtctttacctctcgtagtagttgaatacgtgcttgggaaaagaaatcacgaacagggaaagagttggaaagtagggaggaaaagaagaaagctttttagggttttagggattgatagagcaaagacaattcgaataaataaattgaagttattcgatcggtttaatttcaattagtttgatcgaacttcacttaatggttcactcgatttttttagctcttaaaaatttgaagcaaaacaatccaatcgacaaattgttaacctataattaataatatgttgtgaataatgatgcaatatatatctggaagaaattgcatatcccgaaccggataaagcgaatccttgccctaatctttcccgggcttctggacgttcttgccccgagcacggccatttcctttgttcgtcttcacattttcttggcaaaaacccagggaaggaattacaccacctgctcgaagcgcagaactgtggctcaactcagtattcactgtaatattaccaaaaatcaaagggagtgagaatgagtgaaataaccaccacggcatctgctgaaacggagagctcaaaaccttgagcgaaatcacaagcgcgaggccgatttcgagagaat

SEQ ID NO: 76638 - DNA, 919 bp, Carica papaya
  Intron number 1 from transcript evm.model.supercontig_360. 5 (locus evm.TU.supercontig_360.5) derived from phytozome v7.0 (chr-ID supercontig_360; pos 37538 to 38456)
aacactgctctgttaaaggtatttcttacagtactctcttgcgctatatctgtctgtctttaacgtattcgtttatttttattcagttgcattttttatcgtgatctttgtttctgtatttttttccctttatttgatttctcaagtcattttctatggatctgtggtgcgttatcttctcctatcactgatttagttcttgaaagatatccactcggtaagcttcattgacttcgttgcttctattactgctgttagacttcttctgaggtcgcgtcttcttatttttggtgttatttgtttagcgtcagtttggagtaataaatggactcaaaatcatttcgaattgggagttctaaacctgttccagtgttctatatgctttgatgcgagaatcctctttcaattatctgcttagctgttcgagaatgccccgggggggaggggatgtagatttactactttgagcgaattttgtactactctttttttagtcatccacttggttaattatgaagtttacagaacctagttttgaggtttcaatcggacatgtcagaagttgaatcaagtacaaattccctgtggttgttcttaatattggcatggctttcgtgcacatctaaatgttgtttatattagtgccctaagtctctttgaggatagagttgaacttctttttctataagctatcctttatacctctctttctatcctttatacttctgtctctctctctctcactcatgttttttaatttctttcgttggttttttgcttaattataattctcttttaataattgcagcctaagatgttgggtataggatgctgattttttctttagttctcttttccatataataggtttttttttttaaaagaaaaacttgagcttaaagctgtcattgacgtcttg

SEQ ID NO: 76639 - DNA, 651 bp, Carica papaya
  Intron number 2 from transcript evm.model.supercontig_3.44 4 (locus evm.TU.supercontig_3.444) derived from phytozome v7.0 (chr-ID supercontig_3; pos 3204304 to 3204954 reverse strand)
cttcttttgcttctgttactggtttttctttcttggtgagtcagttgtttttcctttcttcctccacacacacacatacacgcatgtatatgcattatatttttcctatccttactgtttttggatgatagtgattcgtggcttcttatcaaattgtgatatattattgaatgttctgatgatggaagtttaagttatttccacctctgtaatttttttgtggttggacgagcaataagatttacatgtgaagtaaaattgcacaataggtgtttgcaaaaattcaaaagagaagcacaaagaaatatgaacttcattttttattcatactgattagttgtttctcactatcaaatttgtaaaattagcaccagttgactttcacaggtttgaaatgttctgaagaaaatttcttggtcctagaataatttgcctttgctttgaccttattttatttttaaatcttaataattcataagtttgaattataaattatatactctagatagtttggtttactcatattttcaattacatggatttgtattatgacttagtgatgaagaaattataataatactttatatgatgttggatatgtattgacttaaaatgtaatacattcttctttgttggcatgactagcttggg

SEQ ID NO: 76640 - DNA, 855 bp, Carica papaya
  Intron number 1 from transcript evm.model.supercontig_136. 34 (locus evm.TU.supercontig_136.34) derived from phytozom e v7.0 (chr-ID supercontig_136; pos 485545 to 486399 rever se strand)
gaagcagcaggtactccgtttcttcgccttctctttacttccattttaaagactgactacataaaattgtgagatagaactgtgcgaccatttttaatcattattttattatacatttttactatttacctttctaaacgtttttttttttttttactatttacctttgttgctacgtcatgtggttgattttagatattgaaaataataatttattctttttacatttaacgacattttcattgtcgattatcaagctttctttttaggaaaaaaaaaaaaatcgaaatcatccacaatggtcattttcctttttatttttcatctaccaaacatgtatataatatacgtacttaattataaatatatttacaaattagacactataaaatgttgtctcatatcagaccaagtctatcttcctaaataatttacttttctctttttgtcaaatagttttatgctctccttggttaattttcgttcaattagtagttttaatttttttatttttactctttatatccagtaaaaatatgatcttttatgtttgagttgtggttgcatccccacatccagagaattcaacatgagccttcaagtgatcttaagcctttttgtaacctattgtgatttgctccccctttactcacgtcacttttgtcctgggaaatcaatatacatttgaaaatctgatattatcctgtgagtttaggtgtttggatggtgatgacaaagtacataaaaatgtacatttacaaacagagtttatccaacaacgaattcaaacaactttgcttacttgtataaacttttgcagggaaagaaggggatctggattaagttgcctcttga

SEQ ID NO: 76641 - DNA, 812 bp, Carica papaya
  Intron number 1 from transcript evm.model.supercontig_25.3 2 (locus evm.TU.supercontig_25.32) derived from phytozome v7.0 (chr-ID supercontig_25; pos 466422 to 467233 reverse strand)
tcaacttcaactcctactctcgtaatggtgtagcagagttaacagacctactctgttttttgatatacctctatacgtttatttgtctagggtgttcggcgtttctgagcttgttttcttttttcttggtggtcttacttcttgatgtgtaactaaaccggtgttctttcaatctgtgttttttcgtccttaatcatgagaatttaaggcaggaagctagattttgagtgcgaacagatataaaacatatgcattttcattaagttgtataaagggttaatgtacatgtgtcgatatatataacccaaatgtacataccccaaatggctttgtggtcatgctttgggaaattcagtctctgttatttctctctcttctctcttcgcaaatttctagggctttctttatcgcaaagactatcgttttgatttctttatctctagataatccttcgaattctttggctgcttttatttctccgcttaatgtattcttttcatgtcagtttaacattttttcagtggtaagaaaatgaagggaaaatggattttacccttgaagggtaattctttctcttctttcttctcatcagtttgtactgatctttttatttatttatttcctttataaatagaagcaaattgaccatagtggatgagactttttcaattcttttgtggttaaacatagcaggtgaatggcgtaaagagatacttacattagtttttatactggtgggaatgaattttagtcagctcgacctgtcatttatatataatttgtaacttagtttttgctagtttttgctcagc

SEQ ID NO: 76642 - DNA, 498 bp, Carica papaya
  Intron number 1 from transcript evm.model.supercontig_166. 39 (locus evm.TU.supercontig_166.39) derived from phytozom e v7.0 (chr-ID supercontig_166; pos 321981 to 322478 rever se strand)
ttcaggtaatctgtttttccttttgctgcgattctttcttttggttttttttttcctgggtttgttgttttttcttcttatctctgtagggtttgtgtttgatttttttctttattgaaaattttctttatttcttgattttctcccctctggttgtcttttccttctctgcttcagttattcattaattgaaactggctgaccccattaggttaaactcctttagttttctaaatagtaacgtaatacattgaaaatcttcctaagaaaggaattaactgtccacggaggtctacccggccacgaaccctctgtttgtttctagggaagttgtatgagaaaatattggattatgatagtgcacctttggcttagaggagttagaaattctcactgtgaaattgaacccatcttcatccattctgccttttgttattctgcttactcaatttgcaaaaaacagttgatagagaaagatccaagcagagcaatttcctt

SEQ ID NO: 76643 - DNA, 703 bp, Carica papaya
  Intron number 2 from transcript evm.model.supercontig_3.12 3 (locus evm.TU.supercontig_3.123) derived from phytozome v7.0 (chr-ID supercontig_3; pos 957538 to 958240)
ggaaggttaaaagagaatatctcctagagaaaagggtataaaattctctattctctgttctctgtctgctacacaaaaccacaagtgcatgtagatatttaaatttgctgtacatgctgttagaaactatgaacggaaacgaatatcaatcatcagtcagtttaaactgactcttcaaaagttttgcgttcaattagtacaattgcatttaaatttcatgaaccataatgttacggccaatttagccatttgatcttcctgcctaaactaatcatggagagctctctaatcgtcaaaaagatagctctctaatcatctgcagaaggggggaaaataaatattctgcttacttgaagaatgataaatgagatcataaagtagaggaatgcaaaacttggtcgagcggtaggaagttaacaaactaagaatcttgtgagtccaaagtcctcaatttgagccatagcaagttatacttgttgcacgggtcatcccacaccattacgatgagggtttaagtagaaaacagaatatcactcttactaagttgagtcctttttcttttgattgaaaagaaaagaagtggaaagatatggttactgtctgaagacttcagggcattttaaattgagctctctgttgattaccactgaagtactactcttttccaggtaagaagtgttgatcccaaggaagctctgcgtct

SEQ ID NO: 76644 - DNA, 859 bp, Carica papaya
  Intron number 1 from transcript evm.model.supercontig_2.43 4 (locus evm.TU.supercontig_2.434) derived from phytozome v7.0 (chr-ID supercontig_2; pos 4596655 to 4597513)
gccaagagggttcgcgttctggagctttcccgcaggcaaatctctcttactttcacctttactattttcttgctatgtttttggagaaacaaattaatcagtcttgtttttctgcatgttatctgtttaaataatttgcacagaactgaagtgttaagcaggtctaaatggagaaagcgagtgtgcttttgttattggctgagatttgatactgttttatctctgattaaccgttcataatttatttatttgagttttgactgtacaaagagtcggctaatagtaatcgattactgatccaatatattagcataataattgtgggtgacattgattgatatttctttttttttttttaaaaaaattatattgttctaataaggcagtgtacgttgaatcattttcacagactctgtctctgtttcttttttaagtactgaatatccttgagatgatcatctaattgtatgacagagcctgggatgcatgcaggggatgatccaatttttatgttaataattgtcgaatagtgcccagaacagagcttttctggaaaatttttcaagaataaaagaccagatcaatgcttgagtttctttataaaacttgggaaattgctgtaactgattttttttctattagtataataatgactcatgttactggtgtcctggatactaaataaatgttgggtccatgttaattatggtgatgtgaggagcaataattcgaagaggtctatgataagatgattagttactgcgagcttcttttgtgggtaaagtttgatttgatatatttgttttttcaaacgttggtaacagattgaagcaccgtggccctgactggagtggaatct

SEQ ID NO: 76645 - DNA, 737 bp, Carica papaya
  Intron number 1 from transcript evm.model.supercontig_3672 .1 (locus evm.TU.supercontig_3672.1) derived from phytozom e v7.0 (chr-ID supercontig_3672; pos 419 to 1155 reverse s trand)
ctcgcatcagagacagcatgtgagtaattgtttcctttttcattattgtggcagtaattttttatctatgagttgcatatttttacttgtagttgttaattggattttaatttaaaatggtgatgttaccagtatattattaggagagaagaacaaaggaatacacatgaaaacatttttgaacttatttcttagcttcatttatctgagaatgtcttgttgagacttattaagactattaaataaaattatggaatttactaagctactttggaggatgaaaggaaaaatctaccgcataggttagtgaaagttcttaaggtacattttgtgcattttcgcatagttgaaattttggtttgttaaactttgttcagccaatacgtgcgttactggaaaattttcttttcaatgtttaatttccactttacttgattgtttgtttgatcatgtatgattttgtctgcaactgtcctgtatgtcagaccagatttgatgacactttgattaatcctttaatctatgtaattagtctacatagaaaagtcattctccttttgccaacccaaatattggtaatccatgtattattctcagcgctcaggtcagctgtgttatttattttttgttgtatgtgtgtgtccatctaatgtacatctttgtttttctgaatgatttttttttttaaaaaaaaatttccagttagtgtcagtgaagttgaagcattatttgagcta

SEQ ID NO: 76646 - DNA, 718 bp, Carica papaya
  Intron number 3 from transcript evm.model.supercontig_14.1 9 (locus evm.TU.supercontig_14.19) derived from phytozome v7.0 (chr-ID supercontig_14; pos 270370 to 271087 reverse strand)
cagcaaatattgttattaatctattagattggcaggtatgctggttgctgactacctcatagatttaatgtcctagattgtccatttttatgcttttattctgtgatcttcgttgctgcttattggctgtttatggatttactggattttagtttcatacttaaatttcacagtacaggtattttctttctggctttaccgggtctcttaacttgagttgaatatcaattttagttacttcctatgataaatgggtaggtcttgaaatgcgtttgttcttcttaagaagactgtgaagttgttcaacccactatatttttgctttttgcaaaactgagaagatggctaaatactttttaggtggactttgtattgtatgccaccatcttctgtgatgaaaattttcttttgcctttatttgtgtttgaaggatacaaaacatttctgtttcctatagtacgaaacataatatgatattagttttcagtatctttagctgggggagccgatttgagttgtcttatgtttcgtaatttgttgctttccagtttccttgcttttatcaagctctcccttttatgaagcaaaatattatgttgttttcccaaaagaagatcagtctattcgtatgtatatgttatagtttactaccatctagtcatatctggcattatgtttattaggtgatacctgcagaaaatattgtcgcaacattcca

SEQ ID NO: 76647 - DNA, 578 bp, Carica papaya
  Intron number 1 from transcript evm.model.supercontig_30.3 7 (locus evm.TU.supercontig_30.37) derived from phytozome v7.0 (chr-ID supercontig_30; pos 566032 to 566609 reverse strand)
ctctttcgtttggctgttgggttgtcggtgttgtggtttgagggagacataaggctctttataaaaaattctttgcttcttctacttctttggaattcaataacactttggcctctctttgagctaaggtgcatggatttgatagaaatatcttttggttattttgcagagatttggctgttgtgatgttgtattgatttttgtttttcttttaacttttaacttttattcattcctttgtttaggagtatatcttacctccattgatgtacttctctcttttcttctccaaataatatttattaagaaagttattcaagttgtacaggcgccaattggagtcaagttagaaactgcaactaaagatgatatcagaactttttgatcctaattaaattagtctggctatatatcctaaatatcctagagaattcagaatactagatagttaaaatagtagcaatttttttttttgacttaaaatcttccatttaacttaccactgtttgtcatcttcatgaccttagatttttcttcttttaggatatcttcaaaattagggcttctcttcctattgc

SEQ ID NO: 76648 - DNA, 264 bp, Carica papaya
  Intron number 3 from transcript evm.model.supercontig_46.1 08 (locus evm.TU.supercontig_46.108) derived from phytozom e v7.0 (chr-ID supercontig_46; pos 975853 to 976116 revers e strand)
gttccttaagtttaaaaccacagaatatagcacgggtgctattgggtaggataatggtggtcctatttcagggattttgattcaacaatcttccttatcaaaggtacttctttcaaatgtctagattatgagtagatcaaaacttaagagaaaaaggacttaaatctgatgagaattaagaaagaaaaagaacttaatctgatgaaaacaaaactttacttttttgtttttgtttaatttgcgagcagatattcaccggttgct

SEQ ID NO: 76649 - DNA, 655 bp, Carica papaya
  Intron number 3 from transcript evm.model.supercontig_1084 .4 (locus evm.TU.supercontig_1084.4) derived from phytozom e v7.0 (chr-ID supercontig_1084; pos 18523 to 19177)
ctgtcattacagctcttaacttggcgagatataaggcaagtagtgtaaaacattgttttgtctatttgcaatggtcagcacactgttgattaactttacatgtaggcctttggcagttcaaattcgtaattataattaatggtggtgacaatttgaactacgtggtgctgaggattcgttaatttcgggagagtcaagattggtgtaattttggtatagtccaaatgattttataagtttcaaagtgggaaaagtttgatgacgtctttatcacagtttgccaattctagagttacctaagctacaaacaatcaacattacatgtaatagctcaatgtttttcttttggaaataaatgtaatagcacaatgttatttgtagaaatctcagatgtcaattcccaccagtgtagcagggtggagaatcttcccatagatcctgattgtcttaccctggatctcccctaaggagtattgacaagtgaggatgctaaatgaattttgtgctgtggccctcctttttatctaggcatgaaatctttgatcattggtaacttctggttattgcactgactatgatgtaccaattttcatctgtcttttgtttcacttgtaacggcagattaacaagaattttgtttttaccaggatcataa

SEQ ID NO: 76650 - DNA, 872 bp, Carica papaya
  Intron number 3 from transcript evm.model.supercontig_6.24 7 (locus evm.TU.supercontig_6.247) derived from phytozome v7.0 (chr-ID supercontig_6; pos 1943936 to 1944807)
cccaatttattgagctgaaaggtgcacaggttaaagtaagtgattcttatgctgtcacttgttgtaattatatcttcgacagtttaggatatgactgaggcttgagttattgaatatcgacattggttttagcctgggatctactttcgtctgaatatgcatgtccaactatctaccttcacttttttgaaataatattgttgtggattttggtgtgggagcgggtttgttttatgggctcaatcattacctatatatatatgctatctttagagtatttgcttaatatttaatcattggtgaaagatcttgtgttccctgctatggtggcaaggagctctttcctatatgaagtcatttgagaatagaaatgtatcttggaatctcatggagatacaaaacttcgactatgaatgcttaaggagaggttaatggtttaattcgaatatgatgatatgaagtcataagcctggcagaggcattttttctctgtttcttttcataagtgggcctgaatagttgctaaatcaaattcttaaatttcgtcttggctgattaaagtgtaaaataagtcattttttgcttataagaaagctgtaagaggtgcgtagaagaggttaagatatcacgggaatgtgtcctattgaaaggttggtgcagatctagaaaaccaataataatgaagatatggataaggttttatgttatgtttgcatctgaaaagaataatcaaatcgggctgtgagaccgttaatgcttgttttgttaacatccaatatagttgttttgttaacatctgaaataattgtttactgatttctttgtctattatttcagacagtatcttttttgacatatttgttgaagagttg

SEQ ID NO: 76651 - DNA, 549 bp, Carica papaya
  Intron number 1 from transcript evm.model.supercontig_176. 6 (locus evm.TU.supercontig_176.6) derived from phytozome v7.0 (chr-ID supercontig_176; pos 65282 to 65830 reverse s trand)
gaatctgaagatcatacgtacaagaattttcttacgtacttgaatgaaaccttttggctagcatcatattccaagttcctgaatttttgtttatagttacctacattttccagggctcttttaaatcttgtgctcatgaacttttgtggattcagcttatcaagttggcgatattatttcgaagtttcacatctttgtttcctctaatttcattcttcaagttcctgggtttttgaggttttaattttaatgcacactatgtttctgaaagaacttttagatcttggtgctatggtgttcttttttacacgtaccatttggttttcttatgcattacatgtccttttttttggattttttctacattgaatgcatggttaatcgagcaattgagtttaagttcagttagttttggaagcatagtattggggaaactgtagaaaatgtagaaaataactgttattttagaaggaaaacagctgtcatctcctttgtcctttcttgtgtactgtagaaaggagaataacaaaattggtggtgtgtcacctc

SEQ ID NO: 76652 - DNA, 938 bp, Carica papaya
  Intron number 2 from transcript evm.model.supercontig_6.48 (locus evm.TU.supercontig_6.48) derived from phytozome v7 .0 (chr-ID supercontig_6; pos 303170 to 304107 reverse str and)
acgatccaggtaaccttgttgtttattgctattgttgaatgctgttcatacttttaactgttttacttgctatattcggtgaaagatagatagttattttgttctattttttttttccatactttgtataaatagttagctagttagtttctaccttgttaagttcattctatattatatctaggataccatggattgaggattatctataacccaatcacgagttttcattatacttgctgaacaacagtatttattatttgggcaagaagccggtcagatgaggaaggaattagagcatgatggaaatgactaaacatatagatttaattttgttgccaatgatgcttctttcctcctgcatttcgtgttgcattaattgttaattgtaatggctggttatttcatatgtattgatatttttgagatagaatatctaatgttggcagattctttgacagacatattagacgtttcctaaatgagattatttttggagtgtcttgttgttgtgtgggttcagttctttttacgagatggaatggaagaactagaaacagaccatggcatggtggtttgtgcatttttttttgctattctgtctgtaaattttcacattaataggatcagtgtagtctgtttctttgtcttgtgcattaagttatgtttaggagggatggggaagaaagaaatagaaagagagtggcaactgcttctgcattgaaaacagcaggtttgttagcttaaaaaggtcgtttgattgtagccttttctgttaatttgaaatagtgctttaaattggaactgatgtctacaatcagagattatgaatcgagaaatatatatttatgtaactgaatttcagtgctagagtggttgtgcctgtattagttgatcactctataacagatcactggattttgattgcagtgcaaagt

SEQ ID NO: 76653 - DNA, 493 bp, Carica papaya
  Intron number 1 from transcript evm.model.supercontig_59.2 6 (locus evm.TU.supercontig_59.26) derived from phytozome v7.0 (chr-ID supercontig_59; pos 322759 to 323251)
cgtgccttcccctcaccatccggtactatttcttgaatccaaattttctcatatttatgatttatggttaagcagaattgttggtgatttatgatttatgtataaagggagcttttgttttgcttgtttatttgatttatattatagttcttatatcttagctatgattatgcggaagatgcatccaacgtattaccatagatcttggcttcttgaccagattggatcatatattaacatttggatgccgaagattgacacttttttgaaccagtcactgtattgtcaaaatgataatacaatttaaatgttgatggtgaaatatcaaatcttaattgcctgaacaacctgtcatgcaagtcaagactaaagagagcaaattatccgtagctttttttagaaaatgtttccataaatgtgccagctactatgcatccgagtaaatgtctagtggtgtaatgctattctgtttttgctctttcttgttcagcaa

SEQ ID NO: 76654 - DNA, 722 bp, Carica papaya
  Intron number 2 from transcript evm.model.supercontig_284. 2 (locus evm.TU.supercontig_284.2) derived from phytozome v7.0 (chr-ID supercontig_284; pos 7195 to 7916 reverse str and)
tctctcattaatcagcttgaaaaggtctatattactgttgttgttattattattattgttattattattaaatttcgacgtttgaaagctaaactgttgttagtattgttaaattttttgttggctaagctgaccaagtaaattgtttaattaactcattggtttgcaaagctgtttagcttagttaccctttcacattgcactagtactgaggcattggatcatgtctgattgcctaatctcaaagtgctaaaacaattgttgggatccgctttgcagcttgaactgtatgcatgttttggctgcctgtaatgcccttacattgtattttatggtttaccttggtcatacaagttcattgatagttttagcatggagattttgaaagattgagctatctacactggtaagcctcattttggtactgaaaatgtatagatttaagtttcttaagtcctaaagatcctgaaagatgctatattatagtattttttggaagaaatattgaaacctaagaataggttatttatatctgtttcattctctggaggaaacaagtgaggtgttatagcaaacatgttaattttctgtcagagacatgttttgccttgttgatattctgtgtaattagttgatttttgtatattgctccaaatttctattgtctgtgcttactctttttggtttcttgcaggataagaaatcactgaagttgtcacctg

SEQ ID NO: 76655 - DNA, 627 bp, Carica papaya
  Intron number 1 from transcript evm.model.supercontig_270. 8 (locus evm.TU.supercontig_270.8) derived from phytozome v7.0 (chr-ID supercontig_270; pos 128345 to 128971)
agaggaagaagtaagagagactaattcagaaactcaagctttgatttgtggttgatgctaaaaactctcaagtacatgggtatttataggtactagtttattttaatagtattattaattatccaatattttttttttcatatttgcttatttgaattaattaattattttaaaagaggaaagaaaaaagttttattgacatattaattcaattgaagaagaatttgaatgtgcaaatcaacctacaaattgcaaaataataaattaggcttgatttgttttcataaaaaaaaaatgaagagataggctagctgaacataataatttgttgaaatatgagagaaagaagtaaaaaagactaattgagaaattcaagctttgatttatggttgatgctaaaaatcttcaagtacataggtatttataggtaatagcactactactactactgctactactactaataatattattattactgctactactaatgttacttctactctactactactactaatgttacttctactctactactactactaatgttacttctactctactactactgttgttattgctactacaggtatagctgctactactactacaactcctactact

SEQ ID NO: 76656 - DNA, 806 bp, Carica papaya
  Intron number 1 from transcript evm.model.supercontig_123. 32 (locus evm.TU.supercontig_123.32) derived from phytozom e v7.0 (chr-ID supercontig_123; pos 452163 to 452968 rever se strand)
tcaagtttggaggccgagtcttgctttgtccaaaggtgtgtgtgcatgtgttttttgaacgcttaagtctcatagccatcttttcttctaccgtgaagttggatggagggtttgggctagcttttctaatgtctttggtgcttgttgggtttatcttccaaatcgtgagtgtttcatggtctcttccctttgtggcatggaaagaaagagagtagaattatgaaggaccattttctacgtcattgcttatttgggataagctgattttttacttttagctttctgtttgagctaaggtgaatataagggctttgatacttgactggctgtttatatgaattggttttgtcaacgtctactgctttaccattagctgttaatggtgaatattgcgtttcagtgtgcatcgtgtttgtggccagtgtacaggttcttgctaacttcatctgtttactgaagtctataatctatttcaaccatttctagagatttgaattctgtacactagctctattcctagaaaagttaatgcagaggttgggagaaggtggagttagcttgctcgttaagagtatttcaataatggcatattaatgagacactttagtagaaattctctacctcataaagcaggaagagaaaaaggataaatgttatgagaacaaataatgtaagagttggttgccttactttttggaggttgatctaatgcatttctgcccaggaccacactgcagtttatataaatcttctaattcttcatcatgtattacaggaaagaggcatctcagagcgaagaaagaaga

SEQ ID NO: 76657 - DNA, 366 bp, Carica papaya
  Intron number 1 from transcript evm.model.supercontig_0.14 (locus evm.TU.supercontig_0.14) derived from phytozome v7 .0 (chr-ID supercontig_0; pos 354581 to 354946 reverse str and)
cctcactcttccaagccattggcaaggtatatacgtatcatactactcttctttatttcttatcttcttgctttccaatatttgatacaaggaaagaaaatgaagaataccaactttggatcttccccaaaatttcttggaatttcttgtttttgtttttcgtccttaatggttttgtcttgaaactcttgacctaattccccacaatctgcactgccattaggccaagtgccggagaaaatggatgcataaaaaccaaagccagaaaagaaaaaagaaaaagagaaggccattaatggatatatacaatgttgttaaatgagaacatgtataatattgcaggtagtgtcaactgaagctagagca

SEQ ID NO: 76658 - DNA, 418 bp, Carica papaya
  Intron number 2 from transcript evm.model.supercontig_44.4 1 (locus evm.TU.supercontig_44.41) derived from phytozome v7.0 (chr-ID supercontig_44; pos 358099 to 358516)
aaaagcttcagtttagaagactgcttctcctcgtaagttgactttaattatttctcagtcaggtggatcacactatcattctgtgcttgtttgccaagaaaattccaagagagataaaatctaaactttgattcatattcttttttatgtgggtcacttgacttgctagaatcgaaagggtgactgaaatggtttggtatgttcaatcatcgtcttttatactatttttggtagaaatgaattccacgaaataaggaaaaaagaagtggaattcatctgaaagtatatgtttttatctctagaatttgtgtaatcaaactggaaagagtctgatgattgctttaaacaaaattgtaattttgagaaaatgatccaacgttttgcaatgaagttatatatttgaattttgtgcagcttt

SEQ ID NO: 76659 - DNA, 472 bp, Carica papaya
  Intron number 1 from transcript evm.model.supercontig_3.42 1 (locus evm.TU.supercontig_3.421) derived from phytozome v7.0 (chr-ID supercontig_3; pos 3030544 to 3031015)
agctctatactctggtatttatatatatatatatttatatacctacatatgcacatcaatcctctctgtcttttttcctctcatctaacctttgcgtctttttaaaatcggtgcatgcaggagctttctttcttcaattacttttcttttatttctgtgtttatgtaaaattattgtctctgtttctgtgttaccgattggctctgcatggttttggtttttaatgtcgacgggtgtggcggatcgtgcaggtcatgaccgacccggacgcacccagcccgagtgagcctagtatgagagaatgggtccattggttagtggctaaattgtaatttcatatttattattattattttactttttgcgatttatttattttttttccattcataaaagaaagtccgagtctaatttgttatttgtttgatttctttcagggtcgtggtggacattcctggaggcaccaacccga

SEQ ID NO: 76660 - DNA, 531 bp, Carica papaya
  Intron number 1 from transcript evm.model.supercontig_129. 47 (locus evm.TU.supercontig_129.47) derived from phytozom e v7.0 (chr-ID supercontig_129; pos 402477 to 403007)
aggttttgcttcttctgcccatcacgacgaagctggtatttctctctctttgtgtacaaatgttaattttgatttcgatctcacgcggactagggttttagtttatcctcttgtttctgatattattagggcggatttatggttgatattggcgttccctgaatgtttttgcttttagattcgtagttctttgttattttccattgttgcaccggatgaaacatggttggagagaagagaattagttattctttgattgaggatctatctactttttgactagatttacggttaatgtgtttgcttttagattcgtagttctttgttgtttttcagtgttgcgccggatgaaatatggtcggaggtaagagaattaggatttctttgattgaagatctatctatttctttggctagattatagaagcatttcttttttacttttttggcttctgatttccatgtaattgatttggtcttttgatttgttttttaagctgaggcttcaaagtgggagaagataacttatttg

SEQ ID NO: 76661 - DNA, 736 bp, Carica papaya
  Intron number 2 from transcript evm.model.supercontig_52.4 2 (locus evm.TU.supercontig_52.42) derived from phytozome v7.0 (chr-ID supercontig_52; pos 367913 to 368648 reverse strand)
tttgggggatcagataataaagaattgcttcaaaggtgaatccctcttgcaaccacacacattttaccagtatggttgaattaaatctatgagctattatgaactgtgctggatcacttagaaattccaggtggtggggagacttcaaaattacatatgaatcgctctaataattctacattatcactacatttaccaagctaattctgttggtagcctgccaaggatggatttttatacctgtctgtagtgctaagactttaaacaggttgattgaactattttctatcagcttctttcgttaaatcaattatttaagatgttatcaaagtaaaacttttattatctgaatgctaactgctatattcgtatgaatacatgattttgcacaagtaaggtttggttgtatttgttcattttttcagcagcctggtggacttaaatttgagggactgtgttagattataaataattgattggcatattttttatcagcttaaaccagaaatttttttgagattggactcacattttcatcttgaacttgcatctctattatgatggtttttgcttgttgaactggaaaatgtgtgtgtttgtacatgtgcaatgtacaatgcacaacaaactactatttgttttcttcttccatcgctttctatggttttcgaatgcttttatgtttccggctaacccgatagttgattgaagtgcaggtttacttctcagttcaaag

SEQ ID NO: 76662 - DNA, 571 bp, Carica papaya
  Intron number 1 from transcript evm.model.supercontig_30.7 9 (locus evm.TU.supercontig_30.79) derived from phytozome v7.0 (chr-ID supercontig_30; pos 1099065 to 1099635)
cagcgtactctttctactactatagttaatacagaaaaaatttcaaaacgaatagttagaatttttttttcgatataaaacactcatgtcgataaaatgatttgagccccctttttttattggaaatggaaaaatgggtatttcaaacaccctttcgaaatttttttttcgaatgctgaattgatgacctaagtataaagtaagaagaattctttggatttgaagaaaaaaaacaactttgctgacaattatctatttttggttggtcagaagaatcctccgaatattccggtcttggattagtgatcatattcgatatttttttttgaatatgaatagagaagagagggagaggataggctcattacattaaaaaaaaaaaaaagacatgggaatgaaactcccataagaaattttgaagtaattgagcgtgagagccaaatgaatcgaaagattcatgtttggttcgggaaggggtcatgaaattttttgaaatgaatgtaaagataatctactttcattaagtgatttattagataatcgaaaacagaggatcttgaatactattcga

SEQ ID NO: 76663 - DNA, 839 bp, Carica papaya
  Intron number 2 from transcript evm.model.supercontig_56.1 03 (locus evm.TU.supercontig_56.103) derived from phytozom e v7.0 (chr-ID supercontig_56; pos 1261793 to 1262631 reve rse strand)
tttctttgggccaaatctgcagctattcttaacaggtaatttacagatattttactcaagaggaataattaggtcagactgtttagtgtatgtacgaaagctatgcaagtcaaggtgatcagttagaatttgcatgatgcacaagtccaatcttgacatgctgatttttgttgtctgtgatggtttttacattaattacccttgttgcagatcacccaaattgcttatttgtgctaagaaaataacttgttttgacattgaaagagattcttattatagattttcagtttttgttggtcatttaaaattatgagaagtattggatatctagggttttggagagcagttttgtactatgatcaatctgggattagcctcaagttctgtgttggcatctctggaattagcagaatttttcctaaatttaattttatcgagtagaaacaactaatacgagtaagaagtgattgatgaataaatgaatgggagtgtcgtactacatgaagtggccgcttattgcagtcttactcttaggtccattgacagggtaagtttagatttttctttctattctcttactgccatcccttctgtaaactgactattgaagaaacaaaaagaaaacattagggaaagggttctgatattgatctttgattagcctagcttctgtcacctgtcaagtgtgaagatcatgttagaaaacaataactgatatggaggcaaaaatgatgtgagcacctaatttttcttccattagtaacttgcaattgaatcaattagatatttcattgttctgaacaggcctgctccacctctgccagaattgcatctatcag

SEQ ID NO: 76664 - DNA, 843 bp, Carica papaya
  Intron number 2 from transcript evm.model.supercontig_21.1 98 (locus evm.TU.supercontig_21.198) derived from phytozom e v7.0 (chr-ID supercontig_21; pos 2047618 to 2048460)
acatagcttccggttgtcaggtctacaagctccaggtactgttcttttaccttgaatatacacaaacactggacttctcttttgtgttaacatatgttctttgattgaatgaatgttaactggacatgttgggtaaggttagatctctgattctgtttagcaaattttgagtgttagaataaaaccattttggcttactcctttaaaacaaatacgtaaattttgtgaaattcatttgtaaaagttatatttaattcaaaaatttttggtagataataggaattgatctcacttgaaaagtgaaattcaaagtagaattagaacaataatttaatttttcacattttggtgctcatgtcatgtgtatacatgtattatttgcgaagttattggtatgaattctgttgagtcatgaggaagaatcatgtgcttgtgtgagagagaatactttgcttgggaagaatgcttgtgcttctatggatagttgctcagtttccaagaacatggaaaggaactttatggaagatgataagtatttagtttcaaatttgatgacttgttctttttttccttactttcagcctcccatacctcatggcgtatttttttgggttgagatgaatgtggtggttttgaaattaagttggacacatttgtgttaatttattcatgatttctaatacaatctgttttggacctctacttgtttgattactgatatgccacagtccaggtggatgtttttcttagaatgactctttttatttatttatttattttgtttttggttgctaaatacaagaatgattttagttacttatttctttttgcttatagatatca

SEQ ID NO: 76665 - DNA, 522 bp, Carica papaya
  Intron number 1 from transcript evm.model.supercontig_52.7 6 (locus evm.TU.supercontig_52.76) derived from phytozome v7.0 (chr-ID supercontig_52; pos 694596 to 695117 reverse strand)
gcttacaggtatattcaaccttattgtgattcatttagaaatctgaaaatggaattctttcaaggtaaacataaaataattgaatgctcgtctctgtggattgaaatggaaatgaatcaatctttagctgaataatgttaatctcttatggtatgttgggtatcaactgggttactgcgggtacaggtagagatggactacggacttgcaatggaatttgtacgaagaagaaatatgtaaaactgatttctttaattatcttttggatggtgtgaagaaagaggaacaattgttcgaaatagagataggtggatatatgtttttgactctttaattttatgtcatgacatttataaggcgaaagattttgaaaatgtcattgatttattatgtaagttgtaaataccttgtaagtagatgacaccctcttggtgccatatacttataattcatttttttatctagaaaaaaatgaattaagtctcttataactgggttttaattgatgcagggtcataagca

SEQ ID NO: 76666 - DNA, 846 bp, Carica papaya
  Intron number 1 from transcript evm.model.supercontig_20.1 12 (locus evm.TU.supercontig_20.112) derived from phytozom e v7.0 (chr-ID supercontig_20; pos 1247902 to 1248747)
acaactatctcgctttcattcttgctcgaggagaggtactttctgtttggttctcgtggaaaagataataatgggtctgctttgagctgtgtgaatttgctgggagaattgtgggttttttgattgtcggactattggattctccttagggtggtattgctaattgggttgtgtttttattaaaggaattaagatttattggcagtattaagtgggattttgttgtttggggatttgggttttggttcgatcctttgtttgcagagagaatgatgtttttcttggctggtctttttggttattaatcagttcttttggttttgtggagttcagcatttgagagagagttaggggttttatcttgatgaaaatgtggaaattgttcaaattcctggactctggttgctttaagagtttcgaccatgttaggttgacttgaatgaatcctttacctaacgattaaagatcatcggataattctccattaagcttacatagctaacataatgaatttaacttgaacttcataatttcttaatgctaaaatcattctaatcaaagcctttcgcttgtgagaatttttatatgttatcgcagatggccttcagcattttttcctatcaatttaaatagaatagattgcagctggttcactatgctgtgaaatacatttgtgatatttaaatagttaccctgttacaatgaaaccggttttcttgcctatggaccgtcaaatactataacttctgattgctgatgggctgttatgatctctggcttaataatatcgttgttggaattctgtgaatagggtaaaacagtggagattcgacaagctgctggtct

SEQ ID NO: 76667 - DNA, 524 bp, Carica papaya
  Intron number 1 from transcript evm.model.supercontig_18.1 06 (locus evm.TU.supercontig_18.106) derived from phytozom e v7.0 (chr-ID supercontig_18; pos 778347 to 778870)
ccaatcggattcttcttcttgctgctctatctgaggtatttgtgtgattttcgcttgttggtatcttatgattctttaatctattctcttgtattgggtttttttgggtgttttgataatgtagctgaatgagagattatacagttttgcttttttaaatggtgggttttctatttggtttttgatttgttgcgagattaacttgatctttctgaaaagtttgaaattttaatttcgttgtctgtggctagcacttagtttcttgcgtatgtaagtttagctggtaattcagattaagaataaaaattcctttttttttcttttttggttataggtcatacttgtcatcttttgttttggattatataaggaacaacaaagaagaatagaaaagagttatactaggggtagacttatgatctggtctaaaacttaaaatttatgttcttctgcaattgtgtttattgttctttgcctttctctgtttagggaacaactgtggttgacaatttgttgaacagcga

SEQ ID NO: 76668 - DNA, 384 bp, Carica papaya
  Intron number 1 from transcript evm.model.supercontig_116. 55 (locus evm.TU.supercontig_116.55) derived from phytozom e v7.0 (chr-ID supercontig_116; pos 524381 to 524764 rever se strand)
caggggtgactctaacagaggaagcaaatcatcgggtaagagtcttcttacagaagctattttgattggttctgaagaaaaatttttaagaacagaaagaaaatattatattttatgtctgatagtggtaggtgtaattttctctgtttcaatattctaatttgaaaacaaaatttgattttgggactgcattgtggtgttaatgattttcactatgattacccactttagttcttggggagaattggtgaagaagacgtgaaatggaaaatctttatgtttatgtgagattcgctgaaaaggaaccattgtttattagtctgattacgggaaattcacggaatttaacagatgtttgtttttttggtttaggagcacttgaga

SEQ ID NO: 76669 - DNA, 539 bp, Carica papaya
  Intron number 2 from transcript evm.model.supercontig_44.1 14 (locus evm.TU.supercontig_44.114) derived from phytozom e v7.0 (chr-ID supercontig_44; pos 1464642 to 1465180)
tcttttcaactttcttccgtgcatagttcccaactgttagctctctttctctttctctctctctcacgtctattgtaattgggaatctaattttgttttccatgtacgatgcttttctactgatttgattaatagataatcataatgatagaacattaaaattacatcttggatgttatatgtatccgctactgggtatatttaattagtccttagatatgggaatactatggtatagtttagatctccagggtaaataatcaaagtttaaaagatagaacagtaggtagtttgaacttcggagtagaagaaacacgagattacaagtactgaaaattggtgacgcagtgtcatgaatgaaacacctcaagattcctgctctagtcaaacattataagtacagttctgtttatgcatttgacataaaatatttccccatgttagttcagaaatagttaaataagagtttgactgggttcctgattttgtctccgggttggtcaggcacactcaattcagcctgccttgaagctgctccc

SEQ ID NO: 76670 - DNA, 795 bp, Carica papaya
  Intron number 1 from transcript evm.model.supercontig_48.1 67 (locus evm.TU.supercontig_48.167) derived from phytozom e v7.0 (chr-ID supercontig_48; pos 972092 to 972886 revers e strand)
ttttcggggtatgtacgtataacttttcttggataattttttttttttaaactccttttatgttattttgttttgtgttctctatctgtttgattttattcttctttgaaggtactacactacaactttcacatggttgatttcctctgagtagtagttggattagtatcagttaactgatagtggattgatatggtgcttagttctttttttttttttaatttttatttttttattgaagagaatatggagtagagtacagctatttttggacagagaagcctacactttcttagcttggctttagttctttgccactttctctattatttcttgtaggaaaatctaagtcaaatagcctgttttctgtttcactttcttcaattagcagggcagttcttgggtaacataaatatcatcatgattctttcttgatatagaaatgttattctttagcttcttcattttcatttactcatctggcttggtttgttgttgagaagatcacattttctgaaaacttctgttggttttgtgttcataaataccatcatgttgccggagggaaaatgactaattgctacttatttcatgcctgtttcttccacgaaggacttagaaccaactaattgctacttatttctgaaaccaagttctttcaaggacttgattacgtagaggaaaagcttttgagacctactaggatgaagctagataaattcatctgaggatgagttggtcttgacttctattctgatagccactctgatcaatctttgtatatccattacaggg

SEQ ID NO: 76671 - DNA, 593 bp, Carica papaya
  Intron number 1 from transcript evm.model.supercontig_46.9 3 (locus evm.TU.supercontig_46.93) derived from phytozome v7.0 (chr-ID supercontig_46; pos 899018 to 899610 reverse strand)
gtgacaggtcaggaaggctgtatatgtactacagaacgcgcgattgtgaacctggatcggaaggggaagatgacgatgggctataaggatgagaagtaagaaaaaaagtgtggaatagcagctggaaggagattttccactgtccgtaccgtcaagcgaagtttggagtcacggtggaggctatgggttacaacacgacggtgctgttatagaatagaaaagaggtgaggcgggtaggatatgacttggaggtgtggtcagtcattttttgaaaatcgaattgctcgccaatacccttatatccaaaatgcacttacatagggtcgttttggacattccactaatatgagcttgaaactcaacagattgaaagcagatgagttgagaactcaaaaacaatttagctgggccaaaaaggggaagtgggttgactggtttggatcgagctcaaacaaaaggacaacccaacaaacctaaaattagattggtatggcgaaaaaaaaaattgaattggctggagactgactctgaagatgagagatgaagttgatggcgtagggggagatcaagggagaagggaagaagaaaaatcg

SEQ ID NO: 76672 - DNA, 738 bp, Carica papaya
  Intron number 1 from transcript evm.model.supercontig_17.2 15 (locus evm.TU.supercontig_17.215) derived from phytozom e v7.0 (chr-ID supercontig_17; pos 2553166 to 2553903 reve rse strand)
gcagcagaaggtaaccgtgcccttgtttattaaattgtttatcaattccttcatagtaaaaatgatttcatatatgttattgtgagagggggctgtctttagaaatgtaggaattcttgtgaccacatcattttgtcatgatacgaaatgagtatttgatgatgttaattatatgctcacatttccctaggatttacttgctcacatgccttatgaaaatggagggcgagaataaaagcatccaatgcagaagctcaccactagtaacagatggtgaccaactcattggtaaaatacagaattcctattgtggctgagtttgttttccttatttccttccatttacagatagaatcctgctgtctccgtcaatttatgcatcttcttattttcttcgtgcaatttgctttcctttgctttgtggatttttcttctcttgttgacctctggcgaactttagttttgcagtttgcttctctgttctactctgaatttttaattctggagtgtttcttctgtcatcctcatgtgcgttttcatttagtaaaactatctcatggagtacaattgtttctataatccagcggttgattgatcatgaatccttcgagaacaaagttcccttttttgctcttttgagttctgatgcttttgcgtttgcacctttagtgctataagcaatcttctcttctgtttcccgctcatgtctctgtgtttttatatttttttatgcagtag

SEQ ID NO: 76673 - DNA, 676 bp, Carica papaya
  Intron number 1 from transcript evm.model.supercontig_27.2 31 (locus evm.TU.supercontig_27.231) derived from phytozom e v7.0 (chr-ID supercontig_27; pos 2159047 to 2159722)
ttcttcgagcatctcttctgcattggaggaagcaggtagtttatttttgaattttgaccgagtttttgttgtgattaacggcactgttactctattgttcttcagattcagtcgggagttctttggtatgcattattttcttctttttggactgtgacgtgacatttgtggttggaaaaaaaaaaagcggatttcttgaaccgtcaacgaagttacagggggttttgtgtcacaacagtctcgagtcaaaagttttttccagcttaatcagttgtaaaattattagtctaaaacgaaaagggaagaagaattcacttcttttttcaccttttaagtatttcttaccaaataatcatcatatatgtaagagtttataaattggaatttactcattaatgcattttttacttattttttcaatagtttgtaaactagacgagcatatataagattcgaagaatcaaatcatatgaatagaagtatgaaatcttttaactcttcaaatctgtggagcatagcagtgtgagtcctttccattaaatattgtggaaaatttatgatttttcctttttttcttcccctcctcactttaagttaatttaccaaatccacgtgcttaaatatctacgggatgttcatgtgagttactttttggcaggggaaaagtggggtttgg

SEQ ID NO: 76674 - DNA, 373 bp, Carica papaya
  Intron number 2 from transcript evm.model.supercontig_20.1 87 (locus evm.TU.supercontig_20.187) derived from phytozom e v7.0 (chr-ID supercontig_20; pos 1970781 to 1971153)
ctactctgactgaagctgccggtgccattgtcgatgtaagctctctcgcgattcttagtaatttttgtagtcatgtttgttttatggagaaatgattccggaaaaattttcggtccaggagggaggggaataattagattgtgagctgtgtgagtgcttttacttcttttattggaaggtgattccttaaacatgatttctctatcttcgggttaatatttcaaaaagaatagatatcttctggttaagagtgaatttcatgccatcaatttgagaaaagtagagactgaaatcaattttctgtttacatgtaaaaatctttatttatagaaacttctgattttacctgaaattgccaggactccttcacgcg

SEQ ID NO: 76675 - DNA, 717 bp, Carica papaya
  Intron number 1 from transcript evm.model.supercontig_175. 8 (locus evm.TU.supercontig_175.8) derived from phytozome v7.0 (chr-ID supercontig_175; pos 184009 to 184725)
ttgcggagaaagatccgactggtcgatatatccgggtatggattttctgtttgtttttatttctcttgctgcatttattttttgtttggcgaatatgaaaagcttcgaaagaattaaatcttcttttttttcctttgttgagttaatgatgttttaattccacgtcagaaagaattttcagcaacttagcggcattcttatggggttaatttgactgttgataaataacaattgtgcattttctttgtacttgatagttttactttctcaactacgaaatagagcactgtgcttccggtgaaaatctttcattaaggacaacgattgtactgttttatgatctttctttgtttttattagtctttttttctaacattgattcgtgtacatagctttagagagttgttttttcttttttcttcacatgactgaaataaaaaaattaacttgaagattgtttcttatatcatgaagacaatttctcgttattactgctgcttattgtttagaatgaacctgttaattttggattaaggtattgtgaacttccagtgaattttttactgtttgtctgaagtggcttctagttatgtcttttcatccctcattttagttgctttatttgagtcaacatgttattggggtgacttattttctccattggattagtagtattacgatctttatttctttctttttttctgttcttccttcagt

SEQ ID NO: 76676 - DNA, 267 bp, Carica papaya
  Intron number 1 from transcript evm.model.supercontig_166. 16 (locus evm.TU.supercontig_166.16) derived from phytozom e v7.0 (chr-ID supercontig_166; pos 91935 to 92201)
ttgtaccgacaaggtgattttcacttctcttttatattacttcctctgcttgttaattagctttttcctttcaattaaatttgattctgcggtgatataagatggcgatatgtttttgtagtaccagcttttacttaagaaggttttttttttttcctttttctttcgtgttgttctttgataatgtatagtctggtatatactgattattattccatttttttgtcttctctgtttctttcttcctctctcttttggtgtagttga

SEQ ID NO: 76677 - DNA, 949 bp, Carica papaya
  Intron number 1 from transcript evm.model.supercontig_179. 52 (locus evm.TU.supercontig_179.52) derived from phytozom e v7.0 (chr-ID supercontig_179; pos 340649 to 341597 rever se strand)
gttcgctgctacagagagaattggaaaagtcaaaagtgactttttttgtgttagactaaaaactgtagatgatgtactccttctctttaccatgtattttagatttgtcatcaggaaattgattataattaattaattaatgattataaattatcacaatgaaataattaatttttttttataatacagtatttaattaatttgtttttataatacagtattcagtagtgttttgatttggagtaattataagttttctaaaagcacaaataaaaataagtatgaattataaattataaaagagaaaagaagaaattcaaaatttccttttcccggcaaaaccccattgttgcctagaacccaagacgattcacttccgcggtcactccttttcacacaggcctgcaatcagtctcaccggaagccactcgctctctctctctctctatatgtatgtacagacacacacataaacgcacaggtgtagtgcaggtactcacataagcacacaaaggaagacataatctgagatttgactcgactactcagctaagcgttgtgtgtttctcatttacagtttacatttttctttgaattttatgatgtttttcctttttgctttgatgtttccttagggctttaagtttttatttcatctttgcgcatcactcgatgcatttttcaattatcgttttgttttcgggatttagttgtgccgttgatatcttaacacgatatgatcgaaagtagagtgttcggtcaaaattgcgttttttcctgtgtattcatcacttcccgtaatcgatcttcaaaagttagcccattctattaccttctgttagaccataattttatgaattggcgatgcgttctttttcttcgcgaatccgatccttgtttgggaattgattctgtgattttgcagagtatggtttgccctgtttaagga

SEQ ID NO: 76678 - DNA, 786 bp, Carica papaya
  Intron number 1 from transcript evm.model.supercontig_128. 52 (locus evm.TU.supercontig_128.52) derived from phytozom e v7.0 (chr-ID supercontig_128; pos 399428 to 400213 rever se strand)
acagcttacagcatacacaaccaccccaatgtaagtagttatataaatataaatccttttttgtgctagtttatgcaactaaaacttgttatacttgattcgacctaccttcttcccatccgatacagctataagatgaatggcatgtcatatactttcgcattacattctgcatatagagcacaaatttatatcagtagtcattggttagtcatagtatcacttcaaagaaaattttgatgacatgtagaaattcaaatagcaaaagcaaacaagaaatcattaacaaacaaaacaatttaatttcaagattgaagggaattaatgagaaatgcacttctactataacttctgtagtgaattttataagaaaaatccgctaaagttatttacgtttgatagtagcactgaacctccagagtcccggcccaaaaaattaaagttcttcattgggaataataaaaattcagaacatgttcagttcccagaaaatgagcaagggtattaaaaaggaaaaaaggaaaaaagaaaaagaaaattagcaaagacagtgtcctctggtgattcataaatggcaggcgaggcatggggtgagtttcttcaaatggctttgccactctcatttcaattgcaacgtcaaattaatttcttaatagagctggaaaacatgagctttgatatatgtagatatggtaattttgagaataatttagctacagaattgtgactgtttctatcattgctgtatctcatatgtgtttctaataaaagcttctcattttacag

SEQ ID NO: 76679 - DNA, 731 bp, Carica papaya
  Intron number 1 from transcript evm.model.supercontig_24.9 6 (locus evm.TU.supercontig_24.96) derived from phytozome v7.0 (chr-ID supercontig_24; pos 2415656 to 2416386 revers e strand)
aggtttgtactagttaaaagcttaagtctttgccccatcaactttaaccttgtaattaatgttccttgatttagcacaagtgtttctgcgagatattggtctgactcaccatttaacaaaaacatataagacaaacttgctagttcaagccaccatgccacattgccttgatctttgaccctcttaagttaaatacaattacaaaatctcttttttattttttttttttgttttaattggacaaataatctcttattaataatgtgttaattgtatgttaaaaaattcaataactgcataatcatattagatgactgtcgaattatttgactttctgactgtgcacatcaatatttatacagtaaagttaatgaagtgttaatataaaggttattcttttaataaaataaaaaaatattcttgtaattgtgtttgaattaagaagagtatttttgttaattatccttaatacactaatgttatcttggtgcacgtatcaagatacctgcatcatcaataccctaatattctttatttctcttgagctaagcacctgaacaaccatttcaagatggctaatcattggcagattcacttttagaattttctcttcattttttgtcatctcttgctgtaagtgtatggttagactaacttcttccatgctaagcaatttaaaatctttgtatcttgcagttaaagaatagagtgcacaaactgttgaacactta

SEQ ID NO: 76680 - DNA, 773 bp, Carica papaya
  Intron number 1 from transcript evm.model.supercontig_33.1 81 (locus evm.TU.supercontig_33.181) derived from phytozom e v7.0 (chr-ID supercontig_33; pos 1809530 to 1810302)
ccatcactcagcttggtggaccagatagtgggtatttttttttttttttccagttatgtgattatatgtgcgaatgattcaggcataaataataagttgattcttcaatttttttttttttgaaaaaaataaattgatactttcaatttttctaatgttatcttattctttcttcttcgggtttcttttttcttgcttttgaatgtggtcttactgttcgatttatctcaaattggttggaaactcctgcactgccacgttttcaaatgtatgcattgggtgttctctgctgatgaaattcttttctcaaagtttgttatatcctcgaagaggtgcagaagaagatgattatatctagttcatgttttttggataaaaaggaaatattattattgtatgtggttcttcttcgaagaagctgattatatcaaggttttattatgttctcaacttcaactgtaatgaaaagcaagttcaaggaagtttaaggagtaacttatggcaaaagatatccaatttgaaacattgatgcaaattctttgcactcttctctgcagaaaaatatatacttgtatgaaaaaacaaaggtaggatgacattttcttttatggtgggtgttgttttgtctccacaaggattttgctgctcatatcctcaatgattgagtgcatatgctctcttgacttctggaacttgtggattatgatttctttcttagctactttcatcaccacttggtttcaggggcaacaccaaaaggtgttttaagagtt

SEQ ID NO: 76681 - DNA, 682 bp, Carica papaya
  Intron number 1 from transcript evm.model.supercontig_17.5 1 (locus evm.TU.supercontig_17.51) derived from phytozome v7.0 (chr-ID supercontig_17; pos 564354 to 565035 reverse strand)
gagtacgagaggatagagaaggttcaggtactgtaatgaagcgaaaatcaactgcccatttcttggttttgtacttggtgtcctctgttttttactttttggtttttcttttcctgaaaattttgtttacttaatgatgtttctctctcattttcttttgtgggtgaagttttggtttgatttttgttagtagtttccatgatatttttgtttctccctctctctctctctctcgtaaagcaatggaactggttctagagttttgtttggattatgcagaattatgggtttttccattctaaaattgagaatgccagtttggtatttttactttaggcttagcataaaagagcttgttgattatgaagacttttttttttttcaatcattattattagtagtgttattactttaaaggattcccatttgagggtaatgttaattattacttcttgtttcaagaggaagaaaaaaaaaagaaaaggaattatctttgtatattttaggtagagactttctttgggctttgtaattgatgtaaaatgatttgaaggttactttattcaagtgatactgttagaaatactttgaggtattttatacttgaatttttacacaatcaaatttttccttgttttatttgatcatacagactggtattatatcaccaagtaaactgagg

SEQ ID NO: 76682 - DNA, 1012 bp, Carica papaya
  Intron number 1 from transcript evm.model.supercontig_194. 8 (locus evm.TU.supercontig_194.8) derived from phytozome v7.0 (chr-ID supercontig_194; pos 151428 to 152439)
gcaaagaaggcattcttgaggatttcgctactcaggtttgtcactttctctctactataaatctctatttctttaccttgtaggcatatgtatttgtacacctgtgtacctagaacgcagagatagtattacatgtagggatatgattgttttaattttcatttctggtcttacgaggtttcttaagtttcttctatgctgcggatttggttaccttttttttttttttttttttccgtctaatcatgttttagcattcgtttattgttatctttccctcactcactcactcactcactcactccttaaagggtattaggggatttgagattatggtggtgagtttgctctctctctctctctctctctctctctctctctctaatttttctgtttgacttatgtatgtgttattttttagtgattttgcttgatgatattgacactcttaagtagcatctaatatcccataaaatgcgtagcaagcattttatttctaccaaaatttttgtgaaattcgcaagttataacttataagtcaagcaccaagtcctagctacttcaactatgcggattgttccctcaaaacgtgattagcctgctaaaaactaaaactaatatttacttgtcttgagtcgcatagtcattgtattcagtgaagatatttgctcatgatagattcgttagagcagacatataatcatttttctccactcgttttggagcaagttgtggagcattcttgtccttgccaatttatttgatcgattcttttggaccctccccaatggtttaataaatacacatatactatcctaatttaggtaaacttagcaagaagttgcaacactggtaggtcttgtaaagagtggattttttcgtagttgaaacttttgcaacactgctagtcttggattttcttgtcaatagttactcctttactgagcactatttttgggattgtttggaataatttatttaaacttggtgtggtagggaggtgacagaaaag

SEQ ID NO: 76683 - DNA, 700 bp, Carica papaya
  Intron number 1 from transcript evm.model.supercontig_37.7 7 (locus evm.TU.supercontig_37.77) derived from phytozome v7.0 (chr-ID supercontig_37; pos 581468 to 582167 reverse strand)
tatcagttctggcctaagaaccctacttcttacaggtttgaagacttcttttacgttttcttttttcagttctttccattttcatgtatgtcaaagatagaacagatctagattaaaacaagaaagaaacagattcttctgtccacgttttacgtgttacatgcaggaaattctacgtttcctgccatgtttttctagtaaattaattttatggtcataataataattaaataatatcgtctagtaatcacttaactacaaatgtacagtatatatctataaactatttagtgaaacccattatatgtgcaaaattctactgtttgatttattttagaatgaaaataaattttcttgagtaaattaaatattgattagtagtcacatatatttttgcaaagtacactgtaaaatcattaattagctttttccattatgcattaatttgtggggtaaaggtggattatgtattatgtaaatgtttttactatgaagttaattgtgttgttttttaattacaaagttaattatagaattattaaatataaatatttctaaatcaataaaaagtatgaatttttatttaaaaattattattttttaatatttttgcgaacatgtatgtaacttgttagaattcataaacttataaagaaatcaaagtgttaaattaattgatgttttattcacagggaagtta

SEQ ID NO: 76684 - DNA, 766 bp, Carica papaya
  Intron number 1 from transcript evm.model.supercontig_454. 3 (locus evm.TU.supercontig_454.3) derived from phytozome v7.0 (chr-ID supercontig_454; pos 20545 to 21310 reverse s trand)
tgaagcgtctcgttatcaaggttcgtttgcattcctctgaaattgattttttgttgttgttctgaatgttgatttatttgttttggttttgcgtttggatacatgtttaagatgatttgtgcatgtccgattgattttagattgttcttgtggagggcacccaatgaggtgaaccttaaaattcgttcgtttttttttttcgtattactcagtgtttggctgccgggaatttgagtggaaatatagaagaaagtgaagtttgttattgatttgttgatattcttttcgtttttctagtagttgaaagtagtgtgaattaggcgaaatgcgtgtttttagctcgatacgaagtttacatgcttaatcatactgggttttgttaaccgggtggtgtaggatctctttttgttttttttttaaaaaaaacttttatcttgcgtttagaaatgaagcctttttggataattttctttttcaaatttcgcgggaatattactggaattgtgacgttttgtaaatcgactccgtgataactgaaaacaacctcaaaagggttgttcagcattgatttcttttctaaaagatagaactttttgaaacagaatcttgtgtggttttcattgcaagtggggtatacgtctggatataaagggtgtttctttaattctttttattgaattcgttttttttttttaaagttggaatcaattcggtcaattgatgctttgataaatattaaaggttggaacagctgttgttactcgaa

SEQ ID NO: 76685 - DNA, 737 bp, Carica papaya
  Intron number 1 from transcript evm.model.supercontig_17.1 46 (locus evm.TU.supercontig_17.146) derived from phytozom e v7.0 (chr-ID supercontig_17; pos 1859393 to 1860129 reve rse strand)
acttcggcatcgttaggtaaatttttaagcatttttgttggttgcctagaaaaactaagaaagggccctggtctccatttgccagttccttatatttttcaatttaattatttatttatttttagttttggtttgtatactgttttgtagaataagaacatgttgaattagtagttactgataagtataggaaataaggaaaagggggtaattatgccctccgtctgtttggttgtcagtggggaaaaaaagaaaaattgtgaacataaagagtatttttaaccatctttgtgtagcaaagccgaagcacaacggttattagttgaaacaatatagcatgtctctggtggtctgcttgatgtttagttttttctttttcgttattttcattttgaaaagaaagtactaatttttcaatgcaaaactggaagttatggataggttaatttcttgttttgctgggatttgtatatgtacttctgttgacaatacctttgttgcataatttattatgatagagaaagtacctgtttcttttttgtttgctttcatggaagttgaagcagcaaaaccagttaactgtggtaaactttgacacccggatatgcaatctaagggaaaaacatgtcaccttcaatttctaatttttccttaaccattcggatctgtgtgttctgattatagtttcaactctctggtgttcttttattttgatgtttttcttctgttttgtagtg

SEQ ID NO: 76686 - DNA, 388 bp, Carica papaya
  Intron number 2 from transcript evm.model.supercontig_187. 24 (locus evm.TU.supercontig_187.24) derived from phytozom e v7.0 (chr-ID supercontig_187; pos 272966 to 273353 rever se strand)
cggtgcacagtttctggttcgcctattgaggactggtattttctttgcatttccgtgtggtttcccttaaactgttgaaaattcataattactttttctgcctattcacttaaaattatggcagtaaagtttgtgggatcaagtgtactccacaatgtatttcactctacatctcttggatttgggctttatggttcctttttaatatttgcttattggttctcttgttataagttcacaacgagcagtaggagatcagtctaagtagaactttgagtttgtgcacttggttttgtgcttataactgaagagcattgtttctcatattctttcttttctcttttcggggttaggtttaggaaaaggaattaccagttccagtggaaat

SEQ ID NO: 76687 - DNA, 515 bp, Carica papaya
  Intron number 3 from transcript evm.model.supercontig_5.35 9 (locus evm.TU.supercontig_5.359) derived from phytozome v7.0 (chr-ID supercontig_5; pos 3333218 to 3333732 reverse strand)
ctttatctaagacgtaaaagctgcatttaacattccttcatgttttcctttacattctccttttccagctctgctaaatgcatttatcttctgtgaataatgtcactgttatcatggtagtattgattctggaacttgtaactatttatggaggcattcgctctggcattctttgaagatatgattcttctgcttctttctgctattgcttccatcagtaggacctaggtgatacaaataaatgtttttgttattggcaatccttctggaaaaatattattatggagctgatagttaaagttaatgttaatggtaaataatctggtttccaatgacctggaataagactgttttgtgatgatgaataaatgtttgttagcaacccatatatatttgaatatgcacttgaggaactcactatggagaaatattgtataggcaattaatcatttgataattgatgttcatggtaataaccaggcttccagtgcgttgggataagactgtcattgttg

SEQ ID NO: 76688 - DNA, 677 bp, Carica papaya
  Intron number 2 from transcript evm.model.supercontig_150. 2 (locus evm.TU.supercontig_150.2) derived from phytozome v7.0 (chr-ID supercontig_150; pos 25923 to 26599)
aatctttagagagaggaagcagggtaagattttatcacttctttccattttatttatttttgatagtttaatataagggcaagaatgagaatgtattataatgagagaatgcaatgtaaatgaaatagaaatctgaatcaaactagtattccagttccaagtaatgcatactcgattcaagttagctttttatttttttgtggttctttctttaactagtggaaaatacaaattcattattgtggaattaaatatataagtgaagttcattcaattgtgcatcaaatataataaatcatgacttccacatatcaataactaggatttagaattaaataagaatagaataacaatttaatcaaagttatcctattcgttgtacacacctctttgatcaagatgatctaggggatcttattccatatgaattcataggaaaaactggattgagatctgattttggacctagaggtgagtttatcaggcaacaaatattatcgagatagggcttctggtgtaaggccttgagattcttgctggttatgtagatttggtttgtcccctttggtgggattttatgagatgtcccttttagaacaactatggccaagaaagagtaacgtttaattatggtgtttgcaggtgattgcaatattagataggataaaggctgagaa

SEQ ID NO: 76689 - DNA, 951 bp, Carica papaya
  Intron number 2 from transcript evm.model.supercontig_21.2 03 (locus evm.TU.supercontig_21.203) derived from phytozom e v7.0 (chr-ID supercontig_21; pos 2065527 to 2066477)
ttcgtttagaggagactcaaattggcttgggttcagtaaggtaccttattcttctaaattctatatatacacttatgctgtttgcagagcagacacactgcaaatttaaacataatctgttagcttcttcttaacaacaatcatcactgtctgaacctgtatttatagacaatcatgcaattttatttatcatttttttaatatttttgaactagtaatttgaccaaattacaattgggctggggaaccgatgacacagtggtttggaccagtccagttttaatagcctgcagacagatatagctcattaaaaatacacaagtaactttctttccttttactaaaactttcagaatctattgcctttcctcaaatagaggacattttgttgacctcttagacatttcggcatgcaactagttgtatacccacttttccaaatgggcaaaaccctttttaccttgtgaatactaacttttaattcattcttttcaaccaaaaaagtacttttcaatgcaagggatgagaatctgcttgtgctaatttcgtcaaatcagctgtctcttgttttcttcattaaaaactgcatgaagtgctgaaggaattgaaaccaaggctgataagttgttattggtcatctagaaaacttatattaagagaaacataattttgtatcaatgtaaaattatatcattaaatttgattggcgtgatagctttcgtctgtctttcttctcaacttgtactagtgtttgctatcacatctacataattatggaagcaaaaggtgcagccttaataatctatccaggttttaactcaggtttcaactcataaccagttttattgccatatgagatgataattatcattttgttagtataggatagattccaatagtcacatgggcttgatccatggtgcagtgctccggcaaggatatattaggtgg

SEQ ID NO: 76690 - DNA, 873 bp, Carica papaya
  Intron number 2 from transcript evm.model.supercontig_27.4 5 (locus evm.TU.supercontig_27.45) derived from phytozome v7.0 (chr-ID supercontig_27; pos 461170 to 462042 reverse strand)
aagagacaatttcgaggtgtttaaatttggcattctcatttccgtgaaatatagttatggaaatgaaggattttcttctttcttcgttttctaatgctatgacgtgatcgtgtgcgcttttgtgttgtctgttacttttctatcattttcaaacaaagttacggtttcatttctattttgttgaatttattaccgtagaggaagttttacggttattgtgaggttcaacatcatttcattcagaattgaagaattttcgtgattgtcaagcagtttatgagctttctgttttggtcgattagtttagaggtttgattaaatgactgaaaattgaacaccttccaactattctctaacattcatgtctatcgcatcattttgcatggattagattaaactcgtgatatatcgtcatagtcttaatatatgttgattctattagtatatatgctttaggtggaacaatcaaacttagttttgtagacatttataggttttacagaattctatagaactgaagttctgattgttcgtaataaactcttcttccttattttagatttgctaccagaaaaacatgtgctgtaattaaaattccatctttgacaaaaaaaaagatgaattgtaatatcttgtttccagtcaattttgatacgctttccgtatgttttaaggaaaacaattgattccttcaattgctattatgatccacttctgctcattcctaaggcctcatcaataatggtgaattggttttgttagtttctgttgtctctttcccaagtttggcacacccgactgcggaatcatttttgctacttgctgtttatgtttttggtgacagtgtagcctctgatataaggtctaagattg

SEQ ID NO: 76691 - DNA, 898 bp, Carica papaya
  Intron number 1 from transcript evm.model.supercontig_158. 15 (locus evm.TU.supercontig_158.15) derived from phytozom e v7.0 (chr-ID supercontig_158; pos 235608 to 236505 rever se strand)
gaaacaaagtgcaggagaattgcgccttcataaaggttttaccagttatctcagctctttggttgaagagtttctgtttctttgattttagtttgacaacaacatgttgcacctttttaaatttttaccaagcaacattagttgattgtgtataaggagtctgttactttattacacgaaggaaaggaagatggttgggaagatggatgttatatctttgccttctgtggttaaggtttcttactgatcctggttgggttgaaagcattttgaattggtttagggatagaaattaaattaatggtacgggccacaaccacaaggcttcgtataaaaattgtggtgtcattatgaccataattagaagtggatcatataaaacccatattattgttataagtaattgtaaagtctcagcataaatatagtttaaagtgtcaaatagagcaaattgttattataagtaatcttgaagtaattatgaagataatttaagcatctacgaaccgacattataaaggttcttttttcgtgggattggtcatcttagtctattttgatccaacaccaggtgtactatgtaaaggttttctgacatattcttagtgagtagaagaggtaaaaagtccgccattctttgttggaagtattgtgcaccggtcttgttgcatccatgctatctttggatacaatttgcaaatgagaatctagttatcttctttctatctagttggttcttgagttcataagatggttcatgagataaatcagtttgttttttctattatttttattattttgtaaatttttcatcttcctgaataaagtaaattcagttgtcaaatttcttattttgctcgcagatatttctgagttgaatctacctaaatcttgtagc

SEQ ID NO: 76692 - DNA, 445 bp, Carica papaya
  Intron number 1 from transcript evm.model.supercontig_119. 88 (locus evm.TU.supercontig_119.88) derived from phytozom e v7.0 (chr-ID supercontig_119; pos 613643 to 614087 rever se strand)
cgtggtttgttctctctttcttcaaattactggtttttttagtttcttctgggcattttttatataaattacgtgagctggaaataaattatttgagttagagatcatgtaagttgttgaattaattatggtgatatcaagtccttcgttcttttttttgttgatatgacttgattatgagaatattttgtgtatatattgggaaatgttctatgcatatcctggagaatattccgggggtcctagtacttaaaggtcaaaaactctatttgtgatatactctcaatttttgtcacggtgaaaagtttatttttgatctcacacgtgaatataggtatatttgtcgaatcacgttgaatcttatgttttttcctattttactctttactttgtatgattgtgtgcgtattagagatttattttttcaacagcaattgtccacgga

SEQ ID NO: 76693 - DNA, 978 bp, Carica papaya
  Intron number 2 from transcript evm.model.supercontig_190. 5 (locus evm.TU.supercontig_190.5) derived from phytozome v7.0 (chr-ID supercontig_190; pos 25692 to 26669)
agtgttacaattatcggaccaccagatactctttagtgcgtttacttttcttaattttctgaaattcaattagcttaaagtttgtgctttcgtcttcgtcgatcgagttattttggaaattttggtgattctttgtgtccttgcggtaattatggagattctttgttttgctgttggattgaggggttagaggttggggttttgtgccaaacagttttgtgggttttgtaatttaattgatttggctaatatgtttggtaatttcagatgttttcttttcttggtttttgaggttatttgctgggtttttcttttaacattagggattacagttctgggtttaaatattataatcaatgggctttggggttgtcaactagatgttttgttgattactttaaacattggttatagtagaagatagtgtgcttgtaataggatgtaatctttcctcattttagagctgtgcgtaaatatgttcttctaattgttgttttatttattttcttagaatcaaatagcgtacttatggctttacgaatgatatgaacttcaacagagatagttaatttttttttcctaaagtccatttgatattcaaataatttatccatgcttcacttgaaaagtttcttgatgattttattggagttctgcatcctttgtgaatgctaggattgctggctcctgacttgtcttcagctggcggtcatgtaatctgagtcatgatcttgctacttagttattgtttctttgcgttccatctttgcattaaaatttgaagttctctgatcatctgttgaatttaattgattttttcttttgctttagttgttcatgggcttgctcgctgttggacaatttatctaagccagtcctctttaaattcgatatgattaagaactgcaatcaacaagctaaaagaagttattgttctttgttgcaactgtttgatttacagtgaaggggggtttttca

SEQ ID NO: 76694 - DNA, 798 bp, Carica papaya
  Intron number 1 from transcript evm.model.supercontig_3.8 (locus evm.TU.supercontig_3.8) derived from phytozome v7.0 (chr-ID supercontig_3; pos 28214 to 29011)
ggtggcggcaaaggtacaaacctagattctctttcattttatatccgctcttcgtcttagggtttaattgatcttctgcgtattgtttcttttcttcatacagtatcgtttaggatctaacgatccgatggattttaatttccgccctctggttgatggaaaatgcggtttaggaggtagaatatttaggttttagacgttttattattcatttgtgcacgatatatgtcaaatttatagttgagaacacaataaacttatgcttctcttttggaaatgttgtcatgaattaggattatataagctaaaagcagcgctaattcgagataaacttgtgttgcctgatgtcttatactcttgtgtctacatgatcagttatagctactgtaaatgttattgttttcaggagtaatagtaatgtcattgggtttcttctcattccacttcaacattgacaatgcgttaggtcgacagaaaactggttgtataattccatcgatttagagtgttatgtttgtttttatagttaatttaaatatgatgtcactttggctgatttaaaattgctatggaagcaaaagtcccaatcttattctatcctgaaatttgcagcgtttacattttgtgaataatttctcctggtgcctgcatagaaattatttttctcggttgattataagtttagtggttgtctctgaagaggattaattttttttttggtttaaattgaatttttcactggagtgagttttttagaaagttgagtaatttgtttggcacagttgctgatattatact

SEQ ID NO: 76695 - DNA, 494 bp, Carica papaya
  Intron number 1 from transcript evm.model.supercontig_5.34 3 (locus evm.TU.supercontig_5.343) derived from phytozome v7.0 (chr-ID supercontig_5; pos 3226708 to 3227201 reverse strand)
acaattctggatttgatcgaccatctctggttcaggtgcttttgtttctagcactttagtgattttatgcatattctgcgacagaaaatggagcattttctttgtttatctgagattttcttcgatttagttttcttaatcatttggcatactttgtttatctgagaatgatcagttattttcttgatgtgtttttgctttttcaaaaaatggaaagaaaaagaggaatcgaaaggtctaaaatttaagttgatttctaattggaaatcatggatgagggagaatctcgaaaagaaacagtatacttgcatactaatcattgatcagaagccccactcatctccacaagaacttcactactacaagactcctgaagtgaaccaagcactggttactcctttttttccgtcatatcagcttctggttattcttatttcatttctgataattttgtttcaggctgcttgcattccatccatactttcggggaagga

SEQ ID NO: 76696 - DNA, 492 bp, Carica papaya
  Intron number 2 from transcript evm.model.supercontig_36.3 1 (locus evm.TU.supercontig_36.31) derived from phytozome v7.0 (chr-ID supercontig_36; pos 275186 to 275677)
cacggagaagataatctggtaatagtctgaagttacagatgttaatttttcctcttctcgatataaattaaactcaaaaggttaagaggagtattagcttttaatctatatcaaaagcaaggccaatctctaaagtcaatataggagctaaagactcaggcatcctagttgccaatctgcagtaaccgacatattgctaggcttttttggtgaatggattgctagttggtgccgcctttgtgttgtttattcttgatgtagaattagaatatttctcagaacgacttgtgatcaattctgataagcagatttacttgactggttagtctggttgtatctatagttagtttgattttactagttagcttatgagaagtttattgttttcctattttgttaaatatgtgttcataagatattagccatctactatttgtagcataaccagtataaatccaatattttttccttaggaaaattacaacaccttga

SEQ ID NO: 76697 - DNA, 761 bp, Carica papaya
  Intron number 1 from transcript evm.model.supercontig_20.2 9 (locus evm.TU.supercontig_20.29) derived from phytozome v7.0 (chr-ID supercontig_20; pos 233396 to 234156 reverse strand)
gcaggtggaaatttctcttttccagctctctttatttgagggttttatttgctccatgtttcctctcattttaaagttctttgtgcttacttccaaacctagatactctatgccgtacgagtcttctctcttcaggatttaccattttggaggggtttatatatcactgtttctcatgagtctagcttcatcactctgtggcattgattcataatattgattgtagtatgtacaattaatatttgttggacttctatccagcatttccttggatgataaaattcagagaattctatacttgaatccttgagtgatgattagccgatgattttcgcaatgccccatgattctataagaaaatgttactgttttctcaaggatttctgcagttctctttccatctctgaaagccctataagtatcaaaaagtaaagaattagtggacgatatattagacttgaaataatgctaaattttgaattattaatggagttgttttggagaatatgggtttttgagggcatatgtttgctaatgatcatgtggatcatgagtgttaaagacactgttatattcttcttagaggcaattaaattcaaataaaatgttggatttcactttaaaaatattaccaaagagtggtggttactgtctgtatcaacatttctaggggaagatattggaatccttatttccctatatagatgctaatgtttgttataacagtgaggacattcaagtcacttagacctgagaaatct

SEQ ID NO: 76698 - DNA, 955 bp, Carica papaya
  Intron number 1 from transcript evm.model.supercontig_19.1 91 (locus evm.TU.supercontig_19.191) derived from phytozom e v7.0 (chr-ID supercontig_19; pos 1401583 to 1402537 reve rse strand)
gagaaggtaggtatactcaattttgattgttttattttcctgtgtttttaaactaacttttcgtttggctttgtgagaaaattggaggaattagatgtgaaggttttgagttttgtgttttctttatgcttttctagtttaggtcatgcggaaatcagttgtactaatctagataattgaggagttgattatttctctggtttgttatagtgaaatagcactagcaattgaggcttcaagttcctagtttttatatcaggaatccgggaatgtctaaactctattcaagttttcagtaatgagaattcgagatattatcttgaatcagctgtacgttactgtttcatgtggactagaactgggcttttttctataaattctatgtgtgttttttgttgagcaaagcagttcatgggtgggttcttctggatgtaaatttttgttctttgtccttttgatggaaaacttcagctatgttatatggattatgattctttttttaaaagttttgtagctaaagctgtataattgatttgtgagtaaattcacaagattttgatgatgatgaaaatgaaattcttcatgttttcgctatctggaattgttttggctaactgctccagactggttgttttttcattatcaaagatggtttggtcttatttctttactagtcaatcttcatcatgatcatctctctttcctttcggaatgaattgttacttattctgccttgcgggtccaagtctcttgattattttagggatgtctgtttgattattttgcgaagatactagaatgttttgttgttttgatatatttgtcttcatttcttcttgttaggatgagtttttctcctctggttttatactttttctcctcctcctaataataatatttctcttcatctaaattattcatggttggcattgttgctgtaacgtccacaggcaga

SEQ ID NO: 76699 - DNA, 835 bp, Carica papaya
  Intron number 1 from transcript evm.model.supercontig_47.7 1 (locus evm.TU.supercontig_47.71) derived from phytozome v7.0 (chr-ID supercontig_47; pos 1308652 to 1309486 revers e strand)
tgtgagtaaagagttgtgggcgtggacagtgtattgtaagaaaaaaaaaatatttcttccttattccactaattattttttggattgtgcggaaggaaagaaatgtaagagcttttgagggcatagagactaatattacaaaaattaaaaataagttgatccatatttttggttctattttgttaggtcatgatctcatagattgggatgatttttgttgggtcatgcgccacttaacagatttgtaatatatactttgtacatgggcggtacttccttggtatctttgtgaataatatttcttgtcttatatttaaaaaaaaaaggatatttctgcagaagaaaaaaaacaaaagctttcaggatttcagatttgagttgtgtggtaaaatgtgttgttgaactgtgctaggtgtgagttgatttcgaatggtgaaggttctgctattactggattgaattgctaatatatgctccttgttctgacacttaagagtgcaagtgaacatgtccaagagcattttgtggaatattataaatttttgtgatatttctagtgttgtttttggagttatacagatttgttgaatgttctgcagattaatcaatacctaggtttatacgctcgctccggtgttctccctagcaagctttaccaaggaaaagatttggaggttggttgttaatgttgattgaagtctatgttgaatgttacatgataatagtgtcattaacatttaaatcaatcttctttgatcaagagagatggggccaagagataattatttttcttgtgacagggcagaactggggccaagtacataattttagattc

SEQ ID NO: 76700 - DNA, 778 bp, Carica papaya
  Intron number 1 from transcript evm.model.supercontig_28.6 3 (locus evm.TU.supercontig_28.63) derived from phytozome v7.0 (chr-ID supercontig_28; pos 830504 to 831281 reverse strand)
agcaagcccctcttgatctctggctcatcattgcggtttgttctgttttcttttattttcttttttcaatgttggcctccttttgtatagctattgctcgttatcagtttcatcaaattaagattattggtgtcgttattagggttactcagaaaattcccgtctgaatttgatatatttatatttttgcgcatgtatttgcccattttagttgtgcgcgaagaattcaaatattttgaggcacggtttggtgaaaacagattgttaagtactgccagggaggtcaacttacagtgtctttaattgggggagttgagagtcaggggaaaaatggaatggtgatttagcctagcgagtcttatgagtctacataagagattagactctttgatgttttcatggatgttggagtttgtattctttgctttcgactgcaatggttgagtgcgtcctgtagttcgtaagaagagctaggtcagctggcaagcacagctcaagaagcatagggacagacaatttatgcataaccttcatttaagtaaaatacttggttatgatgttttgtctatatccgggtgaacttcctgcatgcagaaattcaatgtcatatttttgagttgaagaaactgttgatagccacagtccttctttagagataaaaaatatgctggtagatgtctaggtaaacagtactaacttgtgtgcttacttttatgttttatctggctttttttatgatgcagagggagtacttcaaacagggcaaaattgatcagtt

SEQ ID NO: 76701 - DNA, 803 bp, Carica papaya
  Intron number 1 from transcript evm.model.supercontig_53.1 27 (locus evm.TU.supercontig_53.127) derived from phytozom e v7.0 (chr-ID supercontig_53; pos 1080627 to 1081429)
tccagtcggtcaacggagggagtaagctctaccaggtaatttgtttggttgtagttttctgtttggttgctgggaaagaagaaggaaaatttactgctttcggcttttgatttatcgtggaacttgaataaatggaaagttggtatcagttaaatgattacatcatgtgaatttatagcgcctaggttgaaaattttgagtattcttatgttgttttggtttaaaagaactgagtttgatcatgaatcaaagaaaaactactcttacatgaaggtggttttagtattgctgaactcctaggaaattctctaatttcacaatcctaacctgaatcagggatttgaacttttgattggtcaaggattgggccttctgacttggtatataggttgtaggatttcccaagatgttaaacttgggaatgttcatttgttggatcaaatctgaaattatttacttcaagaaaagaagtccatctatgtatcttcctcatttcttattttttggaattctctaagatttgtttcttttttttctttttctttccttttttagtatgtgtaattggattttgatgagtaggatgtttctcactggtactttctatgatcacttacggaatgaatgtaactgtggaagcatcaaacgtttgtgctttaggtctttcatgttttttcaaataattcagtcttgcagatattttttcttggatcaatactcctgcagattcttttatattattactaagcaacatttctcattctgcaggttttgcaaagggagaatattgcatataaattcca

SEQ ID NO: 76702 - DNA, 874 bp, Carica papaya
  Intron number 1 from transcript evm.model.supercontig_119. 63 (locus evm.TU.supercontig_119.63) derived from phytozom e v7.0 (chr-ID supercontig_119; pos 440221 to 441094 rever se strand)
tgccgaggacaagacattggatttatcattttctggtgagaatacaccatcactttattagatattattgttgacttcttaactttgtgttagttcgtgctttatctggttatgttctccatgtgaatgtctcgtttaagctaaatgagctgcagatgccgttttagagaagtaagaaagcttaagaaacatatatgttttcttacaagcttctgttggatgttcaattgttcacctgcaatatactcattaattggttagttgctagcagtattacagcatgagtggctgccatctatttccatagatgtcttttacgggaaaaaaagaccggaaggaacttcctgaaagaggactagatgcattttgtttgctccatttaacatcttgtttgctggttttcttttcatgagaccaataacagccatcatctggagtggttctaaattaataataacaaagtttcttggccagtcatttgagttgttggagggttaaagcaaaggggtgaaattttctagaatgttagtgtttttcgtgtcatcacaaaacaaatggaagttgggattgctttacccacttaaatttctaggtagaatcatgtttgtgtctgttattgctgtgtgctctttttttaccaatttccattaaagagaaaggaattccttcagcagttgattgtcttcccttctgcacataagtaaatgactttgttagtggctgaaatttaggattttgtttgtgtaaaatagatatatcataatatgttctatgagaagtcaatatttgaagtggacaaaaatgcaagttctttgccattatttttaactgcttgttttgtattttgaatttgaaatgtcttacattgtagagg

SEQ ID NO: 76703 - DNA, 543 bp, Carica papaya
  Intron number 2 from transcript evm.model.supercontig_3.49 7 (locus evm.TU.supercontig_3.497) derived from phytozome v7.0 (chr-ID supercontig_3; pos 3544099 to 3544641)
tctttccttggaacatcatccatattaactgcagggtatctgggactatgtgagcagtagtttctttcctctctttcatgttttcttctcattcattctcctccacatgtagtttgattataattatattctggatcatctcaacacgtgatttttccttgggacatggtaaaataaatttcaagtagaattatcctttgctgattacttgcaacggttccctgaatatgaactgcatggaaaattgagtgagaatgctaacgttttcagttttcgaatcttggttttagagattgtaatctgcgccagagaggagatatggtgactacttgagttacgcaagtgaattttcgttaatccatctatcgactcacttcagctataataatgtcttcttggccttaagtaagactaattgaacttgctggcttactgtttctgtagtcctttcaggattttgatgaaaaacttttttatctaattcatgaatgttgggtttcaaactggaattagtggatggtgtttcaaatctgttttgcagtc

SEQ ID NO: 76704 - DNA, 541 bp, Carica papaya
  Intron number 3 from transcript evm.model.supercontig_3.49 7 (locus evm.TU.supercontig_3.497) derived from phytozome v7.0 (chr-ID supercontig_3; pos 3544745 to 3545285)
aaattgttgagctggtatttaaattccatatctgtttttgttatgaataattaccagtaacttataagtatttgttttttttattactttgtaaattactattctaatctcaataaataaaactaattttaatagctgagtaattttttattttttaataaaaatatatacattttattaatacacatttattataatatatatatttttttatataaaatacatgaggatctacaatttgatttaaattttcaactttaaccttattttttttttatcattttttatatttttctctaaaagaaaaatcattagtaaaaactaaaataaaaaaatgattgttgaaccttgattcaatcaaaactcggctttgacggcaccaagtcaacgccgtctccttttaacgaatcaatatttttatatgccttacgatcgaaccggaaggttcacaaggatttgcgccggtacgtggtggtatcttcatggggttcttgtccagcctttttacctgcttcagtgaggagcccgaagacgaggagga

SEQ ID NO: 76705 - DNA, 600 bp, Carica papaya
  Intron number 2 from transcript evm.model.supercontig_14.1 48 (locus evm.TU.supercontig_14.148) derived from phytozom e v7.0 (chr-ID supercontig_14; pos 1743145 to 1743744 reve rse strand)
gaaccggtaccctttaagttatatacatacaatatcgtatgtctggatgcttgtactttgttgtggaaatagatttagggtaatgactgtaagtttctgaagaagggctgtgttggcataaaggaaagaagaagaaaattaatggaaaattactttacttctttattcccttcctttatctgctcttctctggtttggtttcctttatctttttcttcttctttcttgacttttctactacttctttatgaatggagtcaacccataacggcttttgcatgtaatgtttttgtatttatttcttgttcaaactcgtcttatagtctagtaaaaaagattgatttgggtgaatgagaaataattgttggtgttgggggtttctgagatggagtttgatgtaaatgatgcttttttttccctttaattttgcactttagagggaaggacaggaaagtgtgctacttttgtgaagatgaaaagaagaattttctttgaatcatgttaatggtgagctggggtctttattgtttgtttttttaattttttaattaaaaatttcctttttccctcataaatggaagagttagcttgtgaaaggga

SEQ ID NO: 76706 - DNA, 997 bp, Carica papaya
  Intron number 2 from transcript evm.model.supercontig_4.40 (locus evm.TU.supercontig_4.40) derived from phytozome v7 .0 (chr-ID supercontig_4; pos 1163618 to 1164614)
gttaccattctattttcagccaaataaaccgtctggtaagcttttatttgcctttctttccgtttgatttgccatttgcttattggctactttgttgaatgttcaaagaagggttgttatggatgtgttaggttgtcggaaataattggttgatagtccggtttaaaatgatacttgaggatttgcatttaaggcgatgtagctagcttataacttacaggttttagcataaatgagaaagggatatctaggacttaaaaagaagagattagttggaaggaataaaagggccagggtgctctgctttgtgtttgagcagggtagtaaggaattgtcaatgggaatggtggttatgtctgtgagaggtgggacagattgcaaaaatggtgtttagggggaagaagattagcaagactgttgaatacatgattatggtttctagttgtcaggacactgactcatgatggtgagccgcttacctgcagttggtagagtgtttagagaagttagggagaaatagcaaggaagagagaagcataatttgagagaagagataagggagaatacagaaccaaggaataatgaaaaggcttttctgcattcataattcttttacatcagagctgaccaatctctagtcgttggggagcgttcatagtatggacaatccttttcctatactgcaaacttggtcctaattagcacatagggagtaaccaccttgcactcaaaaacgacaacatacattaactaaaataacaggaacaaaaagaaaaacatatcttcgttctttcctagcagtaatttcttgggctagacactagtgtctcctctaagttggagagaaagtgagcactcactgacatcagctggcctttatagaatgctttcttttagatagttgattttcatgtgagctggatgtgcctaggatatgcttgcaatatgttgaaaactttttgatagttgataagcgagtgctactgttgtctttcag

SEQ ID NO: 76707 - DNA, 909 bp, Carica papaya
  Intron number 3 from transcript evm.model.supercontig_55.9 2 (locus evm.TU.supercontig_55.92) derived from phytozome v7.0 (chr-ID supercontig_55; pos 563826 to 564734)
gaatcagagccaaaaccaggtggtgagtatctgattgtaatctccaaggcaaatgaagtcattttatagcaaaaagatttaagttgaatttgattcaaaatttaaatatacagaatgtgaatgagaacaaaatataaatgggacaaagattttagagaaaatagtaatctaattctaagtcaattcaatattcaatatacatcattctagaattgaaatatgaatagaattagtttaacaatgcataaaaagtgtaaactataagtggattttgcgtatcagacatttaaaattttaggaatagcacgagaatataataggcttagcaaaaaaacagctactataatttaatagcaggaaataaataactggaaggcaaataaatttgtgatttaggcctgccttctatatttctagtaaattaatctttcctacatctaagatttatgctcatgaagagagagtagctttcttaaatcttttaattcggtcacgtgagactagaatatcacctgaaatatccaatagggaattgaaatacattttttaacatttgtcaactaaaccaattgattagataccatttagaaaggagttagtggaacaacatcatatacaggagtaaggctgtggtagaaagatattttaacaatcccaaaaattaatgaaaataaatattttacaagcatctttctatagattgatcaatgaaacaacaacttgatcagctttgatgcatgtaaatcatattaaataaaatgataagctagtgccaacaatttcattattcaactagagctatgctcccgaacagtcggggaaatgaaaagttatgagacctctttttgaacttttattctaataattttatgcattaaagactgatggttttaacatcctgaactgcag

SEQ ID NO: 76708 - DNA, 960 bp, Carica papaya
  Intron number 1 from transcript evm.model.supercontig_122. 11 (locus evm.TU.supercontig_122.11) derived from phytozom e v7.0 (chr-ID supercontig_122; pos 225601 to 226560 rever se strand)
attttccttactatctgaggtaataatacaaacctctatccctccttttttctgtttatttttcttttcaaaaaatttgtccaacaatcaaaccgccatggcttggtctgtttgtttctctgaggacaatttggttttgttgcatattccccataaccataaattatatatgattgtttaaaattcaagcctttcacttatttgatctcatacattagaaaagagatcaagtaactagtttctttttttgcatcccatcttcatgtttatagtttaaccaaaacatatatatctttgggttttcatttgagtagacgttggtggagcaatgtgaatgtctacagaaatctctctgtgtatatatatgtatatatatatatatatatgatatttttacatgatgaatatgcatacgtgtacattttttggtatatgtacgtacaacgaggtgtcaagaacaacaattgttttttgttttttgtttttttaagtatcaatgtagttttattttacaaattcttatgtaaatattggttttatgtgatttaattagtttaaagtgaagataaatccactggaaacaattaagataattaattaattaatataatggttgttgccatgcaagcggtttgtcgggcattcttatgtcacccttactttgaatagaaatgtattctcacgtgagctctgctatttcttgggtcataaagaggaattcttttggttttattctcaatatttgtctctacaaacatggtaaatcatttcttcataatttcctgaagtgagactggtaaatcaacagcggtaaaatgaagtataaattactgataagacagtcctacagaggtgaaaaaccatattgtaaaacttgttttaatcctggtaattgaactatgtttgttggtaattgtaacgacagtgagcagactcgggctttgttaacaagtgcagcct

SEQ ID NO: 76709 - DNA, 521 bp, Carica papaya
  Intron number 2 from transcript evm.model.supercontig_1308 .2 (locus evm.TU.supercontig_1308.2) derived from phytozom e v7.0 (chr-ID supercontig_1308; pos 6527 to 7047)
gaaccatcattatcggtgcttttgcttctcttctcgtaattttctagtacaaactttccattttcctatcttgttttttatttacttgtaatgtaatcttactactactgtgcttataaagtaagcgaatttttcatgggataaagatgtttggctttcatactcagaaatcaagatttcttttgtcatatattagcctttttaatttctatatttcccagtatacgcatgatgatgagaggattaacgaactaaatcatttataggattaaaatttaaccttatatatcatgtggaatgtatagagtttgaaaattggaatatgatattgaatctattcaacctaaaagttcatatgataggtcacatcttcttctcgttaaactaaacatatatcaaaagaagaatttcaagtacttgtaaatttgtccatgacgtttgtgtttcaatttaattagtatgcaattaatgttaattcaattagtaattttttaaggctgattaaattaacttgacaggga

SEQ ID NO: 76710 - DNA, 910 bp, Carica papaya
  Intron number 2 from transcript evm.model.supercontig_59.1 24 (locus evm.TU.supercontig_59.124) derived from phytozom e v7.0 (chr-ID supercontig_59; pos 1122460 to 1123369 reve rse strand)
tttgattcactacaacaggcatataaaggtaacaagttttggtttcaaaatgttttcattgagcttcattggtagtcagatactgatggcgtggaatgacgtgacaatcttctccctcattcaatttttttaagtgggaaataacagttgttttgctttgtgtgcaagtacaagaagttgctctttaatctaatgtttctaccacttcagttacttttaatctttttgttttactttcctatattatctttagctgtaatgacatgattttctgtccatggaaatgggaaatctttcttacttaagttttctttacactttgtttgaaacaaatgaattcgacacgaaaatgtgaaattcgtttgcaatatatattttttgttagaattgtttctaactacagaattcatttagaaatgaattccttgtgaattgatttgattaaatttgtaaatatggatatttctaaagaaaacaatgaaaagcctttcacactacccatttgtgtacatcaaatttagtaatataactgcattccatcaaacttcatgatttatgtaaaaaaaaaaaattgtgagatgaattcattactcaaaattcagttaatccaaacctaggcttaaaatgctttacacatgcccactataagcatctctttttcaatttgcattacagagctctattattcttattcttagaaatgttctctaatgttgtatataaatccagccttatgactagaactttgttgcaatttaaagctgccatttttgatgcaaaggcagtagctagcagtttgacaaatattctgtatgagcttttattgattatatattttcttgtaccttttgtttatattagtcttttttttcccatggtaaaggtcaaattgttggagtaatcttgttta

SEQ ID NO: 76711 - DNA, 868 bp, Carica papaya
  Intron number 1 from transcript evm.model.supercontig_12.9 3 (locus evm.TU.supercontig_12.93) derived from phytozome v7.0 (chr-ID supercontig_12; pos 809372 to 810239)
aaatccgatcctttcaagatcggaaagtggaactggtgagaatccttttcagatcatcttgaatcttgcttgtgtttcaacttacgggtagtgtttgtttatcatttttctttttggtgtgtgttatggctatttggaggacttgtttgtgtgcggtgggtgtatgatgatgatcgtggggtcgaaacttgatttctagagatttggagaaatggaaggaaactggaagttcaataattgaatcttgcttctgtttcaagtaatgggtattggttggtgtttgtatatcagttttgtgtttctgttttttgtttcttactaagacttaaagggtttgtttgggtatgatgcatgagtatgatgatggaagtgaaacttggtactggaactggaaactggggaaatggaagaaaactagaatctcagttattgaatattgattgtgtttgaagagatggctagtgtttgtttatcagttttctgtgtttgtttttattttctctgacttttgaatattgtggatgagtataatgatggtcatgggagtgaaatttgatcagggaaatggaaggaaactagaatctcaaatatttaaactttcatgtgtttcaagtcatgggtagtgtttgtttgtcagttttttctatgtttttgtttcttttgtgaatatccaaaagggtttattttgtgtggtggattgagtatgatgatggttatcctattgaaaactcagttgttgaaagtggggaaatagaaggaaactagaaatatctatgttctgtttttgatcattcagtccctttaatctttttcttgttggcttgaatttgaaggcatttatcggtggagaagaacagagtgttaagca

SEQ ID NO: 76712 - DNA, 911 bp, Carica papaya
  Intron number 1 from transcript evm.model.supercontig_209. 4 (locus evm.TU.supercontig_209.4) derived from phytozome v7.0 (chr-ID supercontig_209; pos 28999 to 29909)
gacgtgttcaggccgcaccacgaatttatttatctgtaagttaattttaattgtgctattatttttctttatacatcgtgattttgtaacgaaaataaaaaatttttaaaatctaattgggatttgcatatccattcatgtcgatatgcttacattgaattatttttgtattttttatttttttatgtaaattgttatggatttaaagtaaagaatgtatatttttcttgtttaatttccactagaattatactaaatattgctatatacagttatattagggtataataacctccccgtcttgacaaatttgcattcaaaaaggactcctatacataatatgtatatcaatacgtataaatttgttttaatttctgatttttttattatccagatatttaataaattatgatttgtattctcagcagtttagatttctttcctattgaaaaaaccttcatatatttagtaatattttacttatatacatacatgtctcttcttcttcttcttcatcttcatatgagcaacctaaatcctaattaaccctacccataaagctttttggtattagggtaacaatcttttcatgtcccaagaaattttcttttttatttgattttcttatcttcccattcgattttcttgttcatattgtttataagacacatccttttcgttcttatccaaacaaattttcaaaaagtttgtatgtatatatatatatatatatgtgatcatatattactgttgaatttcttccctgcatgcatatatatttatatttcctttttacttattagtatattctttctttttctcctctctctctctcgtgtattgtttaacatatatgttaaaaataatatataagtttgtattattttcatgattcttttgaccgatttagg

SEQ ID NO: 76713 - DNA, 1013 bp, Carica papaya
  Intron number 2 from transcript evm.model.supercontig_4.11 3 (locus evm.TU.supercontig_4.113) derived from phytozome v7.0 (chr-ID supercontig_4; pos 2286108 to 2287120)
tgctgtctctccatagtggtttccggaagtgtgtggtgagcattctctttcgatttaatattttgttctcaatcgccgtttccttttcatgcttatctggtgagaattgcaatcttggatatttgtttgtgtatggattttcattaataacttgaatagcactacgtttataagtagggattttacactgtgtttgggagtctaaagaaagtgaagtgaaggatcttaaaaatacatcacaaattattatagaaatgactaatcaaatctaaagaaagtgcacttcaaacagttactattcaactctagtttatgctcctttgccctaaaattaatctcccaaagtaaagtaaaagaagttagagtacactaaagcgagactccttagtaaactatcagggatagttataataaagaaggtaaagggaagattttaactgcaatcttgtttggttgcaagagtgaaatgagaaaggaattgttaaatatgacaaaaatattttttcatattaaaaatatatcagaaaacatgagaaaatggggaactaggtaatttaccaaaaatacaaagttaaatgaaattatggaacttcctgacccattaatttggggattggatagttgggtattaagagggtaaagcaagaacttggttgaacttctgcacattacttctcttaaaaaactctcaggggagttactattaaacttcaccgtaccttttccttctttttcgtaataattaatttctcaaacacaattaagactagttgattcctatagttctaacaagtaaagcttgttatgccattttagtcttggcaatttttataattgttttaagctaatcatttaaattgctgttgttaaaaatgtgttttctatcatttgttccttgatcttgatcatgtacaagtgtggcatatcatatacatgagatgttgccacacacagtggttaggttcctcaatcaaggttttatttgctgcatctgataatggtgcagagagcaa

SEQ ID NO: 76714 - DNA, 410 bp, Carica papaya
  Intron number 1 from transcript evm.model.supercontig_1135 .2 (locus evm.TU.supercontig_1135.2) derived from phytozom e v7.0 (chr-ID supercontig_1135; pos 18175 to 18584)
tcggtattggtatcatcaatgacctagactttatcctctatgtttcttttcaaattaatcatctaagcctatgtttggaataaattcagaaatgatttgtgttcatttacaaatccaaacttcatttcactaagagaaagtttaaattgtatttgaacaaaaagaaaaagttgagcatatgtggaattctgtgtggaattaaaactatattttgattggatttggaatgtatcattctaattccatataaattaaacttttgtcattttaaataggattctcatcatcttttagttgaggtaaagatggatttgtaagtaaattccagatatagtctaattgcatctcatgatgaattttatttattttctttgagagaatttctaattgtgcttttgtgatttctaggt

SEQ ID NO: 76715 - DNA, 551 bp, Carica papaya
  Intron number 1 from transcript evm.model.supercontig_27.2 53 (locus evm.TU.supercontig_27.253) derived from phytozom e v7.0 (chr-ID supercontig_27; pos 2367569 to 2368119 reve rse strand)
ttaaagctcctaccaggaagcctgacaaaccagaggtaagcggattaaatttccctttttttccccaattattgttccaattttgacattttgcttccaagtttttgattcattgcttgtttactattactgttttattcctcaagtaaactctatttagattatatgattcactttttaaaaagttaatctgattgaaaattttgctaaacttgtagttttggctcacgctctattattatatttgtttttagcaacgcactgcactattctttccaaaattcttccactttgttcgatattttacttcataagtaaacagcataaagaattgaggttattttcatgctaatatacactgtctcctatccctacccgaatttattgctgtgtagagcaatctttttaaatttgaaacagggagaaaattgggtctctgcgttgttcaaacaatatgttatgttatttaagcttcttggagcagttggataacattttcccttatctggggcagtatttgctataagtagttttttgtaggagtagaggaa

SEQ ID NO: 76716 - DNA, 511 bp, Carica papaya
  Intron number 1 from transcript evm.model.supercontig_6.21 2 (locus evm.TU.supercontig_6.212) derived from phytozome v7.0 (chr-ID supercontig_6; pos 1681728 to 1682238 reverse strand)
cacgagaagtcgggcctcctgcgacccgtattcaggtttttttgttctctggaaatgattattatcatttgatccctacttttttgcttttaaataccaaattatgtctcttcatctgttattatggagaattgagtcgattagacattattcatttgcctgactcatgatgttaagcaggctaatcaactcagtaaagtctattttataaattgtgtgccagagttttgagctcttttctaagagggagctgtaatttaatgttaattttagttgattctgcaaactcaagatgaaaaattaaagaaataagttacctcggtatatttgaatctcgactttattcttattggtggtggagctgggtctatgtgacgatttattcgggctgtcaaggcaatttttttgtctattgaggaaatgcagaaagaaaaaattcagtattttgaaatgttgggaaatattcacaatggaagtacgtttgtaggtttttggggattgactcagctgc

SEQ ID NO: 76717 - DNA, 324 bp, Carica papaya
  Intron number 2 from transcript evm.model.supercontig_135. 34 (locus evm.TU.supercontig_135.34) derived from phytozom e v7.0 (chr-ID supercontig_135; pos 500408 to 500731)
cagttccttttgtcttcaccctcggctctggaaaagtaacttacgttctcttttttttctagcttccatacttctaaatctgcgatcccttccattcctggaaagaatcgttcatgtattcttcacataagctgaatgattcaaaagcaaaaaacttatcgattgttgaggagtttgattacactggactatccaagtagcattgatgtttacaatttttgccaagatgatgattaaggttgcttaagaaaattgaagcctgtttttagtagttgaaaacaaattgcaggtgatttcaggcattgaagcagctgtgagatcaat

SEQ ID NO: 76718 - DNA, 377 bp, Carica papaya
  Intron number 1 from transcript evm.model.supercontig_37.2 28 (locus evm.TU.supercontig_37.228) derived from phytozom e v7.0 (chr-ID supercontig_37; pos 1689348 to 1689724)
gtgaaaagaaggtaactatcagcttttgttttaatttggatcattactcatttctgccactgccaagaaaatgctacctagaaaacaaaaacctgtttcccaatccaagttttttggatattctgtgttttgaagttgctctgtttcctggagacattctgcttgaaattaaattttgagactaaaaaatctgtatatggtacattttttggtgttacccaactttctgttttctccggaagactatgtgtcattgaactcatagaagaaaacaataagtgggatatgaacacatacatacatacatggaagccctgttttaaatctggaaatagagtttgattttttaatctcttttctttctattttttgggtag

SEQ ID NO: 76719 - DNA, 690 bp, Carica papaya
  Intron number 3 from transcript evm.model.supercontig_37.2 28 (locus evm.TU.supercontig_37.228) derived from phytozom e v7.0 (chr-ID supercontig_37; pos 1690085 to 1690774)
tctgtgacaagccgttgaatttgtgagtagttgtttgcttgttacagcaactattgcatgctcattaatataagaagctcatgttttgcatcattctagtatgctaaagtgatcaaattccaaagtcctagggagaagaatgcctggactaattttgaaagagtttctgcttccattttctatgccctggatatcgtgatttgacatgatgaagtgctgctagtatcccaaaatggtgaatctgtgctatgtcaatgacatgttaagaaaagttgaattgggatccttacttttttgcatctgtgtcaaatataccaaattgcattttagattggattcaattgggagatatatcattttaattgttactataagatttatgaagtgatacaaacataatatttttggagtcaaatggttgaagtatttaaaactttcaaaatgtgacatgcttattatacaaacgctgatgattatatggatctccgattgctcctgtgctgaaatggagactgatagtgactttggtatatctgggcagttatcactgaaaaaaatcataatcaaatgagcatttcattttattctggtattaatgagagccacagaccaaattagatcctaagaattcatttcgagtttgaacaatccacagataccatcatttaaagttatatccagaggacgaat

SEQ ID NO: 76720 - DNA, 721 bp, Carica papaya
  Intron number 1 from transcript evm.model.supercontig_128. 60 (locus evm.TU.supercontig_128.60) derived from phytozom e v7.0 (chr-ID supercontig_128; pos 537925 to 538645 rever se strand)
gtttcaatacttgagccttcaaagcctgtaagtcacttgtgctgatcttgtccttcgatgttggactgtggtttgaattgttttggtataatcggtgtcagttagtggaaagattttcttggttttgggttttcttgctgctgctgagaagactgttgatggagttggagttggtgttttgtctgatctaggtgtttggttgttgagaaaatgtagtgaatgggaagaaaattgaagtgacgaactagagaaaaaagttttcagtttacttggtttactacgagtagctgattaagtgttgttcttaagaggggtgaaggttggcggaaatgattaagtgtacattctttttgtatttctctctctttttatcagcaatcaaacaaggtgttaggatttgaatttctttttctttttgggtggggagggaggggaatggtcgataatttgactggatgataagaaagtgaaaggctaagatttgattcttgcgttttgggcctaatgctacaactagaacatgttttaggtacattaatttttttgcatgctcgttttcttaatttttaaaattaaaaacatattaacaatgtaagatcctacatttgacaggtaagatgcctaagaagggtgtagatgcttctctcttgtttttgatatggatgttatggtccatttctgattctaatgtgaatgcattatgcagactttctttccagca

SEQ ID NO: 76721 - DNA, 768 bp, Carica papaya
  Intron number 1 from transcript evm.model.supercontig_170. 56 (locus evm.TU.supercontig_170.56) derived from phytozom e v7.0 (chr-ID supercontig_170; pos 314069 to 314836)
gtagatttacacctgagccttgggcctggtgttccgtaagttgtgtaatttaaacaaagtttgggggcttttctgtaaattcattttctttttcaattttgaaaggcattttttacatatgttgtttctgattttttttttcctctctttaatttatcctcgcatttttttttatttttttatgttaaatttttaattattgagattaatttaaacgtattaatttacatctaattaatttaggattaaaaactaatcataatttataaatttaatgtaattatgtttaatatttaaaataatatgattttttaatttaaaatttatttatattatatcctcatttaattaaaatttaaactaaataacttaataatataatattttaaaaggaaataatttattaaaaaaatggaagatgcgaaggcccaattcaaggcccaccacagttgccgaggcccagcctatttaaacgccgccgtttatcctctctctctccatcttcctccggggaaaaatcaagaagactccggatacagtacaacgacaaccaaaaaccagagggaaatcctcgaataatcaaagcagctgaagtccggtcctctctccaagtcacaattcaagacgccgaaaaggtttagctcgttttcagtctcctccggttgttcctctttttcgcgctctcaaatttaagtttagtgtctgctacgacttgctatgttgtctgcaatttctctgatgacgtcaggcagttttctggacaggtca

SEQ ID NO: 76722 - DNA, 311 bp, Carica papaya
  Intron number 5 from transcript evm.model.supercontig_35.3 4 (locus evm.TU.supercontig_35.34) derived from phytozome v7.0 (chr-ID supercontig_35; pos 690410 to 690720)
ggaacagtaacgcaaaggtaggtaaatttgaaagaaatcgtaacgccaacataggtcaatttaggacttgtttggtttgattttgattttttttttttcatatctaatgtttcatattaatatttatatttataactacaatatcaaggtggtatgaaatcagaattacaaattaactatgagtagaacttaaagggaaccaaacaaaccgttcaatttttcaattttttttttcaacattgttttccaagtttggttttcatattgattgatgcttagtgtattttgtcgtctcttctttcagatctcag

SEQ ID NO: 76723 - DNA, 449 bp, Carica papaya
  Intron number 2 from transcript evm.model.supercontig_18.2 34 (locus evm.TU.supercontig_18.234) derived from phytozom e v7.0 (chr-ID supercontig_18; pos 2552804 to 2553252)
aggtttatgctcaactgcttttcttttgtcatatttttctacactgttaggccactaattatgtaaaatttcatctaagtgtccttttatgtcttgagattttaattttctggaagtaggatgtttattatgatatagtatcataataaatttgaatttcattaggatttagtgtccttttatgtttaatcctctggaatttgtgtaatcccactgttttttttatgtcgcttcgcttcttgacaatccaacagtcaccacttgggaatatgtagatgggacttttgatttcattactctaaaatcagttcgtggcgtttcgaattctgttaatgagtcatagtggggaaaacagtctttttgtttgggataaattatcaagttctttccaatctaggaaaagactctttttctttgctttcttaataacatttacaccaggttcttct

SEQ ID NO: 76724 - DNA, 360 bp, Carica papaya
  Intron number 1 from transcript evm.model.supercontig_136. 11 (locus evm.TU.supercontig_136.11) derived from phytozom e v7.0 (chr-ID supercontig_136; pos 182262 to 182621 rever se strand)
gcagggtaagttgttaaatctgatagcatagctgagactgcttgatgcatcttgttatcaaattcttcaccgtgtagttaatcaatcaaaatggaggcgaattcttcattggaattatgaatattgtaattctgggagttcataattgtatggttctaattttaactgactttcagatttagacaagagtacataatgcattatcttcacgtatcttgttggttttgtttgtaacttactacaaatatttttctcgcttttgaagttgaatggaatgaaacatatcttatgctttgggattgattttttattattgaactctttaccgtcaggttgaggcaaaaaaggctgtccccaggg

SEQ ID NO: 76725 - DNA, 871 bp, Carica papaya
  Intron number 1 from transcript evm.model.supercontig_25.8 (locus evm.TU.supercontig_25.8) derived from phytozome v7 .0 (chr-ID supercontig_25; pos 93897 to 94767)
gccttccaggtacttcaatgagatgtgtatgatcttagctgatcatggcttatctggtctttggcctttcccgtcaatgatggctgagatgcagttccatgagctcttagtgacaatgtcattttggtaatgtcggaaatataattttatttaacagatagagagcaagtatagtatttgtttaaggtggtgattcaattaaataggaactaagtagataagatattctaaatggagcgaaaaaatatgcttataagcacctttaatgtttaagttgaaaagaagtgtcactgcctaaattgtttgcacttcttgaagtatgtattctatatccacattttagtcgaagaagactatcattagaagggagggaagaaattacaaactaaaggacactgtcagcaaaagaaaagaagataaagtaacgaatgaaacaatgtaaatgcactattgatacatggtaggagtccaatctcttttgacatacccatttacgtattatctgcatcaaaaaggcaaaacgatatatagtttatgccttacacattgtccaatacaggtaggtctccaattgtgagctctaacagcaatatagcatagatgtgaaatccatactggtcctaatacatttttctttaccgaagtttttgatcttttcagcttcatattctctaaagtgccatttaaatactcttaagtttcttgtaagtacttattccgtcaagtagctttctcattagagcaaacaaactatgagtaaagttcaaaatattgagatcttccttttttatcacacttcattgttgacttttctctcttgttgaattattctgcagtaaaaggtttgcagattctgggtaccttccctggt

SEQ ID NO: 76726 - DNA, 442 bp, Carica papaya
  Intron number 1 from transcript evm.model.supercontig_127. 12 (locus evm.TU.supercontig_127.12) derived from phytozom e v7.0 (chr-ID supercontig_127; pos 158739 to 159180 rever se strand)
cctctcgttgttgctcaggtgatcatcttgactaaattaattagttttcttagtaattaatttagtgttttgaattacattatacatgtatcaaatattaaagaagaaaactaggaaggaacatggttttatccagattttcaagaaagaaattctgaaaattcccttgtctacatatatgttatatgtataaaaatattcaatgtacaaccaattaacatgtacttatggaagtagcacgatctagggtttccatctatatatatacatttatagcaaagtgatcgagaatacatagcaaactatatgtttgagagttataagcatgagttaatgattagtcttctaattttaatttaaacaattcaaaaaaaaaaaactaatgtgcataatatgtatatgtataggtgacgaagtttggttgtggaggatactcagttgg

SEQ ID NO: 76727 - DNA, 955 bp, Carica papaya
  Intron number 1 from transcript evm.model.supercontig_14.2 04 (locus evm.TU.supercontig_14.204) derived from phytozom e v7.0 (chr-ID supercontig_14; pos 2241225 to 2242179)
ctttcttgcacaagcttccttacaacaggtaatcactcttctttttattttttttaccagcttttttaaatttggaatctttattattttcttggctgtttttctgggttctgattattttgccaaggttcgcttgattttaacggcattttcgctttttttattattattttttgttgttggctagttagagttaatattcttgaaaattttcgaatttttattattttatctgatgaatgaggaaatgggttgtctttaattatctcctattttaagcctctcttttttttgggaaatttttacgttttaataatgggttttgttggattagcaaagctcttagcttcatatcgatattggaaactatggaatctggggttctggtttttagtcttaaaggactcatctgtaaatttctaaattagatagttatgtttgcttatcggttaaagtttcggtgggtgttcttctgaattcataattgataatttctatttgaatatcagctttatcaagatttagtagttcattaacggagggcgatcatgaattttactgactagcaattgcaaattgggagtatcataagtgcagtgattgacagtattcttcagcaactagttatgaaggatgatgaaatcgatcaagtctctttctttttttttttttcttggcttaatgttatcacacttttatgcggataggagattgaatatataactctctcacaatagctaattcttttgaaatttatgttctgtgtctcttttttgtaaatcaaaattgctctgtcattaaaacagccaagatgtttttgctgttcggtttatggtccttgtattactttctgatactaatttccaattcaccattcaaagtgaattattttcccccataatcacagaatcaaattaacttatcccgaaatatcttgtttctctttcaaaagcct

SEQ ID NO: 76728 - DNA, 396 bp, Carica papaya
  Intron number 1 from transcript evm.model.supercontig_54.8 5 (locus evm.TU.supercontig_54.85) derived from phytozome v7.0 (chr-ID supercontig_54; pos 1528124 to 1528519 revers e strand)
aagcattatccaggtgaatttaaaatttcatctaatcatattggaaatgtagtcaatcctaatttcctaatttccaccttaattaatgatgtcgttgctcgtaaaattgaatacatattcggatcctgcctgttattgtatatatattctacaattgataaatgaaatctgaatatggagtatttgttttaaaaaggaaaagtgatccgttgaatttttgtattcaaagcgtaagaaattgggactggacaagaattgcagataaaagagggtttctgtacataattagagttttgattaatggtgtttattcatgaaaattggcgtgaagaaaattccaatttccaaccacacctaacatgaattttcgttgttaatctggtgaaggtgtggaag

SEQ ID NO: 76729 - DNA, 612 bp, Carica papaya
  Intron number 1 from transcript evm.model.supercontig_6.19 6 (locus evm.TU.supercontig_6.196) derived from phytozome v7.0 (chr-ID supercontig_6; pos 1571044 to 1571655)
caaacgccaacgagaaaatctcactaatacttcaggttcacttttcttcttcttcttcttcttcttcttctctttcctttttctcttttctgcaacatagcacactactactcgactctctttcaaagcaaaaaccctctcttctcagtaatacccactcactatcagtcactcagtctcaaagattgacttattttccttcaacttatggtcttccaatacctgttcagggaaattctacagagagagatgtaaacaaacagacaaacaaacaaacaaaaaaaacacccatatcgattgcgtgtaacagaatcgaccttcgctcaccagcttttcttttctctttccttttctttccatgtttgttttctttttctcttttacgaatactgttatttggtaatcctgacgcttggattcacagagaagcaactatttattattcctcctctcccacccccacccgcacccaccccccaaataaaaagattataacggctcatatagtgtttctcttcgttattaaccttatcaaaacatatattaatgtctaatccggaaacgttatcgtttttagggtcagaagtggggaatttccccacagaagtgagc

SEQ ID NO: 76730 - DNA, 1026 bp, Carica papaya
  Intron number 1 from transcript evm.model.supercontig_299. 2 (locus evm.TU.supercontig_299.2) derived from phytozome v7.0 (chr-ID supercontig_299; pos 49147 to 50172 reverse s trand)
tattgttactgttactgttgctactactgctactagtactactactactgctgcattatatgtaacactataaaaaatttagtttattttaaaagtattattaactatccaatatattttttttcaaattttcttactttaattaattaattaattaatttaaataaagaaaaaaagttttgttgccatattaattcaattgaagagaatttatatgtacaaatcaacctacaaatggcaaaatgatcaattaggcttgatttatttttattaaaaaaatgaagagatagactagttgaatataataatttgttgaaatatgagaggaagtaagagagactaattgagaaactcaagtttttatttgtggttgatactaaaagccttcaagtacatgagtatttgtaggtactactactactacaaatgctactactattactaaaactactactactactactattgcttttattgcttctactgctgctactacttctattactagtgctactactactgcattatatgtaataacataaaaaaagtagtttattttaataacattattaactatctaacattttttttaaatttccttacttgagttaattaattaatttaaaaaagaagaaaaaaagctttgctgtcatattaattcaattgaagaagaatttgaatgtataaatcaacctataaatggcaaaatgattaattagggttaatttatttttgttagaaaaaatgaagagatatgctagctgactataataatttgttgaaatatgagaggaagaagtaagagagactaattgagaaactcaagttttgatttgtgattgatgctaaaagccttcaagtacatgagtatttatcggtactagtactagtattactactactaatgctactactactactaatactactgctactgctattacaactattacttttactactgttattaccgatactataactacaacaggtactactgctactactattatttctactactggt

SEQ ID NO: 76731 - DNA, 570 bp, Carica papaya
  Intron number 2 from transcript evm.model.supercontig_49.2 0 (locus evm.TU.supercontig_49.20) derived from phytozome v7.0 (chr-ID supercontig_49; pos 100798 to 101367 reverse strand)
aacagtctgaggttgctgaacgacttcgaattaaggtaatttcctatagtattaatagcttatgttccatttaattgaatgaatgccaaatgaatcttaaaaactcaatagaaaaatgaatgttaaaaaatgcaaattgacggataacttgtttgggttggttttataaaatggtacaaatatgttcattcacttggaatttttatagtaatatgagctttccagatagcttaccttccttacttttgttttcattttagaagataatcttcattcctcacaaaatgtgctagattccagctggtcataaaggtttctttcaattaaacctgtgaagaggaaacaatgaatagaataaagatgatttgtcttcttttgggtccacatgtggttacgatatgccacttcttgttttgaattgggaggattttggcagatgcagctgaccaacaaatcagcatttctttttcaaaaataaaaaatttctagaattctgctctatcagatgaaaaaataataatattgacggtcaattaatgcaggcggtgcccctcttccacttctacaaaa

SEQ ID NO: 76732 - DNA, 419 bp, Carica papaya
  Intron number 1 from transcript evm.model.supercontig_51.3 6 (locus evm.TU.supercontig_51.36) derived from phytozome v7.0 (chr-ID supercontig_51; pos 436897 to 437315)
ttgatctacgagctaaacgagagggtcaccttcatggggtccctttgggcaaaagctcacagtcacttcccgaacatgagcatcttagagctctatcatagttggaatgctattttacatatagaatagtggagtgttttttggtttactttttttttggtttttcttattttggttttattacgaagaggatgtcttattcttcattcttgtagtcttttatttttctctcttccataatagagcttcttcttttattaaaaaaaaaatcactggtaaaaaattattcctcaaatcaatgtcaagagttatctaccattatatcatttgtatgtggtcaaatcgtttcaaagatattgtcagaagaaattattcatattatcatcctcctatggttatatgattttaattgtagattg

SEQ ID NO: 76733 - DNA, 527 bp, Carica papaya
  Intron number 2 from transcript evm.model.supercontig_16.8 0 (locus evm.TU.supercontig_16.80) derived from phytozome v7.0 (chr-ID supercontig_16; pos 1288831 to 1289357)
tcgccaaggtgcgtcaatgattttcttcaattttttattattatttctttggagcttgttttctctcaattggtttgataattgaggtagtcagctttattgaaattgctaagaagtgccttcgttgctagaacattgtgattttgagttgatatttattccctgttaaaatgagcttgaaatgtttagaagcagagctagaaaacgcgtgaattgctgctagttaaggtttaatccctattacctttcactgttcgaagcaagaccgtatttggccgattccatcgtccatcttgtttcatcaaaaacttttccaacttacgttggctaattaacttccgtccctagcaaaagaagtagttattaacaattcaactgactacccctcctcattgcaagtaggcattacttgtttgatcttgagtttttgtaagtttcctgaaagatggattataaatgtttatgttggtggtgataaggtgttccttttttgatatggtcagttggaggtcttcaaaaagactctc

SEQ ID NO: 76734 - DNA, 705 bp, Carica papaya
  Intron number 2 from transcript evm.model.supercontig_1156 .3 (locus evm.TU.supercontig_1156.3) derived from phytozom e v7.0 (chr-ID supercontig_1156; pos 6662 to 7366)
tgaacctattgcgaggatttttctattggttgactgtaagtggtttatttcatgcttctttgtctttgctttggtatcctgccctgcacttctttgaggtatcataaagtcgtaggaagtagaactgttcatttacatttacttcttgaggtatttggaaaaattttggtttatagagttttggcattctctttgtatttcacttgcaaaaacttaacaacaaaggagttccatgtcatttttaacaaaaattgatcctgaacttatttgatgatgattattcctaatctctgaagaagttaatggagattgagaaataacctaccatttctttcttatcataacagtgaaatatgctgtttgaaagtctaattatgatgaactaaacttgtgagtattatggcattgtttatcaagttacttgtgagtttggtataataagatgctgcgtctttaatctccatactacacagagatgttaaattcaattttttttttttaaaattcagctaaaaaatgaataaaacagggaaaccagcacatagtttatcatgtttcttatggtgctttctttactacatgtgaagaagcttgtttttccagtgtaattgtatctttatacatgaatgcatatcaattttttatttgtagaaaaaaatcacgtggtaacacttgcttcctaaaattttgggtttctttgtcaga

SEQ ID NO: 76735 - DNA, 622 bp, Carica papaya
  Intron number 1 from transcript evm.model.supercontig_18.2 2 (locus evm.TU.supercontig_18.22) derived from phytozome v7.0 (chr-ID supercontig_18; pos 130214 to 130835 reverse strand)
ttcaagtaattctctttcattcccgttataataccttataataagtttaaaaaaaaacgtcgttaatagagtataattatatttaatttcagcgggtattttctatcttatggtgtttaggtttaggttttcctatttgtcctgtttggttcatttttcttctaatttttttagtcgatttctagttttacactcacgttaggatcgatatgaatgattcgagatgattttttacagtctgagtcattcaatttcctcttaactacttatgggtgaaaattgagttccttgttttctagctaagtgtgagtgtccactttacaattttagggtggagttgaggaaaactcatatgaatactataactcagaattgaatagaaatgaatcaaacaaagttgaatgattatattaactgagttgtttaggtcaattttgattagtataatcaaaattgaggccattgcatcacattaactgctagaaggggattttctgtttgaaattatgaagaaatgggagtttaaatctaaggagtctgattttgttttgttgtttcttttttctttttacaaataatgtaattaggaatctaccaaggcatcagtttggaaacctacaaa

SEQ ID NO: 76736 - DNA, 1005 bp, Carica papaya
  Intron number 3 from transcript evm.model.supercontig_53.2 2 (locus evm.TU.supercontig_53.22) derived from phytozome v7.0 (chr-ID supercontig_53; pos 115960 to 116964 reverse strand)
ttccaaggtaggaaaataagttgtttattcacattttctattattgatgattgctttgacatccacttaatctgtgtacataggttatctgagaatattggtttaatttgaattagttcagtttagtccctatagctgtcattttaaatagccagttcaactacgtactcgtatcgaaatgtaaattgccaatactgaatcatgtagtttgctatattttagcactcagtcactgactcatagtttgcatgtctttttttatgacaacaaattgatcaacctacagccatacagaagagatgcagaatcggttagcattagatttcttaagaaattgtaattatattaaatataaaacaactatactaactaagagtttattattatattatttagaagtattgttatagtttcagtaatttagattttttattctttttagtatttttaaaattattagtattagtattttatttttattagaattagtattcctaattatattagtttactattcttactttaattctaatttggaaaagttacttagaaattattacaaatagctctcacttattgatagttcaattgttaaataataattttgagagtttctcatttttatggttgtgtgatgcaagtaaacctttaggtgtgatacttaagacttcttagatgtgatgattaagaaaccctaggtatgatatctaaatagaattccctttcctcatattgtcatgtacaaaaatctttgtaaatcaacaaagaatgttccccaacgcaaagcacttaaattaaatttcttactacaatctatgcttcttactagttctacgggaagcttttgtaactgttagatggattcttttatctgccattgtcatcctgggaacccttgaatgttttctttgctatttaataaagtttcgcaaataactacctttttttttaacagaatattgttcttgttgaagtatttaatctcattatttgctttcctcagag

SEQ ID NO: 76737 - DNA, 991 bp, Carica papaya
  Intron number 1 from transcript evm.model.supercontig_19.4 8 (locus evm.TU.supercontig_19.48) derived from phytozome v7.0 (chr-ID supercontig_19; pos 390861 to 391851)
tgaggcaagcccctcactggcaagtctttcatcaggtataaatctgccttcctgctctgcgtctttctatcaatgttcatgtttgatctgtttgtcttccggtaaattttgtgggttccatatttttccctgaccctagtgattttattgtgatcgcgttcttgcttcactgataaaaagtggaaatgcatgatagttaataaagacgcgaattttttgtgaaaagatcaagattgtcattcaaataaataaatagcatggcataaataagaaaaaccaagaatagacaaaaggtctctatttcacttctctgggttttggtggtttttctttttcagcttgcttcgattttttttttttttagctgtggagattttactaatttatttatttggttaagaaacaatcatctatggatactttgcacggactcttgtcctttgttgtaaatttcttggctgctgacgctttccttacttgtcatggtggaccacttcccctttttgtttattgaaagcattttcgtggtggtgatgatgatataagattgtgctgagctaaaggcaaaagaaacatgatattagtggttcttcttctaagagtcttgaaactaatgataatggttaatctgtcagtcattacaggcatgtgcactggtgttatgacttgtgagctccatctacttaaccaggagaccttgttaattgcctacaaacttcttttatccgtctttatttatcataccttttgaacactcttatatctgatttcagtattggtctctccatatctttctaatataaggattatccaggtgccttttattgttaagtgctaagaagtatgagcacttttagttttattctttattagtttattcatgtttacatatttccgtgcaatgtgaatccattaatcataagtaaattattgtactttggaaatctaggtaatttgaacctactttatgcagcaacgtgaaggatctatt

SEQ ID NO: 76738 - DNA, 357 bp, Carica papaya; identical to SEQ ID NO: 74539
  Intron number 2 from transcript evm.model.supercontig_26.2 5 (locus evm.TU.supercontig_26.25) derived from phytozome v7.0 (chr-ID supercontig_26; pos 270845 to 271201 reverse strand)

SEQ ID NO: 76739 - DNA, 296 bp, Carica papaya
  Intron number 2 from transcript evm.model.supercontig_10.5 (locus evm.TU.supercontig_10.5) derived from phytozome v7 .0 (chr-ID supercontig_10; pos 152382 to 152677)
gtttttattatagaggttagtcttttatgtccttttcacattttcttttaaatgacagtatttgatgatcgtcggtatataccatgttataaatataagcaatgcatgatttttcacattttctttatggacttctttgagtgggtcattcatctattcagtaagacctattcttctgctatattcttcttagtaaacatttgctattccatttcaatttgattttagtaattttgggaagtaaccaaggggatcgtttctttaattatgttctgaccccaggttacgacaatact

SEQ ID NO: 76740 - DNA, 635 bp, Carica papaya
  Intron number 1 from transcript evm.model.supercontig_11.1 07 (locus evm.TU.supercontig_11.107) derived from phytozom e v7.0 (chr-ID supercontig_11; pos 1159707 to 1160341)
agcgattcttacaaaaagccgctcatcattatcaggtattttaacttgattgcataatcatcaatcatctcttccatgtcttttcaatttattcaaggtttcttctcctttagtttcaacgtgaatcgcctgcaatctgcatttcttttgatgctgatgataacctagattgtttatcgaccggattatcttccaatgaaaaatcagtgcagtccatactaaaaaaaagttagtgttttttcgtatgttttctctctgcttttttttggtcgtacgtaatgattatatgcaacctgcgtgttaacttaacaaaagtattatattcgttgccgtttaaacttggagtccttgaagtaagaaggaaagagagcagagaaaattaggaaaactaagtcaaatagacaatcagtgcacctgaaattgtgtactaagattgaccaagcacaccatttgtcttaattgcatgtcttccaactccaatgttttcttcttttcgtcaatggatacattttttttgcttcatttgttttgttttgttttgttttccttcattctttttcttctgatgagaggtgtgctttgttattttcttgttctcagcacactgtgcagcagggagatttgaagccagttga

SEQ ID NO: 76741 - DNA, 660 bp, Carica papaya
  Intron number 1 from transcript evm.model.supercontig_13.1 80 (locus evm.TU.supercontig_13.180) derived from phytozom e v7.0 (chr-ID supercontig_13; pos 1608298 to 1608957)
tgacaggtatgcaacttgaagaatatatgaccacccttaacatttctttttccttgttcacaatttttacttttttcttggtcaattgataagcgggttcattcaagtaatttggcaaaaattaaagaggtctaatttcaaaccactatgatgtcaaagaggcctgcattatagagcccagtggaactgaacattgtctttttggccctgtgtctgtaaatcccttggtctagatcatattatcgcaagggttttgaatttttttgcctttaaagtagacatgcagtgcagaagtctagggcagtttttcaaacgttcagtcataaactctacttttcagtaatcgtgaactgagctgcatttacaggttaatcccacactggtccctaaaccgtcatctacccattcctggtagaatttgttaagacatgcacaattagagatggagctgtttatggttagaaataagcatagatttaaggaaggcccatctgtccctgcttctaccatcacatttgcaacaaatttatatggtgaagaggtgaagcgatgtctccatgctaatgtcaaaatatgcaaactgtcattatttcattaagatgaacattcatttgctgagatacattacttgaaactcaggtacatcaataggcaagcgat

SEQ ID NO: 76742 - DNA, 743 bp, Carica papaya
  Intron number 3 from transcript evm.model.supercontig_26.1 10 (locus evm.TU.supercontig_26.110) derived from phytozom e v7.0 (chr-ID supercontig_26; pos 849646 to 850388)
cttaccgagttttattttatagggttgtcgtccccgtatttgtatctgcaatttgtgtagtgttggaacggaagtttatggcttgaacttccattttggtggatattcaacttgggaaataagtcatttagcgtggtccagttccagtggagttcatagcaaccatgttggctcttaacaagcggactgatccgttgaattacttgcaaattttgtgcttgactagggatcttttgttgataaatagatcttcctaagtgttggtttgtagttaatttgattttttacccacaagtagtcttgttctttttatcttcggtattaaaccccttgtttccttggagaagcagctgtttttgtttctattcgtgtcgttttgtttacttaggctcctgtacagtttgcaatttttttttggggcttcaaatgatgatccaatgtagtggtaattcgtactgtttctgttgcaaaatgaggagtcagtattctgcatattagcaaatgattatttatactttgtgatgctcttggaagtcctttaaccatggcttgatccttgttcgtgtctctctgatttgtgggcgcggctaaatgatatccttggtgcaggtgaagtttgtgattgttatttgaagaggtacccaatatctggccattcttcgctgttgttttctttcttgctacatgtcattttcacaggtgcagctatttttattccatattcgtcttattgttgggcagtg

SEQ ID NO: 76743 - DNA, 958 bp, Carica papaya
  Intron number 1 from transcript evm.model.supercontig_106. 75 (locus evm.TU.supercontig_106.75) derived from phytozom e v7.0 (chr-ID supercontig_106; pos 756803 to 757760)
cttccttctttttttgctttcaggttagtcttctttgcccactccattagtcgtaactcaatattttctggtaagatacagtataagtaataaattaggtcgtcttctaaaatttttttaagtcattgagaaaactgattataacttattgttgaaaatggtataagaatttgtgattctagttccgagtcatgtccagttcgcgcacaattctacttgtgcatgagggtagtgttaagatactatataaataataaactaggtcatttggtacaagcttaagcttttaggaaatttaaagctacaaatatggtgtagttgggattcgtcaagaacaaagcttgtgattcgagtaacttggctctggtacaaagttgtcctaccttttaagatcctttaaatgaagaaagaatttgcagctagattttttattttctgatgtcaagacataaattttaaatttggctgaacttgtaattttcttaaaaagcttacagaagacacttactgcatgtggaaaattgagtaggagtcatgctcagagttgaactaatttttcgaatgtttaagttaatcgaaaagggtctaatatattattcatattccaatacacctttttgctcgaaattctaccagatcgaatgcacccatgaagtacttactgttccaccatgctttgtttcaaaattaaaatttaccaaaaatggactaagtcaagattcaaacattgaacttctcatcctaatatcctactgaattagaaagttgaacccgttttttcaaaagcttagctgatgagagacttaacactacacatattcgcttgatgattagtgaaaaaccaacctgctgcacccacataatgttaagtagattcactaggagcaagacattcactgtttccctaatgaaatccaatactctttcttggtcacaaatgccattttcaggtccaagt

SEQ ID NO: 76744 - DNA, 1058 bp, Carica papaya
  Intron number 1 from transcript evm.model.supercontig_3.21 5 (locus evm.TU.supercontig_3.215) derived from phytozome v7.0 (chr-ID supercontig_3; pos 1570732 to 1571789 reverse strand)
cgtcgaccactccgtcaagctctacaagtttccaagtattgttcgtttcaattgtccactgattttcctagttgttgctgtcttcgccttacttcaggcgttttaatcttgttgggtcggtttcttcggctaggaactaaatgggtatttgattttgaggtgtgaaatgttgaaatgttgttgtatttggaatgaacattgtatggttaatttccttgtcccctgggcgagaggacggcaagagtaatttggaacctccaatttggattttgcctttcttgcggtttgcatcttttctattttgatggtgtcaatctgattttgattaaaaatttaatcagggatgatagtttacttcagggtctctgttttcaaaccccttagatgatagttttgaactgtataaatcatactgttcagaatatttgtatgatttcttttgtctaatctcatgtgttttactctttcgacttctcagtctgaactagcttccgtacatgcattttcagcatctttttccaagctgcttgcatttctgtgtttttcaagatgcatggcatatgggttgagcaatttaatttgttgacttgctcattgatgttatgagtctcagtttatggacttttgttattgttttttctggttacttattttgctcttccctcctttgtacatgtaatatcatatgtgttaattaattcatgattttctctagaaattattgcaagtgtgccattctgaaagctataaacttgagtgtggaatttgggtgctaaattgtaatatatatagcccaaactttgaggtagtcaactacttggaacagcaaaaaggaagcttgctatttcctggctaaaattactttgattcataagtccatctttctgcttatctttttatttatgaaattcctaagaatttatccatatgattcagtcttatgcaatgtctgtgttggtcttggtctgttgcagttttagcattgtagtttgattgacatttaacactttctttttgcatcaggtggagagtttcagacaaatataacccgattcacc

SEQ ID NO: 76745 - DNA, 882 bp, Carica papaya
  Intron number 1 from transcript evm.model.supercontig_132. 75 (locus evm.TU.supercontig_132.75) derived from phytozom e v7.0 (chr-ID supercontig_132; pos 736862 to 737743)
ataaagtcacgccggctacgaagcagattgatcatgtgggtaattttttgaacatatttttttcgttgaaaactgatgatcatcattaaatttgttggatttcttgattggtttcagcacctgttgtattttttcattcaagttcctttgaatggaaattgtggcctttgggtatggttgagtaagtctgggttttgttaccatagcctgccggaagtctgaacttaaattcttcaatttctattggaattttgtagaatacattgataattaagaacttataaggcttcaattttagttgattggtgatgggagtttacaattgtaatgaatactcaatagatcagatcagactcaaagaacggtcatctgcatttctcaaggaaagaaattttcctcatttgaagttagctattttaatcccagcagcttggagataaaatcatagcttgctttcttatttccttccttaaacaccgtgtaaatgcaagcagttttaatcatttactcctttttcctttttcttttttggtctttttccgtctgtttgaacattttgtgatttttttagctaatgtatctactttctaaatggactggaggcaaggcattgcaatgctttctgaactggaaatggggaaaaggactcatcaaggagataggagtttctttacatgcttcaatacctgcattatttttccgctcttctttaatgtcattgcgtggtttttaagttaggtcattcaggtattgtagttgtagaattatgcattgcagagtgttaatagttgacttcttgaattgcagcccaaatatctatcatattctgattcttcttgatgtatatatgcaggacctgccaagaaccttccctggtcaccc

SEQ ID NO: 76746 - DNA, 760 bp, Carica papaya
  Intron number 3 from transcript evm.model.supercontig_165. 43 (locus evm.TU.supercontig_165.43) derived from phytozom e v7.0 (chr-ID supercontig_165; pos 286453 to 287212)
atcaggtaattggtcatgcgaggaattaaacagttaatgcaacttttctttttcttaacccgttttatgttctatgtgaagcttattggtaaagttgaattagtaggttcaataagcagtagccataaaattacaggcggttcatgtgttttatctgataatggatagcaaatttgaaattaaacaaagttttgttggagttcgtgttatatttcattttgatgtatgcaacgggtggatttagttaaatagttgctatagtattttggagtcttggattatgtaagtatccaaatattctacacagaatagtacattgtgagttcttgcggcttataatgggcttttaatgccaacgtagctagatatgattgtggattaccgaaggcttatagttgatttcaactgtaaagttggttgggcaaattggtgcttggtattgcgtagcaatatgtttagtgcttaatcacttctaatctggattttgagccactcagcacgttttatccttgtatatttgattatgtatcctgttattcttgtgttctacccccaatgttctgtactggaaatggaatttcatgatatgattgtaattgtttaaaactgaaattgtcatcctcagttgggttgcaaataagaagttttgcttttccttctacctagttctgttttttctttttcttctttcaatcttactcgtggataaacacttttcttttcagggttcagaaaatcctcttgtacaagccaagaggaa

SEQ ID NO: 76747 - DNA, 1002 bp, Carica papaya
  Intron number 1 from transcript evm.model.supercontig_55.1 46 (locus evm.TU.supercontig_55.146) derived from phytozom e v7.0 (chr-ID supercontig_55; pos 915769 to 916770)
gggtttctggttcttggtgagttctttttttggattatttgcttcataaatctgtttcggtggttaattgattgatgtgtgcgagatgaaattccttttacttgctgaagctcgcagtttgtgtttgtttgctcaagacaaatttaaaattttccaaatctttgtattttctgattaagaaaataaattatttgtataagcataaaaagcttataagaagctattcaagtagaatgaactacttaggccttatttaacaacctagttaagtgtaaagaagataattcttaatttattcaaacatataaaagcagaagaatgaaagtagttgatggaaagatcaaattagaattatcttgcttggttttcacagatccacatgtctcaatcttaattagagcagtataatcttggttactactaactaaaacaaataataaaccagaaactacagtaaaatggaagtgaatttaggtatttatcagaaagtaaagagtgaaaatgttagaagtgataactgcatttaaaaaggatatctttttagatttctgtttttattttcaacaaaacagcagggcagttaggtgttccgagctcaatgatttggaataacctatgagtagaaatatgaaacaaccaacaaaagtaaacacaatcggttcatttcaaacctttatctgaaaatcatagaaaacaggatttgaaatgaacctattacatttatgggtcttccaactctcatacgatatcggattacctgataaattttcacatcagaaatgctgtgtttcatttttagaacatcaaagtaagaaaaatttccttattgacataaaaataagaagtttttccttcctgccgaaattgggtaggatttcaagggtaatatttctgtgtttgaccatcttatttgaggcaattttttgttattcttatcatcacattaagcaatggatatggttgtcaggtacgtcaagtttgatacattcactcctgcagtgg

SEQ ID NO: 76748 - DNA, 929 bp, Carica papaya
  Intron number 3 from transcript evm.model.supercontig_14.1 91 (locus evm.TU.supercontig_14.191) derived from phytozom e v7.0 (chr-ID supercontig_14; pos 2137905 to 2138833 reve rse strand)
atacaagtatctggataaaagcgacaattcattaggtaagatgtcttctgagtttctgagatgagctgctcttattctgtttaacaaaatctggaactgttactgtaagtgtgtagaagtgcaaagtattaggcttgaggcttagtgaaaccttttagacgcacaccatgcgtctgttactgccagttctctacttcccttccctggagatttacaaacaacatgctcaaagcctgtagggctcgtcacattagtactatgtttgggtaaaatttagtaaagaaatggagaggagaggaaatgaagggtttcttaaaaaaatggaaagtgtttcctttgttgagaaaaagtaaaaattgaaaagggaaagtaaagaaaaaggttgttttaatattttatttggtttagcatcacaaaaggatgaaatgattaattataagaaaatagtcaaagtagtgtcttttattaatagaatggaaaatcattttctcctctttcccttaccccattttttgaggaatgaaaaaaattagagttttaagggaaatgggagatgctcctatccttctattgtatctcctaattattattttttatgcaaacaagtagaggatggtgtactttcgttattcctttctttttcatgaacttccttcaatccaaatacggtgtagggtaatttaaaataattggacctttcaggttgagctttttactagtgtaggtgtatttttacttctaatattttctttttttcaattcttgtactgaattatgtgttaccctttcttttggcgcattaatatctgcttgttttaattacagacaacctctaagtcaatggtttttttcatactctagtggttggcaatgtatgttgatttaataatatgcaaatgctaaatattggctgcaatctatgttaggtg

SEQ ID NO: 76749 - DNA, 993 bp, Carica papaya
  Intron number 1 from transcript evm.model.supercontig_36.1 33 (locus evm.TU.supercontig_36.133) derived from phytozom e v7.0 (chr-ID supercontig_36; pos 1047715 to 1048707 reve rse strand)
gaagctgctcttgctcaaagatctggactaagaaggtaagttgtgctctgtttttgttttgttttcaattttggggttaatttccttctatttccaactatgatgacttcattttattttgattgctattgttatttttcctatgccttcaactttggttggtaggaaaaggttggaaaagagagtgaaaattctcctttgccttttagttgttaggtttagttgatgagagagatgagaagctatactttttcaagcttagaggatattggattcttttctatgattgctcacaagaatgggaaaaactgaaccagagattaattatagtatttaattaattttttgctacttttgttatatgtttgtttatcttatcaaattttagcttattagagtcagaaaaagactggggcttctttcactcatttgttcatgtctctttccctagccagtcatttaagctggtggtggaagtgattgagagggttatctaacttaaattgagctcatgctagtaattgcttttgaggtgtttgcgaataaggtaggtactaatttgccttgaattttgaccaaaaaaacgaagcccatatcattccaaagagggaattttggtgtagtctttagcagttaatgaaaaccctataagctgtggatagcctttgagcatataacatttgtaaggagtgaatcttggtaagatcttgagcaatcaatgaaaaacttataagctggatgggctctaatcttttaccatagtgcttttcaaaagccggaagtagctttcttaagactcatcatttgcttcaaaatccatttaaaattgaaagagtgtgcatgaagcttgtttaggatagctttttgtaactattgcccaaatttctttgtgcaactagattctggaattaaagtgctaaattgaaaaaaagaatgattagttaatcctaaagtgcaggtatagaatctaccccttgaggctgatcttataca

SEQ ID NO: 76750 - DNA, 879 bp, Carica papaya
  Intron number 1 from transcript evm.model.supercontig_50.2 0 (locus evm.TU.supercontig_50.20) derived from phytozome v7.0 (chr-ID supercontig_50; pos 309525 to 310403 reverse strand)
ggtgaggaaaccaatttagctctatgctctgacacgtgtagaccctcacaggttgtgattctttgcacctgttttcatttttctcctcctcctgcatattctgtgtttttctgcttgtttttctccagttgcaaccaggtctcaacagaaatctcctgagcttttaggaaatagatacaatccactttctaagtttgaatttaaaaccccttactttacaagctattatacaatttactacctagccgttaaagttgggatgggatggacatttgttgggctttaagagaaagttgaaccatcaatattaaattgggatgaacttttgacggaataagaacataacatattttggtctcatttgagttgatctagaaaacattttgttaaagtttaattaatcttatctttatgatttatttacctattttattttttcaagttttgtatttttctaaattctaggtaagcataacaataataataataataatagaaaaaataataacaaaaatctaacttgacaattacggtatgagattgacaaagagagaggtgtcctttactcattctaatagttattcttcttgattatcttttgatttcattttcttctgtattctattctccatattaggataataaggaaagaaagagaatctagaaattttggaatgttgaaacttctgtatttgcttcatagcaaccaaatattgatccactatgtgtaagacgttcataggaatttacaactctagctgaaattagaaacaaagaaaggaattttcctcagaattttattttctcctataaactgaaactgtagtttgtctaatttctgcagttagttgtcggccccattctttctgccgttcacat

SEQ ID NO: 76751 - DNA, 786 bp, Carica papaya
  Intron number 2 from transcript evm.model.supercontig_139. 64 (locus evm.TU.supercontig_139.64) derived from phytozom e v7.0 (chr-ID supercontig_139; pos 479625 to 480410)
aaagaatagcgtggattggaatatcaagggtggaagtacttgtttgtatgagcttctgttcccttttttgtttctgaaacttttgaagacaccttatctgcaattttataagcctcttataaggtctacagaagtcacctgaaatccgagtagctaggaagatgttatctgccacaacgatcagattttcaaggagaataaattcacttaaaaatatatgtgaaggaatagaatagttatttcttatatgagaatgagaaacaaatgtgtagaaaatcatgccatgctgcataagtgggcttgagaagtggcacatttatatggagcataagtaattgcagctaataagttcagtgctcttttatgtgcattttacatgcgcatgtgcatggattcaagactcattttctataatttccatgctgcattaagatgtaattggtctagaaatggtgaactagagatttatacatggttttcacacatttcaactttcaatttcccattggttaaacttgattttgtacatgagaagtactcgttctctaatacataccaatttgtctccttttctgcacagtatattttagtttcattttagtctaatttggttattaaatgtcataatgtttgattttttggaccacatcatttaactgaaaattttcaagaattggttgccagttaattttctatgctttggcctgttttcactaaacatcttattgacacataataagttaatatgcagccttgagcataaatactggagaaagtacttcgccc

SEQ ID NO: 76752 - DNA, 976 bp, Carica papaya
  Intron number 2 from transcript evm.model.supercontig_33.1 48 (locus evm.TU.supercontig_33.148) derived from phytozom e v7.0 (chr-ID supercontig_33; pos 1500547 to 1501522)
gcccctctttcaaaggaggtttgtctatgtcaactttttctgtaatgttttaatgtcatgaagggctctgggaacttacagaatggttactattgctagaaatggattaggcatagaatgaaacaatgaagtaaatataatgccagaaggacaatatattaaggaaatattgaacaaaatgacatggtacaaggatcctcacacctgaagaatatgcactttaatatcaaggcaactgagttgtaaatggcttataaaagagcaaatactgcctgcaaaatgtacacttttgtcaaaggtttatcctcttcttctgtagaggattttgcagagcttattaaatttttgactgagttgtaaactgacacattcttttgtacctgagtagcaccctgtcgtctgcctggttaatacattttcgttaattctccaaaaagttgaaacaatttatacgaacggatgatggagtaaagcaacttacagaaaaaaaaagaaagaataacattaaagcacagaaagaaactgattctcctatataggatcacatcataaaggaaagagaaaattaaacaaagaagtattaagctctagcccatatcttttattcccattggtacactatggccacatatgagcttgcctagacacaaaaagggcttcaaaatgttctttgatgatcctttagttttcatttaaaaatcaaatgcggtataggttgatcagggcttgtggtcaaagttcttttgttaaagacttctgctttgttatatattgacaataaatgaatgtgtaatattttagtttgagaactcatggtttttgcttaataatgtaataattttgacctgttgtatcttttgtgttcaaatctgatgagtttgctagcatctgatccattttgtatcggatatatttctgaagttttttgtttatgtctttaggcattggagtgcttggtaaggctggcttctgtgag

SEQ ID NO: 76753 - DNA, 1027 bp, Carica papaya
  Intron number 2 from transcript evm.model.supercontig_165. 28 (locus evm.TU.supercontig_165.28) derived from phytozom e v7.0 (chr-ID supercontig_165; pos 172759 to 173785)
atatagcaaaagtgctgagacgaatccaacgcggggtaggtttcttcttttagctatagaattagattacttgtatttatagccgtaaccatcaagtgtaggctcaaacactcctgtgaaattagttaccatgcaagtgaatgaaactaaaaagtaaatcactgtgttcctcttataaggggtacattcacattgtaccaagtattgttgtagtctgctgctaaactggaccgtatccaacttggttttcctaaaatagagtaatttagtttcatgtatcaaagagtgtgcgtgtgtttgtgtgtgatggtttttgctccctcctacttacgaatatatctgaccaaatggataaactgagcaaagaaatagattatttatttaattagattttgccacataaaagattagacttcatgaaacctagttgaagctagtaacacagatctaagtttttctagaactggaggaggctcctttctttctcttttagtaaatttttggcctttcattttttttagtatagatttatgcatttcaataattggttggtaagtgcacatcaaatgataacacagtcaattttctgacaagaaaacaccatacaacctccgaatgaggacacataagggacacactgctcgaacctcatagagaggagtgaaagtatcgactaatcaactaagagatagttggtaactttaggctttatattaatgtaagcaactgattgtaaaaaaaagcattattcttgaacctttcttgggctttattactttttagaaagacacttttgtgattctgccacttcatgcaatcatgtcagatgataggaccatatctcaaaaacctcccagtatatcccagtttgatgggatctctactaggtggtttcgcccttttaaatatgcattggagttcatttataacagctgcatctgaacatgaaatacctttttgttctctcatcctcatcttatatgattatgtagggtgttcatccttcaatcaagggattagtctggga

SEQ ID NO: 76754 - DNA, 752 bp, Carica papaya
  Intron number 1 from transcript evm.model.supercontig_198. 41 (locus evm.TU.supercontig_198.41) derived from phytozom e v7.0 (chr-ID supercontig_198; pos 209362 to 210113)
actatcttttgagctgctttcctcagactggagaggtactataaacgaagaagattgaaaactgggttctgcttttttacttttgagaagttgtgattctgggtgcattagatttttagcttttggcttttctttacgtgcttttaattcttgtttatcaggttaaggaatttttttgaaaaacaccatttctaatagtctgtttttagattattatgatgctactttcagctttgggctatattgatgtttgtttaccacgtatatatggaagattattgtgtagatgtacggcctcctaatattttttttggtggtcggtctggataagatcatatctcaaaaaatagctttgaacaatgagtttggagattcatcaagaagattagtacatgctgcagagatcaatacttaggtgtattctggaagatgttgaaatcatgcttcagcttaaaagctgaatgatagaaattactagttgccgtgaatgaactaaagaactatttgaagtatttctatgtttctttgaaaactatggttttcaaatttaggtttgacacaagctgaatttgctgtgtgacctaaagactggtctcagaataaccctacacccgcaaatgctctttctttctttattgaagtaatatttggttgtgtgcttgcgctgacctgggattgatgctcttcttagctaaatgtcaaatttcatttttgcaggttgtttccgtgaaagtcatccgcaacaagcaaac

SEQ ID NO: 76755 - DNA, 650 bp, Carica papaya
  Intron number 3 from transcript evm.model.supercontig_197. 8 (locus evm.TU.supercontig_197.8) derived from phytozome v7.0 (chr-ID supercontig_197; pos 263466 to 264115)
agtggtacgttttcttcttatattattatattttattttattttatatcattatattatatttagttcaaaaaaggactataaattcaaatcaaactaatactttttatgatattcggttagaaaaaattttaagaaatagattaattctaagtatattttttaaaaaaatttaatataaaaaaataagagattaacagaaagacttaatttttaaatttacgcttgtcactataaattttaaaggacatgagtatatataagtactaatacaattctaaataatgaatcataattaaatttaattcatgaattatataaaacctaatacataaattatataaaaaaaaactcaaaaaatacatattaattattatatttataatctaaatttaacttaattctatcataagataaaaagtctagacatattaaaatttttaaattattatttttaacaattattaatattcaatagcatatatatatatgtgtgtgtgtgtgtaaatacactaacatttccaaaaacctctttacatgccaacattacatattgcttttgctctttttttgggtttatataattatatgcacccactatcaaatgtataaatgtataggtttacaaactagtccagccagggactttgg

SEQ ID NO: 76756 - DNA, 828 bp, Carica papaya
  Intron number 2 from transcript evm.model.supercontig_4.62 (locus evm.TU.supercontig_4.62) derived from phytozome v7 .0 (chr-ID supercontig_4; pos 1547588 to 1548415 reverse s trand)
tctgtaattaaggtattacttcacttttagtattggctggttatcgaattttcgatcacaaagaatattgagtggttattgattaaagtgtggcattgtcattctccttgctgctatcacagttggtgatatttcagttgacgtatcaaattttcaatctcaatgatataccagagtgatgcctcatgatattgatacaatactgacacttatactctgatgatagattggaaatattgtcatgttattggtattgtatccttaaaatgagtttggtggtgacaacatatcatatagttccaggaacattgtttagtctcaaaattgtgttattttcttctggatggttttggtgtttcgatctctcactaaacttgcacttcatatatttcatctgccattagttacctgtcttattcttgtaaaagcttaaagtgttctaacatcttctaataattgtcattggcatttgaaattagtgatagtttatcaatttttcttatttagttagcaacttgcgcaattggtagcttatttaatttttcgttatgcatcttatctttagagcatttcaataagaatatgcagattttatcaaccaaattatctttttctttatttatttaaaataatgttgttatagtgatcatttcttggtctctctatctctctatatatatatgtacaatttttgtgtacatgttgtatattacattaaaaggttaatttcttttcaagaggatgccactgatgtaccaaaaatcaaagctattgaagtgtttttttctggtgttgattatttgctgcagcaaaaacttgctaaaagag

SEQ ID NO: 76757 - DNA, 961 bp, Carica papaya
  Intron number 2 from transcript evm.model.supercontig_21.1 18 (locus evm.TU.supercontig_21.118) derived from phytozom e v7.0 (chr-ID supercontig_21; pos 1372334 to 1373294 reve rse strand)
gggtttcggaggtccgctcattgttccttatgtctttttatatatataattagaggccttataagtctatgaagtggcagtcaatgttaatgtgtttaatttaagacattaaaaatgggattttccttccctaatcgtttgagttgctgtttttctttagaggaacaatcttttaggaaagtttgagttattgaatatcctcatttcaattgtgtgttaagatgaacttcaccagccagacgaattgttgaattgtccatcgagccccgtgtttgcgagctgagctattctcttcttgcttcaaattttcaaatgaactgctgttttctgacaaaataatgtgcataggtctggtgtgagaatgcctttttgtattgatattgagatggtcaagatccgagggttagtggcattgggtgcatctgaaagacacaggagtttttgtcaatcctttattaatggttaagacattaccaaggagaagatttgctgtagcaattggttggtttactccttatgcatcttttttagcctttgaatgttatttgctttgttttaatgggatcattttccctaggattcaaagtgaggtttgctatttgtattttatcctttcctctgtgttcctcccttctgcaactttacttccatttttgcatggtgaaaaagtagagcttatctgatcaccctattcaataatgtactttgtgcatcaatgataagttgaaaattcctgctcaatactggcattaggaattgtgcatactttcttccatcgttccagatgatgaattaaaatgtttgctttttgtttaaatcactaatttaccatgagtttttttcttctacttaatatgttctatatttaacctttctggtatgcggtattttagtaaattgctaatttactggtttttgtcctacaggggtgcctttgaacatcttgggtcttggtgctggt

SEQ ID NO: 76758 - DNA, 425 bp, Carica papaya
  Intron number 2 from transcript evm.model.supercontig_1.12 3 (locus evm.TU.supercontig_1.123) derived from phytozome v7.0 (chr-ID supercontig_1; pos 1951087 to 1951511 reverse strand)
tctggaggcgagttcttcaagcatttgtacccgaggtaagtctttctttcaatttccttcttttttcttttcgatttcgtaagtatcgaaatgtttttgtatttgaagaaatcgtctggattgaattacttgagttttggtccaaaaccttttctttcctggtttcgcaagtcaaatgacttttactccaatttggtattatttaacctaaaaattaaaaatcaatacagtccacgaagcggaatatttgaaaaaaaaaagagccaattgaatgttgtagttttgatgagaacaatgatcatttagcaacttttaagcttcttcatctcaattagttttttttttttttttctgttgaattactataattatatatgaccaagtaagatgaatgcagggttttcctagcagtgtgacttcggatt

SEQ ID NO: 76759 - DNA, 860 bp, Carica papaya
  Intron number 2 from transcript evm.model.supercontig_43.1 32 (locus evm.TU.supercontig_43.132) derived from phytozom e v7.0 (chr-ID supercontig_43; pos 1637414 to 1638273 reve rse strand)
attaaggtatggttattttgtttatattttattgctgggacttgattactccttcatgtaagcaccatggcatggaaaataaaaaaagtacagaaagagaaaaaattcaatcagatcttggggttaaaaaacacaacaagaacatgaattttgggatggttaagcactcattcattggagtacctgcataattttagtcatcagcggttttcttaataaagcatagtttctatatattctattatgtctataaaacaaaataagaaataacaaccttgattaataatagtcctatacgaagtatttggagtccttgcattaggaggtcctccaataggtgaaggcctctggaaaattttctgatatttctgtctctttattccataggaacttggtagtatattaaactgattttttggtgggttttggctgtaattattcttttgttggacttcttcttttagaaggctcttagaggatgtcttatcctccatttttgtaatttaacttttgtcgttcttaataaaaaaaaaaacaaagtattcttcttatcattctaaagtattcttttacctataaaacttggcaaaccctttgtcttttactacagcaaagaagagtttagtgtgactaatttattgattttcacctgtcatagtagtagtaggttcctgaggtaactgattataattttgtcacattaatcaaatggtttagtttgtcaaaatcaactttagcttctaaaagcaccaaatcatcatagaagacaccttcagttttaatgggagaaggcacagtttctcacagattcttatttttctgcagtctttacaaagtgttgttttcaaggaggtaaattt

SEQ ID NO: 76760 - DNA, 873 bp, Carica papaya
  Intron number 2 from transcript evm.model.supercontig_36.1 62 (locus evm.TU.supercontig_36.162) derived from phytozom e v7.0 (chr-ID supercontig_36; pos 1174661 to 1175533)
ttagatttcaccgagcacagtgagcagggagataggtatatctctaccaaactttcagattttacccttattctgtttttctgctttaatcttagttatagtgaatagtgtcttcaagcttgttaaaggtggaggcaagagaaagtttgtttaataggaaattcattatttggtaatttcatttgtttttgccatgtttcctgctaatctggactttacttttaaccttgttatcattcttttcaaatcttcgttctagcagtcatttatcggagtgaatttcctggcagggattgtatggtccaaaatttcattttccacctcgagttgttggctggaaaatgtgacttatgccatttaagagatcaccatcaacatcactggcaatttgtgttctttacaattgtcccatttcgcctgaaattgtcttctttatggttttttcaaaagctttgtttttctttttcttttttccctcatgattggccttttgaaaatgcgcgagtttagaacccaaaaaatattttggttcttgtctgacatccttccattctagattttcttcagtaacggaataattggaatttacttgcctctttcggtagggtcaatcttgctattgatatatttttgggatgtaattggaattatatttttgatataatttaatacttcgagttaaattcatttttggcatatagttgcttctcttacgtgtttggccgaatcttcatgattgaatatcatgcagatcagttcattggctattgaccgtgagattgattaagtcctttgtcgtttaccgcagtattttaattcataacatggctctccttacatttggcaggtatcgggaactagctcatcgtgttg

SEQ ID NO: 76761 - DNA, 548 bp, Carica papaya
  Intron number 2 from transcript evm.model.supercontig_1.26 6 (locus evm.TU.supercontig_1.266) derived from phytozome v7.0 (chr-ID supercontig_1; pos 3751661 to 3752208 reverse strand)
gaggttgcggttgccaagtattcagattgggtaaggttggtttctttgcatttctagggttttggtcaattgaattgttgagaaaaaaagagaaacttttttcccgagctgtgcttccatgagagtcacttattcagaccacagtgttcaattcattagtttggcgtggtaatgggtatgcgcttttgggcttgctgcagcatgctcatccatgcattttcctttcagctgtcaaactagattgttaagataaaaaaagaatgtggtatactggtttgaattcaaatgaggacataagaattactcacaagtagttagctaagttggattaccatcagatggtgggaagttcttctttttgtcttaaatgtgaagtttaatgttcgtaatctcaatatctgccttgctttctttattaggaaactttaggagtgttttgagtgtctttaatgttcttcttgctttggtgcattatctgaattgtgattaggatgaattctgtattctgtacaggctaaggaagcctctggagaagttgagacctcctc

SEQ ID NO: 76762 - DNA, 783 bp, Carica papaya
  Intron number 1 from transcript evm.model.supercontig_17.1 07 (locus evm.TU.supercontig_17.107) derived from phytozom e v7.0 (chr-ID supercontig_17; pos 1392597 to 1393379)
tccatataacctgcaaagattggggtttctttcaggtttctcttcattacttctctctctctctctgtctctctctctctctttacatatatcacttatagtttttgacctctttatacgtatatgttaagtttctgcgaaatatactgaaatatatgttaagtttctaaatgaagaataaaaaaaaagtaaaaatggtaatactaagttattttcatatatatatatatatatatatcacttatcgtattattagataatagtttaaacttttgaacgtgtaatccaattgcaaagatcacgtactttaaattagttaataaatattgtaagtagtattataaatatacgatgagatatatttttatctgaattcacttaatttgattagttcgaaccttatctaatatatttttttttggttttattacccgttcaagtaggaagatggtgaaattctttctaaactcgtcttattttcatatctaaaatttataattttacattttttttaataaataaaatataaaacgatatgataaaaaaaaatataataagtactaaatttctattaaattggttatatttttataatttttctcaaggaaattaaatctcttttctaaacaataaaacattatgttattatatatatacaacattcaaaatttttataaaaatcaacgaatatagtctaaataaaatagttaagtttgtgtgctaataataataatataataataataataatatataatgatatttttgtgtagttagtgaatc

SEQ ID NO: 76763 - DNA, 932 bp, Carica papaya
  Intron number 1 from transcript evm.model.supercontig_29.6 0 (locus evm.TU.supercontig_29.60) derived from phytozome v7.0 (chr-ID supercontig_29; pos 470964 to 471895 reverse strand)
gattggtccctttttcattgacaaggtcagttttctttgtaaattttcgtgttcatctgattaaattgcaatataatatttttctgtgagaatttaagggctagattagttttccttattcgagggctttgttatttgtttatatcgtttattgcagctgcttttaaaagcatgtttagggcctctattgacccgccatataattcttgccttttctgagaaaaaattctagatatgatctgtcaattgggatattcttttatgaaatttgctatatcaaaagagtagtatacttttttgttcttttgtttaggagttaatgattgtccattgaagttttgctctctctccattttatatttgctcgtgatagctacatacagaaagacctcgtatttcggcgggtttgcaaactaggcttaacaacatcctttgatgttcattgtactccttaggtgctttttaatcagggatcgttttggctttgattttcatctaaaaccattacacaaaaaaaccaattctatttcgtatagaacgtttaccagatttctattttagggatcaggtaagttttatgtgattgtcaaaataagcaaaaacaatttaggcatcattcctctgaacttgttctctaagtatgacatttgttttagacgagttaaggaagcagttctgctcttgtaaatttcttctttagtatttgttcaaccaaattgatggttcaggttataaacactaaaattcagtaaaagaactgatataaataaagaaagcattagctaaaacgattatgtttttctacaaaatattcctccaaaacaaccatccttttgtagcatgtatacatcctcttcttctagtttctatctgactgtagtaaacattgttttgcaggagatcatcccaattataaactgggaaacagcaac

SEQ ID NO: 76764 - DNA, 801 bp, Carica papaya
  Intron number 2 from transcript evm.model.supercontig_42.1 56 (locus evm.TU.supercontig_42.156) derived from phytozom e v7.0 (chr-ID supercontig_42; pos 1502878 to 1503678)
cgaatcattgtccaggtaattgatgttctattgcgtggatttcttgcagcttaattatttgtagttctcactttatgattaagttgtttgggtgcgttccatggaaactcattattggcttgtttttagctattgatgttcatgattcttcttctttccaacctttgttttcatatctatgacagattcagctattcttcttgctttacttctcatctgttgttgtacgcatatattattttaactgagaggattttattttttcgctagtttcaataatttgataatggatttgaagatgtttgctcatagcaaaacaatagggttttgttatgttaaaacagttatttgcttctatggaattgttccttctgacatagagaacaagtctgctttcagtttggttcaattttttgtttcgttcctggttaattctcatattaattttttaatattttttctgtatatatgtatagttagtttttgagctattcctatcttaaattctttgggatcagtattttgagattagctacaaatggaatgagaactgaatcaaacaggcagtacgtattttatttggttacaagtgaaagtatatctgctggaaacagaaggattgttatttctgcagatcatttctttttttctttttttgtttttggttagtctttggagaatgggagtttttgagttcctttggttgtggctatgtgtgtatgtgaccctaataatatggtgaggacactattgacagatgctcccgttttgtgatatggactgtaaactttaggagcagtc

SEQ ID NO: 76765 - DNA, 291 bp, Carica papaya
  Intron number 1 from transcript evm.model.supercontig_19.3 (locus evm.TU.supercontig_19.3) derived from phytozome v7 .0 (chr-ID supercontig_19; pos 44860 to 45150 reverse stra nd)
gtcgcctacagggtaagttcattgccatttgcagatctacccttattgtttccttcgtttctctatatcttagttaacgcatcgttctcgtttttcctgtgttatttcgctcaaatattgctagattcggtttggctgctgagaaatatggcagacaaattggttttggttggattaagtcttttcttatcttttatatttgattgttaaactcgatataggagtgttgatatctggtttttgtgttggcgtgcagtttcaccaataccaggttgtcgggagagctctgcc

SEQ ID NO: 76766 - DNA, 823 bp, Carica papaya
  Intron number 1 from transcript evm.model.supercontig_12.9 8 (locus evm.TU.supercontig_12.98) derived from phytozome v7.0 (chr-ID supercontig_12; pos 888399 to 889221)
tctgcctttgttggcaagtacgcaggtactctctctctctctctctctctctctctctctctgtgtttcaggatataaatattatatgtgtgtataaagaaataaaaaggcaacaaacttggtcagtgcccgaatccaagtgcagtgtcgtcacaatcaaatcttattgggtttctgacttccagtcgttcaaagctttattgtcaaagtaatcttcaatttttacccccagcgtgcatacatgctttagtagcagttcatgtatgtatgtatgtataggcaattcttttgtatactatgcctgctcataaagcaatctgttatggggttttaacaattcatgatgttaaatctgatttgattattcacatggcatgcacagtcggcgcggggtgtttgcatgtataatttacttgcaactcaagcaatttctgtaatatactaattactacgtaaattaaccttcaaatattaattactcatctaattcgtttctctctcaattcaaatccaaaccagaggatttggttttctttaatacttcaaatgtttcctcttcaaaaaaagaaaaagaagatcatgttgcattacaatactaaaactcctaaaaattaattaaagtttttcttatttttcacttctcaattcatgcaccattgctcaaattaattaccatttaataataatttaataattttaagcagtaatcaccaaatcttcacatatatttcccttcaatattattaatttataaatataaagacagcttatttaatgagtaccaccttttttttttttttttcctaaaatcttctacgcacag

SEQ ID NO: 76767 - DNA, 868 bp, Carica papaya
  Intron number 1 from transcript evm.model.supercontig_127. 32 (locus evm.TU.supercontig_127.32) derived from phytozom e v7.0 (chr-ID supercontig_127; pos 506211 to 507078)
ttgttgttagagaaaccgaggccgttcaagccaaggtaaagtcaagtctcgtctctttcctcctccactctgctttggcttttagccttttgctttctttgttctttgtcctttgcgttgtcttgtagtggaatatttatcttcacgttgaaattatcgtttaaaaaatcaaaagtttcttcccggtttcatgaaaactcatgccctttcaattggatgttagttaccaggtcagctttcccctgtggttatttaccattataataagatcaatacccgattctcttttttctgtcaaatcaaatataataatcgtgcgacatgtttatggctctatcgcaaacagagaaacgcggtgtattagtgccaaaacatgattgtaacgcggaacaaattgattttcttcttaaagcaggctaataaagctttttatagtgatcaagggaacagattggccgtgttttggatttacgggtattctgagaaagggcaatcgcggcgatgatttctacaataaatgttcaccaaaatttaataaattcacccaatagcaagtcagacccttgtgcataatttggtattttttttctagctctgttgtcagtaacttagtttctgtacgatatgtttgacttctcttctcataattgatgcaactttattgcaattagctgcatgtccctgtagaattgttcgacttttccaagtacactttatggcaattagctgcatgtcccactgtccataagttagtctctgtaggatatgtttgacttctcttttcgcactttactggaactataacaatcagcttcagttaatttctacttctggttcttgatcatcttttatttacaggcagggagat

SEQ ID NO: 76768 - DNA, 322 bp, Carica papaya
  Intron number 1 from transcript evm.model.supercontig_2.88 (locus evm.TU.supercontig_2.88) derived from phytozome v7 .0 (chr-ID supercontig_2; pos 1466763 to 1467084)
ccctaagaagaagagaaaccagccaggaacaccaagcaagtacccacaattattttatttaagatctacttctcaattcaaatctcaaatgatttaacccaaattcccatcaagttcttcctttctaaattttctttgtctgggtcattttgttggggggttaaaaagaatcacggctctataaaaaaaaccctaaattttggacagatttcgaggggattaatttggcctgatgtttgtgttttttgttctttttttccttgaattaaatcgtgaattttctaataatttctaatttggcatttacccgtgacagatccag

SEQ ID NO: 76769 - DNA, 418 bp, Carica papaya
  Intron number 1 from transcript evm.model.supercontig_197. 1 (locus evm.TU.supercontig_197.1) derived from phytozome v7.0 (chr-ID supercontig_197; pos 13380 to 13797)
cagaagctcttagaaaagcttttgcaggttattctcttcattttaatttcatatatatatatatatatatatatacatatatgttgcttcttctaattatggaaagaagctttggcctcatgttcttggatgaattcatggtttaagtattaacaaaaatgaagttcttaaatacaactgaagttatttaaacaaacacaatattagaactatacccatgaatttatagatcaaatatatatttctttttaaaaaaatagatatgtccttaatgatcatctgtttcttatttttgaattatttatcttagacccaatatatatacacaacatttacttattaccaaccttctattaacatctcccagaaattcacatattgaattttttttttctttttctggtaggattggggacta

SEQ ID NO: 76770 - DNA, 880 bp, Carica papaya
  Intron number 1 from transcript evm.model.supercontig_413. 1 (locus evm.TU.supercontig_413.1) derived from phytozome v7.0 (chr-ID supercontig_413; pos 5140 to 6019)
ttgcaagctgtttctggcgggttagtattattatacatagaaattgtctatatgtctctgtgtgtgcgtgtgtgtgtgtgtatatatatatatatataaacatatagttcattttgttttattatttctcatgatcatgtttggctgcggactataaaaaagtaaccaggccatacctcgcgtagcataagcgcgctaaccgttttaaacaatttagtcaaataagtactttagttaaaaagtttaaacaatatgaaaaaatattaaaattcttttattttaaaaataagttaattctagataatatttttgttggaaataagagaaagaaagaaaaattaatagaaaaattcaaaatttcatttgtagtttttaccataatcaagtttaattcacgactataattatatgttaaacatgaataatgtagaaaaattcaaaaaaagaaaaacatatatttataacatttaatcttttataaaataaaaaatttctttaatttataaattattattttaaactctttaataaaataaaaagtcatcttaatttcaaaataattatttttaatcttttaataaaataaagagtctccttaatttataaattattattttcaacaatattttacctccaaaaactactttcaccaccaaatccagaacatgttattctggaatacacggaatatgttggattttatttttgagaagatgttggacaactaaaatttacactaattcgaagttgtaataacgaacttgtttggttggcaagaaactagctggcagtgaagtatacatgtttggtttactaacctaggtatacgtatatgtctgattcagggctgtttctccaaagtctctactgtgtagctaca

SEQ ID NO: 76771 - DNA, 489 bp, Carica papaya
  Intron number 1 from transcript evm.model.supercontig_25.1 92 (locus evm.TU.supercontig_25.192) derived from phytozom e v7.0 (chr-ID supercontig_25; pos 2030497 to 2030985 reve rse strand)
ctcttcccgtcacccttgactccctcaatcctaaggtatattgcttcgatcgatttttcttttcatttcttgtgctgggtctttttagattgttttgactctcatttccctattcaatttgttttttatttgggttttctttttcatctttgtaagttttcaaaagaaaaatctttttttttttgtttgtcgtgtgggtatgataatgatgggtttttttttttttttaaaaaatctaatagttgaactgttgttttactggatgccgagttcaatttgctaacatgtctggtttgatcaatccaatccttgatgtttaaccccattgaaatgtaggagttgactatttcttctctttgacattgatgatcaaaacttttgcttttctcttatggttttgatttcttattcatcaatcttctttacttacagttttgaccagagatcgtttggctgaccgcttagttttttcttttcccaggttctgaa

SEQ ID NO: 76772 - DNA, 703 bp, Carica papaya
  Intron number 2 from transcript evm.model.supercontig_157. 4 (locus evm.TU.supercontig_157.4) derived from phytozome v7.0 (chr-ID supercontig_157; pos 32316 to 33018 reverse s trand)
tcttcaggttattttcctgcctaatgtgtcagtatttcctttttatatgcattttttcacaagtacatgcttcatttccgtgattgttcaaaatattttgattctaggttatgcagagaattttgactactcccaatgggatcagttttaccgttattccgcttgttctctgcaaatagcaaatcagactttttgaaatagtgttcatatgttatttttagcggctgttgaatatttctttcctgtttggatggagttagatatgtaattgaggaagaaaacgtaagcctctgaaattttattttaaatcatttagttttttggtcttaactgataactgggaatgctagcatactttctggttgagaatcactagaacaagatatttgtcccacaactagcttgcctgtcgcggattgcatctggcattggcttgatgcctcgtttattttcagcaacacattttcacttatcttaattcttcataataaatagaagatcctgggttaacctgtttatttggaggtgctattcattgtttctctgctcatagaacatacctttgaattagacttttatgtttgtttgtgcattccatgacttgaatttcatactatagatttctcattgtgattttttctttggtaatattatttttgcaaatctagtgtagattttccagggtcatatcaagattggacag

SEQ ID NO: 76773 - DNA, 862 bp, Carica papaya
  Intron number 1 from transcript evm.model.supercontig_54.5 2 (locus evm.TU.supercontig_54.52) derived from phytozome v7.0 (chr-ID supercontig_54; pos 967405 to 968266)
ggagagtctctggaagaaaaggttttcccaaatcaaccttgagaacaaggttgatattcaaggggagggtattgtcagaaacccatttagggtgaaataaaaggaatggtaagttagaaaattcacctaaaaagacaaaataataagaaaattagggttagggtttgtcaaccttgattagctcattaatcccgcagccggcacctcagctatcctcatctcattctgcagtggacactatgctcaccacattgcgcaattctgacaagttgattccgccaacaagaacgtttcctttgttgatttaggcctataaatggccatcttccatcatttgtaaagggaatggaaattaatcaataaaaatactatgttttccctctcttcaatattcttcatcttcttcttagttcttcttctaccttattttcccttcagactagacccatatctaaggggtctggcaggaacatatcataaatatctatgaatagaataattttatctttgtttctttctcttgtttgaaccaagttatgaatataatattattttttgctttagagtgaaaggagtagggaaaaagttgttaataatagattacccagagaaataggtaaaaaaaatttccatccaagagtattaattcttgttacctctttcttgctttaacaggaggacctattatcctttgttgatgtatttgtttgtttttctctcgaataacacatattttcttatttcaaaatcttatattgcttggtgccagaaaggaatttcagatttccttcacatacatcatttcttatttgttccttctggttcagttagctgggacggcaaagtctaggttctgtgcaaa

SEQ ID NO: 76774 - DNA, 436 bp, Carica papaya
  Intron number 2 from transcript evm.model.supercontig_58.4 8 (locus evm.TU.supercontig_58.48) derived from phytozome v7.0 (chr-ID supercontig_58; pos 544449 to 544884 reverse strand)
tgaggcgatagaagacaacttgaaaaatttcctaggtatatagttctcattttttacaccatagcaacggaagcctagaaaatggtttatctctgcattctttttttcatcttttctcccttactttgatttagttccttctaaagaaaatagttcatctctgaatggttctagagcccatggcttgagtgcagtaaagattatcattacttgagcaaaatttagagccatgcagaagactcctcttttcctccccttgtcctgcttcaaaacatgggttgatgtgtaaagtttctacagtttgttcatgagtaaaacagtttccttttttggttaatttaatatatgtttgtgtgtgtactcatataaagtagcctgattgcatttgactcttgttgataaacaattttttttttttttacgtgaaataaagcag

SEQ ID NO: 76775 - DNA, 1021 bp, Carica papaya
  Intron number 3 from transcript evm.model.supercontig_6.42 9 (locus evm.TU.supercontig_6.429) derived from phytozome v7.0 (chr-ID supercontig_6; pos 3244180 to 3245200)
tcagctagtattttggataatctgccaaaagcttggtatggctgctattcacatttgttatcattcagctacttttgttcattatgtatgctttgtgtagaatttgtatattcgtaaactataaaatagatagctgttatttaaatatcttttttatgtttatgtgtttttacgtgatctttacatggagtaagcttactttgcattatgatctctataaagaagacttcaattgccatttttgatgaaagggtgaagtgatattttattttgagaaattcttaaggtaggttgacaactctatgaaactttgtcctgatggcagattttggtttcaagttttgttatcccagttaatttttaggatatgttgcatttcttctggctttaattagctagatattcattattgtgtcctcagcctatactttcttcatttacttattatgcaattttattcttaagagagtggaccctttaaacaaacttagtttcgaacttgtttcagttcataatctttaatacttacagaagcatttatgatatgattttttttgtgaagtttatgagttttatgagattactgtcatctatttactatatttgactagtgcgaggcagttctgtgattttatttatttctctcacttttctataatcgtgagctgctgccactaacaaacttggctgtaatatccccccaccctgggttaaaataacatataacttatacatttgattgactttgttaattgatttgaggcattcaccttctccatactttctagttgtgaatatttcaaccttcctttctttttctctgttgtgtttgtttcttgtgaaaagtatttgtacatattccaatacatactaggtgctctcgggcatattggcttacagtttttgggttaaggattcaagtacctaaaaagacaaatgctttgggtatgatgtcttttggaacaatgagctctaatttttgtgcatatgttggtgcaggttcatatacctattcattggt

SEQ ID NO: 76776 - DNA, 548 bp, Carica papaya
  Intron number 1 from transcript evm.model.supercontig_11.1 2 (locus evm.TU.supercontig_11.12) derived from phytozome v7.0 (chr-ID supercontig_11; pos 292353 to 292900)
cttcgctctggtttactgcactgctgggatctctggtattttccttacatctctcatcttacccctaatgttagttattctttcttttgaatatttttttgctgtttttttccgggtaagtttacatcttgcatgtatttagagagtctctatttggttgctgagaaagagtgagaaaataagaggagagagagatgaaaagttctttctgttttggtcttatttgtgggggttggttttgtctgattaatgtttagtttctaagaaaacaagaagggaagaaaaccataccggaaatccaatgaaaaaaatggtgatcaaagtccaaataggtttcctgtaactcccatgcaaactaaatttccatttggattttcttttcccggtaaccaagcaggaaaagaaaatctgatgattttcttttcgcgcactgtaactcccatgaacttaaaatattattgcttctcggaaattctcgagtccttacgtcaacctgttcatgggtttgatcaggtgggcacataaatccagcggtgacatttggactg

SEQ ID NO: 76777 - DNA, 925 bp, Carica papaya
  Intron number 1 from transcript evm.model.supercontig_1.39 4 (locus evm.TU.supercontig_1.394) derived from phytozome v7.0 (chr-ID supercontig_1; pos 4900259 to 4901183 reverse strand)
gagagaggagaaagagctcacagctattctcaaaggtaagctctttttctccatggcgttttgctccatacaagcaaaaacttattttgctaatcttatatgaattcaagtactatttttcgtgcaattgaattaaattttctcggacgaagattaatgatgaataatgggtgttcagctttatctgtacttagttaatgccgtaggctttagtgttgaatcagcttgaattttcatgttatatatggaagtatcattctttgttgacggaatttagtgggagggattgaactatttatgtcaaatttgatgaggacttggagtagaagagcaaggatgagtatgtgtgtgtgatggagttaagaaaaggaccgaatcttcaagtattacgaaaagcaagttggacttacattgtcttttcttttcctgtttatcatcatctttgctgttttcctcattttggaactcaaccgtgtttgtggtatatgaattatgcgtgtgatgctgcatgaacatgcttttttagcataggtgattgagttggcatttggagtcaccatgcatttgaaaaacactccactctgtggtttaatctcgagtctttatttttttggaaatgctatatctgtgacatgattaattttctgcattttactctgtctgggtttctaaccattcttctttgatattactatctgtcacattcaacattcattggttcgattcctttctgatgaatattaaatttgtgatctaaacaagttgcatctttaaaatttgtcaggcatattttgaagcttatattgcctgtacataaattatatctaactgtccacttcaaagcatgtagtttcaaatttctaattgacttaacaaaaacaatattgcaggaccaaatcgtgcatttggggatcttattgcagca

SEQ ID NO: 76778 - DNA, 539 bp, Carica papaya
  Intron number 1 from transcript evm.model.supercontig_6.24 3 (locus evm.TU.supercontig_6.243) derived from phytozome v7.0 (chr-ID supercontig_6; pos 1916300 to 1916838)
aattctctctgatcgcatccgctctcttggccaaggtaccgccttctgttttttttataggaaaaaagaaaagatcttaggtctagagggaagggaactactattattttgtctctggttatatttttttttctaggaaattaactagataatttgtatattcaaggtcagtgttttattttgtctcttaggtatctgaatttatatgaccttgtaatggttatttgtttgatgagtgtatgtgccttgatttttaaacgaacttgggaactctagggtttcggtttgctggagatagtcgctctcttcataattggttattattattttttttgcatgtacttgtaaattccgtctttttgtacatggatagaacaattccgggccgtctttatgataattcatatgttccattcaattttttttacttgtgcttgtcatactgaatcctggggttatcaaattttcgtttggttatgtagattttcttatttgaatattgatggtgtcatataatatgtatgggattgtagaacttg

SEQ ID NO: 76779 - DNA, 481 bp, Carica papaya
  Intron number 3 from transcript evm.model.supercontig_151. 14 (locus evm.TU.supercontig_151.14) derived from phytozom e v7.0 (chr-ID supercontig_151; pos 137217 to 137697)
gagggaaaggtacgtctcctatctcttaccttttctaagtgcttgttggtttataaaggatccatggaaatgaaaaagagtaaacacatatagctatgtactctttttttataatatatcctctctgtttcttacgtttcgtggtaagttgcaaattgagcaaagtttgggttcttgccaatgcaatatggtaattggtaggaaattgtcatttagtttgcaaaaccctcgaagtgaatatttgatatttgaaattagtttatggatggcaatataaactgcggttgtgaatttgtgagctgtgaaatttgattgggcattccgtaaattttttgccagggtagagtctaaatagtgaccaaagaagatttctgttgttataacttttacgtagttattggttttaaacttataggctatgctcttttatgttgttgattcattaggagggcaagattgctgtggttgttgggactgtaac

SEQ ID NO: 76780 - DNA, 722 bp, Carica papaya
  Intron number 2 from transcript evm.model.supercontig_23.3 (locus evm.TU.supercontig_23.3) derived from phytozome v7 .0 (chr-ID supercontig_23; pos 19656 to 20377)
agtagaccctccagaggcagctctggtcatcgcaggtcagttatgcatgtctgttattgatttcctgattccagagtgttttatttttaaagcttagacttctgatattcatggcatgtctactaataagttatctcttctctgttgtcttattttcatatcatctcaaattttgttgtgatgtgggtttaagtttctaaattcaaacttgataaaatatgccctattgaaatctgcataagcaaaaagagggattctatgaaattgaaattggtaagtccttaatatagctactgattatgaagtcattttagcaaacaagtaaatatccaatagggctgaaaatgtagattttaaagttctgttattgttcaccaaatttatttattgcactggcgatctgaagccgacaaaatgttttacgtataaccaaataaccaatggcagcatctaaatatctatgtgattgcaagtgattgatcctggcctgaatgatttccaaagtaagtggaaggatctgggcatgggcatgttatgcagttgaaatagattgaaaacatgcaatagattgaaaacatgcaagagcttagtttcaattcggttggccttctcagctcttcgagttttatacactaatatttgttggccgtctcatactatttcctaggtgtaacacacatttttccttcttttcagttctcgtagacgtcgttcccgcttct

SEQ ID NO: 76781 - DNA, 939 bp, Carica papaya
  Intron number 1 from transcript evm.model.supercontig_2.13 4 (locus evm.TU.supercontig_2.134) derived from phytozome v7.0 (chr-ID supercontig_2; pos 2069731 to 2070669 reverse strand)
ataagaaaggtaacccttgaacttggatattgtgtgagtttgttcaatgtgctatctttatcacacatagtagtatatgccaaactcgtgggtggagcagcaattatttttgcggcttgttacgataacaatctttctagtttaattaattgatgaagtaaaatttatgctctagaaagtctgatgctgatgctgttgtttgggaagctagtttgtaagttattatgtttccttattgcgtatttctttgacctgcatgcatgtgatagtagaaaagcaattattttccttctaacttaatatgaggctgataaagaaagttgcattattgctgccatcttgtttagatgaatctttctatttggaataatcttatttgtcctgtttcaaggatattcgtgcctaacatatcgaagttcgccctggtcataaacaaatatttttgtgcaatcacaaaaacacattcttccttatgttacaagtgaattgtagatgaattatgaagtcctttagtctgccaaatgacactatcacacacatatgcttatcttcaattttatgacactttttcttctaaaaacagttcatgacacttttttttcgtgcagaaggttggagacgattgttgaatctttcttctttattctcacagaggataatgaatttcattctttcccaagatataggactgattctgcctagttgcattgtactcgtacatgaagattttgtttatgcattttctaattttcttttctttctacttgccaagttcttgaaagtactgcatctaaatttgaatttttccttatatgtaccacacagaaagataagaatttttgtcagaaatctagtaagatatactcgattgaaaaatcctactgtgattagaattcacgtgaaaggaatttttattcatttttttgggttatggagcag

SEQ ID NO: 76782 - DNA, 756 bp, Carica papaya
  Intron number 1 from transcript evm.model.supercontig_1103 .1 (locus evm.TU.supercontig_1103.1) derived from phytozom e v7.0 (chr-ID supercontig_1103; pos 10963 to 11718 revers e strand)
ttacaggtctgtacttttttttggggtcatattatgtttttacttttccgagacattaatctgaaatagttggggattttgattggaaatatatctatcaactactctcaattaaatctgggactcgaaaatctttctgatcccttacttccagtccctgagatggactgctattggtggttagtagttagtgaatacacagatataaatcagagatatacatatacatgcgtgtaccataaatttaaatacatttgccatcgattcgcgcattatcactttgaccacatgcccacggcatggttttaggtgaaccatattaaagcatgtatgtacatatatatattgctgctataaattgagcttgtatactctttcaagaaatgcatagtcaagtacgaggggagttacatacgccgtagctactctctctctatgtatatacacacataatatttttaacttgaaaaataagggtaaagatttttacgtgtgaccaatcatataaacaaattaagcaaatgattatattaataattttttatttgtaacatgagttaaagttttatcaaatgaacaagatattacaagtcaatcaagaataatcttcatcatctaacttctaatattttggccctagaatttatccatgtagatagcttttacatcttttttttttttatttttttcttgatatttattaaataatatatttttggaaattttattgtacgtaacaggtgcaccccaactcgt

SEQ ID NO: 76783 - DNA, 200 bp, Carica papaya
  Intron number 2 from transcript evm.model.supercontig_114. 38 (locus evm.TU.supercontig_114.38) derived from phytozom e v7.0 (chr-ID supercontig_114; pos 587189 to 587388 rever se strand)
gaaccacaaggtttccttctttatctctggtttttactacgctctgtatatgattttctttgaattattaattcatgcccttttgaaaaatttactattcattatgtgaagctttgttattgtcttttgtttttcttcctctgatccttgtgctgctttttccttgtctaaaaggttatatacttgttacacgtgtccat

SEQ ID NO: 76784 - DNA, 864 bp, Carica papaya
  Intron number 1 from transcript evm.model.supercontig_6.12 2 (locus evm.TU.supercontig_6.122) derived from phytozome v7.0 (chr-ID supercontig_6; pos 923797 to 924660 reverse s trand)
agtgggcatatcacaagttcaccgagtaagtgaaatgaattatcgtttagttagacttccatcgatttctttggcgtcttcaatttgttatgatagagaatgaatttagtttagacttcgaccgattttctatctatcgcaccatgaactaaataattttcaagtgattctattctggggtctcattgatgtaatctgcattatctttttaagattaaagagtgacttttcgggcagcactttggtttttcgcctgcagtcgctatatgtattatatatatatatatatacatatatgtacatgtatacatgttacatattttactcttggaactgtgttactgttacatctcatagagtactgtaattgaaatttgagggagaattactacgggattttttcagctttcttcctttgtgaatcagattcacttcttttatactttgatctgtttgcttttgcttaatttgcaaatcgcgtagaaattattttccattattttcaatgagggaaaacgttgttcagccatctgaccttggctatgcgactattcactgcatgtgctataactagcaagggagaatatactagctataacaatcatccgttgaactttgaaagaagaagtcgtctgaaaaagataaaatctctcctacagagctacaggcttacgacatgattttgattatagtacatcaatcctaattcttattcaactaatttgatgcatgaattcgcattttgtttgatcaagaagaagacaagggcttgcaaaatattattgtataatgtggctgatgacaacctttctttcaatggtgctatcagagaatttggagataaaccagaggaggcaagagaag

SEQ ID NO: 76785 - DNA, 793 bp, Carica papaya
  Intron number 2 from transcript evm.model.supercontig_27.5 5 (locus evm.TU.supercontig_27.55) derived from phytozome v7.0 (chr-ID supercontig_27; pos 530199 to 530991 reverse strand)
gattgtgacaccacaggggttcatttctggtgcaggtatgtcttatagttatttttggattctagtcttggtagaagaggaaaattctttttattttctaattattttataattatcactttgtacttttttggggtcctttttggttattgtagcttgtggaattgtagtactttgttatgtttgcaacagttgtttgaagtagtaattgtggacatgcactgggttgaaggattataagtataggaagaaacttttcaagtttcttctgcctaccattgtaaggaagtaaagaaataggagagtttcttacaatgtttgctctcctcttgatagaattagaattcattggtcccacacctttttgttgaaaggacatccactcagtcaaacttggaaaccttgtcgatgttttatattttcatgacttgtaaagtcttttctggatggttactcttttggtgtctatcaatggtttttttctctttttcactcaagaaaattgttcaaagtagtaaatttaactaataatcagtggtaggttcagcatcaaattttgatttcacagcatggagtagatttggtggacattgcgctttggcagagaataaatacagatatagcagattttgcatgcatatgatatccttcatcaccattgtttatgctacgccatttgctaaatgtttatctaggccaaggtttgtgctggatagttcctgatccttacatctcattttcaaatatctaaataacagttgaggtcagagaagggaatatcatatcaatattt

SEQ ID NO: 76786 - DNA, 492 bp, Carica papaya
  Intron number 1 from transcript evm.model.supercontig_2.28 8 (locus evm.TU.supercontig_2.288) derived from phytozome v7.0 (chr-ID supercontig_2; pos 3504361 to 3504852)
gcttgcggagaatcttgaaggtaaggacataaccttttcaatggctaacgtttcggtgcacttaagttcttttcttttttcttcttttctttctttttttaaacctccatataggttttaaccaaatctaaaggagaaacatttctgttttaccaaacattatagcatatcttaatctatccgcatgaaggtttttgtttaacattctaaatttggccgaggttatatttgtatataggtaaatatgggcagagataaatacttttaaacactttttcttctctcaacctcaaacaacgggtgtggtaattccacatccaattgtccagctaggttagcctctcccatttcttagttcttctgccaaaaaacccagcgggaataggttccaatttctgaattttacattacaaaaaaagtttttgatgttatattttattaatctccaaaatgctgagtaagaaaatgacaaaacgatccctgacaccagag

SEQ ID NO: 76787 - DNA, 637 bp, Carica papaya
  Intron number 3 from transcript evm.model.supercontig_1200 .1 (locus evm.TU.supercontig_1200.1) derived from phytozom e v7.0 (chr-ID supercontig_1200; pos 6973 to 7609)
ctgatagcataagacttcagaagttggccgcacaggtttgtacattgtgattttatttgtgtgaaaatgttcaactcttcattttcaagtgaattttgattagaaattgagtttggccttattatagatatagcatttaacatatttcccaatcatatgcatcttattttacatcataaggttcatcactagttcattgtaaaaaaaagattaatcctttgaaaatggaaagctttaacctaaattaaaaatgataaaaggatcctaaagtaggatagctttattgtaactcctcaaagaatagctttagtatgaaaaaatttgcataatatttttgatatttagtatcttcaatttactcggcttatttaagttgattttaaggaattagaaattctttatttcctctcgaactctaaatttcatcctttttttttctctattttttgtttttccctctattttcttctaatttctgggtatcagttcttatttctagaccatccctgacaatgtttcaaactctacttcttgtacatccgttggtataagatcgtagcttctatcattgcattccttactaaatgtcctacttccaaaaggaacgtgaagaaaagattgctctagagctaagtgc

SEQ ID NO: 76788 - DNA, 248 bp, Carica papaya
  Intron number 1 from transcript evm.model.supercontig_1.43 (locus evm.TU.supercontig_1.43) derived from phytozome v7 .0 (chr-ID supercontig_1; pos 834571 to 834818 reverse str and)
gaacctcatagctgagaagttggaaggaaggtcaggtaatatagtgggggctcctctgtgttcttgtttcttcactcatttcattaaagctttgtttgttttctttttgaaagatatgtatttatatatatatatatatatatatatatatatcttgttgtgtcttatttgtaaagtgatgattagtgttgccttattattttgactttttgttatttggaatttgaaggtaagagctgtagactaag

SEQ ID NO: 76789 - DNA, 635 bp, Carica papaya
  Intron number 1 from transcript evm.model.supercontig_2.15 7 (locus evm.TU.supercontig_2.157) derived from phytozome v7.0 (chr-ID supercontig_2; pos 2318379 to 2319013)
gccgaggatcctaattgtgagtatccatttaacgggtgcttaaaaatatttccttgaattgcatctctaacaattttatggctatttgcattttcttttctgttatgtggaaattgaatcaatttcctatcacaaactcgacatatttagctttcggagtgcctcacttcattttagtaattcaattatgagtgatgtatacatgccttcaaatttaactaaacccgtttgaaggcttttcttgctgtctgaagcaagggagttttgtttgacttgcgattaagcaaggggctaaataagtgaattcatttatgaaattttagaggtggagtgcattaacacgtattgaaatgagggaccttgatggtttttgtgaaagccatacctccatgacaatagaacaggtaactctaatgatcgaaatggggagtttgatagttactgatgtctgtttatctagtagtccactttccctcccttttgggctatggggcctaattttcttcttgtgtatgtttgttgctgtctatttgttatctgtaaaatttctttctcctactgcagctctttttccctttgttgacatttgatttttctcagacctcttttctgaggaaaagtctccattgaaatac

SEQ ID NO: 76790 - DNA, 985 bp, Carica papaya
  Intron number 2 from transcript evm.model.supercontig_36.1 00 (locus evm.TU.supercontig_36.100) derived from phytozom e v7.0 (chr-ID supercontig_36; pos 772664 to 773648 revers e strand)
catcacccagactctcctcctcccgcgcgaatcctgtaagtacttgctaagtttatgtttgcatctatagagtcaattattgttctttgctgtctctttatttgtttttgtttcttaagcttgtttcaggatgtgatgtgggtatttttttgtaaatcctgattcctaattgaagttcagattagtaagcataaatgtaatttattccaaaaaagaccatgaactggatcaagtttactgtttaccacttgtcatgtctgttggcattttgccttcctcgcagcttggtctctaggagaatctaggttcagccactagtttaaggattttaagaacccatcattacacaaaatttatttgaatatgtaagttcttataaattaatgagaaccaactacttctctggtcctgttaattgataagtgtatgaaaatctcatttcatattacaccggtagtcattctaaacacgctccttaacactaggatgaaaacgcagattgagcgttacgcctttgattatgatactatatgaaacagtcaatggagatataataagcacaagaaagatcaattaaagagatagattgtgagttattctttgagacaatccagaacttcttagatgcttaaatcctcataaattatggccttcaagaattagctgtagggtcttttgtccaactctctcatgatctctcacacttgaaatacaacaagaacatctgttgacaacaaatctttacaaatagcatgaagtcagtcaaagatggatagatgtggaatgaagtagaatttggactactacttggtgcgatcctctttatccctgtagcagaaagctatttttggcaaatctgagtctgttaatcttcaagttttagatcattaaaataccctaagactactctaatggaatttcattttgctttctatgcctaaaattttcagataaactgcacacccattatttgttcatctactct

SEQ ID NO: 76791 - DNA, 978 bp, Carica papaya
  Intron number 1 from transcript evm.model.supercontig_212. 12 (locus evm.TU.supercontig_212.12) derived from phytozom e v7.0 (chr-ID supercontig_212; pos 345836 to 346813)
gttccttacttcgacagggtacaaatatctaaatttgtgtgtgtgtgtacgtatgtctacaatagcacccaatttctatgtgtgaccaagatggtcactggtgatgtcaatagtaatcaatccatatggccatttatggatggaccaaaacttttgaactatgaaatctcatctgaagaaaaataccatttttgctcttatccattctgattatctctcgattgcacatggacaattacgtttcgtattgaaaattaaaatactaggagattcatatctcataaaatatcaccctaattacttttaaatgtgaatattataaaacttaatttttatttttcaattttcaattcaataaaatactaataagagaacaatacaaatataatataatataaatctgaacaaaaataaaattctaattacatgtctaacttgagttaaatttttttaataatttatttatttataaaagaaaacaaaaattcataattataaataaaattaatcaaattatgcaacacatatgtgaactataattaaattatacatattaaatagcacatatataaaaaaatccaataggaatgaagtagattgagaaccatctataaaatataattcttaaatgtaaaaatcttcactataaattaacttaagcaaatttacaaaatattactttgcattatactttattataaagagatcccatatttcctaaaaaaaataaacgttaggatctcgtagaattggaaatcaattaattctaattaaggagatcaaggattttgatggtctctgatgagtggctacttcttctccgaactaaatcagaaaggaaattaaaattatattaattataataacattaatttaagcttcatggaacatgctcgtaaatattcaatgtacttttcacttgtatatttctgtatgttgctagacttttgtcactgtttctaccctaaagtacttaat

SEQ ID NO: 76792 - DNA, 659 bp, Carica papaya
  Intron number 1 from transcript evm.model.supercontig_50.8 8 (locus evm.TU.supercontig_50.88) derived from phytozome v7.0 (chr-ID supercontig_50; pos 844858 to 845516 reverse strand)
tggaggaactgctgttactaccagcactgacccaagtaagcttcactcttcatctccctataaatacatgtacatatgtatatattataatatgtagctgcaattccttctaatactattatttgatatttttgttgccctgctcatgttacatgctctgtgtgagaaaaaagagtgtaattttggagtaccaagtagggtttctctgttaatattactttatatatatctatatctatacatatgcacatacagttgctatcttcactttattttatctgagatttttttaatttcttggttggtggtggaaaaagtcatctgggacactgagatgggagcattgtttgagtgtccattttttctgccttgaaaagttctggactttaaagttcaattatttgaagttactgaaaaaaaaaaaaccttcattgctaactttttaaaattcatttgtacttctccccttttaaagttgaacttgaaccaagcatttctgtatatattttcattaagaagttttattatacttgatgtatatgtattatttaactattcaaaaattcatatatatactgtttttctattataacaatttagaatttctaagttgaactgtgggtttctgcatatatttttattgttgtaggtactggaac

SEQ ID NO: 76793 - DNA, 818 bp, Carica papaya
  Intron number 1 from transcript evm.model.supercontig_42.1 40 (locus evm.TU.supercontig_42.140) derived from phytozom e v7.0 (chr-ID supercontig_42; pos 1314090 to 1314907)
taacgattacgaatattacgttcactacaccgagtgtgagtcctcgcccatttctgtatctttttgctgtagattttgggttagggttagaatagggatttgattatgattgttgaatcaccaatttttatgatatataggatggctagcattatttttaagattgtggcacgtaggttgatacataaattctgaatgtaagtatgaataaatagattcacagtgtagattagaccaaattgcctctacgctaatggtaatatagtgataacgaactgttctaatggtcttgtggttaacactaagtccactaaagagtgtaggaacgaggaaattttgaaaataggctcagagtggaagacgggctaaaatggtgggtagtgaagttggatccaaatttttttttattttgggcatcttaagtaggtatttctggtacaacatgaatcttcagataagggaaaggagtaacataggcttgttaagggagtttcggaagataaagatgctatgtggaatcttcgcttccatcttagtctgagaacaggctcctggtagtggctttttgttaagtcaatgtgaaagtttcttctactgtaaataaaaaggaaagatgatatcttgatgtacgtgctctctgattattctgaagatttaagctttcttccaagaaaaatatatctgatggattaagctaatcttgtccctttttctataatggtgattatgaaatttaaaactaaatacattcaggttcataagttgatacggtttttcttttttttttttttttaaatgtgcagttaataggagacttg

SEQ ID NO: 76794 - DNA, 1008 bp, Carica papaya
  Intron number 1 from transcript evm.model.supercontig_33.3 2 (locus evm.TU.supercontig_33.32) derived from phytozome v7.0 (chr-ID supercontig_33; pos 211982 to 212989)
tttgtggtcaggtatttctttctagaaacattgtgcttttttttttttttttgtgtttgcggggagggggaagggtttccgatggaatccgcttgatctgttcatcgagctttgttcttctgaaacaaattagttttcttgtgaagtggtgtcttggtggctgataaaatgcagaaaaagagatgagatcttaaatttttcccttgttttctattgtgaccagaaccttaacgcggttatatctaatcgaatttttaaacctcttcgactttgtttcatgtgattggacatatgatcccgggggttgggacccgggttctaccaaataacctttttctcctttcgaccattgtgattcttttttgcttcactggaaaggttgtgagcgatcgaatttctggaatatgtaacttttccttcgttcttgaggttaatgtttacctcaaaagctctgcgttttcctgatagggaatatgaatactgcagttgatgcattttggttttagtagttctggatgcggcatcctgtttcttttgattttgattcgctgtgatcttaaatttgacaggtaaactggatatagttgaattataaataaactttttatggttagcttttctcaaataaccattttctttttctataaagctacgcaacgtgtgtcatacaagtttccaaagtactttaccgtttccttgttttctagggagaaaccatagaggttaaagtgcaatttttgaaacgttagagaaaagaagcaacatttataacgattactttctacgttgatgctgaaagaacatgaccagtgatcaatacttgtctctagttatgttccagtaaatcatgatgtttgttggctgtagagatgcatatcaccgataacttcacatctatgcaattttatattcgtttgctggtaattttgcatttgtttgcctccttatttcagaataattttgagtcttatactcttaattttacaggaatcgagccgtgttttgagc

SEQ ID NO: 76795 - DNA, 743 bp, Carica papaya
  Intron number 2 from transcript evm.model.supercontig_271. 4 (locus evm.TU.supercontig_271.4) derived from phytozome v7.0 (chr-ID supercontig_271; pos 38891 to 39633 reverse s trand)
agactatcctcttctcctccttcgtatacctcacagtaagtttactttcctcttctgtcttttcataatccactaaatttcttcaatagtttctaacataatatgacaccaatatagtaatttattggtttacataaagagtcccaagttttctatcatcactttgtgggtatagtagtatatgttgggtaattgagttgtctactccataatacttttgtctactagtttccttattgaattcactagtttcctaattgagttgtggttaccaattttgctttttgggggcaagatattacaattctagattccttgtcacatacccaccacaaattattcttttcttcattaaaaaaattattgtgctttgtgggtgtagtaatatgtgttgagtgtatatcttaattaactaatgtatttgatgaattcgtagttactaaattgggtttcatcacattgaaagtattacaatttggtagttagtccgtaatgctttcatttactagtttcctaattgggttgtggttatcagctcgcctttttcccagcaggatattacaattcaaaattccatgtcagatacccactatggattattctcttcttcactactataatataacctatccatatgtctacatacaaaagaagagaggttatatatgtatgcatagatgtgtgtgtgtgtgtgtatatatatgtaaagtgtgaaataaggagagttgatattttgacaggga

SEQ ID NO: 76796 - DNA, 803 bp, Carica papaya
  Intron number 2 from transcript evm.model.supercontig_50.1 05 (locus evm.TU.supercontig_50.105) derived from phytozom e v7.0 (chr-ID supercontig_50; pos 982847 to 983649 revers e strand)
ttcataccatttcacaggtaagttcatcctctctgcctatcatcaagctgtttctttttctttttgggtttccttttttctagagaaaacatttaactacatatatgctgtttatatgatttttaatttgtttaatcagaaagaagcatccaaacacctgaggctttaacaatggtgaaaaaagatgttaaaagtaaattacagtttgtttatacatgacttttgggagtagttaacatcaactaaacttttatttatgtgctttcaagttgatctaacaagactatcatgaatacttgaggcacaagtaaagaaaatgagtatatacacatctctattggctttgtcaatattgtgcaagtttttagtcttatatattgtgattaaataagtataaaaaacatttcaacacaaattcctgcaaaaaggaactattcttgcttatatctcaatatgactggtaataggcttgaaccaagaacagtaaatatcgcgcaaactgaatattcgagcagcacggaagaagcttatgatcacgcctaaagagaattaactacaaatgctagtccacattttaaaaagggaatgtatgaacataattaatgcatcatgtcttgattagtccaatcaaagttcaaccagactaaagatatatacaggttattctatatatccaagtgaacccatatctatatatattttcctgtcgtattacatgggtaaaaagttattatattgaaaagaaaagttgtaattttgtgagaacagatagttgctgcacttcttgtaacagcaggagcagt

SEQ ID NO: 76797 - DNA, 390 bp, Carica papaya
  Intron number 1 from transcript evm.model.supercontig_26.1 53 (locus evm.TU.supercontig_26.153) derived from phytozom e v7.0 (chr-ID supercontig_26; pos 1159124 to 1159513 reve rse strand)
gaaggccattcctcttgaagactatctcactacccgttagttactcatctcttttctctttttcttcactctcacatgtaatgtcttctattactttttcttctcccttcttttttttttgtgcataacttgaactaactttgttggctgacttaatatagaaaatttctctttcagaagttttgaatttgaaattttgatggaatgggtttcgttgtttgttagtttttttcccaagagaaaggcaacttatatatttctggaaccggtcatgaatgggttcttgtttgatgcagatatttagagaagaaatgaaaaatgagatgtgggtgatttcaaaccaaaaaacaaaagattaataatttgtgtgtgatattgaatcaacagctg

SEQ ID NO: 76798 - DNA, 668 bp, Carica papaya
  Intron number 1 from transcript evm.model.supercontig_55.1 54 (locus evm.TU.supercontig_55.154) derived from phytozom e v7.0 (chr-ID supercontig_55; pos 964107 to 964774)
gtgcgtttaggttctcaattacttcatttttttagtttttttttttccgttaaacttagttatgtgtttctgtatgtatcttcaattcaacgcattagattgcttcattacagtttgtgatctggtattgatatttgaataattgggtgttattcctgttttttttttttttttttttaataaaaaatataaaaactctattatctttttctggcgtgacaatttgatgtttaacgtttgaattgagtataaattaggaatttctgaggcgaaaatgtaaatccggtttaggtttttcaggtttcatctaagttgaagatgaaatatggcttgaacaaatttctcggcgacactattaagggctatactgttgtgctctgtgaagtatatcatgtttagctaaattacttgcggatgatcggatgaatataattcatatttatatgtggtgattgtaattttgaatatttattttttgaagaacatttttatcatcttcgtttgtttatcatcaattttagatatcttcttttacaatgccaataaatatatgaataatttctttttaaatgtttgtttgagctattctccacatgttactgctttgtaatgcatttgcaaccatgccaataggcaagtctttatagaggacaatccaggaaggaaaa

SEQ ID NO: 76799 - DNA, 1060 bp, Carica papaya
  Intron number 1 from transcript evm.model.supercontig_33.1 68 (locus evm.TU.supercontig_33.168) derived from phytozom e v7.0 (chr-ID supercontig_33; pos 1705996 to 1707055)
gtgtcgtcggtcaggccgtggcttctgccattaaggtctctttttgtttgctttgcctattggttgcttcggttgtcatttttgtttaaataatcgtttaagcgagattgaaatacgtatttggagtagttttcattgatttgcttgaaatggattttgttaactgcgaagtttctgcaccataggaccagaattccacgaaatttctcagagttcatcggagaaatattgttttgggtgattagactaaattatcacactttagatatccacgatacagaaacgtataaatttaacacacagatataggtctcatttcgcaggtgcatgtatgtttgtccaagtcccaactgcttactctatcagttttccattgcatggattttggtactctttgaacttactttaaattcttcatcttcttcatgtataaacagataaaaaaatatcagtgcgtttagggtgttttatgtttaagaattgtttcatgccactacttgtttgatgtttgttccacgatggttcattttttgatgaatgatagtcgcattaaggagttcacttgctattatcattataatggaagataaatttgggaacattaattttctgcagtaatgggttcttttttgttctcgagtttcaggggaaataaaaaatttaggtttctatttcattcaatattggtaaaaatgagatatttattggctggtattcaactgatatgtttgttttatgttttgcttttgtgccaaattatcattttaattcaatacctatcctattcattgctttactaaatattttttagaaaaaaaatgaattatttttcaaaggcatttgtgaacacgtgggtaagtaatcagctaggtgtttgatgcttcaattaagtcttctaggaacaaagttgtcatatccagagaaataaatagatgtcgtccttgtttgctctgacaatttggtatcaattatttatacaagtctaaacttcagtcatcaacttagccccttctacctcaatgcaggtcgggtaccgccatatagattgtgctcaaatcta

SEQ ID NO: 76800 - DNA, 485 bp, Carica papaya
  Intron number 1 from transcript evm.model.supercontig_487. 5 (locus evm.TU.supercontig_487.5) derived from phytozome v7.0 (chr-ID supercontig_487; pos 30363 to 30847 reverse s trand)
aatctcgaccagaaagacgacatttacatctacaggttcacttcatttcccctaatcttttacttctgtaaattgcttcttcttggaaactccagagtatctgattacaatcctatcaatttcttagcttgattttgagaatttgattgcttgaagaaatgggtcagttggattaattgtttaattctatgggtttgatgatttctgtgtcatcttgaagaaattaatcacataacatatcttattgggtttactaaaaaaaaaaaaaaaaatcaaaactgtagatgattccaacttttattatgaaagagaaagcaacgagtgaagttttctttttacgatcatcaagttctgtttgcttttgtttcgtatatctctacacacacactatgtatatgtaatgaaattgctttttgattaaatttttgtgaaattaattaaaaattgcagaggggagcaagctttttgcagtagggagtgcaggt

SEQ ID NO: 76801 - DNA, 596 bp, Carica papaya
  Intron number 1 from transcript evm.model.supercontig_39.1 6 (locus evm.TU.supercontig_39.16) derived from phytozome v7.0 (chr-ID supercontig_39; pos 320655 to 321250)
aattcgaacttggcatctttaattactttttaaaggtaaaggatatacttgaggttaaaatctttggatggtggtattcaactgaattaacagtaatgatttgttacaaacttagagaccaataggacttctatctccttatcagtgtgtgatatgttattacgtttaagcacagaagtcataaatttctttttttttttttttttctgatgcagcatgattatggaatacaatttttgctaaacttggggaatcctttgtcccttttaggacttaaaaagactggtgtgaggctttgctattgatgcttgcagtttgtgctattctcttattttgcaatcaaactggtagttgcttatacatgtttagataatctttctttattattattattattgttgtagttgttattgttatttattcttcacggaagatctttgtgttcttttctcactaatgctaccctcctaagttaatcatattctaggaatagcatctccactgaagtgaacttttagagttattctgaaattctttctcatctgattgggagagtttgatgcaggtacgatctgattgggataacatcaagattg

SEQ ID NO: 76802 - DNA, 637 bp, Carica papaya
  Intron number 2 from transcript evm.model.supercontig_178. 37 (locus evm.TU.supercontig_178.37) derived from phytozom e v7.0 (chr-ID supercontig_178; pos 323182 to 323818)
tcggattctttgtctttactggtgtccctacctccgtaagttcctctcgtctcctgcaacttttgtaagttttttctgatgttgcttttggtcttgtgggtatccagtagtagtccccattatatatggttcctgaatcaagcaagtcatgaataactaatgcccctgtttggtttaaatctattctcatttgattttttattttaattgtttaatatgtaaactttagttacaatttatacgtttgattcataactaaaccaattttacttgtatttttaatgtcaaacagaagacttgtatctttatttgtcaagatagaattcacaaaaacagcctactccaattaaatatagaattaacttaggattagaatatacttttcattaaaatggtcatcttgtttgtactatatgcttactcccattcaatgtaattgaaattccaactaagcgcaatttaatgtttaggaaggaaaaaaaaaactcatattgaacctgttttatgtcaactgcatatgtacaaacctgaaaattattgagtatgaaaaattgtgatggttgatttgtaactcatctttagctaagctgacttgtttgcaggcattcctgtggtacaaatccgtccaagttgctaa

SEQ ID NO: 76803 - DNA, 961 bp, Carica papaya
  Intron number 1 from transcript evm.model.supercontig_111. 45 (locus evm.TU.supercontig_111.45) derived from phytozom e v7.0 (chr-ID supercontig_111; pos 817555 to 818515 rever se strand)
ggtagcatttttaggaaacttgcctattgttggtaatctctcagacttgtgttcagttttacttgatatcatttcaacattatttgatttagttattataatgcttttccgtcagtaaacttaattaacaaggaaattggacacaatgtacatatgataaattccgagtaaacatattcttactgttgatatgatcatgtggaaataaatggaggcattcttttacaagaaaattactgctcaaagggtaccaaggaggtacccgatacaaaatttgttacagggatatgtactaaatcagcacaggaggggggaacttgtaaaagaaagagtactgtgtttgtccatgtatctaggatcaaagcttggagcttgctccgccaaagccctggtattcctcttgctcgaaagaagaaaaattctttttagatggaaacaaaaaagaaaaatataagtaaaggaaatatgtagctctttcaatctctttgaatcccagcacgcttgcaactccattagaatcaaatgaccaacaagtgaagagacatcaaggtaagttccgtttcgactagttcatgaggaccagaaaaaaaaaagatggttgacaaattcaatgtcttcccaataatcatatcccatccattcttagcttttgctgccaaaagttgtcttctagacatcactcacaaccaaatgatgttacctttgctggcacactcttaatggaacatattttcttgtgatagtatcagtgtcctatatacccaaatttatatggaacatatttttttgtcatatctgttcgaaaaaaaatgaataagaatgcagctcaacatgcaatattctcctagtggtaaaattgtgtcattcaaatgaatgatttgctattttgctgtccctgaatgatgttttgtcctcgtttttaatgtttatggtgccgtaaccttttcaggtccgacaccaa

SEQ ID NO: 76804 - DNA, 776 bp, Carica papaya
  Intron number 2 from transcript evm.model.supercontig_10.2 38 (locus evm.TU.supercontig_10.238) derived from phytozom e v7.0 (chr-ID supercontig_10; pos 2951383 to 2952158 reve rse strand)
gtcgtgaaattccaattgtccaccgcgtaattaaggtattatctcttaaatccccttactttacacgtcatgtcacaggtgatattaattgattactacctgggatcatttatgaacaataagtataggaatggaagctgtcctttccatgtgggtacatgcactatgtgaacatctgtatgaggaatggagatgtaaccaaatgctacatttttgtatatagtaaatatatatcacagatttgaaaaaaaaataatgaatttctcagattggctgttggataattgccagtatgaattgtctgcctcagagttcatgtttataaatacacacccatctttcttttactgagccaaaaacctgttgacctatgtcaaagggcagaaacttaaccggaaattttgattagttatgcataagtctaatctaaccttcctaatactacataccaaggaacaagctttatgggcaacaataaggcgtgcacaaacagatggagatttacaatcgtatcatatggactatatcactttgtatttgcatctacatggtttgttgaactcacaatcctgatttgttcttcctttctgtgtatgaaactacactgttacactgtctttgttttcaactttgtgggttttattaattttattgggatgattagatcttttgtaaaattatttttcattctcctatgctgtttgttttgaaatttatttagttgagaatagttgtgggggtctgattaatcttgatactaactgtatctcaggttc

SEQ ID NO: 76805 - DNA, 652 bp, Carica papaya
  Intron number 1 from transcript evm.model.supercontig_127. 18 (locus evm.TU.supercontig_127.18) derived from phytozom e v7.0 (chr-ID supercontig_127; pos 241802 to 242453)
cgtgagtttccgtttcagcattttcatcactttcactcaaactcagttattctccctcgtttgggtcgattctcacattaattttgtatttgttgtgtttgcaattagttcgtttctcctccaccgccctcctcttccccattcccctttttctcagagtttgctgaattgaattgagtgttttcttgtgtttttcttctatataagctaaattacggctcgtttaattttgcgtaattggcaaatttattatgtattttatttggttttggaatgcatgtcgtctttgttacatttcatttgttaaaaaattatcttctgttgtttctctgtttcatcattgattcataccaataatttttctggttgatttgtttggttgaactagtcattttccatgtttcagccatatatatatttgtcatttaaaacagttccgcccatctacaagatgttgattgtttttttttttttttgcatttaattggtttagttatccgttcaaatctccctatcacagcgatataacggtcattcttttcgctatggtttttctccatacgcgcttttactgattgatggaaattttaattaattgcttccgaatccctttgcaggaacaaagcagccattgtcaaagcaggcgctgttc

SEQ ID NO: 76806 - DNA, 552 bp, Carica papaya
  Intron number 4 from transcript evm.model.supercontig_39.2 6 (locus evm.TU.supercontig_39.26) derived from phytozome v7.0 (chr-ID supercontig_39; pos 503263 to 503814 reverse strand)
atataggtgaaagaattcaacaggtacgtctgaactcaccagtcttcgcttgctttacctttgaatttcatagtgaaataccaaaaagtaatcacatcctctctgctttccaccaaaaaggacttttatatgctatccttccatgtaaacttaaattttttccagcatttttctcttatttcttaaggtacctccttcgcaccagaaaaactaatatgtaatagtaagaagaattaaacagggaaaagaaatctatttctcttttctttgattacatgttgaatgtcatggaagaggagctgtcaaatcgtatgtaggtacatatgcaagttcctatattatttccttgatagcatactttcaaattttcaattaagactatcaacaactagataacaaaagtaccagattaacagaagtttgtttttcatctctattttgagggttgctttcgttcattctttgtggagccatgtgaatttcaaatcatcttgatatttaaatttccatgtcacagtccttgggaccaagagcacgcagcttccggtcaat

SEQ ID NO: 76807 - DNA, 887 bp, Carica papaya
  Intron number 1 from transcript evm.model.supercontig_11.2 8 (locus evm.TU.supercontig_11.28) derived from phytozome v7.0 (chr-ID supercontig_11; pos 435728 to 436614 reverse strand)
gaacacctgtatattattatgtcagtatatcttttctcttgctctttaaataaaatttaaaaaaaaacttctctcttattacacatctctagcaccactaatgtcctgtatcccgtttttatgattttgagcagctattctgtaatacatatactgataacatctatatcgcataaagtatcgaagttttttcttatgatgtctgtcttccttgaatttgaaggattgtgaaaggaaaatttattgctgaatagcagtacaacactttgtaatttatattaaagtaaggggcaggtcacagggattttgttttggagaatgatttttcctggatgatatgggcatgtagtctctgaactaattcaaatattgagatgcagatttttaaagttgctatgattggtataatagggagttcatctttttcttgaaagaagtataatagggagttcatatgaaggtctattctattggtaactaatattctgaaatcatggagtccaagagagagttctgacatgtatgaaatcttgagctcactatcgtatttcttttaacttcatgcttgatattgctagatttgagaagcatatagatgttactatgacatgatgacagatcatagattgtctgagttcaactggacagactatgttgctagaaagatgtaggaaacctgctaagaatattacttttgagatagacgtattggtaaatcttgtaatatgctttcttttggtaccaaactgaatggcccagaagatttggatcacatctagatggtaaatcttgttcttttttttcctaaatgacaatgattatttctgaagtatcctttttaagtcattgaaattcccttgtgcagtgtcctccagttttggctgagc

SEQ ID NO: 76808 - DNA, 239 bp, Carica papaya
  Intron number 1 from transcript evm.model.supercontig_123. 48 (locus evm.TU.supercontig_123.48) derived from phytozom e v7.0 (chr-ID supercontig_123; pos 645894 to 646132 rever se strand)
cgaaataattcttcatatcgcgaaaacacgtacttctttcttatatatttggtttgattcccctttatgatttcagtacttatttttaccatataggagtctgtttctgaagatgatagattttcaaaattaatcttctttctttgatacatgtgtagaattgttagttggttgaatttcttgagttgatcttttattgatttgcgagtaatcattcagacactttctacgcacagggg

SEQ ID NO: 76809 - DNA, 744 bp, Carica papaya
  Intron number 2 from transcript evm.model.supercontig_26.1 05 (locus evm.TU.supercontig_26.105) derived from phytozom e v7.0 (chr-ID supercontig_26; pos 805209 to 805952 revers e strand)
agacaaaccggagggtgttcaggttgatcttagtggtaatgcttcaattttttacacttgattactgaagtatgagcgtattcctatccgcagcaattattgctctatgatctctgagactaaactgggttgtatggagttaatttggtctgatttagaagcctatagtatattaggaatgtgatattcatccttgctgaaagaagcggctttgatatctttttatattggctcaagtcctttgaaaaagtctagtcaggacaagtaatgagttgcacttaatgaagttgatacaatattatcttataataccttgcaatagccattggaagataggtttagcatctcttcatggattgtttattgtgtattgcttttctgtcttctcggattggtaatttgcaactaaattagtagatgcttgatcacttgacatttttaaggacatttttggtcttgcaggagagaaagatggaaacttcttatttgatctcatatccaagttaacatgaaatatattttgcttttcttggtgctagtttgttacataatctattggtttatggaaagtcatgcatgcattcctttgtcaggccttagcaaatcgcttaacctcatgtattgaatttttttttccagttttgattttgactaaaggagcttgatatattgtttctataatctctaatatagagtttgattttctttttggatttaacgttttatttttccttgggacttcag

SEQ ID NO: 76810 - DNA, 982 bp, Carica papaya
  Intron number 2 from transcript evm.model.supercontig_112. 84 (locus evm.TU.supercontig_112.84) derived from phytozom e v7.0 (chr-ID supercontig_112; pos 660675 to 661656 rever se strand)
atagatttggacaaaacagaaaagaaggtaatttcactatgtgacctactgtttgtatgttcatagtatttagcttttggtttgtaggttgcttaatattcttagaggttgcattctagggctactatgttagcgcactttggaggagtttacgtccataaaaatctctttggggataatgcatgctaaatatcaagaaaatgtagcatagagcgtggggctgttcccataaaatgctttttggggtcattgcatgctaaatagcaggaagatgtagcatagtgcatgaggttgtgcccttaaaaattctctttgggtttaatgcatgctaaatatctggaaaatgtagcattgatgtttatgcttctgtaataaagatgtcaaagaagcgataaactatcagccttgtacactttatcttagttgaggattatttattttatttcttgctttttgatgttttatattagaaatgtcgtcgattgtggaggaaattgggtctactcaatgtgcatgtttgttggatcattcttttattcatttgccttggttagtttaatatcaattaaacttgctactgatttatgcaagcccgagcactcagcttggttggctagcatcttcatttgcacagttttgttaacaaagcctgttgggttattccaacaaatttgctagctatttactcatgttaatgaaaatctaaaagtgtccatagctacttactcaatttggaaagggaaaatttccctgatctagtctgtacatttgaatacttttctttgttttgctaactcatctgggtgaatttcttttcttttggatgattcttggtgctttcatattgaataatactttttctgtaatggctggtttaatggtttttgtctgtctttatagttgttcacatattcacacctcatgaggcactacttctctcttttctaaatcaccttctgcttacagggtgaacttggagcaa

SEQ ID NO: 76811 - DNA, 718 bp, Carica papaya
  Intron number 1 from transcript evm.model.supercontig_25.6 7 (locus evm.TU.supercontig_25.67) derived from phytozome v7.0 (chr-ID supercontig_25; pos 815077 to 815794)
tttgcgcccctcaatcgtgggtttcctttcaattgttcttcgctccttgctacttgtttctctagattcgttatttttgtttgattttatttgtatatttgcattttggtacctgagccatttccattccttggcttctttttattttgattttcaattctacttgtttacttaactggatgcgtgggcttcttttttcattttttaaaaacattagtttccgttccatttatctgaatcctttatcatatgttattctggatttacgtatgtatctgggcttttcttaaaattttgatctcattgactttagtagtttgttcttcttgagttttggtatttggatgtatggttttctctcaaaattgattcccatctatgcattgctttttttttttttaatctgtaatttcttattatttggtttaatcctttatcatatgttattctggatttacgtatgtatctggacttttcttaaaattttgatctcatttactttagtagtttgttcttcttgagttttggtatttggatgtatggttttctctcaaaattgattcctatctatgcattgcttattatttgggtttgatgtataggcacgggattctttctaacatatagtatctacgttatattttggagatattatttcaaattttttgttgataatttttcagggataaatctggttcgggtcattctgtcactctcc

SEQ ID NO: 76812 - DNA, 556 bp, Carica papaya
  Intron number 3 from transcript evm.model.supercontig_1440 .2 (locus evm.TU.supercontig_1440.2) derived from phytozom e v7.0 (chr-ID supercontig_1440; pos 8962 to 9517 reverse strand)
gcaccacaaccctgcaaaaggtgcggcaggggtatgattttgatgtggagagatgatcaggtgcaatgtgtagatgtcattaagggggaatgcacaatatcctgtatctttagaaattgtaagggggaatttagttggatgttcactggagtctactgcagaggaaacagagaggaaaaagtcagtctttagaatgaattgttggaatgtaaatctaattcgagaagcaattggataattattggggacttcaacatgattttgaggggagaagagagaagtggcagctcgttctcgactaaaaaagcaaatgaattaaggagataatggataggattggtgttgtttatcttcctttatccaatacacagtggacttggtccaaccaaaagtgcaaattcagaattgataggtttctcatttctgcaaatttgatagtagaacttgcgggtgttagtcacaaaacactaccttgatttgtatcagaccactaccctatttgtattgaagcttatggaattaagtagggtcttatccctttccgcttggacaacaa

SEQ ID NO: 76813 - DNA, 323 bp, Carica papaya
  Intron number 2 from transcript evm.model.supercontig_14.4 6 (locus evm.TU.supercontig_14.46) derived from phytozome v7.0 (chr-ID supercontig_14; pos 543955 to 544277 reverse strand)
cttttggtgaattcgaggtagatgaactgcgatttattgaattcgaactacctattattcttctgacagttgaatttgatacactttttatttttctgaacgaaattggtttaaaagctttatatgtgatagttactttgtgttgtgtgtttgatatttgctatgtttgtcgtacgctctgtaactgctgctgttctgtttttttttttttgaaataaaagtataaactgctgttctgttatttcctatgtttttcatattgatttcttgtcgactgtgtcttcgtaggtcatccattttggggataagattattcttgaaga

SEQ ID NO: 76814 - DNA, 415 bp, Carica papaya
  Intron number 2 from transcript evm.model.supercontig_1.36 3 (locus evm.TU.supercontig_1.363) derived from phytozome v7.0 (chr-ID supercontig_1; pos 4739179 to 4739593 reverse strand)
aagggtggactgccagattgcttccctcaagacaggttagaaaaagaggcctcatccaattttctatagcggctttaacatctctatttgtttaatcttcattgatgacactgctgggaatgctttgtgctgttgttcatggtcgatcttctggattgattttctttgatagttcaggcaatgatcaattatgtcacgccatattacattgttagattttatctaatttagttttgatattttttatgttgttctaattctactagttatttgaatttcctcatagaaacatgagctttgtgctatggtctttttgaatttcctcatagaaacatgagcttggtgctatggtcttaactgcttattggtcatctgtgcagtttggatatattgttctaaccacttcagctggcat

SEQ ID NO: 76815 - DNA, 578 bp, Carica papaya
  Intron number 1 from transcript evm.model.supercontig_21.4 1 (locus evm.TU.supercontig_21.41) derived from phytozome v7.0 (chr-ID supercontig_21; pos 600504 to 601081)
aatcaaatctgggtttaccatcgccaactgtacaggtcttcttcattctttttaaaaaacttaggtttcttgaaacttttgagttccattttctttttaacaagatgataaaatttctgtgttgtttgtttaatgtgaaaatgcatgaagaggcaaggaagggggaagtcgaatcttgattctatgaattatatggcctgttctgagcaagaattatatgaggccactaatttgggatgtgattgagagcattctcttttatattctcattctattttacatctcaactatctgatagatagaagttaatcgtaatttacataatttggttagttattgaaccaattcaaccaatcttattcatatttttagtaacactgatattctcacttgttcagaaatatgcgtaagttagaattattgatagaattgacttttttattcaaaatttaaggtatttgtattgtattgtcatttttattctatctattaaaattttaactaaagtcaactctgcagaatctaagaatatttcattgttttcttttttattccagacaatttggttatttttataa

SEQ ID NO: 76816 - DNA, 701 bp, Carica papaya
  Intron number 3 from transcript evm.model.supercontig_29.1 19 (locus evm.TU.supercontig_29.119) derived from phytozom e v7.0 (chr-ID supercontig_29; pos 1113673 to 1114373 reve rse strand)
aaaatttcaggtgaattttgttttgtctataatatatctttggaataattatctgattgtttggatatatactaatttgctagggtaacaaaatgactctattctcaaccttataagttcttgttctactactctgcattatgatacaggacagacgaagctagttgcaaatttatgcatttatgtctttatgattttagtaatttttttcatcaatcatatatcattgataatagctttattcatttccaatcaatcaagacattttgtgatgatcatctcgaaattaaagaaccatgaataatcatctaaataattatttctgaatatgtcaacccaagagttctttgattcagatcttctagaaaccccattattcttttatccactcttctgcttactattgaatctttgaactattataagtttgtcagttctttcttggacttgttcttgctctgaaaggacattcatattatttttggatttatggactccgcatgctaagctgaaaccttgcttgcactgatatagttaattacctaattaattttttttcttacatttctataaattttcgtgtggaaattgtccaaaaaaatgtggtgaacaaaatctctcgttaatcataaaatttggttataaaagatctaatcaatctaacttgatgatgcagaagagccaacttcacatctgcggac

SEQ ID NO: 76817 - DNA, 673 bp, Carica papaya
  Intron number 1 from transcript evm.model.supercontig_117. 2 (locus evm.TU.supercontig_117.2) derived from phytozome v7.0 (chr-ID supercontig_117; pos 4640 to 5312 reverse str and)
gactttctgatagcagtggtatgttgtattttatcatcatgttatacggtttcattgtgtcaatgttcaatgtcatggatagattatgattcctcatttaaatttggctagaatcactttcacttgtgggttttcagtgggatacttctgcttcttaaacctgcatctgttgggtattagatgtaaacatatagcgccttttgttttttatgtgattattcagctcctgtagatagttaatacaatcttaccttgaaaacttacatactcagacttaaatgttgatctggagaaccttcatagaaagcaaaccatccaattgcctacttattaaaacaaatttttcatggttttcttagtataagagagatgcaatcaagaatctgtttattctgtatctgtttacatttcttgcctgttgtctcttctgaattcttatggaccataattgactcacatgtttgtattagacatgctgttatcctgaaggataatcatgagtttaattgtgcttgctaagtatgatgagcataagtctttcatgaatctgttaaatggcagacagttacatctccctgctcaaattggagttcttatttagttgtatccatgttacatccaacgcacatgttatgacagaattgttctttttctgaaaaaatttcaggaacag

SEQ ID NO: 76818 - DNA, 634 bp, Carica papaya
  Intron number 1 from transcript evm.model.supercontig_103. 25 (locus evm.TU.supercontig_103.25) derived from phytozom e v7.0 (chr-ID supercontig_103; pos 212433 to 213066)
agaaccatcccgataaaggtggcgatcctgagaaggttcgtttgtctcttgaggtttattggaaccttttaagctgcttggttatttcggtttgtttttcggctccatgtctttaattctgtgtgacaatgggttttgattatgcattttgtggaattgtgattgactggattgctccttttgtatgattttctattgtatttctagtaacgtgttgtttttctctgtttattgtgaggttattgtttggttgttgaatgatcttcttttggatccttgattagatttttgcctaatttttctggttaatgctgcaaacagctgtttatctggactcttatttttggtcttgatgctttatgagaaaactaatgttgtaatgagccactattcttgtttggttcaaggaagatagcttaactagaatttaggatgaaggaaattggtctcttttgcaagcgaatgaactaatattgtagtgattcataactcttgtttggtattgggaagttagattcttcatgcattggcaataacctggttgaccttatgcagttcacagaactgaatttgagcttgactagaacttaaagaaaaacctttgctcttgtattgcagttcaaagagttagcac

SEQ ID NO: 76819 - DNA, 909 bp, Carica papaya
  Intron number 1 from transcript evm.model.supercontig_24.8 5 (locus evm.TU.supercontig_24.85) derived from phytozome v7.0 (chr-ID supercontig_24; pos 1939034 to 1939942 revers e strand)
gtggtacttttgcaaggtcccattggctgaaagtgagttttaactcattttggaacgttttcatggtttatagattttttttccttcttgtccaagagaacttctggtctgtttgattgcaagatgtcttatctggtatatgagatactgtaggggaagcagggagctaaactttcctttgaaggaacggaacttccattatctgtttcaatgcattttttttcttttttatttggctttagttctgtgttctttgaccgcttaacttaaaagctttctttggatctttggtttgagaaaaaatcaatttgattcttgcctgcaagccattcacggaagccttttgaactcagtattgcaaacatttaaagcgtaaaatgatcagctttgaatatgcgtggcctgtccatggtgctctctgatttttttgcctcaaggagaagagttgatccagccatttccctgaaatttagctgatatagttcaatttcaaattggtttttatgttagtttataggggataacttgttggagtatcttgaaatacatgacgcgaataatagagccaatattttgctcatcttagcttgtgtaatcttgtgggacaaataagatggttgttgcttcagcaggtccttttttaatctgagatatactctaggaaatctctttgataattgtgaatggcatcaatttttttggtccctgttaggtcttgttagtttgtgaggatcttaaccatacaacttgtattgctttttaaatttatatagaagactctttaatttatcttctttcagtagcttaagttatgtcttttactagattcctcaaaatttcttgatgatatttttgtaattgtgtacgtctaaagagctagctgcttcggtccctcgcactgagattgtg

SEQ ID NO: 76820 - DNA, 211 bp, Carica papaya
  Intron number 1 from transcript evm.model.supercontig_211. 4 (locus evm.TU.supercontig_211.4) derived from phytozome v7.0 (chr-ID supercontig_211; pos 17351 to 17561)
ggtaacttcgtttttttctcctactttttttccctttttttttgtggtttgattatctttgtttacctgctgtatttttctcctgaaatgaggtgtagataattctgtgttttggataatttgtaaaaaataagaataatttaaaacaggaaagcaaatactattcatcgtggagaagaacagtgtttttttcagaatttttcagggttga

SEQ ID NO: 76821 - DNA, 988 bp, Carica papaya
  Intron number 1 from transcript evm.model.supercontig_360. 2 (locus evm.TU.supercontig_360.2) derived from phytozome v7.0 (chr-ID supercontig_360; pos 15108 to 16095 reverse s trand)
cgacaacggcaccggagtactccttctccctcctatatttgctttttatttcttcatcgttaaacgtttttgtctacatccacagaagttcatgatatcagatatctatctttttctttttttataaatatgcaatgaaattaagatttacgcagcttggtatcaccaattatgcgctgtttagatctgctcagattttaaattctgtttgtatctgatatggtctgtttgggggtttgttggatttgaactgatttaagtgtttaagttaagcttaagcattcgctgatacatttatggagttttttattgcgcatgggtgaaaatgcctgtgagaatctgcaaagttgggctgcgatgcgattgagaattaaatggccagttgaatcatccattactaacggaaataacttcaggtcttttatgtggttttgaatgactactctgctttcagttttccatgctctagtttgttgtctgcaaggaatggctccattattgaccatggattaggaataagaatacggtagaaatgaggtaagattggataagaataattccacggggttatttacgttagcggaatttcaaattatttcttgtccaagcacattacaaaacctatattaaaaaatggaaaaaaaatcaaagtaggagctgaattggtatgatatatatatcaaatatgaaaattgtgatgtatctcaacatatcaagaatggaattagactatagtaaaacaataagaatggagttgtctctgggaccttgtagatattttgagcgaacctatcatgtaaatattttcgtacatggccagcagcctttggtgtgttgaatgggtttctttttcagtcaaaagaatggtattcaactaggcaaaaaactaaatgtgaaaagcaattatttaggaggatatgccaattatgatgttttaacgtgagttatctctcattggtttctgaggcttgctacttttcattgcagt

SEQ ID NO: 76822 - DNA, 458 bp, Carica papaya
  Intron number 2 from transcript evm.model.supercontig_48.1 46 (locus evm.TU.supercontig_48.146) derived from phytozom e v7.0 (chr-ID supercontig_48; pos 861110 to 861567 revers e strand)
ccaaggtagatcctttcactccctccctctctctcctgtttcaagcaatggcaattgattttggttggggaattgccactgagtttcctgaatgatagtttgatcgtagggcttttactttgtttgattacacctaagctggctcgggagcttgtttttattatgttctgattactagtttgtatgcagctgctttctgaattttcctttgaattgtatcatagtagttgtgcctccataatcccagataatatattcttctgattatctgattcatgggaggcagagaacaaaatgtgtgggttctctgatagcacctttgctttaaaagatggtgttctagtagtacctcaacacacattattttttttttaatgttaaaaacaaagaaaatgtaagtctttggctcattacctgagtgcaccaaacgtatgtttgtttgtttaacattcaggtgg

SEQ ID NO: 76823 - DNA, 656 bp, Carica papaya
  Intron number 1 from transcript evm.model.supercontig_48.1 46 (locus evm.TU.supercontig_48.146) derived from phytozom e v7.0 (chr-ID supercontig_48; pos 861660 to 862315 revers e strand)
cttaaagacgaggtaagctttcctctcgactttgattttaaaagtacggtacccttttttttcttttagagttcttctgttctctcgtttgtttttctcttcagcgttatcgttttagtgcaactgttaatattgagttgtgaagtagtctgttgttttgtttaacacgctgtaaatcagaaaggataaaattaatttgattttttttttaattgttgggtatcagtggattgtctgttttggttactgtgtgaagttggaacaagtatatccagttatttttttagctcaaagaggtcgtggatgaactaagcatgtatgtttttcctggatattctatttttttcttaaaaaaaaaaagttataattcattggtttgtttggttgctgagaaagctatttagaatgccgtggttaaaagcttttcaatcaattcaaattccatgaacattgcaagacttgatgttaaacacgtgatccttaagttaagcagctgggaagcataatagtgttttacttttgcaattgcgtgattaaaaggaagcgtttttctgtgatattatgattgcttaaacaatatgattattcttaatgtgttggttattaatcatggcatggcagagattagttcaacaccagcccacccagtaccctac

SEQ ID NO: 76824 - DNA, 518 bp, Carica papaya
  Intron number 4 from transcript evm.model.supercontig_29.8 8 (locus evm.TU.supercontig_29.88) derived from phytozome v7.0 (chr-ID supercontig_29; pos 846019 to 846536)
ggtaagattctgctgctagctgatttaagacctattagtgtttggtttgagataccaagtttgtctgtcaagaaataatctatttttggtctaattaaggaatgcttcaaagaaatcaatattttttttttaaataaaagaaaagaagatgtattaatgtgaggtgctaagggagcaccacccatttacaaaacttcaaagaaatcaatattgaaccaactatggacgatgatacaacatagaaactgagtaattgtttgttttccacccattctcaggaactttgcatgtagcttacaaaaataatactgggtgattatgcttcacttctattattttgagttaaaaaagggcaactaaataaatgactatcatgaaagttcctttttcgcaaaaactgtttttgggatattcaattgcagctggtgcttttcctttgctatacagctcaaaaccttctattttattagctgttatatacatgtgaaggttttttttttttttgaagtaatatatac

SEQ ID NO: 76825 - DNA, 927 bp, Carica papaya
  Intron number 1 from transcript evm.model.supercontig_19.2 02 (locus evm.TU.supercontig_19.202) derived from phytozom e v7.0 (chr-ID supercontig_19; pos 1472912 to 1473838 reve rse strand)
cctacgctgttcctcacaacgaatcttccgatcaggtgctcctttgctctttcttcaatactcatttctcttgccttcaattagaacattgtggaaaattttgtttgtagcattgccggaccttgggaaagagaaagggaaggatgtcagtgtttcgattacgagttttgtctggccttgtttacttgatctggttggtaggttgagtaaatgtggagaaattatagccgagtttcggtggttgttcgcttatatagatggggtatgacttatcgtatcttcatgagttgatacgttggtagtcaatctggaacgccatttagggttcctctaggtgtaattgaaagctttgaattgctagtatcttgttgtcagtttccttatatcgagctggtcgttgaggatagctgaagtagaaaaaacgggagagtttggagtcagctttagttttgtgattgttgatctaagaggtgaaaaaaattgcacgtggttattagaactttttatgtttggctgcgtagaatgcttgaaacatcagaaaagaatgttgaagaacttgagtttccagcacatttttgctctggatatggatttagatgcatccttttgtaatggagtgattatgaacagactgtatggttgttttcatctgatggaaacgggctaaagttatgttgaagttgagttatttcgaactagagaggtgaatggtctctcctggattgagctcggaaaaacactaacattctcatcaacagagaggttcttgtatttctttaggaatgattgtccgcaaaatcaagaatgttcttggtgtcacctggccagcttcttcttgtggccctccttttgcatgaatgaactaatgttacgtttctgcattacttttggctgcaggttgctttggatattgattatcatcacaat

SEQ ID NO: 76826 - DNA, 616 bp, Carica papaya
  Intron number 2 from transcript evm.model.supercontig_518. 2 (locus evm.TU.supercontig_518.2) derived from phytozome v7.0 (chr-ID supercontig_518; pos 21772 to 22387)
gcttcagttggcagctgtgagagttctgcagggtatggaggtggatgttctgtattggggcctctcacttgatgttaagtttttttttaaattatgtttacaatattattattgattattctcttctttttgcagataacaggtggaatttagcttgaagtggcctgacacacaatgcattcgacattttctatagttggtcttacggaatggctttcttattggcgaggagtgggttcgcaggcacatgacggatgactgagttgcaatgcctgtgggcacaacattgaggatatcaatcatgttttgagggaatgtcacccggcgaagggtctctaaaaaatgatcattccacaagtagtcgcccatagtttcttttatacacattttgatgattgggtcaatactaacttgcaaaaccaatatggctggtgttcgtccttccaagactgtaaggttgtgttttgcatcacttgttggctcatatggaagcagtataatgcgttcattttcggtgggaggccatttggcttcagggagttgaggtttgaagttttcaaactaattgcgtatactttttaagcttctaccgttgaggctactatatcttgtcagc

SEQ ID NO: 76827 - DNA, 753 bp, Carica papaya
  Intron number 1 from transcript evm.model.supercontig_3.16 4 (locus evm.TU.supercontig_3.164) derived from phytozome v7.0 (chr-ID supercontig_3; pos 1224700 to 1225452 reverse strand)
tgctacatctgtttacaaggaccatttggacttaggtacatctaacttctttataaagcataaatgttcatatataagtttatgggttttgtttgtgattactttcatggatgatgtttaatattctctttgcttatattgattgcttcatcatctttatgccaattttgtccctggagtgcttgttagttaattagttccatcaacctctctcgtatccgagtgggtatggcttgtgcattaggatggtatttcgtacttctgctataacttctgattttgactaaaaaataacccaaacattctatattttgaatcgttgaacacatataccaccatcaccctctataatttgtaactgattggtaccactaaattttttctctattaactatctgtaaataaataaattgccaatcttcattaccctcattcttttaaagtcacgtccaatgcaagaatggaaagaaggtctcgactgacagagtatcagttgacatgtaaactgaaaggcattcatggagagactttcagaattctgcctcctaaatgattttcaaaaaattaggcttcactttcacccaaaccactccggtgtattttattatgttttttccattgtatttcattacttttttcacttattctttttgtctttcttaaagattgtttataaacggtaaatttaatggagaaatcaaaagaaaaatttaagtttgtgtaagattattagccaatactgtgcaggggctt

SEQ ID NO: 76828 - DNA, 638 bp, Carica papaya
  Intron number 1 from transcript evm.model.supercontig_53.6 3 (locus evm.TU.supercontig_53.63) derived from phytozome v7.0 (chr-ID supercontig_53; pos 423663 to 424300 reverse strand)
ggagcctcagtcgttgccccaaccttcctatccaggtgaatgtttttcgtaatatacgtatgctgtttattttttttttcaaaaaagtaatatacatatactgtatacatgtaggctgttgaaatttggtatgtacgtattacttacaaatatatatttatttattgagtactcatagaaaccacattcttggtaattatttagattttggaggcattgcagtgttcgtttctttctgatctcttttttgttttctttacccgtatttgaatgttgataagcttggccttcctttctctttgtctcttccgttatagcgattagcgagtcatttctatggatgagaaagagttgctgttattggtatactctatgttcccatagttgcggatacatgttccaataccagggacttaaaaaattagtgttgttcatttatcatgtattcatgagcaatttctgaatgtagatgacatagttaatacagaagactgaaagttatctttaatctcttggaaaagctcataggaaattctgtgtgattgtgccaaactttgcaaggtggatcaaaggattgtttgtaaactgattttaaaatgtgtcgaccattgacagaactctctggtgtggatttgttt

SEQ ID NO: 76829 - DNA, 270 bp, Carica papaya
  Intron number 2 from transcript evm.model.supercontig_249. 8 (locus evm.TU.supercontig_249.8) derived from phytozome v7.0 (chr-ID supercontig_249; pos 147346 to 147615 reverse strand)
ttcttgtaaggtcatttatcttttgtttctgctcttcttttttcgttgccattattgtattttttcccggcttattgtcgtctatctttaatttttggatgttaatagtgttgtagtttgagttcgaatgacttttttattttcttgtcgcaatgaaacactatagtttcatggaaatgaaatctgttgtgtgtatgtatagatctttatctgataaatctttaacttgtaacaggcgtttaaatcagattgcacctctggaagatctcc

SEQ ID NO: 76830 - DNA, 799 bp, Carica papaya
  Intron number 1 from transcript evm.model.supercontig_16.1 08 (locus evm.TU.supercontig_16.108) derived from phytozom e v7.0 (chr-ID supercontig_16; pos 1664356 to 1665154)
aggtttggttcttgagtttggtaagtagatttaggtttggtaatgcttgactgctgagtgattttaattttttcaagtatatgttgtcattgttctcttagatctacccactgcaactttctacttgcaactccgatgcttgtaattctaatgtgctgtgtgtaagttcgattagatcatggattctgtttaactgaatgattaagaagttagaagtttccattgtcaagaaacttgattcgttcgtttggttgctgtgattttgtagggacatgactacagagctgttggatattcaacccggtgaactcaagttcgaatgtatactacactcaattcaatgactgttcagtgattagtcaattatcacttttaattttctctgattagtctttatacggataatatagaagatattctgtagcacttcacttcccatcattccaagtgcgaagtcaattcctacatgtcaagtttgaattggttttcaaataccaactaattgaaaatgggaattggaacttggaattgactaggaattgaatgttatacgcagcataacagtttctttcttttgtagttttttgtattatgatgctttgctccatttctgtggcgaccaccaataagttattatggttttgcatgtcataaagatctcaatactgatttgcttacatttcctctctctagttgagttgaagaaacaaggcacatgttcaatccaactgaacaacaaatctgatcattttgtctcttttaaggtatccggtattctctgtgttagcttgagtcatac

SEQ ID NO: 76831 - DNA, 531 bp, Carica papaya
  Intron number 2 from transcript evm.model.supercontig_21.8 6 (locus evm.TU.supercontig_21.86) derived from phytozome v7.0 (chr-ID supercontig_21; pos 1051888 to 1052418)
ttttgggagatcctaaccaggtaattagttaataatttaatattttgatataaatttggaatccaacaattatatttacaaattcatccactgcttgtgaaacaccttataattatcttcaaattagttttttccacgtttcaattaaaaaaaaaaaaaaaaaaaaacatacagtaattatattacgtttaaatatgttaaaaaatatatcaaataataattctaattaattaaaagatattaatgatttattaatttaattaattagttaaaaattatttatctaatttatttttttacaaaaatattcaaatacgatttaataattttattttttattaaaaaataagaaaaaaattaaaaattttgtaaattaaattataataaaatattaaaaagaaaattataaaaaatatcatattttaaataataatttaatattttaacactatatatagatattacatttagattatgaatttgaattgaacgttgtgatgaaacaggcatttttcgccgtgattgacgggc

SEQ ID NO: 76832 - DNA, 476 bp, Carica papaya
  Intron number 1 from transcript evm.model.supercontig_34.5 8 (locus evm.TU.supercontig_34.58) derived from phytozome v7.0 (chr-ID supercontig_34; pos 549641 to 550116 reverse strand)
ctgggtgagtccgagctcgtatttgaattttttgaatccaagcagcctcaccaaagaaagcctcttcatttgaagtaagaacttttttttttctattttctgtatgttgctttgatatttgagcacttatcaatagactgtaggcaattagttaaatagctgtagtatgaaacgtagtaagattgttaaccttgttataaaaactcggcacatgtttgctcgtagtgtttgacactgcaatctagctttgtgcttggaacatagagcaattttactaaagggtcactaatgctgatataggctgtttcagcacatgaattgaagaagaaatttctttgactgtatccttacaactacccacagacaccagtcaacagtaataagagtatcctgtcctcttttattttatgctatgtttattttaatctccaagtttcaattactttctagattttggggataatttgtaaggataa

SEQ ID NO: 76833 - DNA, 755 bp, Carica papaya
  Intron number 1 from transcript evm.model.supercontig_51.9 8 (locus evm.TU.supercontig_51.98) derived from phytozome v7.0 (chr-ID supercontig_51; pos 1016056 to 1016810)
cccttgtcgtcatcaggctcttcaagtttgggtattttatattcatgcattttcttcttttcttttccttttgaatcttttgcgctctgcaggtcacataatttccggtataactttctgggttttggagtttattaatggggaagtattatatgaacttactggcctgttactcacaatacgattgacaacatggtgtttgatctacggaaccaatgtgttatgagtattttcctttagatttctaacgttaacaattacatattttctccttcccctaattcagttttgaaccttcttttatctttttcttaatcagcatttagtagcatgatatgctatggagttgtggaggcccaaattctttttcaggttttgtgcttggaatctgaagttaatgtaaaagtttaacatctagaagtttattgaacttctacaattaagggttgttatggctaggagtatgtaagggttgtctatggccatcttctataagttttaacaactttaatatattcttaaacttatatatatatatatatcagttttgttacctttttcaggtttttatacatataagggttgtctatggctagtagtatcttctaaaacgacatcatattttgtttttagtttttgcctgatgatatggttccaacatattagagatggtttatatatcagttttgttggcagtgatttcctttatgtgttttgcagtatcaacttcttcacagtttgctctgtggttgggt

SEQ ID NO: 76834 - DNA, 587 bp, Carica papaya
  Intron number 2 from transcript evm.model.supercontig_119. 91 (locus evm.TU.supercontig_119.91) derived from phytozom e v7.0 (chr-ID supercontig_119; pos 635542 to 636128)
attcagatttctcatcagatccaaccgagacaaaggtttcatgtttctacaatatcttagtttatcctcattcacgttgatggttttaatcttttctttttctgtgtactttagtcttttgctgttttcatcaatttgttattcacacattatagtattaacgttgaatcctgcctcttctcttgaatttaatcattaagtgtttggatttttgaacagaaagcgatactaacttactgagacttcatgatgttccttggttttcgaaatttagcagccacttctaaatttccaagctgttacctcaattttgaattatcactaaaaatacacccatattgtgaagtaaaatagcatcctcgtcttatcaaccttgattatgaatccattaattggctgtatgaacaacagtcttctttcagccgctggtgctagatttgttttcattgagcgttgaaaggttgcatatttcttaattttcttggctggtatagctaattaggtaatatctaacctatactagtaaataattctctctgctttttgccacagggatctcaagctttgacatcaaggcgctggtgtct

SEQ ID NO: 76835 - DNA, 358 bp, Carica papaya
  Intron number 2 from transcript evm.model.supercontig_17.1 4 (locus evm.TU.supercontig_17.14) derived from phytozome v7.0 (chr-ID supercontig_17; pos 215207 to 215564)
gttccaactttgcacctaagtaagtcccgtcgaactgataagcttcttctattctctcactttttcttctgtgttcttctttgtaaaaaaaaaaaaatctttgttacatcaaaccgccaatcgtattgcaaataattgctacctatatttgggttgttccataaatggactgaattcggattcgtctgaaaaaattttcaagttcttttttttttttttgattaaaaaaaatctaaaatgcattttattctcatcagacaactattaatgttaattattttccctgtgtataaatgtgtctgaacatactgtttgttgttctgttccgtgtcgtcacagtacaccagcaacactttca

SEQ ID NO: 76836 - DNA, 756 bp, Carica papaya
  Intron number 1 from transcript evm.model.supercontig_48.1 53 (locus evm.TU.supercontig_48.153) derived from phytozom e v7.0 (chr-ID supercontig_48; pos 883142 to 883897 revers e strand)
caagtgtgctgaaatccaaactgcaatttctgttggtcagctctctttcttttttcttttcgtttcttttctttttctctgtctaatttccacaagcatgttctttgcattgagatccctgtctcacagtgattgtgttattgagtttttgagcttctgatctgattctggcaactgggtctgtatgataatttttttttagcttttcttgtcttaatttacaaatgagaagtgtgggttttcttctttatattttataaacaggctattatatgtagtttgtgtttttcttatttacatatataatttggttttgcaaaagattttaattattatttcatttacaagaaatttattaattctcctttcacctctaatctgctgagtttccaattatgtgcctgtttttgtttgtcgcttttttatgtttctatttctttcaacttgtacagcaacatcctgagatctcacatgtcttatcagtacaactttgaatttcctgtctgtctgctaaagcagtttgttctctggccacttcacttcctattttgattcatataagaaacttttattttttttaaattatttttcaagtattgtaataaggattagtagttaattctcaattgtgaaggtattgctgcctcctgaatggttgccgtaattagctatatttgctaatattgatctaatcttcttttgatctgcatcatggtcccaggagcaacctctttcttgtttactgagtacaagtac

SEQ ID NO: 76837 - DNA, 790 bp, Carica papaya
  Intron number 2 from transcript evm.model.supercontig_42.1 58 (locus evm.TU.supercontig_42.158) derived from phytozom e v7.0 (chr-ID supercontig_42; pos 1508401 to 1509190)
caaggagctttgttttccagaatccagaccatcaggtttgccattcaattttgatttctcttattgcaagtggaactataagagaagaattcctttttgctcttgcttgctgaaaagattacatgggataaactctttttacttgctgaaactgttgtagcagctccgtcagattaaatttctccataattgagagtttggcagttgtacttttttaccttttctgtcttctgtacctaaaaagggggtggataagaaataggtgatcatttacttttctttctggagcaaattgtttgttttgggctcagtgggtgtgtatgtagattcatgcatgccggtaactataggatatcagaagataatcatttgggagaaggtcttcattgatcagtgcaaatgagatagacgactgaaacctgttctgtctgttttatgcaactttctggttgtttttgctggacttggatatctcctacggtatggtttcataatttatctatgcataattggctgataaaatagttgctttttttactgaccaaaaagataactttactctttctatctcctatatttcttcctttctttgcacaacacttggtgtagtagaattagaaagtagatgaatacacgagattgtgagtgatattgtagcagtggagactttattattattattgttgctaaaaagtaaaacgagcaataaaactaagcctacataaccaggtccaaggggtgtcacaaatgttcaggtacaagtggaggttcaactatttaggggcttgat

SEQ ID NO: 76838 - DNA, 638 bp, Carica papaya
  Intron number 1 from transcript evm.model.supercontig_218. 4 (locus evm.TU.supercontig_218.4) derived from phytozome v7.0 (chr-ID supercontig_218; pos 59994 to 60631 reverse s trand)
ctggagaactcaatcaacccattcaagtccctcaggtttcccttattttttatgcgttatatatctacctatatgtatttttgtatgtatgttgtattcttcctcattggtgggatcatctctgatagtctatgacagtgtttatcccttgtttgattcttgagtaaatgtatcagaagatgagcgataactgcgggtaaggttaaaaagaaaatgtaaatcatgattctggtgatcttcttttttgtttttttctttcaatttcttcatcttctcggcgccctaagtttagttatgcctacggcatctgatgctttagttctgtttcattagatttttcagtagtaattttgagcaagcaatattatggtggttttacggggttttaacaaattgcatgtatggtctgtaaatcatcagattctcattcataatctatagaattgtgatatgaacttaactcaacgtaataattatcaagatcaatcctcttcgtctttccgtcatgaatcttttggataaatcaaagcaggccagcacttggtgtatagaagattcctcgtttctacgagtacgatttccttcttttattcctttttcaatttcactcctgattatttgggttgttgtttagttga

SEQ ID NO: 76839 - DNA, 735 bp, Carica papaya
  Intron number 1 from transcript evm.model.supercontig_44.1 36 (locus evm.TU.supercontig_44.136) derived from phytozom e v7.0 (chr-ID supercontig_44; pos 1706568 to 1707302 reve rse strand)
gcttagcaacagggggtcgtcaaggaggtcagtttcgaacttgattaccaattcaatactatttgatttacttatccgtttctatattatgtggctttcttaatttagaagacgattgtatgatcatttttcaaaataatgtagcatagagctgcaatatttaattaaaaaattgatgatagggcgataagggttctgttgaagctaagctggaaactttaattatgagagtaggattaacttgtcccgttttgatctttgcgacctgtatggtttaatgctactcaacttctgtcttatttgtttgatttattcggatctttatagaattgtatcatcatagtttcattttaataacctccaatcatgtaatcatatcttaattttttcagaaattgatttttatttcatacaaatacggtaggaaagaaactaatcctaaagaattctagtttagcaaggattcaaacattatgatgtattccatatgttgataatgtttgagaaactaatatcaaactagtgggatgaaaacttgataggaatttaatcaaaaaaatccttaagagtccataaattggattcaggattcaaatattctcttgaaaattttctctcttaatgttcctttttccatattttgcatatcactgattggacatcttatgaatttggttgcccgcatcccatgcaaaactgtgaattgccactaagcttttaagctttaccaggaac

SEQ ID NO: 76840 - DNA, 943 bp, Carica papaya
  Intron number 1 from transcript evm.model.supercontig_46.4 7 (locus evm.TU.supercontig_46.47) derived from phytozome v7.0 (chr-ID supercontig_46; pos 377849 to 378791)
aagatcttcctcgctcacgcaatcgaagactggtatgaatcagtttctataattggtaggtaattcaatctagtgtttgattcatcttggaaaagggcatttgagatcttccttgtgtaagtgagattttcagttggtaagtgcttttaggcaatatcttgatattcattgaaagaactccagaacaagaaaatctgatccttttacttaaattccttttctaatagaaagttcatttcttttttgacatatatatatatatatatatatcttgttgtagatcccattaaatgtgcaaaaaaccctgggagttaaactctcaccctcttagtaagttggcttgctttaggcccctcggggatggggtgggagagagtaaattgtacttcatttgactggcagacaagtccttgtaaagatttgagttgttaactgaagtttatatggtatgaaatatcataccagcattagaaagatgtaaaaagttgcttgatgaagataatttaggtactgtatgcatgattatttttctatgagacatgccagcttgtacttgtttgaaggcagtctttttaggagataaacttcagccaattttgcggccttattttaaaggcagatgcaatttttcttcaataggtgatcttctttcttttttcagagagagaaggtagtaacctttttgttagattaaaagaaattatgtttacttggtgagtccaacaatttcactgtttctgttttttgctgaatgggtaatctctgaccaggcatgtagaaataatgttaggaatttgaacaaatgtgctgcatcttaagattttgcagtctaaaattttatcttccaagttgagttccctttttagtcgcaaataaaggcgctgatagtcatatgctctaatctttaggtgatctcactttgctggaaagaagggtcttctag

SEQ ID NO: 76841 - DNA, 540 bp, Carica papaya
  Intron number 1 from transcript evm.model.supercontig_145. 22 (locus evm.TU.supercontig_145.22) derived from phytozom e v7.0 (chr-ID supercontig_145; pos 536618 to 537157 rever se strand)
ttgcaaaaataaaagacttcggagaaaagaataaggtcatattaactgattaatgataagcaactctttgttttcttgtcattgtttaaaccattggaatgtaacatgcattatgagctgttgagcatctgcaatgtttttgatataatcggattctcttcaactttgctacaagttgttaaaaggctttcagttctagagggaagcattcctctgatttttctgcagctagtttgatgtttctccgatgcaatcagccaatttttgcagcttaaaatgttttattttcttgagaaggaatttgtgaggttatgtttctcataagtacaatctaggccaacgacacttctatattttccttgcaaaagataatttgacagttcagccataccgttgttagttaagaactatagatgaatgttttagatgtgccttttatattattttagctatttttctttgcagtaagttggtattttatctaatcttttacctattctttatgcagcctgtgggagaaaactacaccaatccaaagac

SEQ ID NO: 76842 - DNA, 787 bp, Carica papaya
  Intron number 1 from transcript evm.model.supercontig_36.1 61 (locus evm.TU.supercontig_36.161) derived from phytozom e v7.0 (chr-ID supercontig_36; pos 1168269 to 1169055)
actcaattttctctttcatcacccaacagtaagctccagttttcgcagtttgaggactattagtttcagttatatttattaatggttcctaatttgcagcttatctaatttttagccttatgataatcaacccattaattggattaaccaatatgtctacttttagtactgttttccgtttgaactacgttaattatcagctaagttgtcaatcttaacaaattggtcttatgtgcttgtgaaatgagttgattagattaaggctatagttggaatcattcttaaaattttatggaatttattgcaaattcattcgtagttaagatggtaattaacctcacgtgggattcagatggaacttgaacaactatccaaatttgatataggtaattaaggctatggttggaatcaatcttaaaaattttatagaacttatttgcaaattcttatttaggtaagaagatggtaattaagcccacatggagtttgagcggaacttgaacaactatccaaatttgatacaggattccatttaactttgatttttttatcatttcctagtaaaactagatgtgctcgtaagtgtgaatttgtagacaagttttacataatttgtgcattcgttcaaaatataacccaagtttttgttgataatagtcaaccttcaagatttttctacgaggtatttgttcaatcatgaaaaggttgctaatgtcaagtttcttttgttcccaaatcctgcgtttgcaaagtgctggttccctacaggcactgagtttaccaagaa

SEQ ID NO: 76843 - DNA, 967 bp, Carica papaya
  Intron number 1 from transcript evm.model.supercontig_53.1 53 (locus evm.TU.supercontig_53.153) derived from phytozom e v7.0 (chr-ID supercontig_53; pos 1261153 to 1262119)
tacagttcttaatacggaaagttgtagtcttgcaggtaagtttttcgattggtctacattcccctacctttcttgatttcctttcgaaagtccgaaattttttcttttatctttatccggctgttttcgtctttagtctttcaattgcatcttttgtttgcagttaagctatattcgttagacaagcatgattgacgtgcgttttctagtatttgtgcaaatttttttgaatgttttattaattcgggattttcggtttgatcaaatggaatttcattgcgattcaaacccatttctgaggaatattagggcttcttgagtttctgaggggtaggattttgatggtttttacattttcctgtggaatagaagtatgctatttttagtgtgagatgaaaattcagttctatcgagcaggttataaaacataggaatcgggaatgagttgacttaagctaatattaggtaaattcaggcttcacattcactttacaaagcagaagataatgtattttggtttggctatttgtttaagtaagcttatgcttcgtatggtggctgataaatgtactgtgaatacgagatagaaacctattagatgttctgtaggggaaaatattgggagaccagtattggccagttctatcctcttgggtcgtagaaatttaactatttagattattgtagagacttaaagaaaaagaacgggaggaagtaactattttgtattcaaacataatttgcatggggtttgaccacagatccgaagtgtaggtgaggaagaagatggctgtttcgtatggatttagtttgaaaaaataatcactggcttttgtaattgattttcatcattttcccctgtcaaagattaaggggttattttctattttctttatgtctgctggttgtcattaagttgctattgtcttcagttaagaaggcagagggggataaaccggcaaaggta

SEQ ID NO: 76844 - DNA, 1018 bp, Carica papaya
  Intron number 1 from transcript evm.model.supercontig_12.2 73 (locus evm.TU.supercontig_12.273) derived from phytozom e v7.0 (chr-ID supercontig_12; pos 2458048 to 2459065)
ctctttcctcgccgcctttatctcataatcaccaggtttacactaacaatttaaactttctcgatatctgctcagtcagacctctgtttgataccagagaaaatatttgtgtatgcaccaaaataattgactccactctttgttctttggaatgtccagccttttaaagccaaaacctcaaatgtgctcttaaaactgcgctgtgtttggtcgccggaaacaaaaaaaaaaactgagtcgtaaaagaaatccgaattatggttaatcactttatagttatttgagagcagagatgctgttacttattccaattaaattgaaattaaaatgtcaaatttgaagtttcttttacaaccagcttcttaagtttcaaaagcaataaatagaagattctttctatttccttcttttggcttcaattctgtttgttttgtcttttatgggaagtctctgatcaattaaacaaatcaaagttccatctgcttttcttaatcaagttctatcatgtcgaacagaagactaacttcatgtcttcacctaatggccaaattactaagagattatccttcagtactgtttaatgattggaaaagttatagaggtgaggttattcagttccttatggtcctaactaagatcaatatgtgggtgatgagctttgaggtcaaagcccattccatttctgtcttgtaatgaatggattacaatataatggtggaattttcagattttgattcaagcataatacgttggtattggttgcatactgtcaatcttgtaactttttgtgttaggtttgctatatatgtctaggtgtatatctcaattaatacgtatatattgacgtatgtgtgtgtgtatatgtttatgcattcagttatccttaaggtgtcattctaacttgaaaagcaaaatgcattctggaagtgcatttctgaataacattgttgcttggttttaggtcttacaacttttaatggtgttgatgaattttgctgatattgtttcttataggagg

SEQ ID NO: 76845 - DNA, 932 bp, Carica papaya
  Intron number 1 from transcript evm.model.supercontig_130. 54 (locus evm.TU.supercontig_130.54) derived from phytozom e v7.0 (chr-ID supercontig_130; pos 628197 to 629128)
ggaataccaggttttgtctctgctctgtttaaactcttttcattgctgctgtttgataacctttttttgtgctgttggtgttaatcatagcttaatcttgctagttgtttgctggaatttttgtttttgagaaggaactgtctattggaaattttcctttttgtttcctgcgtaacttccctttctgtttgtttgtttgtttttttttttttttttttttttttttgagatgggttcttctttggtagttgaatcaacttagttcaagttttaatttatgcatatatatattttccattattagtagaattattgagccaggcttgctgagcgggtatatttcaattttttccttacatttatagttaattcttatacttcatattttttagtgttcgttttatgtatagaatcacgttatagttttcatttttgaatcattttactgccagctgtggagtttttatggattagaaaagtaagaattagaagttcccttctaagaaatttaagagatagatggtgatgattagaaattaaaatcatgttgtgtaatactagtatgaagatttaagtgaagaaattatagatttagaattgagtcaaacaggacttatatgtaaattctgtacatgatcgagagatagatggataagaattgaacggaatcagaatggccataatgtttttcaggtattattggaattattctagctggaagggatcttctgttcgtggtacttaaatttaattggggttttacattctaatttttaagttatgtaaattgaaatgggtgtgctttttatatctgttttccttttttccccccttattgaagtctgtcgcttgtgtatgtgtgtttgaacccttatctctctgttcttttgctagtattcagtgactaaatagtaatatcttgtagcaaacag

SEQ ID NO: 76846 - DNA, 921 bp, Carica papaya
  Intron number 1 from transcript evm.model.supercontig_285. 1 (locus evm.TU.supercontig_285.1) derived from phytozome v7.0 (chr-ID supercontig_285; pos 2906 to 3826)
gtgagtaacaaaataaaaagattttgtctgcgatgcttgacaaggtcttggattgttttcccttggaagcaagtgtggaagacgaagacaacacccaaaattgttttcttcacatgagaggcagcatgggagagggtcctaactatcaaaaacctcaggaagagaggtagaatttcagtaatctggtgtttcttgtgccgtggtgatacaaatccgcaagtcaacttcttctttggtgtaccctgaaactagaaggctttttgggatcttgttctcaacctctttaacctggttaagttgtaagtgatttatcaaggatgaattatgagcatggaaggtgttgaagtgctagaaggacgtttttacccataatctcctgtgcgatcttttgggtcatttagaagaaatagaggcaaaatggaacttctgaaaatttctgctctccctttgcttctatccaggattattggcttaggaccttcatattttgcttgaggtcattccatgatggggttgattttcttgatctcattgatctctactttttgtgagagttgtatgcagtttctaaatgggttatacccctttgagccttttaatactattttctttctcttccaaaataaagattacatttttggaacaaaatcttcttttagagaaaatctttgaggtaatttgttattttgggtaatattctaatctacatatggtgtatatgttaaggaatgggagtcattaagaaaatggattaattgaaaattggtttggttgtaatgtgaggcacttgacaggtgggaaaaatacacttttctttttatgcctatattgttttactattcttgtgtaaaaagtaatatggacaatgatttacaattctgttattttgatttataggtagatacatatataaaaagtgga

SEQ ID NO: 76847 - DNA, 903 bp, Carica papaya
  Intron number 2 from transcript evm.model.supercontig_13.1 33 (locus evm.TU.supercontig_13.133) derived from phytozom e v7.0 (chr-ID supercontig_13; pos 1164379 to 1165281 reve rse strand)
aacgttaacgaggctggaaaagttcttttgaagcggtatttgtactcaattcttctgtagacctggctgcaatttagttcttgtatattttttgttttttgttttaactttttgttaccttcatacatatttgcttatgcttatcgaatgtttgcgataatcgtagcttgaataaacactaggatttgtcttaattttcaattccactaggatgttcaggtcttcctcgagcaaatacttttctactgaggttttagaaatgtcatggaaatatattcatcatatcagcctagtaggcgagagggaaaggatgggagtgttgtgtgcaagtttggggcacagagcttactggctactagaatatggggaaacatgctagtatatataagtgaaattaggttaacagagaaacacaggcgaacaaaacatttgtacttgtggagagcatgggaggaaatgattaagaggtggacttggtgcatacagtggatttgatttgaacagtgcttttgtggctagaagaggctcctgctcatgctcattctcttgcgagaactccgttcaaatgtcccccaaaactcattgtaaaattgttacttccaaatgctccgaactgaataaaataatgcatattggcgatgctttggttagacgaaagcactatttgatgagttgccaaagctctcttgctttttgatagtgttgtgtaaggaaatggttctttggcttgattcatagatggcagacaccatgttgcacgttctctaactttgtggccaggatcacctaagccttagaaaaatgttcaagttatttgacagtcatttggtacatagttgatcatcttatctaatttagctttttatttgtagaggcgaaggaaagttggagaagcaatttcgt

SEQ ID NO: 76848 - DNA, 843 bp, Carica papaya
  Intron number 3 from transcript evm.model.supercontig_30.1 8 (locus evm.TU.supercontig_30.18) derived from phytozome v7.0 (chr-ID supercontig_30; pos 290980 to 291822 reverse strand)
agaaaaaggtataaatgtactttcctctttcatagttgatgtttgatatcgaaagagaataagaatattcttcatatattctgttaagaggataactaatttcttttaacatgataagacatgtaacaatatttttgttaattcttctatatgttatcagggtaataaatcctaggattttgaggttttgttggtacttagcaagtgtccttagtgctttgcatctcttacctgttttggttcatcctctcacttaatcgtccacaataaagaagaaaaaaacttagaattccagattttcttcatatgaaaagagcccagttcttttatgttttacccttaaattcctaagggaaaaactatttcaatactaaaaaaatatcataaaatcagcatggacttatccagttacaagtgattttctggtgattagcttgagattttcagttgctttcagtttttcttttttctttttttttttttttttggcaataatagctgtgttaggattcaagttgaggggaagttttagagaagaagaatattttcagtaaggtttgttagagggtggttgctatatatttagtttcctattgtcatcttcattgtttccctcatccttggcatttgtatcctcaataacttatctattaattctttaaaataataacaagagcactttcagaatagtttaatatgtactatttctttaacataaataagagtcaataccttaatattttaattagtcttgcacgtttaatgagttaaccaatctcctctcttgcaatttcatgaattttagcaggtaggaaaattgacaagctatacacctggaagaag

SEQ ID NO: 76849 - DNA, 866 bp, Carica papaya
  Intron number 1 from transcript evm.model.supercontig_13.2 71 (locus evm.TU.supercontig_13.271) derived from phytozom e v7.0 (chr-ID supercontig_13; pos 2441150 to 2442015 reve rse strand)
ggttgtcctggaaattgcttgagtcctcagagaatgtaagtataatgcaatactacaaagcatactctctcgagtatatttctttgccaagcctaaatattctctctcatcctactctcgtgttttttagcttttttttcctttttttttttggatatgacaccgaattttgcttgtaggattaattgggaaattgggtctggtaagctggtatttgtcctcgctcatttggctggtagccgatgttcttttttggtcaagtttgcatttccatgtcttcgatttagctctttctggttactttgaggcatggtcaaccatgatgtagggatactaaaagttggatgatatagagggctttagctaataaattgtaggcttgattaaatgtatggtcaagtacttggtttgttgtttagatgagatataccataaacaactttgattgatgatgtggttaagttgaggtttttggagtctcgttgggctgggttttaaggaactgttggacatggatttataaattgttaattggaagttcaatgctgagaggggtttagaggtaatgaagtgttattttactatgatctggttgaaatgcatataagctcagaagaatagaaaaaagcatagtttggttatcaactcttgtcaggaggaactagatacgaccctaaaacagatcgacttgagacaggttttttgacttaactgttagaatgcatgtttttaattttctctcttccatccatagaattgaatgaatctgaaccacaatgtctttcctttgactatgaaagaggattttgatagtggtttttactggaacaggaatcacgctgtttgggatttaaacttgtcccaag

SEQ ID NO: 76850 - DNA, 380 bp, Carica papaya
  Intron number 3 from transcript evm.model.supercontig_217. 1 (locus evm.TU.supercontig_217.1) derived from phytozome v7.0 (chr-ID supercontig_217; pos 4667 to 5046 reverse str and)
agaattcaggtatttgttcgtggaatgatcattgaggtattagatctaaatggcattgatttctaaatgaaacatggatctagtttttatactcctccgcataaaagcatatgatagctgcttcttaggacattgagacagtttatagtcagtgtaccactgcttccaattttgatattttatttccttgtgccagcgaaagcttgatagtagttggattaatattcttattggttgttgggtgacattcaaaacttctttcatttcattaagtaaatatcaattttttcttttggtttcctatcttctaagttcattagtaatatggggtttcccttgttcatgtgaatttattacatgcttatgtaactgcagggggt

SEQ ID NO: 76851 - DNA, 829 bp, Carica papaya
  Intron number 1 from transcript evm.model.supercontig_150. 36 (locus evm.TU.supercontig_150.36) derived from phytozom e v7.0 (chr-ID supercontig_150; pos 350619 to 351447 rever se strand)
agcttctcaaggtatatgtatatatgtgtgtataaatgtatatatgtacaatttcttctccatttttgaactaagttgttttaggcagtgtttggaaaacttagttccacagaagaaagtatagaatacattagcaaattcatgtctttattcacataaagtttgtaagttgacaaatgatttctgtgccaattcattatcattttcattcgtcccaaacatggtattacagaaaagtttgtaaacttacaaatttaaaagtctctgtttgggacaaatccagagttttcttgaattcatttggaagtgcttgcctattttttagctagaggagattgaaaattctatttgaaataataaaattgagtttgcaggaaactgtaaatggaattgtaaggagcagagttggaatttggaatgtcattgttccatttctacttaaaaattttcaatttttgttttctatgatttcttaattaaaatttcatcaacccttttacattaattgcaatatctgaaaaattttcacataatttctatatttattccaaacacgactatattatgcatagcatgtgagtatcagcagttttgagaccctgtaagaagatacattgatataagatgctaataatttactaactttgatgtcagatccttgtagatcattagataataccttcttgtttcacggaatttcaatttgtttccttgtcttttaagtgaatcaagtatgaatctgtttgtattatgagctgacgcttaaaacaattggacttaaatgtcgtgaacagatcaaaatacaccggacttgcccgggtgagttaga

SEQ ID NO: 76852 - DNA, 993 bp, Carica papaya
  Intron number 1 from transcript evm.model.supercontig_23.1 01 (locus evm.TU.supercontig_23.101) derived from phytozom e v7.0 (chr-ID supercontig_23; pos 1452018 to 1453010)
acaacccagctcttcttaacgagaggaaccctgtggtattatctcattctctctgctctttttgcatgtacttttgtctttccgcattgttgaatcatcagttccttttacgcccatcattttgaaggattgtggggaagggattttctttgacggcttttctactgtctgctcagattttaattttatacatgactcatgttgagttgggtttgttgtactaatgggtttaaattgtttgattgtggccattgacataaacagagctatggttaagtttgttagtctgttgaattggatctaaactgcctacatcaatattaaaacttttggcttttactttttctgtttctagttaagctggtgggagttgaattccgacggaaggaattcgaattgggattgtgacaaaaaaaatgatttaattatgcgtattaaaactaagagttgaaatgagctttggttgactaacacaaccaatgtgatacagtgtatgcatatatgatgactgaaaggattctaagaaaaatttgcccgatttgacagccaacctacttctgaattgatcatttagaagatggaagcaaggagagaaattgaagaaatctaaaaagatggggaaaatctctttagctgcaatcaccgtagcttctgaaatttgttcaacttcatttagatcggatatactgccaccatcaagctgttaaacattttagattttgagtctgtgcttgttattactttttcttccgatctttctatcatcgtaattttccttttcattacttccgaatttgtgataataatgtcattcatgctctaccacattattttttgagcttcttagttactgttccagaagggcttgacattattaacctcttactttttcattattaggttttctctctatgtacatgactaagaaagcataacttgagtaagatgtctctcttccattttatttatgcgcattgttttggttaaatgcag

SEQ ID NO: 76853 - DNA, 521 bp, Carica papaya
  Intron number 1 from transcript evm.model.supercontig_3.33 0 (locus evm.TU.supercontig_3.330) derived from phytozome v7.0 (chr-ID supercontig_3; pos 2273719 to 2274239 reverse strand)
aactggtattcgtcttttgacgactgatactttctgcatttacaatttttgctgaatattattacaaattgatgagtagttgttgagaggtagttttcgttcattagttatttaaaggatttcggtttttcagtgaaatgcttaagaattttgattcagtagctccgcgggaaaagaaaagagaatttaattgagtacgaggaattcaacggtaaactaaatgttggcaataattgctaattgtttcttctaatctgctagatacacgaggaagtatgaaaataggttgggcaatataaatcatgaaaaattggcaatttatgcgcagagtcagctgtgaagaattgacagtcatgtagagccccatgtgaatttctggcaacgtttaggactttgcccgtggaatctctgaaattgattttgttcaaaattggtgtgagcaatttcttttcaagcaattaacagatgtttgtttccggtttgcagaagaagaaacatcaccagcttagaaccattatttg

SEQ ID NO: 76854 - DNA, 329 bp, Carica papaya
  Intron number 2 from transcript evm.model.supercontig_129. 70 (locus evm.TU.supercontig_129.70) derived from phytozom e v7.0 (chr-ID supercontig_129; pos 558964 to 559292 rever se strand)
caaaaaggaaggtcaaagcaggaaggggagacaaggttagggccctaaacatggagtccaatcttacacaatcaaatagctctgtcattctttcttcttcaccccgttcctgctatatttctgacatttcaaagtttttgtctttgtttttattttgtttttttttttttggttggggtttggtggggatgctattcatatcaaaatgatgaatttcagtttatctgggtaagcctctcttttcttgttttcagtacagtaatgatcaagtaatttatgtaattgtaattgttcatcaagtcattccaagagtttgatttcagggggtt

SEQ ID NO: 76855 - DNA, 1061 bp, Carica papaya
  Intron number 1 from transcript evm.model.supercontig_23.4 8 (locus evm.TU.supercontig_23.48) derived from phytozome v7.0 (chr-ID supercontig_23; pos 512374 to 513434 reverse strand)
ttactccattttagcccttcactcgctaaactcaagtaattgcttctctctctatattctttctttctcttttttctttttgggttggattacttcggtcgttacttatatcggtgattctcttttgagttgtttagcaattttgttggttcttactgtggaatttgcattagtggcatatcgtcgcttgctatggaagacaggaaaagatcgaaatttttttaattaaattaaatgtcttgttgatttatgtaaataatagcttggcttggcgtgttggatatttttgcgtctcttgttgtaggggtaatcttctgaaagtgttaatcttgcagcttacaggatattcagtatagaaataatatttctaacagaaggggaaatgaattcataattagtgcagaggtgggtttttgtactattaagggccataatgacttacctatatatgcaaaggaaaagtctaacgattgcctccacagatattcaaattactctattcctttttatttatttttgtttcaatgtggatttaaggaacgaggttaacagatttatggtttagttgagtcctgccgattttgggatatcccttattagaagaacatagcaaaagaaaacactaaagaatttgcaggtaaacatgagcatttggtcacgtatatctccgaatgaaattattgaaaggtagatagttgcctatactatttccataaacattgtttctaaagttgcaaagcagtatccaatctctcgcccttaattggttgggcgattgttattctcactcctaattttatatgcccatggtgcatttccgacatcaataactttctaggagctatatttgttgtttctttcatactggagtttgcttcaagggctaattgtttctgaggtggcttttggtattttggccttatatgtaactgtggttgattcatcttgtgaatgcatcatgttgttttttagttagcaagataacatcattttacaatattgatttttctcctttttcccaaatagtgcattctctgtatccgggaacagcagatacttgt

SEQ ID NO: 76856 - DNA, 212 bp, Carica papaya
  Intron number 2 from transcript evm.model.supercontig_38.3 9 (locus evm.TU.supercontig_38.39) derived from phytozome v7.0 (chr-ID supercontig_38; pos 684050 to 684261)
gttggagttgttgaggggagtggaggtgtgtagaggtaatcaacaggtggagatttctcattttttctttgttgatgacactttgattttttgtcaatttgaggaaagggtgattttaaaccttaggtgtcttctcttgtgcttccaaattgtttctgcattgaatattaatttgaataattcaaaaatagcgagaataggagataggaggg

SEQ ID NO: 76857 - DNA, 968 bp, Carica papaya
  Intron number 1 from transcript evm.model.supercontig_150. 55 (locus evm.TU.supercontig_150.55) derived from phytozom e v7.0 (chr-ID supercontig_150; pos 478614 to 479581)
cgtaagctctctctgatttccattttgagcttaatcagttcctgtatgtgattgtgttctcgatgtgttcgcgctttcgtttcatagctgcaaaggcgaattgtagagatgtggatctgtgtttggatggaaaattttggatatgtataaggaaatttatggctcgaaaacgctgaacttgttcatatgtagtggtgaaattgtgtggcactagtaagaatacgtggtgtgttgtattgcacgatggcttataagtagtaatctcaacctcctgcgtgagtgaacttgaatatcgttgaattataatgagattatagtaggattggagttgattcctttgtatcctgaagagctgtaatttgtctttggcttagatctctatcagggaaaggaaaggaaaatgcctattctcccatgttggcttcaggtgtgagttttaggtgttgggacattcaggagtgtgatgattgcaagtattaatgactggcagagcaaagttagatgttgacttccaagtgaaaaagaatagttcttccccaaaattcttgtattcatgatctgaacgttgcttttcagcactaaagatgaagaaagtggaagcatgaatgagattgaacatggcaaagggaagagaataagttgccactcaatgctatatagtgcacacaacttaggtcataagtgttcaagctcagagctttttcagcgttgcaatatgccttttggaacaccctcctctctaattttacagttcttttaaatattattgtttctggtttgattgaacctgtttgttatttttcaataaaatgataaactgtgtatgtcttgcaattagccaacaaaaacaccactcttttgggtactagatttactgcgttagtttggttgtcaaattattaattgtagtgtttctttccaagtttaatcattggcttaccacacttgtttgggttgaaggattggag

SEQ ID NO: 76858 - DNA, 980 bp, Carica papaya
  Intron number 2 from transcript evm.model.supercontig_229. 6 (locus evm.TU.supercontig_229.6) derived from phytozome v7.0 (chr-ID supercontig_229; pos 129057 to 130036 reverse strand)
aactggtcacaaccccttttttccggtattttaaggtctgtacgacctgagatcttatctgaatgaccataatttactgtgttatttcccttttccttaggtagttatattgatgcatttgaaagaagcgtagttctcatgcatgaattactatgattgattgtttgtaagatattcattttgagatgtctcaagtggtttctttttggatttgtgcattcgtcattgttctctatatgtaggaaccatacacaagctgatggctggcattacctacctctatttgcttgtttgaatttgataggagtaacatcatacttttcatcttttggttccttactgaattgtggaagatcagatgatcaatgaactattaatgggacaagattaataatttgaactgttattctgcttgcaagataaggtcatttattttgtttataaaattaagaatctggaaatagatgtaaaaaacttatttacaagtgtaacaagatcccttaacagaaacgggctacctcagagatgacaatgtagtgacacaagaaaaggaaaaagtggaagagcacagcatggacaatttaaagggattataaaagtaaaattgagctcatccaatattcaaaagattagaaatatctaggttccagtcaagattatccttggggtttcctccctaaggatgaagtaccttgggtgggtttttccacattgaacttatttaaaaaaaaagcgtggcctggtatttaatgctaaaaactttgaagcatctaaggaattgttctagtatgatgattagttctctgccttgtagtctttatctgaaacaaaaatgtaattcataattccttctcaacattgtactctaagaacgctataatcactggtttttatcttctcttttcctttgtaatcttatatgtttctttctatttctatgagtaggttaaattgtggtgtgactgcccattctggcctga

SEQ ID NO: 76859 - DNA, 417 bp, Carica papaya
  Intron number 1 from transcript evm.model.supercontig_229. 6 (locus evm.TU.supercontig_229.6) derived from phytozome v7.0 (chr-ID supercontig_229; pos 130113 to 130529 reverse strand)
ttaataatcacaaatcttgtcactgtgcttcacaggtattctctctggctttgtacatttctcactcaacttactatttttttcgcattgtgcatgtgtgcttatcgtggattagtgactgaattgtgtgctgtttcatttttggtagatccattttcgcgacactgtttttgattttgaagattttctctctcttcgtgtgctattctgtttaatgagaatttttagaaggaaatatctgagatggaataattgaatgccgtccatgtgcagaataaaatttattctgtttactgtgaagacgactgttactgatatatctttgattcaatttataatgtttttgtttttttaatcccttttcgaagtttttacttagaaaaatgtcctttgcaggaacaagaaaaatataagggc

SEQ ID NO: 76860 - DNA, 676 bp, Carica papaya
  Intron number 4 from transcript evm.model.supercontig_27.5 9 (locus evm.TU.supercontig_27.59) derived from phytozome v7.0 (chr-ID supercontig_27; pos 571117 to 571792)
attatcttagcccaggtactttcactttcttatatttatattactcactcaatcataaacatattattaccagagagactggctatctaaaatcaaattaagcaattttttaaaaaaaaaattaaaagaatttagtaatgatttgaagaaaaaaaaactatatgattcaaaaaataccaagataattatagtgtaaaatttttttaaaagtaaaagaatacattccattcttgttcttttacgaaaatctagtgttaaatttttaaattaaaaaattattaaattaatcctcaaaatttaatatttattacgatttaatccttaatatttttcgttatgaattaatttttcaataatatctatttatttcagacatttagtttcttttttattctctaaaaacgtataaaatagaatataacgaaaaaaaatattatgaatcaaattataacatataccaaacttcaataactaatttaatactttgtcattttaaattttataaaatataaaataataaaaattttacataaatgataaaaggttaaaatgaacagaagagaattttaaaaaataaaagaataaattacaataacataaaatcaaatgggaccgtgggggatataaaataaatgtttttggaaaatggtttcagggattttctatcttgctggca

SEQ ID NO: 76861 - DNA, 631 bp, Carica papaya
  Intron number 3 from transcript evm.model.supercontig_184. 11 (locus evm.TU.supercontig_184.11) derived from phytozom e v7.0 (chr-ID supercontig_184; pos 95348 to 95978 reverse strand)
ataccaacttcatcaatttctccatccagaataaagtgagtgctacataaattagttgtttataaagattttgatcattttgcttgaaactgattgggatttaaggcgcttgtgatctagagttcatactctgcccattaatgactgcaccagattaaacattttcttatgcttagatgtgatggtgatgatgttcaagtcttagaagcgaaaatgatcacattaatttcaccaggtttctccatctagaatgaagtaaaaaagtgttagatattttttttactgacttcaaattttcaggtctgatgctttatggtaaaaggggaacttgaaacactgcaatcatagtattttgcatcattttatgtcaaagttcttggttgattagtgatagtatgaagtcttatatttattatattttgatagaaggctgagaaagcctttgatagaaacttaccgttaatttctttgtcttaacttcaccttagtcaagattctattgaagaattatctctgttgtgttaacaagaaaacaaaacaacatcaggtcgttaactgaatgagagtttgatttcccttgctaatataaacaatttgttgcatttctttatagctggacctagagaaggga

SEQ ID NO: 76862 - DNA, 515 bp, Carica papaya
  Intron number 1 from transcript evm.model.supercontig_15.1 07 (locus evm.TU.supercontig_15.107) derived from phytozom e v7.0 (chr-ID supercontig_15; pos 1847345 to 1847859)
aaaatcaacctggtcagcgtggtttcacaagatagttatttatatggtttcacgagatagttattttttggaacatctaatataaaagaaatatttacttgtgagaacttaatatatttaacgtagactatttgtttatttttagtacattactggcatagagactttcaagaaaataatctgaatgctttgtgcacaggcaacaaccccttaatcctcttgtgaataactttttctttgcaaaacaaaaatgaagtagaacataaattccaaatcattcttgtttattcccttggttagttagtcatgtactccctagcttaatcacttcttggaatttttagctagtcaatgagctaacattgaaattacttcctggtaggagcagatttgttaaatcagtgtacttatacttttgatgatgttgtgagtcaatgtggtttggctaatcatttcactaacgttttctttattgcccctggttatttaggaattgtttgattcaatcctgtgga

SEQ ID NO: 76863 - DNA, 952 bp, Carica papaya
  Intron number 2 from transcript evm.model.supercontig_333. 6 (locus evm.TU.supercontig_333.6) derived from phytozome v7.0 (chr-ID supercontig_333; pos 35910 to 36861 reverse s trand)
aagaaattgtccatccatacgaacccagtcaagtgcgtccacaatctgcatatatatgtgcatagatatatatatatatatatatatatatcaaattttttctaggttttttagattacagcttgatgtgtgtaggggcaccagcagcaacctaagaaacgacagaaatgtccagtagcaggaagagccacagtttcttttacccttccagaggatcttctggtcttagctgataacatccaactggttagtaaatatttctgtcgcttaaatctctcgtatcatcttgtatgtcaaatgggttttgtagaaaattggtaaatggttaattttcttgatggtagtatacttctgaccaactcattccacccaaaacgagtcatcggtacacaattaggcaaagaaccgaagggtggactatagagagacggcgacgtgcaactatgagatatgattcagtaagtcccattaattttttgaactgaacaagctggttttttcggagcatgcatctagaaattgagaactctacacatggtttcccaagaacattgacaacatttacttgatgtgttactgcagtatttcattcatagggaatcacagggattattccgatcagcggtggaagtcacggactttatactatatgagctctacccagagaagccgactcccaagccaaggaaggaaaaggcagaagaagggagtggttctccagtgaggaagaaggtaggcaggccgagaaaaaataagctggatggggaacaaggaagtactccggtaagaaggaaggttggcaggccaaggaaggtggcggatggggaaaaactgactccttctgtatgttgtttttcagtgtatacagtggaaatatcgcagtcacaattaattttctaatactaaaatattttttctagatttctcttattcttttttgctgcgcaggtgg

SEQ ID NO: 76864 - DNA, 583 bp, Carica papaya
  Intron number 1 from transcript evm.model.supercontig_277. 10 (locus evm.TU.supercontig_277.10) derived from phytozom e v7.0 (chr-ID supercontig_277; pos 36234 to 36816 reverse strand)
aggtaaattttatagctattgaaaatgccttgttctccacttcaattgtttgtttattttgttactgtctgacctgtttgaacgccttaccatgttgtttattagatggagcctgaattacctagagaagcgaaaatgtatatttcttttctaaattttgtagtcttagcgggtcgactgtgctgcaattgaatctcttcttttctttgatcttggatgatggtttggaatctcatggattgaagatatatacggccttaagcaagtttttttgccgagatgatggattaaattattaaagagacaaagaggttgaaaaatatgtttcttttagtttgaagccctgaaaagaattcttttttaggagaacctgaaaaagtatcttttagcttgcttctttacttttccaatttcagctgaaaacatgtgatcttccttgttttcaatcttgtatgatagatgaatagttgaactgaaataccttgtaaaattctgtagatagatataggattttggtaagatgccgcaacaaagatttttcggactcacagaagacattctttctgatcttacagatctaaag

SEQ ID NO: 76865 - DNA, 664 bp, Carica papaya
  Intron number 1 from transcript evm.model.supercontig_34.4 2 (locus evm.TU.supercontig_34.42) derived from phytozome v7.0 (chr-ID supercontig_34; pos 430639 to 431302 reverse strand)
acagctacagctgttaacttgtacttttccctaacaggatgtacaaagctaagttcatagttttggtggttgaatatggtatctttttggtcctaatcattaggtgagcaaagagagagagttggtaacttttttggcttatcttttggttaaaactgatggtttctttaggcattctttatccacattaccaagtgatttggttgctattaggttgtgaataatcggtttactttctttctttttgaagatagcttttcctccttttgtctgtatacttttccctccttcctgattatatttcttcatttttcagaaaaaagaatagagacaagggagactggtcaaagttgttctcttcttttctttattttgagtggtttgtgtttcatttgattgtaagtcctgcacgtgggggtgttgggttaaccaaagacatgtcatcaaatagaggggagaatcatgcactaggcttctccctcaccttaggttgtcactttttagaagggcgaagcatgctatgctattggatttaggatattttttaattaaagttaatactatcatctgctgcaggtttctttgtacctggacaagttttctggagtatgtcagtcagtgctgcatgaatgcaaactcatatttttgcagataatctgtgatc

SEQ ID NO: 76866 - DNA, 444 bp, Carica papaya
  Intron number 1 from transcript evm.model.supercontig_52.1 53 (locus evm.TU.supercontig_52.153) derived from phytozom e v7.0 (chr-ID supercontig_52; pos 1519247 to 1519690 reve rse strand)
aaggctcaaatttgggatactgctggacaggaaaggtttgggtttccatttttccccctgttgagatttgttctttaggttttcaatttttgctacttttcgcttaagttttttggtgggttcttgtagtttggtcttgaaattttgatgggtttcatgtatttgatgtttttgtttttaatagagccctcggtcaaagtttcctagtgctttttgttttatatatatggacatgtgttttgattctcaagctgggtagttagtattttcctttgtaaagtatcagatgatctgtgaactaatttcagtggtagtattgcttttgatctttgaactggatgacattctctatacatggtttgatattcataatcaggtttttctagtttttgtttgaattcttatccagttgtgtgaagtttttcatgctttcttagggtctaa

SEQ ID NO: 76867 - DNA, 481 bp, Carica papaya
  Intron number 1 from transcript evm.model.supercontig_1.23 5 (locus evm.TU.supercontig_1.235) derived from phytozome v7.0 (chr-ID supercontig_1; pos 3343532 to 3344012)
cgtggaagaggtatcctttcttattctgcattctttatgaaactcacctttgataataagtgtttattcttctctaattcttgggttgatcatatttttcttttgatgctctaataaacatgcttttatttggttttagtttgtgatatttagatccaaagctagtatatcattagaaaaactagcataattagctctggccattaggttgacatactatgtatgtcatgtaatttagttataatagacttcctttcccttacactgcatgatgcatgaaacgtttgctagtgaaagaagtagctgatgttattctagaagcttttattttcatgcttgatctctttgtccttatctgtatgtttgtgtcactataaagtctttgatggatatttgttagtcattatactgaaattttctgtctcggtgttggtgtcatgttatacctttcttgctgcagcttgaaaaggctttacgtgat

SEQ ID NO: 76868 - DNA, 1054 bp, Carica papaya
  Intron number 1 from transcript evm.model.supercontig_109. 37 (locus evm.TU.supercontig_109.37) derived from phytozom e v7.0 (chr-ID supercontig_109; pos 826290 to 827343 rever se strand)
gctcaactgctcaaaagcattcagtttcacttgaggtaaattttattggtaaatttaaactttattttgtttatcatatacatctgcagacggcaaagtgaatatccaagagtctttatttaatcaaattcaatttaattccactttgaggttaggtgtaagtctctagcaatgtacaacatatttggttctttgtattagataggaatatattagtaatatcataactatcgtcggaatgaagtttattagattgtttattggctaaatcaagattattttagaatataattgttgaaggagttgtaatcttgagtcatcaaggggtcatgaatcattatcacaatcaaggtatgtgttatgtttttgagaccaggatcttgtcaccaggcggtttaccgaataatctgattccggattttgcttcttttccttgttattatttcttgaccgacctattgtaaattatttacaaactcatcaaagggagcttggcaccttggatctcgttagagaaagctccaatctccatattgtaattataattatgtttatctctttattaattgtagaactctttaaatagaactagatacattacattatgggaaatttttattatttaggtttctcgtagcaaaaatcaaggagatttctaattaagagataactttcccaaataaaaattaaatttctaaataagagataatttcctaactaatatttacataataggataaaccttaaccatataataaaaatttatttctaaataagagataagctttcctaactaagagataggtttttaaaatagaataaatctaaaccatatcagctccttatttccttttctcaaataaaaacgacctactaaggagtctataacatcgctctctctctaaagaaagagcttgtccgcaagctcaaattctagataagcagtctggaaggtttcacggttttcctaagtagcatcagctacatccgttctgttttaatgcactagaagttcccaggtgcttctattaagtcgggtgcacaatactgaagc

SEQ ID NO: 76869 - DNA, 960 bp, Carica papaya
  Intron number 1 from transcript evm.model.supercontig_138. 18 (locus evm.TU.supercontig_138.18) derived from phytozom e v7.0 (chr-ID supercontig_138; pos 230934 to 231893)
tctgcttcttattcgtcgacatttcgtcctcctatgtaagtcctctctttggtttcctctctttctgctgttacctatgtatatgaggaccatcggcttatttaggcatgtattggtttattgttgttttgaaaggtttatggaagtaattcggcaaatgatatttgtttactactcgaagcgctctttatttgtcaacattcctttcttttataatcttttcttttgttatacttattaatctaatacttattctgttgtacaatggttcggagcttcaactgactaacttggcagagattttagccttaaaattacttttttttttctttctaatcctcgtggttgaaggactgaaagaattggtttctctaagaatatcaagcttcgtattcttataatggaacatgaatgacatttacttcttcaaaatctttccctattcatttctcttaaaagaatgcatcaaacctttcctcattttagtgagccactaatttttcacttccatatagtttgttgatcaattaactttttaactgcatggtctttaattcaaaattttgatggttttaggtttctaattttgttagagtggagttctgttgttactctcatctaatttctcttcatcagagcttttactaatttgctcatcaattctctctctctctctctctctcccctaacttttagtttaatatccataattttatttattttcatgtgctttgtctattgatgggcatcatgttgagccatgtaaatgtaattttacatcattcagcaagaaatgtaatttaacttggttttgcgttatgtattagtgatcacaaacccagtcgcatgaactttgtaatacttttagagcatatcatatggtaaatgtgatgttatattactctgaagatcttttcctccataggctgttgccacaggcaaattgcagctatcaaaaat

SEQ ID NO: 76870 - DNA, 687 bp, Carica papaya
  Intron number 1 from transcript evm.model.supercontig_3.28 1 (locus evm.TU.supercontig_3.281) derived from phytozome v7.0 (chr-ID supercontig_3; pos 1979280 to 1979966 reverse strand)
tcctcccgagactgggaacatcggtagtttgcaaggtaagttttggatttatatatttcttttcctagaagttttgaactttaaaatatctctttttagtttttggtctgtattgttcaagttcgcttcctttttgacatgagctcaagtttgaatggtctgaactttttttcccccttccttgattatatcttgttttaatggtaatctatatctgctgcagtactttaaatagttttactcaaacgggtaatccatgaagtttctacagagtttttatgagttctaagtgaaatttaaaattgctttatgtggaaattgtctcatttgggaatcagtatgaaatttctccttctggaaacatgaagtgaaaaagaaaaaagagaaagaaaatacctttcacccccaaccggaggaaaaagaacttacaagctctcaagatcacattttggttttttaaacactatacatcaaggttatatttttaatttgaggaaccaaaaaactctaaattttctctcattatatatgctctgtaagacttatattggtattggctaacaatcttggaatttcttttatagttctgcattcaaaagtttcatcctttatatccaacttttgcttattccagtcttgtgcatgttcatagtgttgcagctttgttataaccagttaactggaagc

SEQ ID NO: 76871 - DNA, 689 bp, Carica papaya
  Intron number 1 from transcript evm.model.supercontig_5.64 (locus evm.TU.supercontig_5.64) derived from phytozome v7 .0 (chr-ID supercontig_5; pos 513879 to 514567)
attcgtgaggtattttgacgaaatcttctgcttttctttttaagaaatttctttagggtttcatgaggaagaaatgagctaccttgttgaactttaatttggttttggtaggtgggtttcaaagatttgaactttttaaccctaaaattacctttccggctgcatgaaagctcaaaatttaagctaaaaactggaagatgtaagctctgctgttacagaaactcatgatctgaaaattagacggtcatggatttttattatgttcaagttctaaccttttttggtatattttgcactacaggtagctttgttcttcttcttcccttttttcttttttttttttggttagtttaattatttattttttttcaataaattgggagtcagaactatatttcagttttaaactttaaaagacaagattaagaaaagaaactattaatttggggtttttgggtctaattaatttcaaccttaaaatgaagtaattgctgtaaagctctcgaagagggtcggatgaatttgggtatcttttagtcttcatcaaactttttttttttttttttactggttggaatttattttacctgaaattgcagaaaaactacggtaattactgttaatatagtgtatgaatttatagctaacttttataaatctaccaggagcttgaagctcttgcagatccc

SEQ ID NO: 76872 - DNA, 657 bp, Carica papaya
  Intron number 4 from transcript evm.model.supercontig_18.7 2 (locus evm.TU.supercontig_18.72) derived from phytozome v7.0 (chr-ID supercontig_18; pos 489112 to 489768)
acaaggtaaatttttattctactctaagttcaagaaacttgcatgaatctgaagatgttgtgctggttttcccttttggaagaattatgacatggttccgggttttccttttattgatatggttgctgttttgcgtgatatcttactgaaaaacttaatcttttattttatgagtgaggtcattggaaaatggtatccaaactattactatggttgacgtcataacttggataaatttctcatgaaatgttgctggagacttttcaattggggatagtagtgcggtgaataatctagtatactagttgattgctaaaattacaacagtggtaaatcggatgattcattgtcaaaatactctgaatgagatcaaatgttaagacatggttgggtaattctgaaactgcaatcacatggtggcttagtcaccctcttcttcctgtcatttaaggtaagaggatgacagtggtgtatggtccattccttaaaaactatttctaagttattgattttttgaattcgacttaaatacaatccccttctctatcttgttgtttctggtatgcaagtactctctgatttatggtacgatccccttctttatttcttcagctaattgtcattttgctttacagggttcctttgtaatcaaaatca

SEQ ID NO: 76873 - DNA, 597 bp, Carica papaya
  Intron number 1 from transcript evm.model.supercontig_380. 3 (locus evm.TU.supercontig_380.3) derived from phytozome v7.0 (chr-ID supercontig_380; pos 12632 to 13228 reverse s trand)
tctgcaagttgatcttgccagttttaggtgctttttcttaacctttgaatgaagaaaaaaaaaaatctataataatcagttttgcttgataaattttgatgttaagttgttttagatttttcagtttacgtatttcttcttccttttctggtttaattgttaagtatctactactctacttgggtagtgtattccacaatttgctaagcatgtgatttgaggaactcacgattggatcctcctgatacatattaggcatgcagtttattcacaggcatcatacagttcattaccaaattctccttcacagcattgtcctgtttcttatcttggtgtttattcttctattttgtttgttatacattatttttccttttgcgagggtgtgggacatggtagggagtaatttgatgagtttaaccatagacctctagtctacttggaatcattgtagtcgagctagcaggggattgttttatatcatagattgtactatatcacacagtcaaacaagtacggagtatgagcacattgtcctgggcttataaaaaaattaactttcttattgtcttcacatcagataaatttggtgctgct

SEQ ID NO: 76874 - DNA, 438 bp, Carica papaya
  Intron number 3 from transcript evm.model.supercontig_30.6 8 (locus evm.TU.supercontig_30.68) derived from phytozome v7.0 (chr-ID supercontig_30; pos 996451 to 996888 reverse strand)
aacgtcgccttctacaacatccctttctccaagcggtaattttcaggaaattttcctacaaatttaagatctaactttacatcgtgattgatgctgaaatggtggcctgactttttttgtatgtttgtgaattgtgctaattttgacgttgtttagcagggcatatggcaccttcttttttgctcgcttgatttcataattagtgtcagtgagctcaataatctttttcttctgagagcattacttatgagctgctccggatgttgctatttgcactttgattgaactttaggaaactcatgttacattattgtttgctcattactttccctgtatggttctattgaactgatttcagtggctgaaaaattatcatttctcactgattccatgtattccttaggttgagggaattaactacagcagaaattgggaaac

SEQ ID NO: 76875 - DNA, 443 bp, Carica papaya
  Intron number 1 from transcript evm.model.supercontig_4.15 4 (locus evm.TU.supercontig_4.154) derived from phytozome v7.0 (chr-ID supercontig_4; pos 2854848 to 2855290)
cgtcgtcctactcatatctcttgccttcctcagtatgtgaaactatacatttacgtacactactctgtgctaaacatacattcatctgcttaataataatgtttttctaatcatacgcaatacataatataatatatagaaagtggtccctacagattcaaaacattcttcacaatgtttttaattaatcaatttgatgatcgctatctcctttttttttttatgaatggtctttatttcatgtacatgatgaggggcctcatgtttgtatattattcctttttgtttcctaaaattccctgtctcctttctgtttgtccttttgttgaagatggaaacgacaaaatagtaatgtaagcgtatatcacaggctgttttcttattgctctctcttctttttggtcgcagatctgggtaagaagaatcttctcattgaaccaacc

SEQ ID NO: 76876 - DNA, 862 bp, Carica papaya
  Intron number 2 from transcript evm.model.supercontig_4.15 4 (locus evm.TU.supercontig_4.154) derived from phytozome v7.0 (chr-ID supercontig_4; pos 2855317 to 2856178)
caagttttcaccgaatcgcaagcttcttcttcttggtaagatatgtgacccattcatatgcacagattttgaagatggatggccagtctgatttaatatatacccattttgtgctttgtatgttgatttagtgtatttaatttgttcggttattctgcatctctttccctctcttgcaagctgcaaatggggattattttagggttaatcctattctatacacgcgtctcaggtatcgtacggttctggtgtcagcagttcacgtctctgtcttttctcactgcgttttacactaacgcgcaccgtttgttaactggcgcccttgcaggcaagataacaaccgcgctgttgttattggctttttaggtgccaccgtgtcgtctttcattcccgtctggtctttttgaccatttttgggtcttctattaaaaacactaaagcacttttgagtagtcacaaaatgtccaccagctaaaattaggaatcttattcggccagacgatgtctaattttttaccttaatcaaagaatttctttttaaactcctagatttttgagttcccctattgtttgtctctctcgtcgaatttacatttactatgaaaaagaggtttttctttttgatctcactgcaaatgaaaaggagttgaaaaagtaatggacacgtgtctgtcatctggaatagccttttggggttaatttagttctcctctgcgctaatatcgatattacttcctttttctttttcttattggctggttcacatcattcatttatttactgccccatgtttagcagcctttcacggtctaaacttaatgcataaaattaatcttccatcttcattgactcagaaacacca

SEQ ID NO: 76877 - DNA, 588 bp, Carica papaya
  Intron number 1 from transcript evm.model.supercontig_190. 7 (locus evm.TU.supercontig_190.7) derived from phytozome v7.0 (chr-ID supercontig_190; pos 32369 to 32956)
caggtttgttcatacttgcactcaggggagctgcatttttattcgttagctttgttttctatctaatgcaagacacagcataaaaaacactttccatgaagatttctttagtagacatctcaacttttatatataatttaaccttttcgaagttgtgagagtatgctaaaagcgcatggaccttcaaattcaactcttcaatactcaagtctttcgttgtttctcaaccttatgaacttatggctttaataggagccatgcaaaaacacatttgcctttgtgtccacatatggtgcatgtatctaattaccatcatgaatttcatcccattctgagatcaaaattttttcctgtttcattcttacaacttgtagcagatcataaaaagtcgcagatgctttttctttcaaatctgttattgtggctaaacagggcaagggcatatggtctgcacagttctgttcttttggttatctaatcagaaaatgcataatatgcttgttgtggatatatttagattcttcctgttataattattaatcgtttgtcattctaaacaacttataacagttaattttacacttccag

SEQ ID NO: 76878 - DNA, 974 bp, Carica papaya
  Intron number 1 from transcript evm.model.supercontig_21.5 1 (locus evm.TU.supercontig_21.51) derived from phytozome v7.0 (chr-ID supercontig_21; pos 683976 to 684949)
aaattggtacttatatcttcttcaatctcttctgctaattgcctatataatctacatataaatacatatgtatatatatatatatatgtgtatgtgtgattggagatttggtgtttcttcttgtttgaatcacatgcatgcatgtagaatatgtgattagcatggtatattttatttaaccaattaaaaactgtataatttattaaaatataaattaaatcattataagtaaatttcaaagttgtaaaaatattaacattttaactgattaaattaataacaattacagtgggttgttattaaggttaaaaagaagtgggatgagaaatattgattattttaatttgtaggtaagttttcgattttacgtgcatgcatgtaattaacctttactcacattaatattaatataaatccatcttgattaatatgtttcggtgattaaattagtcgtaataattaattaatcgtcagtaatgtaatatatgagagcgacccagtggtttttttagcaatataaaatgggagaccttatatatatatatatatacccaaccacacagatatatatatatacacagactgacaacattgcaaaatcaagtaatatggtcaaattctaaagtcttatttcacgaaataacatgtacgaaattcaattaatcaatgaccaaaatttcttggctctgcatttacctacccaaaataatagcattaggaattattaattagtgtcagaaagccaactcaaatccgtcagaccaaaaatcaatttcatctattccaataatttttaagcacttgttcatacaaaaattaatttaaaaaatattaacataaaattaattgaatttttaatattattctgttttgtatataaatttattaaagttttattattattattattattaaagtaatttgcttttgattatgcagctgagctgctagggttgcctctgattcctgcatac

SEQ ID NO: 76879 - DNA, 387 bp, Carica papaya
  Intron number 1 from transcript evm.model.supercontig_106. 78 (locus evm.TU.supercontig_106.78) derived from phytozom e v7.0 (chr-ID supercontig_106; pos 772431 to 772817 rever se strand)
tcatttctcccctgttatctccacaaattctgaaggtactttcctcttttagcacttccccataaactttttctttatctagggttcgtgttttcttcttttttttttttctctgtttgattgcttttaaatcatacccagaaagtgaaattagcaaaaaggaaaaccaagtgtttatgttaagtcctattttctgtttagcttaattgaagattactctttccttaaatctctctctctctcttttttttttttttcattttctgtttgttttttgttaatccaacactcgtcaagaaaaagttgtcttgtgatttccttctctttaaatttcggttctttttaacctttttttgtactttttttttttttttctgttttcaggaa

SEQ ID NO: 76880 - DNA, 849 bp, Carica papaya
  Intron number 1 from transcript evm.model.supercontig_25.1 49 (locus evm.TU.supercontig_25.149) derived from phytozom e v7.0 (chr-ID supercontig_25; pos 1544464 to 1545312)
attccaaggagagcttgccacctcgtaagcttgaggtaattttctgaaatcgaataatgctgtttggcggcttaaaaaatgtggaaaacaaggagaaaatatgaaaatgaaagggaattctttgttcctttcggaaagggaggaaaatcacttcatctactcatgtttcctaatttatctgtttggttcgcgcgcttaggcgtaagaaaggtggaatttttcccccttttttgggaaatagtctatttgcactgttgttattcttttctggattctatttggacagatgttgaagttggaacggaactgaaatttgaactctttagatgttttggagattggatttttttctaggaatctagcaactaggcctaatttgttgattttgagttttttttttataaatcttctattcctccttgagtctttttttgaacaaaaagttcatttagaaggaaaaagaattgctttaattttcatcaggtttctcagtaaccatgtgggttagggggtttgacccatggtgtgctaatgctttaaccgctagtagggtagttattgctggctttggctctgttgtcatttctgtatcacaattgaaattctgcagtctcatttggttttaatgatctgataacacgaataaaaatgtcctttgtcttgttttctcttgaaatcttttgtttatcattgtttgagtgtcgacgaagtaaaaaagcaaaaaagttctgattgcagttatgatgttttatgtttgggagaacatgttccttctatgattatgtgtattatttcttgaaatctatgattatgggtattgtcctgtaatgtagggtggcgttgttgggg

SEQ ID NO: 76881 - DNA, 659 bp, Carica papaya
  Intron number 1 from transcript evm.model.supercontig_353. 4 (locus evm.TU.supercontig_353.4) derived from phytozome v7.0 (chr-ID supercontig_353; pos 117903 to 118561)
atctaaccgagtccaaatctcaggtacatatctacataatacgcgcaacttcaattcttcgtgtatatttgcgcagtcatattttcgcaattagttggatttttcttacgggatcgctctcgagagatcggagaaccttgtctgctgactgctgaatgttagagattagttttagttcgaaaatagtgtgtttggagtgaaattcagggctctcgatgagttagttaatgagcaccggatgtttgaagttatggtttttctataattattttctttgtacactttctgttgataatgccgtgagataagtaattcaatagaagaatacctgtatggtaagataccaaggcttggattctgctttgatgttatttaacttggtccaatagcaaacctagacatgatagcatctgttttcaatttggatatccgtcacgctcctgtgtttctcgccctgggcgttcttttatgcttttaatttggacatgtgtcatgtacgttgaaatattttaggtcattttgttactggttaaacatggcaaacaatgccatcatcagtatctcaaagatgccttaattttttaatatacggatcattagtcggttatatatatttttagttttattatataatttaatcaatcatgtgcattcacagc

SEQ ID NO: 76882 - DNA, 494 bp, Carica papaya
  Intron number 1 from transcript evm.model.supercontig_6.19 (locus evm.TU.supercontig_6.19) derived from phytozome v7 .0 (chr-ID supercontig_6; pos 91670 to 92163)
ttaagccaaagaagctcaagcattaccaaataaaggtcattgctctcctttatatattcatataatcttttttcttgctctgacttctttaacaaaaatctttcttcttcggggaatgatttcggtttcctccatgaatttctgccgacgagtactatagctttactagcaaaagtgaattgaacatgccttttgcagtttttcctttaaattaacaattatcactgtcaatgcttaatctctcaatctcaattaaccatgccatggacttcgtggttttctcagtttcttaactagctaaattttgccaggaaccaatcaaagaccttccacctaattaataattcacaggaaaaggccaaacccaagatcggggctcaagaagctatggtcttttccaatggccattggggttgaattttggcctaaccgtatgataatagttggtttttgtcttcactggttttctttctctcagggacagaagcttttgg

SEQ ID NO: 76883 - DNA, 555 bp, Carica papaya
  Intron number 1 from transcript evm.model.supercontig_146. 21 (locus evm.TU.supercontig_146.21) derived from phytozom e v7.0 (chr-ID supercontig_146; pos 95198 to 95752)
agaacagaatcattgatctcaagatcactgatcaggttagtaaatcatctccgatttattctctgctcaatgcgctttcgtctctctttttcttcttcttcttcttcgtcgtcttttctgctctcttttccttcacgcaaaatacggctccggattttgacgtttattctctttctatctgctgttacaattttgaatacgttaacgagttagcagataactgataattttggctattccatttttgtttttctacgtaatcacataaatttcctgaccttcttatagattcctgattaaaagtatgaatcattagagtatttttctgttccgattccgattgccaaaacaaaattagagaggtactagttaacaggttcctttcttggcgtttctgtccggtgttatgtttccgtgttgaaattttgtggagaatattacgcgacatgtattatagcggtttctctgaaatttccattttgctaacagtagcaattttctctggtgttataatttgcagataaaaagagagatcgccactttgaagcttcttaa

SEQ ID NO: 76884 - DNA, 555 bp, Carica papaya
  Intron number 1 from transcript evm.model.supercontig_192. 9 (locus evm.TU.supercontig_192.9) derived from phytozome v7.0 (chr-ID supercontig_192; pos 149272 to 149826)
gaggtagatcttcgattcagagtaatcaaacctattgctgtattctggacagactttattgatgaaaaatatttataaggtttagattgtttggttctctcttaacaagtccataaaatttattgaaggtaggtaaggaaagaagaattcatgaacagtcacaaatagtattgaattatcaactgtcccataaataggtccattaatagggaccctaaaagttttttctgttttgcgtttctttaattagtctatattcagttatacttttattgtttgatagagattttttcgcaatattgtttgataaagattttctattaatttctttgacatggaaaatactggaaagaggaaacgaggaaacaattaaagagaaggtagttagcagaagtataaactaggtgtctgctttatttttgtgttgattatactcaagctgcagccattcagtgtttttttctccctgcaccccatattgttaaggctttaaatttgtagtgaaaactgactatctaaagttattacatatctatcttgcagtctgttgaagga

SEQ ID NO: 76885 - DNA, 433 bp, Carica papaya
  Intron number 1 from transcript evm.model.supercontig_46.1 31 (locus evm.TU.supercontig_46.131) derived from phytozom e v7.0 (chr-ID supercontig_46; pos 1208958 to 1209390)
cccaactacgagaaaaactcagtacaaagttcaaggtaagttcatgcagttcttgtgcatgtagatatgtctctatgaacaggatcattgattaaataactttagtttttcttttcttttctgggtagatttgaaatgggtttttgcttcttttggaactttgttatgattttaagcagtttgagtggtgaaacaatggtttctcagtaatgttcttactctgagatttactttatgaccgtatgattatgaagaaggaaacatttcctgctttcttttctcttcttttcatgtctttttttttttcttggaaaccaagcggtaattaacactgaaaaaattaaaactgacatgaagatgcctgatatatgtctgtttgttcataattatatgatttggaacagcttgtacacaagaagaggtaaataaggtc

SEQ ID NO: 76886 - DNA, 733 bp, Carica papaya
  Intron number 2 from transcript evm.model.supercontig_59.5 2 (locus evm.TU.supercontig_59.52) derived from phytozome v7.0 (chr-ID supercontig_59; pos 540437 to 541169)
ggaggtagtgtactaaattaacaatttcaattcaaaatttttatgtttggagatttttatcaaaattccaccctttgttattttgttcgtagaaatatcagtgtacctcaatcttttagcatcaatttgcatcctagctagtatcatataaggatctttctgaataaacagataaaatcagagtaaatcgtcacatttatgatgtgtgaattgattagcttgttatatggcaatatcaagtgattgtatttgagtttatatgttgagggattaatttagcaacgatgtttctttctttctttccatcttttgtttgtctgtttttatgtaaaaatggaaaaaaataagtaccttttgaaatgtcaagctatcatcaggtcacagatatgatgttatgaagaagtaggcataccacacgtatcaatctcatgttatctctattaccaatttgtttgacagtctttccaaaagagcagtctgttcaacagaagatccttaattttgtcatgaactatcagttcaagagttttagcaattaaaaatttcatgtttagttttatattatgataatgcacctttcgagtttgacaccacagccccttcaatcccaacatcctctccaccccccgccaccccgccccccgaaaaaaaagaaacaaaaaccaacttttgccttttctaattcccattctgtttttttactctcttttgttgttatttcctgatagctgtg

SEQ ID NO: 76887 - DNA, 590 bp, Carica papaya
  Intron number 1 from transcript evm.model.supercontig_40.7 2 (locus evm.TU.supercontig_40.72) derived from phytozome v7.0 (chr-ID supercontig_40; pos 1166799 to 1167388)
caactcgttaccccctggactttctccgttgcaaggttcacttcttctaatcatctttcatggattacggcactgtatcataagatcgttggttaaaaaaaacaaaaatgtttgatgtgattttatgtgattcactgtgctccaactgccaatggttcatcccaaagaaatagcttttggttttatttcttcatgcttgagttttgtaagctgaatccgattttatgcttaatagttctctaaattatttaacgggtctcgttttcattttctgggagttcctggaaagtgggtggatttttttttaatgatctcttctgttttctgtgctgactaatgtctcaacatagtctctgatttgttcatttctctgttcttttactacttttttgataaacagcgtatgaattgggaaagttactacatatatatatatttcttattctcaacggtgttttgaattttggggtcgattgcttagaattttacgcctctggaagtaattcaaataatctgagatactaaagagtttgagatttatggaacatggtgcagtgggtatacgttgttgagggatccacaccacaaca

SEQ ID NO: 76888 - DNA, 351 bp, Carica papaya
  Intron number 1 from transcript evm.model.supercontig_16.3 9 (locus evm.TU.supercontig_16.39) derived from phytozome v7.0 (chr-ID supercontig_16; pos 815857 to 816207)
tttttggtgcgtttttttcttcattaacgttttccgcacacccaaacagcatttttggttatggatatttgcttctttgagatttccctgtctgggtttctttttgtcttaatggttctcttgagtttttgtcatggaatagctttgttgatcttactaaatcttcctgggtttaaagctttctttagataggcgggtgattcagcatttctgggttttgcttgtttgtttgccatcgatttgattctctgttctttcttattttttaagaaaaaaaaagctattattcatcattatctaactatatatctctggtgttttctgtaggattcgaggctccgaacttgaggt

SEQ ID NO: 76889 - DNA, 799 bp, Carica papaya
  Intron number 1 from transcript evm.model.supercontig_40.8 2 (locus evm.TU.supercontig_40.82) derived from phytozome v7.0 (chr-ID supercontig_40; pos 1549498 to 1550296)
cattaagctgctagttattcctgctcattcctcaagtaaccttctctctctctctctatatatatatatatctatgtattatctcattctttgctttcttttctctctcttaattattattgcttttcgtattctttctcctgccaattttagtggctaatttggcgatgctcaaacgtcttcctttgttcttttaagtgttcgtctcagttttttggtgttttccgagatcagtctgttttaacttctctggttaatatttcttggaaaaccaactctgcagtgtattagtcttttgttcagagaggttaatgcattttttgcaagttatatatatgtaaataaaattttcccgttagtcaaaccttttatgcataccaaaatttataaccggaaaacaatatcatccattaaaaatttatctccaataatagtggaagaaaaaaatgtagtattataaacatagatgagaaattcatagcagggtaagttgattagtcccccaggtcaaactgaaacactcattatttaactgaaaactgaaacattttagtaaattgtttggaataaatggtttataacatcccgagaaactagaatagagtgctttagcgaacaatcataagttgctctcttgaagcactgctgcaacttcttttcatttacgatgctgcataaagtggggatcatatcaaaatagctccgaacaagtaattaatgatctacttgactctattatatagcagaatttcagagttgatactgataaacgatatgatgcatgtccaggtaaaaggac

SEQ ID NO: 76890 - DNA, 855 bp, Carica papaya
  Intron number 1 from transcript evm.model.supercontig_123. 53 (locus evm.TU.supercontig_123.53) derived from phytozom e v7.0 (chr-ID supercontig_123; pos 705865 to 706719)
ttagcggacagaacactcaggtagttttttctttttgaactgctcttgactgctttaggaattttctttaagaaaattgtctaataatgctttgaattgaatgaattttgcgaataaagtcattcctttgatgatgaaagaatgcaaaacaccaatctctatcttaacgagtgtctggtattgtgtgtgaagaaaagtgactgccgctaaactgagtgattgactatagaatcttttaatggattttatcgtgtgaatgtggaagttgacaaagttttcccatcccctattgatgaactaaactttttttctcagtgctatttttcctttataattcctggaaggtatacatgatttctctgcaatctcacgacattttcatttcctattttctaaattatctttggaacaaccatgagaaattgcttcagtggtaacttcacctagtccttgtaaacggttgacataccgatcctgggttctcacccagtttactacctccctagggacctagaaatacacccaaaaagaataaagaaaatatctatctagtagtgcagaaagcctagtttgaagtgtagtatctgaaaataggaagtgtagattagggatacatgatcacatgttgtaatttctccaaggttaacagtatttcgtttatcaaggccttttaaccttgtaggtgactactgtctttaatttggatttcagttagctttgctattcaaagcataaatcaagaatttcaaaatgataaacaatgcattttatggctgtgtttatctatctaatgctaaaatgcttcagacaattgatgtaatgtagctttggtaattaaaacttcctcctgcagat

SEQ ID NO: 76891 - DNA, 194 bp, Carica papaya
  Intron number 1 from transcript evm.model.supercontig_33.2 5 (locus evm.TU.supercontig_33.25) derived from phytozome v7.0 (chr-ID supercontig_33; pos 175406 to 175599)
caccttgtcatcccttctctgcaaaattctctcaggtatacctcttaatagccactctttcgcgaaaacctctctccttatagtaattatagttatttgattagagagaagagactagagggtagtaataattcaaacttgagtgctgtgtatttcttttgtttgtgattaactatatatgcaggatccttcaa

SEQ ID NO: 76892 - DNA, 782 bp, Carica papaya
  Intron number 4 from transcript evm.model.supercontig_26.1 38 (locus evm.TU.supercontig_26.138) derived from phytozom e v7.0 (chr-ID supercontig_26; pos 1032274 to 1033055)
ctacagattcccgcctacaggtgagttgcatattttacatgaatatcatcccttgcggaaaaaaattaccctgagaggggaatgaagaaatttgttatttgaatggtagttgaactgccttgcaaggaagaatataatttcatgattttttgatttcatttgtgaccctttaatattatgaaaactattgtcgttaatgatgcatttggtgtagtaccatgcaaataatatcagctacgcttacggtattacagtatataaataattaaacgctaataataattaacatcttccgttcgcttcgactatcataaatgttaaattatttatgaaatattaaccgtcacttaattaaatagttaatatgttcttttttttttttataagatgtcgcgagttcgagttaaattgtactctcgtatattttcgtttaaaaattgtgtttataattaatatttataaattaataaattgatgaatatgtaaatatttattaaataaaaaaatcaacagatttttaatgctgacatcagtgaaaatctatgcaacttctaacacactgtcattgtgatttgtagtgtctttatccttaaaaaagaatttaaggataaagagagcatatgtgatgttgatatgatattatttgaactcatcataattgtattgtttgatctaaatatatattctactctaattgaatatattttgctgcaattgataatatattatttatttattttataacagaaagttcagacgagcctgacgtctttaaataagcg

SEQ ID NO: 76893 - DNA, 482 bp, Carica papaya
  Intron number 1 from transcript evm.model.supercontig_2319 .2 (locus evm.TU.supercontig_2319.2) derived from phytozom e v7.0 (chr-ID supercontig_2319; pos 3860 to 4341)
gaaggttccaaggtgctgccatccatttaagctcatttaccttactatagtaatttatgataaccagttcatgcattgtcaaggcttttcttgctgaaattatttttacaagataatataacaaacttcttcttaactttagtttttaaaactttgggataatatcttctaccatgcctggacagtcttaagttccctattcatgtagagaatcagaagatttagcagaacacatgcattgccttatgtcctccctaaggaaaagagaataagaaaaatctgtaggcttgggtagtggaattagtattttgatctcaataggagctaagttgaaatttttttatgttgctttgagatggagcatcagcccaagaattttaaacagactttcatagatgcattttagtttggataataatcgttcagccaactaggacttgattcaacactatatggtgttaaaacatttgattgattgcagt

SEQ ID NO: 76894 - DNA, 560 bp, Carica papaya
  Intron number 2 from transcript evm.model.supercontig_15.1 50 (locus evm.TU.supercontig_15.150) derived from phytozom e v7.0 (chr-ID supercontig_15; pos 2727082 to 2727641 reve rse strand)
ctagaatatctctcttcatcattaccaaaggcaaggtaaagggttaatcccacatgcatttcagaatcatatttttgtaatcttgatgcatatcaactcaaattccatattcaaatgaaccaaacatcaacaaacatagaaattcatgcctcaaatcaagtaatatatccaaatataatttatctagaaagtgcacttataaatgtaaaagaaaatattaaagaatcccttattgaaaccgattcattagtttttagaaaagggagaaaatgacttctagaaaccttcaaactagcccttaaaattcttactttcttttctttttccttgcctccttctctctctaaccttcactcatttctttctctaaaattctagtaacgcgagaatgaaaaatggtgaaaaattttgaagaaatggatgtgcgtgcaaatgaggagaagaggaagctttaaatagattttggaaggatacggatgctcgccacatggcaaaaatatgacagtacatgtgatggtggttaaggggagaattgccagcggtgggacacgcagggtgtg

SEQ ID NO: 76895 - DNA, 975 bp, Carica papaya
  Intron number 1 from transcript evm.model.supercontig_223. 2 (locus evm.TU.supercontig_223.2) derived from phytozome v7.0 (chr-ID supercontig_223; pos 15159 to 16133)
aggcctcttattctcgattacacaaacgcttcaaggtcattcctctttagattttgtgatttcatttctgtattccgaaactggctctgatttacttgcatgtactttttctgctattagaaatagagagaataatcagtatacataagctctttcgttttgaaaaaggagttttaaaacggtcagttaatttctgtttttctcctgaggatctgtttttttttttggggatgtttagtatgttcatgtaatttattgatatgaaacagttaatgtttgctcgcacttgttgattatgtatcttttttttttgaatttgtacgataaattttgagaacgattgcgttattggccatttagcatcatacgaagcttaatttaatgaagagttagaacttagtttcgttgtgtatgaagaagaaaattagagtatctgcattctgcctagtaatgaaaagtctgcaagttaatgagggctgagttgctctccatttcaatggtgaaagttcacacttggagtttcttgctgtgtttcgacatgacctcctggcaatattattgtattagtcacaattgaaacttacattaaaattcattcacgtcctgaaattttgattttgctggagtcattaactgttctataattctttaattaatttcattctgtaatttatacaagctttgaaactttagctggaccgatgctgccttttattaataagtgagttcctataggtattcttttgttttacatccatgaagaatcctagcaattcctagcttaattctttggctgctcagtattctcatgttaatgaaaggtgtttgaccgatatggataatcttagtactctattttttccctaaagcttcatgtatcacaaaaaatattttgaagtttaaacctcattaattgctttcaagaatttatttttcacaattaatcttggattcaatgtacagatacagacacaa

SEQ ID NO: 76896 - DNA, 889 bp, Carica papaya
  Intron number 1 from transcript evm.model.supercontig_1296 .2 (locus evm.TU.supercontig_1296.2) derived from phytozom e v7.0 (chr-ID supercontig_1296; pos 5505 to 6393)
gtcaacaagcgcaagcctaaacccaccaagcttaggtactgtttctcttcccttcctctgtatctatctgtaagcttattcattttctttttgttatccatgaaattttcaggctgtatttaattggttttccgtttttcttttgatttacatgttttgtttagttgatttttttttttactttttattgagaaaattgtatgtctttactggtattatgttcatgtacgtggcagtgcttagatttattgctgtatgtttgactgttttgggtatttttgcttgtttttgtgtatttcctttaatcgattggttaggaaatggagaacattcgaagaagaattattctttggataataaatatattttctctgaaatttaattggattttctgttcgatcttgtgttgtgaagctgagaaatttaagtggaggtccgactttgatgctttggtgttttaatatttgcattctgttagtttcccgggattattgtcttttttttttaggtttgttatgtcttcttacactcgaaattttctcggtcagttctgtgcctctgtatgttagtagctgtattttcttcaaatgcattaaattttcttttactggtttgcttgattggccaattcaactttttagccccgtctgtttataggattcattttgtccgattggctatttttatagttctcgagtgaagcttttgtattctattcttttgcctttgttctgcttgattgtaaactgaaagcgggagttttgtataagctgtgggaaaatagaggatgttattcaatgaagtcaattgtaccaaaatactatggttttaattcaattctttttcctcttcagggctagcattaccccaggtacagtgttgatcatcc

SEQ ID NO: 76897 - DNA, 411 bp, Carica papaya
  Intron number 1 from transcript evm.model.supercontig_12.1 74 (locus evm.TU.supercontig_12.174) derived from phytozom e v7.0 (chr-ID supercontig_12; pos 1564805 to 1565215 reve rse strand)
agagttaaaatcttcattcttccaggaatttacaggtctgtctgtcttcatacaagactttttaatttctattttccttgtttttttttttttttctgtttgtcagtaaagtcgtgatctttgtgctgtgaaatcttgaagcttattgctttattcttttttggctcattggatttaagtcatgcacttttagcagttatcctatatttctgggttagtgggaaaatctaattgttgcaacacggacatgaacaaagacagttagttacatagttataagttacggatgcaaaaataaagtgcttattttttgatcccttcttgcagtttcttgctcctcttttccctattgattaatttcaataaatttatacagagaaaaggtgatcgttccaaatttgaagccatata

SEQ ID NO: 76898 - DNA, 749 bp, Carica papaya
  Intron number 2 from transcript evm.model.supercontig_2.27 6 (locus evm.TU.supercontig_2.276) derived from phytozome v7.0 (chr-ID supercontig_2; pos 3448979 to 3449727)
attttcctcccgactacccatttaagcctcccaaggtaaattttttcttagtgcattctttttttagtgctgctgttcctatatggactaatatttataatgtgcgtcattgcaaaatctttgttgaatataggaaagtatataaaatttcccagcaagggttgttcttgtggagtataattttgaatctggaacttatttctttttgaaaataaaggaaaggtgtctgttgtttatggaattagttaacatattggttgtggaaaagtagaaagtttaccaccactaagagtgaattatgtgagatgtcgtcttatcatgttcagtaagacttgtatccttctacgccattatcttcaagacaaagacatgtagaatataccttatgcaagaaaataatcttttaatcaaattggtcttacggtacaaaagtggagaggagacaaaaaaaaattgaaaattatagatgattagcatttcttataccttggcacttcattaagctgaagtggggaactgctatatgcatctccacagttctatttgcatatctggtttcattttgagttattttttcgttggctgtgttatttgtttattttactgatttcacttattaggttggagactaatactttatagtaagtgataattacttgtcttttccttaatttctttgtcctctttattaattctttttcttcatatttccaggtcgcatttaggactaaagttttccatccaaatat

SEQ ID NO: 76899 - DNA, 954 bp, Carica papaya
  Intron number 2 from transcript evm.model.supercontig_427. 2 (locus evm.TU.supercontig_427.2) derived from phytozome v7.0 (chr-ID supercontig_427; pos 11772 to 12725 reverse s trand)
gtggcacaggtaattttttgttatgtatttttcccactctagtttctgtttggttgccctagaactttttatttaagaatgtttttacttctttcttgctttaaatattttattttgtaccatcagtgggccttaagacaaggaattaccacaccggagcatttctttggcggaggattggcattttcgtttattgctatcttatccgattggtgtagttgttttagcttcacatttaggctacgtgtagaacagaaggacaattagatcctttcatttccatcattaggtgattcttttatgtgacgaataaatcatgaattttgtaagatattttatgatctataggtttttagtagttgcatttctagcctacacgtattttgctagatgtattccaagctatgcattcatgtttcagtctatttcactcttttaaatcttcatattcattttcaaatgtcattattttttaacgtaatttgaaatttatcccttatcattccactcagacttcatttgaagatgagaattgatgtttagagcagctctaagcagagaagttaacgtttacaaataagttccacaactttttgcaagtatgtttattcccaatggaccgaaagctccattcaattgagtacaggttataggatgcaaaaggaaggactgtttattttgtagtaaatttggtgtttaactctattctatagggttcagaagtttagtaaaatggttgctttgtggccaaaacaatcttcaaatgcttatgctgacaaatattccaagatgaaagattttctgaattggagctggataaagatcctgcctactgatttttgagtaattgttcttgcttaaaatgttttatatgattgtttaattttccttctgatgtagaattatttgtgcaatgcaggaaaaactacctttgtgaaaaggcatctgacaggc

SEQ ID NO: 76900 - DNA, 214 bp, Carica papaya
  Intron number 1 from transcript evm.model.supercontig_124. 12 (locus evm.TU.supercontig_124.12) derived from phytozom e v7.0 (chr-ID supercontig_124; pos 279052 to 279265)
cagctctcagtttctctgtacctttcattcaaaaggtgatttgattgattctcctttgtgttcttccatttttgttccctatctgtttgattaatgtccttctctcaaaaaccattttacttggtagaaatatcatgtatggtcatatataaaatcatagaagattctgttaagaaaagaaaattttgcttatttgttgttggttttgcagtta

SEQ ID NO: 76901 - DNA, 704 bp, Carica papaya
  Intron number 2 from transcript evm.model.supercontig_124. 12 (locus evm.TU.supercontig_124.12) derived from phytozom e v7.0 (chr-ID supercontig_124; pos 279453 to 280156)
cttttgcctcttgcaggagatttccactcaagcaggtttaaaactacacagtaatttcagtcaccattttttttcttcaagtagtttagctacactgacctactctgattttgtaagaaaccatggctttgtttcctaaatgaaatcttaatgttttcttctgttttttttgttttaaaaatttatatgtattttgttcagaaaatgatgcaatagtcaaccatgaatagatagaagtagaaagttttagaattactggttttagtgtttcctataaatttttgctttggttattttacaatcataaatgtgttatttacatactcctgcgaatgaaaacatgaataaacagatatgaattcagataaaaaactaggaaatatttatataaaatcagtattgtaatttttcatatattaaatggaaagttcttttttttttcttcaactaatcatctttcctgtagtacttttcaagtttgactttgttaaaacattattaaccaacaactgtatattaagctgacataagtggtaattcttctgaggatcagttttaatcttgaccagttttctttcttttcaagcaacttcttgactgacaatgtttctacaaaattgagcttaaatatttttcttattgcattttccaatgcttatctctccttaggtaccggcttatatactggttcaactgctaggatc

SEQ ID NO: 76902 - DNA, 751 bp, Carica papaya
  Intron number 1 from transcript evm.model.supercontig_12.2 67 (locus evm.TU.supercontig_12.267) derived from phytozom e v7.0 (chr-ID supercontig_12; pos 2414571 to 2415321 reve rse strand)
acgtattttcgatgtttccttttcttgcttagttgctttagtttttgaaagcagaaattggtggtttagtttcttgtttgtttggaagcatacaagttatactgtatacatttacatgcatatcaatgtatatcaagataatattcaacaaattaatatcacaaccttcttttttttaattttattacaatttaaactttgtttagtagatttttacattaccttgtgcatttgttttttgtcgtttacgtttatttatttaggcgacttccaattgttttcttttttatatctaattctgatttgtttagtcttgaacttctacatattcctgtgtttggtcttaatgcaattcaatacttaaagatcatgttgtttgctaccgttgatttttatcaacggtcttataagaaagtcttcagaattttatcaatggttctccacgctgcaacatatttgtaggttaaggagttcactacgcagtgagtcaagaagataatgctgtttcctatggcgggttaatgaaagcaccaaagattcttgccgacattgtagaatctctcgctgctgctgtttacgtagatgtcaattttgatttgcaaaggctatgggtggtttagtagccatcaatgactcaatgcttcctttctttcttgtttttttaggtgggtttggggttttagaaacttgtgacttaaagcagtgtatatttgcagatctttaggggtctattggagcctattgtcacact

SEQ ID NO: 76903 - DNA, 595 bp, Carica papaya
  Intron number 2 from transcript evm.model.supercontig_171. 16 (locus evm.TU.supercontig_171.16) derived from phytozom e v7.0 (chr-ID supercontig_171; pos 202939 to 203533 rever se strand)
ctcctaggtgcttatcatttgttaaattatttatttgactcgttttagaattgattttatggagtagtaattggttttcattctttttccacgtggacaaatctagccagaatttgattgtgtattgaaagtcttcagtgtgtcatatagaattcattccatagcttgattttctaaaatatattttggtggttttaaaataaatccagtttttgcatttggttcagtttttgtaattcatagattggtgattgctagaatttaattggttcactttttgtaattcatagattggtgattgctagaatttaacgaatgagctaattactattttagtccagaaactatgatcatttttacgcatgaacatcaaatgttttctttttcggataatcaggatccaaaataacatatgctagtttttagattagctgaatgctgaaacttgagttggttaaaatattctgatggtttgaattgattgtaacgaaaaaaagagttgagactaattttaacaagggttgtagttccaaggctaagatagttactaatcctccaagtgtttatttttttgggaccattttattcaaaatag

SEQ ID NO: 76904 - DNA, 529 bp, Carica papaya
  Intron number 4 from transcript evm.model.supercontig_3.33 6 (locus evm.TU.supercontig_3.336) derived from phytozome v7.0 (chr-ID supercontig_3; pos 2324780 to 2325308)
attatatcaaagcagctatctgacacaatctcaaggcatgtcgaattttcgtttctctagtgacctattgctgttctcaaaatcacttccttaatcctcttcaactggaatatcttttcttgtttgtttctaatctgtgcaatgttgctttcaagaaaatatttatattcattttcttgatagaagagagaataaaacttttttgagagagttcatttttatttgcatatttttctattcttccaagtattttccgtgtcaccgtgtctttccttgagacagataggtggtcataccttcaacgttattggtgttaaagagtaatcactagacattatttttggctcttttggttactaattttcatctatattcagttccttttggatcaatatgttgtattgaattgtaagcccctaggtttttctttatttaagcagcatattcaccttggtatgggctctttcaatttgattccttgtagatttgtctaacctgtgaaaactggtttacttactgtagttctggc

SEQ ID NO: 76905 - DNA, 551 bp, Carica papaya
  Intron number 1 from transcript evm.model.supercontig_27.2 19 (locus evm.TU.supercontig_27.219) derived from phytozom e v7.0 (chr-ID supercontig_27; pos 2093379 to 2093929)
attgcatatttttgttggctggtacaaagtaactcatttcatgtcatgtaaggtcaaaataagtttgagatatttgataaattgaagataattgtacattttgttgcttgataggagatctctcctttcatgtgatgtggtatgcaaataagcttgcaatatttgaaaaagcgaagatgattgcatgttttgtcgggtgatacggagtatctcttttcgtgtgatgtaatatctaaataagcttgagatatttgataaatttgtcgcggtttggagctagatgaggaatctgtcggtgtcttcttctgcttcgtatgcttaattgatgccgttacactttcttgtatgctatttgaggaaagctgacagtaaatctaatctatgaagtaattaactgaagcttggctttaattggatgtttcggtgaatagtgttatttattactagtcagtaatgtctaaaaacaaaatattactactgttagtcctttcatttatggtgaattaattgttgggatccaaagtctaaaggcttctatgttgtcatgcaga

SEQ ID NO: 76906 - DNA, 834 bp, Carica papaya
  Intron number 1 from transcript evm.model.supercontig_10.1 08 (locus evm.TU.supercontig_10.108) derived from phytozom e v7.0 (chr-ID supercontig_10; pos 1683912 to 1684745 reve rse strand)
gatcactgcttcagccacggatctctttcgctcaggtgttggatctttctcttgtcaattgttggttttgggattttgttttctctttttggtttaatcattttgcaattctacttcgttccccctctttttttagaaaaaagatcgaattgtgatgaatgattttgtgctttttacattttaaagaattgaggtgcaaatgaatttctcttcgccctctctctctctctctctctctctctctctctctctctctctctctcatttcatttggatgccattggtggtgtccatgtgtttgatatttcggcttgaaattcacttgccagtgttgtatgttaactgagacattctctttcattttgatatattttttaaatacaactcatggtgaaaaccactctgttgaaagatacttataagtattgacgtctcattgttacttttccttagtctatttttggtaaatgaaagaagtttatctttctgtgtggtgaacatatattttgtaatatgagctgtggttttatgtggaagtgcaaaagtagacgttggatgacatttatgttttaattctgaactcaatgtgattttcaactgactaccagtgaatacgtgactctacttttcttcatgtttatcacaaggaaaattttctggcatgggttgttaaggtttttccttaaattcttatgtttgtttcctgctctttgtgcactcatgggtgctttgttttttggatttaccataagttactgagtttctatcatgttaataatttggatcttctgcactttcacttgttcagcagcgagtaaggcatcatcaaaagac

SEQ ID NO: 76907 - DNA, 711 bp, Carica papaya
  Intron number 2 from transcript evm.model.supercontig_205. 15 (locus evm.TU.supercontig_205.15) derived from phytozom e v7.0 (chr-ID supercontig_205; pos 143221 to 143931 rever se strand)
attcaaatactcagcttcatatagcacttctgaaggttctctgtttcttgttattgaagtcttattttatgtcctggaaatactgcaccctttttagcttcttcccggcgttaagcccttgactatggttaactagagaatcttagattcacgtggatagcgtttttgggcttgcttgtatgtacgttgttttggatgaactgaactgtgattattattttatgtttttgtccttgttttaatttgtttttgcctgcagagttttctttcttcatttttttgcttttttgaaagcaggatttgatgctctatcttctcaataataggttcctgttttttatcttattctcaagcataatagccttgatatacttctagtgatcttattttattgaatggcttttggaaatcttgagaagatcatactatttttcacattggtaagtgaaaaacatgcctattactgttataaaaactgacatatttgcttgctcattattgttatcggaactaacatatttgctgcaactgctatggatgtagttttgctttcacgcattctttttgaatgtactgcaaaatgtatgaacgtgcacaactttttgttttttggttttgtgaagtggtagagattttgttcttactattaatatcttgtgagctgattttttggcagggaatcccgccagttagtaaaactctggatcgtcc

SEQ ID NO: 76908 - DNA, 714 bp, Carica papaya
  Intron number 1 from transcript evm.model.supercontig_205. 34 (locus evm.TU.supercontig_205.34) derived from phytozom e v7.0 (chr-ID supercontig_205; pos 268095 to 268808 rever se strand)
aagcaaaggtacggttcatttacctcgtcttttaccttttcatctgtggaaatgatgggtttcgagccgtgtttttatgggcaagtgttctaactttgaactgttcacggccacttagatttaaaatctatgtggaagatcatcaaccagtgcaataaaaagggagattttagtagtctaaattggttatttggcttcttcgtatatgcatttcgtctttttgttgtttgccttgagttctgttcggcacctataactgaatgagagattggagacagaggtttgacaggatcctagttcatgttttaagaaatgtagagaagactaacggatttgaagaaagaagaatagcagctctgctttagagaaagaaatttaacttttataaaaaaaatttggatgccaaaacaattacaagattcagcttttatcgcttgatattacattaatcaacttagttacaactaattatgtaataatttttagtaatcaaaacaaacaaccaacttattctagtaaactctaacaactattttgggtcctgacaaggttttctgcagtaatgagttgagggacaagctaaatacttgtataattaagcattaggcagattatctatggcaaatataggttctgttatattgaaatttgattagtttcttctcctgctatgttattggtttaccattttcccggtatctgtctaaattgcag

SEQ ID NO: 76909 - DNA, 990 bp, Carica papaya
  Intron number 1 from transcript evm.model.supercontig_2207 .1 (locus evm.TU.supercontig_2207.1) derived from phytozom e v7.0 (chr-ID supercontig_2207; pos 8842 to 9831 reverse strand)
tccaggtctgtattatatatcaaaattgttttactgactgcttttcgactgctgccttttaatcttctttttcctttcccttcatggcacaaatgggtgcttatgaccctaatttaaattatgattgacagaactatcatggcatctatagttaaaatgacatgaactagatgacaaacatacatgaaataataacctaacaatgtgtttacttatcaaagttaaatttgttcttagtatatatttcaaatttatatccaaatcaccatttgttatggtccctactatgtgatatacttatgggtttacttacagggaaataggttggaagacaccttttcagagtcctattttgagtattagagtgggcttgttagaggaacccttcagtgtgcaaagtttaaggactttaaaaaatttgaagaaaatattgcttgcctctttttgttccatacaatcaacaaattcagttggaaaaaaagaaacctttagccccacttcatgatctgaagtcatccaaacgtctaaaagaactgactctcacacccaaaagaaacgataaatgagaacagagtttcttaaagagaagtaaattgttaaactgcatacagaaaatttgaaaacaagtgagtgattatcgtgctcccctcttctgtgtgacaatgtgcaaggagtttgtatccttggtaactagcaccatcctaaatgatccttgctattctgacctggcggatgacaggcacaaattattttagctatgctgttcccttcaatcttccactacgtcatttataaatcatgatattgagattaacccttcaatggaaaaattcccagctaatagacatattgtgtaataccatagtaaaaaataatatgtaacatttcttttagttgtaagttaaaccattttctccttttctgatttgtttgaattttgaatttccttctccagggaagtcttgctttaaaggattttgacatacgcaa

SEQ ID NO: 76910 - DNA, 608 bp, Carica papaya
  Intron number 1 from transcript evm.model.supercontig_17.2 17 (locus evm.TU.supercontig_17.217) derived from phytozom e v7.0 (chr-ID supercontig_17; pos 2559767 to 2560374)
gatcatattgtctgttctcttctcctttattttttttatttttttcctggttaacttacttttattttaaagcaatatattaattcattttaagagaaacaccatggctatgttaggcagaaatcaacaaatttctaatgcagcaaaatggaagtagtccatggtttttcattgcaacaaattttcctgtttaagaaaaaaaaagaagttgttctttcttctatttctcttgaaatcaaatcttctcttcaattggctttccacaaaaacatacagattttaccatttctactattaatagctgtcttagcttgctatccttttcatttgtttatgattgtcttttgttcaaattgttctctttaaatggctttccataaagacgtagaaacttttaccatttatactatttactctgtcttagcatgctatctgtcttggagtcaaaatattctcttaaaatgcctaatgcacacaagacgtactaacttttataattactactttttagtatcttagcatgctatccttttcacaattgtttaccagtgtcaatatctttttgctgttatcttatgctatcatggttttatcagggtggattgccc

SEQ ID NO: 76911 - DNA, 250 bp, Carica papaya
  Intron number 2 from transcript evm.model.supercontig_1128 .1 (locus evm.TU.supercontig_1128.1) derived from phytozom e v7.0 (chr-ID supercontig_1128; pos 12601 to 12850 revers e strand)
tgaagcgcgaagaaattgaggataaggtaaagaagatgattgaatacttctctcttcttttcttttttttttttctccactatttcaaattcattctcaatttttttttttcctataacggtatgagaaaaatctatttattatctgaattatgttatcaaattgtgaaattaatgtttcttatttgattttttcgtattttgttaataattcaggttgtttggattactggagcgagcagaggaattgg

SEQ ID NO: 76912 - DNA, 725 bp, Carica papaya
  Intron number 2 from transcript evm.model.supercontig_435. 2 (locus evm.TU.supercontig_435.2) derived from phytozome v7.0 (chr-ID supercontig_435; pos 12652 to 13376 reverse s trand)
aagaaggtgaaatttacattctgattccacttatgtgtcatattaggtgcaatttaaacagttttttttagtgacagtagatttgctggattgtacttcgacaacgtttaatcattaacttctgcatttcgtagtctgttggactttgaatttgatttcttaacttctacagtcaattaaagttaataaaagaaaatctgcagcattacggccttgttaccccaaggcccttttgatcatataccgggcatgaaaaggttctgtaggcatgggtttgttactaaatcttacaaatcaaatcagcatgttcaaaggcccttcgttataaccctttgggttcaatatgtgcgagaacagttcttggtgtaacttccaatgaaaccaacaaggttctccttctcttcagattggcacctatgcgcataagcatatttcttattttattactgtcgttggtacaataaaacctgagatcttccaatgacaccgctgtcactggcattgcagtctcatgcccattgttcttgagcttggatagcctgaacttgttatatctctaatcttgttctagcacatgccaggagtacatttggcctcattttctttcttgtttcagtctaagccgggtattctttaatcatttagcagaagttctaactgcatgatatgttcgatactattaaatcacaggtcaaagggctttcaaaagaggagcaagacacacg

SEQ ID NO: 76913 - DNA, 680 bp, Carica papaya
  Intron number 2 from transcript evm.model.supercontig_16.1 07 (locus evm.TU.supercontig_16.107) derived from phytozom e v7.0 (chr-ID supercontig_16; pos 1651138 to 1651817 reve rse strand)
cgcggtatgccttagttctattgagaatgtgatccatttctttcagctttttgctctctttttctccatctgcattcaggatttgaatggatttttctttgcgttctagaaattatgtcaaaattttagtaaagaagctattgcatatgatcattatatgtttctaactgtgtaaatttaccatgatgaatctccctccaattgctgcacctgcatgcttggggtccttatctcttatatttactgagaagagttgcatcgttgcttcttgttattattacttttattgggagaaagtatttagttaattttagccgtataataagttgttttgtgcaggattgtccttgtgactatgaagtttggctgaatatatttgagctttaacccgtctgtgtcttaatattcaagtcctgctagagctaaaaatgacttcaggctaattttatggcatttcgtagtacttatagtacttttatgcagtactcaatattttatagtttatctttttctgtttgggcaaagctaccttaatgctgtaaagttatctgatacaatattagttactagtcataatgactataacacaccatagtctaaccctttttatgactaatttgcatgaatcctgatgcttttgctcaggccaagccagagacattgaacaaggtgtgcgaaat

SEQ ID NO: 76914 - DNA, 399 bp, Carica papaya
  Intron number 1 from transcript evm.model.supercontig_16.1 07 (locus evm.TU.supercontig_16.107) derived from phytozom e v7.0 (chr-ID supercontig_16; pos 1651890 to 1652288 reve rse strand)
ctccttcaggcaaaaccaggttaaactaagtcctgatctctgttgtgtttttcttcttcattttgcaatctgtcgctttaatctggaacgaatttcgttttgattgaaaattttatagttcccgatcgtaaattttataagctctattggattcggctttatttgttcagagattttcgggttggtagtgattgtatttgggtttgattgatttattttctcgaacttcatgtgttttgatgtatttgatcgtgaaatcgttggatttacaagttttgagagctgattaaatgaagattttttttcgatttgtttggggaaagcattggatttattcattgttctctgttttaatgttgagcaggcatctcctaggatctctagtctccgatcagtttc

SEQ ID NO: 76915 - DNA, 918 bp, Carica papaya
  Intron number 1 from transcript evm.model.supercontig_162. 43 (locus evm.TU.supercontig_162.43) derived from phytozom e v7.0 (chr-ID supercontig_162; pos 403927 to 404844)
gttagcttaagaaagatcaacctatacttaaagaggtaaggtttgcatgtaaagaacagtggattcagataagtgatatgttcggtggactactgcaagcataaagatggtctatactttttaaggagttgtttccaaggagaagcaattggttgaatctagtgaccttggttttccctggagaagtgtgtaaccagctaggtatgaacccaaggattggtgtatatcttgctggttttcttctatgccaggatatcagatgcatatatgaatattctagtaacatcattactttaccagtgaattttaatactgtattttggcaacttgctaaatggatgaaaccaaggttacgtgttgggaaatgaactttgatagactcctaattgcatgtttaatatggtgctggccatcatgacttgttcattcaacatggcaagatccaaactgatattatattagcaatcattctaaaacctgtcatattttggtgtgacagtttctcattcttgcgtgcttcttggtatcctttttagttttcttatgggaaaaagatattgtatatctttaccatatgacagttccattgttatttaaacaccggaattgtaagtgaactgaatgctgatgcaactgcaacacgtatttggattccttttgataatgggtttggtccttgctatatctgccctgtacacacataatgagcaattttatgggatatgttttcttcttgatctccatttaattcgctaagctttcatttactaagccttctgcagctttgtattttattaagcttgtatcatattttatctcacaagagcagataattctatgctatccattgtttcctttttcttaaaatagttttttgatataggcttgagtttgcaccagctgagaaggaggtgtttt

SEQ ID NO: 76916 - DNA, 1027 bp, Carica papaya
  Intron number 2 from transcript evm.model.supercontig_162. 43 (locus evm.TU.supercontig_162.43) derived from phytozom e v7.0 (chr-ID supercontig_162; pos 404818 to 405844)
ttgcaccagctgagaaggaggtgtttttctatcaggtaatggttacaattccaccctgtgcatgcttgtttcctttacttgttcctgagtttggatacctgttatcccttggctaccttgttgattatttgaaaggagaggaataggacttttgagggtccccttagtagagatagataattatggttccagatcctttatttatttatttatttttttatattcaagggtcatctcttaattcttttgaggatttggggtaccttcttgatattttgattcatctttaaggttttcatgtgtgggttgcccccttcgtgtcttgttaatgtatgtttctacttttttctttaaaaaagaagacacctgttatcatcttctgggttcttctaaattgctctttttccctgttttttgccctgcttccagtttgtaacttttttgcagtatagatgatatttatggccataagtgtaaccatataagtaactgcaattcttttctctattgttattgcaaatgaaaaaaaaaggaaaaaagtgatggagatatggtcggctcaagttacaaatattattaatagctcgttatttggcagtggcacactgaacatatcaagccaccattgtgttaattgggcactaaaattgatatagcttttgcactgaaatgatttgatatcctacagctgatttgagcaatagaagagagagtatcaactgcagaataaggaatatattgcaaaacaatggatctttaatgaggaagataaaattgaactgaaaaagacaccttcatgatgttccattgttgtctttatttttggttttcgatactcttcctggaggactgatgatgatgtacagttggccagaattaacttccttaatgtgatgtatgcagaaatgaatctttgcatttcagtcaactttgatactaatttagtgaaagcctccatgaccattattggatgtggatatttctaacaattcagatctacaggttaaccaggctgttcttggtgctc

SEQ ID NO: 76917 - DNA, 966 bp, Carica papaya
  Intron number 2 from transcript evm.model.supercontig_25.2 2 (locus evm.TU.supercontig_25.22) derived from phytozome v7.0 (chr-ID supercontig_25; pos 322332 to 323297 reverse strand)
ctaagagaaaagaggttttgggtcgaattgggcaggtaaatttctgggtttgctatatgggaccttataatttacagaggagttcatgcttatttgtcagtttgagtcgtttttaagttaatcaatgctgttgttttgcacgatgtaaagcatgttttgccatctagcataggcatatgcttcttgatatgggggacacttatttgacattttttaaattttctgaagtgcgtgacaacatagatcaatgtttcagaatttggttcggatcaggattagtgaaatttgtattattctttacagtcttataatgtctagaaactgtatttttttactacagttcagtacacatacgatgagatgtttctgggtatcccttttccgaaataaataagggttatagattttatctgcattgctatatttttatgctcagaatacataaaccataatgtgtcttgaaaagtccaggtttttaaggctttttgttagagttaaatattataggatgtgatacaaattgaaaactaggcatttgttgtgattttgatttgggattgggagtggaattcgatgtggggaaactgcttccccctagttcatggacgatttgaaattaaagaaattctatgctgaaattatgacgatggtcaggcttttggtgcagttgagtttttgtatatttttgttcatctacttgatccgttgccagcaaatgatgtttcagaggagcttgttattagatgaatggttggttatgaccttgcaaattgttctttctttgagcatgtaaataaaacattttttttgtgttcaagaacttttatagtattaacaatttttagggttgaagattgtggtgtttagaaaaatgtcttgatgttcttctttttgcttggatttgtctttgatatatcttgctttttcttagattgtaaaagactgggtgaagcagcttactcgact

SEQ ID NO: 76918 - DNA, 1003 bp, Carica papaya
  Intron number 4 from transcript evm.model.supercontig_48.1 08 (locus evm.TU.supercontig_48.108) derived from phytozom e v7.0 (chr-ID supercontig_48; pos 649516 to 650518)
agcttgctctcagggctcctttgggccagaacacggtattgtctcgtaattcgtttcttcattaatgcttttctcgaagatcatagtgaactgtcgttgctactatattcaatctgaatatgtaaggttgttgatgttttctgggtttgttgaagttgagatgcatttctgtaaaagtacggtaatttaggtgttaatccaaaagtgaggatccaagatagtttactgtatgtcacgaagacaagtctcacgatataggtgggtagataactttggaataacttaacatcagttccgtagtttaaccttgtcaacttttgacattttatgggttctgtagatattattcttggttaaaactcaagatataaattttctatcctttaatccttgtaatatttttggggtcttgcttttgctcggtatcctggctagtgtaagtagattaattgcgcgcttggaacccgcttcaaaattttgtaatggttcttgattatatctgtttggttttgtacttcagatttaatcagtgtccaacatttctattatttcattttcctctggttatcttggtatttaattgcaaagagatttgatctagaattttgtttatcttaaatgtatgcgcagatcctgttaatatcttttattttgtttctcatgtaggagattgtattttttaggttcctagccatccataaaaattattgttgttgtagttgataatttctgctctttttttgatacttatactgtttctgtcatcgcatttgttcattcgccagttccatgtttcgatcttcactgttctcacctatgaaaatggagcctgaatcagtcccttttgaaaaccgaaagaaaatatgctaaatgaatgcccatcagttttggtcttttgtatgaaactagagcttcgttcaggtcccattctgaataccaaaccactaatatgtaatgaatatctatttgtttggtttgcaggttcttctcagaggcccaaaga

SEQ ID NO: 76919 - DNA, 581 bp, Carica papaya
  Intron number 1 from transcript evm.model.supercontig_152. 12 (locus evm.TU.supercontig_152.12) derived from phytozom e v7.0 (chr-ID supercontig_152; pos 70549 to 71129)
aactgattttggcttgtccgtgttcattgaagaaggtgaaaaaatctagccttttcccttttgttttctagagttcaagttaatttaccgtcaagagtttattgatgggttcatgatgtgtgtttggtagaaaattcccagcattttatgaacataattctgtttacgttgatgctaagtattgactattatgaattttagcatgttgctgcttattagcctgttcaatgtatcttgaaatgttctgttaaagcttgcttcaatagaactttgctttctgttattgttttggaagctttgtgggttatctatatcttttggtttgccttcttatatgggttcgatatggttttccctgtggttgattctgtcttttatgtttgtttaggaattattttttggagaactcttttttacttagttttatggcttatgcttcatttatatgtgacatttttggcatcggaataaagttttaactgtctacgtttatcaagttattcatttcttttctatctgttcggtagccttaagttcatatctggactgaccattttccaaaattgtgaatgccagggaaa

SEQ ID NO: 76920 - DNA, 634 bp, Carica papaya
  Intron number 1 from transcript evm.model.supercontig_0.62 (locus evm.TU.supercontig_0.62) derived from phytozome v7 .0 (chr-ID supercontig_0; pos 2303941 to 2304574 reverse s trand)
tctgttggtcgtcttcatccgccagcatttgcaaggttcttttttagcttcttctttttttaatgtgatgaaaaaaatatctgaaccattctgggtatgtagagtaggttcttaaaggcaatccctgggaggagtagttgcattcctctcaatggatattaggtgtttgaattgtttccataacttcattactgtcatctaactctaaaaccccatcatttcagagtttcataggtaaatgtagcttttctataagccatttgaataaattcaaagactggaaacaattaaaatagatgtccttttcagcacctgagtttcacttatttgattagttatatttttatctcagccttagtataatttatgctacttctcattaattatttcagtttatataatgaagtgataggcattttttagtcagttatgctctgcccattatgtcttctcccctctcacccaaatgcgctgacatctggtttctaagtatctaatcaagtttgctacttgtagagttgattttcttactactaggcatgagagctttcaagatactgtcttcttttgacttaggagttttgacttgtgaggacttgcaggtttctttgtcacaatttggattgctgctgtc

SEQ ID NO: 76921 - DNA, 773 bp, Carica papaya
  Intron number 1 from transcript evm.model.supercontig_193. 10 (locus evm.TU.supercontig_193.10) derived from phytozom e v7.0 (chr-ID supercontig_193; pos 255476 to 256248)
gtaattactccacgtccaggtaccccctttgagaggttaatccatcaggtttagcttatcaatcttatctctaaactcctaagcgcacacagagggaaagttatcgccagacatttcacttcgccacagaatcatgttgaagtcaccaccaaccacaccctggttcccccacttgttctgatatggagccaattctttatccattctacaaataaattagggggctactttgaaataatttttgtttttctaatggttttctgtttctactatttcagaaggtcttaaaagatgtcttatcctcctcttatattgttctcttctacaatctttaataatttcttcttttatccaagaaaagaaaaagaacaagccctcaggacacatgatcttatgcttttgccatccaccttaaatataaggatccatgtttctcttcatcatagagtcaacaatttcattagtaataattgctgcatcaagaatttcgcatcctcccacaaatacatgatagtaattcccaaccacactacccaccactcattcaagttctttaagccaaatatgtgaagctcggcacaagttgctgttattatttataaatagcatggtttttggagaattcgaaaagaactgagtaaaaatcaagtcccttctcttccctatttgttctagatagctgaatcatattattttccatgtattgaaatgttaactatttattatcaatttgttattctcaacattagtactattatgttgacaggtacagg

SEQ ID NO: 76922 - DNA, 643 bp, Carica papaya
  Intron number 1 from transcript evm.model.supercontig_213. 2 (locus evm.TU.supercontig_213.2) derived from phytozome v7.0 (chr-ID supercontig_213; pos 31106 to 31748)
cttaaagtaaaataaaataaaataaatcaatttaaacactctgaatgagtatgaatttctgcaactacaaaagattctcactagccaatcaaacttgcatttgaacagattttttaacttgaagctgttgcttcgtgtcttttctctggtttatacgcttactgggttatcaacttcctccgtgtggtttggtgtttgtggatatactattttctcaacgaaaatatttatttatatatatatatatatatgtatatgtatatatttgtaatcataaatttaaaagttcaaatatatttttaaattttatactttttttctctatttagtttctgcctcaattttatgctaaattattattattttttaatttttgaaaaatattggaaaatgctgttaacatctgccacatgttattgtgcttgacaacctaaaataatttaattaattatttttgaccgtcagatgttatctgacaatcttatttgtaatttaatttacagataactcccctctcacgcttttctctcttttccttatcttctttccacctctctctctcctctctctctctctctctctctctctgtaatcccgttttcgtgcagaacataagagccgctggggagcaggagacggctct

SEQ ID NO: 76923 - DNA, 501 bp, Carica papaya
  Intron number 1 from transcript evm.model.supercontig_12.1 66 (locus evm.TU.supercontig_12.166) derived from phytozom e v7.0 (chr-ID supercontig_12; pos 1510174 to 1510674)
tttggaggttaaaaaaaaaaaagcaaaagggggctcttagtttgctagccagactaaactgggcactgttttgaagggtctagaagcatgaaaacaagctgttaggataggtatgcttcaataggtctaaggcttgatacactgatccacatgatacctgttattataactttttgatgtgcttttaataggtatttagtagaaactttttagctaaaatcgagcccatgccacctgggatgggtgaaccatttcccaaatccaaatttctctaaaaatgactagagactactttagtgcctgatttgcttctaacaagatcaatgattactctttttctttaatttgaattatataagtttattttttgggggttgcaacactaaggttaatactattaactttgagattgaattttttttggcatcttattttagtagattgaatttcattgaaaagaaaatgtttgcttgtcattgcaggataagaacaccactattt

SEQ ID NO: 76924 - DNA, 370 bp, Carica papaya
  Intron number 1 from transcript evm.model.supercontig_21.1 35 (locus evm.TU.supercontig_21.135) derived from phytozom e v7.0 (chr-ID supercontig_21; pos 1462964 to 1463333)
gaggtaagtgagatcgaaactacaacgactgcatcttgttcttggttgagacagagaacgctctatgttatcatgatgtgtttctgaagtagttgatctgattattgtgtctcaattttgggacttttggtctaatcttaatctaattagacgccttgcatttttagtgctctgatgcgaattatcggctttgagtttttttttttttttatatatataatatgaccattagatgataaccagtgcaattatactttccaatttcaaaagggtgaaagttttacggaagattttggaattttgggtttctaagaaaagttataggttttagctgactgggtctgatcttccatggtgtgttgatattcag

SEQ ID NO: 76925 - DNA, 860 bp, Carica papaya
  Intron number 1 from transcript evm.model.supercontig_27.8 9 (locus evm.TU.supercontig_27.89) derived from phytozome v7.0 (chr-ID supercontig_27; pos 1059558 to 1060417 revers e strand)
ttaagattttggacgacaattctgaccccacccaggtaggtttggtactagttgtgtgttatcgaacggggctgcgtgagccgggaaggctaatgtcgttgaattctgtggagtcttggggtggaattgattatctggctttacgttgcatggtgtatacttgactgagtaaaattcaacttgtactgcaacttttaactggttggatcatttgatgtgattttaagttcatgtttttatggcccaatactgctttctcttccccttttttcccgaggagatgagttcggagattggttattggtggatgcctataatggctaacatacatacggaatcgtaattctgttgattttgaaaaatttcagtaaatgatcgcctgaaattagttaatttaggaaaaaaaaaatggggaacatttggcaaagaatatgatgtgtgcatttggccttggagagtagtagaggaggaataaagtgagataccgagcttaataagtgtagataatgaagcatttgagtgaactaacagttaaagagtaatatacgtgtatatatagaagtatatttttgagtgtgctctcagaactctgttgctagctctcaaagtacataagtgaaaaagtaccctgcaattgttaaattaagaaacaagcctgaaggggataaagatctaggcatgattatcgtttccttttgcatcttgcctttctctgcatttctattttaaagcaaaatcatgcatgcttttcaacatgttttcctaaagggcttttcaatgagcattcagccattggatgctgaactaattatcttaatcttgcaggggagtcaagaagatcagccaccaaacaatttgtc

SEQ ID NO: 76926 - DNA, 852 bp, Carica papaya
  Intron number 1 from transcript evm.model.supercontig_150. 33 (locus evm.TU.supercontig_150.33) derived from phytozom e v7.0 (chr-ID supercontig_150; pos 323825 to 324676 rever se strand)
ctgtaagtatatataacttttcagatgtacactcgaacgtataccacacatgtatgccgtatagatcttaattaatatctaaaattatgcatatttttctctgtcgatctggagatacaacatgttaatgattcatgttgtgagtgtatgtgtatcaccatacatataattataactcagtactccatgatgtgaaatgaacttgtcgatttaaggcataagaggtggattatcgtgccgccttcgcatatgcgtatataatggataaaaaatatatagatggagagatctgtttgcaatctcctattttctccacgagatgaattaggagtgcggatatcgattcaggagtgtgaacattacttttcgctcattataatactaaacacacacacacacacacacagcaatatcttttgattgaggagctaccaaattggtcatcctcatctttttcttcacctgtgaatttttcaaacgtgttcaatgaagtttctctttccttcaaaaaaatatataaactaatcagctttttattttttgcagtgtttatcaatttacaattaaaatatttataattttgttataaattagttttgaatatcctttatatataaattaaaaattagctgcttcttataaaaacaaattgcaaatatttaatcactaaattatggaaaataattaaaattatttcattgaaatatttttgatagatcaagttcttgattataaaaaaagaaactaatttatatttgaaaaaaaaattgtggtatgcatatataactatatgaaattgtcctttttttttttgcaggtagccatattttacctggttctccgagctcttga

SEQ ID NO: 76927 - DNA, 890 bp, Carica papaya
  Intron number 2 from transcript evm.model.supercontig_227. 2 (locus evm.TU.supercontig_227.2) derived from phytozome v7.0 (chr-ID supercontig_227; pos 8542 to 9431 reverse str and)
ggagaataaccacactaggcatcctccaaaactcagtttttattcattgtcaatttaaaattgagtaacattaactatttctgggtagtctttcccaatatatttccacaaattagagccatatgctcttgaggaacatctctagccctgatgatcgtccaccagaacttcccacttcataaaaggacaatctatagccatattagcttgaacagccttattaaaagtagttaaaaaaccagatgcctgagccttatgcagaaatggataatttgatggggggtaggaatcaggattggatctgtacaaggcatttactgacactgttggcataagcatgtccttgcaatcatgtagaaatttaaaaatttatacaatgcaaattaaaacaaattggcagttctaatgtttataggttgtgcatcaacatggtttattcaaaactattctgatattgatctagaattaatctggttgggaatctgtaccttggccaattggttcaatctttggttccaatgcactccaaactcttcgcttgcttgctgcaatcctggaataagagtaaatgcctccactctaatgttgtctacactaacaaacttttctttgacttggagtggattaattcgcttaagaactagataatgtttatttatctcttgtgaattttcgagaacgaagaaatttctcttttctctttttggtggctctctctatcttttttgaaagaaaaaggtcactctatatgtgccagctggtaggtagaagaggcaacaatacaaaagggaaaacaaagtgaaaactctgttgagttgtgcctcatatttagagaactctactgttcagaaataggtactggtaaacaggtggaggattggtggttgtct

SEQ ID NO: 76928 - DNA, 1001 bp, Carica papaya
  Intron number 1 from transcript evm.model.supercontig_10.1 19 (locus evm.TU.supercontig_10.119) derived from phytozom e v7.0 (chr-ID supercontig_10; pos 1762142 to 1763142 reve rse strand)
gcaaagtgaaagtaattaagatcttgaagttgcgtgcgatttcaattagcacgtgtaatatttcttattttcttgatactcaaaatgttcagtcgaaatgtaagtctaaactcaaattgtaattcttgtatatttgcattaatttgtccttgttcatctggctaattaattacaatgatctactataaatactgacgtctctctctctctatatatatatataaatatacatatgtatatatatgtttatttaaacattttaaaagtatggagcattagttttttcaattgatttgttgggttcagggtagaattattattttggctgtacatatttatatatatatatatatgtacctgcaaaacagagaagtacgagctataaaattggcctcaataattactaatgattttttattaaatttttatttattttatttgtatttatagttaagatctgttgattaataagagttactggacggatgatcaagagaactgagttcttaaagtattgagatttgacccccaaagtacatttacggcgtcgtttagagaaaaaggaaaacagaattaattagcttccttattagaacttaaatctatttccaattaacttacttcaatgtacagttttcttccaactttctcgttttggtcccttttcaatatcaaaactatggaaattaactgaaaaatacgattgaatgatctcttcaagtggcctgaaatatctatcgtctggtgacaaataattttcttacaattacactatatatctccattatttactctgtttagttagctgaatcagaattcttctggaatacataaataaatattggagaacaaaagcatgcagaatacatataagctacaagaaggacaataagaaaattaaaacatcaaaatatccacattatttgttaatatgaatactgtatgcatacgggaactaattcatagagctggagtctgattcataagctggaggagaatca

SEQ ID NO: 76929 - DNA, 904 bp, Carica papaya
  Intron number 1 from transcript evm.model.supercontig_25.2 04 (locus evm.TU.supercontig_25.204) derived from phytozom e v7.0 (chr-ID supercontig_25; pos 2104023 to 2104926)
aaggtcaccctttagaattttatttttttctggcagtgaaggtcaaatagaacttttagagagttctggttttaaatctggagctttgatactgtgtcatgaataattatgttatattctcattaataatacgtgtacttttttttaaatacatccctatatataatagctacaaataatcacaaagattgtattttactttaatatcttttaacctaatttagccgtatttatacataaagtacattgtttaacagtgtttgaaatgcatcaaaacaaaaccttgattgagctttgatatgtgtatttaagagtgtatgaccagtagaagagaagatagagttgcctaaatgactgaaatgcacttgacaaaagacttgctctctccaagataacaaaagttgtaatattatcaaactcatttgtgcatctgctggtcattcatcttttattgcactgtttgtggcttcttttgtgtattgtgttgatttgagttcatcatctggtatatcagtgtggttggtgttgtattggcttgaatatatcatctggtatatcagtgttattggccttgtagggaacttttcataaagttttaatatacttccgtatcagagagagtttagtaaaagcaatagtccaatgattaaacctagaagcaggaatcagagagacttccaaaagaatgcatatattgaaaaggagcaccagtgttagcatataatctcacatggatcttgtcagacaaaacatttattaagcaaaatccaaagaactagtttcagaccagttatcatttttagatgttatttgcttaaattcatggttctgcagtttcctcatgatttccgtgtctttatattgatgtttcagggaagtgagaagctcgtacagctactttcac

SEQ ID NO: 76930 - DNA, 369 bp, Carica papaya
  Intron number 2 from transcript evm.model.supercontig_43.8 3 (locus evm.TU.supercontig_43.83) derived from phytozome v7.0 (chr-ID supercontig_43; pos 1061740 to 1062108 revers e strand)
cagcaccaattacaccatcatcaagggtaaatgattaagattctgattgagcattgtttatttgttttgagctcaagtttattagaatggattcaaaatgattgcaaattaatccaaactgttgttttctgaaatttaaaattggaagtcaaaagaatctatctgaccttgattaatgcagcattctcttgtcctagaccttgtgtttgcactttgcttaaccatattctttgctagagtaactagattttgcagataaaactgctttttctatattctttatgtggtttgatatggtagttgttctgtccttatcatttttgtgacttaacagactgcgtctttgcctcctatatcgccgcgaggacc

SEQ ID NO: 76931 - DNA, 983 bp, Carica papaya
  Intron number 1 from transcript evm.model.supercontig_1815 .1 (locus evm.TU.supercontig_1815.1) derived from phytozom e v7.0 (chr-ID supercontig_1815; pos 1010 to 1992)
agcttgaaaaggtgaactagtagttgtacgtttatgtgttcatcttttttggggctttcaatttttgtgttttttccccttctgtcttcttctctgtttgcctaatgaaaaatttcatggacattaagttagtaattctggtatcgatttatgcctcgtgttgttgagttttgttattctaaatgaaactgtctctcgtttttgcacaatagttgtgcagggattggtttgagttgaagaattgttgcattggatagattataattcaattggttggacaatgtcttgtcttctgttagtaaccaaaatgggcaacctagagagtaatagactgtgtgaaaatttccggatcaatgtttatgtttctgtggcggagaaattgtagaataactgttttaaatgcgtgataattgccttagcagatgtgttttctcttactatgttgttaaataacttttcttgtgaatatttaaagaccgatccccttcttttctcattgctgcatgtgttccactatcatttgaggtagatttattgcaaaatctgtttctcttttcgtgcagactaaattagggttcattaggtttaattcttttgcttaatcacagttttggaatgattaagcattcattgtggtgatggcttagttcagtaccagttagctatttgtagtgttgtgcatctgggtgaaccaagtatgattcttttggaaatcattttcctaattctcaatttggccatgattagttacgcttaggatttggttttggctattttctgttaaaatttagagatgagttatgcaaccaaaatttcttgttttaccttatcacgctgatatatagccacacatccacttctacctgtaacaatattgctcttcatattttaatgactaatgtacttatcagcttgccagtgaaattccaacttttttaactgtttgctcttttgcttctgttgcatttatgtcttgtagatca

SEQ ID NO: 76932 - DNA, 846 bp, Carica papaya
  Intron number 1 from transcript evm.model.supercontig_130. 32 (locus evm.TU.supercontig_130.32) derived from phytozom e v7.0 (chr-ID supercontig_130; pos 398005 to 398850 rever se strand)
gagtgccaacaggttaacagagtacatcaagggaaaagccaaggagacataaaattacttatagtcaaaacaaagtccaccccagcattcttgtctcttgagggagggggatgtggaacagacagcacttaggatgtacttttcagtacacacatttaataatatagagcaggtcatggagtgcacggagaaagaagaatgagacatgagtcagaagtacaggaaggttgaggattgatgtttaagaatttgagatagagatggagtttctgaagaatgagacatgagtcagaagtacaggaaggttgaggattgatgtttaagaatttgagatggacatggagtttctgaagaatgagacatgagtcagaagtacaggaaggttgaggattgatgtttaagaatttgagatggagatggagcttcttcaccggttattttaagctgcttgaacatggtttggcaaacccaatgggaggatgtggtttttatgcagttaaattgtgaacttcatagttcttaaaaagaaaaagaatctaaaccttgaagataaaatgtgttcatattttcttttttttttgaaaaaatagaaaataaaatgtgtttatattttatttagtattattcattaacattagaattcatcactatctttatctctttaaatgagaaataaaattaactgagtgaatgctatttaaacaattttatagaaaataattatattctgttaaaacattgacttttttgtttttctataagaaagaaaagtaaattgcaactctgattaagtttagatgaactaaatcttggtgcagactggaaaggcagaagaggagagaaaga

SEQ ID NO: 76933 - DNA, 878 bp, Carica papaya
  Intron number 1 from transcript evm.model.supercontig_115. 48 (locus evm.TU.supercontig_115.48) derived from phytozom e v7.0 (chr-ID supercontig_115; pos 680518 to 681395 rever se strand)
attcctgtgttcagtccaaaaacagtgagtttgtacttccattttcaaaccctaacattattattggtttttgaagaatatagtttatttgattgaactgtcggtggctctgtctgtatgaaataattttgttggttcaaccatttctgacagcttaatctggtaagaaaccggctgagtaatcagaagaggatgctactatgagattatttttggaataatttaagaaattttgtaaagttttattttctattcaaaaaacttatttgtttcaaatcatagcttaaatttgagagttagacaatattcatagcattaacaacacagttttcttaactgtaacaggttggtcacaataggaagagagatctaaaatttgattacaatgactgtactgacctccttaattttattttagtttttcatcattacccttaatctatgaatattcataaataaatccagtttttgttcaaaagttgtttgacaaatagttcttgtgtaggtagatattaaatagcagatgctgtttatatatataatacaaaacaaatttacagacaattttaaatggttgaaacaatatgtcctcccatttcatagttataatatatttatatatatgtaaattttttgattaattttcctttgaaagtctgtatgttccgaacatgtatggtgtttggtaagttattgtacttgagatccagtagtttttgatggttctttgaagttttgctacaaacttactgagggctcaaaaaaaccataaaggttgccgtgtgtgtgttatacatgtgatattgatatatatatatatatatatatgtatgtatgtatgtacgtacgtatgtaaagcaataatgggtgtgttacag

SEQ ID NO: 76934 - DNA, 584 bp, Carica papaya
  Intron number 2 from transcript evm.model.supercontig_146. 11 (locus evm.TU.supercontig_146.11) derived from phytozom e v7.0 (chr-ID supercontig_146; pos 54140 to 54723)
cttccattcctgtcataaaggtctttcttccttgttaaataataatcatatgcttgttattgttttcttcttacatttatttacccgcaaaactgaatcctcaaggttgatgctgaagactattcacctttaccttcattagaaagtgtgtagatttgatcattaaggtgactttacaaggtcatgctataaaactagtgtatttgggctaatcaagtagaacaatctaggaattttataaagaaaaatacttgttcaaattacctatcgcacataactagtctgcttattttgtgcgaaggaactggaacagttgcatctcgctctcccttcctccccaacctcctctctttctctctctcttccctctctcacattcagcgtcaataatttcagaaagctcagtatgcaattttacttagtggaactcctgctttatctagaccaattgagctttttaagcaggtatcatcatatgttagtttgagatttgcaactttcaactccaagaatatatggaagtaacaggataatgtgtttgttggaaattgtgtcctcttgacagttggaagcgttgtatccag

SEQ ID NO: 76935 - DNA, 339 bp, Carica papaya
  Intron number 1 from transcript evm.model.supercontig_2.11 (locus evm.TU.supercontig_2.11) derived from phytozome v7 .0 (chr-ID supercontig_2; pos 90058 to 90396)
gaaaagggtacagcggccgaaagtggctgcccaaggtgtaacatggagaaaactgcccaacatactttttttgaatgtgaaaaagcggtaaacttgttggtccttttgggtatccgaatacagataattcaggctaatgacttgtaatgttggatagaaagtcatgctcgacagaaaacaaaacagaagatggaggtattttttgttgtttgtggagaatatggctagaacgcaatgaattattgtggaatggaaagtattttaacgatcaaaattcacatttattaatgaggaagttcctatttaagtggaaacaggtacaagacatccaggaaaaag

SEQ ID NO: 76936 - DNA, 771 bp, Carica papaya
  Intron number 1 from transcript evm.model.supercontig_39.4 5 (locus evm.TU.supercontig_39.45) derived from phytozome v7.0 (chr-ID supercontig_39; pos 791170 to 791940 reverse strand)
gattttagtaacaactggcccagggttcgttttatctcttttcaacggttttctcagcagagtattgtttttcgagaagaataatattgaacggtttgatcttgatgtgaggccacgttttaattgattttattgataattcgagaaattgattattgtattgttgattcttgccgacctataaggagcggcgaaatgctcgtgagatggtgttatatggttttctgagatattatttgataagaaaaaacatcttgtttgagtttaacaatacatttgaaacaaataaattcacaaaaaaatatgaaatctatttgcaaatctacatttttatgattagaaccattttaaactgttgagttcatttcacataggattgagaagtatatttggattttattaaatttgacgaagttaagaaacgaacttaagagtttcgaggaaaaaaaaggtcagaatgtgttctcttgtatctcttcaagtttattagtgattcatgaattacaatcattttaataaaattatcactgtatatttcaaacatgaaaatttaaattcaaaagaatatcttctccaattcatttacaaatgaaatgaactttcaagattcagttacttttaacaaagcttaaaaaaattaaaatgcattagtccaaaaggcgaaacaagagaaaaatgaaccagttcaattgtatgtttccattctaatgttttcttaatcttgtctcgttttcctgtcttttttatgtttgcagtacaggaagcagctaa

SEQ ID NO: 76937 - DNA, 489 bp, Carica papaya
  Intron number 2 from transcript evm.model.supercontig_10.2 23 (locus evm.TU.supercontig_10.223) derived from phytozom e v7.0 (chr-ID supercontig_10; pos 2795674 to 2796162 reve rse strand)
cagctctctggcagtaagagtgttgaaacaatatagtaagctttcatagtttgtaacttgaattaatccattgtgtagttgaattttgtggatgttcatgcacagacgtaagaagagaaggattgtgtgtgtttgcgtgcatgcatgcaagagtcctttattgtgtccgtatgtgcatgctgcaggtttatatatgttcttagtaattccaattatttgattctacagttgattttatgtctatgagagatagagacggcttccttgtgtgtgagaattaatccattttatgtatcatatttgtatggtgaattaatttcctgggggctggatgggaggaagggaggaagagaatgcatacaccgagccgtttctataaatatatacacacacaaaaagttgtaggcttttaacttttcctatctaatgcgtccattggttatggtatttctctcattttggctgtgatctctgcaggtgtgcctttaa

SEQ ID NO: 76938 - DNA, 812 bp, Carica papaya
  Intron number 1 from transcript evm.model.supercontig_10.2 23 (locus evm.TU.supercontig_10.223) derived from phytozom e v7.0 (chr-ID supercontig_10; pos 2796227 to 2797038 reve rse strand)
tatcaagtctaccagctgcccgttctggtagaattgtaagaatcaagaacttttaactccttaacaattgattatacggtcagattatcgcaggatgcaagagaatagttttgcttatcaagagagaataattttgcttatcaagtacttctagctcttttaacatggcaagataagggcagttatcaagcaaagtactaagacaggataggcaaaaatgattttttttttttcgctatttcagttgtttgactgtgtagattcagttggttttaacatcaataagaatttgggagaacatattttagttattgttggcaacatattctatcctatcaaagatatacaaaattagcaggaagtttatgcttatatttccatttgtgtgagtttaacaaaaaagaggatcaaagtttgggttgagagctctccgaggtgacggcttgcttatgggatcaactcagtattaaaatttttataaatcataaaaatagaagcaataatgatacatcatagtttgttttgaacctactggcaggtatctggagcattatatcaaaatggaataagatattctacttctgagaccaatgatcctgacatgcatgaagactttagaccccaccaataaggattaataattcagctgtgtccttgaaggatgtagtggagcaggtggagttatcttctgtctctttttttgttatgcagataagcctattatgaatgtttgaccataccttattatttataaaagggcattttttcacttgtaatccatgtttaatgatagtgattttcttctggatagg

SEQ ID NO: 76939 - DNA, 636 bp, Carica papaya
  Intron number 1 from transcript evm.model.supercontig_33.1 58 (locus evm.TU.supercontig_33.158) derived from phytozom e v7.0 (chr-ID supercontig_33; pos 1614350 to 1614985 reve rse strand)
tcctcgccgctaaattggaagaacaaaagatcgatgtaatttcccccttcactctcgtagtttcgtttgctcttctccttatcttttacattttagatagtttacatgtttcttttatggattttttctgcgtcgaattcgattgtcactttcttttgggtacttctgattggatctgtatatttgtttaattttgagttagggttttgattttcacgagattggtgtattattattctgactacgtgtattagatctaagggaaaaaaatgaaaatagaaactcccttgcatagcatcgaaagaaatacaagggtgaagaaagagatctaaagtaaaatttcattaatggagttcctagtttgagttagttatagtatgaaacggacttgaagttatttcacgttcaattttatccgttgattattttttctcaaattcaattgttactctataggatgttctgcctgcaagttgttatactcatttgatctatgcttttgtttgattggttatttggaagttttgcttgatttcatcattggcctttatatactcatatcttttgattgcacacttgggtggtttgtttaatgatgcaatttctttttatagccggataagcctgtgattgaag

SEQ ID NO: 76940 - DNA, 574 bp, Carica papaya
  Intron number 1 from transcript evm.model.supercontig_111. 5 (locus evm.TU.supercontig_111.5) derived from phytozome v7.0 (chr-ID supercontig_111; pos 112053 to 112626)
tctccgtcgtcgatcaaccatcgaccccgtcaaaggtaatacatatctggtcactgatttttcttcccgatattttttctcggtttcccgcccttgtggcctaaattttgaataatttccttcatctacttagtttaatcaatataatgctccactgtttgttctatgacttgtgaagcttccctcatgtatgtacaagtttggaatgtagagaaataaatttgattgggttagaatataggaaaacagctttctgaagaatgaatcgttgtgacattgtcctaaaatagttaaagtatcaaatgaattcgtttaatgaaaacttaatggtcaattggactgtttccatcgcctcaaggatttggaatgcatttaattgcttgttttgtaagtaaggtgtataagtctcaatgcatttgaattgaaaacttctggaaatctgtagaattcttgaatctttatataagtgaagtagatagtaataaaaatttagtagttattactttttccagtaacatagagagcttattgtgtttcagagtagtagttggcagtggaaattcaaggacaattt

SEQ ID NO: 76941 - DNA, 971 bp, Carica papaya
  Intron number 4 from transcript evm.model.supercontig_3.28 2 (locus evm.TU.supercontig_3.282) derived from phytozome v7.0 (chr-ID supercontig_3; pos 1986228 to 1987198)
aagaagacaaagaagcttcctcctgtctggaaatagtaagtctgctgttcttttttttttttgcttggttagacattgtttatgtcagcttgagtaacttattctgtgaattcaggtagatttagttcagtcagtctattgttcaatttgcttctttcttgttttcccatgaaatacttagagttctatgcttgtcagtttcttttttctttttgattttggtagccattggttttcaagcatactttgtcttccgttcaagagtctgtgtctcttctgtgaaggttttttttttttttgtcttgtgaaaatatttttttaaagctttttcaacttttgtggtcttaattgtcttaattgtttttagtcatctctccatttttacagtgattgaaatatactggcatccctcatacttgtaactcgtttcctggtcttcttttgcagttgacagtagtatggggaagtttgttgctctataagttttgttccgtttcttgcattagaataacctgatgacaagcatttttgataaatttccttgtgacaagtattaatggaaaagatgaagttgatacatttgatccatagtggaagcccattttgatcttctatgtgatcacaacctaacaccctctggacgggaaatggaattcgaaatagaaatgatatttgacttcattggtgttcttgcttctttcactgactactgcaaagcgttttttttttaacttttcttatttagttgtaagaaccttgttttggttggcattcctagcaacagttttggaacttttgatttgagaatcatgaatctcaaatcctgtagctcatctgggaatgttggactcacttgcaatcttctcatccctttttatttgcatgtgattcttagcatatgtcatgattttgatcagctcaattttttgctttgcagtgagtctacgactgccagcactctcgtggcgtag

SEQ ID NO: 76942 - DNA, 942 bp, Carica papaya
  Intron number 2 from transcript evm.model.supercontig_33.1 24 (locus evm.TU.supercontig_33.124) derived from phytozom e v7.0 (chr-ID supercontig_33; pos 1238487 to 1239428)
gtcagaaaggaggattacttaaatctggctgacctgtatattgaactatgatttttgtctcagttgtaatttatatcctttatctgtcatctaactttttgtttcattttgtaagatcatatttgtctttatgtttcacgtcaagaaatttgctctctgctggttatttttggttccaaggtgttgtttcttcacaatattatccctatcttgataatgctgatagatatttttgtaagcctgcgcagaatccatccatcattaaggaaggagatagcaatgtgtgtgataatccatgtaatagttctgatggagatggatttattgaactggaacaaatattaaggcagaagacttttacaaggcaagttatcgtaagcagcatgtttttatttttctgtataagatattgagatagaaagaagtgatttaaaaagttgagaattaccatggcttgtgtttggtgattttaccttatgatgtataaactaatttgcatggcagtcattccttttcaaaatataactgtttttgttatagtcttcgcttttccataactttatggccagaattttcttgccattccccaagcaaacatcacttcctagaatcagggagaagttgaaagcagcaatcaggagggaaaattgatctgaaaccagcaaaaggagtcagattatttccagtttttagcagttaggtcacagattgctgctttagttggctaatgtccaatgtccaatgtgtttcttgactttttaaggttgtcattttgattgtctttactgttgcttcaataggagattcatgcaaaaccatattttatgatcagtagcattgcatggatagaaatatttttgcctttttaaatacgatgttattgatgagtttaattttgaacctacagatctgagattaatcgactaaccagtttactgcatt

SEQ ID NO: 76943 - DNA, 630 bp, Carica papaya
  Intron number 1 from transcript evm.model.supercontig_2.17 9 (locus evm.TU.supercontig_2.179) derived from phytozome v7.0 (chr-ID supercontig_2; pos 2517005 to 2517634 reverse strand)
agaaaattaaatcttcaacttttaaaggaaggtatctccacaattaattaaaatattctccatttagaaaagtttccttataggaagatcatatctatcttattttagttgtaacttttaattttgcttgttttttcattctagtctagaattaattttctatgtaatttttacaattaatttgggagatttattttctttataatgcacatgatctacactataaatagattttcaattcatagttgtaataattcaagttttatccaataaaattataaagttttagttttcaactagggaggttttcttcaattttcttgttgaatgaggattgattcaacttatcaaggtaagttcttgtgccgttttatcaatttgctttcaaatcgatttctaatttatcaatttcatacttatggggtttttaatcaattcaaactatcttaattaccttaattcataattccaggtgaattattggattaaatagggatgatttgttgagggtttttatgattctaaatactgatgttacatgtagggtttttgatccgttagttgatctcaggttccgcattagcaatagtgctccatttgctacatttggtctctagaaactgaaggctc

SEQ ID NO: 76944 - DNA, 957 bp, Carica papaya
  Intron number 1 from transcript evm.model.supercontig_49.1 40 (locus evm.TU.supercontig_49.140) derived from phytozom e v7.0 (chr-ID supercontig_49; pos 1058883 to 1059839 reve rse strand)
agaaggttccattatctattggaattataatttaggtaagatatacatctttaatgactatatattaatatgataagagtataatatattaaaatattttatttttaaaatttattattctttaaacaattactactgaacgtatatattaaatttcaatatatatgatagtaaaattagatattaataatctttattattggtgtattattattgttgaactttcaagccattaaaagcgttaacaatatttttttcacatctatttactccttggtgaagaatacccaatatattatttttaggaaagatagtttacatctgaactcgtttaatctgatccgttcaaattctattatttacgttttcttttttttttttttgttaaaaatgtgagtttggatcaaatcgagttcagattaataagaaaagagatgcaaataggtgcgtgttcgtgtagttttaaccttctagaacctgtttaaatttgatctattggatatatatttttaatttttatcattacacatgtaaagataattatattaatgaatataataaagaaatattagcaaatataattatatttatattgataacatcagtatatattattatttgtatatattaataaatatttttttatttttttataaacacaaatataattatatttatattagtataataaaatgatcagattaagttcttgttgaatatcccgcaaacccaacaatgtttaaaaaattaaaaagattcaaatttattctgaattcaaaataggtttgggtttactctttgtagaggaagattgaattcgaatttattaaaaaatctgtcaaacttatatcttgccatccctaattatccaatatatattatttttaacacaagctaagtgtatatttatttatcattagagaactggcaacttacttatgaattgttgtaaaatag

SEQ ID NO: 76945 - DNA, 578 bp, Carica papaya
  Intron number 1 from transcript evm.model.supercontig_32.3 8 (locus evm.TU.supercontig_32.38) derived from phytozome v7.0 (chr-ID supercontig_32; pos 501924 to 502501 reverse strand)
aaaaggcggaggtgggatttgaatcggaccgtctttgctctctctaagttgatcttgtgagattagtagtggccgcttgttgaagctgatgaagataattctcattttgttcttggacgctttcggtggtggatttgtatacggtttgtttgaagttgatcactgcgtcactttaaatttcaaggaacatatctcttatatgtttttcggtatctctaggaagtaggaatacagctcagttgccatagaatttgatgggttctccatgtatggtgagctgtgatttgctgggatcaatctgagatggattcacgatgacactctctgttgtcatttaacacaaaattttatcccaatatgtttactatttaggtaaaaaagtaaggtattctttctaacaacttgggccttccaaggaaataagcataataatgaatcaaattttctcctgtatgtcatataatttaaataagcatgttatggacgaatttgagatttgagatattaggggaccaattaattatgcttctttgtgtttgttattttgtatttatttacaggatttacaatcaaccagc

SEQ ID NO: 76946 - DNA, 1010 bp, Carica papaya
  Intron number 2 from transcript evm.model.supercontig_5.27 5 (locus evm.TU.supercontig_5.275) derived from phytozome v7.0 (chr-ID supercontig_5; pos 2438363 to 2439372 reverse strand)
ggtaactggagttaccattgaaatattaacttgctagtctgaagatgattcagacttaggtaaaccactgtttttcaatcaagagtgacaaataaggaaagaatatgtttgcatgcattctttgttggaatcatttattacatagttaacttgggggtatgattagatccctccattactttcttcttgtagttattggagaaagtcatccgagaatctgattaaatgcgtatacgtcatcaagtgcgaactgcccttgatgggtacatctggcaaaatttgctccaataatttattgctcaatttaagttgctgccgtatagttagatacccccttcatttttattgtattttttagggagcttctatcagaatttgttaagtttctgtacggttatcgagtgagaaacgctctcaactagtacatctggcacaaatttttttttgaaataaatagatctggcacaatttttgttaaagttggctttgttcggaaatgtaattgatttgtttttggatactgattaagtttgtttgctcgcttatcaattatttgccatatgacatgaaagaaattgaaagacaactagcggaagtagggaaatttaattgctttcattacgaagttgatatggaatcaaggtcagaattggccaataatagatggattttttgcagaactaaaaatgtaagattcagtactttagttggtaaagtgactttttctttaaatagaaataagcttgtgtcccactcaaactagagaattagggtttggcgaaaagagagaactacctcgcaatgaatagaaaatataagtttattgaggcttacacattttgggattggtgggttgcgagtcagtattttagttggttgagtaacttatgatataaagttatctgtgtcgaatcttgcttaaactagaggttgggaattaaatcaaagaagagagtagtcttccgttgagcgatttagtcttaaatggcctcctatgcaggtgcaggggc

SEQ ID NO: 76947 - DNA, 884 bp, Carica papaya
  Intron number 1 from transcript evm.model.supercontig_3.39 6 (locus evm.TU.supercontig_3.396) derived from phytozome v7.0 (chr-ID supercontig_3; pos 2759815 to 2760698)
cctcttactggattaaccttcgctgtctctgacctgtaagctgtcatttctaaatttgtttggcgtactgttgtaaatttttttggatgaagctatatatcatggcctgaaagaatttcttcataatccgttccttttagaagaaagtacaggtgcttggtagagagaggttaggaagtgaacaattgagtcgaattattttaatctcaaaaggaaaattgtttgaagtgaaaccatgccggattcagttgaatggaggtttctgtattttttagtatcagtacttcgtgacatgctaatcatttttaacattttccccaaaatttccagttgacaactgattctttttattaataacgttatatacttcggaggtccaaaatttccagcaatcattgattagaatgtgcctgaaatcattttccagggttacttgtattgagtttattgtatgtttatgtttatgatttttttcctcctactcttttgcttttttatcgtctcaattcaatgattggacttcttttccctttttttttgcgctgaacaattcaaaacattcctagcatgtatttgatttggtgttgtgttgaaaacattcagatgttatcagtgagttcctaaatttgtctactttctactgattcaaagtttaccttgtacaaatattttaccttaagcataataagacattcaaaatatagtggaacaccgaatccttccacctcagttgagctactatactttctggttaccaggaaaggaaaaaaagggaaaattctgatggaaaattttctgctattatttattgcaagtctactgaaacttctctatctggattaagtatttttctgttatgactgtcagatttgacatcgaaggat

SEQ ID NO: 76948 - DNA, 968 bp, Carica papaya
  Intron number 1 from transcript evm.model.supercontig_32.3 2 (locus evm.TU.supercontig_32.32) derived from phytozome v7.0 (chr-ID supercontig_32; pos 446290 to 447257 reverse strand)
ctgctgtctctgctcttcaatctcttggaattccggtagaaatttctactttacaactgttgtttccccctaaaaataagcttttgaatcatgagaacaggagcttgtatatagtattagttatttatgtatttgttaaaagatataatttataagttgttggatatgataaaatgataagaaaagataagttgtagataatccgtagataatttagttatctatattttatagataaattaatataaagtaggaattaattactaaaatttgaagtcaatttaaatttttatttcatgttaatttatgattattgacttcatgtaattattggtaatattcaatttacgttataaataattgagaaagatatattattgaaaagataaaattataaaaaaaaggtagttgtttaatgtgctcagttgcaaaatgttcagatgtaatatcactgttatgaatttgttaaatgtgtattttatactctgaaacaacgtgtttaattaaggattgatattaaaattttcagaactgttataaggtaataaggtctcttgttttttatcaataacatcattttttggcgaacttttaaactgtctaaaataaaatttaggggcctataactttctaaaaatgctattgtaagagtttataagctgttaaacttacaagtttttgattgtttaccaaacatgtcaaaagaacccacaacccagttagaaagtgtataagctcctgttaacgaaaaattgactacatcagacaccctgttgaagtgttctttacgctacatttcatgtgttaatatgaaattcagaagtgttagcaggcattgttaatggatgatgtcaatactgtccatggattattattgacgactactattacagtattgttcataaccaaaatagttcaataactccaaagtaggcaggcaagtctcctcccaacattttgtacctcaa

SEQ ID NO: 76949 - DNA, 974 bp, Carica papaya
  Intron number 4 from transcript evm.model.supercontig_1131 .1 (locus evm.TU.supercontig_1131.1) derived from phytozom e v7.0 (chr-ID supercontig_1131; pos 10405 to 11378)
aatcttgttacttacaaagcaggaggagaagacaggtaagaccaatgtttcttccgtctcttcatcttcttactttattggatgatcataatacttctcaaaaatcgaaattcttgatcaatggaggaacaatatcaccatttttgttcaataagataccaaagtggatgattgactcattccatactagaaagaatcgtaggaaatcttttgataacagggattcctatttctcaatgatatcccacgatcaaaacaattggctgaatcccgtgaaaccatttcatagaagttcattgatattttctttttataaagcaaatcgacttattaatcaatattcgattgattggtctgaggttattgacaaaaaagatttgtctaagtcacttcgtttctttttgtccaagttacttctttttttatccaagttacttctctttttgtctaactcacttccttttgtctttgtgagtttcgagaatatctccattcataggtctgagatccacatctatgaatagagccttgccctctaatactttctttctgttgttgtgataaccgattcacttattcaacccgaatacatgactaatctgagtatattggaaggttttgcacgacccggaagtaattctaaacttaaacaataaacatcacttttaacctgtctgatattgaactcaattccgggatttagacttaatgcattcattattatctggtgtaaaaagtacttgctttggaccgttttaatgtagcagttgatgtatagatatacagcttcttgtataggattaaccggttattatgttgtgaaatacgtagttcatgtctagctgacaaattctcggaactctgaatctgttgatacatctgcttcatcttcatcttcctagatatttttttgcttattcacttttaacttttgctgagtgttgctgctctttttttctcttttgaagggttaa

SEQ ID NO: 76950 - DNA, 307 bp, Carica papaya
  Intron number 1 from transcript evm.model.supercontig_6.33 5 (locus evm.TU.supercontig_6.335) derived from phytozome v7.0 (chr-ID supercontig_6; pos 2409386 to 2409692 reverse strand)
tctgtctgatccaggtaatcctcgtgtcattattgttttgattttatatgggtgtttgtttcctgagaaaactgcagagaatagaagtggaaaagaaaaaagaaaaagaaaataaaactgatctggatgttctccattatgttttcatttccataagctaaataaggtggtttaagctttattcaggaagttctttcctccctggtttaatggatgatctttttgggtattctttttcctggtttcttaattttatttgttaatgctttcagctcggagatcagcgttgggcttgaaagtggcattg

SEQ ID NO: 76951 - DNA, 684 bp, Carica papaya
  Intron number 1 from transcript evm.model.supercontig_40.1 07 (locus evm.TU.supercontig_40.107) derived from phytozom e v7.0 (chr-ID supercontig_40; pos 1975032 to 1975715 reve rse strand)
tcaaagacctcttgtcaattcctacttcaaatcttatcaagattaatttatcaagtaagtcgtggcatctttattcttttatttttcccagttaccttgaatttctgtttatattatttggtgtagttcaagtagggagggtaaattatgtgattgttctttttaatgctatgttgactgaggtttcgagagttaaaacactccatatccattctttgccacgttatttggtgtcagagcttaggcttttagtgaacttactatctttattactttagcatattgtactttgcataaattaacaattcaaaatttttgattactaattcattgtgcatctcacttgaattcatatgatgtattcaattcatgtaatcgtttgtttattccattagtaaaaaaataataaaaaatataaaaatatctcaattacaaatcatatggcaattggcattctattgttgcattaaaacaaaacaaaggaagattaaatgcctaccagtgtgatgaaaacctttgaagtttcaaaggaacattacctcacctatcatgtgtgtgcgaaaatatttgtttcattctgttgcataaacaaaggaagattaactcactcttgtgagcaaaaatcatttacttcatgtttcctttccagtattacatctacattatccattgagcttgagctat

SEQ ID NO: 76952 - DNA, 698 bp, Carica papaya
  Intron number 2 from transcript evm.model.supercontig_27.2 4 (locus evm.TU.supercontig_27.24) derived from phytozome v7.0 (chr-ID supercontig_27; pos 208830 to 209527 reverse strand)
gagcattctagagagaaatcttcctggttagtgcttgctttattttatgaactctttatttttgtagtttgaaatatttctggatgaaacttgggttttgatggtggattgtatagtgggttcatctatttatttatactttctggatatggatttgttttttatttttattttgtattttcttaactgtattaatttaaaaatacgtgtgttaaattgaactgaaaatgacaggttatttgttaggtattaactattttcttacccactagctcttagaacttttaatgagaatgggatggtgcaatatttccaattaatgtggcacctctatacttgtatttcttcaataagttgggaaataaatggtcaaaaatgcaaacaaaatggctgtaaaacaggggaaaaactgcacggacattgaaccataaaaatattcatatacaggagatgctaaaaaaatgctcatcttttaaagaaaacaacaaaaatacaaaaaatgtaacttgtctttctgaaaagttctgccatctgtttggattagaaagctctacaaaatagaaaagggtgcaagagcagtttgaaatctatgcctatgccgtggccaattatgtccataaatcaatttggaaacaccagagcactacatttatcatttataactgataaaacttcgatgacttggacagaaacaatct

SEQ ID NO: 76953 - DNA, 587 bp, Carica papaya
  Intron number 3 from transcript evm.model.supercontig_120. 53 (locus evm.TU.supercontig_120.53) derived from phytozom e v7.0 (chr-ID supercontig_120; pos 683080 to 683666)
agccgttactggactccttaaacaaaaagaaagaggtaacctatctcacaatccattaaagaaaaagtgacatccttaaaaactctcggtttctcttcctccaaatagaccacaagataaagggatcatgtatatttccttcgttgttctcttatcaactccggtactttgctaagcctagaacttttctaaagcaaccaacaccaatctaactcaagttgaggaaatggaaagttagacactagaggcggtaagaaagaagacaccaaaatagcatacgatcaggagtcttagctgcctccttatgtaaatgacaactgtttgctaggagcttctccatctagatcactatagttaaaataacatgacaactgtttgctaggagcttctccatctttgaattgtaatacatctattccatgttattttaactatatgtgatctatctattgtagttcatgatcttttgtgtattttctgtataataatgaatcttgcttcatattgtgtgtattttatttgaattttagtagtttgcttgctaatttcatttgctttccttgtctttttcaatacagatagctgag

SEQ ID NO: 76954 - DNA, 600 bp, Carica papaya
  Intron number 1 from transcript evm.model.supercontig_1.22 5 (locus evm.TU.supercontig_1.225) derived from phytozome v7.0 (chr-ID supercontig_1; pos 3155607 to 3156206 reverse strand)
gtcactggacggatctacagggtaagcgtatatactttttaattatatctgctactttcatttgattttgtttaattttcttttattcattaataaaatgttataataaactgtgtgtatgtctgcgtgtgtatgtgtgtgtatatatatatatatatcatggtttcgtgccgcggtgagcaagaaaagagggccgtctcgacggaaggagaaagacctgcaacggcagagactactcaccctcttcttgttctaagcccgtctattaggagtcgaggaagcctggtatcctaagagggatccctcaaaatagagaagtgtgatatttacatgtatcttctctaagagaggtttcataactattagctaacttctttcaatttaaataactaaattgattattacactgagagatttctattgttccataatttgatgttacgagagttaactcattcatataatcaagttcttcttattaataattattatatatattttttgaaaattaaaaaaatttgttaatttttgaaatagtaattaaatatcttataaattaacttcatttattttaatttatgtagtattattacgacctga

SEQ ID NO: 76955 - DNA, 447 bp, Carica papaya
  Intron number 1 from transcript evm.model.supercontig_13.2 80 (locus evm.TU.supercontig_13.280) derived from phytozom e v7.0 (chr-ID supercontig_13; pos 2545040 to 2545486)
acatccccagttccggtaacttccttctctgtatcccatttgtgttgcttacaaacgcaacatacagagtgttggtctatttcgttttcttcactgcttcttctctctctctttttagtttttttgttaagttggtgtcttttttttttttttttggagaaaaagaacactgcttctagtttgtggctttaaactgcgtattaccttgagtctaatcatatctgctgggaaggattgaagtgctagggtgtcaacagaaacagagttactttgacttaccaactaatcgtgtttaacagttgggttatttgcttttcgcttcactaaaatgaatgaagatggggtataaattacgtttgttgtatacagaaatatttgttagagcaaagaattattaatgtattccaaactcactttctgttataggagacgagattgttgttaggg

SEQ ID NO: 76956 - DNA, 679 bp, Carica papaya
  Intron number 2 from transcript evm.model.supercontig_1308 .3 (locus evm.TU.supercontig_1308.3) derived from phytozom e v7.0 (chr-ID supercontig_1308; pos 10587 to 11265)
agaccatcatctttggctctttcacttctcttcttgtaattttctcacataaacttcctagtgctttttgtttatatatagcattgtcttattgttgctatgctttcaaagtgattttttctcggtatgaagatgcttggttttgttatgtgttggacttttaatttctatagttcccaataaatgcattctgattaggatcatgccaagcgtgaagttattaaaggatataatctcttatcgtgaaatatgtcgatgtattatgttttattataataggtgaagtttttttccatttagacttcatctttaaatgtttaattattattttaattttcaaaagatttgtgatataaattgataaatagttattaacactattgttattgttcatagcggtgaaatgattgacaaattaatcattccaaggattataaaaaatttaaccttatgtattatatggagtagatagactttgaaatttggaacacattatacttattccatctagaatttcctacaagaggtcacatcttctcttggttaaattaagtttacatttaaagatgaatttcacaagcttttgaatttgttttaaacataatatttgcggctcaatttaattagtgtaaattaaatcagtaatgttttaaggctaattaaattaagttgataggga

SEQ ID NO: 76957 - DNA, 313 bp, Carica papaya
  Intron number 2 from transcript evm.model.supercontig_1.5 (locus evm.TU.supercontig_1.5) derived from phytozome v7.0 (chr-ID supercontig_1; pos 68660 to 68972)
ttttctgtgagttttctttttcttatactggtggagatttgcatgtaaaagcttgttgccaaaattttttcaggaagaaaattttagtttttaagtatgcatatatggtattagtttaaacaattttgaactccggtaagcaaaatgttacttgtataatggtcttgtaaaacatgttatgaactgatttgattcacatgaatattggattaagtgttattctctgtttggagaagtcggtatgtgggtgttgtttctctggaagagtttaaagaggataatttttttttgaaatacgagtttaaagaggata

SEQ ID NO: 76958 - DNA, 1066 bp, Carica papaya
  Intron number 1 from transcript evm.model.supercontig_152. 31 (locus evm.TU.supercontig_152.31) derived from phytozom e v7.0 (chr-ID supercontig_152; pos 245860 to 246925)
tgttacagcttcgccatcaccctttgagaaccaaggtcgtttttaatgtgtttttgttgagtttgtttcacttattcctttctgatttcttacggggtattgataattttgcttcgatatctgttcccttgcttgtttttccatttgttcgagttatttttcttgatgggttttcttcatttagcttgaattctgtttggttgctgacaacatgaataaaagataatgaaaaagcttcaattgctagaacttgtattcttgcggtctatgatgcgttttctcaatttcgcttcagttgttcttcctttgtttgttttttcagttagttttagttattttatttgatggggtttctttattttgcttcaatctctgttcccttgtttgtttttctactggttctggctacttttctggatggattttccttttttgattgagttttatttgtagctgagagagtggatgaaatgaaacggcttcagttgccagaactcttatttttgtttagtcatgattggtttgtgatagagaaatacaagaccctcagcaactacaactaactcctttgtgatttttgatgggttttctttgctttgcttgaaatttgttaccttggtttattttctattattctagttacttttccttattaactttttttgtcctgcttgagtcctgtttgccagctgaggaaatggataagagaatgaaaaaacttcaatgtttagaagctgtttgtcttgttagtcataattggttttcttgatgggttttcttcattttacatgaacttttggtcccttggttgtttttctattagttgtggttacttttctggatgagttttcttttctccttccttttttttgcttgagtttgtttagtagctgaggaaatggatgaaaattttgaaaaagcttcaactggaagagcttgtatttctgtttagttcaaactagcttgtaacagagactattggcagattttgagatcaaaatttaaaaagtttcaggcttttgggtttgcaggcaattacagctgcggttttgtcagcaatcagcga

SEQ ID NO: 76959 - DNA, 954 bp, Carica papaya
  Intron number 1 from transcript evm.model.supercontig_4.21 9 (locus evm.TU.supercontig_4.219) derived from phytozome v7.0 (chr-ID supercontig_4; pos 3841252 to 3842205 reverse strand)
cctcaagattcaaccttaccctctccctcctcttggtaaaatttcgttatctcattctcccattaatgtttaaatgtgtttgtatatgtatattcacacaaacacacacttcaaacattctaagaaagagaaaaaaacaagaatttcccggttgagtatgttatccacatgcctgatttgacttgcaagccttggttttatgtggacttgtttttggtactttcaaatacatgtaggtagccatgtgtggcaatagccagacaagataagaccaaaccgtaacctttgtttttctgtggaatggaaatagcaacaaaattgggaaaaatcccaaaaggaatgttacggaactttcaagggttcatcacaaggaaagaagatttctttctctttgcatccttgtagaaaaaggaccagaactggcatagaatttcaaataatttttcggtaccgaagaaagaagaacttatgatttgcaagggaataagaaatcagcctgcctaactactgcttgtgcttgcagtaactgtgaattggtttaataattctgtctgttgggatgtgtatttactcatcctgttagataataaatcataatcaaaatttcggaaaagcttgagttattagaaaatgggtgaattttaacactctctctcataggcaagttgaattgcttgtgtaccaaacaaagggcaattctaattgtgcttggtcaaattattgggcaattagaattgcatatgcaccgacataaaagggaagactcaaaacgaggatttttaagttctaatatattaagtataaattttaagaaattttcctattagttaggttgtatcttaacaagttctactagacttgacttggaaatattggggaaaattaatacttagtagttgcatcctgtctcttttaggttgtttaattaatcatgtgttgttgccataggccctc

SEQ ID NO: 76960 - DNA, 200 bp, Carica papaya
  Intron number 1 from transcript evm.model.supercontig_29.7 4 (locus evm.TU.supercontig_29.74) derived from phytozome v7.0 (chr-ID supercontig_29; pos 651407 to 651606 reverse strand)
ccactaaaggacttttgatttcctggtaatcattattgacagctatttgtacagaaactaaaaggactttggtttcatttagtttgatataaggaagaataaaaattgcatcaatcatcatttttttgttcctcgttcccaacttggtttttatagctgaaaaggattgcgatgcatgttgatgttacagtgacatacca

SEQ ID NO: 76961 - DNA, 452 bp, Carica papaya
  Intron number 1 from transcript evm.model.supercontig_57.3 5 (locus evm.TU.supercontig_57.35) derived from phytozome v7.0 (chr-ID supercontig_57; pos 606797 to 607248)
taaaaggtgtattcgcaaatgggttcaatcacatgaatttaaactatctagcttttctcgtttcctgcttaattcgtcagtgttggatattggtattggcagttttaatctggacttggagaaatattttgaatgctctttaaagttaatagataatattttttctgacatttttgtttttcaacgtggtggtggaagaagaaattggcagtccaagggcaagatagatggtcgtattgtaggctgtttgaattttattctataccgtgattatatgcttgtttcatctcgccaattctgctggcatgctcagagagatgaattaggttttaatataattgctttgattttcaaacttcttgtcattgcctgaataaggctttaatgtaactgctttgattttcaaacttcttatcgatggcttgaaattttggttcagcaaggcatatact

SEQ ID NO: 76962 - DNA, 684 bp, Carica papaya
  Intron number 1 from transcript evm.model.supercontig_3603 .1 (locus evm.TU.supercontig_3603.1) derived from phytozom e v7.0 (chr-ID supercontig_3603; pos 222 to 905 reverse st rand)
ccacgccatcactttcctttctcgatctttatcaggtagttaccaagactgatcttctttcactgtttctctatttttcacttttttgttttggtttctctaagtagtttagctgaaatgataaatttaaattggttttggttctgaatacgagggaagtggtttgccgattgtggtagatcagcttttctacttattttcgcgtgtttactaaaagatgctaatcgagaagcacttatttttttattcatctctaccgttattgtttttgaattatattatttttatctgaggaattgcatggttggaatgcttctgacatatctgataaaaacttacggttttcttgtttcggaagcaagaggcaagcgttttcttgacggaaaccttcagtaattcttgattggggatattcagttggtgtccttcctttatctttgtttgtcatctttcatttcttgagtgagggcctaatttttttcttcggctgggaaataatttcttctatcgaagcgagaaagcaaaagaaaatagtagaagtttttattatttactatatgaaaaaatatgtcttattaatagagggagaaatttctattttcttattggatatttggatgtgtaattatttgttttttgtttatgtcagtggaccaagtggaacccatagttgttgcggttgtt

SEQ ID NO: 76963 - DNA, 788 bp, Carica papaya
  Intron number 1 from transcript evm.model.supercontig_108. 41 (locus evm.TU.supercontig_108.41) derived from phytozom e v7.0 (chr-ID supercontig_108; pos 425877 to 426664 rever se strand)
tgcaacacgactcagcgcacgatcggagcagcgtggtgtgcatgaggatcagttgaccaatctccagatgtggatcgactagattagagcaacggagggcacagaacggcagatctttcaaatgcacgcaaccgcgtgaaaaaaagaccggataatcgcgatcaagccggattttgggcggaaaggaaccagatttgtctcaatcacgcttttctggcagtattccaccgtttttcgggccaaatgggatgaaggcggcggcgtgtgtggcgggcgcgcacggaaactgtgactgttctggctgggtttgagcggcgactccgtctgggtgatgttgggtttagtttcttcggtagttgagtaccaactttggcctattttgtttattttagggttttatcaaaactccaaaaatagtcttcctttgactacgataccatgaagtttttgaaaaaaataaatttctaattttattttttatttcttgtgtttacatttagaaaatatatataaaatggttatccttattctagttggactctaattatacgatataattatactattagaactctaactaatatagtattttacttaatatgaaatccttatcaacaaaccctaaaatttgaatgattgtgattatttgcttattaaagttattgaacttacattttcattcattccttccacatgaagtcttcgctttgatggttcactcttagtcttcttcttatagtttttttgcttatatcatatgcttttctgcagaacggaaaccaagcagc

SEQ ID NO: 76964 - DNA, 577 bp, Carica papaya
  Intron number 1 from transcript evm.model.supercontig_3.46 1 (locus evm.TU.supercontig_3.461) derived from phytozome v7.0 (chr-ID supercontig_3; pos 3376521 to 3377097 reverse strand)
ttgacggagagaaaatcaataataaccacagagaggtaaggatattatatatatatatatataatcttatcttgttatatgcattttccttgtataatctaaattgccatcttcgtatttcctttgtggttgactggttttgagccttttggtttaatggtataagctttgaagaactcatccatggcgggttcttatatgattgagttgaaacatgggtttttagcattttcgttgattggtttgatgttgtcattaaaattgggaaatcgatgcttgtaatttatattccttttcccgagaaaaaggaatataaattcttcatggaaaatgggaattatttggctttgggcgttggatggtggggtttgatcttggatttagctgaagcgtcttctagatcttagttacattaatggccaacttggtttgaaatttattctttctttcttcttttggttatttcatctgattattgatgaatttccatagttttcttcttattttcttgagctttcagttcataaatttttgaatatctgtttggtctttccagtttcctttaagaaaaaattaa

SEQ ID NO: 76965 - DNA, 370 bp, Carica papaya
  Intron number 1 from transcript evm.model.supercontig_2197 .1 (locus evm.TU.supercontig_2197.1) derived from phytozom e v7.0 (chr-ID supercontig_2197; pos 1672 to 2041 reverse strand)
gtggcaccatattttactactacactcagtaagtctcatatttgttcttgttatcaaagttgtagtttattattgaattgatggattgattcatttttgcactgccattcatatccatacaacttgttctctttctatcttttcacattttcatttcagaacttccagtatatttttctttttttccttgaggcttttaaagggcttccttggacatgaagatatgaatacattgtcaaaatctctttgtgaagttgattttgttacacaaaggatggacatagaaatttctgtagcagtttctaatcagtaatttgttttgcttttttctacaggtggactttcacattaatcactttctattttgggg

SEQ ID NO: 76966 - DNA, 982 bp, Carica papaya
  Intron number 1 from transcript evm.model.supercontig_1843 .1 (locus evm.TU.supercontig_1843.1) derived from phytozom e v7.0 (chr-ID supercontig_1843; pos 3162 to 4143)
cctatccacgggcccatagttacactgatttgaaggtatctcttggaaattaagtaacaaagtatttggcaaagtaccaaattccagttatatatcacgtgattcttttttctgggttgaagaggtgctatttaaggggatttgttttcttttattgggtacatatagttactccttcaacataatctacaagtaacttggtgttcatggcagttaatggagagatttccctctttcaaatacctcaaccagtattgttggatatttttctccctacataaaaattcattgtttatttgtaccactagaaaatgatggctaaatcattgatcttggactaaagagcttcctttgaaatgagaaataatataagataataaatttgcttcatctatgaaagtacatctagatagaggtttatagggtgaaatgaactttctagatatcattatttgtctgagattcttgacagattttgactcattatttgtctgcttgattaatagataaatcatgagttggatacgatagacatacacagaggtagttctttgaaatgaaaagggcaaaacttgaagtttaacatttgaagaagacgacagtctagaaatcattttgactcaatcatactgcacagttcttgaaatttgaccaaagacttgattgagtggggtgcttactcataaacccgaccaaaaagttttccacaaaaaaggaactcaccgcaacatctttttttcttgcttagtcttgcaacttgccaaatagtaattgaatattttaataggacaaattcgagaagacattatcgtagtgcagacacagattttactccccccacgaaatgatcctgctgtttgcaagtctttacctcaaggacagttcaattttatttttttcccttatctaattatttctttttctctttgctatctatgggctaattcccaggagctcttaggttcattgcattcgagatttg

SEQ ID NO: 76967 - DNA, 452 bp, Carica papaya
  Intron number 1 from transcript evm.model.supercontig_26.2 05 (locus evm.TU.supercontig_26.205) derived from phytozom e v7.0 (chr-ID supercontig_26; pos 1510562 to 1511013)
taggttcaataagaaagaggtggaaaactttgcatgtaaggttaaaatattatactccatggtatttatctgagaacatatatgcaacaaaatgaaacaacagtatgtttcatttgtttggtttgcaaatgactcgattgctttttcttaatacatattctggtcttggtggatatattttgggattattgatatggactttgtgcaatattctaaaaggtagtgtttaaaattagacatttggagaaaatgggggaagtaattataagaaaagaaaaaaatgctagtgccactagtcaggaaaaatctatttctatgtgtaatgaagctgattttacaattcccattatgagtttgatttgggtcattctctcgatactgagcttgtgaatgatgtgctagactttgtcttgatcttttgcagaaaaataatcctgataaggaaaggaggc

SEQ ID NO: 76968 - DNA, 409 bp, Carica papaya
  Intron number 1 from transcript evm.model.supercontig_238. 6 (locus evm.TU.supercontig_238.6) derived from phytozome v7.0 (chr-ID supercontig_238; pos 215321 to 215729 reverse strand)
ttgttgaagccatcaaagaagcaggaaacattaaagtatatctatctacgtatttatccttttcgtctgctttaatttatcaaattataaattatttgaatttttttaaaagaagaaaacttaattttttattaattttgtttatttaaaaattaataatttaaaatatttttaaataaacttacatcaaaattaaattttttaaaaataaattatctatacttaaaaaataaatatgatatcttaaaaataaatataaatataatttaattaaaatataatttttatttaaatttaaaataataaataaaataaattataatttttatattaaattttaaaataaataaaaatatatattatattaattgcagcagttcttgccatcggagttcggcataaacccagc

SEQ ID NO: 76969 - DNA, 1025 bp, Carica papaya
  Intron number 1 from transcript evm.model.supercontig_2.95 (locus evm.TU.supercontig_2.95) derived from phytozome v7 .0 (chr-ID supercontig_2; pos 1609925 to 1610949)
cgacgtggctgctccccgcgacgacgaagcctcaggtcctactcttactctccttgtacgcatcacatcacttgctgataattacttttgtttttttaattgtctaaaggctaaattaacaaattaatttaatcagaaaaaagaaagaaacaagttttttttttttttgttttttttttttcttcttcttcttcttcttcttctttgtcgttgagctttcttaatatattattgcaaattttttctcggtcaaacgtgcagggttgaaaactctgcgacatttattaggaccccccattattctcatgctcaagtactgtcaatcccattttgatttgataaagtgtaaaatatgtaccgttggattatatgacttttgttttctttgtaaagcggccgctggatttggacacagacgatttgtgtaagaagtaaaatccgtgggccgtggcccttatatattggatgtagaatgtagattctccatggttaaaaaaactgtgttttttttttttttttaattttcatttttctaattaattttctcccttgtcttttaattaaaaataattaaataatatcagtaattcagttctcgagagatgaagtgtgaaacaatcattgtttttgcataaaaatataattcttctattaaaaaataattatttatttatttttaatcagattctattttagattattgattaaaactttttaaagtaatatcggttgctgattccaattgaacaatcattttctgcttaaactttatacgatacacacacacatatatacatacatatttacaattcttgaaaaaacacaatcatgcaagcagttgtgtttggaacttgaactctggtgacagcatgattgttagtaatttctacggctgcaagaaattatcagagctaaaacaaaagagaaagagaagtaatcagggaagtagttgtgttgtaagtagtaattaatttgaatgtggatttacagtggaagtttcagattcatcagagacagaatccagc

SEQ ID NO: 76970 - DNA, 863 bp, Carica papaya
  Intron number 1 from transcript evm.model.supercontig_25.1 73 (locus evm.TU.supercontig_25.173) derived from phytozom e v7.0 (chr-ID supercontig_25; pos 1752916 to 1753778 reve rse strand)
ctctcttgggtacgtttttagggagagaaaaatggaagcttttatgcttcctctctttctctctcacccccctcctcctacctctgattgtgcctcttttcttttaaaagcatggtctgtaaggtgtgaatattgggtttggtttctgtgcttttttctcttttcttaagcttgtttttgcttgatttttaggagacttataactttatggtttagggttcttgatacatttagtcatgttggtatatgtttgatggacatttaagtttgtttttcttgttaatgctgtgcattaagtgtatatttggacaaatgaactactttttttggaatttatttcaaaagtcatacttccactatgaatggatatgaaaattatattgcaagagaacggaagtttaactcaaaataaggcgaattaagtatgtcgaatttccatcttctcatagtggaagtatgtacactaaatcccataaaatgttccaaatatactctaaagcttgtgggttttggatcatttgctgaatttatggtccacacatgagagcctagagtttgttctgttgcagaatgtagtggaactcatgtttatatcaatgtccattagttatggctaatggattttccatttgttgaccttcaacttttttttaatactgagaatttttatgtatgaataagttcgttcataagtttgctttaatgagaatataagttaatttctttattggggggaaatgataccaatcatttgtaagttatggaacttttacctgctgaatcatttacttgtcatttattcctgttctcattgagcattatagttcctttggttgatgataatggacttgtctgttgcagga

SEQ ID NO: 76971 - DNA, 956 bp, Carica papaya
  Intron number 2 from transcript evm.model.supercontig_192. 11 (locus evm.TU.supercontig_192.11) derived from phytozom e v7.0 (chr-ID supercontig_192; pos 186457 to 187412)
ccagagtgctcattagacagaagcatatcaggtaaagttatctaatttggtgcctgtcattgggatattagcagcttatggtcgattcttttctactaaacagttgttctgatcatggtatcttactttgtatctcttgaacatgttttaatccaagtgcatgtttctgggggaaaaccgcaaagcccaaactagcaataagatgctattttgaaagaacttaacttgagaatatttaaatttgaagggattttgggtttccaatggaacaatggataatattcctatgggcattatgatttcattgtcaaaaatcctgattaagatgacagacggatgttacagtgaaaccatgtagtttttttaatgtttgcaaaaccctgttgtctggttactgttgagaccatggatatggttgtatccctgaaggatgataacggttgttttgcatatagctttagctgacggcacttcagacaccagtatggcaaatatgtattcttcttaaggaatatggtaaaatatatttgataaatattattttggtgttgatatatcaagaaagaactgttgctgctgtgttttgatatagcttagcattatataagatgctaaagtttgtcaacaaagtattcgttcctaaaaagtacttttctcattgaaagaaaaactgtctgcaatatgaatttgaagtcgttggtttattccattagaagcaatcttgcaagacataggaaagtttgttcattgttgttttttctctttttttcccctggtggaaaagaaaggagtatgatgatgcattttctacctttcccgtaaaatacgagttctgggtttaccttgatataatattataactttccattaaaaaaaagcaagttactgtttgaacatatgtatttgttcttggtttggcagggttgggagacaggttgtgaacattccatctttca

SEQ ID NO: 76972 - DNA, 742 bp, Carica papaya
  Intron number 1 from transcript evm.model.supercontig_14.2 12 (locus evm.TU.supercontig_14.212) derived from phytozom e v7.0 (chr-ID supercontig_14; pos 2315230 to 2315971 reve rse strand)
ccaaaaacgaagtcttttacaacaaaacccaggtctcaaagacgtagtcttttactcttgtcgattgggtgcttggttttcaattatctctgtttccaccacttgtgttcaatttctgcttatactactttgtctgtgttcttgggttttattatgtttgttttatgcttgttcgatagtttcataagaatattttagtagaatcttgagtttaaaagaattaggatgtggaagatttctagtttttttgggtgctttttctgttactatggtgtcttattgggtctttgaattgaaagcattgatgaaagcttgcgttggttgctgaagaaatctgggaatataaagttttaagattttgaattagatggtatcatagtcgttgctttatgtctatgatgctgacttgacacgccgtggttcatttgtattatcagttcagaagctctcttgatttggttgaacagcaaactgacagttaaaatctggcttgtctgcgtaattgaactattcattaactaagtttgcaccctaatcaatcctcatttgaaaatctgggctgtcttggctctgccgtgcacctgttgacattattctgaagtttacatatatcatggttatgcttataatgtcttgcaaggacatgtccattcctgcatactatcttacatgtatattagtctgaattttgctgtctcctaataattgtttgctatataatggtcaggtcaacaacagagac

SEQ ID NO: 76973 - DNA, 508 bp, Carica papaya
  Intron number 1 from transcript evm.model.supercontig_128. 69 (locus evm.TU.supercontig_128.69) derived from phytozom e v7.0 (chr-ID supercontig_128; pos 752862 to 753369)
atcccgtcacgacttccctctcttcctctcctctggtatctctccgtctcacttttgtttcttttcctctttctggaaaatgggcgtttccaaatttgtgaaaatgatggaatttactaaaaaaatggaggttttatttctttttattgcttgtagcgatgagggcatttttggatacatctcctttttatattcaagaaaagcaagaaactgtttctttccgtctttatacgaaagaaatgcaaaaggtgtgttttaaaacggataaaaagttttttttttccttttgtccttgtacttttaaatgagtttcaggttttcaattcttcaatagcaagaatattgtgcttcttggttttttattgctttttggttattaaattttcaggttttgaagtaaatgtctttagattttgattattaaatgcagtattttaggttgtattatagttaatttgaggggttatatatatttttttctggcttgatattttgttttaggctaccc

SEQ ID NO: 76974 - DNA, 510 bp, Carica papaya
  Intron number 2 from transcript evm.model.supercontig_6.35 9 (locus evm.TU.supercontig_6.359) derived from phytozome v7.0 (chr-ID supercontig_6; pos 2749106 to 2749615)
gtgcactggtacgaagcaaaaatgttctctaaattaaattgaaaacgaaacatttgaatccttatctgcaaatcctgtaaacttgatttgcaagctttttattttctaaatgtccttcttgttccttacacgtgtttgcatatgatatgtggttcatcatctaaaactgagaagaaatttgcttacttctgtttagtttttttttttttggaattatttcattgagggtgttcttgtttgtgacacacctgcgaatcatgtttgtttgtttttttctttttggcattatttcattggttatgccggtttcttattggtatttgaggatggtgttaaagttgcagaagacaaacttacgacatacttgctaaatatgccttttggttttgcatggttgggacatgtcattatctttttgcctgattgcttacctaagttctcttttatcattgactttttttggctacactttagtcattgactttaatgttgtgctttcagaacctctca

SEQ ID NO: 76975 - DNA, 343 bp, Carica papaya
  Intron number 1 from transcript evm.model.supercontig_119. 29 (locus evm.TU.supercontig_119.29) derived from phytozom e v7.0 (chr-ID supercontig_119; pos 166198 to 166540 rever se strand)
caagcgcttcaccttgcgttggacactgatcctcggtaagttttccacaccttgcgttggatttttttttttttttttctctatacgtttatgtttcttggttttggccttctgattattgatttccatgacgaagacaatctgggtaattttcatttcgttctcttcttgctgctttctgtatttctcgttgaataagcatgtaagattcttgacatatcaatcctaattatctggtttctgttgctttctgtatttctcgtgaatcaaatgaagatttgcacagaatgcttatagtttaaacttgatattaatccaatatgttcgttacttcacagttctt

SEQ ID NO: 76976 - DNA, 691 bp, Carica papaya
  Intron number 2 from transcript evm.model.supercontig_223. 17 (locus evm.TU.supercontig_223.17) derived from phytozom e v7.0 (chr-ID supercontig_223; pos 191704 to 192394 rever se strand)
atcttgatcgaattttcaggtaatgcaaattatacatatccttcattttttctttggtgaaatttatgtttctgtaataacttaaatatatattttttgattcttatgtccagaactcacagccaccaataatccaactgacatgccttattgtttctatttttttaattctacaaatgaacttgatgtagagaatactttgagcttcaaaagagagttgatctctttggaatcagagtaatttatcctgagcttctaagaattgaatgctcattgtttccccaaattttatttaaacatattcaacattcaaatatgaatcatataataacactgatggaattcagcagttttggtgcttggatatttttcatactatgttattcattttctagaccctgctttaggcatgaaatgagcaattgagcttttcccaacaaattttctttcttctgaatttctttaacttgacaattgtccagatatttctaccttatgttatgtttgtaagcaccttatctcaatttagaagaccagaatttcttgagatgttgatgacataagtcaacttaccaagtggtggtagaattgtttgcatctcgttcatctaatgacactttccttttttctttaccacattcataactatttccatctgactcagtatcctcacaagtgatattttgcagta

SEQ ID NO: 76977 - DNA, 840 bp, Carica papaya
  Intron number 2 from transcript evm.model.supercontig_12.7 6 (locus evm.TU.supercontig_12.76) derived from phytozome v7.0 (chr-ID supercontig_12; pos 612645 to 613484)
accctgctgctcttcattctgtatccacaacatgatatgtaactttacatggaagttttgttagctagcacatgatcactctattcaagtcatagattttagaaaatcttacattaagggatcgtttagtagaggagaggagaaaaatcgagagtaatttagtcctcaaaagtaaattattaatttttttattgagtaattttgatccaatataatattccaatctcaactaatactaatatttgccatgattattaaataaacatgttcttttcccttccctccttccaaacagatccaatgggctgtttacaaaagttctcccatgtctgactatcggcacttagatatccatatctatattagtacatggctaccagcaactatctacttatctgtgagtcatatatacatatctgtcgtattccaccctatcataatggtctttgcattgtttctatggttgtagtagtcttgattataacttgttttctcaagcctctgttacagtacctgcaacttgtggtctttccaattgtttttttattattgtagtcttgttcgtaacttgttttctcatgtctccatcatggcgctggctggcaaataacttgcacatactcttttttttgtggtgtttcatgacacagatgcattgggttaacattaagacatgtactccatgggaaatatttttggacatgtcctgttttgaatatgttgatgatgatttaatctgtttaggaatgagtctgcaagatttatcattgtctttgagtctcttttgggcctgtggaacttgtctttctagtttgtccatgacagagctagaaatcgaga

SEQ ID NO: 76978 - DNA, 655 bp, Carica papaya
  Intron number 4 from transcript evm.model.supercontig_26.5 1 (locus evm.TU.supercontig_26.51) derived from phytozome v7.0 (chr-ID supercontig_26; pos 445057 to 445711 reverse strand)
tgaagtttgaaattaacactattttatctcgggaggtaacacttgatttctttaatggtctttggtacacgtaggaatttactctgttcttcctgaaggaagaactaatcacttcttatcacattgctttttctgttgttgctgtgttttttaagtctttaaatgggggatgacaagaagggcatatgtatcgaattttgattttatttttatttttgtagaaagcttgatgcttttatactattaaacacaatgtaggagaatagacaatctgcttgttatgaatgagaagctaactgcatgggtgggcatgtagcagtcgttaacttatttgtggatactacttatttaaggcagcttctacagggctaaatatggtggaaactccaaaatcttctagcataatgaatgatttcatagtcccttccccttcttaagtcatgcagtagctctgaagaattgccaaattgtaccatttttcaattttctttctgtctactaagtctgttgatttgctggactaattgagttcatggtggtatatagacctggatctccgcaagttgtattttgaagttcaaagtagatgaatgatagtgattttttccttaagttgacattcataaccaacatctatgtgctacagggaattgaa

SEQ ID NO: 76979 - DNA, 441 bp, Carica papaya
  Intron number 2 from transcript evm.model.supercontig_57.1 0 (locus evm.TU.supercontig_57.10) derived from phytozome v7.0 (chr-ID supercontig_57; pos 241125 to 241565 reverse strand)
aggtttttgcctctcttttttctttttacttgaaaaaattaatcttctttatcgttcttgggtttgagcaagtttatctgatgttaataacattttagtcgaatgatgcttcaactcaatgtttccgcaattcaatgttcccgcatgtttcattgagacttttccaattttattgaatatctcgttcaggtgcattttgcatttactgagaattaatttttttggcatatagatgattcttttgtcagttttttcactcatcagtagcatgtgaatgtgaagtaatactatcgttttgtacttcttcagttaactgaagtttaggttttgcccattgaatttctagaaagtttccttttgattcgtaagatttcaataattttacttcttaaaaaggtttcccctcaatgcagattctaaaggagaataaagacaagaagg

SEQ ID NO: 76980 - DNA, 562 bp, Carica papaya
  Intron number 1 from transcript evm.model.supercontig_2.83 (locus evm.TU.supercontig_2.83) derived from phytozome v7 .0 (chr-ID supercontig_2; pos 1403861 to 1404422 reverse s trand)
ctctcactctggcttcctcatcacctgcacaatcagtgagattctctcttttttttttttttcttcttttttcaccatcatctgtctttttcgtttatttttaattttttaacttccttagcaggatgaattttgtattttttgttttaaaatttttctgccaacggaaagcgctaccttttttttttcagaatataggtttaatttcattgtcgttgtggaaaatgagtaataagttgtatttgcatcaaacaaacttttcttctggttaactatgaaactatagaatttacatcatatgaggataacattttgagaattaactacagaatttgaaatgtctagtttttattttagttagaatactttttaggtgtcaattttcatccgtttgtaatagaatttgtatcctcatagttaaaccatttcataatttctaaatggatttcaaaagaattgatgatttcttccaccgtagcatatcattccatatttatgcatacacacaacatgaattttgatgttcttgccagagagagaaaagagtgcaacgaaagaggcc

SEQ ID NO: 76981 - DNA, 644 bp, Carica papaya
  Intron number 1 from transcript evm.model.supercontig_288. 7 (locus evm.TU.supercontig_288.7) derived from phytozome v7.0 (chr-ID supercontig_288; pos 182637 to 183280 reverse strand)
gacgggacgactgctgccttatcctatcaggcgttggccatgctgagtagaacccacccggccaaccactttgccaagtgtctttgcggatgctcgccacttgtcgtgcatttgtgaacttctaaaaatctatttaaaccttttcctcccccttatttacatccacactcaactcttcactctttctatcaatttctttacatatttctacattatttggagtgaggttagaaagatttaagggaaaagagaagaaaggaaagtttgaaattttaagcacttgttcaggattttctagaagtttttttccccttcacaaaagacatattttgacttcagttttagtaaggaattccctcaatattttctcttacatttctaagtgcaatttctagaaaaacaatttaaatgttgaatgatattttgttgccttaatttgtacgatgatttttttattcagttacagaattagtgagcatgatgattttggatgcataagcatttatgccaatttactatagttagtttgatattaaatgttgagtagggtgcatgaaaaatgtgatggttgtaattgcatgtaggatggcccctcaccttattgtttttgtttggtgaagtgggttattctaggagtcccaagt

SEQ ID NO: 76982 - DNA, 630 bp, Carica papaya
  Intron number 2 from transcript evm.model.supercontig_23.1 44 (locus evm.TU.supercontig_23.144) derived from phytozom e v7.0 (chr-ID supercontig_23; pos 2220825 to 2221454)
ttacattgtagccagcacttgacaaaagctacaatgtaataatataacagtataaaaagcaatgttacattgttctttatttggtgaataaaagacaaaaaaaaaaataataataataataagtcatggttttttaaaaaacttttctttaaaaaaatatatcaactatcaaaaatatcaatcctggtgtgcccttgagcccgggcacttgaatctcacaatgtgtttgtgtaaataaggaatagagaggagaggaaaggaaatgaaataggtaaatattagtaaaacaattgaaggaatataaaaattgtggtttagggactgcatgaaagtagtattgtaagtagatgttattatgatatgtttagttatcccctgctaattctttttcctaatcattaaaagacacctttttgtcaagttaaagcacttcgtgcaactgcttttaattaagctttaatctttgaataagctaggaagaaacatctatcctttcactacttgtttgctctgcttaattggtagataactctgttgctcagattccaaaagttatatcgttaacttgttctcgtcatcgtgtcttctctccttgtcaattcagttactttcaatactgattttgcaggt

SEQ ID NO: 76983 - DNA, 496 bp, Carica papaya
  Intron number 1 from transcript evm.model.supercontig_34.2 05 (locus evm.TU.supercontig_34.205) derived from phytozom e v7.0 (chr-ID supercontig_34; pos 1930976 to 1931471 reve rse strand)
tgtgcgtattcctcacttcggtttcatttctatctcaatttgagaatgataatggtacgataatctcttgttttctcggaaactagtcaagaccgatgttctcctagtgtttccgtttatcttattttgaattcatttgtactcgcgctttgattcagtgcttttactaagtcaattagttgtgttcgggagtatgtgaggattgaatgttttcatgctttgtcattttgatctccctagttgaatctatgatgtcacaaaaattaaacaatgcgataatgcttcctagcgttagttgctttgcagcatttgatatgaagaaaggttaatgttatataaattacttgcggaacatttattttagcgaaaagttatattcagagcatcatgttcatgagatctaatttagtgggagttttaacttttgcattttgtcgagtaaaattaaaatttctgtgaaccacatacagagttttgaagcagtcatcacgagtgt

SEQ ID NO: 76984 - DNA, 805 bp, Carica papaya
  Intron number 1 from transcript evm.model.supercontig_26.2 68 (locus evm.TU.supercontig_26.268) derived from phytozom e v7.0 (chr-ID supercontig_26; pos 1814633 to 1815437 reve rse strand)
gactcgttagtgtcaacggccgtattgttgataaggtaagctgtattcgtccttaacaatctgtgattctgttggttcttgacgcggcaaatcaaatgctcttgtaagccgacttgtcatttttatgtttgagagaaaaatgcttgcggctttccactaatgagaaggccccgggttcgcttatttgaaagtcaaccggcatggtttcatttgccatataaaagaggttataggataggatgattgagaacaggttggattcatctggtgaaatggtagtggttttatttgattaactacaatactctctgttgatttctcaaattctttcttttatgcatctatatttgcctttgcctgattaatccaaagtagaaattttcgtgcatagttatgtttttattaagtgaaattcgggttcagaatgtagtattcatgtagaggatgaaacgagggctttacaccatatagacacgcacacatacagacatatatttttactattttgcctgcttctggttgtgtttcgtctcataaaaacaaaatgttgtttttatatttggttctcttcaaatttctcagaagccaagtttcagcttggatggttaaattctagtttcttttttggcgtgggattattttcttgttgcaattgaatgatccattgttgtgcaaataattatatcaattgattgttaaacttacatgtccttatagtggagaaattgacaattataacaaatcatccagaaataatattttaacttagaatttcctaaattatttggtttgcaggttgcgcaca

SEQ ID NO: 76985 - DNA, 692 bp, Carica papaya
  Intron number 1 from transcript evm.model.supercontig_27.1 36 (locus evm.TU.supercontig_27.136) derived from phytozom e v7.0 (chr-ID supercontig_27; pos 1539969 to 1540660)
tccaaatccaacggcttttattgaggtgatgcattggccacatacctcttttgttgggattgtttctcattatacgtggcctgtgaaaccttgtctttttgtttgttctggatcttgacaagatatttccgtctgagccttgcaagtaatttgaaacttgtcacatttgctttgtgttctccagatacagcaaggtcttttcaatctgccagcacattttattttctcatttgtaaatatggacctccttttttattgtctatccagcaattgcttcctacatattgaatcaaaaccttcttgaatttagtttgtattcaaagataaaaatttgtcatgcagttttataaccatcatgtttttagttaagcatgaaggaggtgagtcctttcttttccagaagagctaccgatcctattgtctctctcctttttatcttttatttattgaagtgtctactctttattgcaagatgcattggcacccattctttccaaacaagatcatattttactctctttcgtttgagattttggtagatagatgcatctgctgtgaattttaattgaggattccctgctggatgaaatttatacagcattcaacattcatcattaagtttttcacatttttgtaaccattatatggttcatacaggaagtagaagaagctttcactttctggggtactcc

SEQ ID NO: 76986 - DNA, 780 bp, Carica papaya
  Intron number 1 from transcript evm.model.supercontig_346. 1 (locus evm.TU.supercontig_346.1) derived from phytozome v7.0 (chr-ID supercontig_346; pos 10007 to 10786)
tgctgtgtccaatcaatctactgataatattgaaggtagtattttctttttccgtactcttgttgttggatagtacgagagagatctgatgatggtttgtttttgtgtaatgcgtttgatgatatggggatgttagtcgccgatcatgccgctagggtagtttttattgtgatcactctatcaatttttgtttattgttcaagtttagattgttcttttcctgggaaaatttcttattcgctgatcgtaattttggtgtttttatgtttatgatcactgttgcaatttgctttatttgattaagttgggatttttttctttgttttggtgactttgttctgaagtttatatatttgtcatgtagctcttttacctctaacaactgtgattgcgattcaatgcttagtggggcattagcagattcttatttgtgttgttattcctttcatggggttatgtatttgtttatacttcccagcatttttcgtttttgcttggacatgtcgtgctgatattcataattgtaatttttatgcaatgcatcttgaacactgaggtttctaggatttttcagttactttttgcaagtcttatttatgtcccttaaaagacttgtctgttaatctctagaattaaatcttcttatccttgttgcatttataacttgcaagttctgcattgattataaaaggcaatgatattagacgcagtaggagaatcgacctttttgatttgtgcttcgatcatcaattgcagaagcattttggcggataaaaattc

SEQ ID NO: 76987 - DNA, 639 bp, Carica papaya
  Intron number 2 from transcript evm.model.supercontig_5.20 8 (locus evm.TU.supercontig_5.208) derived from phytozome v7.0 (chr-ID supercontig_5; pos 1777004 to 1777642)
ggtcagtgaccactcgtatttaacttctctttttaataacgatgcttgatcttctcttgatcttctattactatcacagatgatgcgcgtaatttagatgcttatatgtatctatctcaatgtgcttaattcgaagttttttagtttctctaagagaagtttgatgctttagtggcattgtttttttttttcccaattatttggaatcatagtttttaaaggaaatggatcggttttacaagaatgtttactctttaaaattcattggaatttcttcaagaaatttcttacttattagaagttcggttgtacggctaaagctgaagctagacggtctctcaattttgactagcttagaggaaagtttcaaaccataaaatggaattcagtttcagtttttctttaagaaaaatgtgcaaatcagaataggaaagtttcaaaccataaaatggaattcagtttcagtttttctttaagaaaaatgtgcaaatcagaaccaattctactgttgatccttccatttctatattctccatctagtcacactcactattatgttctttgttaatcatgattgtaatttttgggttcatgatttatttctttataatttttctgtttgggacaggtatcggttac

SEQ ID NO: 76988 - DNA, 578 bp, Carica papaya
  Intron number 1 from transcript evm.model.supercontig_6.30 4 (locus evm.TU.supercontig_6.304) derived from phytozome v7.0 (chr-ID supercontig_6; pos 2249352 to 2249929)
gagagcctgaaatacaggtaaaatttgagcttgcatttggatttattacttttagtacaaattaattgctttagctgctttttgctttgataacgtagaaaattataaattataatgaacatgaattttccatgattctgagattcaaactttgaatattgatgctagtctttgtagttgcaagtcggatgcacttttagctgttccttctgataatgtaggaaattacaaattataatgtacatgaattttccatgattccgagtttcaaagtttgaatattgatgctagtttttgtagttgcaagttttgaataaagaagcacaagtttggtggacacaaaattgaaaatacttttctcaattcacaaactgatgattctcatgtattcaaatgtttgtttaactaaaaataggatattgttatttcactgcataatgacattcaattcttttctttttttggtaagaaaaattggtgcttcttgtcatgactttactgcaatggatcaactcgtcttactattagtgattgaattgacaggaagagaatatacctgtgattgaaaaagaaacccg

SEQ ID NO: 76989 - DNA, 435 bp, Carica papaya
  Intron number 1 from transcript evm.model.supercontig_124. 16 (locus evm.TU.supercontig_124.16) derived from phytozom e v7.0 (chr-ID supercontig_124; pos 354617 to 355051 rever se strand)
cttagaactaaaggttagcatagtgctggaaggaattaacacaaatggagaggcaactgagatttgagtgaaataagtttttctataagcttaaattgatatgaaaaataaaataatatttatacagtaaaactggtcttttcacactcagcagtccattcgctcatttacatagggattgaacaactgttatgcattgaggtttctttgtagtttgtttttttctgttcgttggttgctgcttgaggattgcttattctcctttttctactatcttctattttcttcctaatagtatacatatatccttttcttttattcaaaaatagaataattggcttctcaacattatctcttcttgtccattggaagtaatgtttgagataacttttcttggcagatcagcattttttccacattaattgtggtggagat

SEQ ID NO: 76990 - DNA, 881 bp, Carica papaya
  Intron number 1 from transcript evm.model.supercontig_2.12 9 (locus evm.TU.supercontig_2.129) derived from phytozome v7.0 (chr-ID supercontig_2; pos 2025851 to 2026731)
cagctataccaagctttcaaaggtgcatatgtaatattttctcatgtattctcattaatttcctattcttgtgtgtgtatatatatgcatacacagttttcttaatacatatatctatatatgttttttatagaaaatgcatgtatgtaaccttcttcgttttccacactgattgcaatgatttttaattgagttggttgccagtcacataatttgtaatttgtattgctttaacaagagaaaaaaaaaaatccttgttctatggaggcattaaagttgcttgcattttgttccacatttcttccttttttccatgcatcaaaatcattagtatcaatttcgatctcaacgacaatatgattcataaaaatttctaaaatttttcagtctttcaatcagaaaatcgagaggatccttgttgataactaaaatacctagatttcacaaatgaaacaaatatttcaattaattgctttgatggtagctcttcttttaattaactagtaagataagaatattgtttgtgttttcacgtagatgagtttgatttgcaaccaatccattctctatcagatttccataatccattaataattttaaaataaagtaggcaaactagcaacttcttaatatctatatgggtttcagaagaatagatgaattggtaatggttagtgcaatgtaaattttgtttctataattggctaaacatgaaatcgtatgatcaaagttatgagtttgtcatcttcgaatactttataactattcttgatccaaatgtaatcttcatatgtacattaagaatggtgtatgaagattagaacaaaaataaataaaaaaagttaaagagtagttttggtgtggagatgatcaggacgagg

SEQ ID NO: 76991 - DNA, 745 bp, Carica papaya
  Intron number 1 from transcript evm.model.supercontig_21.4 7 (locus evm.TU.supercontig_21.47) derived from phytozome v7.0 (chr-ID supercontig_21; pos 666687 to 667431)
ggaaaattcgatctttctcataggtgagttaaaatctccatttttttttttatttctaatctcctgcatgtgaatgatttttagcatgttctacaactggtttaagtttgagtctgttatggcaaacgagagataaccatgattcctttcttcaagaattcattaagcagtccgttaaatgtgaagctacccatcttccaaatttcgctgctttcttatttccagtttggtatcagagtggtggttgacacttcgagatataatggatctctcttgtattttttacttgggtaaactcttcttaggactactatctaattatctgactaactttgttagcattattcatcttctaaattttgatgattttttcagttttagtatcataatgaacggttcaaacttgaaatattcttgggcctacttttaactgtgaattggccaaattgttatttgaattactggtttctgacgattttttagttttaatatcagaatgactggttgaaactttaaatattatgtggtctgtcttgaaaatgtgaattggctaaactattcctagtatttatacttaatttatccgactaattttgttagttgctttgctctggtatgattgaacatctggcttactctctagtcccttgttgtactacattgagataattcaaggctttatctgttaacattcgatttctggcgtttagggttgttttggcaccgttaacaaggcaaagatctt

SEQ ID NO: 76992 - DNA, 747 bp, Carica papaya
  Intron number 2 from transcript evm.model.supercontig_169. 33 (locus evm.TU.supercontig_169.33) derived from phytozom e v7.0 (chr-ID supercontig_169; pos 347245 to 347991 rever se strand)
cttatttgcatctctgcttgattctgctcttcaaggtgctgagcttatagtaaagttgcctatgtagtagcacaattctaaaagtttaactttttgatagcaaaacaagttaaaaacttagaacattaataaatattaaaattgttccatctaatctggcttgatatgatgatgaaaataaattttgtttaaaagggcttgaaattttttgagtaaaatcaatttacttgggcatgttagttaaaggcaattgggtaagtaagaagtgggaaatggcttgtcatatgcatcatacagctagagaaacacagttaacttctcaaggatgaatgctgcacagaaacatgctttttcattatttttttggtttggttagggtctttaggatggctgtttgtatggttctggttgcgtttatatttgaatgttgtggcatctaaattacttcaaaagctttcccatgtattactcctgacctcattattttcctgtgtcttaaaagaatagagaaaaaacaagcatttccgaaaccgtggtttctgatataattattagatctaatataaattaacagtttccaattttaatttgatggttggcagaagattttccattgaaagaaatttccctaaactgtagttccatttactctagagtatgttgctattgctcttatttgacattgttataagcaagatttgttaggacccatgcaggacttgctaaaatttttattttgcaggttta

SEQ ID NO: 76993 - DNA, 913 bp, Carica papaya
  Intron number 1 from transcript evm.model.supercontig_215. 7 (locus evm.TU.supercontig_215.7) derived from phytozome v7.0 (chr-ID supercontig_215; pos 124191 to 125103 reverse strand)
gcgacgggaccgaggaggtgcaggagttgaggtaggacgttttgcctttattctagcagtgagctggggtttatggagtaggttgcactgctgatacattcatgaatctgaatataagtgagttttagttgccatgcgtccagagagattagtgaaagttaacatatgaaaatgttacttctactgcacgcgggaacttgaagaaacatgaaaatattttctatattgatacgtgcttagacatatatttgctggtaaaagcatgggttcgtgtgtttacgagtaatttctacaaataacaaagttctgaaaaatactaaaaacataatttccgaaatccatcattattttcaatgtatatttttttgttattaactaccatattgttatatgtaaaatacatgcaacttcaggaaatgtaacttagaaatatttttatgcagcacatggaacctttgatttttctctgtttgtctttggggttgcactgaggtggtgttgtttaactgttcagtatattagcttctgacttatcttgttcaagtttcatgtatctggggtgtgtctttgtgttgtaagttcaggctgagcagtagatagaattttattacgagtagaagctgtaagtacaaaatcatttacgtctgtgttacagggatatgaaggttaaatatattttaggcttggccacaagcaaatgaatgcaggacgccacataataggaatgttgtttgtatgtggaaagaagtcagtgggctcaagttgtggtcattttggtactgaagcttcttattcttggtgctagtgcaattttgtagacgagcagttcctttattggctaattgatactaagttgttggagtctagcctgtgtccaatatttgtaggatttgttcttcttttagaaactgca

SEQ ID NO: 76994 - DNA, 556 bp, Carica papaya
  Intron number 1 from transcript evm.model.supercontig_6.37 (locus evm.TU.supercontig_6.37) derived from phytozome v7 .0 (chr-ID supercontig_6; pos 232059 to 232614 reverse str and)
ggggtaatttctcgctctcttctttctgtcgcttttaagtttttccccttttattgattgtttttatccatttgtttggttggcaagaaaatgcaaaaaagcttaggggacttcacagttagagttattttgtttggtattgaggatatcgggggtagagttgaagattgtggactttaatcgaatattgcttgtctcattgtttattattctaggctaagattactgttatggcttggttgaggggcttttttctttttttcttttattttcttttgggtggggggaggactgaatatccttaaaccttcaaagaaagaatgcgtcgtttcccttttgagttccagcatttcattcttatttagtatgatttactggactcggagtttgttgggttagtagttatacttcagctcatttctgcatgacccttttgttttcagacttttgatggatcaccggtgattcaaactcgaagttcttcaatttcttcatgttttattatcaaatgaatgaatgataacaaggttgtttctatgatgatacagggagcagg

SEQ ID NO: 76995 - DNA, 756 bp, Carica papaya
  Intron number 2 from transcript evm.model.supercontig_129. 28 (locus evm.TU.supercontig_129.28) derived from phytozom e v7.0 (chr-ID supercontig_129; pos 246841 to 247596)
atctaatttcttcggcttttcgtgccgattttgaggtattaatataatctcttataacattttgcaattttaaatcgtttttctgtggttcttcacgtttcctgcgcttcttttactttaatttgggtggatttgatttgccctgaaattctagtggttatggtttaattttcttgttttcggacttttcgcgttcttatgttttcgtctatgttcattaagctttttctgtgggtttctcttttttccgggtcaatttgtttggaatcgtaaaggatagttgatcggagcattttcttgatagtaggttttcgggaaatctttttacgtttgcagcttttgtttactaaagctctggatgcgtgtcgggcctagggtttctctctttttaaatgttttctagattttgtcaataggaaattcaggtagctgcttcttcatcaaattgttgctctttacattacaaaatatatttgagcgtctaatgatagtattttttttccactaattaaccgttctaacactgtctctggcgacatttgattcctttttcagaggtctattatctacaagtggctgatctaattagtttttgctaagcaaccatgcggagatatgaagatgtaaggcaatttggatataaagtctaacttcatcagtttaactccctctcatgaaatgctgtattgaatgttcgggaagcttggctgattaaaatgtcattaagttgatattttttgtatatgtaggatctag

SEQ ID NO: 76996 - DNA, 956 bp, Carica papaya
  Intron number 1 from transcript evm.model.supercontig_450. 3 (locus evm.TU.supercontig_450.3) derived from phytozome v7.0 (chr-ID supercontig_450; pos 13309 to 14264)
aaactacagcggcatcctcgattccgcttctggaggtaacttttctcttaccccagcttctttgatatcgtaagcatgtgatatatacatatacatatatatgtatatagaaagcttatccaatagcagattaaaggtccagaattatacatatttgtatgtgtacaaatacgtttaagaatcacagacgtttgtgtaaatacaccggtacagattgtagaagaaataggtagaaaattaatagcttatcaaagtaggagatcatagtagatacaggctgaagattttacagaagaaagaacttatatgtatttgcataaaaaagtaagggaaaatatctttggcgaaagactgaaattttggagaatttgaatgtgtttcatgtaagatgatattaattcttgtttaacttaatctaactattaatcagttctcggtgttcatatatttatatatataaacatacattatgatattaatggtcatatatatataagatatgcgtagtcggtcatcgtcgttgactagttatccgggggtattggtacgtatatttatttggaaaagccaatatttaagaaagaaaacgatagaaatctgcagattcatggaccagccagcttgcaccagccgcctagaaatgtattcgcaatcttgataatgaagcaagcatcttttgactgcatatatatctagtatatacatttttttttaactgatacatacctatatatatatatatatatatatatcctggccctataaataaattgttttagttcatcaatagatgtttgaattgttcaacgtgattatccaaaacaagtcaacgttattgtttgcatttctttgtaccaactaatataaatacagaaaagaattgtcgttatataggacataaatcaataaccttggtgattttgtactcgtaattacagctgttgatttgttgaaca

SEQ ID NO: 76997 - DNA, 495 bp, Carica papaya
  Intron number 1 from transcript evm.model.supercontig_19.4 3 (locus evm.TU.supercontig_19.43) derived from phytozome v7.0 (chr-ID supercontig_19; pos 372296 to 372790 reverse strand)
tgcgaaaaccattgaaggagctttgtgaggaactggtacttatcactttatctttattctactattgcgtttattatggttatgattcaaggcatgttgtttccatattcgaattatatggtttcacttgtagtctatgaaaagaacgcagtgacttttagttatgtttttcattttgaatcttcttttgttaattgctgtttttattgctcggagctcacaccaattgcaagcttctccttttgttctcagctacttgaaaaaagaattgcttttgggtagtaaagtattgatcttaaattttttggaaggtgtttttcttattcaaagcgaatgaaaaatatgtctttaaccaatattggggattagggattaagagtgctgtgttgttgaggggtagaaagtttactgtatttacttgaggaacttatgttcattgtttggtgttattgtgcgtcagctaacagaatcctatcagcgtgtttcaggtggtat

SEQ ID NO: 76998 - DNA, 336 bp, Carica papaya
  Intron number 1 from transcript evm.model.supercontig_104. 90 (locus evm.TU.supercontig_104.90) derived from phytozom e v7.0 (chr-ID supercontig_104; pos 594033 to 594368 rever se strand)
ggttggtttcctcgattattgttatttttttttttcattttttttcattccttgctgctttgtttggttgagacagaaaatttagtgaaagggtgaaatgcaatttaagagcacgaaatctttgaatttattattctttttgtttttcattatttggaaaactactcttgtctttgatctagttcagctgagaattagagtgtttgtagagtaatttcgtgcaaaatgtaatcgctcttcttcagttcttgtaatccagtattattttaattttgtttatcctttggtttggcggttgcagagtcgcaaggacgttgaaggatctctgtttgttgt

SEQ ID NO: 76999 - DNA, 572 bp, Carica papaya
  Intron number 2 from transcript evm.model.supercontig_112. 92 (locus evm.TU.supercontig_112.92) derived from phytozom e v7.0 (chr-ID supercontig_112; pos 715967 to 716538)
ttgtttccggacattaaagcttactactcctagctgtaagtccctgctgggtttgtcctagttgttatgattcaaagcttacatctttgggattgttttttagttaaatattgaattttccatggtggggttttttttttgtgattaataagatttccctaagttttcatgtatgctaaattaatttgattgatttgacttgcaattagttctaatatgtttggttgagcaatcctagatttatatattgtgattcttgtttagggccttttgagcaatcctagattgatataagaaatgtgttttattattcttgtacgaggcctttaagaactaatcaagggactttctttgcggccgttaatgcttgatgtgatcagagcatgtttttgatccgtaagaactaggattgacagagggctttttcttctttttatatgttatgcagtatgtataaaaatgaggggtgatttgaatttgttgagctatacagaaatgtgatttattaaccatgtcctattccttttttggctttgacagttggtgatttgaatcacttgatatctgcaaca

SEQ ID NO: 77000 - DNA, 769 bp, Carica papaya
  Intron number 1 from transcript evm.model.supercontig_48.1 60 (locus evm.TU.supercontig_48.160) derived from phytozom e v7.0 (chr-ID supercontig_48; pos 922114 to 922882)
cttcatcggcggtatcgtcgtcctcagtttcacaggtaaaaattcattcacacccatttatgcacacacacacacgaacacatacgaacacatatttgttccttgtgcatgtccatacacgcactatttctatatgacgacattttactgtgttttgctgttttaattgctgacgcgattatgaaattctcacctgaaaggagaggtttcttttggctgtcaatttcatggtgtttcaattagatattgtgaaaggttactcatgctgtgcattttatagaaatgcatatttctctgatcagtgtcataattattgatggcaaggtatgttgccaagcctgaaaagaaaaaaaaaagtaattgaattggttttaagcattaaataatgtgccccattttccaagtaataccacgaacccagttgatacttttcttaacttaaccaagaatgtctgaatctgtatcaacggtcgatcttccttgtaggtaatgtttgtttggaaataatctgaatatacagagggtatagtttgatttagcatagttttgtccatgggctactcgatgcatgcttatgtttcttcctctagcttcaaacttttatattcatcttatttggtgcatcatgttttgtgattatgtgcaaatatgattgttgcatgattctttttatcctcgtagtctctaattgctcaagtgcattttctgacgttgtttgcttaagggtagaattctcaagtacggatttcttttttgtcacagctgaaaa

SEQ ID NO: 77001 - DNA, 981 bp, Carica papaya
  Intron number 1 from transcript evm.model.supercontig_17.1 19 (locus evm.TU.supercontig_17.119) derived from phytozom e v7.0 (chr-ID supercontig_17; pos 1497188 to 1498168)
gctcgtcagtgctcgaaacagtgactctgcagctggtaagtggctttcgccttttgaactttgatttgctcgcttcttgacctctgttaattaattagtttacgatgttgctaaaaagaaacacagagtaccagcaacttttttatatataattgtttaccaattaaagattatgtttgaagcaaatcaattattatttttttaaattcatttggaatttcacaaattgtttagttaattaagaatagaaagtctattagaataaaactatcctgtataaccgagactgtgtatttaaaatctacttgaaagttttaggatgttaatttttattatctgagatgagatttttattttttctaattaaatgaagtgcaggtttcaaaagaattccaccaataaatttcataaattccaaagcatagcttaacttagcaatcaaagtaatacgttcattgttcaattaattaattcaagaaattaatattggggttgatcgttttctgtgaagatcatgatcatcattaagagattcttgtaagctaacctatctgccgagaaaaagttccctagattcatcagttgctaatatcatttgactatttgtctttctggaaagttttagtattagcaagtgattttgaattctaggagagttaattccttttcaggaagtgttccgtgttcctttagatttctgatcattttcaaatcatatctttagttactttttacatgtgtgtttttttttttttaatgttttcaacttccttagaacgaacacatgtcagaccaataatttagcaatcaacattttggatacctgtttgttgctacttttctactttttctccctcatattttaaagcttaccgtatatcttaattgtgtttgagtgcaagtttatcagcagcttaataatacctgattttatgttctaatgcaggagatcagttgcaaggaaaattaggaaagaaagca

SEQ ID NO: 77002 - DNA, 655 bp, Carica papaya
  Intron number 1 from transcript evm.model.supercontig_108. 52 (locus evm.TU.supercontig_108.52) derived from phytozom e v7.0 (chr-ID supercontig_108; pos 537720 to 538374)
gtttggcactctttcttcgaggtatgtcgctttaaatctgactatctaattgcaattgaggctatagttagttcagcttgatcttagtcgtgattctgattattttacagtcaatttttcttcattagttgctgtagctgtagttattgtggccttttgttggtaaacatgattgtactgcaaccgaatagaaagacgaggaggcaaagtgaatcgtgtatgattccttattggggaacttgatcgcgtcgattgcattgtatgcaaaaactgacacggataatttttctatagtttgttttggtagaagagcagaaggctgaaggtcctatataatgacaaggtataaagttgtcatcgggcattttttctccaatgaaattgttggctacttgcattatcccctgctactaataactagtggctgcagtaagctagttatataggttggcacaacttgcaagtttgtttaatcctcttgagaacattcaaaatcagtgctctgctgttttaaccttttaattttcatggtaccatataatatgcacattaaaaagagaggttatttgtgcttatagcattcctagcagtagaggagtattgataatgttgtcttgcagggagaggagagtagattttcagtgtttgttcactc

SEQ ID NO: 77003 - DNA, 937 bp, Carica papaya
  Intron number 2 from transcript evm.model.supercontig_54.3 4 (locus evm.TU.supercontig_54.34) derived from phytozome v7.0 (chr-ID supercontig_54; pos 783677 to 784613 reverse strand)
caaaaaagctcgagcaggtaacttcaatgctttggttaagtaaggaatatgatgatactgattacattttttgaaaatgggggaacgtaaggacaccagccaaagggattgaaactgtccctttatgacatataagaaaatccaacattctgtttcctaaaaataatcaggagaagcaaatttcgccagcacactaatcaatggtttgattcagtcattgctgcgaaacaaagagaaatcagttgagaaaaataatcatgtttctatcctccaaggcacctacatgaaaattatgatctgatgcttctttttggcttcttagttttacctatttgtgtaatgggtctcagaagtcatgagaaatattttaactatgtggaagatctgctttcatatgtttgtatcaaaagtagattaggcaaatttatccttctggtatagaaataaccgttttggtcttgtcaatggatgattgaaattctccattgaattttctcaaaaaaaaaaaaaaagaaagaaattgtccatttggtgatgacttttggacctgtattccatcagcctgttaatatgaacattaacgcaagatttaatgtaattggaatctgatggaacaaactgtaccatgtttcacatttaggatatctgttgaataataactgtatttttaaagtatatgaaccaaatatttagtaggtgtattcatgtttgcttctgtacatgtgcagtgtctaaagtttctacttattttatataatagattactggattttgtaccttgtagacattaagatcaagaaactcctaacttttgctcatgtttagccaaccattcatatacttccctttcattcctctcatttgtattagacctctcaaactcgatattttataatttgcagtcccaagaacgggccagaaagcttcgagcagagct

SEQ ID NO: 77004 - DNA, 481 bp, Carica papaya
  Intron number 1 from transcript evm.model.supercontig_54.3 4 (locus evm.TU.supercontig_54.34) derived from phytozome v7.0 (chr-ID supercontig_54; pos 784713 to 785193 reverse strand)
ggttggaatacctggctctgtgaagaggtacttgttgctggctgctgggtttcgtggctggaatcaaatcttttaatgagtgtgttaatcttccacatgttatttcggatagatgacttatttggccctcatgtgggctaaggcacttgttcttttggggtttgcctttgcctattatccgaaggagttgggaggctttgttggtttttcttatgattaaaaaagtactgttatgaccgggggtaaaagttgcatcttttttgcttttcttttctttcttctttttgtttcttttttgtgaggataccttattatttttcgtattctctttccatcttaataatatatttttctttttctatcagaaatacatttattctctgtttttctcattagagcctcttgtctgtaacttgtagtgtactggtgctttacgtgacttgggctttcttcattttattttaggctacccaaaggagta

SEQ ID NO: 77005 - DNA, 860 bp, Carica papaya
  Intron number 1 from transcript evm.model.supercontig_3.44 5 (locus evm.TU.supercontig_3.445) derived from phytozome v7.0 (chr-ID supercontig_3; pos 3209005 to 3209864 reverse strand)
cttcttttgcttctgtaactggtttttccttcttggtgagtcaatggcttctcctttcttcctctacacacacacacacacacacacacatgaacgcatgttatattcattatattttttctatccttaccctttttggatgataataattcatggcttcttgtcaaattgtgatatattattgaatgttctgacgatggaagtttaagtcatttctaccctctgtaattttttatgttgggtaagcaataggatttacatgcaaagtaaatattgcacagtaggtgtttgaaaaaatttaaaagagaagcacaaagaaacatgaatttcatctttttattcataccgattagttgtttctcactatcgaatttcaactaaatcttttattcaataagatatttccaccttgtaattttatatggtcggaaaatcaataaagtttacacatgaactaagtagtgtgcatagtaggtgtttgcaaaaattcaaaagagaagcacaaagaaatatgaacttaatcttttattcatactgattagttgtttctcactgtcaactttgtaaaattagcagtatttaactttcaccggtttgaaatgttttgaagaaaatttcttggtcctaggataattttcctttgctttgaccttatttatttttaaatcttcgttactcataagtttgaattataaattaaatactctagatagtttggttaactctactcatatttccaattacatggatttgtattatgacttagtgatgaggaaatcataataatactttatatgatgttggatatgaattgacttaaaatttaataaattcttctttgttggcatgactagcttgga

SEQ ID NO: 77006 - DNA, 510 bp, Carica papaya
  Intron number 2 from transcript evm.model.supercontig_12.2 74 (locus evm.TU.supercontig_12.274) derived from phytozom e v7.0 (chr-ID supercontig_12; pos 2462055 to 2462564)
aagatcgtgttacatctttgaaattgtctataaaggtgaactttgctcaaaagttttcataagttttatgtttatgtttaagctgcattttgttgaaaaatactgaaaaaaagaaagatctgtcttatgctgaagataatagtttctcttggtatttgatcaagaaaattaatttgttaaattggcttgtcatccaccattatgggcaataaattttgtttcataaattctatctgtttaaacctagcttgaatagtgcagtttaagcctgtacatgaactggattgctttcagtttgatgtcttatgttaatattctgttttatctgtccgaactctgaactgtgaatccagttattgcattgaaatgaatatcaagtctggtgtaagaatattaggtcttttttctttgaaataaaaagtgtgtattatgtattaatgtaagaatattatgtcatataatctgtgaagtgaagttgcatattctgttatgcaggttactaggcttctg

SEQ ID NO: 77007 - DNA, 813 bp, Carica papaya
  Intron number 3 from transcript evm.model.supercontig_12.2 74 (locus evm.TU.supercontig_12.274) derived from phytozom e v7.0 (chr-ID supercontig_12; pos 2462697 to 2463509)
tgctccttacctgatacgaatctcttggaatcattgtatctctcatcttagtcacgtgcccacacaaaggattagagatagtatactaggatatgcataaaagtgcatgctctcccctcatatgacgttttgatttttggttggatatgatcacttcaagaaaggaaactaaaagaaaaagaaaaaatcaaaggggaaaattttgcatgtttattgtcattcctgtgcttcaatgagaactaatatggcaatactgggctctcttgataaaggattactaatttattaggttaatctataaagagtgcattgaacctgatctctttgatgaaaatgcttcaaacgatttatgctttttttgccaacacatactgataggttggaagagcaaatgtaattgttccatggcgtggtattttgcagtgtagataacttagcaaacaaagcattaaaatcattgatgcgttgataacttgcaatttgttgctaaatacttacagaagtcctgaacctgggtttgcatgactttactggccctgtttggccacagctgattcgtgttcatgaaacctttttctatttattgcagagaattttgaagcaaaaaatatttgtactgatgcgaaagaaacttgctataactggttttgcaaagttggttcgattagagagcttcttccacgcatgtgaagtcctccaactgattttatatcttgctcccatctctctctctctctctctcttgttttcctcatttgttattcatgttgggctccagttacttggaactggcaatattgccttgcggtagat

SEQ ID NO: 77008 - DNA, 329 bp, Carica papaya
  Intron number 1 from transcript evm.model.supercontig_44.1 25 (locus evm.TU.supercontig_44.125) derived from phytozom e v7.0 (chr-ID supercontig_44; pos 1563086 to 1563414)
gtgaaattgggcaatcagggacttcaagtaaataagcttcttctgccttttctttttcttctttaataaatcattatctactttcatttgcataatcaatatctgctcttggtcatcaactaagaaattagagcaatggctagcttctacgtagtttctataacccacgtactttgacataatatgtacttttgtttttatcataataagctccttttatgtgtttggaactgaagaaaaagaaaacaagaaagtgggtttgagttaatttatacgtatatattgattgtgcaggtgtctagattaggatttggttgcgtgggactttc

SEQ ID NO: 77009 - DNA, 850 bp, Carica papaya
  Intron number 2 from transcript evm.model.supercontig_2.35 6 (locus evm.TU.supercontig_2.356) derived from phytozome v7.0 (chr-ID supercontig_2; pos 4069750 to 4070599)
aagggccatagggtaagttggcatgcataatggtgaaacgacagattaggactgccaacagagaaacaatataaggatattcacgtgtcagttgggagtgcagaagtgcttgatgggctttagaaaattacttaatgcaaacctgaaattgacaggttctggtttagattaactaggttttgttagaattaagtgaatctattctatatgcacaatggtcaaatttgttttgggttatggggtttggcatggttatggaggctgtggtgtctttgccaccatccaaccgcatttagtaatccctatctctacacaagctaccaactcaatccttcatttccagctcacctctactgtgtaccattgtatttgaagtatgaagaggttgaagatgcgtaactccttcaacattatctttgctgtatgattgtgcctatcaagatctctttggagctgttgaggatatatttcattgtataaaagcactatgaagatctcttttgagctgtctgatggtacaaaaacagttgaacttttgaatattatatgcagcaagatacttttaagtaaaagaagaaaccagcagtttagaattctatcacatattgcatgtagtatcctctcttttcccattgcatgtagtatcagttcaagtcgccaccatagtggtattttgtttactgtttgatcatgtattttggtgatattcaacattttcttcagagcctattaatgcaatttagttgcaacaatgctcgtatgaagttgaattgttaggtctatgttaatggctgtaagttgccttttttctttagttattctggcgtacaagaaaccttggctattttct

SEQ ID NO: 77010 - DNA, 583 bp, Carica papaya
  Intron number 3 from transcript evm.model.supercontig_2.19 5 (locus evm.TU.supercontig_2.195) derived from phytozome v7.0 (chr-ID supercontig_2; pos 2725814 to 2726396)
gacagaagctacacaagtattgcttgtgtttgttcgggtttttgaatttctttgcattttaagaacttatttttgcggttatttaataggtgaggtgccatgtaaaaatgatgaaatctgagaagaaattgatcacatttagctcttaggtcgtttatgtattcttagttagaaaaggatactaaatatcagctgagacttgatggtagataagttgtcattgtatgttatacatgacggattaattggtgagttatacagttctcatactaacgtattggattgtggtttgatattttgaaatttctttctgcattcccctactttgtggttttcatgtagctagaataagggagcagtggtggctagctttctggaattgtgcatatgtgggcactgctaggttcatattttgctgagggattttattttatccaaattggtgaaggtgctcttgagtttatgcttcaagtacatgatagacggatgcaccttgctaaaggataagctgactgagaacttggaagtttatgtagagcctatactttgaaaattgtgcttttataggctttctttgcacggc

SEQ ID NO: 77011 - DNA, 751 bp, Carica papaya
  Intron number 2 from transcript evm.model.supercontig_199. 26 (locus evm.TU.supercontig_199.26) derived from phytozom e v7.0 (chr-ID supercontig_199; pos 271182 to 271932 rever se strand)
ccaatacttgaaaatgtaagttcaacactgcagtttcttttctaatgatgaagcccaaataaggaacttttttgtagcacaacttggacgaggattatccttacctcgcatgcatgtattcgattgaattgccaagtgttgatgtttttaacagtctcaaaaaatcgtattagcgtttttatgcagtttctttctactttatagaattttgattcacttaagtagaaacatggcaaatttcagttccaccgcctgtgtgatttggctttattgtagttcaaaatccttttttttatgggtaacagtttaaccgtctttctatgctctgattttttgctatttcacataagatcattagtttttaagatattatttagcattaaaggttcatatcttcatatctaaagattcaggcacatacagatgttctaatctactgtaccaaattatcacaaaataaaaaataaaaaaaaaaaggtttgaagcatgtcaagtccaccggggatgaatttttgaaagaataccatataacttcttttcttctgaaattttcctttcgtctgaaatttttggaagtggcatcttcaaaactaatctgatagttttcctatttatctttttttacccccttttattgaatgaatttatctgaattatgttcctttcattctttattaacctcgttaaagtttgttctttttttgtgatgccctcagttgcttgagagtttccagacagcataccccacatt

SEQ ID NO: 77012 - DNA, 709 bp, Carica papaya
  Intron number 1 from transcript evm.model.supercontig_199. 26 (locus evm.TU.supercontig_199.26) derived from phytozom e v7.0 (chr-ID supercontig_199; pos 272016 to 272724 rever se strand)
tattgcctgcagagaggctggtttacattttgcaggtctgtcttgtagacttttagtagcgaagcagcataatttttaaggtctcattttatttcaagaaaaaaattttaaggtcctattgaattgtagaaaactgtttttacttcattatttattaactttatgtgtttgctacatatatctatgtaattgttaaaaatgaaaatattatttgaaaaataatagtaaaaatatagcacgagttttaaaacaaatattttttcttttcaacctcatgccaaattttcactacatttgtaaaacttgttttaatctgtaacaactatatatatatatatatatttgtgtaccatcacatatgaacttaagaaataaaactcagaacattctatacggttaaatatattttctttggagctctcatctaagacttaataagaggagtaaaaactcttatttcttatgttttatttgcggagataacaaacaaatttattttgtataaaagaaaaattcaaaatcttaggtttcgaagaaaaccatgaagtcctttttatcttgaaatgtgttctagggctttgagaccctcatacttcctcttctgctttgtattcataataactgcaatgacataattcaaagtccctgctctatcaaaatgcaccaactttgatccccttttgttaaataaatctctttacaggggttc

SEQ ID NO: 77013 - DNA, 788 bp, Carica papaya
  Intron number 3 from transcript evm.model.supercontig_2827 .1 (locus evm.TU.supercontig_2827.1) derived from phytozom e v7.0 (chr-ID supercontig_2827; pos 5389 to 6176 reverse strand)
aaatcttcagtggctctgctacttatcatcaactagtgtgtactcctttatgttgagaaaaagttaatggaattaaattgtcaaaagtatttggaatttgtttccagtcttcatctttatgtctaaatttttccaaactatttacgacatgtttgattcaaatatatattattctcactctattccatgatttcattgatttattatgtagattgatattttgatttgcagttaagccagctcaatattgttttaaattctaaactgatgactttacttttctcaacatagggatcacagtatacctagttttgaattaaacatgaaatttgatgtggtatttaaagacttcttttaatctttattgcatttttattatatttctatccatgttctaaataattgacatttgaacccaatggtaccttattcatcttgaaattaatactatgtggcattaaggaagtagtactgaattctattcaatagttcacacctgaggaaggagaatatatctctaatatcgttcatgtgatttacattggtctatacatgcataaatatgtagatagatagatataaatatacattgtttccatgatagaaacttatacatggatacaaatgatgatggtgtacaagaaactagtaaaaattcttataaatcgttatagtttctgcatctttgtggctttctccttgaactaatgagtccaacattatggtttcttcaagcgcctgaagctcattttggatattgggatactactgatgtctgacaggtgtat

SEQ ID NO: 77014 - DNA, 433 bp, Carica papaya
  Intron number 1 from transcript evm.model.supercontig_13.1 96 (locus evm.TU.supercontig_13.196) derived from phytozom e v7.0 (chr-ID supercontig_13; pos 1777275 to 1777707 reve rse strand)
ctgtaactttgtcgtcgcttattgctccaagattggtatgctactttattcacccgctaatactgttgacatttatgttactgctctggagttaattaatgggaatttgtcagatgaacacgtgtttagaagattcacgactgcttaaattgtattgttttggcaaatctgttgtttgccacttgtttgaattcgtagttacctttctattaatcttcagttccctcaccccacttgtttgccgcttgtactctctctctatttgtcgtagtttttgctagccagtatgatggtcgctaactcctgttgtagttccagcttcttcagaaaacatcttcattttagcttgattataaaagattttaaaagtattaaaagatcttctgtttttcggattcattttaatatttgtaggctcgtagaggaggacttg

SEQ ID NO: 77015 - DNA, 687 bp, Carica papaya
  Intron number 1 from transcript evm.model.supercontig_37.1 47 (locus evm.TU.supercontig_37.147) derived from phytozom e v7.0 (chr-ID supercontig_37; pos 1207862 to 1208548)
ttaaggtttgcttctttctcttattcattttcctctcagttcagacgaatcttaactgtttgtaagctaaaaattaatgtagatgtttggcttaatgtcttgtttatctttttttgtaattgtttgtttgatgagaaatgcaacgaggaaaaacacatactacaattgcattacgttaacggctatggcgaatggcttgttagtaggttatcttctggtggagagcctgtgggtgatgaaaattagattgttcatttggattttgatgatacggagaaaatttcagagggatcctttgtaagtagaaactgatgaattaacagaagaaaagtttttaaataagcagcatattagaaatgattgaattgtgggttggtcagtaatgggaaattccatcagttgaattgatggctatctgacaggttttctgagataattgtaatggctggtaatttttttgactgctacatttactgaaactttccccttcaaccttttgtttatgcttcttgttttgaagttttttgatatgtgccagagtgagtaatttgctagtgaataatggtttatactggccatatgatgtgagaattcgagaattgttttttgtcttgcatcatgaattgtttggttcatatctctgcatggtcaggatcctaaaattcgtccattagttgatcaagactc

SEQ ID NO: 77016 - DNA, 948 bp, Carica papaya
  Intron number 1 from transcript evm.model.supercontig_36.6 2 (locus evm.TU.supercontig_36.62) derived from phytozome v7.0 (chr-ID supercontig_36; pos 501843 to 502790)
ctgaaaggaagtccacttaaagtaataggtgcctattaagttaattgctgatttagaaagataactagttatgtacataaagatggttattataaaagataagtacttaatttatgttttacaaaagtaaatatgcttggataaagaagtcaactaagtattttaagttgatgcaaaaaagttcaggtttgggtgtgtgttattttgctggttaacgcagctctttgacatttaataagaatcatgcttattatactgccaaatggatagagttaaacacggttcttaaagctgtttattagcaccaacaagcaaagataaaaactcccttaagagttatttagacagatgaatcctttgcgaatctttgctcattagcaagtacttatatgtggagcaattaattacttgctctattttttgatttggtagtgaatgtgcaggccgaatatacaagtgataatcaattaggcacatcaaaaaatctccctatgtatgatcatggggggaggactatcttttagtttatgaagtttgtattaacattagcttacataagacttggatgacaagtgttgcaactatattaggctattatttttagttactacttactattcttgttctttgacaaggaaatccaaactacatcgcaaatgttacattgtataaaaaaaaaaaaatgttacattgtatcatgctctaaattttcattcatatattaggctattatttttagttactacttactattcttgttctttgacaaggaagtccaaactagatcgcaaatgttacattgtatcaaaaataaaaaatgttacattgcatcatgctctaaattttcattcatcttcaattgccaatttcctttttagtgcatatctgtggcaagtaatgactaagctttttatatatcttctcaggaattggtggattctctgcaca

SEQ ID NO: 77017 - DNA, 889 bp, Carica papaya
  Intron number 1 from transcript evm.model.supercontig_19.1 36 (locus evm.TU.supercontig_19.136) derived from phytozom e v7.0 (chr-ID supercontig_19; pos 886910 to 887798 revers e strand)
aattctgcctgcaggtgcgttgtatcgagcactatcatatatatatatatatatatatatatatatctcactattcgtgtatatgtatggtcaagtcgttaggcactactaagtactctcttcttccttttaactgcaaatatatacgtatacctatatatacacacacttacctgcagataattatgacatttaattttgaaatttacatctggattcaaaattggaagacagctattagatttgacatttctgcaacaaaaacagtttgacgtttttgaaaaagtgaattcaatcgtgctcgatattcaacgtgaaaatttttgttttgctttggtcctaacagaaaataatatccgaagggaattgttagatacgataaacatcgtagaagtggcccaccgtgcaataagaacagcgtagattcttactactattctggatagcctgagtacaacagcgaattattgaaaatattgtcggtgccaagatcaagcacccaattaatggattagttataatccacacataatgatcaattcactaaataattaacttaaatttcgtttcacctagttatgatgtatagaaaaagtaaatattctatgatatataaattcttttaattaaagtagttataataaattaagaatctgatttgtatataaaaaaaaaaactgataaatctgaaataaattgttataattctctatgatatcgtattttttcctttctgacttcttataaaatttatgtcttagttaaactaatttaaggaaatttataaagaaattatattaaagttttaaatatactttaaacatagcctaattagttgtattgttttcaaggatctaactaacatagtgtagtgcctaattaacagaat

SEQ ID NO: 77018 - DNA, 867 bp, Carica papaya
  Intron number 3 from transcript evm.model.supercontig_10.2 0 (locus evm.TU.supercontig_10.20) derived from phytozome v7.0 (chr-ID supercontig_10; pos 458095 to 458961 reverse strand)
ctaaacaaagataagaagattctttcacccgaaaagtaagggtatctatcatgattagaaaatatagttacatttttcagttcttttaatgtgcttggtattctttctttgtttcgttctagttgaccaataaagaagtacagttttttggttctgcaaaattggtaatcgaactgaatgtgcttgtttaacattgaaaaatattgtttagggaatggttatctcactatttaggaatatgctggaagtatctgttaactctgcaaaattggtacaatttgagtaatcaaactgcctttttttggttctgcaaaattggtaatcaaactgaatgtcttattcgacattgaaaaatatcctttggggaatggttatctcactatttaggaatatgttggaagtatctgttagctctttgagcaaatggagaagttcctgatgatggtgtctcctatgattttatttttttggttgaagatgttttgctattctgtttcccctcatgcaccaaaattagccttctactgggatgacatatttcttttcctatcctcttggtagccaaggtaaagagttccattctctctccttcagattgtttcacatttgcttgtaaattagtttcttttaatgctggaaggccactaatgataaagagaaagggtgtatgcttgcaagaatatattgtggtattcagagactaacaccattagaatgcaactaaatgtcagtttcagaacctctttgacaatagtcttttatattttgggatattttgctagcactttcttctttaataattgtaatcttttagtgttctttatcaattcaggtttgagagcattatttttaagctggaggttttgg

SEQ ID NO: 77019 - DNA, 698 bp, Carica papaya
  Intron number 2 from transcript evm.model.supercontig_19.1 22 (locus evm.TU.supercontig_19.122) derived from phytozom e v7.0 (chr-ID supercontig_19; pos 791954 to 792651)
aagcaaatctggagcttgtaagttacctttccttcaggctaaattattatatgcattgtaatttaagaaatttcattcttctatgtgtaattagagtatgtagtctttggtggtatggaaagagagaaatatgagaacttttgatggggaagatgaagttcttgataaggttaggaatagatgattccagactttggtttcttagttttgggttattttctctatttaatggggggatttagagcatcttcttgacatcttagttgatatgtaaataatatatacacgagctgatatcctcttattgtctgttaatcaattgtacatactatatattttttttaaattagagtataaagtcaaactgctttcatttcaatgtttaagttcattggtttgtacgatgatatgtattcattttattcttttacacttgatattttttttggaaaagattaatatcatatgtataagcatgctctgagtttgatctcacttcttcaatattttagtattggagtgtttttcaattctagacttcttcttttcttccacttttttttttttaaatctaaagaagaagctcatgtttcttagattctttagacatatgtctttggtaaaccagcagataaacgtttatgatttccctattttagtttgatccccagatattcttttaatgtaggtgttaattg

SEQ ID NO: 77020 - DNA, 752 bp, Carica papaya
  Intron number 3 from transcript evm.model.supercontig_3.91 (locus evm.TU.supercontig_3.91) derived from phytozome v7 .0 (chr-ID supercontig_3; pos 749192 to 749943 reverse str and)
gagtttagagtctgggtttcttttatttttatttttataaatgggttttgattttgtaagtaatttaagggcttatactcctcttgctggtcatgtaacaggataattccttacaagctgtatggtctaatgataaacatggtaggagattgataaggtggggcctgctttcagtataatatatcgttatttctgttcactctaagataattcatttgtgtatgaatgattttttttttgaaattgaagagttttcaagagtacaaagttgtattttgatagtattaaggatacttgatttcaggccctagctattttgattaatgtgattctctttattcttgtgagaacttcgggtatatgattgaattttttattgacatgtaaatattttcgcatacgggttgcatactgttgatgcttttaatgcatcataccttttattttcggaaaaatatctacttgctttccgatttgaagtaagtaataaaatttgaatttctaattgttgaaagaaagctgattatgaaagtattgagcttaccatttgggatttgctcataatatattcttctcaaattattattcttctcaagaaatactacaaaaggtcttataaaaaaacttatttgttctcaagaaagtttgatttagtgtgaaaacaaagttgctatggttgatgtcatttggttggttgtcagttatcatttaggatgattatgatggaattatctgtgtgtttttcagggtgg

SEQ ID NO: 77021 - DNA, 704 bp, Carica papaya
  Intron number 1 from transcript evm.model.supercontig_1.37 3 (locus evm.TU.supercontig_1.373) derived from phytozome v7.0 (chr-ID supercontig_1; pos 4776535 to 4777238 reverse strand)
atttcatttacacaactcacctttcttccttccaggtatatgcgtatttgtgttgctgtctgcatacgcttgtaattatatattcgtgtatgtgcatgttaaggatgagattctgtacgttaactgattcaaggatgctgttggtttccttttactccttgtgctttgctgaggaagctgatggggagaaggggattggatgtctcgtttgcgtgtttatgttgggcatttgtttatgaagttgaactgttgtgttttctttccgggcatatttttttcttttattcgagtgcagcttgtaatgaatatgaagctaacattggttgaatgggcttaggaagggagttgctgaagcttgaaaaagtaatgaatgtcaatatgaaaccattcttttgctgatgtacttttgagcttgaacctgagagcatatagaagtaacctaatgtttgataagaagcaatgttttagtaatcacattgcggagacaggatgttcctgtgcaagcttacttttaaatgtcacaatgcaattcacttatggacagtgcatacaatttagaaaccttggtattctggggattttggtaccatagttaatttcaggaagttggtgatgtttagcatatggaatgattacatagtttgtataaatataagctttctcacttctttctcctctaactaagagctgatgtatttgccaga

SEQ ID NO: 77022 - DNA, 703 bp, Carica papaya
  Intron number 2 from transcript evm.model.supercontig_17.9 (locus evm.TU.supercontig_17.9) derived from phytozome v7 .0 (chr-ID supercontig_17; pos 102110 to 102812)
gcacaccctggtatattcccctctaatttcatgtttttgtgtctagagtaaatctaaacttgcattgatatatctccttaaacctactttattctcacaaagacataataaatacacaaatgaacgatatctgcggctctttttagccttaagttctcagtgaagatatctcagggtgcagtcataaacaaattttgagaagttatatataggttgaatgagttattctcaatctggcacttctgtgaaattttcttgcaatgaatgatagtatcttacctgatttctgggagagttttggcatggctcaatttgcttctaattgccttctagtggccactggaaggatcccccagcaatgtaactttgatggttttggggataattgcaaattaaaatctgtaatttcgaagccatgcaaggagtacttgttttgtccgcacctctaaactggtctatttgaaactgttcagagctttggcactgagctttcttggtagtaattgatgaattcaaatggtaaaaagtatgagttgaaacaattccacaaagttggcatgttaatgtcttattctagtttgtttagtgggaaaatattccaccttagtcattgaagtttcctttaaagaagttaaagaagaattgaaacagaggtgtatcttatgcaggggaatttgcaactgcaagagcagcttcagcagct

SEQ ID NO: 77023 - DNA, 520 bp, Carica papaya
  Intron number 2 from transcript evm.model.supercontig_26.1 84 (locus evm.TU.supercontig_26.184) derived from phytozom e v7.0 (chr-ID supercontig_26; pos 1324143 to 1324662)
gcaagtacgtaattatcaccacgacgtgtgaatgtattcttcttctcccctctatacgccgtcagtactgttagtgcgttcttcttgttttcccacttctcttgccattccaactttgaccaaatctcataaattataatgattttgcttttcaaaaaaatctccgtatcactaaaccacctttctaatcggcgatttagaacgcagattagtaattaacttaagattaaagattagaaaattatacatttaagtattcactgacgtacaagctcacgtcatccttaatcaccggcaacgtacaacagttttcttcatttccacgaaggtggttgacttttgaaccgtgtgaatgagattggtgaatgtagttagtttccttatacaatattttcagttgaaaatttgagtcatgcttattttttataactatatacctacatatatatgtgtgtgtatataacgaaatgcgtggacggacgcagtcagaggtgaaatttctggggaagttttctcatcc

SEQ ID NO: 77024 - DNA, 438 bp, Carica papaya
  Intron number 1 from transcript evm.model.supercontig_15.1 46 (locus evm.TU.supercontig_15.146) derived from phytozom e v7.0 (chr-ID supercontig_15; pos 2587057 to 2587494)
gcccatccaccaaaaagagaccacgttgggtgtctttaaagtgagattgatttgtttgtaaaattcaaaagtgaagtaaaatttttggataaattctacatatgttggctgggagttctgaaagtaaggagaccagctaatgttgctaatcagttgcaaaacctcctctttgatgctgaaggtttctaggataggggtatgatagcatttgcccaatatgatggaaaatttagagactttattgtacctctttttctttgattcttttgaataagtaaggtagccacttagtttagactcgttgcccagaagtacatgtttgcgctttcagattcatgccctttttaggtctttggtagccttgacatcttcggtagtaggttactgtgagtgggattaatgtaatttaggctgttgcaattcgggcttatcagtggc

SEQ ID NO: 77025 - DNA, 936 bp, Carica papaya
  Intron number 1 from transcript evm.model.supercontig_12.1 8 (locus evm.TU.supercontig_12.18) derived from phytozome v7.0 (chr-ID supercontig_12; pos 103147 to 104082 reverse strand)
acaagggtttggaggagctgcctgaggctatcaaggtggtggatatttgcagctattttctgttcttgtgagttaaattttgaatttagcaaccataaatggaacaaaaccagtgtttttctgttgctgttgtgagttgaattggattttgatttctgttatctttacagtaggtgaggatgcactatttgaatgcaggcttttatattattattaaagggtaagtataggattgaataggtattttttgaagttagaaagttagtagttaatttaatgaaatgatttgcgtattcaattttgtatcgaagaatcaaatgtttatttacatcttagaacgatctattattgcaatttggataggttgaaagcgtagatcaaagagaaatcatcgatagcttgtgctgaaattaatcaataaaaatgagataataatatcttcttaaaagaacagaacaatagttaatatccaaacactagactcctgtttctattaccgtgtagaataattgactatagtcaactgttctataaacttaagttaatagaaaataaaccaatcgattattcatatattaaaagatgttcttgaaggcccttcttcatttttgcaatggatcacaaacaaaggattgggctgattgttctcctagatgaaggttgccattttgtttccattagtattggcatgtgttttccattatttacaataagcctttttttttttttttgcttctcttcaaatttagcaattcaattaataatacaaagtatttaaaaatctcaagatttatttcaaacgtataaatgaattatgtatgcttttgtggttcagtttagttcagttgaaatgaaattttatcgttagtttttccagatgaagcctacatatgatattctggtcctattttcaggctgtattcagggaagagacca

SEQ ID NO: 77026 - DNA, 403 bp, Carica papaya
  Intron number 2 from transcript evm.model.supercontig_14.1 40 (locus evm.TU.supercontig_14.140) derived from phytozom e v7.0 (chr-ID supercontig_14; pos 1682353 to 1682755 reve rse strand)
gtgacccaaaaaacattgctgttgtgcattgtgtatgacttccaagttgttccatataatctgttaatttggtggccttcatgagtcatcttatacaaggtttatattgtccagtcttcttctgaactcaagtttggatattatatcaaaacatttgtatagctatacttaaaagttgtaatatgatcaatcaaatattcttactgaaaaattagggatattgtggtctctctttatctttaacttatgtaggaatcttggtgaaaaatgattggagaaacaaaagttcattaatagtaaagattttcttttttcatatctgctaattttgatgaattacattgcattatcaccgatgtttttcactttattttcgcaggcgggtaaaggtcggacaggctta

SEQ ID NO: 77027 - DNA, 701 bp, Carica papaya
  Intron number 1 from transcript evm.model.supercontig_107. 70 (locus evm.TU.supercontig_107.70) derived from phytozom e v7.0 (chr-ID supercontig_107; pos 361717 to 362417)
ttattaattctgtcgttcttcaggcaagtatctgaccttctagctttttggtgtttcttgaagtggtaggaagaatttcagaagaaggaaaatgtttgcattttatgaagccatacagcattggtttttgcattttcatgtcctgcgatgattttcttttttaaaatcctactgtattggaggattaaaggctgcagtatttttttcctactgggtgatgccagtagtatttgcttttcctgggaaagaaaattgaatatcaagttaaggttcatgtttgtcatcatctctcattttttcgttggtaaaaccaccaatatctgagtcttatattttatttcaaaaaaaaatctgaaatagatagattaaatttgataattttgtcctaatatttctgtaagcatgataaattatgttgagaccaagggggttcgcatccatgaagtgcttgcttccatttatttatcatgtgaaatgaggagcaccctgtggtttacgaggacaattggctcccttcgtatggatgcattgcagcatcttaggttgttatataggaagttccaattgatgttatctatgcctaaaagcagtgtgccaatttggcaccagatgatcctagtttcaaacattgaactgccaagcccagcactgtctgtcacttcggtccttatgtttgattatatatttatacttgaatcagg

SEQ ID NO: 77028 - DNA, 902 bp, Carica papaya
  Intron number 1 from transcript evm.model.supercontig_34.1 44 (locus evm.TU.supercontig_34.144) derived from phytozom e v7.0 (chr-ID supercontig_34; pos 1297965 to 1298866 reve rse strand)
ttcttcactttctgcttccatcacaaaacttgcaggtagaaatctcctcctcctccatctacaatctcgttaatggcttccttgattggacgattctttttttgtgacctacaatcttgcatctttcattgattttgttcaaacacccataagttgtttgataaaagtacccacagaaaatctgatctctcttcaatttctgcctccattacaaatatttaagtacaatctgcttcttctccatgaaactctcgttaagggtttgcttgattgcatgattttttcttagtgacctgcaattttggctattcgatttatttttctcaacactcataagctgtttgataaaagtacccagagaaaatctaatccccaaaaatgcatacaacggtacaaagtaaatagcaaaataagaaaaaaatacaatattaatacgatttggcagagatccttacgagcaaaccgaaaacaaatttttcaaaaatgtacaaaatcacataaaataaagagtaaaataaagaaaaagaatacaagatttaatgtagattcgatagagatgattatatctatggacaaaaccgaaaagaacctttctgaaaaatgcacacaatcacacaaaaaaaaaaagagtaaaataataaaaaaaacataagatttaagatggttcgataaatattaggatttttttggaatattttcagaatttaccaaaatatttctaaaatacaaacaggatacttttcaatatatatatatatatataatattctcaaaattaaatcatataaaaaaaaaagactatctaataaaaagtacccagagaaaatctaaatcattttgttctgcttgtcacgctgaaatgtgtagtgaaagaggattacagaagacaaggctacggggag

SEQ ID NO: 77029 - DNA, 561 bp, Carica papaya
  Intron number 2 from transcript evm.model.supercontig_209. 11 (locus evm.TU.supercontig_209.11) derived from phytozom e v7.0 (chr-ID supercontig_209; pos 52338 to 52898)
gtaattgcaagttcccttcaaggtaatgtttcatagattacttaaaacatatgcatttctctcgttgcttcattaattaaatttcctagtttgcttgatttgctttctggggagaagatagttgaaggaatactctgaaacttcatggtagagtttgatgtgtatttgatcatataagaatttttgctatgtgggtctttggtgaggaaaaatgaaaagtaatttattcaaacttaagggtagttgttcaaagaaatgaacctaacattttcaaaagatttttaagaaataaagatggagtctacttttttagtttatttcgaatagcgaatagccaatcactcgttggaatagttagtacttcttttcttttatataaaattacgagttcgagtgttaccatacacattttatatgtatctttactaaaatatttagttatgattagcgtgtaagatctaatttcatagtaataaactcgatagtgtttcttagtaaattattggagatcttctgaagtatggaatgtggcatttgtggattttggaatgcagcaagaca

SEQ ID NO: 77030 - DNA, 370 bp, Carica papaya
  Intron number 2 from transcript evm.model.supercontig_507. 2 (locus evm.TU.supercontig_507.2) derived from phytozome v7.0 (chr-ID supercontig_507; pos 23771 to 24140 reverse s trand)
cgtagagaattcttattggtttgagttctttataggtatgttcttgataatagtgccatcactattctgaggttaattctgtttattcgatcttttgatttgggttctggttttatgtctagtatattttcttacgtcttgactctgttgttgtaacctttctacattttgtttcggggcctctcattcaatgctaatccagatgatttgcctctctggggtatgtatcttttgttagttaaggttttttttttttcttccctgaactttttgcagcattattttatgtgttttggaaccattgtaatttgttatttaatcttgtttacctttaggtttcgttggtgaataccaccctgatagaagcaat

SEQ ID NO: 77031 - DNA, 814 bp, Carica papaya
  Intron number 1 from transcript evm.model.supercontig_279. 6 (locus evm.TU.supercontig_279.6) derived from phytozome v7.0 (chr-ID supercontig_279; pos 68863 to 69676 reverse s trand)
ctgctattgaacttggtagagaattggtaaatgcatctctctctctctctctctctctctctctctttctattcttcccctctgttttgttttgttctctttttttttttttcatttttcttcttcgtttctcttcttctttctcggattttaggtcttattttcgaatgggtttcttctgattttttttgggtgttcttggaaaacacttgggtgtctcttcaatctctttatttgctctgtttcggtttgaagatgggcttgctctgttttgaattttctgagctgtttattgttcacaatcttttgtatttacttctctttttgttttcatttgatttcagtttgagatacgtaagtcttttctatctcgattttttcaaaaaaatttcgaagatcaaacttaattacagtatagacctgaaaccctttggtgctatttgtcttttaggacattttcagaaatgacattaatgatttcttgttatgaactgtaatcatctcatagaactattgggttactctatcttgatcaaattttatcctagtatcatttgagtaatgtactttgataagaacataatggactagattttctttacttatttgtctaattaattgcggttaaacccaaattatatgttaaaagtaaaagctaatagttttgtaaaaggagaaatttggagtttcattcttacataactttatccactaaagtcaatttgtctttcttgagctaacattatctctttccccattttctgtttttttattattattttttggaaggtatcaagaaatattgatcttgttt

SEQ ID NO: 77032 - DNA, 860 bp, Carica papaya
  Intron number 4 from transcript evm.model.supercontig_5.30 8 (locus evm.TU.supercontig_5.308) derived from phytozome v7.0 (chr-ID supercontig_5; pos 2787431 to 2788290)
ctgccgagtttctcctttacagaaagcacaggtaaaagtccttgaaggtaacttaaatgaagtattacacatttcatcaatgagttggacttagatttatccctcattccctcccttcgccttgattgctttataattttttccttagtttaaagaacaaagtaataagaaacatggtaaaagaatctgatttgccttgacagttcttgtcgtgctagatacaaaattgaagtcttttaatgtgaatccatattctggtcttaagattcctctagggatttaaaatattataatgatctattatttctatggacactaaattttgaaactggttgaccttaacaaagtagagaagaaaatctggagtagaaaaaactaaactgaattttgattaatctcctacttaaatcacagcactcatgaacttccttcaagttgtgcatgacaggagaaaaaatcagaaaaagaaggtactttgctgacatacttaagcaatctaaaactctacgttaacctttcctaattaaacttatactccaatataagaaactgtcatcctaatgactatttaaactaagtaacattggacaaaaagataattctagatattgacaacaaaaatgcctaagactaacagaaactaaggtttgaaacttgagttttgacattttgattcttgcctcgctagcaagatcatctgaacaaacttctgaggactaaagttcagataggtaaaataaatgttgaacagaaacttttcaatgttataagtttatcattttggaggttcagtattgttatattaagtcttgttgctatttgcaggtgacaagtcttgtcagaaaaggtgcccacaagat

SEQ ID NO: 77033 - DNA, 198 bp, Carica papaya
  Intron number 1 from transcript evm.model.supercontig_470. 1 (locus evm.TU.supercontig_470.1) derived from phytozome v7.0 (chr-ID supercontig_470; pos 23078 to 23275)
gtaagtttgagtttgtattcttgccttaaatgtttacttcatcttggcttcattctttttgatcttcgacaaagttccatgctaagtaaaccactggtagtttggattaagacagaaaataagaaacctatattattcttcaattcttttcacatgtatcattaattttttatcaagctttcatataacttgtacagg

SEQ ID NO: 77034 - DNA, 922 bp, Carica papaya
  Intron number 1 from transcript evm.model.supercontig_50.1 25 (locus evm.TU.supercontig_50.125) derived from phytozom e v7.0 (chr-ID supercontig_50; pos 1132901 to 1133822)
cttcattaagagagggcttgtcgctcaattttgaggttggttcttgttaaacatctctgctgcaactttttattaactactacatgcattggttggaaaatttgattacataatatgggaacaaaggagaatggaacttcatttccgtttattcaagccccacaagatgccattttgatgcattgtgtacatgatcattggcaaaaccctagaacccaacgttttattggtgcattaggacgcatgtagccacggtttgagttctcaagtttaacctcaattgaaacctgagcacttttgaagtgatgttagcaggaaggctagaaaagcacttacgtagaacctaacctttgcaatagcttcaaggaggatttttgttagagaattattgaagttcccagtacttgtgtttttataagtaagctttgtactttgatggagtacatgttggttttatcaaagaaacaaacccctctctttggcttcctagttgcttcccaaaataagtttattctttttttttaaaaaaaaatagaattcttgcaggatttttgtttttaatgcgtattctacctgaatctataaaattagctagatttacaaacatatttataagcacgcagacttgtgtgtaaatatttgcattctctccttcgttgataattcagactgattcagcatactagaagctcaaagtttcacttatccatgaatgatcatggccgtaatataaaggctttgttgccatgtattataataatctctggtgagactcttcttgtgtttttctccttataccatttgagatgttttctactggcataaatatgaaacacatttgtaatgcataaagaagctggaggccttattatttatgaactttgcaggaagcaagagctcttcttggaaggttggagtacca

SEQ ID NO: 77035 - DNA, 668 bp, Carica papaya
  Intron number 1 from transcript evm.model.supercontig_126. 24 (locus evm.TU.supercontig_126.24) derived from phytozom e v7.0 (chr-ID supercontig_126; pos 268320 to 268987)
aatcaattttctcgaatccttggtattcagactagagtctaactggacctttgatccagttcggttattgtttgtctgggtccagtacccgccattcagtccagttctctctggtttacacttgcatggtgtaatactttttccaagaagagagcagtaagcatcatgtttgtatatgtgtatcggcactcgcgtgtttatcagatatgtataagtgtatattaagcagtggataatcaaatatgtttgtagtaagcattatgtttgtatatgtgtatacgtgtgtgtatgtgtcagtaagcattatgtcagtgagtaatatgttagtaaggactatgtttgtatgtgtataggcactcgcatgtttgtcggatatgtgtaagtgtatattaagcagtggacaatcaaatatgttgactaacacttgcatggtgtttatttagcctctgtgttagtgtatattaagcagtggacaatcaaatatgttgactaacacttgcatggtgtttatttagcctcgcagctgtgcatgcttccattgattttgtttgtcaaacatgacacattatattagaacaaacaccattcatttcgcattttcatttgcttatcacagttcttttgttacataagttcctgaactttggaaattgcattgggaacttcag

SEQ ID NO: 77036 - DNA, 631 bp, Carica papaya
  Intron number 1 from transcript evm.model.supercontig_18.1 97 (locus evm.TU.supercontig_18.197) derived from phytozom e v7.0 (chr-ID supercontig_18; pos 2114960 to 2115590)
tcaattctacttcgccaaacgcagaccattagctagtaagttttcgtcttcatttcttctggtttttatcttttcccggaaacaatccagttattacagaaccagcatttggttctttcaacttctgaaagaacaccattggtcgttcgattgttttctccgatcatattgtagctgtatatgtgatttatctctactctggaatccaaattttcgttttccatgaaaatggagtacgattaactcaatctccatgcagattgagggagtagtcattatctgtttgataaaaggatacgaagttcatttttcatggtgcgccatggaagatttcgttatcaagttcttagttattaacatctttgtgctctcagtgactaccatggaagaacaactattgattgctttttgttttgaatagtcatgccttagtggatttaattaaaggatttttagagactatcacaatttattcaatgttcttgttagtgcatgagtagaaacgctaatcttgggttatttgagtataatactttgagcttttacaatatctggtttcaacaattttgttgagctccgcattgttattctgcctgtggtttcaaaaacctgatagtggcggcactgagtg

SEQ ID NO: 77037 - DNA, 712 bp, Carica papaya
  Intron number 2 from transcript evm.model.supercontig_213. 14 (locus evm.TU.supercontig_213.14) derived from phytozom e v7.0 (chr-ID supercontig_213; pos 383619 to 384330 rever se strand)
ctcggaacatacgcacatctgtcaaagtttctaatgtgagtattctttcaggctctgaaaatccttttctgttccatataaatttccactctgaaatattaagtcagtggtagtatctcctatttaggaattatatgaagaaagtatgttaagttctatatgttctcagatgcccttgcttaggatggtcaatttgaagcacatttagtctaaagcccgggttagatgaaattaaatgtttctataatcctttagaagcttctgaaatttttattacaatagtgaacctgaatggatgatattttatgtacttgtttattttgctccccaagatcagaaaacataaagttacatgaatcttcttctctgaaattcattcctcaagcttccagtggatgccaaggttattctaggattttatcaaccatcctaatcagtttgatttcagataactaaattgcatcattttcttgttctgaatttcatttctgtacttcttaccagcagcatgttttgaatagaatcctgcaattaggatccccgtctctggttctctttttgaaaggtttgatgttcaagtttagctgcattacggatgcatcaatttgcagatacaatgcatttttgtagtcagtttacattatttatatttgatagtctttttccaatttccatagcctgctggaggtcagagcaatatccttttcagcga

SEQ ID NO: 77038 - DNA, 615 bp, Carica papaya
  Intron number 1 from transcript evm.model.supercontig_20.4 (locus evm.TU.supercontig_20.4) derived from phytozome v7 .0 (chr-ID supercontig_20; pos 24266 to 24880)
tcctaagcgcaaatctcaaacctgaactctttcaggtcgtttcttgttttcttttttctttttcttttcttttttctttttcttttcttttcaactcctgctttattatgatttgtggctaattttggttagtgtgagtagttttgactatttaaatctgtacctcatgtatgtgttcttagaagtgatctgctctattgcttgttctgtaatttttctaatgatttgatttgactaagtatgcagtctttttcactttcttgctttgacttgattgacatatgagccggagtaattagaaaaccgttgaaatttttctttctagaaaatagattgttcggtttttgttctttcggtgtcttgctcgtcaatctgaaatgataatccatggtaaagaagttaaccaattataaagattagaaagcattaaaaaaatggtcggaaaaatctagaagcaaacttgtcttggtaactatttctggttatacagtccaatcaggataagggatcttcaactgacatattgttaaatttctgcattttctttatgttgatatagattggaatttccagttcaaaccatttgtgttttgcaggaggtcagccgcttgcttt

SEQ ID NO: 77039 - DNA, 1046 bp, Carica papaya
  Intron number 4 from transcript evm.model.supercontig_19.1 76 (locus evm.TU.supercontig_19.176) derived from phytozom e v7.0 (chr-ID supercontig_19; pos 1261955 to 1263000 reve rse strand)
caagatagaaccattgtaagtaattgttgcaagccagcttttcttgtttgtgcatttctagttgtttaatctttttcttggtattcattttctaatttcacatttaaaagaggtctcttgcttctttttttttggtcttaattttagggagtgactacagaactaaggacatgtaagttatccagtgtgcatgatgccctgaaccatatgagtgtttcacctaatatgatgtctagaaactttgtttcaagacagtctttcacaattgtcctgttgcatttttttattgattaatcattcactatcagttttacttgtttcaaacttaatgttttgccatttggatgtgaatgagtctcccttgttttctatttccatgtgcgggatatggattcgaggaccacttatttctggaaaatgcatccaactggactaactgggctctaggttttggatagaggagcatttagaacttattttctcaagattatagaggcagtacctaacaataactttcagacctggggaagaatcaattttccgaaaatgtgaagcgaacaagttttctcacagtgtttctgtttctatttcaattattcaattgttggcagcttcttcttgcatttaacatatcttggttcattgaaatacggcaaacatgtttagaacttttatgaccaatattagacacaagctgatgtctatcaccccgatcttgcataaaaagacaaaaaaagctataccctagtcttttggcataatgatctacaaaatatggttagcatgtcggagaccataaataaacttggattgtcagagaggtgcttttggtgctctggagcaattatttttgctacatgtgcacttggtagagtacatttcctgtcatcatatctgatgcaatgcacatagcaaacataatcaatttatgctcaattgagcttctagcttttgtgtggaaaagaaaccaaattcccactaagctttttctgttaattttgttttggatagagttggtgatagaaccatagcaattttgctctcaa

SEQ ID NO: 77040 - DNA, 285 bp, Carica papaya
  Intron number 3 from transcript evm.model.supercontig_233. 2 (locus evm.TU.supercontig_233.2) derived from phytozome v7.0 (chr-ID supercontig_233; pos 12546 to 12830 reverse s trand)
gtcttgaattatttgaatcagccagcttgcctgtgagttttgtcttttttggttaaattaatagggctttcctattgtcttgggctttgtattaactgcttgtctttcctttaattttctaattgtgcttgtgtttgaatcttgtgcaaacttgctgagatcttcatctgaagccattggtatttttgataaatgtttgaatcacagttttctgtatttgtttgttgattagtaaatgtgggttttatagactttgcttgtgtaacgtcaactcgcttgctagta

SEQ ID NO: 77041 - DNA, 884 bp, Carica papaya
  Intron number 1 from transcript evm.model.supercontig_23.1 28 (locus evm.TU.supercontig_23.128) derived from phytozom e v7.0 (chr-ID supercontig_23; pos 2016629 to 2017512)
gtacccatctaagaatttcgatacaagccccgactgtgaaagggaagcgctctgcttcttaatttgaaaggtaaaattcaactatttttttttcttttctgtaaattatgtcatttgaggatttcttgtttgagttatggattttgggtttcttatctattggaaagcgatgtaaaaagggcaagaaaatgtaattgaagattgatgcttttttcttcccaaataaaatgaggaagtcagacgattgaatatctgaaatatcaaatattctttattatttgttctctgggtttcaattaagaagacaaataaggagatttagcttcagattttataattattaatgggttttaagatatttaccattaagtttccaattgatttttattattaattttctaattctggttctaatatgttactgttgttagtaggataatgtataataagttattaaacaatgcacagcttcttggatttatgtgttgatgctgcaattcttctgttcccctttagttacagaactttttaaaattgcgtttttagttggatcttcttactatcttaattgtcaagtctctgtccctttgtgttgataagagtagaggtgtatagtttgaggactcttcaagtactcttattctgttcttactttgtttattttggaaatttttattctcgaataaaatgggttggattgatattagtctggatacagcaaaataattctattagatataatatacctattggatctaataaaaattaagtactttttgttagaattgtgaaattttgtagctcaaatctttgatattcttttatttattacttgtacctattatttagaccgagtaccatcatccaagaggtatccaccgaag

SEQ ID NO: 77042 - DNA, 602 bp, Carica papaya
  Intron number 1 from transcript evm.model.supercontig_179. 21 (locus evm.TU.supercontig_179.21) derived from phytozom e v7.0 (chr-ID supercontig_179; pos 119490 to 120091)
acccccagaacgggaagacttgtcaccaggtgagtcattgattaagttccaaattacccgtcttgtttttgttccgttttgatctggttggcgagaaagttaaagcaggcggaggatattataattgtgtttagagagctaagtttcttcttgagaccgatttatttattgtatgaacgaacgggcttagattttttgttgtttttctagtaatgcgtcaatgatgttcgtttcccgttttcttctgtctggttgattatacagttgcggaaatgaattgaagtttatatatatatatatattgaaatcctggagtttagattcttgacatttcgagatatagatattcaagaggaatttaaattcggctgagaacttcctttatttttttttctatttcttttctggcttagttgcgttaaccaattcatcatattgaatttaatggccttgattaagtgttatttcttcgtctagcgatatctagggatgagaaatttcattcatataatgttttaaccttcagtgatagtttcttgttatgagtaaactattctttcatttttgaagtgccggcaaaaaacaatcgatttttctgcttc

SEQ ID NO: 77043 - DNA, 649 bp, Carica papaya
  Intron number 1 from transcript evm.model.supercontig_5.19 7 (locus evm.TU.supercontig_5.197) derived from phytozome v7.0 (chr-ID supercontig_5; pos 1706086 to 1706734 reverse strand)
ccgaattttccgaatcgtcggaaagtattttcctggtaacagcctcttctcattttctgtttcgtttcccgatttaacttggtttaggttagttattgagttttttgtttgttccgggtgactgtatccgagactttgaaacggattaatattttttttgttttgttagctccatatgggtaagaagttgaaattatactatttgttgtctgcatgattgaatttagggttcttaatttactgatttgaataaactgctgtattttatcttctatatcgtcctcgacaagggcaccctggttttcatatatcctattgcattgcacctgagacatcttattgttctctctcattttgttgcaagtctgctcttccctcgaactgttctttgggacggtgtttgggggtcgagaaattcctgggagactcaacgtaaatccgttgattaaagcacatgtgatttatgttctgacttagtcacacaccttcttggtactttcttatatatatatataatatgatatatattttcttcttaaataaaaagttcttagtcactacgaagttactgaagtgagtttcttttttgaacttcttacatttcaataaaacagctccagttgtgagcggggagcggctcaagaagtat

SEQ ID NO: 77044 - DNA, 715 bp, Carica papaya
  Intron number 4 from transcript evm.model.supercontig_150. 34 (locus evm.TU.supercontig_150.34) derived from phytozom e v7.0 (chr-ID supercontig_150; pos 327513 to 328227 rever se strand)
acagtaccattcttcgatctatcgcaattccccaggtataaaatcttctatgtataggttgaatatttagttgattatttgtaagatgtaatagaagtaatgaaactcgtgtatgtctatgaaatttaaatttttagagaagttggatactcacttatagtcttatattatgttgaagtttgggattctcagttcaagccttattttctttttgaaaaaaaaaaataaacgattatttcaatgtaactctatgcatgaattaaagttttaaagattcggtataaatgataaattaaataatttgttaacgatcttaaactttcggagagaaagtttgtatatatattttttataattatgttttctgataaaatggattatctgttttttacaacctgatggctgaaaacactatacttatttatttataaaactgttatgttttctctctagcattgtcttttcttgtggctgctaagcttgaaatttggacatgccttattgacttctcaatgtgctatcattttaatttgagaagcccacaagtgtgtacataaataagtggaacacatatgaacctaaattagcatatttatgtgtacgtggtcgaggccattgacaaatgtgttcttgaccttaaggaagtttgcactaatcaaatacgaaatttggtatcataggtgatagtgattggaacgcttgctttgagctacaa

SEQ ID NO: 77045 - DNA, 663 bp, Carica papaya
  Intron number 2 from transcript evm.model.supercontig_112. 53 (locus evm.TU.supercontig_112.53) derived from phytozom e v7.0 (chr-ID supercontig_112; pos 441166 to 441828 rever se strand)
caccagtggccctcaaaatattagcccacgcataggtagggagttatatttatttttctcctctttggatcattagtctcatcttttcaagcctttatagtttaatatgttccatgatatactgatcatatttatttttaacaaatattaattgttctgctgctagccttcgcatgaagcctacttttcttcttatgcattgtaagtccagggatggtacttgtttatttatatatttgtttttcgggtggggagctgatagtaatttaagcaggagaggcatgcatttaagacaaataccataggtaggtgtccgatctatttcttctattaagagcttggcttttgagccaaggtaggaacttcctatatggttgtttggtaagtttaattttcagtcagctgcttcaaaacaaacaatggaatctgcaactagcttccagcatcatagttgaaaatttttgatcttttttagaatacacgtgcatcaatttagactgtactagctgcctcattatgtattaatatttctctttattgctttctgatcctagctgtactgtatggagctttgatctgcctgcatgagccatcaccttttgttgtttgtgaatgattttgtgaataggacttcctaaattgcgcgaggattgggttgacaga

SEQ ID NO: 77046 - DNA, 824 bp, Carica papaya
  Intron number 1 from transcript evm.model.supercontig_159. 8 (locus evm.TU.supercontig_159.8) derived from phytozome v7.0 (chr-ID supercontig_159; pos 166045 to 166868)
ggacgtcgtgcctcaggcatcaaaggtattgtttttcgtctttcctctatatcgtctgaatttctttcgttttatttattattgattttttagatctatatctggtggactttttatactttatgttcttttaccttctagatctgattattttagttcaggtatgaatttatctttcggtttaaaggttgctttcttcgtgctgctcttttctttagctcgatcgcgttctgttttttgtccgtatatctgcgagggattgtaacgggatcgaatcttattgttttctttgtttttctgcatctggtgtataacaattgcaaaatagttatgggacttaactttaatatgggtttcctttcttacaattaaattcgatcttaaaattagtcttggattaatcggattatgttaagttctttgtggcttaataataagcggatgatttcgattttattgtggacgtttggaataatattttttagtaattgtttggttcaagatttgctcgtcttgaagaacatttgtaatctctttaatgcatgtttctcctttagttatttggatttaatgtctttagtagttgtgctaccggtccgacggaagttttctgccgggttgtgtttgattctagtgggtattttgctccttacaatttttatagtcttatttatctatttatgtgagatttattctataatcaattttattctggaaatattggagatgtatatcagaacatatttgaagggagggatgggtacaattttgatcaattctgtgttggtacataaatggatggctatgtgtaggctcaggtagga

SEQ ID NO: 77047 - DNA, 701 bp, Carica papaya
  Intron number 1 from transcript evm.model.supercontig_3.15 2 (locus evm.TU.supercontig_3.152) derived from phytozome v7.0 (chr-ID supercontig_3; pos 1175931 to 1176631 reverse strand)
cagttacagaggtcagtatgtctcgatttactgcaattcattccccttttccttcgattatagaattgctcgacataggggtttgcctgggctttgtttagcttatcacgatccttacctctccgggtttttcgtctgaagaaatgggttcttcgtaattgtttcatatcgtttatgatttatgtgtatttggtaattcagttggttggagaatagaagagtcttgtttggttgcagaagtttctgagtctcaagtttctgtctttcttggttgtataaaaaaaaaagtttgtgtctttcttggatttcataggagtttgattttagaggttaaaaatttgacgaatagtaaattatggtctcttttctattttctgctcatttcctttgttgggttagttgtgtgatgttcagaatttggtttgatttcctttcttttttcttttccagtttgcatttccttctgtcttgtggatcatcaactggttaaataccttatataaaaagcagaccctttttaccttttgtaattaaaatctaaatttgaatgattaagctgtcttttaaaaattgcaaaagcataccgtttttaccttatgtaattatgtctattgcttgctcctgaggctgaaatttaacgaatttcattcgaaagctgataaggtacttttgtgctgtttgagcagttgctgctgtgcctg

SEQ ID NO: 77048 - DNA, 628 bp, Carica papaya
  Intron number 1 from transcript evm.model.supercontig_5.33 2 (locus evm.TU.supercontig_5.332) derived from phytozome v7.0 (chr-ID supercontig_5; pos 3062707 to 3063334)
atcctgggctgggaggcggcgttctccatctcacggtatgcgttatttccttcgaattgattatagttgaatatcctttaaaccgttagaatatttttctgaatagtaatttcacattgtcatggcgtctcaattgtgctgttgattgttctttttgtttttgtttttttttctcttaaaaaaactctctttgaaatttctacttatattagtacttaagagttcccatcttgattttcgtccatccaatacaacgtactccgacgcgttcattcattggttgtattcctctgtcatttccttttctggtaagtcttttgtttcttcatggatttagagcaaagaaagccttctcatgacccactctcagagttatctatagagttctgacctaaggtcaaaatttttacgaagttcacgtggcatgctaagatgatataaatatggaaagtgttcagtaatttcgtcgtggagaaataaagagaagataaaatgtaacctgattgtgattggaagttctttttcttttgttgatcttctacttgttttatttctacagtgattagatttacgttctttttcattttattttttcgtaaataataagatgcatttttgcagacatccg

SEQ ID NO: 77049 - DNA, 239 bp, Carica papaya
  Intron number 1 from transcript evm.model.supercontig_170. 4 (locus evm.TU.supercontig_170.4) derived from phytozome v7.0 (chr-ID supercontig_170; pos 22704 to 22942)
gcaacgcactgtaattttcttatttcttgttttcagatcatctcattttgaatgtgttactggaaattgtgttatatgagaatcctgttttagtttttttcttttcggctttctttatttaaagttttagtacggttctaagttaagtagactactgtcgtttcctttgaacaataattggtaattcgggaacaggtgaatttattcatgttttgattgtaatatgaagcccttgacag

SEQ ID NO: 77050 - DNA, 514 bp, Carica papaya
  Intron number 3 from transcript evm.model.supercontig_170. 4 (locus evm.TU.supercontig_170.4) derived from phytozome v7.0 (chr-ID supercontig_170; pos 23269 to 23782)
aattgaatacccagcattcctcagcaattgaacaggtaggtgaaaaaagaaaataaacggtctatgttttgtgttatgtagatttctttagttcactgtggaaggaatccatgtgattatccattaagggaagaaatttttttgctttgataacaagttaacaagattatttgcttacttgtcctcaatgaagagacttttccacatgattaattattctgcaatcaagataaaaagacattaacattcatttctaattacgttgcctggccatcaaattttgagtcgtggtttctacttggtgaatgaggcaagagtgagagaaagagtttgtgtgcccgcgggtggagaaaatatagaggaagtagtgagatagagagggaacaataaatttttattttggcttatctatagaatttattatctctacctcatgatttcttactaatgaaattaactaattaacgggattctgcctcttgtagggtgtatttggggaatctgagaaggtcaa

SEQ ID NO: 77051 - DNA, 758 bp, Carica papaya
  Intron number 2 from transcript evm.model.supercontig_260. 6 (locus evm.TU.supercontig_260.6) derived from phytozome v7.0 (chr-ID supercontig_260; pos 167236 to 167993)
ataccgcgccggaattgtccccgtcagctaccgtagtgagttgattgattcttttctcactgattttatcttgttctgaatcagattcattcgcagtccaaatgctaaaagctctttagctttaatttgagtagcctttttttttttttttctaaatagctcaaacatttctaacctaaaagaccaattcatgttttaatttcatcatcattataaaccattatagatattctctactgaaaatagttttcacgggttttactggagtccgaactaggaattcccattgtttattgagttctgtgaagtgtttattgaccgggaaaaatgggccaaaactaaatggcattaaaatctgggcctattatgtataatctcttttcttctcggctaagcgaaggtgatgatgaaattagaacgggataagaaaataaagaggaaaataggtattgcttagggagtaatgtttcatgcttggctgtcgattttgtttttacgaagcaaacagtggatgaaaatatgggggttctaggttttgttaaaatttaataatattttttgttttctcgggaaacaaacagtacctcaaaagaatcaacagtgagcgtgtgttggttgagaatacgctcagattttatgtcgtttagcaaaacttaaccaacggaaatccgtctcttctttttttttcactttcggcagaatcatttttagcttaattaccagaatacccataccctgatctcctctcatcctcatac

SEQ ID NO: 77052 - DNA, 639 bp, Carica papaya
  Intron number 3 from transcript evm.model.supercontig_129. 58 (locus evm.TU.supercontig_129.58) derived from phytozom e v7.0 (chr-ID supercontig_129; pos 474469 to 475107)
gacaggttagaatgttgccacaacgttcctgtatttgagtatcagggagttcggcaaagcttatgttccttcttggttaatttgatcattcagctggcctcttaggacatagtatataaattttggtagatgtttatagattctcaaattcaagtgatctgctgctttattctctttaactgaaggaagtctccatttgttgtattgttatgtttcaattaatcccacatggaaatctgatatcgcaagcagtaagacattagtgtaattggtgaggaatgaaaattttttcgcttgtttattaagtggaaaattccagttttgaagtgttcaaacgagttttgtgcttatgatattgttctttatgtagagttggtcttgcaccaatacttgattcagatgcaactcatgtgttggttagggttaattgagaatcttctggggctatatttctgtgaatgggatgtgtctagatgtgcttaactgtgtaccttgggacctcagtagcacatatctaatctgagttatttcttattttggtttgtgagcttgtaagaatccatctctctttctctcaccagacattcctttttttcgcctatagggattatttgaaggtcttaaagcgtacaggaaaga

SEQ ID NO: 77053 - DNA, 524 bp, Carica papaya
  Intron number 3 from transcript evm.model.supercontig_55.3 0 (locus evm.TU.supercontig_55.30) derived from phytozome v7.0 (chr-ID supercontig_55; pos 190593 to 191116 reverse strand)
attcccaaggtatggacaaccagagtgtagatatttttggtgccactaagttgcattttccaatttttcatgaactcaggtattcgtcaatttaccataaaactgtgggacatagattagaaatgactaatggagcgagatgattttattaattatttggtagaatggattccagtacttatgcgaattttgaaatgaagaaatccatactctactctacttcgacttgtggtggcttccaggcgtactatatgtttttaagtcatataataggatctaaattaattaagtcaaaatttcaccctaacattttatcattggttggaaaaacaagtctactttgtttcaaaacatttacgcttaatttgttttttcttactctttgtacctgttaaataaagagatgttatggtaagaggaatacaggttatgatacaatttagttcaccatagttagatccactgtttgtattctgaatgccatttattctaatcacatcttttatttctgcgcttgacagttc

SEQ ID NO: 77054 - DNA, 757 bp, Carica papaya
  Intron number 2 from transcript evm.model.supercontig_108. 79 (locus evm.TU.supercontig_108.79) derived from phytozom e v7.0 (chr-ID supercontig_108; pos 930788 to 931544 rever se strand)
atacggaggtatctttttcttttttcttttttgtttttcaaatacgaggtttagatggggttatctgaaccgtctggaacttacaaaagtttagtgttcttttgggactaacatgtgatttaattttaattcatttgaccatattttgggctctgttttgagtatcttagtgaaggaaaaagaagataggagtttatataatctgagcttctttatccttgacttgaagttctgagtattaaaagtttagtttaaactagttcacaatattttaagaagccgattaacccagcagttcgctatttgtctttttcgtattcacttacgggtgttcttacagtattttaattgtttggatttgtattctgtgaacttgctactcttctgaggaaggcttttcttttagttgtttggatttgtggctggtgcactttctacacttctgaggtttcttttatctttgagttgcaccaccaagagaagtcatgtatagcctagttcctatgttgcattgtgcattcctacataccattcatgtttagaaagacaagtgaaatgcatttcatcaatctgattgttgaattgtcttgccaataattttaaataacagcttaggacaaaatgaccattcatatctgatctaatggctcctaagttaaacaagtagaatcctctgaatttctatattacccctatctgttaaaacgcattgttctatgcagatctgggttccaacaaatcctcgtggtgctgaaag

SEQ ID NO: 77055 - DNA, 269 bp, Carica papaya
  Intron number 2 from transcript evm.model.supercontig_190. 38 (locus evm.TU.supercontig_190.38) derived from phytozom e v7.0 (chr-ID supercontig_190; pos 271221 to 271489)
cttctgctggaggcctgatctgtcagtattttcttattcctcgtcaaactttagttcataaaatatactaacctgcatttgacgaatgtggaagaacgcgggcttaattatacaaaacagattgtttttaattgcagaaactcaggaaggtttgaaattatgaaaagaaaaggttgataatcttaggtatttgaatttattctttggtatttgtttgtcattattattgttcattttgttttgaaggtgtcttacaaacttctggattc

SEQ ID NO: 77056 - DNA, 557 bp, Carica papaya
  Intron number 1 from transcript evm.model.supercontig_1.21 2 (locus evm.TU.supercontig_1.212) derived from phytozome v7.0 (chr-ID supercontig_1; pos 2993726 to 2994282)
attttggagacccagcagagctcaggactaagaaggtagctgtctctgctattttactttattttctaacgtatctcctagtgtattttattggaatttgcttctgttctataggtgtatttgattgtattagttttggtaatctaagcttaagaggatcgaattttgattgtgtgcggtgctgatgtagtcatattagatacttacaattaactgttatgtcctcaaagtattgagtttaagcttgtagttattgtagaagctgagaaaaacatctgacagtgagagatttcttgagtgaaaagttgaaaattggaaagaagaagatgattagtttaccatccttttctttccttactgcgaaaaaatgatggcacattttgaaactcatgctgaagttgtaaacatttttttaatgactggattcctagtcaaaacatcttgttaccttagaaaaaaaaaagacataaatgttaagctacccgcttcaagatgagctaatgtttatttgctacattgtttaacatttcaatgttgttggtagatcattttcgaag

SEQ ID NO: 77057 - DNA, 485 bp, Carica papaya
  Intron number 1 from transcript evm.model.supercontig_157. 16 (locus evm.TU.supercontig_157.16) derived from phytozom e v7.0 (chr-ID supercontig_157; pos 165322 to 165806 rever se strand)
tcagaaattcttcgagatcaaacgagattcttccggtacgtttctcgctgaagaaactcgttaggctatgtttggaacagatcaagaattcttgaggaatttatttggaaattcaagttagtttaactgatagtgaaagaaaattttactaaagaaaataacaaatgtccaactagagaatttttaaatggaatcagaaaaatttattccaaactcagttgaatttgatggagtttaaatatattgctttgatttcagttggaattctcaatgaactgatgttttatgatttcaactaaaattttatctcactcctagttaaactaatagtggcttttcaaatgaatgttataaaattctcaatttgttccaaacatagccttaacatttctggaactttcttattagcattctggaattattgctatcttctgacaaaaatgaaaatctcgaacacttattctcaattttgttaggtgtttgat

SEQ ID NO: 77058 - DNA, 309 bp, Carica papaya
  Intron number 4 from transcript evm.model.supercontig_37.9 (locus evm.TU.supercontig_37.9) derived from phytozome v7 .0 (chr-ID supercontig_37; pos 62254 to 62562)
atcaaaccgcaggtttgctcaaattcccctctggtcaaaaccaaaaattaatgtgtatcagcagtgatataatgcactatcaagtgttaaatctagtcgatgcaggcagcctctacttttttcttttcaatttctgctgcagtattctaaagtaggatgcaaatagttccatccttctaacagaaaatatctaaacaagatagggtgtttctagtttatgttctaacttcataatctactgatcatcttatgactttatcattgagtcttattgcgggtgtattattttccaggcagcaaggcaaatag

SEQ ID NO: 77059 - DNA, 779 bp, Carica papaya
  Intron number 2 from transcript evm.model.supercontig_337. 6 (locus evm.TU.supercontig_337.6) derived from phytozome v7.0 (chr-ID supercontig_337; pos 116267 to 117045 reverse strand)
tagtatttaagggtcatcatctaaagggatccctggtaagcagactgatctccctctttcaaaaaaaagaaaaaaaacttttggttcccctattctcttggtatccataccaaaaatgatgcttcatcctccatggcaaagctgaaaatttttaattgagcagagcaatgatgcattttgcctattggccctagtttcaagcaacaaaaggagaccgacgaatgttctttttcctgcactgggtaataaatgtcgggagtattagcatctctttctctttgatttgaattcttagtccatatttctgctactaaaaatgttacttctggctttatggctgtccaaaatggatcagcagttgagaagatattctggtatttttttatattatttgcaactatcttgtcatgtttttaaaaatattccctggtaaggggtggttaatctgttcaacaaatggtatatttgcaacgatacatcagtttttctgcaactctaccagtggtggtgatgcatctcgcaatgggaagcctgtaattaaaaggtgagcacggctaatgaggcatactgcctatctgccgtgccatttaggatttactgcttctaactcttttttttttcagaaatatctttaattgtggaaaatataccacatgtataacagtttttgatttctcccataagtatgatccgttctaactgtgggctacttattattttttttattggctttggatgtctcaggttcggttggttactgataaagtgacaaaaaaacc

SEQ ID NO: 77060 - DNA, 465 bp, Carica papaya
  Intron number 4 from transcript evm.model.supercontig_42.1 3 (locus evm.TU.supercontig_42.13) derived from phytozome v7.0 (chr-ID supercontig_42; pos 57391 to 57855)
ctgctttagaatttgctgtaaattctcttgaagtaagtaatttctttccttgtcttctcctaccactctggtgctcccagtggaaaaaacataacaatattgaaaagaggaatctgtatgataacctgatttgttaccaaatcttgggatggatagtttgctttcttgagaataagttggcaattctggttttcttaagaaatttgctgaatgttatttgcatggttgccttgtggtttcattcttaaatatgaaactgtatggacggtatccgtttatgagtattggaaattttcttttttcttgaagtgatataaattctagaaaattatctctattgtttccctatcttactttatctctgttgataaactgtaaaagtatgtcctactggcatcttatcaaagacacaacaaaaaatatttttcaggtcgaaaacattttggtcattggacatagttgctg

SEQ ID NO: 77061 - DNA, 383 bp, Carica papaya
  Intron number 3 from transcript evm.model.supercontig_34.8 1 (locus evm.TU.supercontig_34.81) derived from phytozome v7.0 (chr-ID supercontig_34; pos 686397 to 686779)
gggagagtttgcttgtaggaggtaaatctccagtgatcaatgtgaattcaatctcaatgtagagaagtttatgaatcaaagctaatcagaaaaaagtaaagaagaagaaggcacccattgagtttatgaatcaaaataaatctccatgtctatccaagtaacctcttaaaagaattaccaaaaggtatattttcataaatttcaatcaattcccaaaattatgaactgggaaaggattaaaacatttaacatcactatgatcataaaacacagtaaacaaaatcatcagaaaccccagaaatttagctataaagttcaggtgatttttcctgttcatctctattgtagtcaccgaaaaaggatcaggagagagtaggtcccca

SEQ ID NO: 77062 - DNA, 495 bp, Carica papaya
  Intron number 1 from transcript evm.model.supercontig_53.2 0 (locus evm.TU.supercontig_53.20) derived from phytozome v7.0 (chr-ID supercontig_53; pos 105781 to 106275 reverse strand)
atactttcctgctcaacagtgtgcaccatcacaaggttcagctctttttctgttactttagttttagttatacttatttgttttttgagcttcaacaagtaaaaggaatatttttttcataaaattcagtgtttagttcattctattcagctgtctttacgatgttagaggaattgatgcgatgtgcatgaaaaaaacaaaattcttttcaagatttactaatctgtaaaatggtttaaaggttgtaagcgtccttgagtttgcattgtgtctgtatggagctctctttcaggtttgtaatcttaaaatctataatggctgtataatctagctcctcaaaagttcttcggaaaaatattatgctgcttgtttgacttttgtcaagggaaaataattattttctatatgttctttcaattattatctcaattcctgatgatgatgggtaatgaatatgcaggacttactcttctcgtacaatattgctgttgatag

SEQ ID NO: 77063 - DNA, 953 bp, Carica papaya
  Intron number 1 from transcript evm.model.supercontig_17.2 8 (locus evm.TU.supercontig_17.28) derived from phytozome v7.0 (chr-ID supercontig_17; pos 346239 to 347191)
ctggggattgtgagtttcttgctactctttccttataatcttgttttgctcaattgatttctggtatttaattcttgctttagacttcaccaatctatttttgtttttagctttcttgattcatacatgtttggtaattttgtcagttctgttttttcagtttctgaatgtgggtttgagtagaaattggttcaggttttaccaaccaagttttgttgttttgccttgaggataaagattatgttaacaacatgaagctgctataactagtccaagtattctttcagtttgtaatatgtgactaatgtttaaagtctcttgtcatattatcaaagacataaacaactaaccaaggggattaggtgctttgatcctcttctaattcaggaaagacataatatttttcactaagagggagatgaagaagggctactggttgattgggaaagcaaagttgaaagatgatgtgtacaaaagaagagagaaagagcagtgtcaatggaagaagaggagagaagatggggctgctatagagagggagcaaaggggatctagttcttttttttgaagatggtgaaaactgatcaaggcaaagaatattgttggccaaaagctcctgtcctgattgtttttcattatgggcattcctgtcatagttcttttcattttgagttttctttcttatgtacgaaaaaaatcctagttttaaaagaaagaactggatatggcttcttcgaaataggaacattgttgaaccatcaagatttgctctattcacttttactttaatagatatgagttttttgttttgtgagtatatcgatcagaacctctgtcttgaaccttcgtacttttcagtttttatgaattcctactttgttttggttaatcctgtaccagttttgttcgagtttgggtaaagtaactgactcatggcaactattctgctgcag

SEQ ID NO: 77064 - DNA, 530 bp, Carica papaya
  Intron number 1 from transcript evm.model.supercontig_17.9 2 (locus evm.TU.supercontig_17.92) derived from phytozome v7.0 (chr-ID supercontig_17; pos 1172721 to 1173250 revers e strand)
aggtatagaataaactttctatttttgcagttgtttgtgccatcttcattggagcaactgtcaccttgtcccagtgtgcatatagccaccacactccccctctttccttggttgttgacttagcaaatctccaaaactagttggatagaagttccttattgaggatgggatagactttgttccaagtcctctgtgctgagtaatcatgaaaattctcctgataccataagatcaattctgtagcatccttaagttttactggtctaataattatagagtgatataatcaatatattttttagtttgagttttgttgtaaatatatatgtatatatatttttctctggagatccttagtgatacgaagttgaacattatacccaaggtttatgtccaggtttcacatgtttttaagttgtctttctgccctctgtagtgagtctagacaagtattttctgaccaactggctttgtgaaaagttgaacctttgtggatagctggaaagtttcttactggaattgctggcagg

SEQ ID NO: 77065 - DNA, 708 bp, Carica papaya
  Intron number 2 from transcript evm.model.supercontig_37.7 3 (locus evm.TU.supercontig_37.73) derived from phytozome v7.0 (chr-ID supercontig_37; pos 543336 to 544043)
tggagagagaaagaggcatcacgattaaactccaggttcgttatgttctttcttttcttcgttcgtcatgactggaccagcattggctctgtttcttctctgaagcatttgaccgattgctttttattccgtttagttgagttcaatcaagaagactaaaaaattaaccaatcggcaaatagtccagtgcttaccttctcttctcactttcacgagaatgagagttcagtgacggccgttagcagctattactatgtacgtaaatgagaagaaaaagaaaaagaagaccaagaatttccatgttgagaaagttatttcaaggtgaagatgattaataatgaatagtggctggtttgttaatagcttggaatgggttcctcggaggtagggaaaactctttgcaaatttgaacaattctgttctaatctagtactttagggtattgcagagataaaataaagctctgttatgactaccaggatcaagttagccattcaagagctggcaattgtattctataaatcattttgtgttttctcattctatttgaattagttagttatcacgaaaaaatgggccagtacttctttctgtcacacttaaatgcttttataacgtgcttgatgcttcttattttgaaatgattttgttcaactcataattctctttaggtctaattttctttcacttttgtggtaggcagctcga

SEQ ID NO: 77066 - DNA, 950 bp, Carica papaya
  Intron number 1 from transcript evm.model.supercontig_50.1 44 (locus evm.TU.supercontig_50.144) derived from phytozom e v7.0 (chr-ID supercontig_50; pos 1373637 to 1374586 reve rse strand)
gccaggtaagtgagcttatacatttcaattattggtctgtgagatcaaacagttttctaagttttatcttctgcttcttagtcatgagagtggagcttcttgctgccctttctttttatctagacagatatttgcatggagatggcagttcaagtgattttaaacatgttttcttcattaaatgtgtttcatactgtttactactggtaaactagggcgctttttgggtttgtagtgatgcatatgggtgtactgaataagtgattatttccaaaatttggaaaattaaaccactgtaatcaaattgatctgtaagtataagcaaattctagcagtagagaacgaaaaaggagatttaattagtaatcactatgcagtgtagttcttgtttgcctaagaaagattccaggagctttgaaccttgaaagtaactagttttgaaatttagcaaattatgagatcttattcatgtttgtttatgaagtttgtaagtgaaatcttttatttgaatgatcaattttcttgtcttcaagaatagaaaagcctctggctaactttggcatcatactgattcatattttaaagaaaagaatctgggttgaccattgacttgtttctcaagtcggggtgttaggtctgtgttctgtccttcctctggcaacagaatatatagtttcaattccatgaatcaatttaaagcaattgttgtgtataaacctttactttcttttccttttttcttttttaaaatttttgtggacatgtatatgtgtaattgtagtaacactcactaaaacagtataggcttctccgtctctcttggatgcaagaccaaatggtggacagccttttaaagaaatttcagatttccccaaatgccaattaatttaaaaaacatttattaaattgtatggtttttagtgcattaatattcatttcatggcttgcag

SEQ ID NO: 77067 - DNA, 658 bp, Carica papaya
  Intron number 1 from transcript evm.model.supercontig_142. 31 (locus evm.TU.supercontig_142.31) derived from phytozom e v7.0 (chr-ID supercontig_142; pos 397783 to 398440)
gaaggtgttgttgattgaaatactagcagttttcttgctttgtcttctctattttttcttttacgaagcaaagtttcgaactctcttagtccattgacgtgttcttgcatggtcattcttagtccattgatgtgttcttgcatggtcatttactgcctatcttgggtcatgaatgttgtgctttattttggtataaattttttaggttgttgtctgagttgtggtgtcactggatgtcccatggagtcgctgttactgttacttctagcttctgatgttatgtcaatgaaatcaggaagtcggaactacttcttgttaagcatttgatgcagtattttctcacttaccagtattaagctcaatattgaaatcaaggatttcatagctgaaatactaaagttgctgttgtaagaggttgctagtttcttttaagtaaggctacgtttggaacgaaataagaaatttagtggagttcatttgtagatcccggcttaattaatttgttccaaacttagctttccatggcttccttctctgcgttattgcttcacattttgcttcaataaatttgttgaaagatgaggatggaatatttggacaagagctcttcaacagctagtttttgattctctcctgcttgaatcgcagggactttgtg

SEQ ID NO: 77068 - DNA, 902 bp, Carica papaya
  Intron number 2 from transcript evm.model.supercontig_1.25 (locus evm.TU.supercontig_1.25) derived from phytozome v7 .0 (chr-ID supercontig_1; pos 468861 to 469762)
ctggagttttgagccttggtattggagatactgtaagtctgcttaattttgaactttgccaatgaatgctttcagcctctcaacctagaaaatctactgcgcaaatcaaagattatagttaacgtggtgctatggtcacttttattttgttaaaatctctctagctaagccattaagtttcctattgagcattcatgaggcagaacaatctcttactgttgaacttcaccaatgaatgctttcagcctctcaacctaggaaagtgtattgcgctaatcaaagataatagttaacatggtgctatgatcacttgtctagtttgttaaaatctctctagccaagctgttaagttttgtattgagcattcatgaagcagaacaatcaactggtggcaattgtgtcagcagcaattgtttgtgtctataaaagtgtcaatttcatgtaatatttaaatatttttagtttaaatcaacactattaattattaaattatattttaaaatggattatttcttgtcatttctgggttaaacaggttggtgccttgtcttatccaggttcctcttagtaatttagtgcaatatattggttgtcttattgtgtcagaaatttgccaaactacttaaagcttgccaaccaaaaaataaccttctaaatatataacttgactgattcatggagaatatttgaggaccagcctaatctatgaaggcacattcaagatttgggatcatggttttgaatttgtgtaagaatggtgtctatgtggactggtcaactattattggtgatactggaatgagccctatatgccatgtcagcagaatattctttcatagttggtcaagcatggtaaagctcataactcacaagaagggtttttgttttattttcaggcatca

SEQ ID NO: 77069 - DNA, 850 bp, Carica papaya
  Intron number 2 from transcript evm.model.supercontig_128. 21 (locus evm.TU.supercontig_128.21) derived from phytozom e v7.0 (chr-ID supercontig_128; pos 169250 to 170099 rever se strand)
ccaagtgtcctgttaccggcaagcggattcaaggggtatttctttttctttttctttttttaatttggcggggttattttatttccagttgtgctttttatcttcttgttactgcttttgattgtttggggtttctgtccttgtgttctcttggtatttaacattttggatgatgtagaatgattttaggattgtgaccaaagtaccttatttttaagtcagtatgggggtaagactaatcctggtagtaagaagaaattggagaacgtgtatagtaaggttcttatggttccaagtttagattcatatttctattatagaaatgtgacctcttgatgcagggctgaagaaagctctttcattgatcccttatggtttattgctatattatcttttgatacatccatcccaatttgaagggtattttatcatggtcgtgcaaggaatcttcccgatttatatggattgtgtcttcctttaattacctggaagagggttctttctgccctgtaactgcctgcctttcattctgatatttttcatactgctcttctatataaacttgttcggttctcttttagataagttattgttaggaaacatggaatcgtaattaataatgtggtaaaagatgtgaacttacagctgcttttcagaagctggaacttaatgccatctgttttaattaagtcacaagtgctaagccttagtgtatactctggtccgtatgggttgcttgcagaacatttctacgtcttattctttacatgcatctcttgtaaatatatttttctttttcttattgatgtttgtagattcctcacctgagacctgccgaatataagagatc

SEQ ID NO: 77070 - DNA, 353 bp, Carica papaya
  Intron number 2 from transcript evm.model.supercontig_28.1 34 (locus evm.TU.supercontig_28.134) derived from phytozom e v7.0 (chr-ID supercontig_28; pos 2025515 to 2025867 reve rse strand)
gcgtgtgggaggacgaattcaaaggtattagtttgttgccatcaattatgcgttttttcttaaataatattttgattttattattctttttatgtttttgaagttttgttcttagtctgtcctagaacttttctattgatgacatagaataagctttggttgtgcataatttttcttttctttaagaaggggattggttgttcgattcccctagttaagtaaatgtaagttaatgcagttgtgtatgatgctatcttgctaacatcttcatgacctgatggaaagactatcttcgttccttctctaataggttattatactttcagatcttggacttgaagggtgtatagagc

SEQ ID NO: 77071 - DNA, 573 bp, Carica papaya
  Intron number 1 from transcript evm.model.supercontig_28.1 34 (locus evm.TU.supercontig_28.134) derived from phytozom e v7.0 (chr-ID supercontig_28; pos 2025994 to 2026566 reve rse strand)
gagaagcagtctaaattagccgataaggtcattctgtttctctctctctccccccctgttagttttcttggtttatgttgtaagaaagttttgatgagtaaactaatttgtcactgtcttcaagtttcttcattatcattcgcttccgtcaattgtagaaggtttatacagtgtcttgttctgctctgtctatggagtttgtcatggaaccgaattacaactggtttcaggatgtattatgttgtttatgtcgctcagtcttagttatttactcgagtgatttccgtttattgttttttgattgtacgatggtggattttatatccgaattacgaatttcgaattactttatggaaagcccgttgcctcaccatactggatttatttccgaagataataaagttatcacaacatagcattatgatgacattgattgctaatcaatttgtttatctcacgctgttattttgcacaatattacgttagtgagagtggagccatggcaccaatgaggcaccggggtaacaccctttctttgatttgtttcacagttaccacccatagcagttggag

SEQ ID NO: 77072 - DNA, 502 bp, Carica papaya
  Intron number 1 from transcript evm.model.supercontig_150. 10 (locus evm.TU.supercontig_150.10) derived from phytozom e v7.0 (chr-ID supercontig_150; pos 128053 to 128554)
caatcttcttctcaagtaagtcttcgaatatttcttgttcgatcaaaagttactttctttttatctttaccttcggtgttggatactctttgtttgattatatagaaaataaaggaatccttttgatcctgtcttgttactctgcattaaaatatttaatgatgacttggtccgacccagaaaactattgcattataaaacttcttcatttgttatgatagtggaaagtttttttggcggtattgcccatggatgtagattgcccgtggatgtaggtatccttctcgaaccacgtaaattttgtattttttcttttttactttttactttgtgcgattgggattaatttttcagaacgaaaacattgtgtatgtttatgtatgtgttttctacttttcttttgttggatactgttatatatacgcattatatatacggagctcactgacttagtttctgggctccagaaatttactgttcctcagagattcttcagccattt

SEQ ID NO: 77073 - DNA, 614 bp, Carica papaya
  Intron number 2 from transcript evm.model.supercontig_150. 10 (locus evm.TU.supercontig_150.10) derived from phytozom e v7.0 (chr-ID supercontig_150; pos 128851 to 129464)
gttatctagctggtttgttgtgagttctctggaatcctttgtttattgtcttttctcttcatgctctacggatatcatgcaatgctattgctcagtcattgttcaatgttttgtttgattttgaaaatctatgctgtgtttggttcaattctcatttaattcattgttctaatttcatatagttttccagtacacataatttgtgtattgaattactatcatcaccatctgaaggcaagttcctaccatcagaaattcaagcaggtatttggtaatctaagaatgacgctttgtgctctaataaagcatgctaaaactaatatgagaagtaggaatcgattagtaattaaatgagaattgaaccagacacaccttgaggtatttgaatcaaatcagactggttaggacattcatattattggagaaaagaaactaatctgttcttgcgagtaatgataatatcttaaaagctacaacgtttgctacaaattgatacttgagaaacatttctctaatgcagaagttatttcgaatctgtcaatttgctttttcgtaatgcagtcttattatcttctattaattttcttttaaattcccttatttggtcagttatt

SEQ ID NO: 77074 - DNA, 1026 bp, Carica papaya
  Intron number 2 from transcript evm.model.supercontig_471. 6 (locus evm.TU.supercontig_471.6) derived from phytozome v7.0 (chr-ID supercontig_471; pos 21691 to 22716)
cccagagcctttaaaggttaatttccataatggtttgttacaaatcattggtctggttacttagtcataagaagaaaatgcaattttttcttgttaaagtttttactttgttgtatgtgatattattttgctttttctaggatgagagaaatctctaaagtccaatctatgtaactggactggaaagtttgaataatgcatttgaaaatgatgatgtcctttccagtgtgttagttccctgcatctatctgtctccaacaatttatttttccatttgttatgcatatgttttaaatgagactgtaatatttgttcctcatggagtaatgtcagtgtatgtgaggaaatttgggcgtgggaaggcctaagcacaaaaagaaatatagctaatttgattctattgactgttttttgggttctttggaaagagagaaatgctagaatgggttaagtagattaagaaatagatgaatacattattttgggaccattttgttagatcatgacattattagggaggtagatttggaaaatatcattgacattttaacccttttgtaaatctttgtacatgggcagtatccccgtttttgatatcttgttaatatacacttcatactttttatctcaaagaaatggagtaatatcactgtgcaagaattttcagtgggagtttctgctctgccttctggaatgtctaggttttgaggtgcctcaaatggtaataacgtcgtttgtataaaagcagtttagtggacttaaatggtgcacttgaaacttcaaaacctattagtcttattggtgttgctaactttttcttcagctaacttcttgggtatctagaaatggaagacttaagagtacaacattgtgttttgatggatgcatcagcattacattcttaaatctttagactgctagtttctttataaaatattttaatggcagagatgtaggatactaatttttctcagttaacaccaacttttaggaaatccttgtcctgtgtaaaaatcgtctggtgct

SEQ ID NO: 77075 - DNA, 488 bp, Carica papaya; identical to SEQ ID NO: 76488
  Intron number 1 from transcript evm.model.supercontig_1.27 7 (locus evm.TU.supercontig_1.277) derived from phytozome v7.0 (chr-ID supercontig_1; pos 3872102 to 3872589 reverse strand)

SEQ ID NO: 77076 - DNA, 955 bp, Carica papaya
  Intron number 2 from transcript evm.model.supercontig_10.2 09 (locus evm.TU.supercontig_10.209) derived from phytozom e v7.0 (chr-ID supercontig_10; pos 2669320 to 2670274)
ccttgcattttacctatatcaaaggtggttgattggtaataaatgagtttgtcattcagtaagttcaaaattattcataggcattgcataactgcaaagtttgttccaagccattcattctactttgccgtgactgggccgattttctgcctgtggggtcaatagacggtgattctttcatgaggtatgtgtatttcttattgctttgttatacttctcccttctgttgaatccttctctgaaacaattgtcactcctgaaattccacaggaaaatggtcttataactgttatacattttttctgttatgtagttttattagttttagtttagtatactctatctaatgaggtttattattataaatgaaggcaaaaaaagcttctgtgatcaagggattttcttcccatgcttatataatagatctctgtttcagttggctcaatatgccggccaagaaaatgattgattggataactggttccaggatggcggaatatttagatgattttatatttattagaagtgtttcaaggatatttctttcagaatgttgtttaagatttgatttactgttttttctgataatgggattttttggtttagcatattggattgttgttgagccctgaggtcctgaagttaaggtcctagaagtttctcaagaacccttcatccttgccatcttcagttactggtgaagacagtgttaggatgctctgagtggtggctgaaggcctttggcaattgaagatgcccgaactacatccttaaagggggacaattaaacatgcctcttaaaataactgccatgtcttgtggcaataaagtaagaattcatggcacatgtgcttgtttgttgatttggaaactagtaagattagaaagaaaactagtaaaaaagctgccctatttcttggtgaaattagttaaattttatggttttacaggttta

SEQ ID NO: 77077 - DNA, 669 bp, Carica papaya
  Intron number 3 from transcript evm.model.supercontig_128. 11 (locus evm.TU.supercontig_128.11) derived from phytozom e v7.0 (chr-ID supercontig_128; pos 99152 to 99820 reverse strand)
gcctgagaagctccgttaccaggtgtattgaattttcttgttgttctcttgttcctgaattgagaagcaccttcccatttgagtttcatcagttgcaatatgaaactatttgtcagtataatatttgctattcaagtattttactgacttgctctaccattttgaataccagtattttttttagtaattttcagatcgctccaatgatctttcatttgctttgcaaagtctttttgattcccaagtgagttcttttttgctgtattaatcaaccttcgacaatatataatgaagtatttgcattcaagcaagcgaaggaaattatgtccatatgcattaaacataagttatggaaataatggataattcttcatatgtttagtggttgagacttgttaaatggaattcctaaaagttcatgtacttctggtaattggtggaatatattgttatttttcaagaagccagtgaaatagttttaaccttgctagttatgtttaaagtgacttttatttttatttttcactgatgatgtgaaatgctttccccccctctcttccttcacccatcctctctgctttccaaagttctgaatgaaataatttccttctcgactgaatgtaacagaaatgtttcacactcattgtcttccatattcttgacagggag

SEQ ID NO: 77078 - DNA, 611 bp, Carica papaya
  Intron number 2 from transcript evm.model.supercontig_2.43 6 (locus evm.TU.supercontig_2.436) derived from phytozome v7.0 (chr-ID supercontig_2; pos 4607086 to 4607696 reverse strand)
ttagaggagatcctttctccactttcaagttcctggtgagtttgatatgtttgcaacactaaaaacagcaacttttcattttcttagttctttggttttatggttctgatctcatttcttcaaaaatttcttttattcttcttttctggaacggagaaaaacagtattcttttctttgttccttaaaaacagaatccatggcactcgggtcactttacacccaataaattgtttagataaatggaatgaatttctaaaaacatcgatcaagagacacccttcttgttaagaaattcaaatgctagtcaaaaaagtggttctcatcaaggaggccatcatgttttacagcggttaaaaaaattgtagcatactataattttattgactttgagggacccaaaaccaaaaggcaagcaagtgatagcactaattttgcttaagttgatgccaactgcaacacattaaggctcatgtcctccaaacaaaaatagtggccagtgaaagccacgtcatgtcctgttgctacccagaaaaagtgaatccctaaattgggtttgttttggttatataatgcaggactacggcgtttcagtgtcattttacaaagctcc

SEQ ID NO: 77079 - DNA, 692 bp, Carica papaya
  Intron number 2 from transcript evm.model.supercontig_116. 41 (locus evm.TU.supercontig_116.41) derived from phytozom e v7.0 (chr-ID supercontig_116; pos 420209 to 420900)
aggttagctttgaatattgctagttatactatcattgcaagtaggaaggaggaggagaatcatgttatagatagggaaaatttcactagatattttctgatatcatcttcttacaaacgttgggttatttacactactactagctggtgcagtataataaatggctacagctggcattcaacctgaatctaccacggactataagtcagttataaccaaatttgcagaaaacatgccaagtgcggaataaaacagccttctacggcagactaatctaactaattggaatttctttcgcaattattggggttctgataaaatataatagaaatttagataaaaatagcaatctaattctaagtcaattatatgaccaattcaaattaagtgtctatgtgattccttggttggaaggtggaaagataaatttcatggttgtagaattgaaaacaagaatgaagtttgtttaactatgcattaaatgtgcaaattatgactaatttttcacattaagcaatgaagatctaggaattgaacaagaatagaattggtctgaaccatatccgtagtaagtgaattaagttggatttaagttacatgctttgcatgttaaatggaagatttcaagatttacttatttatgtttacctccaacagttgaagttgctgctgactgattcagaaagatcaaa

SEQ ID NO: 77080 - DNA, 1053 bp, Carica papaya
  Intron number 2 from transcript evm.model.supercontig_148. 17 (locus evm.TU.supercontig_148.17) derived from phytozom e v7.0 (chr-ID supercontig_148; pos 249070 to 250122 rever se strand)
accaccctgtaaaatctgagctagtatgtcttatgatttctatgtttcttgttttttaattttcaactttgacaattttttaagttgattactatgatattcttagctgaaatgactgcttcggattcgatggttccgttaagtttgaactttgaaatattcgttttagtatctagtgtttttcatttcttaataagtaggtatattaaaaaaagatttaccaaaaaattgatacaaacatcactttgatagcttggaaaagatccttattttagaagtatgcaaatgtattttgtatgaattgtttagatagcctaatcttcatctgcttaatgttgaaatattttaccaatatgcaaaatttttctcttatttaatgctgctcaagcacttaaaataaaaaatatattaggagacctaagagcactgttgagtttgaaggctccgttacatgtcattgcacacacttcaatttttgtttctatattttttgtcaaacatttgaaatgatgggtcatatttgtaggtccaacaatccttctatgctgtcatctgttctgctggaaattttatggttgtaccctcttataatttgctatagctctggaatttttaagaaataaaagacctgaaatattaatagatatgatttagaaagaggtcagtgttgattgattaagaaaaagtgtgaagatgttattatgtggagataaagaatctaaaatgtcaagagaatagaaaggttgaaaatcaactgttagttgataatattttagtatcttggttctatatgatctgtcttcgaagcttgtttttcatttgaagtgtgtcatatattttctgtttgcccatgtaagttactatgaatgggatatttttgttttttctagaaaagaatatgaagaagctagcatatattatctttttaggaatattttgttagtatcctatagtacgtaggattaattgggtaaatatcattgacgaatttagcatcttttgctgcttgtgcatataggagagaataagcttgtatcaagacaaacttgaacg

SEQ ID NO: 77081 - DNA, 315 bp, Carica papaya
  Intron number 1 from transcript evm.model.supercontig_151. 45 (locus evm.TU.supercontig_151.45) derived from phytozom e v7.0 (chr-ID supercontig_151; pos 382334 to 382648)
atcggtgtctctgctgcaattctcagcccgtacaggtaagcttcttaaactagaaattctcagttcctatctacctgtctgcaaatgggtttgttccatttatttgctggaaaggtcccacattatgaatagtcatcttgttgagggagttgattttgaatttgaatgtaggaaagttggtttctagatgtaatcttcttcatctctttgttttttcaccgcccattgaattcattgctgtaagattcttatctgctttcatatcatatttatcttcgcatatggcatatgctgctatacaggcttctcattgca

SEQ ID NO: 77082 - DNA, 454 bp, Carica papaya
  Intron number 1 from transcript evm.model.supercontig_191. 12 (locus evm.TU.supercontig_191.12) derived from phytozom e v7.0 (chr-ID supercontig_191; pos 227607 to 228060 rever se strand)
ctgccgagcttaaaattggaggtcattcccccttaattcttctttttctttttatttttactattattattattatttttacatagatatggatgtaaatttatacatggcgaattgcctcttgaatggaaataagcttgaagttcaaaaaagagaaacaaaaaggaatttcgtagagaggataacagtttttgacttaagctctctgatttaggttacagatttatactttgcatttattgtgtggtcaaatcaatttggtaaacttgttcttctgtttaaatccttttgcaaggcataaacaccaatcagttggagcaaaaaactaaagccatgcttagaatttggttttatattacgtactaaatctggggctgagtgttttattgtttttctttcttttgcgcgggttggggatgttttctgaacagaatttctgaaggcaaagtgttta

SEQ ID NO: 77083 - DNA, 389 bp, Carica papaya
  Intron number 1 from transcript evm.model.supercontig_142. 58 (locus evm.TU.supercontig_142.58) derived from phytozom e v7.0 (chr-ID supercontig_142; pos 706834 to 707222)
accttctgtttaaggtaatatgtacttatacatgtatttatatatgtctctatgcatgtatgaacaaacaaatattttatatattccaaatgttaatctgtactctatgccaaaattgctgctttctgattgttgttaattttgcatagtatgtgtaacttgcctatgattccttgccttcggcattaggttttgcctgctagtttcagtaatagtgatgaaaaactcctcttccgtattagtgatataagcaatagaagaatcaaatttccaaaatctttgtcatggaaaagagaacagtggtttgacaatcgatcatccatttaaagttacaatcacatgagagtactaattatttgattggaaaacagggaagtcctccggtgaac

SEQ ID NO: 77084 - DNA, 991 bp, Carica papaya
  Intron number 1 from transcript evm.model.supercontig_2554 .1 (locus evm.TU.supercontig_2554.1) derived from phytozom e v7.0 (chr-ID supercontig_2554; pos 3059 to 4049)
actctcctgttaccgttgcaggtacttagaaatttttgagtgttgagttcttttttgtgttcaatttaggagtcatttgttgattttggacggcgtgcattgggaatatggtgtctgattagcatgaaaaattttgtttgtttgtttgtttgtttgtttaagggaaaaaaaaacgaagttgtctaggacttgaatgttttgaagatatagacattcatttgatcaacctctgtttttaattcaaacatggaaggaatgtgagattagattcatgctccttcactttttattattatgattttgttgggtggcggggggacttgatttgtgtcgctgccaattggttttgcctttttttgtagtgaatgaatttatgctcctttgtttctatgttgggtgggttcggtgattgaattcatccttctaaagaatttattcttaggagaatcatggatataagatgttacattgtagcttataatggagttgcagtacatatttgattcttatcatccacaggcattataaaaataatatggagaagagatagacttagattttaattcgatttcattagtccattattttgtcttatgaagttgagaatcagattatatcattatcttctaccctgcctcaggaaaactagacattttagattatcaactattgtgtgaaaaaaaaaaagggtatcaatttgattattcaaaaatgtaatatttgattgtggaggaggaactctaaacagcttggtgtttccatgttgtagtgtttagggtaattttacagaaaagagtacggtttcatcttgaactgaaataatcagtttcaaaaggatatttgtgatactattcttcggaacaaatttacctattgattttattatggatcgtgtgcatgccatgtcttcaccaactagattggttaatatgatcttgatattgcctcattaacagattggagcgttcaagcagctgttagctggatattg

SEQ ID NO: 77085 - DNA, 707 bp, Carica papaya
  Intron number 2 from transcript evm.model.supercontig_55.8 (locus evm.TU.supercontig_55.8) derived from phytozome v7 .0 (chr-ID supercontig_55; pos 51456 to 52162)
aagaatctatccacagaggtatgtgagatcatgtagctagtccggtgatgtccaaacatttttccgagttagctgccgtgatgactgctgagttaatgacggcaagagtccagaccttcggccgggagggaggatttaagtcgggtcaataacgagtagaaaagactggctgaggacgctagaaagtagaatatgagagaggcggagacggagagccagtgaggtggcatgacggagagtttgagggctgagagagagagagagacaagcaaaaaacagaggagataaaacttcaaaaagtaataataaatttataggggtgaatttttaatcaaatctaaggtcaaagggtcaaattctatggacttggggggggcgcaaagactgaaccttttcttatgggtaataaaaattttgaagtcagaagattcaagtgacaaattgagcttctttaaaaataaaaataaaaaaaaacccggttcactcgtctaaactactatgagaaaacgaaaatgaaaatctaagatcaacacattagaaacttttaataaaaccattcgctcaaattattaaaaataactcgagacatgtagattcatttttggactgcaattctggtaactggtgtggttgttttgaagggttcgtttttgtttttgtttttgattgaaggatctggaacaactagcagcagagctgagagcaga

SEQ ID NO: 77086 - DNA, 845 bp, Carica papaya
  Intron number 2 from transcript evm.model.supercontig_177. 20 (locus evm.TU.supercontig_177.20) derived from phytozom e v7.0 (chr-ID supercontig_177; pos 455255 to 456099)
aatttcagtgatttaattgatatactaactaaaatgtaagttctttttgtaaatgggttttgtatcaccttggtacttgtaagtaatacatatggtacactagttttttttttaaaaaatgttcggttgcaacaatttgggtttattagcttcttcacttgttattgcgaacatgcatatgaatcagagttaaagttgggcctctttgcctgaacagtgaaagtcaaagaggtttgcaaaaacaattcacaaaattttttctactttcttttctaagatacatagatacatatatatgtatgtgtgtatttgtcagaaagatataaatgcgtaaggatgtaagttcaattttgaattagaaagctaagatgtaccagttttcatgtgttgtacttgattacccagaaatttggctattatttgctcctttagtaagtgtagtttttagttcttggtgactggacttgtgaattagatgaaagtagaggtgaatggactctctttggcatcttttagtcttgtaatgttgctttatggtgtgataatttggtcattcaactgcaaatgtttacttccatgcatggaaatttcttgtcttactaagctctcgagaacatttcatctatgagattggtagtagcgtgtaagtatgatgtttctataacataatttgcaattattccatactcttctattaagatcctgattgcaatatctctgctctaggtgttgtattctttcaattcataatgcttttaccatttttgtcatgaaatctaggtgaataattcctataaaaaactttctttgcaggtattgtgaggaaagacctttattgttaagca

SEQ ID NO: 77087 - DNA, 439 bp, Carica papaya
  Intron number 2 from transcript evm.model.supercontig_123. 17 (locus evm.TU.supercontig_123.17) derived from phytozom e v7.0 (chr-ID supercontig_123; pos 290802 to 291240 rever se strand)
cttgatttctcttcaggttaagcacatggttttttggtttcctatatatgctgttctttggctttgcttttgttctcttgtatgtgtttttttcttgttttgtctctctagaagataacttatcctcccatgggctatatctcctcattctttttctaatatacttttttttctgttgtcaataagttatgtctgctttatgtttatttgtactgtctagaaactcattaaatatcttgactaaccaatgttggactatttcgtttctatataatagattaggaaataaagcacttaatagatgttaactcaaattttttggattggatatcatttgccttcgtgagcattgcatttgttgtctatatggcttgctgggaagcttcttgaactttcttgaactttttcttattttccttaactgcagcaaattttcctg

SEQ ID NO: 77088 - DNA, 297 bp, Carica papaya
  Intron number 1 from transcript evm.model.supercontig_167. 10 (locus evm.TU.supercontig_167.10) derived from phytozom e v7.0 (chr-ID supercontig_167; pos 161108 to 161404)
ggtttttagagtcaaatcttggtacaggtgactggttaagacatctaatgaggctgtgttgttccctcgcatgcagatttggaaagtaaaactccctccaagggtctcttttttcatatgggaagtgaccagagtatactcaccattgataaactaagaaggagaaggcaggtgctagttaatggctgttttttgtgtttgaaggcagaagagagttgcaaccatctattgttatcatgtcctgttgcctttgagatgtgaactttggtgtatagagctttgggaattgggcgggtt

SEQ ID NO: 77089 - DNA, 580 bp, Carica papaya
  Intron number 3 from transcript evm.model.supercontig_5.18 5 (locus evm.TU.supercontig_5.185) derived from phytozome v7.0 (chr-ID supercontig_5; pos 1619403 to 1619982 reverse strand)
gtgctgttcaggacttgtttgacatcatacaacaggttaacattcctggaattgtatcatcaatttttacaactctcgatttattgtttgaattatggaggaaaagactagctggcatgcagtgcgtgaaacttcaaagattttttatttgtgtttttattgtgaaattatctaccaatttaattatatgaattgactagacctcttatgagttgaactaattgaataggttagttaaaaagcagaatatttttctttgctttttcactgatcagtgatcttcaaaagggagcagtgatcctatatcgatatgatcctgaatcgatgtgttaaaaagaatttcatttctctagctgtatatttcatttacaatgacctaaaaatggtaatggattcattgccaaatacctagaatgtatacaaggaaagtgaagcaaaggcgaagacaaaaataatatataaagaattaaatgatgtctgttctcatttctaaaatgttcctttctgagatatctgaactgtatccgtaattaagtcaaatattagtttagtttatttttctcctcccctatattttagg

SEQ ID NO: 77090 - DNA, 684 bp, Carica papaya
  Intron number 2 from transcript evm.model.supercontig_26.1 64 (locus evm.TU.supercontig_26.164) derived from phytozom e v7.0 (chr-ID supercontig_26; pos 1213054 to 1213737 reve rse strand)
tagactgcagcctctatcggcattactccttaaaggtgcttctgctcctctatagctttttacattgcattatgtttctacaagcagtgtccttgacacttggttggtttcaaatttattcttttttccttatggaagttataccatgtgtctatttgaaaatctcactttattgatttgttgtttgtatgactttttttttttacactttgcaatgattaaaacagaagacattagaaggattgacttcttcctgtaatcaactattaaagtatggaatttttgagtttagaaggcttcaggaggcattgtatttttctcttttatctgtccctcatgagttgcctttttttatttttccttttttcctagttatcactatttcccagcgcaaatgtatttttaccatacaaggttacttcttttttgacatgtcattgctaactggtatgttactgatacatcttcccagtcttggacagtcttgtttcatgaagtttgttgttatctttatttttttataaaaaaaaattaaagactcagaaagaaatgtgaaacatcttctgaatccatttgcaaatcttttctctttattctagttttagctcacaaaaatgtttgcaccaatataatgagtttccgttctttataatggctgcaggttcacaggaaaccaaattgtca

SEQ ID NO: 77091 - DNA, 639 bp, Carica papaya
  Intron number 1 from transcript evm.model.supercontig_50.1 71 (locus evm.TU.supercontig_50.171) derived from phytozom e v7.0 (chr-ID supercontig_50; pos 1598711 to 1599349 reve rse strand)
tcgacgtgagtgtttgctgctatacttaatctttgtttaaagctaaaacagttgagcttgattttatttttgtgtcatcttagcagttaatcttcgtactttagctatctgttttctgtcaccgttgcacaacgagcactgttgtatattcagttgttagatgaaattacagttcactattccaacaaaattttcagtgtttattgttcagaattcaaacaattctcgatcactttaatagaaaactgtttttgttctggcggaaggggaatttttcttaggaataatagttagtatctttcttgtgagggatttcgtatttttctctgcttcgtgtaatcaatgcaaccttacatccggaaagatcgattttcaagcttattgatcatgtcttctgtcttttttagatattaaaaaaaaaaaagaaaaacaaaacagcagaaaaaatggtggagttctgatttatatgttctctggatatgactggatggctttgaaacagaaccactgtaggaaatcgatgtgaatttatcttggagtgtacatgttcctatctggattatcgagatttaatgatatgtcattgctaaccattaatgttattctcttttaatattgtagttcaatattccacattta

SEQ ID NO: 77092 - DNA, 619 bp, Carica papaya
  Intron number 4 from transcript evm.model.supercontig_52.6 0 (locus evm.TU.supercontig_52.60) derived from phytozome v7.0 (chr-ID supercontig_52; pos 529194 to 529812)
attaaagataaggacaacaccaagacctacagttggtactcaactgaagctaatatccattgtttttatccttctttcttcagcacacacataaacactgatcttcttgttcttcatatgttgcttttccttcttgccattatctgttctaagttgctatatgcggcatgtattattagcaataattaattattcaagtaaaaaaaattgcatactgtcatgaagtttgtcgacaatgataccagatagcacatgctaaggacagaaggatacacaaaatctatatggattactttagagactagcaagttttgaattcttagaccatagctttcacagatgaaaacggaagtcttaaatcaaatagttcaggaaaaagtcacttccaattttttgaggaactgaaacttgaatacatttatgtacgagcaatccagttattggttttaatacctgatacctcaaagaaaaaaaaaaaagctttttagctatcccatttttcaagtaatgaaaacgatgacacaaaattccagcatcaaataaccaaactggttttgtcgtactctatttatttgggtttgttcttgttgtctttgcagctggccccaaggatactcca

SEQ ID NO: 77093 - DNA, 484 bp, Carica papaya
  Intron number 2 from transcript evm.model.supercontig_130. 80 (locus evm.TU.supercontig_130.80) derived from phytozom e v7.0 (chr-ID supercontig_130; pos 928063 to 928546 rever se strand)
tttatattgcagttgcttccttagttattgctgctgtgcgcatactttcctcttaatttttgattatttgttatttatttatgttgatttatgaagaaatcaacgagaaaaagaaaaacattggagtttggaaatgtgaatgagaacgtgattaacttgataatcgttgagtcaagcagttcttagctatacagtgtacactagtgttggattagtgtaaactcgcatcttatcttattaatttaaagatctgtatacgaggcttattagtcctgagctagaactcaaggttgctactaaaccattaaagtttcattagttttttttaattattttcctgtttgcactttatcttttgaggattcaatttaatggtctgtacatgtgttttagcatactagcaatgcatttgctgttgcagggagttgcttttgcttgtttgttattttgaggtaagttatgcgtgcaggtctcagagatatct

SEQ ID NO: 77094 - DNA, 388 bp, Carica papaya; identical to SEQ ID NO: 74004
  Intron number 2 from transcript evm.model.supercontig_5.18 4 (locus evm.TU.supercontig_5.184) derived from phytozome v7.0 (chr-ID supercontig_5; pos 1593338 to 1593725)

SEQ ID NO: 77095 - DNA, 914 bp, Carica papaya
  Intron number 2 from transcript evm.model.supercontig_17.1 05 (locus evm.TU.supercontig_17.105) derived from phytozom e v7.0 (chr-ID supercontig_17; pos 1304497 to 1305410 reve rse strand)
gctcaaggcctttgtatcagtatatacagcagctggtaatgttatacttactttgcccttttctttatgccacctaatttatttatttgagtttggtgtcgcttgtgcattgttttagtgaacgttgttcctgttatttaaaagtgtatgagcactgttttagattttcccatggattactattactggacatggatagtaagcctcttcctgtcaagtctgcggaaattgattggaaaaatactgtctcaagctggattacatgctcaaatgttttttttttttcaaaatttgtgttccaaagaataatccaattcaagagaaacaactcagtgggataacatatttgcatgttttatagtttaaaaagatgtatatttatgtatctgacatcagactggtactatatttactcatcggtgactgtctatataaataacatggtgtttatgttactgttatttcctgttggggggttctatctgaaacttgaaagtatgattttattggtggttttgccaaaaaaaaaggggtctgacatccaattccttgattgtgtaaagctaccagtatttcagatattggacactgttttctcttttttttttttttggcaaaaatctaaataagttgaaatactctgcatatttctataccgcctgcaggttgatgttagtgtgataacatgattttgaagttctatttatagttttgggaaatccaccttcagatagttgtttcagataggggttattatatcacgtgtgaggatttggactctctttccagcttacctttttatttgttgcgatcatgacttttgacttgttccttcttgctgttttgtttgctactggcatgacttcttttagtctacagggaatctccagttcaagaaagttactagctgcttc

SEQ ID NO: 77096 - DNA, 442 bp, Carica papaya
  Intron number 3 from transcript evm.model.supercontig_112. 96 (locus evm.TU.supercontig_112.96) derived from phytozom e v7.0 (chr-ID supercontig_112; pos 733892 to 734333 rever se strand)
gccaaacgagactctatctaagcatctttttcactgtaaagttttcagtgctgttctccctttaaatcctgtttggtttccttcatttcctcctttatcattaaatgatgcctttgtttgtttgttttgggttttgtttatagcggaaaggacaaggattttaaaatgtcaatatgttttctttcatttttccatattcatgtcaaagagctaaaatctgttaccaggaatttttgtgggcaaacaaaaaaatcaattaccttattttctttgatcttcttttagaaaaactagttgataaagattgtctcttcgtctgttgtgtgtgcgtttgtgtatgtatttgatcgatatatattgctataaaggtacgtaagaacccgaaaatgtattgataggtgtacctcgtattgattgacatgtttcaggggagactcagccc

SEQ ID NO: 77097 - DNA, 649 bp, Carica papaya
  Intron number 1 from transcript evm.model.supercontig_27.2 45 (locus evm.TU.supercontig_27.245) derived from phytozom e v7.0 (chr-ID supercontig_27; pos 2208324 to 2208972 reve rse strand)
cttggagttcaatcggttgcagaaccaactcaaaggtttccttctcttcctttctttcttttttctctgagacataaacacaagtaaatggtgtgtgtctctgtgtgtctctgtctgggaagttaatagggtctgttgtcatgttctgtctttcttctgcctggtttttcagtgctaaaaaaggtggagctatatataatatttagctgtattgagttccgacttattgctacttctttgtgttttcgtaacttattgagcacaaatagtactgtgtagtttgattatatgtataataacgatgtttgtagtttgatttttctcttaaaattctttgtccttctcattatgatcattacacggtttgatgcttggtatagtgatagctttttccaattcatggttatgataagtatggtgggaagtattttcagcttcccactatatgataacccttggtaatttatatggtcaatgcattcatgtcaatggagtttgataatagaagtctttttgaccttatatttttttttgtgcttttacaaaataaaataatgatgaattcccttggtgggtcaaactatgttttacttagcttttttatacgtttacagaaaaagacagggagctatcagcttctcaggctgaa

SEQ ID NO: 77098 - DNA, 496 bp, Carica papaya
  Intron number 1 from transcript evm.model.supercontig_6.23 7 (locus evm.TU.supercontig_6.237) derived from phytozome v7.0 (chr-ID supercontig_6; pos 1895802 to 1896297 reverse strand)
aaaagaaggttctctcgagttcctaatctctaacagcaagctccatgcatgttaacctcgcaaaattttctccagtttttggtgcatcccgtattcttagtgtagggttttacaggaactttttgcgttagggaatgagcggcaagggcatggaaaatcgaaattcagttgtttttcactttttgttttgttgccgttaatcgtggcctgcaattttgtggcttctggaccaagtttcggtgacagttttgcatgggaaatgtttcctcgaatgtaaaggatcacgatttctttctgcagagcagacatttgctcttttagtatttttctttgagtacgggctttttggtcatgaattttttccagttcagttattctaaatggcatgacattgttttttttttttttgagctatcatggtgtatgtttatttacttggttgtttactggtttatcttctctcttttgtcctagatttcaaacaaaagagttaaag

SEQ ID NO: 77099 - DNA, 320 bp, Carica papaya
  Intron number 2 from transcript evm.model.supercontig_340. 8 (locus evm.TU.supercontig_340.8) derived from phytozome v7.0 (chr-ID supercontig_340; pos 43168 to 43487)
ctgcacagcaaaagaaacgaattgaaggtgtgatggaattgaactcttaataaatttatatatgaaagtaatcctggatgtagcatttttccttttcttgaaagtgtaaaataattatactcacctcttaggcacaagcccgctggctaaaagcgtggatgaacacatacacactgcatctattgaaataattttttaaaagattaagttgatagaagatggtttaatatagtatttatatgtacggaaagctcattcttggttttttgatatatgcttttgaagggaactgtgaagctggtttttcagcctggtgaaga

SEQ ID NO: 77100 - DNA, 756 bp, Carica papaya
  Intron number 2 from transcript evm.model.supercontig_10.2 60 (locus evm.TU.supercontig_10.260) derived from phytozom e v7.0 (chr-ID supercontig_10; pos 3132687 to 3133442 reve rse strand)
tgaagcgtattgcaaaagaccccagtgaacgtaagtttctctgcgtattctcttttatgtcaatatggtaaaacatgaaaatgattagaaaaagaaaaagaaaagaaaagaagagagatatttttggactttctaattgcacaagatatcttgttttatgaaataaatttggtttgacatggcagcaattctgaaacaaggtttggcatgtatattatccctatgctctatcactaccacaaaggatttgaatgttgacaacggaaattttttttatggatcctccttgcttgttctcatttatgttttaattttcttcttttcttttggtggatgggtttgctttcctttgcaatttatctctccaagaaatgcacattttatcttattgtgtggaagcaatttggtttgacatgtatctttttgttatagttcgcgaggtttttatcattaccataaggattttgttttgatttagtcctctttgctcatgttcttttctatacctttttgttattttctgctgctggatggcttaccttatctcttactttgtaatttatttatctatttctgcaaatgtatattcccctaagagaagaaaaataaaaatgtttacattaggatatctttacttgaggtagattacaatttgcatcattgtggtatgtggaaggaggatctcttcgatgtaaaattttgcaaacatgtcattgtgcagagactggtgaatccattctggttctcaaggggcca

SEQ ID NO: 77101 - DNA, 1019 bp, Carica papaya
  Intron number 3 from transcript evm.model.supercontig_1135 .1 (locus evm.TU.supercontig_1135.1) derived from phytozom e v7.0 (chr-ID supercontig_1135; pos 2257 to 3275 reverse strand)
aggtatatgattatttattatcgccttcatcttttatttttcctcatactcataatttatgcataaacaaaatatatggtgtctttatttttatattgagttaatcttctaatatggagtgtacattgaccaccccaacttacattctcatagagatgttgaagtagtaactattgaagtttaatttcttctaaatagtgtcttagtatgagtttttaagtgtttcaagataattaattcataacatatgattttgtttggaacagattaatatggaatcatgcttcttttctaatgatggaatacatttaaatatgaattcctttttttgaaaaaataaataaattattgtagaattgttcaccaattctttggacttattattgggcttcaagtgatgtaaaggccatcaatctccctttcacttgcattctttcaattattcttgggcttcttttatgttctttagatttgatcttcgtttaatttgatggtttgaaaaaactattggaaaaaattttaacagatttgttaactctcaataatactttgttgcaaatgagaggaagaaaaatgagagactaatagaaaaacttaattttttatttgtgtttgttggaaaaaaacattcaagtaagtgggtatatataggtaataatgtaacttttaaaattttaaatatgcatatcgtaattaagtgggagaaatcacataggagaattcaaaagacacatttataattttaaccctttgtaagataaaaagtcttattaatttgcaaattattatttttaacttcttattaagacaaaaattctctttaatttacaaattattattttcaacaaaaacttgcttgcacataaaagatataggttgtgtcactttcttatcacttaaagtttttagcataagcaacttcaagtttaaatctaaatattatatgtaagcacttaccttagttttgttgcttgctgtgagcagttctttgcacaagcaggctttccctgtcctgcttt

SEQ ID NO: 77102 - DNA, 853 bp, Carica papaya
  Intron number 1 from transcript evm.model.supercontig_117. 50 (locus evm.TU.supercontig_117.50) derived from phytozom e v7.0 (chr-ID supercontig_117; pos 492448 to 493300)
tcaatcttgcaaaagtaatgatgttcttatctggttctttttttcaattcggttccattatttaattttttggttgcgaaattataaaattctacttattctctaggttataatgatcagattccatcttcctgtgtccgaacacattaagatatttacatatatgtatgtatgaatatatgtgcatctacgtattgcatttcctgaagactgaattgtttgatggatgtgttggtttagttgtagtatagttgttttgttatataaaaagaggaatgaaattatgattgactctttctttaaattatgtcctgaattatgtcatttcaatatatattacgttcttcttctatgtcaatcatgtaaaagtactgatgtttttgtctggttctttttcaattcagttccatttttcagttttatgattgcagaagtatacattctatttgttttatgggttataatgatgatattctttctccttgtattcaaacacgctaatatatatatatctgtgtatgtatatgtatgcatgttcatgtatgtattgcatttgttggagactgagttattagatggatttgtggtttgttgtatataaaaggaggagtgaaattacaatagattcactctttgaatgatatcttgggaaatcatgtcatttcaatatatattacactctttggacatatatgtatatatgttcaaatatatatgtatatatatgtatatagatgtttcatttgttggacattgttatatgtgccagatgaggtgatggttaatataatcttcaaatccagtcagataacttttacccatttgatttgttgtttctgtggtgcagaagtat

SEQ ID NO: 77103 - DNA, 889 bp, Carica papaya
  Intron number 1 from transcript evm.model.supercontig_116. 73 (locus evm.TU.supercontig_116.73) derived from phytozom e v7.0 (chr-ID supercontig_116; pos 728967 to 729855)
gactccactgagaaggtgattgctgagtacatgtacgttgctttttcttcgccttcttactcctctgtgctgcctacttctgtacatatatatatatatatatatatatatatacacctataactgtgcatatacgaatctgtatgtgtgcgactacgtgtccgtggagatgggtctaatctaaatatatgttgttttgttttctcatttggtgtggtcgaggtgatgatgatccctgtttttttggtttcctacggcattttttttctcctgtttggttcctgagaaagttaaggaaaatgaactaattcaaaacaacttccagtattcatttatctgctaactcatacttgaactacttgttcactctgttttttcattttaccaaacaatcattatgctctgttttatttactcattcattatttctgtgtgtatatacacgcacatatctatatatgtttgtgtatatattttttcaaggagaacataattttttaccgatttgaaaagcacccttttgttttgatgaaactgaggaatctcttttttcttccattttgttggagggagatggaggactcttcctccaagaaatttgcagttatattaaacgacagcgtttcatttattttcattaatacgcttgtctactttttaactttgtcaaatttctgttgtcttcttcatcctctgctttttttacagtcttccatgcgatccatcaatgatctcttagagtctctatcataaatactagtcttcgtttgggtcagcacgttttaccaagcgttaaaaaattcttgtttttctctgaaactggtaaagaacttttacccaatttacttttgactatggttaaaaatttcccaggattggcggatctggc

SEQ ID NO: 77104 - DNA, 882 bp, Carica papaya
  Intron number 2 from transcript evm.model.supercontig_1833 .2 (locus evm.TU.supercontig_1833.2) derived from phytozom e v7.0 (chr-ID supercontig_1833; pos 5504 to 6385)
gttgcatttgtgttggcagctgtttacttttacaggtaacaagaattgattcactgttaataactttgcatttggtgaggtttgtgatattgggttagagccaaatgcagtaatctgctaaaaagtaaagtttttttcttttggatatctaaacttcatagttctggcagttctttcttgttttggtttggagggtaatggcatacaatattaactttctccctttaaatagtttcttctattggagtgtgaatggaatatatattaacttcatgtaaagtagctggcacaaatttggaacttagatatttagccattcccctaagtttatatttgctgttaggtacttcaggtcagctaatacatgggttggttggtggagtcacttgtgatctgcaaaaacttgggatgaaaagttttgatcagactattctgattaggaggagatcaaaatgagacaactgcttttttttctctctctttttgggggtgggggtggtagctcatactaaatggagtgagcaagatacatgttggaataatatgaccttttatgatcattggtgaccaattttgtcataaatgaaatattgccattgtttgttgttgtcattacgtcgcttggattgtagccataatttaactgtgtttttgaagttatgatgcaatttcttttagatatatgattatcaatgatgatcatgttggaacttggaattattcatcaaattgtttgaccagactcttgagtatggaagattgataaatttcgctttaatctatcctttgaatgtaatatatcacatttcttttgatttaggacttctgattgttgtcattctaacaggctttcagttaatatcttggaggacccagagacag

SEQ ID NO: 77105 - DNA, 668 bp, Carica papaya
  Intron number 2 from transcript evm.model.supercontig_26.2 30 (locus evm.TU.supercontig_26.230) derived from phytozom e v7.0 (chr-ID supercontig_26; pos 1635349 to 1636016)
atcagccactttctgaataccgtatcctatctttctactaattaggactttagtgattttgcattttgtttatctgtactagttactgtttagaaacggtaatctaaatgttactatttgtgttttgcactaaagaatgtgatattggttagagaaaacatataatatggcataatatcggtgatctatggctattatctgaaacatagtattggctgtaagagtgtcacatacttgaaactcttcagtttgtcattccccagacatctatttgcagtttgatatgcatttattcatgcaggcaaacttggttggcccatgaaaatttaaaagaaaacacaaggcatggtaggacccattgacatgactcctttgcaagttttgctgtgaagaattttgtagtatcagtaaatagctcttatctaaaagagtgtgttacttatacctgtcccatattagtaaattgaatattaaatcttaaatatttgaatcattggctggactgaattggctgccttaatctggtttcttttggtggatatgcagctcattccatagaaaatgacctagttatttttctcttgtccatttcttgtttcgtggtgacttgtcatatgtcctgtttctatattttatttttatgccgcaaaactcttaaccatctatag

SEQ ID NO: 77106 - DNA, 648 bp, Carica papaya
  Intron number 1 from transcript evm.model.supercontig_3.34 7 (locus evm.TU.supercontig_3.347) derived from phytozome v7.0 (chr-ID supercontig_3; pos 2386817 to 2387464 reverse strand)
tgcggtttcctaccaaatctttcctcttcatcaaggtacctcattattgtctttcatttctccagtggcttcgtcattttcagatcatatgtctgagttttttctgcgattgcatctgcttttacttgtgcaatttgtggttcttttaggagtggcttaattcttcttttccttcttattgttatttcagtttttcattaattctgcatagtgtctttggaagcttttagactttttgtagatagaaacaaataacgaactatggaggcttctcaagttgcatgatcgttagtgttcgcctttttcgctaatccacttttctaggtggaagtgaggctttgaatgctttggttttgtgcatgaaaatctaaggctggaaattttatgaagtatctaaaacgtgcatcttcgtttgagtgaagatatgtgagaatcacattttttctgttcttgtatattgctcttttttcctcctgaagccagtgatctgacgtataaatttacttgagggactgacggtgtatagctgctttccatataagattggtatttgataagttattgaagggaactctggattcatttttttttccgttgcttgatgcatttgcagcatcattcggcaattaattactcaaaatcaaggca

SEQ ID NO: 77107 - DNA, 689 bp, Carica papaya
  Intron number 1 from transcript evm.model.supercontig_221. 18 (locus evm.TU.supercontig_221.18) derived from phytozom e v7.0 (chr-ID supercontig_221; pos 203579 to 204267)
gctggtgatttttctattcctttaactagaattctctgtgtttgtttcctaggaaatttgcgatgtcgacgaaccaaaaaaatgcctagaaaaagtttgtttagtgtttttagtggttttgattatctgggagtgaacataatgtgagagagatttgtgtgtaaatgtgttgacctgttaggatgttgagacatgttttgggactccactttttgcttttgtaaattgaagttacatacacttggatgttttttggattttcaacaaaaaaatgaaagctataccagaattttaattcaggttactatcagtgtagcagaataaagtaatgtggctgtggttgaggtgctaaatccgtaagtttatgtggaactgcttttaaaaaatttatgcactaatgcatgttttgttcactacttagatattagattctggaaatatgattttgagcatagctagaaaatagatcttctgaatatctttctctcgcaaattttttccaggcgacatctatcttgattatcatctgtggaacaattttttatttctttcaaagattttccacttgctttcatattggttattagttaataatacaaaggtcatattttaatgagatattgtccttcttgatgaacataaaatctgccttagggaccaagcaatttgaggataagctttttgccgag

SEQ ID NO: 77108 - DNA, 703 bp, Carica papaya
  Intron number 3 from transcript evm.model.supercontig_26.2 11 (locus evm.TU.supercontig_26.211) derived from phytozom e v7.0 (chr-ID supercontig_26; pos 1540075 to 1540777)
taaagaggattgcggtttgctgactgttgtgctgggtgagtatcacagacctattaactcttgctcagtagcaaggaatggagtattttttgctttttgttagataaaaagacactccaaattcaggttgtgaacgtttcaaacgtaggtctaatttctcaccatcattttctggctgtggtggtaaagtcttttatgaagtttgcaaagtttaatttctctcattgataaaaagaaaatgatgcatgcctctagtggcggtgctatatattggtgatctcttagaacaaattatcatattctcaattatcatgttgctgccataattctgtttgtgaaatgcatttagctgtatccattatctgataagttcatctaaaaatttgctgttggttctaaaccttttaatcttcttattttctttgactgtgcaataaggatcttgagtccattaaattggctcaatattggttcatagtatctctttttataggacaaaggtggagctctcttgtccttcaatgttatactaggttaattgctatctgttggcataatgcaccaatcatagcctctggccggcttgtggtttggttgtacttattattggctcctttcatgtattctacggctagagaaattaatcatgctttcttagagctaccgccattttagtttgaattggttcgtccttcaatttcag

SEQ ID NO: 77109 - DNA, 629 bp, Carica papaya
  Intron number 1 from transcript evm.model.supercontig_3.47 (locus evm.TU.supercontig_3.47) derived from phytozome v7 .0 (chr-ID supercontig_3; pos 280225 to 280853)
ttgtaaaggtaatcctccttttgcttctttttttgttgttccggttattctaattttctgcttggtttacgagaaagcgtgagaaaattaattagtatcagatacagtggtgtttcatttccttttatgattatgcgtttgtgtttcatcttataatatgctagctgttcttcactaggttttgcaacgaacaagaaacatgctggttcatgagagagttccctatttagtacaattttctattcacattattaatgttgtctgtagatttcccttacatttccggttactgttctaaatccatctacggaaataaatggaataatctcttttcaatttcaacgttattgcaaattcgatttatctagctatttgatgtgtttggttggttaggggttgggtatcgagatcgaatggtatttctatccatgtctatatgtggagtaggaaaatcattcatcaccttatttactgaattcttgtgatgcatcgattatagttattgtcttgattgtttgtttagtagaataaatgttaagattggtttattccttggagtcctgttgtgtttgattttttctgttgcatttttagacaaggttgcaagcacaggctgctggagttcttta

SEQ ID NO: 77110 - DNA, 577 bp, Carica papaya
  Intron number 1 from transcript evm.model.supercontig_34.1 68 (locus evm.TU.supercontig_34.168) derived from phytozom e v7.0 (chr-ID supercontig_34; pos 1456195 to 1456771)
gcacaaggaattgctggaaaacttcgtggaggctggtatgtatatttgactctgtgttttaaagttgtttcttttgaattatatttactgaaggatgaatattaaatttgaatattaggattatgtagtgtgatcatgtgagaagatgttttagtgtttgatttttgttcatatgaaatgacaatgctccaacaattttgtgggttctttttctttcttcattgatataccattatttttaaataccaaagaagatggacttaaatttttttagtgctaagttagctttaggagccatatgagttgttgcttgcattggattttgattttgtttttttcacatgtaagtaagtttctttcgttgacagaatcttgggaagtgcttaaagaaaacaaattgtaaattttgtcattttattctatatgattttgttcatcagcaattagtcttatctctaaattcatttatttatttgctttggtaatagctgaacaaatatgtggatagaaatcatgacttcattggtgaccccttgatgatatgagcacacgtttattttgacagagacacttgacg

SEQ ID NO: 77111 - DNA, 918 bp, Carica papaya
  Intron number 2 from transcript evm.model.supercontig_27.1 0 (locus evm.TU.supercontig_27.10) derived from phytozome v7.0 (chr-ID supercontig_27; pos 69710 to 70627)
aaggtacctctttgcctcccttcgctgtacgattcttttttttttttcggtgatagacgtattttttgtatcaatatatccttcgtttatcggctaaaggtcaacactttagtgatttatgatatgtttacatgttgattatgtgatttgtagatgtgggtttgtcttgtttgttcgaaataattggtgatatttctttaattatatttcccttgtgtggagatcgtttgaacttgttgcaaccgggtttggttgtcatttagtggctttagttttgtgtattatttgttgtttaattttattttttctttgatttagtgaagtttctgtaagtgccatgaggctttagtttaaagttcaaattggtgaataaatgctggggctaaagggcttgaacacttttcctagtgttcttcgatgtggagcatttactgttttgtgcaattcctaaatgaactcatggaactctagaaacacaattaggaatcatatattgaagctatgttttaattatattcaatagttgtggagagtctagatctttggaaacattggctgttttaatccaaatattagaaatagcaagccagactgattttccatgttatttcagtgtttaattacacatttaattgtaagtttcttgtagagtgttactcttaagtcagagtaaggctaacttgagaaaatagttgcgtggacaatactaattctaagatttagatgtttggtctacctgcatatggtgttttggaccttggttgggtattgactgaggaaaataggagcccaaaaatgcaacgccatttttttatcccaactgtttttcaatgtcaattaggtaatatgtcttctatgtcttgcatacagtgaaagaatggatgttctttttccttttgtagggcaagacaagactag

SEQ ID NO: 77112 - DNA, 667 bp, Carica papaya
  Intron number 3 from transcript evm.model.supercontig_157. 48 (locus evm.TU.supercontig_157.48) derived from phytozom e v7.0 (chr-ID supercontig_157; pos 315257 to 315923 rever se strand)
gtgtgctgcaaacaataaatcctcacactggagaggttatgaacctttgttcttttaatttgtgtattaatatcagaaagacattgcatgtattgaggaccttatttcggttatctcagtttgatttttttgcattaaaaatttggccattccaattgtagattataaggattcatggttatttctgaagcactggtaatagcattatgtttagccacatttttcattgttgtacgtcaaggtgtggtgctgcaaaatagattgaagaagatgtgaaaaacaaactcgaaaaggtacaatatgaaaaagttattctcgaggatatgttttgttccactgaaacatttaaggtggatttacagtatggaagggctcttcaaattgtaatttattttcagtgaattatgaaattgaatgatctgtaaacgatttcatctggacttaagaggatctttatcatttttagttattaaaattgaagtggtgcatccctcttagtttctcatcttgttaatgtgttccatctattactcttagggttggaattgaaaaggctgttatcgcattatatatcatatctacataattctgcataaatttgaaacaaactttgcttctaattttttatctctatttccaaactgcagaaagtttgcctgagctatag

SEQ ID NO: 77113 - DNA, 493 bp, Carica papaya
  Intron number 2 from transcript evm.model.supercontig_157. 48 (locus evm.TU.supercontig_157.48) derived from phytozom e v7.0 (chr-ID supercontig_157; pos 316022 to 316514 rever se strand)
atcccaaggtttgctcctcctgcttttttttttctctctttcttttgttgaccggtacttgatttactgatgtcgctttcatgttgtagtaacttagggttgcgtgcgtccatattgctttccgtttattagctttctcaaatttatagaaatgaatttccctgcccagtagttatgtacatgtaatatgaaaaacttcatgaatgtccactgcagctgtacccccaaattgaagatgtacctcgaattctatcatatatgtatacatgtatgttgtacatatcagcattaatatgaaaattgagtgtggaaatgaagtagaatgagaatcaaaccaatggaaccttggtgtattttagttttcattagtttttcttttcttccaatacatggagcttaattaaccttgttggatctctggcaaaattgaattacaaatttttcttctgtgcttgtaggttgcaggagagacggagacaaaggggcaaattaa

SEQ ID NO: 77114 - DNA, 988 bp, Carica papaya
  Intron number 1 from transcript evm.model.supercontig_51.3 (locus evm.TU.supercontig_51.3) derived from phytozome v7 .0 (chr-ID supercontig_51; pos 72669 to 73656)
ttcatttccttaaggcctttgctcaagcgtgagtttatgttcttttctctcttcttcttgttttctttttctttttagtgttgtcttctgcctctttttttcttgcttgctgggaaggtggaaagaaattaggtgctgaatcaggacccggagttatatatgtttttatatatttgaaattatagtttcgaattggttccttagcaagtgttgcaccttagaatttcttaattttctttgttttgttcaacggatgatattttgggggcttttccgagttttctgtctatatttatggaatttggtcgtccatttcaaattataagttcatattgaatgacatgtttctcggacacgtctgggtgctgattgaagtagaggttgaccaacaaatagtcatgtagtttagatcatacgagactcttcgtgttggtgaatcgagattgaatcttataatcatctcatctcaacaaaggtagtagtggttaagggagaaacttcaatgattttgattttaattttaattttaattttaatttttaattaatttggaaagaaattaataatgcatgtacatgtctcaagtacttccggatgattggatgtgatctctagattgtttgagaaattaacaactgaagaaagtatgctcaagattgtcttggtaatcaagaatgtcagatttttagtttttctttccttgcaatcgggacggccaaattcgtttttttatagaaagacgagtcagattaaattaaacttgctattggaatatttttattttattttctttccattatttcttccagctttccaagaataccaatatgaggattagagtagattatttgggaaaattgggtactatgtacgaggtggtccgttatacttttagaaacatagtaaaaaatacaagaagttactggagaggtctatgtaaaaatagggggctaaacttacaatttcattcttttctgtttaattaggt

SEQ ID NO: 77115 - DNA, 676 bp, Carica papaya
  Intron number 1 from transcript evm.model.supercontig_22.8 4 (locus evm.TU.supercontig_22.84) derived from phytozome v7.0 (chr-ID supercontig_22; pos 2086270 to 2086945 revers e strand)
aaggtaaaccaaaaaggtgaaggaaaaaaaaccttcttctttcttaattattcaagcacaataatgtgcttatttatatagaattttgtaacaaaataatgggaaaaaggatgcctatagcagaagtggtggcacaccccactacctgtcattctaacaagaaaagggaatattcctaaaaaaaaaaaaatttcccaattacagacagtaaatagtaaattaacttcctacatatatatatccctaatctattggaatgaaataacaagaaatattcatatattttttctaatatttacatggtatcaaagctaagcttaatgtttgagagggagtcagatagatcaaaccaaaaaagggattgaacaaaccgttcccggtgccaacggcggttgacagaactgacctctgaccaaatcagtgtgcggtcaacacggtggtgaagcagaaatagccggatcgacgcgaaacagaatcgtgcggcgatcttccgtgcgtgtctaaaccttttgattcgtctaggtgcaagtctccgacctagcctgtctcgatcaactctttggttgtcgttgcagtgaaggggaagccagatcagcatgaaacaaaatcgcgtgatcttcccatgcgtctgtaactagaagacgagcggcggccgcacgaagacagaagccaaaga

SEQ ID NO: 77116 - DNA, 630 bp, Carica papaya
  Intron number 1 from transcript evm.model.supercontig_0.14 6 (locus evm.TU.supercontig_0.146) derived from phytozome v7.0 (chr-ID supercontig_0; pos 4109046 to 4109675 reverse strand)
gcgttgaggtagattcgttattcctctttatccatatctctatttatcttttttttttttttataattcttctagaatcggatattacgttcctgtatagcattgacttgttgacaattattcattcgaattggtacgtgtgaattgtgaactatcaatggtaaactatggttgtttcatttaggaattgatggtttgtgttgttttggagtttaggaatacattcttttcatgggttgcattcaatttattagaagaaacaagtgctttcaaaatcttcccaaaatgaaggataaagaaaaaacaagaactatttgaagagaaaataattgtgtgatgttgatagaaggcttgggttttgatttgtatgagatgtaaaagtttattcgatgaactttgcatatctttccccatcagcgcatgtgaattccagcatgtattgacctgtaattagagaaactaaatgactcccaactcttttgggtgtttaatttactccctgggtttggatatttgctttctcttcattttgttttcacctagaaattaactttttctgtatcctcttccaatctttgcctgtggttgcaattgaatattccctatgtgtaggttgccgacataaaaaag

SEQ ID NO: 77117 - DNA, 758 bp, Carica papaya
  Intron number 1 from transcript evm.model.supercontig_198. 25 (locus evm.TU.supercontig_198.25) derived from phytozom e v7.0 (chr-ID supercontig_198; pos 131091 to 131848)
tgaccttacttagcctttgtggttgcggtttgctggttagttttttttttattcgacactcaattgttttctgattggaaaaagtttgaagtttggtgggattgttttatgaaacgatgagcttttacatgtatagtgataggtagttggaatttgtttgaatatagagaaaatgtaggataagatagatattaggctccgaaatttcgtctctcttatgtctaggccttctagaaactagaaggcttttttcattaagtgttacattaatgagagagagttacattaagtgtcagaaagattataactttgaactcagacttctttcatgcacctgaaaggtgaggcctttgaacagttgagccaaaacaatctatctggttagtttttcgagagaaaaatgaacatatgttcaaatccataatattgaaaatccacaatcttccttcactattatttcaaaaaaaaaaaaaacaatcttccttcactaatagaatcatgcaccatctttatcaaattgattatttttaccattcaatatgagtttttccatcacttgcaagctacttgcttgtaagtgatgtgactacgaaaaatatgactaaactgccattaataaaagtacttgatatgggagaagtttaattacaatagtttcttgcttggattgtatgaactagagcagtttagattgacactgtgtactgatgcctacttccctaggtctttccagttgagctaactcgattgccacttct

SEQ ID NO: 77118 - DNA, 324 bp, Carica papaya
  Intron number 2 from transcript evm.model.supercontig_117. 82 (locus evm.TU.supercontig_117.82) derived from phytozom e v7.0 (chr-ID supercontig_117; pos 841945 to 842268 rever se strand)
aaatccttcttggaaaggtacattctactgctagtacttcttagtttctgaaaaaaataagttcaaaatttcgaatccttgctgccaatctgtgcttaatccatgctttcgaccgaaacgggtgtatgctaaggggacatgttagcgttttaagttaacttggtttcttagtgatgcggaactcagaataaaccaatgtgatcaaaaacccggctcgaatcactcagcctgatgaatttgattgttaaatttttgtcattttgacctgaagaaaatgcatacctttcaggccttgaagcaattaccaagagagaaaattcaagt

SEQ ID NO: 77119 - DNA, 582 bp, Carica papaya
  Intron number 1 from transcript evm.model.supercontig_117. 82 (locus evm.TU.supercontig_117.82) derived from phytozom e v7.0 (chr-ID supercontig_117; pos 842424 to 843005 rever se strand)
ttccgaaggtgaaattgggcaaccaaggacttgaggtaaagaaaaaaaagaacccatttcaattttctcaaatcaaacgtggtcttctttggttattcaaatcaatgctttgaagctttttgtgggatttaggttttcttgccgcagtcaaaaattataatttgaatctctatcttaaattagtactcgaataactgcggagttaaaacccttttgttaattgggatattgctcttaacttacatgcccttgtctttaggctgttttgaggaagatgcccttatctttaggttactgacaagtaagttcctctatgtaaatagatggttgaaccttgatggaagacaaggattgactctatacaaaaatagctatattgaaccttcaagttttaatcttttaagactctggaaataaacttttattggttatgaaaatgataaatgattcttggttaccaaacttaatccagttcctaattttctattacctataatctatgagaaaacgtttgttgattgctgtatttactccctgtacttcacaattttttgctcgctaggtctcgaaattagggttcgg

SEQ ID NO: 77120 - DNA, 743 bp, Carica papaya
  Intron number 1 from transcript evm.model.supercontig_13.2 21 (locus evm.TU.supercontig_13.221) derived from phytozom e v7.0 (chr-ID supercontig_13; pos 1946705 to 1947447)
gaggacagtcttattcttcgctcctcgatctcaaggtaaataactggtaggttttggtgggaatttcgaaagaaatggtggttgtgctttcttttgggtggaataggggtgaggtagattgctacaggacctgcattcctctagcttcattggtgaagatttggcagttccgaaattgataggctcattctggttgttttgttttatttggaggatgtttggttgcagttttggagatgtggttactggtatgggttagggaaattgatgctatttaatggaggcaatttgtcagtgccaactttgacatgaaatgacatatattagtgcgtcttttgattagacggcgaaaatagtatgttgatataagttgatgataatttctgtggctgtatatcacggttctttgtttgattctgtttcttcattggactgatatcgataggttagaaagatatttggatccaattagaatttggagattataactgctgccgtgatttatagtcatggaattatttgggctgtttgataagttgatgctcgtaaaacctaccataggccaacaattcctggataatattttcaaagaattttgcatacctttccaactcccctctgaaactgtttggcatgtgtacccagaagctttttaaacgcaggattatctctatgcatgctttataaacacctgtgtattgtttgcagcaacttgtttcagagaaagatttgatagtgagaga

SEQ ID NO: 77121 - DNA, 588 bp, Carica papaya
  Intron number 1 from transcript evm.model.supercontig_250. 13 (locus evm.TU.supercontig_250.13) derived from phytozom e v7.0 (chr-ID supercontig_250; pos 110067 to 110654)
agttcactagtcacattcgtgcttcgcccttagaggtgtaattcctcactgttcttttcctctgcaatattacttacttcaatggaagtaaatactcaccatgaaagggaaagacagatgcttgatgcacaggctgctctgcgtaattgtttagtgtttgtataacgaatgaattttggcttagttatggcgaaaattttgttgcttaataccttgcgcatggtagagagaagttttttctttttccttctctgcttttcttttcgtttgggttttgggggtggagggggttatcttcatatttagcagaagaacacagggggtcacaagtgaggaagacaaaaaatttgtgataatattcaaacaggaagttgtttttcttatgcaaaatttcatgccaattttggtttgtgtttgagtattattatgagatggaagtaccgggaatgttctgttctttttttgagtttccttcgggtaatactaataagggttgattcaacgttggcacctctgccattggctgtttttataaggttgttgcattatgatagttgtgtaatgatggtgcaggagtgggagggaagg

SEQ ID NO: 77122 - DNA, 575 bp, Carica papaya
  Intron number 2 from transcript evm.model.supercontig_117. 13 (locus evm.TU.supercontig_117.13) derived from phytozom e v7.0 (chr-ID supercontig_117; pos 201242 to 201816 rever se strand)
aacaagacattgagcgagtgagtgagtgaaaaatgcaacatgtcttccttgcaactgcaacaaagcaccatcacctaattttgaggcatcaatctcaaacgcaaaagtcgagggaactctttaataggccaacatcggggctctggacatggcttagtcaaatgctacctagctttatgagtctcaaaaaagaaaaaaattcttcagcattctagttaaagggagcggcaatgggaccataatcttgaataaatttccgataataacctgttaagccaaggaagccccttaacatgactttgggtggataatgcattgattctacatgtgatctattttccatgactgcagacacgtttatacaattttcggtttctgatcgtaaattctcagaaatctctttttttttttttaactacatctcacaagtatcatcattttaatttttgaacttaatctcttttttatattctcccctgatatagttgtgtgaagatctctttctatattatccttcacatgttgaaatttatgatgcagaacaaaaccatccctcaaaggcgtcagcaagtaac

SEQ ID NO: 77123 - DNA, 977 bp, Carica papaya
  Intron number 2 from transcript evm.model.supercontig_49.8 4 (locus evm.TU.supercontig_49.84) derived from phytozome v7.0 (chr-ID supercontig_49; pos 550450 to 551426 reverse strand)
tcgcggctctcgctgcccgcgactctgttttcctggtaattaattcacttactacccattcatctcttactcccttcataatatatgaaaaacaaaaaaaaaaattatataattatataattatgtgatcaaacaaataaattaaagaaattaaccaggactttttattttcttcatttgtggaacctcatacgttgtcgttttgcaataataactactaaaaacagttttaattcatgtaaatatagaataatatctatccatcaagttgctaaatttatagaatatttgaaaacattgtcaatccaaaatagggcatatcgcaatcgaggtgtgatttttggcatctagccactcgtggccattgattttgtcaattaattaggtaacaaattttttactgtatatttgtttgtgctgtcggtggccatataatatatatatatatatatatatgttcctaagtgtttatttgcatttatcctgtgacagatattttcttgtactgaatttaaatcaaactcgtgaatttcaagataaaaacttatgttattattatttttatttactaaaaaatttcacatataataaataaacacgttacttttaaatttttattgaaaaatgtgacaaaggtaccatggatcattattaaataaataattgtaatttagattttatgcgttcttaaataattaaaagggaggcttgctcttgtctataattttatttttatttttaatataagagatttgactggttatctctaaacgcatgtgcattaattaagacatcatatatatgtatatatgtaaaatgatacttttatttttgttaaagcttataaatatattgtaattcgtaaacaagtttaggagattaaaatgatgataattagttaatatatgtatgtatatatatatatatgcatatgttttgcagtcaggaggccctgattatagtatcccactgggaag

SEQ ID NO: 77124 - DNA, 564 bp, Carica papaya
  Intron number 1 from transcript evm.model.supercontig_139. 36 (locus evm.TU.supercontig_139.36) derived from phytozom e v7.0 (chr-ID supercontig_139; pos 224323 to 224886 rever se strand)
aaatctgaagcattcatcttattgtgttcttgcaggtatatagtttaatcgatttttaattgttttgctactggaatatattgttatggtgcagtataaagagtaaatttagcctaaatagttgactcctagatggtatttatatggttatttgattaaattgtgttcttgcttcactttgttctttttcctttttcagagaatgcgttgcagtgtaatgcgatgtttttgacaactgctctttagtttttttttttgcagaatcatcttgctgttagcatacttgaaatatcttcatagctcatgctctaaaaaacggaaaaaagaatgagatgtctttgtagttgatatacctcattagtctcctttatgacataattgttctcaaattcatagtttgattcaatgtgtcatctgttacatgtttaattttgatggaaaaggaaaatatatatgtaatgttgtgtcatatatacataaatataaggaaatacatgcttctcatcttattatctcaatatcattgctgtaacaggacggaatcttaacaatataaggtgctca

SEQ ID NO: 77125 - DNA, 447 bp, Carica papaya
  Intron number 2 from transcript evm.model.supercontig_4.75 (locus evm.TU.supercontig_4.75) derived from phytozome v7 .0 (chr-ID supercontig_4; pos 1661747 to 1662193)
tgctctgaacttggcgggttcttcctcaaggtattctgacacattcctttcgttttattattatctcaacgcctctcgtctttttcatgctcttatttccgtaattcagaattgattatggtcccctgaagtgggtggttttggacgtctggatttaagttcctccttaacagctgttttctttttttatgttatgtaacttttgaattgtttgattcaaatggtaatgtccttttctttaatgcctcaatttgtttctcaatcttctttttctgtttttatttctttatttccttttcaattttcttcttgaggataatgtgttagagataattcggatttaggagatttcagccgtttgtttatcagtctatttcgtagatggttcttaattggtgtatatttgaattagattgctcaaattattggaaagcctgacttggcccc

SEQ ID NO: 77126 - DNA, 820 bp, Carica papaya
  Intron number 1 from transcript evm.model.supercontig_104. 56 (locus evm.TU.supercontig_104.56) derived from phytozom e v7.0 (chr-ID supercontig_104; pos 356209 to 357028)
ttctagggtttgtgctctctctctctctctctctctctctctctcgctctgtgcatatatataaatatatatataaatatacacgagcgagttaatttcaaaggacaggaaggataattttataatttttttcctggatgttacattcttatgtgctttgaattgggtaacattcccttttagacgacatcaaacatataattaataattttgttttcttaattaattttgatccctcttgaaccatgcaaattctttcttttctcaattatctatgaagtgggtaattctgaaactggtcaaagacagacatcatgggatcaaatgcagggtcttgacgaatgaaatgggaataatctgtttgtgaggggagaaaattggtcttttcctcccggtaatgatcactcattaccgggtttaattagattttgtgttttgaaagtcaaatctttggcagtccactttagaattcaaaaggttatggtgtattgagcagtttttttttgtttttttttttaaaaaaaaatgagtttggagttgagcataaatgatccaagttcacactgaaatttcctctttgacaaaatatagaaaacccttgtccaaacattgaacaaaaaaaggctttttaaaattggtctgatggtacagaatataaatgcagtttgcttctataaaaatagctgtaagccaaaagtgttttgaatctttcttaatttgtttagtagctaagaattaaaagattattgttattggagtgatttatgaaatgtttatatatgtttgttggatttcttgcagggtgattccaaagacccta

SEQ ID NO: 77127 - DNA, 710 bp, Carica papaya
  Intron number 2 from transcript evm.model.supercontig_104. 56 (locus evm.TU.supercontig_104.56) derived from phytozom e v7.0 (chr-ID supercontig_104; pos 357032 to 357741)
ccaagagaggtatatccaaaaatcccttaagaaaaatttggaaacattactcttttgttttgcagtagtgggacaaaatctatcactcacaacagtatatatgcacacatatatatatatatattcatgttggctcactttttgaatgtcatggaacagtatatatttatatatatatatatgtttatggttgccaacaatgccttagtgtttttgggttactggactctattataatcaaggatgggactctctgtggggctgaatcttgcttcagtttccctttacattggcctaaaaagatttatcttacttcttcaatccaatttcactactacccaaaaagatcaataaaaagcaaatgaaaaaggaaagggaaaaaagggaagtaaaagcctgtatctgttcttcactactgcatttctttatatatatatatatatatatatatatatatataatatgtgcagagagtggatcaaacacctttttgaaatttttagattaatggctactgacccattttgttggagaaaaagttcttgtgatcttgtaatctattattgcttaattaatttgctttaaagatggtatctatatgtatggaatttgataaactgggaattgtcttttatatatatatatatatatattaatatgtatgtattgatgcagataactggaaagacagttggagaagttagagctgt

SEQ ID NO: 77128 - DNA, 761 bp, Carica papaya
  Intron number 1 from transcript evm.model.supercontig_1729 .1 (locus evm.TU.supercontig_1729.1) derived from phytozom e v7.0 (chr-ID supercontig_1729; pos 4952 to 5712 reverse strand)
atcaacatccgcttctagtagaaataatattacaggtgcttataaatataagtcgtgttaatgactcttcatcattctgtgacagtgatttgtctcttattccattccctgttttttttttttcttgggtgggaaattttagtctctgtgggtttgattgcatgcagctttggttaatggttgtgggttttgtttggaagattagacgtgctgagttttagaaaaaggaaaaagaagttctggttattgatgaatggagaggtcttttcatggaaatcccattattttttctttcattttaagtcttgtcaagtaaaagtttgggcacgtctctttttgctatctccttcaaaatccctcttcttgaaagctgttttctggtaatagtaaaccaaacacggcataacaataccgcagaaaagagaaccaaaacaaggaaatgcaatgattttggagttcttttctttatagtttattatatatatatatatatttttttttccctccattaaagacaggaagttgtagagactttgcttgattttttattcatttttttgggggtttaacttgctaaatactcctcctttatcacttttctacaatcatggtcatggatatcctttttccccctccaatttaccaaggaaatgccttgaatttttggctttttccgtcttttttttgaaggacctcattttctaaatttgggtttgttgtatatatttcagggtactacaacaacagtagtggaatctata

SEQ ID NO: 77129 - DNA, 982 bp, Carica papaya
  Intron number 1 from transcript evm.model.supercontig_42.2 5 (locus evm.TU.supercontig_42.25) derived from phytozome v7.0 (chr-ID supercontig_42; pos 152787 to 153768 reverse strand)
aacttgaaaattatatcgattgctgatttaataaggtaatgacatcttagttgaatgacccaacatttaaatagtttcttctatgtctatcatttgctgaaagattatctcaacaaacagaagacttctatttcttattgggttcaagaaactcattgctttgctaatttggttgatcaattaccatttttgagatctgcaaaatttgttgttcctgccattgttggaaccaaagagcatttaggaagaaggaaattccttggaatgaattccagtctcttgcattttgtacatgcatgcttcaattagacagttccatttggaaatgtcattaaatatgcacaaaatgtttgccccatgaatgttagtttcttttctaacctaactagttagtagcataaaaactgccatatcatgccttggtaaatccagtttatagaattgaattgggagatgctgaaatcaaagatgttaaaagaagaaattaagttggttaaaaagggaggcattatttgccttcttcaaatataaatagaaatagaaattgcaggctcaccatccaaaatacagaatttacatttgatctaaccaaggtctttgtgaaactagagaatctcgaagaaagactcgcttggaccttttctgtttgttcaactgcaggagcctttgcttgaacgagaccataagcttcatcagctatggctctcttatgcttacagctgcaacaatttgaaaacaaagtcaatctaacacaaaaatttagcaatgtatttgtttaaaccgagtaaaagaaatgaataagttaagatcattaacctccttgtttctgtggattcatcacatactacctgctcaaagaagtcagaagatttttcccatcaattaatagatttaggtcacttgtataaagtaaattgcttatggaatgaaaatggaaatttttgcaggtacaggaggaagagagacaaattagtggagcatt

SEQ ID NO: 77130 - DNA, 989 bp, Carica papaya
  Intron number 3 from transcript evm.model.supercontig_26.3 02 (locus evm.TU.supercontig_26.302) derived from phytozom e v7.0 (chr-ID supercontig_26; pos 1936086 to 1937074)
ctggcaacattttgcctagactgtaagtggcaagaagtttcacaatttcttagaatttcaatcttctgattagttaatgagagacacgtgcgtttgcaatgttcacttgaatgaacttggtatgtgtgcggtaccagtttatgtaagaccttaatttaattgaaggttttagccttttgcggcattaattcttctcacattcctaaaaataatatattgatacctgtcccaatcatgccaaaccttcttagctcattggtctcaactctcttggttcccattcggtaagagttgaggtttatgacttgacataaaaaatttgttgtcacgatcaagcaatttgggtaagataaaatttcctcgtctcaacattttagtgtcatttagttttagcctcttctgattttactggaagtagtctctgttatatataatttttaaatgctattgttagatccagccttggagttgataagaatcagtgaaagttctcccacataaagaatgcattcctattctttgtgtaggagaaatgacagaatatatgtttaatatataagatatcgggccagcttaattgttgtagcttttagataaaatattgtatatagtaccaatcactggaaactctgtggaagaaatatgtctgacacagattttcttttgattatgtttataaacgctgggaattgcaattcatgtttccctgaacaagaaagctcaatgtggggccttcatccttcagatatgtgaattaactacgtttatgtactttatggtacatcctgattatttatcctttgatttcttgaggaatgctgatttgcctacttgcataagctacgattaacttctcttttttcttgaggttgaaagtgcaaaagccaagagcttaagtgcttcatgaaatttgcatgtcatatccttaaaatattattttattctctttgtcaggtttttgaaatttcctttgttaatctaccaggtat

SEQ ID NO: 77131 - DNA, 734 bp, Carica papaya
  Intron number 1 from transcript evm.model.supercontig_5.21 3 (locus evm.TU.supercontig_5.213) derived from phytozome v7.0 (chr-ID supercontig_5; pos 1838909 to 1839642)
ggctggactgacttcgccttcacctctccaaacaggtataacgtcaccgcgtaatgattttaatttctagttatttcttagtttcgtaattagaatttattttgaaacaatttcgtatggaattcagaagagcattttgtatttggaacatgttaaaatgcgaaaaaagaaagaattcgtgaattgaagaacagcttaaattgtttgtaatttcttcatattgattccattgaatttcctaaactatttaaaattttaacggttaatttctatcataaacattaatttgtaaatgaattgaaatgaaattttcattagttcaaaataaatgtcttttaagtaaatccagtgtattttttctacctatattaatggatgttttggaatgaagactcatgttaagcagtcatttgaaaatgaaaattcaacatgtggagcttcattgagcattatgttgattgttacctatcatgtcaaatggaaatgaaggttgcagattgagaaaattttatcatgcttctgtgacatggtacttccctcaatctatgaatagaaatatagtggtgaaaacaaattactcctttgattttagcagctattatcgtttttcacaatctaatgaaggaaattgctggaagcgtaattttttattacagttttaatctcccatagttttcattgattggagaagtaattttcaaggcagaatttgttctcggccatttgcaccgggg

SEQ ID NO: 77132 - DNA, 793 bp, Carica papaya
  Intron number 2 from transcript evm.model.supercontig_116. 11 (locus evm.TU.supercontig_116.11) derived from phytozom e v7.0 (chr-ID supercontig_116; pos 54422 to 55214)
aacttcaaccttcgagcacagacatagttcggccagtgagtttactaagtattagtggcatgaaaatattagctgtctgatttcaaatagaaaaagaaaatcttagctgtcatcacccatttgaaatatccatttagaaagcaattattatgttttctagtgtaaattttctttgttccagatcaaaagttctctcagcttgaagtttaaacactttctctgtgttctctaaactataaaatattctgcactgagttggttttagtttgcgacctaattaggagtatgtttcattttgatgattaacctccttgctaaggttgaagtacacacttacctgggttctgccaaactatatgaagtttggcattgagttagttctagtttgtggctcgggtaagagtgttacatgctgatgcctaacctcttcttggagataatatctgatggtgcaactaaggttaaatgtttctttttaactttatcataaattttccagagttgggcttgaacctggatcacttctatggaggtgacaggaagtaaccaccctacctggtgcaggtggttaactgtgattatatgttcttagtgctgaactaatgatgccattaactaaaccattttttgtacttggtccttgtctatgttgctttaagcactgaatgcttatatttctttcacgccatatcatgcatttccatgatcatattcatcttttgacccagaaaaaaacataatgaaacaaaattttgcaggttcggcgtgaacatattgacttcgacaagccaga

SEQ ID NO: 77133 - DNA, 768 bp, Carica papaya
  Intron number 1 from transcript evm.model.supercontig_179. 40 (locus evm.TU.supercontig_179.40) derived from phytozom e v7.0 (chr-ID supercontig_179; pos 290697 to 291464 rever se strand)
actcgccttaccttcaagctcctccggtacctcgggtaccatttcttcaacttctaagctgtagtcctgcatttttcatgtatttattcatgcatgtcactattttttgatgtatttatggatgcatgtaactgtatgtcttctataaagtaatgcatgtattaattggataaattagcgacattcttttttgggcatgcgaaagtgataattggatttgggtttatttctttgtatttttatttgtttatttttctttagctgaatcaggcctttattttaatttgtcaatgatgatagtaaaaataatgagaacatcgttcaaaatttctaacttttaggtgtaataatgcctggatggtgaaaatgatgacagcccagagggtttcattgtggttactttttgtttttttttttcttttgatattctcgtttcctgttgatcatcgattattggtgtgtgaggagaaatgatttttactggtaagctgaagcctattcagtgtaaatgttttccaactgttgctttcgggtcttgatttaacttttattggttagaattgttattagtcttgctagtacttttcttggttaaaattggtatcaagaatgtgttgtgcgattcaaatctttgttttttcccctccgttggacctcaagttaaacttttgtaagtacatgtagagcattcatccagaacgttgtcattgcaatttctgaagacccactgtttttaaccttttattttgcattcagggtaggttacag

SEQ ID NO: 77134 - DNA, 623 bp, Carica papaya
  Intron number 1 from transcript evm.model.supercontig_140. 1 (locus evm.TU.supercontig_140.1) derived from phytozome v7.0 (chr-ID supercontig_140; pos 9622 to 10244 reverse st rand)
ctgctgtatatcttgctgctggctctgtcgtcgaggtaataagcaagcaattttgtaaagttactgtaatggttcttaatggttttgttgtgctgtttttccgtcttgatctttgaccaagtcacatcttaaacttttcaaattcaaaaatattttttttgaaagaaaaagtgtaacatattctaagtatcaaggagatgcaacctgtatatacaaatattttgcaattcatgaagatattaataactaatgtagagactagagctagcttatataacgtgaatgttgcttaatctatttctttagcaaaatgctctacagtcgttttcggtgataaatatggcatttggttgacctctgtttttgttcagatgttctttccgttctattagtctcaagttcttgttgtaggataacaagttctaatgcaaattaattggaaatttaagaaaagggacaaggacgatattgtgtttcaaaattctaatcattattaaaatccatcactctagttctcaaaaaatacaaaaaattagattttattaagttaaaatatctaagggattaattattttgcaatttacttttgatgattgtgtgtgatatcaggtttatcattgtca

SEQ ID NO: 77135 - DNA, 650 bp, Carica papaya
  Intron number 1 from transcript evm.model.supercontig_1.12 1 (locus evm.TU.supercontig_1.121) derived from phytozome v7.0 (chr-ID supercontig_1; pos 1936692 to 1937341)
attctccctcgtaaactttcttcctcactctgtcagtatggtgtaaacatttttcttcttgcatatattttatttattttggtgtttataaatattgtgccgattatttcatgccgacttaatgttattttgttaatttctatggtttatctttaacttgatcgcatgttagagcttgttagagcttgctcgtgatttatcattgatcatctttattttttttttttcgctgccaaaattttatcaatacacacgcagtcttttagctttaatcgcattactctgtctcttatataagtagtacttttctttatgattctgattgatttcatttctggttttctcttcctgcttttcgattctgaatttgtactcgtttcttgttaacggattgtaggatagtgatttgctcgataggtttatttatttaaccattttctctccgcgtctttccaatttccactgtaaggcattacattgccccgaagcttatgagaaatcatcccccctcgttttttgattgatagcattggattttagggtttaaatgcttgctcattcatttggggttggttttttatttattttttatttatttatttatttatttttaagaaatattagtttatttgatacaagtttcagttggt

SEQ ID NO: 77136 - DNA, 830 bp, Carica papaya
  Intron number 1 from transcript evm.model.supercontig_216. 8 (locus evm.TU.supercontig_216.8) derived from phytozome v7.0 (chr-ID supercontig_216; pos 69287 to 70116)
actcctcgcattccttaatctcgagggattgcaccgtaagtatgcacctggagtttctgccgctcttggggttaaattttggtgaacaactcatcataaataatagctgctaacaattttactttctgcccggaaacagtttagttccactttcgccgttatcctctttcttattgcatattattttcgtaggtgcagctacttttattccatatttgtctcattgttgactcaagtttattttcccataaattttttctctgatgcttcgacagtgatgtaaagatcctcgtcgattcttgtgttttctatagcgaaataatagcaagaattggaaatgtcggtttcgcacgatatctagatatatgcaattttgaaatttcacttccatgagtagttactctttgcttatttcttctaaaataaaggcactcggtggatttgtgcgtgcggggcaagtttcttgtaaatgattgctagctccaccagagttaaattttaataaatatagaaatgaaaacaaccagtaaggaagctaatggttttcggcagaaatcaaattactcccctcctccactcttcatcctccttgatggacccattgttttctgtttctgttccatttcatgtgtcgttcgcggttctatcatctgagtacaaaaataatcaacactgttgtaaccggatcatgtctgcttacggtgcttagttttgatgttagttaatccactgtgcgacattcacgggcttctatcaatagaacttgatattttgtctcgtctctttgatttacagggactgtgtcctggcgacatcatagttttcattca

SEQ ID NO: 77137 - DNA, 660 bp, Carica papaya
  Intron number 2 from transcript evm.model.supercontig_49.1 12 (locus evm.TU.supercontig_49.112) derived from phytozom e v7.0 (chr-ID supercontig_49; pos 801387 to 802046)
ataaggtgatgaaattgcacgatgttttcatctctgccgatcctttcctgatctctcatttaatataaatccatcataatcttctaagaatttattttcggttacatgggaaattagctataagagattgacaggctcctagatactgtcataaatcttgaatgggattgaaatttttgaactgtatgctttttacaaagtcttactctgggtgtaccaggctaccagttttaagtatgcttaagatcatgttactaataagattgtctattcaacatagattttgcgtattaagatgaattggtgtggaactatcacatgttgttgtgatactccaaaaataggtgttcatacaaaatgttaacgtagtatggtcttacgtgtgtatgttgcaccctaaggttggaaggtttgatcttgtgctgaattttatcatttctgttttttattttactgatttttgaatcagtagaatagaagatttgacgtcttttctgttgtgtgaataatcatatatcaacgaagaagacagtttaaaacattctatattactgttggctttgctacccctaatttttttcttggattctcactatttttattctttgattatgcatgtgtacagatacagagacgtttagcacaaaaccgtgaagctgc

SEQ ID NO: 77138 - DNA, 318 bp, Carica papaya
  Intron number 3 from transcript evm.model.supercontig_49.4 6 (locus evm.TU.supercontig_49.46) derived from phytozome v7.0 (chr-ID supercontig_49; pos 333412 to 333729)
ccgtgcaccggtaagttgcagtcttctctattttatatatcgcccttactgtagaaacccttatgttggtgttttgggttgtgctggctcccaaaatatgctttgtattttaggataatcttgcaaaatctccatacttctctgaaaagatagaagtggcagtatcatggttattgaatgcatttttttcatcgtctgcacgatttgtacattaaatggtctgaacaaggatcaaaattttctctcattctttgtttcatggaattttttggaaggattttatcattatatctttccctttgttcagctattgcttag

SEQ ID NO: 77139 - DNA, 776 bp, Carica papaya
  Intron number 1 from transcript evm.model.supercontig_2.29 8 (locus evm.TU.supercontig_2.298) derived from phytozome v7.0 (chr-ID supercontig_2; pos 3627356 to 3628131)
gagctctggaaccttgaccccaagcgcgcgaaaaggtcctctttcttcttttcttttcagttgatacgctcttttttgtttcaattctttttcctggaaatttgcatattcaaatttgaagtggaagttttcactttttacgcagtattcagcgaaaatggataaggttttactctaatcagcctaattctgctattcttttgtttggttcccctgagaatatagtttgccagattttatattcgtgcaaaacaacgggaaaatcttggacttacaagttttcttcttctttcttgctgtgcatgcatttttacaccttaaaaacccattcttttccctgataacttgaaaagataagttacattcataataaattggaatcctactgcaagtaattattcaatcactgattttcatgaacgttttgcttgtcttctcttgccttttacacctcaatcaactctctcaagctcaataaccaagttgccattatttgaattgaagctgccattttttgctagtatattggcatgtatagcttaacatgtttaaaacaagtctaatcatttgtctgaactcgggatgctatatgttatcatgagacttgttgaacatggaagatttaaccgggagataatttttggttccaaggatattgagttccgtcaaagaatttctgaatgccatacaacatacatagagatgaatcgagcctcacaagggagtttattacatgtgcaggatactggcaaataggcagtctgcagctcgctcaa

SEQ ID NO: 77140 - DNA, 402 bp, Carica papaya
  Intron number 1 from transcript evm.model.supercontig_18.2 25 (locus evm.TU.supercontig_18.225) derived from phytozom e v7.0 (chr-ID supercontig_18; pos 2503967 to 2504368 reve rse strand)
gcttcaagtgcagccattgcaagggcactcttgtggtatttctttttatttttttctctctattttttaaattctactttttcttttcttggaagccaaacagccatgtttcttcatttcctcatgtctccctcctaacaaccacccagattcaaattctgggtcgagcatataagaaactgattttcttaatatcttacaatcttgttataaataattagaagtttaagtaaatcaagaagatgaattatcccaatgcattaacagaaaataccaacattgatatttaaatggagaagttgacatatatatatatatatatatatatatatatatatatatatacgtatatgagggagaaagtattgttgatttttatttgggaaatgggtaatgacacag

SEQ ID NO: 77141 - DNA, 435 bp, Carica papaya
  Intron number 1 from transcript evm.model.supercontig_169. 26 (locus evm.TU.supercontig_169.26) derived from phytozom e v7.0 (chr-ID supercontig_169; pos 303503 to 303937 rever se strand)
accaaatcagtcaacgggtaattccaatttggatccctcttctaatttgttatttcactgaatcgtgatccgtctgtggtttttgaaatcaattctaatccttcttcatgctcgtgtatgaactttcgctgatttgtggagagagatttttgttgtcttcgaatttcgcttgattgatttctcttggttctgggttggatttgattatttgagcatgaatcactgctgatgtttttttttttttttctttgaaagaatttttaaagtttattaaattaatttgcgaaaattcaaattcttgttataactcaaggtttttcttttgttttaaagtgagtagggtagtaattgatggattgatctgctggtcttgtgagtggaagattctgcttatttgacagcttttggtgcgtcttttatgtagtttgctgggct

SEQ ID NO: 77142 - DNA, 875 bp, Carica papaya
  Intron number 1 from transcript evm.model.supercontig_18.2 05 (locus evm.TU.supercontig_18.205) derived from phytozom e v7.0 (chr-ID supercontig_18; pos 2291434 to 2292308)
gaagagtctggggaagaaacctggggagaaaagttaagtatactgccctttaggaaaaggtcaagatcattctataactgttctcttttccgtggtcttagctatgttggatttcaggttttttttattaaatgtgctgcttgtacttggttctggtttttggactccattgatggtgatcgatcaaaccattagtaatattgtctcaatggttgacttgctgtctgattatgttgcctgagcttaacatgtatttattgtggttttggtgattcatatcatgagatgatgacttctggacctgtcgttgtcagactcaaaatggacatggtggctctttcttttcgtgagttatttggtttctccatattcttcaccaaaaaaacaatgatgtccttgctaaaacatctgtgtgattggatcctaggattacatattttatcctattttgttttcatgacattagaacttttttctcttctaatcaaacatgtttctacttcctatttttttaggtaatattaaattgtaagtttattatatttttagttcaatcgtaactactaaattatcttatttttaactatcggtgagccggtgttagtttttctcttttttttttttttttttgttttcttttcaattttactgatttaaatttcactttgatttttaataaaataaatctcagttgaatttttttttcttttctcagtaagaattctatttttttttttgtcttattttatttttcgtatcttttgttcttttaaacaaaagaatttttaaagaaaaaagaaaaaaaagattactccctctgatattaactttaacctataggaagccctaggattcagcaaaaaaagggaaagttc

SEQ ID NO: 77143 - DNA, 320 bp, Carica papaya
  Intron number 1 from transcript evm.model.supercontig_5.14 9 (locus evm.TU.supercontig_5.149) derived from phytozome v7.0 (chr-ID supercontig_5; pos 1178674 to 1178993 reverse strand)
ggctaaggtgcatggttttggtttgcctttgttgtgcaaaggaattggaaggctatcctatattaacatctaaacctttacttctgtattttgttttgtcttcttcctttttgtttgttttcttttccttgtttgatgggaggatattttatattctctttctttttttaataatatcttcttttccattaaaaaaattgtcagatgcaatatttattgtgtatgcatatatcagctaaattgtgacgatgttattcttctctagcattcaaatgttggtgtcaggctgcctggcaatttagtgtggattttcctttgca

SEQ ID NO: 77144 - DNA, 577 bp, Carica papaya
  Intron number 1 from transcript evm.model.supercontig_20.2 17 (locus evm.TU.supercontig_20.217) derived from phytozom e v7.0 (chr-ID supercontig_20; pos 2208296 to 2208872 reve rse strand)
cttcagagtttctctctgctctttctctgtttacggtactactggaccttcttttccgtgttttttctataaattttcttgctattttcaggtggtgattgatcatagctttgcgagactataaattgggagtttatgacttttaatttaattgttgtaatagttagggtggattcgaggttttgcttggttgcttgatcgttgttgactaacaacttttattttccttatgtatcatcatcattgaagttttgcttggtttagtaattagttgtagatgggcaatcaaagtgcgtgcggagttaaattgaacttttactagttctaggttggttttgaattaaaattgcagataaactgagacgcattctgtgctgagatcatgatgcatcgttattccgttgggggaaatgttttagtttctgttaaaatttttcgaatgccccagattaatttatcctttttcacgtagtgcatagaatacagtagctgaatattttgcatttttttgctgttactgaactgggtactctttactgcaggtgatatttttggcatctttggttagtgcagggaa

SEQ ID NO: 77145 - DNA, 711 bp, Carica papaya
  Intron number 1 from transcript evm.model.supercontig_21.1 05 (locus evm.TU.supercontig_21.105) derived from phytozom e v7.0 (chr-ID supercontig_21; pos 1258693 to 1259403 reve rse strand)
cgctaatttacgccgctgctgatttgacatctcaggtgaaaattggggttttaattttaatttcgtttttttaattcattttctggatttatatttgtaagtattttccgtagctatcagattgtgaagagtatctgtgtattcggtgagtgattacactttatatgaagaaattagagattagcgtttgatgttctttacgtttgcatgctgtatccggcaaacctttgtttgaatttttgtttttcgagctgcttttcgtattgcattaaaatcacgaatttaagaataactcttaacacttgactgattcttgcagactaacaccgtgtttaggacaaacgattccacgaaaaaaaatgtggaactcattttgcaaatgtatattttcatgtttagaattattccaaataatagaatacactctgcaattaagtctacttaaaatgggattgacagatacttgaattctattattttttatagaattcgaaaatgaattgcaattttgaaggacaaaaattttgagatgacttttacacacttgttaatgttctcaaaaaacgtagtaatttaattcaattccaaagaattgtctaaaaagttctgaatggattatcagcataaataattacttgtaaatgaacccgttattgattctgttataaataaaatgaaatttgttgtacatttgttcagaagaagccttaa

SEQ ID NO: 77146 - DNA, 560 bp, Carica papaya
  Intron number 2 from transcript evm.model.supercontig_397. 9 (locus evm.TU.supercontig_397.9) derived from phytozome v7.0 (chr-ID supercontig_397; pos 42399 to 42958 reverse s trand)
gcaaagggactcagtgtgagttgattgttcaaaaggtagttacggatttcgtgcttgattttggttttgctgaaaatggaatttgtttcatttgattaacgcgtaatgcaccatgatgtatgcgagctaatacatttctacgaatttgacaagttctgttatatgtacgtatgtttctttttgttggattgcttgaaaattgtgtataatccttgtataatttgcaaattctacatatttgggccaacttctttaatggtacaccttcaaatggctacacattttgaagaaaaaagttttccgctaagagacttctttaatagcacaacttctttaattcatgtcactttcctcctaagaaactctctctgctttttcttttcttttctttcttcccctggtggggtagggatagataatgaagatgtgttattatttgtcttaaatgggtaagtttactccatcttgaatgcaaattatagttttatattttcttgctcataaatgttttcttttggttcctagtttggattggtgcatatatctactggggatctctt

SEQ ID NO: 77147 - DNA, 841 bp, Carica papaya
  Intron number 1 from transcript evm.model.supercontig_161. 27 (locus evm.TU.supercontig_161.27) derived from phytozom e v7.0 (chr-ID supercontig_161; pos 376506 to 377346 rever se strand)
aggcacctccttctgtttcttcaagagtacgcagttcttaatttctttccctttgaaatgttttacttctgttatgttaagtgtaattttttataatttactgggtacattgttttgcttggtgtttgacaatggactttcttgacataaagcacggcaaaatgccttgtctgagacatcagatcgtcattgtgttcacccgcaaatagattgtcccttaatatattgcttaatttgttaggctcaatctgaaatcaagaattcttgacaatggagttggaggtaaactaaaatgagagaacctatgtccaaataaacaatgaatctatttgctggaatgctactgtctgttcataattttcttgggactttgggtttcatattccgcgtaatatgggaaacttttacttggacttatcctggatatgcgtttgagtctcaatattttttggcaaatttacttcaactagtcatattgttttggagatcatttcttggcacaaacttggacttttggtttcaatgttagtaaaagatctcactggatataagtttgattattttggagatcatttcttggcacaaacttggacttttggtttcaatgttagtaaaagatctcactggatataagcttgattaatacatttgcagagggttgtggcttttcaatgcatagtgcaggtgtccttgtaaggacttaaaacaataatgattttttgcatgcaaagcatttatgtgcatttcgataaaattattatatccatgattctagatcttgatttgccaatgcattctttcttcagccaccaactagatcaccagttggaccagcctacaa

SEQ ID NO: 77148 - DNA, 978 bp, Carica papaya
  Intron number 1 from transcript evm.model.supercontig_6.21 9 (locus evm.TU.supercontig_6.219) derived from phytozome v7.0 (chr-ID supercontig_6; pos 1722759 to 1723736 reverse strand)
aggctgctctctgccgtgcttgcgacgaaaaggtacgctcagataatttatgggtatttcatgtttatcttgttaattctttgctcttgttttttttgttttctctactttatgggatttgtatgttgttttcatatgtgggtttcttctgttcttgcactttctccttctaatcacttgcctttttttaattgttcattatttgctgcttttatatcaagcttgggattatcttcttcacgggaaaagtttctgtcgattatacgtgatctgaacttggaatttctttttaggagaagaaatttggtttgtttgatccagtctctggtgcttggaattaattttacttagaattctattatatgctgaagtaatagttaccttgttaaaatatatatgaaattgtaaagttgatctgtggaaggacatttctgcagatctttattgaaaatttgattgattgatatccagtttcttgagagatttatgcagttgctttgtttgtttggttgttttctttttgttgggttctactgatactgataggaaattctttaatctattatatataactaatcaaggttcctcacgtgcaaaccattattcaaacactagaccttgctccgacaataatagattttgaacctattttcttgaaaatttaagcttataggtaatgcctcaatgggttggcttggttattggagcagaatagggagggtaatcggaagggggatggccttgtatgtcatgattttcagttttatataattaatttcaccatcctcccctcttattttgcctacactcgctgcatctgcgaggaagcaagttcatttggcggagtttctgaaaaattctttcttttttaaatgttttcaccaataggaggtttctttaattttgtttgaaccgatacttctctttcatgatttaaggtcatcctgctcaatattgtaatcgggttgccaggtgcac

SEQ ID NO: 77149 - DNA, 801 bp, Carica papaya
  Intron number 2 from transcript evm.model.supercontig_12.2 82 (locus evm.TU.supercontig_12.282) derived from phytozom e v7.0 (chr-ID supercontig_12; pos 2576553 to 2577353 reve rse strand)
tcacagtatagaaaatagtaggacttgggacccacagaaatagcaaaaagaaagaagtttgagtctagtggaagttagtttcattgaagcactaatgagagttagaagtatttaaaaatttatattaattagattagaaaattagaataaagtaggattaggattcctagaactataattagatttagataggacttaaataaaactaggattatcattcctagaattgtaatagatatccaacttaattagtttctttataaatacatatattattataactaaaataatcaagctattaatccaaagagtttatctctaaaagattggagattctcttagataaacctcatcatcaattataaggttgaaaaaatgagaagcaagcaacttgcttgctctaggatttgactctagtgggtcctctaattagatacaaagcccggaacagtatcaaatgagctcatattcctcgagaaaaacttccactgcatgttttcagaaaatacatctacaatgcactctacagatatttttaatccgttcctctaaagaagatgcaccgttagattttatttgtgacttccacgtgaatgctatatttggtcaatgtttaataacaatgcaagagggtagttgcaatccttgaatatatgtctatatgtcagcgcttaaaaaatatatttatacagtgtttcaccctctttgcagcttagttcctggatacgcacctcttagttatggtgagtatgtttttccttttgtatatgcagaaatctgttttggaagttcttgagaatc

SEQ ID NO: 77150 - DNA, 663 bp, Carica papaya
  Intron number 1 from transcript evm.model.supercontig_3.20 1 (locus evm.TU.supercontig_3.201) derived from phytozome v7.0 (chr-ID supercontig_3; pos 1453702 to 1454364 reverse strand)
gcttgtcgacactaattctgacatagatcaggagggtaaacaggcgtgtaggatgtctccttcaatggggacagttcatggcaacttcttttcaacttcccttatctgcaccgaagaaattattgtgacacacatttctaccacacaaataaatttcgtaatgcctttttgattttgttatcttgatattcttcacttgggatcttatattttcttttatgcaaatgtcatacgttaaggaggtatgtaaagtctgtaatttttttttaaatggaagtggtatgacttaggcctagagattgaactggaatttggttgtgtcgttattactctcagttgttgctcggaatccatttttcccaaaataaaaataaaccccttcccttcatgcagagtgatttgggtgtatacaattcacaaatgaaactattatttctacttgggcgtcggccaaacctaggtatcaggctcatttagccccacttaaacccagcacatagactgtctctggcctgccaacccaactcagggcgcatactctcggcctacccttggtagcatgattttggtctcggctcggccttggaacatgattctcttctctcagtcttggatgtgtattctttagccggagctgacagaacactgaaagaaagaattgct

SEQ ID NO: 77151 - DNA, 871 bp, Carica papaya
  Intron number 1 from transcript evm.model.supercontig_33.9 0 (locus evm.TU.supercontig_33.90) derived from phytozome v7.0 (chr-ID supercontig_33; pos 843101 to 843971 reverse strand)
tctccttgcttctcaacgtcgtagcaaaagatatagtggacaagttaccttcaagctactctaaggattctacagtatattaaaagaacaccaggacaagggatttgcttccctgaaaattctcatattcaagtaaaagtcttctctgatgtcgactggggcacttatcctgacacccggagatctctgacaggatattgtatttttgtcggatcatcactcatatcataaaaatccaagaagcaacaaactgtgtcttgatcttctgcagaagctgaatatcgctctatggcaaatacaacatgtgaaatagtatggatcttgaatttaatgaaagatttgaatgtcaagtacatagggccagcattattatattatgacaatcaggctgctcttcatatagctgccaatccggtttatcatgaaaaaacaaaacacatcgagttggattgtcattttgttcaagaaaagatccaagtcggaacactcaaaaccatccatgtctctttcaacaaccaactcacggatttgatgactaaagctcttccttctacacagttctatacacttttaagcaatatgggtacaatcaatatatactctccatcttgagggggagtactagaattaattgtttgtttttctgttatcaattttgttattattcttgaccacatgtaaatttccttattctgccctttactttgtatataaatagtatacattcaaatatcaatatacaaaaaaaattcattgtttatttacttttctaatatggtatcaaagtgttgagctcctaccatttccgctgcacctcattaagctactattgctagaggtggtggaggctcctcatcacagaatcgatttt

SEQ ID NO: 77152 - DNA, 691 bp, Carica papaya
  Intron number 1 from transcript evm.TU.contig_31416.1 (loc us evm.TU.contig_31416) derived from phytozome v7.0 (chr-I D contig_31416; pos 912 to 1602 reverse strand)
gccagatcaactttgttagggtaactttctctcccttccacttttctgttttatcttggattaaatccgggttgattaagaacgaagatcttaaatagtttatattgttagataactctatttaatttcggtacataatattaggatcaaatttttttttttttttaaattttttgtctcataatttgtttttatctgtgcttttcttcttcatgtatccctgatgtgttaaatgatttatatttaaaacaattctatctaacgtgatatgattttgggaaaaaaaaaaaaattaagagttttagagctaatactatttttctgtcttatagtttagaattatctttgttgtttttatatacttatatcttttgtgtgtgagaaaatagtaagaaaatcgacggtaattattgatatatatatatatttgttaactaaatctacgtatctaacaccataaaatctaatatacacaaaattttcagtctttttctcatcataaagaaattagataacacttttgaactaagtagccgagtcatttctctcacaaactggaattcaaatccgaaataaaaactcttacccatcttaataataataatgtgatgaaaaacaaagtaagactacttggtaccaaacataaattacaagtgtgatatctgatcatcttcttggaattatgcaggaa

SEQ ID NO: 77153 - DNA, 488 bp, Carica papaya
  Intron number 2 from transcript evm.model.supercontig_82.7 6 (locus evm.TU.supercontig_82.76) derived from phytozome v7.0 (chr-ID supercontig_82; pos 1334892 to 1335379)
agacccctggctgcaccaagcaggtttttttttttttttttttttcataattcctctccatctacaatgtactttttcaaacatgtttgtttgttcgggaaggccaagatgagtttggagctgtatttgttctctagttctgtcaagtaatcattccattccaacaccaaaagaattgttttaaagccattttgttggacataattctgcaaattaaccataggaaccgtcgaaaatacgcctactagctacagcctacatcatcagtacatgccatttttttttttgtatagctttgctttcaggttctcaacagtagaatggtgttttttgcgttgatgatcgactagattatatatatatatacacacatatatacacattttttttaagttagtgtaatggaggggttgcactaatgagaaaccaaaaagttagaagagaaatgatgttaatacttatgcaggcctgtgctttcagagattctt

SEQ ID NO: 77154 - DNA, 490 bp, Carica papaya
  Intron number 1 from transcript evm.model.supercontig_62.8 8 (locus evm.TU.supercontig_62.88) derived from phytozome v7.0 (chr-ID supercontig_62; pos 595508 to 595997)
ttatacttgtactgaacacccacacccgaggagtcagtggagggcaccacataattatgcttaggaatttaattacctaacaatactccgccattgataaacacctgcaacacagtttgttggaagttgattcaaaattatgaaaattataacgattaaaaaaaaactaaagtaaaataacagtaaactaaataataataaataagcatcttctttgtgctagtttaatgtttactcctgatttacatttattctaataaggaccggtgttaaaaatttgatctgtcagtatattcttgatccaaggtttgaagtcctggctgttaaaaattctcagtgattgatgaaaactaattctttgtttgtggcagtgtttgcttttttttttttggttctgcttcaattttcctttaaaattatgtttttcaattgaagtttgtaggcataaaatctaaacaaagtcttaacttaaatgattgttcaatagggg

SEQ ID NO: 77155 - DNA, 804 bp, Carica papaya
  Intron number 1 from transcript evm.TU.contig_29343.2 (loc us evm.TU.contig_29343.2) derived from phytozome v7.0 (chr -ID contig_29343; pos 11995 to 12798 reverse strand)
aagggaaggctgcattgccgctcaagagagatagagtacgcatggaagtttcatttttctgttgagtttatctggttcggcatcaatttttagggcgtttgattaatgggctttgggtaatttttggaggtcgaattattgatttggagtaatttggttcataaaaattattgctttgaagagggacttaaacatttgggctgattctcataatagttgtaaattgtatacttgtaaaagtttttattggtttgagtctgatcatagttgtaaaagttatcgacagaagaatgattggttgcaactgcaacctgctcttatgctttccatatttcgtggaaacaatagatttttatgcagctatttgggtaaagaggtttgtttcatacaacctatggatttatacagctggttctttagatatgttgtatttcattgaaattgttgatggcagagttgtagctactaaagtgattgacttgaagagatacctgagaatacttctttgtttccttggctctgcaattaatactttcatatattttcttcatcattctctgaaagattctttagttgctgaacctcaaaccgtcttttgattttttttcccagtgttttaaactttattctggagtttggataaattgttttactttgatctatctgttaatttggcttatacgatttgtttgtaatgtcctcgtttctgaattttgaaatttacatatttttagtcactaaactgtttcatttgcattgagaatgtcagacgagatctaagagattcctggaaattcaaaagtt

SEQ ID NO: 77156 - DNA, 492 bp, Carica papaya
  Intron number 1 from transcript evm.model.supercontig_78.3 1 (locus evm.TU.supercontig_78.31) derived from phytozome v7.0 (chr-ID supercontig_78; pos 418761 to 419252 reverse strand)
gttccagctcaagaaaccccaatttcttccttcttgtaagtttactttcatatcatgatcacattttgatttcgttatctctgcacttctacacatctttttccccctttcctcttctcttgattaattatctccctttcttgcttctatattttgattccctgcacttggcctctctttggctatgtggaagtataaaaagatccaagagaatccaaaatttcgttgttaagcttcaatagcgtccaattactaagtgactctgtaatcgtaaaatccagacttaacctctataatcgtgaaattcacaattattgaatgactggggtcctgggctgctaagttcgctgttcaccattagaccacgctcgttgtaaccgatatatgttttttaatggtatttatctatatttaaatttatttttggttagattttatagtcaattgtattttctcttctgctaattttcaggactgcaagtggtacatttc

SEQ ID NO: 77157 - DNA, 818 bp, Carica papaya
  Intron number 1 from transcript evm.model.supercontig_70.1 10 (locus evm.TU.supercontig_70.110) derived from phytozom e v7.0 (chr-ID supercontig_70; pos 841810 to 842627 revers e strand)
tagacagcttgttaggcgtcattttgcggtaaacggtaaggtcctttcagctgtatatcagcctgattgctgcattttttttctatgcgagggtatattcatggatacgatcttttatttctcgatacacaagctttttgcctttagataaatacatgttgtatcaggaagaacaggtaatgcatttatacatgtgtgtatacgtctgtgtatgttagtaatatcattttcaacaaatttagtggctgctagtctctgtaagaagcaactaaattttagttttgataattggtcaggtatttgtatgattatacgcgaataatcttaacttacaccttcatgtgttgagatatcttcttacaaaggaaaaaagaatcgaaagaaagaaagtttttagcttattcaatggaattatggggattgtatgaaaatcacgttagataaatagctcgattaaagccttaaattgtatacgcatattaatttcataatgactcgggtaaaagttagttttcttgagggaaaaaaagtgcatatactaacaaggctccgatggggtactggcatgactcaaaagttgaaatttacagctcactcaacttatcactatgaccccaagatcctattaagaggtggtccttaataaaaaaacagagggtctgaaaccaaatgttctaactctatcagaagaaaagactatattctcaaaagctttgtccttttaatttagtatagaagctcacttgtttttttttttgtaaaaaattttcttttctgtttcaggggcttcagcaatccgtaatcttcctcctgagcag

SEQ ID NO: 77158 - DNA, 592 bp, Carica papaya
  Intron number 1 from transcript evm.model.supercontig_94.7 5 (locus evm.TU.supercontig_94.75) derived from phytozome v7.0 (chr-ID supercontig_94; pos 1019452 to 1020043 revers e strand)
gattcaggttttgggtttcaaagacgtggtggctggtaatgtctttgccttctgttcttctttttttttttcggtctgtttggtaatcatgaggaagtaagcaaaacttgggatttaacgaattcaatcttttgcagtcccttatttttcttctggattatcagctggttggaatttcgtttttggagaaaatttattatcttgatatctgtactaactaagcttcacttcttttccctcttcagttgtcagaaaaacctttgctaattgtgtatttagtagagttcatggccttcaatttttccctaatgaaagagcttataccatttaccaggcttattcttttgagataacttttttatttatgatttgacaagtcagagataactcaaatactagcagggaagcagagaaggatattactgtgtcatatgaaatttgatgactgcacaatgatttttcttgtttgagtgcatggaagttctttcattgtgatattatctacttttattaaaaaactagctatctcagagtaatatattttgtagtgtttttattatcaaaataaatcttatcctatttgcaggagaag

SEQ ID NO: 77159 - DNA, 632 bp, Carica papaya
  Intron number 1 from transcript evm.model.supercontig_7.12 2 (locus evm.TU.supercontig_7.122) derived from phytozome v7.0 (chr-ID supercontig_7; pos 1147138 to 1147769 reverse strand)
tgttctagaccagacacttaagacggtgcttccaggttattttggtgtttatgtgctttcgttcattgattatttaatgtttgcatgagatagattaaatcatctctgcatttgtttcgcgtgttaattgttttgttgtatattttaattatgatgttttgcctaatagttttttgattataaatattattatattttatatattgcttgaatgtatgtacgtaagtctgtattataaatttttttttcttactgaactcgtgaaactcaccccaaatcacccccattttagataagataagatgagaaacaaatctaagaccaagagaagattgtgaagaaaaacttattagtttctattttaaatttgtaattaatttagatgtctcatatatctgcaaacaaacaattattctgttacaagtaatgtgtattaatgtgtacttccgccgtatatgtaatatttattgatttcactagttggaaatagtgtgcaaacgtccgtacttatcgacatttgaggttcggcttgttataggtagtatcatgtaatataagaaatactttgtttgaaattctattagtaccatggacattttaatgttgtagtaccgattgataagaagagaagt

SEQ ID NO: 77160 - DNA, 577 bp, Carica papaya
  Intron number 1 from transcript evm.TU.contig_29666.1 (loc us evm.TU.contig_29666.1) derived from phytozome v7.0 (chr -ID contig_29666; pos 7653 to 8229 reverse strand)
cgtcttcctcaccatcgttctgccactttcctccggtaacttcacgttcacttctttcttaactacttgcacacttctccttcattttcgaaatcgttttcttctggtgactattttcctgaattgtttggttgcttagaaattacccacactcaaaatgtttccctactaaataacctaaatttcaccataaggaaaactgaacgtgcactgaataaagcttgcctcttttctcatccactaaattcttgtcatcttttctcatctgtgtttcgtccaacttgagaatttaaggcaagttttcgtgactgataataatttatagtgatagaaagtctggggggataaagagaacagaggaaaaattggcttccttatccattcgttgtgatggctgatgagtgcttgtcactgttgaacgtaatgtgttcctgatattcgtttagtatgaattgttatgtaattcaggatgtttaatacaacttgagctaatggtatgatcattatctattggattctcgcaattttccggcatgaggcttctatatggttgaaagttttttcttttcccctgcag

SEQ ID NO: 77161 - DNA, 737 bp, Carica papaya
  Intron number 1 from transcript evm.model.supercontig_94.5 (locus evm.TU.supercontig_94.5) derived from phytozome v7 .0 (chr-ID supercontig_94; pos 182036 to 182772 reverse st rand)
cacgattgattgctcgaaaaccataaagagaggtaggtagctcatttcgtcaatttttttttaatgttctgtttgtttgcgtgaaaatataggaaatcaagtggaaaactagcttgatggagttgacattgcgaaagaactaacaaggaagtgtaatgataatagttggtttcttcagtttcagaatgcttgcgatgttgaaattttggttgctattttcttattttactacaaggctttcaaacctggcctctgtgtctttttttcctcgttttatcttcataagtggtctgcccttcaaagatgtatttgcttaagaattaaagtaggaagctactggaagaagatacatgcctgtccatgttgctcaagcaaagtgaaaattgaagcctaattatatgatcttcatcgcatagtttagcaaatcaccatagctcatatttgtatggtgattagactccattttcccatcgaagatcttaccagtttttcaactaagaaactatctctttagtaacttgcatatgtatttccaatttagaattgctacactgctgaggcagatctatcaagtggtggtgattcctataatttccatttctactgatgtggaaaggtttctaaatttgattaatatcctagaagggggtaacttgtactaggttcaagtgtaaatataatgtaaacacttccatggaataaataactgatattctttattgtagtgaaagcgttaa

SEQ ID NO: 77162 - DNA, 523 bp, Carica papaya
  Intron number 1 from transcript evm.model.supercontig_80.1 26 (locus evm.TU.supercontig_80.126) derived from phytozom e v7.0 (chr-ID supercontig_80; pos 1064392 to 1064914 reve rse strand)
ctctggataagtgcgtctctgttcttggaaaagaaaattcgattttcaaacttttcttcttcatctgtggatatagctaaatatttaggatcgtttggttcgtcttttagggtttgaattcattaaaaattggtaattatgatttcctgcttcaggtattttgatttttgttgaaaattttgaattttagttaggaacatcattgtttctgtggtagagaaggaaacagaataacttttcaacaaaggtaatcgagtattctttgattaccagtaaatcttaggattaagaaatttagatgccatcatatgagctgatgacttagttttttgtcaacggacctacatggagcatgttgtaaatgtcaagttgcagttatactttttgcctacttttcttacactcttctctctacttcctgttattttccatttggtaaatcgcggtttaatttcatagagtgcctattgaacttatgatgtttacagggtgtatctgtcatctccaaagtctactggatttg

SEQ ID NO: 77163 - DNA, 544 bp, Carica papaya
  Intron number 3 from transcript evm.TU.contig_29901.1 (loc us evm.TU.contig_29901) derived from phytozome v7.0 (chr-I D contig_29901; pos 4388 to 4931)
ggaacaacattgcagtttttaagcgtgctcacaaggtttgtcacaacagtctcattaatatacttctatattggttgctatgaactatgacggtcaaatgttgtttgttcttttttttttcaaaaaatgttatttgttctttttatcttttttcctttttagttagtttgaaatgatctaatatggtttatcgtttgttccttttctccaattgttattgttttttaaaatcatatgtagtaagtcacaatgtcttgaaatttgaaaaagagtttttcctttttgttacttttgtggtatgaatgtacttttgggaaatctgaggcaaatgaatttctttgcttcaagtgaaatgattgcaatatgacatgttaaaagaaagatttgctttttttgccttctcaatgtttttttccttgggaagtaaatacatgctgtcatctggaacatgtactttttttttctctgttgagatgcttgtttgatactgaaagttgacgccttgtcaggtagcaacttggagcagacatatagcaaaagtgaa

SEQ ID NO: 77164 - DNA, 773 bp, Carica papaya
  Intron number 1 from transcript evm.model.supercontig_99.5 4 (locus evm.TU.supercontig_99.54) derived from phytozome v7.0 (chr-ID supercontig_99; pos 883015 to 883787)
caaaggtattttttgcgctttttcttgttacgatgagtcgctcttccctttgttcgtttaggtctccaaaaagttcctaaagaatgttggagctccaaatagcccgtttggtttgtgaggaaatggagcaaatgaaaattttcaaatctttcgagtcattaattttcgtcgtgcgcagaggtaagagaggaatatttgatgtataagatcaaaggcaagatattcatgtaaaacgaatttgatgtataagatataaagaaaatgacatttaatgactattttccccgttcactgcttaagaaaagagcacaggaaagaaaaatcattgcttagccgttgggcacatattttagcctttcaaattggaattcaaataataaaatttgaattgaaaagagttgaagtccataatttccttcctgttagggtttttgtttattaactctgctatggccaaagaaagagagttctcgtattggtaatcagggtttttgacaagtgtgatatctttttctttgttttctttgattttgattcacgacttgatacaaatctacaagcattctgttctcgatacatgcttctatactattgcaaattttttatctatcttttcgctgtaagattcctttcatgctaaggtcaggttcaatctaaaagtacaatgtatcatttattatttagtttgagacacttttgtgttttattgcaattaaagaagcatctagttttatctgtttttttattatttatttttttctgattgaagagaa

SEQ ID NO: 77165 - DNA, 706 bp, Carica papaya
  Intron number 1 from transcript evm.model.supercontig_97.9 0 (locus evm.TU.supercontig_97.90) derived from phytozome v7.0 (chr-ID supercontig_97; pos 570207 to 570912 reverse strand)
ccactctcagggaccctggtttgtccactcatttcttcttcttcttcttcttcttctttctttaatttctttctctctctcctcaaaatgcttctttttttttttttttttttttttaaataatcctttctatgttttcttgattagatgacacacatactctaaatttacagttccattcgtacttacaatactaattatctagttaaaaaataattaaattttttatattaactaatcaaaaaattagtggtagctctggaaaattaaaagtaatggtaactccattatttttcaaatgatattttcatttattcaatttgggatattcattaaaaaagattaaagaaaaataatttagtttcttctccctttataactttgttaattacggtaaatcagcaatctgggctcagtcaggcccatcagccattacctctactatttccacctgtcttgggcttgattgaaagcaaatgaatatatatatatatatatatattttagtcaaaaaattcaccattttgattgattgaaagtcctcaactttcagccgaagaattaactaccttttattgatggtatgcatacaacttcatcttcacgatgtgtatgtatagacatatcatctgaaaactgtaattgactgaaaataaaagttttagattaaatttatctcaggaaagtcattgcatctgttatcatc

SEQ ID NO: 77166 - DNA, 645 bp, Carica papaya
  Intron number 1 from transcript evm.model.supercontig_71.1 4 (locus evm.TU.supercontig_71.14) derived from phytozome v7.0 (chr-ID supercontig_71; pos 245853 to 246497 reverse strand)
cagtcctattgccaattggaagatctctagccctggtaagtgaattctatgaggaattttggtctttgatctgattcttttttttttccgtgatgaattggagtatgaacttttgttctattcagattgtgatttagtttgccgaaccatttctagatgaaatactttgtctggatgctaccaaattgtagtttcatttgtatctattggtatgcttcaaaagctctgttgattgacaggcaactgttgtttttatagttgttaagatttattgagaaaataatgggttatgatgagaagattgtaaattttatggatctgttggacatcaagttaacctgctttgggaaaagcacgatcctgcctaatcagtaagaagcacatttcttctttacagggtttgtttggtctaatgtggttatttggcttggcaagagatttgatattggtgtgttatattagtttatgtaacacttctacaagtatcattctagttttctcgcattattaagaaaagctccagtgtgagaaagaatgagagattataacgagtttgcttttcatgttcatttattcaatttcgatcaagcttttgagtttaagtggtcttttccgcttgcccttttccaggtgaccatccagaag

SEQ ID NO: 77167 - DNA, 832 bp, Carica papaya
  Intron number 5 from transcript evm.TU.contig_34704.1 (loc us evm.TU.contig_34704) derived from phytozome v7.0 (chr-I D contig_34704; pos 1030 to 1861)
tgcaattgtgtatttttcatacgatctgccaaaaggttagttatatttcgggaggactgggatttctttcttttattttctgagaccgagatggatcaggaagattatcacacataattaaatatttttttcttctaatgccaacctcattgttgagtatcataaaaaaatatttcaggatattgaaaattatagattttatatttgatcccatacataagccttgtgagtaggccctttatcgacaagatgcagatgctaggttttgtagctgccagttacagatgaagtggttaccttttatcttttccttcccaccagcttccctattatctttcgaaataacgtttttgaattaaatttgggatgagtatagtgtcattttgcatactgaaatctagtcctgcaattctttttatgataattcagtttatatgttttggttttgtcattttacatagaattcttaatttttaagagagcatctatttgtgaatgaactttgcaatgcaagtacatggaatgtccaggaaatacatatcaaactaaaagaacaaacaacaaaaacgcgataagacaaaagcttaaaagaactagtgtttttatgtaaactaaaagaatatatatctatatatattataatttatccttgaattgcaataaacttaaaccagaatggtaaaattgatacactgttgttaaatttatgtttgtttcaatttagaattttcagtttgcgaatgaatgtaaattcttgtctgtacctttcttggctgcataaaaattgtctttgcttccatgcttctgacaggtgacaattctccatcctcaa

SEQ ID NO: 77168 - DNA, 566 bp, Carica papaya
  Intron number 2 from transcript evm.model.supercontig_62.1 18 (locus evm.TU.supercontig_62.118) derived from phytozom e v7.0 (chr-ID supercontig_62; pos 743060 to 743625)
gcgggtattctttctctcttcattattttcttactttccctttcgctgaatatcctggatgatttatggctttcacagaagcaaaataaaactagattgatacttacttcctgcttagttcaattcttattcagttcaaatcataactttttctttattattaaactatttttttttttgtagaattagatcatcattttcatgtttcaatcagttccagtcatgccttgaattatttacatagatctgtaattaatacttggtttgattcagatattgaaattattattgattatatatatatatacaccgaggacattttagtagttaattgaagaaattgaatcacggggttgtttgttgggtgttacacgggggctgttgggtgttaatgggcattattgtacaaaagtctgtcatccattgatgaatttatccctactcagtgtatcattcgatgttattcaatgatcattgcatatgtcatagctgatataggttcttcctgaactgatatatttctcttactagggaatttgttgttggagcattggaaatctatcaag

SEQ ID NO: 77169 - DNA, 676 bp, Carica papaya
  Intron number 1 from transcript evm.model.supercontig_87.2 4 (locus evm.TU.supercontig_87.24) derived from phytozome v7.0 (chr-ID supercontig_87; pos 152695 to 153370)
gtgctggtatgtctttatggtcttttatggtctgccatattgaatatgatgaaatttagtataatcttgttgtacgattgatttattttataagttttgagtttatggtattgagagaatcgtgagatgctaaaagccttaagtaaccatctggaactgggagttattctgtatattttttttggtggttctctagctcagtttaactcttgtctctttacctaaaggctaaggtattacaaaaaattgagcacctttttcccattcaaaacagaaggaacttttccattgggttgagattttgtagctgttttttacctctatcacaagccttgttctaaagcaatcaactaataaattgggaactgtattctggccatattttcagtgttgagatttttttgctgtcttttacttctactgcatttcatgttctaaagcaatcaactattagttttggaactgttggctgaccatataagataatttcatgattaccttttgatttacttttaactatactatgaattctgaagttctttatgatatgcctgtttgtttacgacttgttcttcctttctaatgattttagattgcaaaatttttaaaatgtttcatgcttggttactctttatctccagaggcagctctgtcaggtgaagaggataggttgtgg

SEQ ID NO: 77170 - DNA, 908 bp, Carica papaya
  Intron number 2 from transcript evm.model.supercontig_7.10 8 (locus evm.TU.supercontig_7.108) derived from phytozome v7.0 (chr-ID supercontig_7; pos 977449 to 978356)
tgggtgttgcaggtgaagttagaaaacacaggtaaccagaaaaacaaaaaagaaaaaaaatggaacaaatttttttttccttctttatctttgtgaattaatgcaaatgtaatttttttttttgaaaatatatacagtaaaaatatttttctcagatatgcctatttatcattattattgcttgtctatttatgtatttattgccttcatatgaattcactgttccgctcagagaatacatatctatttatatattattattattattgtaattttcttaattggagtataagtttttaattgataaaaaaattagtataaatgtaaaattcaaataatttaaattatatatatcttttgctattagacaggtttcttttgatattacacgcgtgtctttttattattcgtctttcggatcacaaatttattgatactttcatttttctttggttgaaatttattcaattccaatttaatttttggttattcttaaactaattataatttttatatatactttttaagtaattaaatcacttttactcatatgtttaatttcataactataatttgtattcctacatgttagagacttgaatcataaactacttaatttaaattaaacacgaaattaacttataattaaaacattacttttattgaaaatcttattataattttcttgtattcttatctacatcatataaaattaaaatttaatgaattcttatatttttattttaatttgggaatattataattatctttaacgttctcatcaatctaaaattatcatattataatcatttgatattgggtgtaattatcatgattgtgctgtaacttgggtggcatgatattgttgatgaggtcaaaaatagtgctgcttgtgataaggtcaccat

SEQ ID NO: 77171 - DNA, 727 bp, Carica papaya
  Intron number 1 from transcript evm.model.supercontig_801. 5 (locus evm.TU.supercontig_801.5) derived from phytozome v7.0 (chr-ID supercontig_801; pos 23326 to 24052 reverse s trand)
atcatcaggttctatctctatcttttttatatatctcactatatgttgctctagaagttataatcaaattgttgaaaccattggttctttgttgttaaattatgcatctttctagggcatgtagatgtgagggtcaaatttgtcggttttctcagaataacctcatcttgaagaccaacaatctatccttcatgtgctattgatgtaaaaactagatgacatgcttatgatatggtcttggtttttttttttataatagaaaaaaagtattattaagagaaattaagagagatacaatcacggagaataaggcatcctcattttctatatatgtgatttatgcagttcctaagatgatggattatataatccgttgtttgaaattccaccctgctgataacacacatgttgagagcaatggattctcatccactactagaggtatcagacatagaaaactttaggctataaatggaagaaagtgtttttattttcctccaaaggagtaggctgccagattgattctggtttgaagtagaaggggtgtagtctaggcacggttatagagtagaatcgagtaagatggaaatatatgttgggatttaagtttgcacatgcattctggatgtccttccacgttttttatgcacggttaagtatctttctgcagtgtgtacaatctgagagaaaaaatttcctaacataagacaaatgattgatgcagcta

SEQ ID NO: 77172 - DNA, 588 bp, Carica papaya
  Intron number 2 from transcript evm.model.supercontig_64.8 4 (locus evm.TU.supercontig_64.84) derived from phytozome v7.0 (chr-ID supercontig_64; pos 594789 to 595376)
aggttctctctctctctctctatatatatatctttcttcctctctttctctccacctcctctctgtatatatatccttgttggcaccataacaatgatatatcttatatatataagcatgtatacaattattcttggcatttgtgattggttttgttggaaattgatgtttatttatacaatatacttgtaaaatgtctgtcactagtatgtttgacaatagacctgattctatgtagtacttgatgaaaattccttaagtggatgtatcagttcttcccaatttcatattttaatagaagtttgtaatttaatttgatctggtaacgtattcttcaagttatctcttctcttttctgacatgtagtcaaataatgtatttagttggctaactagacacaaattctttggttatagagaacaatcactactggatttgtgctctgaatttttactgctggaatttaaagttttagctaccactcgagcaattatgattggcttggatttctaagttttgttttaccgtgttgttcatttatctttgtttccagacagaagttacaactgtgatttgtgggagcaaaga

SEQ ID NO: 77173 - DNA, 539 bp, Carica papaya
  Intron number 3 from transcript evm.model.supercontig_877. 2 (locus evm.TU.supercontig_877.2) derived from phytozome v7.0 (chr-ID supercontig_877; pos 12854 to 13392)
agaactatgtactacctctgagcttcctgcgtatggattatgtctatattagattttgatttgctttgttctttcatctgtttttattttatagagagtaactgtatatatgtatatatacacacacacagagactctacatgtatgcatatatatacttatataaggatacacgatagtagttgtaggttttcctgtatacagtttgtttcttgtataggttttcacgtattgtagttagttacttgcagtttcctgttcacagcttttccctttcttggcatattgatccctataaacagccagttatttttttctttcaagcatataatgtactaacatattttctttcaacaatctatatccacgtgcttttgttcataagtagtcataataaacttttatagcagtcattgcctttagaaggacgagaatattttgacgtgatcatcttcttgaaattacgtggtaattgataagtcttaaggtgcttctatttacatggatcaggcctggcctaatcatcttcttttgtagtt

SEQ ID NO: 77174 - DNA, 602 bp, Carica papaya
  Intron number 3 from transcript evm.model.supercontig_69.9 2 (locus evm.TU.supercontig_69.92) derived from phytozome v7.0 (chr-ID supercontig_69; pos 1041732 to 1042333)
aagtacgtatatacaaatacccaccagaaaaaaaaacaaaaattaacagtaaactactgggtaaattagatttattttttctttttattttttgttttcaattcttcaaaatagtgaaggaaagtggtcaaagaaaatggcagaggaggcatggtagttgtttctctttcttggagtcccctttttcaaaagatgaccagcttgtttagcacataaaagaatgagcgaaggagttgagatacaaaagcactgctttcttcttggatggacctaaagagacataatttgcttcttcttttatgttcctttttctttcaaatctctcttatatttaaaaaaaaagaaaaaagaaaaaagaaaattcagtctgcaatttgaaaaaatcaaaaacaccaaactgggagttttctggtgttctcagttctctttttgaaatttagtagttgggtttcatttacataaccattttctagttgtagtgattaaagacttccatggtttaaacaatatatatgtgtgtgttaatcccagtgagtttgacgattggtaattgtttatgggttgcagcacgctgttggatacgtgagtggagagcaatattt

SEQ ID NO: 77175 - DNA, 735 bp, Carica papaya
  Intron number 1 from transcript evm.model.supercontig_652. 4 (locus evm.TU.supercontig_652.4) derived from phytozome v7.0 (chr-ID supercontig_652; pos 19241 to 19975)
ctgttgaatctgctggatcactttcgctatcttctgtaagattcaattcaatttcattttcatgatcgttctcttcatttattatgttaatcttgattgtttctctttctgggttttgattcgttgaaagacctttgcctgatcgttcagtttaatttctcctgtttcttgggaaagaaaatatggttagtagtagagaaacggagtttgcatctatgaagatgatgacgtggcatctatgaaaatgtatatatatatatatattttttttttatttttcaggagagatttacagctgttaaattagagtttgacatggcttactttcactttttttaaataattttgacgtaatcacttatgtcttggtgggtccatctaggaaaaagataaaatattgattaaagttgatagtataattgttttactatatatatatatatatattaatgtttgataaaaataagtaaatatttttatacttttcctttttttttttttttaatttagtaatcctctgaatataaagagaaataagaggaagaactgatgtttatgaactgggcaaaatagcaatgtaaaactgtactgtccgagttgaacagtcagcttgaaaattaaaatatcatttaaactattttatccttaaaatattcaacgcttcttccatatccaacgcatatagcttgtttgtttacaataggtaagctttgtgattgtaaagatcactgcaat

SEQ ID NO: 77176 - DNA, 513 bp, Carica papaya
  Intron number 1 from transcript evm.model.supercontig_9.19 0 (locus evm.TU.supercontig_9.190) derived from phytozome v7.0 (chr-ID supercontig_9; pos 1233830 to 1234342)
tggtaattttgttttttcttctaagaattgtattggtttttagcttataaatcgacatgaactttcacgcacaactgtattagttaaattagtagtttacatatgactcctagttttcactgcctagcaggtgttgatagtattcaaattcgcaatgtttttgacatggtttacgatcctttttcttgttaagaaatgtgtgggtaaatgatctgaacagtgtgaattatattggattagttgacagaaaacggaatatggtcatttgattacgtctagcttttcgtggactattgttattacttttttcgttatgtcggaattttgcaaaagggatgtttgtctataaaccatacatcagtaaatgactgacacactattcttgcatgattttgtgaccgctataatagcgtgaatccatatttttatagttttatgcatgtattaagtttctttttagatgatagtctttacttcaattaatttttttcaggttctaagtggcattgcttt

SEQ ID NO: 77177 - DNA, 995 bp, Carica papaya
  Intron number 2 from transcript evm.model.supercontig_9.19 0 (locus evm.TU.supercontig_9.190) derived from phytozome v7.0 (chr-ID supercontig_9; pos 1234361 to 1235355)
tgcacaggctcctaaagacaaagaacatccatgtcacttatgatctgtacctacacgttactccattgatcttacatatattgttctataattctatcctatattccaatctgtactttttttctttaatttttaacaaacttgttggtttcacctatctccccctctcccttgttattaattcagtgccaagtggcacaacacaagcatggccccaattttaattgcatttacttccctctatgcaaatatattttttaagaaggtaacctagctcttcttcattttacagtgtctcctgcattagtggagaactctggacttgagtagatccgaaaaagaaaatttatcaaatttttcgttttgagtgatggaaaagttgtttccggctttttcaagtttcctaaaaacagaagcttaagaagtaacaaaatcaatcagccaatgggaagctctcttggatggagatgacttaggagatcttatagatacttttttctagtactcttgtgcctgtttattcaactctcttttctttgaaagaaaatgatgttctactcatggtttgtctttttctgtgatatcttatgatttgttggcagcactaatctggtgatggcagtttcgtgctcattttgatttgttttttcttagtcattataatttgactttgtagttagggtaccttactgcaagtttattgaggatcttgatgtgatggccttgttttttttcgaattttatttcatcctttttctaaaaaattatatgtaaatagtagtggttggacatccttctcagcttcacccctgaatttaactgaaagggacagtgcacaattttttttcctcatttccttacagtaataatggagatgttgctgaaaacaaatatttgatgatagttgcttttatgtaagtgtttgcatgggcttcatgttgcacttggcttctagatttcatactcttttctttgttttgttttactctcaggac

SEQ ID NO: 77178 - DNA, 768 bp, Carica papaya
  Intron number 1 from transcript evm.model.supercontig_81.5 5 (locus evm.TU.supercontig_81.55) derived from phytozome v7.0 (chr-ID supercontig_81; pos 212082 to 212849 reverse strand)
ttgagcgccaagaggagaccactttggctgttaaggtactttgcctctgttcttggcttgcattagctgtttgttgaatctactcgagtgggttctaaaattgttcaagttgtacgttgggtctgttctgcttttaattgaagtagtcttttaagcttatttgctatagcttgatcttgattcttcttgggacacaatttgatctatttagtcatcgaagtgttgtagagctagtattgtaaattaaatcatcgaaagatctgtcaagtagatagtttacgcatacgaattgttcgataaaatgcttgaaagatatttggttcctttctttggaaaattttaagagataagtcttaacttaatctaatattttgttagaaatgtgaggaagaagaatgagagagggaagactcaattttttaatttgtggtagtctctgtaaatttttaagtatataagtatatatagacagtaacataatttttaaaattttaaatacatgaattatacttaagtttaatacatgaaccaaatagtaaaactcaaaagacacatattaatgattatatttataatttacatttaactttactccctagtaaaacaaaaagtatggacatgttaaaatttgtaaattattactttcaacgatatgttttgcagtggtagaaattctgatgatcaaacaataagtctgataatatagtcaagttttgatttttatgtgactgtttacagatgtttaaagggtaactcgttgaattgcag

SEQ ID NO: 77179 - DNA, 957 bp, Carica papaya
  Intron number 1 from transcript evm.model.supercontig_62.7 8 (locus evm.TU.supercontig_62.78) derived from phytozome v7.0 (chr-ID supercontig_62; pos 518654 to 519610 reverse strand)
tgattgtggcctccattctggaagacaagaagctggtaagctcactgtctacttgtttggctgctgagaaaatggaccagaaaatttacgagcttcctttttttatgttgatcgagagtaatggaaatctgtttggctggttgtgaatgtgtaagagaaaagaagttgcgtgtctgattagcatttcgagtcgagagtaaaattttttgatgacttcgagctcgtcttctttttctgtgttttgaactggttgatgatgacaattgattagggctaggcttaatcttccaagtttgattgattgctaaggaaaaataacagaggaaaaaatttaatcagagaggaatgtgatcttcacgtgtttatttttttccctctcttttgctttttgcatgtgggataatttggctgctgatcagttcgcttgaagattcagagattttaagaaaattatttgttctttacagaggcctccagcttgcttgcctgcctccatataaacaagacactgtttttgtttcattggcgtaaatgcagctgctagtacagtttatgaacgaaagtcattgcaaatggcctagtactctttttcatttttttattttttttggaaatccaatgatttttcacccccaccaagtcatataattgtatatatagttttatatatgtatatgatttccagaaatttaatgcataatctacttcatgttagtttagttgcattcttgaaataaggttcttcatattctggtgttggctggaaaatgaagggacatttggtaatcgtttgagaactgatacttttggtctttaatgagtcaatagagtgagcctcatggttatcattagtgcttattttctgtattttactgtgaaaagaatgagatttctgtatatatgtatatgtggttcttatatatgcacagagaataccggacaagtttgttaggagat

SEQ ID NO: 77180 - DNA, 765 bp, Carica papaya
  Intron number 1 from transcript evm.model.supercontig_91.2 5 (locus evm.TU.supercontig_91.25) derived from phytozome v7.0 (chr-ID supercontig_91; pos 248868 to 249632)
attatacacggttttggtttgtatactatattattattttccatgcaaatccatgcacgtaaacaaattaatttatacacgaactaattaaaacctaaataacagccacaagaagaccgtgcaaattatatatatatatatgttcacataattataattgagtgcttaattaattaattaattaaaagggatttgtttttttaagtttaaacgatatcatttagtttttttttttggtaaaacaattaatttttagttcaaatttactaaaatataaacaattaaaactattaatattcagccgcacttgatatctcaaagtcaatagtgattcaacattgatagattattttcaaaatttaacatttattataacttaatttttattttttatttttgttacaatttaatttccaataatttttttctgtttcaaattcttaatttttttattaaaaaaattaacgtagttaaactatatttatatactttaagaaatacttcaaaaaataacattgattaattgattaaattaataattaataacaatgaaaaaatattatggaccataatcttgtaatacatgtcctggtaattagacctaaaattaataaataaaaaaattatgttaattttttaagaaaatggtacttataaattttaaggaaaaacccaggagactctcctctcgtttctgaatgttgggttttgatattaaattaactgcatgcatgcagtgagataatagaaaattatcagaagaaa

SEQ ID NO: 77181 - DNA, 406 bp, Carica papaya
  Intron number 2 from transcript evm.model.supercontig_9.23 (locus evm.TU.supercontig_9.23) derived from phytozome v7 .0 (chr-ID supercontig_9; pos 100679 to 101084)
agaagaggagagctgtcattgagaagcttaagaaggttttccaatgttttaatttttgtcccatttttaattttgatgtgcttctcatggagatatggagactgttacattgtccacgagatataacggttatttaattttagctacgatttgcttatgacatttgtatggaagcttgtgatgctatatcttacttccaggtcttttgagttggaatctctaaatgcgagcttttgtttatgatagatttatttatgtctttcaatgtcagtcaggtttatcaaggtttgaaatggttgttaattatcttgtaaggtccctgttttcattgttcttataagatttgccagcagaaacagagtttttaagcttttacttgtcatatcttcatgcagatagtgttgaa

SEQ ID NO: 77182 - DNA, 674 bp, Carica papaya
  Intron number 2 from transcript evm.model.supercontig_77.9 (locus evm.TU.supercontig_77.9) derived from phytozome v7 .0 (chr-ID supercontig_77; pos 104425 to 105098 reverse st rand)
gtcgaagcaagtgagaaggattcacttgaggtaggagttgaatgtttggaatagaatgtgacattttgggaatgaaggaaaatggactagtctaaatgctgtttatgtttccatatcatttggattttaaaccccgaattattttatattattaacagtaacaatcaaatcaaatggggagtgatatcatgtgaaattaagggtccaatcctgaagacgtgtgtttttctgtcttataatcttatgtttgccaactctctggattttgaatataagtctttggctattttgtccaaatctttttcctttgttgctcagtcccatgcacttgttcatggttgtagaaaatgaaaaataaaaatctagtatgcgactctgtgctttgtagaggtactctgcctcatttctattaaaacccattatacaactaatataatggatatttatcatatggttgttgcagtactttcttgattaagtaacagggaaaaagtttcattttttttgttataattactataagattgttatagaaactcccatgatttggagtgcttggaactaatgacgatatagcatgcatgcaattttattttgattggattattgtttatctgaagaaacaatgtcaactagcaaggttatcctttggaatgagcaggttcagaaaatag

SEQ ID NO: 77183 - DNA, 895 bp, Carica papaya
  Intron number 1 from transcript evm.model.supercontig_70.9 1 (locus evm.TU.supercontig_70.91) derived from phytozome v7.0 (chr-ID supercontig_70; pos 611621 to 612515 reverse strand)
tccgtctcaattgatatctacaaccaaggatcctcgtcagtttaatctcttttgctttataattttcctttcgtttcctgtctcttacgttcagatctagcttcgaattttgttgtgtcgcttcgattaatttctctgcatgctcacactttattgagtttctattgatttcttgtggaatgtaaattccgtgccctattttcactgatgtaagagcactttggggtattaatatttttggacctagtaattaacagcctagggttcgacttgttgatcaggtttggttttggttactgcatagttcttgatttgcctcaaatcctagcagccggttgaaaagaaacaagatggggtatttttggctgagtgaaatgagtgattatggtttgtggagtcgtgcatagtttgactggtagtttgctggctgctttgataattgctaacatggctagaggaggattggttgtcaaaagttccagtttgtgaggacacaaataaatggaggatttataggggtctcagttgttgattgtcttccacttgatggcatgtttgatatctcttggtattggcactggtcgaaacttgaatgtcaatgatgagttctttgcccaatttatctgcttgagtagtttcagaattgtttggaagggtatgtgtagtctgtacatacacctgttatttcagcaatcaattgctatgttttgtctttaagttcattcctcgtttgatattgtctggttcttgttgaatgttagctcaatgcttcactgagttcttttgtcctactggttttggagactgtgtctgtttctatgtgttgtctgcatatatcatgttattcaagctattaggtgttgaattttgtttttgtgaatttccaggacagcat

SEQ ID NO: 77184 - DNA, 507 bp, Carica papaya
  Intron number 2 from transcript evm.model.supercontig_7.99 (locus evm.TU.supercontig_7.99) derived from phytozome v7 .0 (chr-ID supercontig_7; pos 897688 to 898194)
aaccaacagtctctgcccatctctctactccccaggtatgcttattatcctgcaattctcttcccatacaatattatttctgatttctaagcccccagaaaatataatcaaaatgcagtgtaaaatgagttatttccttctagttgaagttttttatttaatatgatattgtagctttagtttatgcaaatttagtactctaatctgttaagtgctccagttacttacctatcagtggagtgttaagatgcaatataaacataaattaagctcatattatgtaaacctaatattctggcatgtgaagtactctagtggtcatgtataattctatttgtgccttaaaggagtgtgaagagatataatacaaataataaattgacatattcactgctaaggaaaagaaaaaaacttatcataagtaattaattgatatcagtaatttcctacattgcttgaaacctgatgacattaaagcttctctaacttgatcatggtttcttcagg

SEQ ID NO: 77185 - DNA, 552 bp, Carica papaya
  Intron number 1 from transcript evm.TU.contig_33100.1 (loc us evm.TU.contig_33100) derived from phytozome v7.0 (chr-I D contig_33100; pos 1014 to 1565)
ctaaggttgccgccaccattctacagatcgtcaaggtatattatatatatatttgatatatgtagtacaccatgagaaatggattagagttttaatctattgctgcatggatgtattacttttcatacattttgtgatacatggtgagaaattgttggggaaattaatttcaaagcctcgtataatcacaacaaaataaaagaaagaactaaaaaaacataagtctaatgtggttcagtagtatatttatatttatgaataattttgataaaaaaacttttccaaatgattaaaagatacatcaacaataaaattataaacccttatataaagaaattacaataattttcttcccacaaaacatttcatgacatataaaaatatttttcatgacacatacaaaatatttttcataataaatataaatttttaaaaaaatatataaaattcttatagaatatagatgctacatccccagaatcaagacatatcaacataaataaatagagttttaatgatattggtttataaattaaattttgcaggtgtgcc

SEQ ID NO: 77186 - DNA, 824 bp, Carica papaya
  Intron number 2 from transcript evm.model.supercontig_75.7 3 (locus evm.TU.supercontig_75.73) derived from phytozome v7.0 (chr-ID supercontig_75; pos 678479 to 679302 reverse strand)
gggaggttgaattggttgagatcgccgattccgaggtgtgaagttgagtttttgattttttaggttaggatgtgtccgaaaggggttttctgatggagctgagtttggtttgtttctgggagaattattgttttgcttggtgacgattgattagatgttggaaatggaagcaatttcttatttcaattcattttgcgcgtactgttcttgctgtacttggttgtttggagataagaaatatttcattttggcccagagaaatggcactcagtttggagaatgttaagcatagtcctggataagattcatctcatacgacggccactcacgatttggtctactgatatctgtactgcctgaggacggtgacttggtttcctttctgctgtcttgttctactttggctcaaggtgaccagctaattgggcaactgaaagagtttaggttctgttgtttataaaaggaagatgtagattttttatgttatttatgatagaaatctaaggacttttagttttgagagttttaaaaaacactcctagtacatctcagcttcttgcggagaaaatatttaactgtcttacattgttttttcctgtcaataacctttgttgttttgtttatctgtttgtttgtgtcaaccctgggagttaggagtgtgctgagacttgggagacatcttgtttggccggagtctgtaatttgatactttttggaacataaatcaccctagcttgtttaatgtcgttgcaagatattcgagtaacaaagggagtgaatatattgttttggcagtggtttgtattggagttgtttttctattc

SEQ ID NO: 77187 - DNA, 658 bp, Carica papaya
  Intron number 1 from transcript evm.TU.contig_37539.1 (loc us evm.TU.contig_37539) derived from phytozome v7.0 (chr-I D contig_37539; pos 1578 to 2235 reverse strand)
cttaacttgcaacttggtatcaggtaaatagaggctgacatcataaatcttccttttctcaggaactgtcttctgttgaatttactatcccctccatcagggagaaagattagtttttggctcaatcctatattgttctgggcttgactgctggaccacagtcattaaaattgtaaaacagtacatggacaatgtattataatgtttattggatccagagactttgttgctaaaccttctaatcttataaaacataatttgatggataaaatctggagtatgtaagcactttggcttctctttgctctctgttgacacttttgagaacatggaaagtgtaattttttacaaatcaaattgataatgatgtttcttaccatatgatataatttgcaccttgataagctaatctaattgttacagtctatagatttactgtttacaagctttttccatagtttccctatgcctccctctctgtgtctacatatgtgtatatatgtacttatgttctaatttttcagaattttttgctcccacttatttttagtaattgaagcaattcttaagttcctttttaggctttgtcacacttattaaacaattaattttgaagttcacaggtatactgttggcaagatcacaccagtgcctaggc

SEQ ID NO: 77188 - DNA, 534 bp, Carica papaya
  Intron number 1 from transcript evm.model.supercontig_738. 1 (locus evm.TU.supercontig_738.1) derived from phytozome v7.0 (chr-ID supercontig_738; pos 2161 to 2694 reverse str and)
ggccaactcaagctactggatctgaagcatcctatgtaggcttaattactcttaagagttttccaagcatgttgacaagtgttgtattaattaattttaatggtagtcgtaattcattagaatttaatttctttgctgtcctaaccacttctgagttttgctgttgttttacccaccaatcacactaaggaacagttacattgaagaaaattcttttagatatatacaaatctgttcaattcaaaacccttgtttctcttggtttatctgttattttctatctctgattcccatccacttgccagttcctgtacttgtttgattctgcatgctctttctggtgattatgtcgacatccttttaatgtaccttatttaatatgatgacgggcttttgttatccatgtctttggagttgctaatgttgcctctttctcttatatgccaacttattataactttatgtgagagttccttttcaaagttttaaaaaaaaagtctgtatgtaagagttgaaactaatttcaggttgcag

SEQ ID NO: 77189 - DNA, 541 bp, Carica papaya
  Intron number 1 from transcript evm.TU.contig_38781.1 (loc us evm.TU.contig_38781) derived from phytozome v7.0 (chr-I D contig_38781; pos 994 to 1534)
cgccgtctttgtctgggtcctctacgttggtaaaggttcgtttattttttcctttacttgtggattgtttacttcctgtcaggggaacctctagtggtatattttaggttcattttttatatggaactgaaaattctacgttcagttttatctatttgtattgcgttatgtttagttttgaattgatttgatgttcttttcataattttgcttaaatattttagacaagttatgggcttgagaacgggttatctatgttcttggttccattcatgctctgctaattgctggagttaatgggtgatttcacattaaataaaagttgcaatggtatgattttttcttgaaaaaatcaaataaggaactcttggctaatccatgattttgtttgaagcattgagatggttgttgtcaggtttccactttaccttgatgtggtctttactgagtctctgtattgaaatctttgtttttcaacttcatttatattgaagttatatgggataatgatgcacgggcctatggttgcttttaggtgaag

SEQ ID NO: 77190 - DNA, 856 bp, Carica papaya
  Intron number 1 from transcript evm.model.supercontig_62.1 03 (locus evm.TU.supercontig_62.103) derived from phytozom e v7.0 (chr-ID supercontig_62; pos 664465 to 665320 revers e strand)
gctcaaattcgttgattacagggctcaatcttcaggtattcgtcagtcattctacatatttgaccctcctgtgaaatgggtatctgttggcttctattttgacaggaattattagttttgatgcgtttaattgctatatcagaaactgactgccattgcttgtatataaatgagagattatgatttgaaactaaaagattgaatatcttcttgaaccaatttggtgtaaagttccagaacactgctttttttgatgaagtagaaaaatttaatgaggaacttgcattttacatgaaagatcaaatgttcaagaattttgcaatttgctgttgaagtctttgcaatgtcaaaattgtagtatgcaagtgtctgttaattgttgtgcgtactgataattgttgtttgttttttttttatgatagggtgagtttcgtttatagggactgatgtttatacgcgtttgggttttgtctgattagactccaagagaaatataatgtggtttgaaatctagggaagatatatgttcataatataaacattcaatgcagaacacagttttgttttttggtttttgttctaaatgataatgtaaaaaccagggagtagaaatacaatgtggcttgctattttgtgtttgtacatttattgttcgttgatatgtattcgttgttacgtgctgctatctcccctgtctgcatggcaaagtgtttctattcgagaatgtcttttttcttcttggagggtcctgagcctaaaccatgatgatcttctaataatttttcggtttacataatttatacatgtcaaatatgacaaaggtgcattgaaggttagctcaaaggcagtcgaggca

SEQ ID NO: 77191 - DNA, 872 bp, Carica papaya
  Intron number 3 from transcript evm.TU.contig_29023.2 (loc us evm.TU.contig_29023.2) derived from phytozome v7.0 (chr -ID contig_29023; pos 9364 to 10235 reverse strand)
gaactgttacttcaggtacatgtaaatcaaacagttttcaaatgttattgtttatctctaatgctactaagtttaaactcaaagagagttcttttagtggaagtgaatgataagcaaatcagtacataattaacctgcatttggtaccatgaagattattaattcttcattgatagattctttcaacctgcacctgtgtttttaactttacactaaaggcaggtggcttatattatctatgctttacttaaatgcataatgtggttaacagtaggaaacaagaaacattgttaaaaagttcaaaatggttattttgtgtatttatcatctaagatactgggttgagatctattctaatacttttagcttcaagatgcaaatttttgcttgaaaaagaatatagggtcatggttcattttttcagaccatctttaaaggttagcgatatatgttccaaagatcggtaatctttttaaaagattgtttgtgaatgcattctctgtaaataaaactgcaaaaacatgctttggcttacttataccactccttccactccaccttgttctaaagaggataaaagagaacatatatctataaaactggaggcttggggtcttgttatgaaggaaacttgccttctatgaatgggggtcgcattttcttgagaagtttctgatggtgcaatctttgtggactgaccaaattaaaagaaaaaaatcacgaggggcctgaaaatctacaattcttatttttgcaacaacatagacaaaaatttcatgaattcctcattataatttttgacatatatatttctaatatgttcttcaaatccttcagcacctgtagaaaaagttgaacgggttattgtatca

SEQ ID NO: 77192 - DNA, 556 bp, Carica papaya
  Intron number 1 from transcript evm.model.supercontig_84.1 5 (locus evm.TU.supercontig_84.15) derived from phytozome v7.0 (chr-ID supercontig_84; pos 149745 to 150300)
tctagagctcggtggagtcaagatcgcaaaagacggtagagatttcctactgtcaagaatttgagctcaatttctgtttgtactgttttcgattttagtacgcgggttgtttgaactgaacttttgatgttgttctttatctgaactgttgtaatcacttgatgcaattggcaaaaataggcctgcgtttgtttttgttatcggtttggaagaagtgtctttattttattcatcgataacgctttctaggaacttggttgggtgcaactcaagcattttaactgagagtaatttctgaaatgtttttttttaacgtcatgttgtaacttattttggttcttagaaatccgaaaacgtggtttttgttgagttcgcataagaatttaacaaagtgaggatgccttctttaatgtcaactttatgatgaagaaagaattttttttgtatcatgtgatttaaccattctggctgattggtgaaattgttatgtggatttattctttttcgtttttgagatgtttatgcagtttgacaatttggattttggggtttatag

SEQ ID NO: 77193 - DNA, 854 bp, Carica papaya
  Intron number 2 from transcript evm.model.supercontig_84.1 5 (locus evm.TU.supercontig_84.15) derived from phytozome v7.0 (chr-ID supercontig_84; pos 150463 to 151316)
atctgtgcccaattgtttctgtacagcaggtacatactgcagcttatatgcttaaaaaatttgttacattggacaatatttaactattccttttcgtctgctacttattctcgcatatatttaatctgatatgctgtttatgtttgcattcacatacaaagaccacttcgtctttgcatttttgtttgtgttttgcagtttccatttgctatagttagtgtcatacattttgattctctcgtgattattacattttacacattaatgtgtagaaaatttaagcaggtttcttatatttctttctctagaggtgaccccttctttttgggaaagctttaattctaaaagttccacaagtaagcaatatatataaacccttcccccatttttattgattattgatacgttttagatgtcttgatatcatttttacttctttttcacttcttttttgattcaccatcatgcctgtcacatataaccatatctcatgcccatgatcaactttgatttctctaacttgaagtatgaggccttagaaattgtgtgatacttattcagagtctggattttgattgagctacttaaaatttgtcctaatcttgttttattctatttaaaaaagaaacatcctttagcatgggtttttgttctttggtgtgctttttcctacttttcgggtttgtcctcacctaagtgaatgcagcttttatttatccaactgatggatccacatcattgtcttctaaactatttgttatagtagatgaatctcaagattctgatgaaattattatcataaataagaatacatgtgcaccttcttgacttctttacttctttgcagaattttg

SEQ ID NO: 77194 - DNA, 1017 bp, Carica papaya
  Intron number 1 from transcript evm.TU.contig_27582.1 (loc us evm.TU.contig_27582.1) derived from phytozome v7.0 (chr -ID contig_27582; pos 9080 to 10096)
ttgcgttattgttggggttatcttctaggaaggaggtgagatatacgcagggctgataaagtcggcattttgcctatataaacagcctccttgcgcctctcttctcattactctggtttttctcctttcgttgaagaagcaaagaatctccctctctagcatttcaaggtaagatttcttctatatcggtgaacactttattcatttttaataaatttttctttctgtttttcttcgtttgattgtcacgtttctcttgtgccgattaagtttctcgatcaagtttcatgattgattttggtgatgatctttgaattattatttttttatcaaagaaattttaagtttcatgttaagatgttgttttccctgatctgatactgtctgcgctttattcttgagaattatgtctgagattattagtttgttgttttccctgatctgatactgtctgcggtttactctcgagaattatgtctcagattgttagtttgttgtgtttcctgatctgatactatctgcgatttattctttagaatgacatctctcgcgattttaatttggatttgtcgaggtttgatttgcttttgtatttttgatgattgtgtctgacttgtttcatgtgtcactttttgtcggttaacaccttattcatgttttttttttcttgtttgattgtcccttttcttttgtgacgatcaagtttctcgatcaagtttcacgattgattttggtgataatctttgaattattatttttttgctgaaaaattttaggtttcatgttaaagaacgactattagttcgttgtttttactgatctgattctgtctgcgatttattcttgagaattatgtgtctcgcgattttaattttggacagatttatcgacgtttgatttacttttgtattctaacgatttcgtcagacctgtttcatgtgcaactttttattcccagctatcttgattcgggttcctaatttgttggaccataatacatttgttgaaacgtttcag

SEQ ID NO: 77195 - DNA, 957 bp, Carica papaya
  Intron number 1 from transcript evm.model.supercontig_67.2 0 (locus evm.TU.supercontig_67.20) derived from phytozome v7.0 (chr-ID supercontig_67; pos 394235 to 395191)
caggtctgtttctcactcccttacgcttttactatttacaacttaaagttctaaactaaattttatgttgaattagatttaggaatttaatacttgtagaatataattttagaaaaaaaaaattatagttatataaaaaataatataagtactatctaaacaaaaattttataagaataaaaggatttcatataaaaatgtgaagtaacaatcatatcttttctactgaaaattcgttctgtataataaataaattatatgaaacaaaaagataattaagaatttatagtgtataatttcagagtttgtaatggactaaaattttaaataaacagttattattattatatatatatttacagtaactttttaatttttttttaattaaaataggacaataaaagatgtgtctaatattattattaatgtgttgatctattaattaattagttaaactaattatttttagctgttttttaactattttagttttgtaagttagaaaatagaaagaaataaaaagaaaatgtcaatgaccaaattacagttttttttttaaaaaaaaagaagtattaaaaagtaaattaggataaatactaaacatcagggattaaattagtaatttattctaaagaatattacttctgaaggccacattgttaatgcttctttggtgggggatttatatcatattgtattttatgttttgatccttaaatcacctaattaaatgaacattaggagtagttcctttctttttttctctcattgttgtttgttgggttgcatatatttgacatttgaaagcataatatcaactttaactcaatcttctcatgttaggaaactttgaacaatctatctagtttaacaaaactcaatatttgtaagacgaacatgaaaatttacatagattaacaagatttgaacttacaaagttgatttattacaggtgta

SEQ ID NO: 77196 - DNA, 914 bp, Carica papaya
  Intron number 1 from transcript evm.model.supercontig_92.6 4 (locus evm.TU.supercontig_92.64) derived from phytozome v7.0 (chr-ID supercontig_92; pos 559032 to 559945 reverse strand)
aaagaaggcgataccttctatctcataactcataggtagggtttttgttttccattgtatcgtcttcgtaaattttaatttcatgtgttttgccctattaatgttggatatttcgggtgataacgtcggcagattattgaatttgtagttcttcttcttcttattttttaaaatatggatgtttacattttgacgggagtctagatacgagttaatttcttctcgacaatttgcgtttctatagcggttaaggtctaccagaatgtttcggaagatggattcatttgaactaggtattatgtctttgtcgaagacacaatatttttaggtgatagtttgtgcttatggactcactagatgatactaggacattcattgcactactgagcccgagtgtgtagtagaatttctgttgggggttattctcccctttctgttttgttttgttatacttttatataacttgagatagtgatacatttgcagatgcctaatgctcttatagaacaattgaattcagttcgtttccttgtacttgtatcagcgtttatttgctatatgtagtgtgtgggcgaggctttagtcactttgtattgtgtccttgaagttgagtaccatttgctaatcctagatgtaggtgattggaattgagataagtatggtggttaaagaagaaggtgttcggggacccagagcgcgtggaatttctttggatcatgtgcttaattcatatttccactagtatgtattattgcacctgtactttaggttagctattgggaggaagggctattgttttgttgttttttttccagttactcattcgactgctgccattttctgctcctaatcttctacttttggctagagttgagtttttgaagtaactaatttttctaatcaatttccaacag

SEQ ID NO: 77197 - DNA, 358 bp, Carica papaya
  Intron number 1 from transcript evm.model.supercontig_9.11 7 (locus evm.TU.supercontig_9.117) derived from phytozome v7.0 (chr-ID supercontig_9; pos 614190 to 614547)
cgcagacaagtacgtctttttcttacctcattcctttcaaaattatattaatatataagattactgcttaattttatactaaattgtttgtggaaagcgtctgttagctgatcaaacttttaatttttttgtagaaattgtctgttagctaatcaaatgcttacaaaattaccttaaaagatattcttcagctggtctttgttcattttcgtcttcgtttggaggtcaagaaaatattagttaattagtagaggaggttttattggtgttatgagctgaagctgtccagatctgttttgtttggtttatttgctgtgaacttttgttgaacagggtaacttgcaagttgcaaatattt

SEQ ID NO: 77198 - DNA, 636 bp, Carica papaya
  Intron number 1 from transcript evm.model.supercontig_80.1 1 (locus evm.TU.supercontig_80.11) derived from phytozome v7.0 (chr-ID supercontig_80; pos 56978 to 57613)
cgcttcgccgacgggctaagcgcgcaaaagaactggtaaagcatccgttttgttctttaaccctttattctactctgtttttattgtatatgtctttttttaaagaaaaaaaactctggttcctcgtgaaatttggtagggtttttttatgtttctaaattgatatttcgttgtagaaatttacttgcttcattctcctccttcatatatcttatttgtttcactataaggctgcgtaattatgtggattttttgctgtttctgttttatgcaaagctaagatcatatgtttacttctgagtttgttttactggaccatcccaatacataccagttcgaaattttgatgaatcaggctttattttttttccgatttcgttggtattttcttttgcgcgtcaatagattcttcagcgtgaatcttttagattttttctgttggttccaagccattttgattaggctagttgctttcaatttgcattctgagaactgggcttagcttttttttgaatcactttgttatgtgctaatatgatgtttcttttagtcgctttgtatgtgttaatcattttgaggaaatgtattttgttgtttgtagagatttagatcttcagaggtaaaaaagtcattgaa

SEQ ID NO: 77199 - DNA, 823 bp, Carica papaya
  Intron number 1 from transcript evm.model.supercontig_9.48 (locus evm.TU.supercontig_9.48) derived from phytozome v7 .0 (chr-ID supercontig_9; pos 215888 to 216710 reverse str and)
tctgcgataatctcttcaaacattttcgaggtttgtcattttttttttgggggattttgtaataatctgtatcctgttgcttaaatatgtaggagagttgggatttctctgtgattttgaattagccacgtcgttttctgaattgagccccatgggtggagaaactgttactggtgattttcaatctttcttttttgaaagcttttatgtgaaaggttgcgcttttgattgggggcttttatgggttttgattgtaaagtatctgagacagttgagagaggtgtaccagtatttgcttttcagacttagagcttgaatgtcaatttctttttaaagatctccagagcaactttgttactttagaagacaacctaagatgtgcctttctggcttttgagactttcattttgatctctaggaccaaaattttgctacttttatgctgtgtgttgggagtttctcatttggttttgggtgctaaaatctagtaagtgcagtaatatgagttctttaatgcttgccaaacagggccttagtttctttaggcattccctgcaagtgaaaatttacctttgtattgggcgttggaagtttagacttttgaggcatttaaaaactagaggcagatgtttctcaacatgttttctagcctcttattctttcattttcttttctttttgatacgtggtgtgatgggtcggtactttgctttcctctgtgaactaaatactaccaaaagagatggagcccttcttatgttggcatgcttaggctttgtgattatgcagcaatatcagaaaggtcccaaggagttgtgacaact

SEQ ID NO: 77200 - DNA, 794 bp, Carica papaya
  Intron number 1 from transcript evm.TU.contig_43574.1 (loc us evm.TU.contig_43574) derived from phytozome v7.0 (chr-I D contig_43574; pos 412 to 1205)
ggtaagtaattttcactgatataatagtttgtttttcaattttttggctgtttggttggtggaaaagtataataaaatatatttacggttatactgagtagttgtgcgtttgttacttttatttttctttgtaaattgatttgttcgagcttgatttgtgctccatgtgtgttctttaagagtgttcattggtttggaaccggatctattcggtccaacaaccaaattaaagatggaggtttagaccgaagactagacccttttagttctgatccgaatttatatatatatatatatatattcttggttcaatatagttttaatcaaaatagaccaatttttcgatttatcaattaaaaaaaattagtaaaatttttgtatttttggtctaagtcaatccattgtgtgtggaccaaataattatttgtagatattagaactaaaccgaatgatttagtatggtctacttttacaataaagtgtatatatatcataagctacaacatattttttttactttttttttgtattttttctctaaatcgatcccttggtgtgtggatcatggaccggacgaaacaattgtttagtctaatctgatctgaattgaatatcccaataattttttggtaccggttcgatcttgtgtcgaatactgaatcaaacacctctcacttagtatatgctcgtgtggatatctatatatatatattaaaatagttatattgtatatatatttatatatacattggcatggtgaactacaggaactttggggcatattgtagtcatag

SEQ ID NO: 77201 - DNA, 830 bp, Carica papaya
  Intron number 2 from transcript evm.model.supercontig_86.6 7 (locus evm.TU.supercontig_86.67) derived from phytozome v7.0 (chr-ID supercontig_86; pos 864819 to 865648 reverse strand)
agggttgagaagaggcttgctggttggaggagaaggttcctcttgaagggggtaggctacattgataaaaaagcatgctttctagcctttccatctgcttcatttcctttggcaccatgcgtagtagtgtatagaacacttgagcagattcatgcagattccttttaggtgatactgataagtagagacaatctaccaagtgaattgggatgatattaaagactatatttggggacctagcatcactctcatgttctttttctttttaactaactaagatgattccttgcaaagatactatgcggtggaaggtatttggtttaaatatgtgttgttggtgggggaatgaatgcctagcttaaacagagaagtctctggtactagcttgtggaggggaattagagaggaaacttgctaccatgagagcttcaaagtcataacaaaaatatggtgagattttttgaggatttgtggtgttggcaaacttctaaatcttgatttctatcatctatggcttcaaagaggcaaaagtgatgactgtttcttgatgaatgaaaatggtgtttcctggaatgttaccctctctggcaacctaaatgattaggagcttgatgagatgttttctttgatggccttccttgagtcatgctctattcatccatatgaagaagacgtgctggttttggaagctcccaatgatacttcttcctcgtttaagtcctatccttttctttcttttgaactgtgatttgattgttaataactttccttggaaattcatttggaaatgtaaagtttctccccgtgtggctttctttgtgtgggaggtg

SEQ ID NO: 77202 - DNA, 591 bp, Carica papaya
  Intron number 1 from transcript evm.model.supercontig_72.4 (locus evm.TU.supercontig_72.4) derived from phytozome v7 .0 (chr-ID supercontig_72; pos 194210 to 194800)
cattctcttctcgtcttttatcgaaatcaaaacaggtaatgctccttccctgtgccagatcgggatgagtttaccatcatccccgtttgatcttcacatttcctatcctcttgcaactccccgtgagattaggaatgccgacttctgttcagatgttctctttgatttttttttttaagggtagaattaagacggctgcggagaggtttcgttaggtcaagggattaacttttcattttggttaaactatttttatcgtatttttggggaatttgcggtttctctattaaaagaagatgatgcttgattttgaagatatggtactgagatttcctggggaagtttttggcagagaggatacaaaacgataagcttttgcagttcatgctatttttcctactcccatttttgattctgacagaaaataggaagcaaacattgggttaatgttgtgagatggttaatgtgttttccacctgttatattttgcaataatgtgaagtcatttcatgctgcttgcattcgttcctttagtttgatttttcccctaacatttctcaaattccttttccttcatgattttacagttgt

SEQ ID NO: 77203 - DNA, 936 bp, Carica papaya
  Intron number 2 from transcript evm.model.supercontig_72.4 (locus evm.TU.supercontig_72.4) derived from phytozome v7 .0 (chr-ID supercontig_72; pos 194859 to 195794)
caaagaagctgctccctctattcttaagggaggttagtggatgagtatatctatccttgtttttttttactggatttattatttcttttgagaaaatttaaaaataataacattatgtactaaaaatgtatgtattaccctttcttggtacggatatggaacatttggcaatcatatatcacatgtttgtgttgtgtattttatatatctttgacctgctgggttctcttcatctaagcttttgggttaatatgaaatggctaaaccccatattgagagtccatttttcttatgttttggaatcaagttgactgcttttttctttttgaaagaaatgttccattgatttgttgttatgtatatcaaaagaatcctatatactttccatgagagcatctaaattttctgtgattttagtgatttactattagaaaaaattaatcatttaatggaaggaatagtgaaatttgacttttacattaggggacagttggagtactacttggaataatctcaaaattgtatttttttgaaggaaaatcttcaaaaattgtcttttaaaaaaactctccaaactacttgtcctgaaatgcatgagaatctgatagtttgcttatttagtggctatatgataatctagaagaattgctgttgttggtgaactgcgatcctaatcaactagtggatagctttccacagttgtgttgttattttccttttgtgtttctctttcccacatgtttgatagaactatcatataaaaaaagaccatggaatggttctattttttcctttggaatgaaaatgtgactggaaggagtaactatttgttgatgctttatgtccaacaacatacataactgatgtgcatgaagtttaatttctaaaaaggtttcttgatggtaactgaaaaattactttcaatgctcaaaagag

SEQ ID NO: 77204 - DNA, 851 bp, Carica papaya
  Intron number 1 from transcript evm.model.supercontig_84.3 7 (locus evm.TU.supercontig_84.37) derived from phytozome v7.0 (chr-ID supercontig_84; pos 350573 to 351423 reverse strand)
gagtgcggtgtcggcatcttcactaaggtatctcattttccgattttagtcatcgcgggattcagatgactgactgcatgtgttacgcgttaggttgatttcgtttgattgtttttaaaatgagatttttattcggttaaagtgttcagggggcggggggacggactttgatctgttagttctgattttggttgtcttaatgctttgcctgcatttatgatattggaattatgtgctacctcatgcaaatcggtttgatctaatctgtccattgctgataatatttgtggaggtgttgtatgtggtttcagaagaagataaaaaggatatttattccataagattgatgtggtcctttcgtgataataaggggatgccaatcaccaatctctgtcatcttatcaagcaatgggtttgttttgttttgtcaattttcttttatgtcctctatttctatattatcctaacctgggattagtcttaagttttactgtgcatggagatgcatattgcatgatttgatgatgataaaagtgtcaaaagtatcttttcaccgcacatgtttcaaatttagtaaagaaattttccaaagaaaagttttaaaaaataaagattgtcagataataataaatccattgatgcctatgtcaatcattgattctgttaatgcatcgtcattcaaatgataataaatccaaaaaaattcctttccatatcgagaaaaatgtcagagcaggattgattaatctgcctctctctatctcatattacttgtagtttctttaaaataaaaattggaaattgacgatattacttctatgttgtttttgtttcctagactgctgcagaat

SEQ ID NO: 77205 - DNA, 352 bp, Carica papaya
  Intron number 1 from transcript evm.TU.contig_47396.1 (loc us evm.TU.contig_47396) derived from phytozome v7.0 (chr-I D contig_47396; pos 96 to 447)
ctttacagctacttgctttcaagaaaattcctaaggttcgtcaatggttattcagtatgtaactctaaattttttattttcccccttatataactttgaatttattttttaatgaaaaaaagaaatattattaggaaaaaaagagaaaaaattacatcagaaagggataagagatgtccttgaaagggaggtgtcgttgaccagttgcttttctgttcatcatcccctctccatatcttcatactattttctgaaatatctaatttttctttatttcaaaaacaaaaatctaatttttctacatttggtacttgtagttgcgagaactttcactggctaacgttggtgcaat

SEQ ID NO: 77206 - DNA, 775 bp, Carica papaya
  Intron number 1 from transcript evm.model.supercontig_882. 1 (locus evm.TU.supercontig_882.1) derived from phytozome v7.0 (chr-ID supercontig_882; pos 3172 to 3946)
aggctcaaagtgtaagtttatagcaatccaacaaatcaactccaattttacttcttggctatatgcaaaatttggctaagctattcctgttgttttttctaaagtttgctctgcttacaatttcttagtaggaccttgtcgcttaatgcagtatccatcttggtagactaaaaacttaattttactttacgttctctattgcatccattgtctctttgtttgatttgaaagtgagacagatagttttgacctattatagacgttataattgctgccaccgggaatataggttgtctcttgatttgtaaagcttctagaacgtaatggtgcatatggcttctttccatgccccccagatgataggaaaaaagaatatacggactccattaaaagaaaactgttcactactctaaaaaggagtttatgtgctgacacacatatagtaattacattgagggaaccttgactgaaggaatggtatgatctcaagctggagccagaggtgctagtagaatattttgtggtcaatcttgaaatgcttttataaactgagttataatccagtttctttagaaataagtggtagaatagcaccaagagaggtgcagataaacttgtaggagttttttcatttcaagcagttttatatgaatatatatacacatctacactatttgcgcactatattagaagcttcattttagtcttaaaacgattgactgaaataatttccaatgcagaccccagttaacaatagcctcggcgataatatttt

SEQ ID NO: 77207 - DNA, 645 bp, Carica papaya
  Intron number 1 from transcript evm.model.supercontig_774. 1 (locus evm.TU.supercontig_774.1) derived from phytozome v7.0 (chr-ID supercontig_774; pos 259 to 903)
gggtatttctatttgcacatcttgtatggatgatggatatttatcatctttcttttcgttattggtttgaaaaataggcttttaacttacctattggtcaacagtattgactggtaaatatgtaatgctcacatcagttcagtgtctacttgattagaatcagtactatgctgttctctttcataagacttatccaatcatggctgtccgttttggcttaggtgaatgatatctctgtcatatattgttgttaaagtggtaagagagtgagatttgctttatacctcatgtgggtctatttgcaattccacagtaatgtcttctattacaaaaataaagaatgagaaagaaaagatgttcttccatgaagatcttgggcgcgaaaggaaaagaagaaaagaaaagttagtttccagaattttccatagagtacgcaagatgataaatatgaagttggatttatacagtaacgttttgagttcaaaaatgtggagtattttcattaatttgccaaatgaattatgtttatccctgagaagtgggttctgcagttttcctcttgtttattattatttttactgttcctttttctgaaaaagagaacttcatttgatatctttagctaagtccatttattggttgtag

SEQ ID NO: 77208 - DNA, 590 bp, Carica papaya
  Intron number 1 from transcript evm.model.supercontig_65.1 42 (locus evm.TU.supercontig_65.142) derived from phytozom e v7.0 (chr-ID supercontig_65; pos 1252066 to 1252655 reve rse strand)
tcccttactcaggtatgtgaagcttgcagtttttacaattgtaagcaaaccctatataaatagatagacttcttaatgttccctgaatgatttaaacaattgatttgaaattttgttcaccttcctatataacatgaggctgggaaagttttttcttggattgggatggaccttgtaatttaatatcgatgttttttttcttattcttgcttttgtagttagatatttctcttttattgcttgacactttcttttttgctttgtaatagatactttgcatttacctagttgcttttgtaatagatttattcacatttaaatcagctcttgatgtaaggatattttgaattaatatttttctggggcaatgattgattagttttaaggcaatggatatccatccactaaaagtaaggctgtaatcatgattggagaagagagataactgcttaagagatcagaaagagatttaagtttcagacatctttgctttggtcccaaaactaaaattcttatacaatattaattcccattctttgctttgttcaatgacagataactgacttgccccctggaagattgccagttga

SEQ ID NO: 77209 - DNA, 391 bp, Carica papaya
  Intron number 2 from transcript evm.model.supercontig_69.4 9 (locus evm.TU.supercontig_69.49) derived from phytozome v7.0 (chr-ID supercontig_69; pos 614644 to 615034)
ttaaggtgcctcagtctgttcattacttttgatttttatgtttcttaatcccttttggcagctctccatgcccagactggacttttcaagattgtgccatatgttatcctaaccacttgctttaagttgtaactctatattcctttttctatacagaaaactgccttttagaagtaactgaataatgtcttcactatccaataaggatactgttacaaatttatctcttatttgttgtagtaacaataatcacgggaagctgcatgttcacctgggtgctggttgattcacacattttatttagaatgcatttgtgctggaattttcaactctctgtaattctacttgtcttccaggctggaaacatactagttgattcaaaaggtgcagt

SEQ ID NO: 77210 - DNA, 721 bp, Carica papaya
  Intron number 2 from transcript evm.model.supercontig_65.7 6 (locus evm.TU.supercontig_65.76) derived from phytozome v7.0 (chr-ID supercontig_65; pos 866681 to 867401)
gaaaagtccaactcagtgtggtcaggtttggtccaattcccagaatattcatgatagatcctttcttatttgttgaaactaataatccttgagaacttaggagttcctatggatacagattaattgataatatgctttctttttatgaagaataagttgccatagttctctaatcgctttctctttatcagtcagcttaatccaatttttggttctgaatttcttaaacattcataatttgattatttgaactggggtttgtatgcagcaattggctgactctcagatgcttatgtttatatcaactacatatagttgtcttcaaacttgatctatttaatttcatcttcttctttaagtttgctgcaggataattgcttggtcaaggagcttttatccgctcaaaagtgaaaaaagtggagttataaaattctaaatttcagagacgttatcaccattaacacagattttgacccccttatattgttctactgatttatacctacagtaaatgtcagtattcatgaagcaatagatctaacttgttgctagggagctatctttttctgttttccactctgcctaggtatctgggtattagaaaagtattggtttgttaaaggttgatatataacctgtaaatacagttgcatacaatctccaattacaagtgacgagcagattgtataggggactcttaacttatataatttttgcagtt

SEQ ID NO: 77211 - DNA, 804 bp, Carica papaya
  Intron number 2 from transcript evm.model.supercontig_78.4 9 (locus evm.TU.supercontig_78.49) derived from phytozome v7.0 (chr-ID supercontig_78; pos 559748 to 560551 reverse strand)
aacatctcatcctatcattgttttttagcataaatgtaagttaaaggcttctttattctagcttggtaacttgtgatgtagaataattgcgagcagctgcttatcctgtgtgaagaagttaattgaattgaatcccctatcccgcctcttttaaggttaggtttaacaagggcaaaaaattgtatgatttcttgtttgttcatatacttaaaattatgtttagtcttggggaactgtcttctaggacaacaaattcttgtcaccagaccagccaatttcagtgtgttatttgatttgacttctatttcctactggaaaatgataagtttcaaatattatggtgattttgagtagatggatggacgaagatgactctttcatagaaaaaactctccatttggacggactgtagataccctttggtcttggatataatgtcctactcttatccattatttgttttgtggctaagattaacctgctaattatctgaaatactatatgcaaaatttcatatgcagatagctgacaaatcagttaatggttactggcatatttgtgttggcccccaagagtaatttgttattcagtttctgctatgttctggaaattttttgtagtgatatttgtaataatatctgcatgatttctgtttttgttcctgatttatttttcagttttttattagttctgaattacttggttcgtgactatctcattgacataatttgtatgcttatgtgctgaattcttttggtacaacattaaggttggacctggttccactttgcgaggtccattgga

SEQ ID NO: 77212 - DNA, 843 bp, Carica papaya
  Intron number 2 from transcript evm.model.supercontig_7.17 4 (locus evm.TU.supercontig_7.174) derived from phytozome v7.0 (chr-ID supercontig_7; pos 1809270 to 1810112)
gcactgtaagttttatatttttaacatctaattgttgtccattgtgcttttatgttatcgcaagcatcatttagggtgggtggttggctgacctgatcttcgggcctttttttctttttcctttaatttaatttagatataatggatattattatatttaactatatttgtttctattctatcttgtttatattaaatattgttattactgaaataaaaaaaaataatgtatatattttatttccatatcatttttggtaattttatacttaattcttttaattaaaataatcataaggcttgttatgtgaaaaagaaacactagctacaacgaaagggacatgtatattcagaccaaaaaggagatggtaacatgcaccatatttcgtggaagccctgatgacagcaatgaatcaaatgatgtaatgtatccaaaatgttggataacatgttgaagcgatcattcaataaaaagaaaatagttataaaatagttattactaagttattttctttagaaggaaaagaaatttaaaaaaatatgatctttaaacaagggaattgtatgtaatatcttcattgaggaaaataaatcttattgttgccacttccttattttagtaggttaatgaaatacttgaaaatcttctgattgcttcagtagctctttaatatgaggttccagacaatttatagtttcaattaaaggtgaataagtgagagtcggaaattcatgaatgatatatagtagcaaaccagttgtcgcttattttaggggttcacggaataaacttggatttgcatcacaggaagttgctgttaagaagtttctagaccaagattt

SEQ ID NO: 77213 - DNA, 858 bp, Carica papaya
  Intron number 1 from transcript evm.TU.contig_41394.1 (loc us evm.TU.contig_41394) derived from phytozome v7.0 (chr-I D contig_41394; pos 636 to 1493 reverse strand)
ttatattgactgagccaactgggtcatctgcagaggtatttttaagcttatcttgatcttggtaaaaaaaaaaaaaaatcatgtgggttttttggggttatggtgattctgtttggttgtcttagtggtgtgaatttaaaagtgtttttgtggaatttaattgtgtggttgatgatgttgtttggaagacagtatttgagtgtttgcagttgtatggtgtgaaaatggttttttggttttgaaaaagataatctttttgtaattaatttcagcatataggaaaaatgaaagttattttgaagttaaaacagggaaaattaatgaaatgacagaaggtaatttagattttggatgcaggagtttgaagaaagagattgagttgatgaaaaaggagactttcttttttttttttttttaatttaccagtcagtttatcttcctaccagctattgttctctggtgtatcaaaactacatcacttcctaatctggttaaaaacaagttacaacatgctgggattaagagattcatggatctcaggccagttattctggatgttcattttaaaaatcttggattttggagtcctgcttggatgaaaacagagaaatggagtttttcttctgatatttgggataattaactgggattttcatttctgagcttgagtatcagatttaaatccataggactcaaaagctcgatgatttggtgatagaaacttgacaagaacgtactcttttaacttcaagttttcatcctgttttactggttatgttcatcacatcagtgtaaaaggggactatagattgcattgttacaaatagttcagtgttaaatggtttcaggtactcttgt

SEQ ID NO: 77214 - DNA, 311 bp, Carica papaya
  Intron number 2 from transcript evm.model.supercontig_80.4 1 (locus evm.TU.supercontig_80.41) derived from phytozome v7.0 (chr-ID supercontig_80; pos 344744 to 345054)
agctgcccttgtccctcttaactgatcacaggaaggtaattattttttttccccttcggaagattgaaagctgaaattgtttgtaaacctaatgtactgagctcgagtgatgtgtgctttcaactttataggattaccatgttttaaaccatgtgatacatggaggtgcatatatgttatgtctgatgaaacagtgttcttatttgattttatatatatatatatatatatgtatttctcacttttttccttttgtttttggatcaatatttgaagcaagctagagttcatcttctcgacacagaaccttt

SEQ ID NO: 77215 - DNA, 619 bp, Carica papaya
  Intron number 2 from transcript evm.TU.contig_36848.1 (loc us evm.TU.contig_36848) derived from phytozome v7.0 (chr-I D contig_36848; pos 1056 to 1674)
attcactcatccacaaaatagacctctacattttggtatatcctggcttttagtaatttcctaattactttagtaactcccagtatttaatctagttttgcaattaaggtcttttgagtcataatgagactaaagtcttgttaaaggtaaattaagaaatttacaaaagaaaataaaaatcatcacttaaaaattgatgtacaaattataatttattttatttattattttaaattaaaataagatttattttttaataaaatttaatttatgtttatcttttaaatatcatataattatgagagcttatttctgtagaagatttaactcatattaaatattatgtaattagtgatatcttactttaaaaaaattaattaatgtgtaaatgtatttaaaagcacattaagttaatttttgagttaatcgaaattcaagtttttttcatctataaaaactccaacaatgaggaccgctctccaaaaaaaaaatcttaaaatttgttgctttcagacattacatatttagaaaaaaaacaaggttctataatttgcttattctactaataaattaacgatattgatatatttttgattgtttggtggtttgcagattagca

SEQ ID NO: 77216 - DNA, 906 bp, Carica papaya
  Intron number 2 from transcript evm.model.supercontig_875. 3 (locus evm.TU.supercontig_875.3) derived from phytozome v7.0 (chr-ID supercontig_875; pos 17722 to 18627 reverse s trand)
gtcaaggtaaattctgaagtagaaatctaacttaacctgtgtttaatataaagaatctcttgtggtggatgtaaacaccaaataggagccactagtgccaatatggtttgagtagtttcctatcttcatactcgatacatggttaaaattgttggacatgcagttttgcccaattctaaagtgataaatttcaacaagcatcaatttttagtgaaacattgattttaatcactatcttgtcttattttttcaagaacaaatattctaaatatttctcttcataatgaagagggaaaggcaatgaaatttcttttgaggttgtggcacatctcacaagatgaacggtgaaaccacattcttctgggaacagtctgtgaagatgtatgaatacttgtttttttatctataagatgttttctgagtttatcatgcatcttgagattcttattttgtttttccacttctttgtatctcattgtagatagaatatatgtgatgaggttactgtgtcaaaaggagctaaaggttttgaagttaagacaacattgaaggtagaatgtcgttgaatataaagttaattacggcctagaaatttatccaatataaggtttgctacagtctttaggaaaaatacaaaatggagactgcaaaacaaacatctattgactagttaaaacttaaactagtgatatagctacttctacactgataaatcacacatcctttattgcttcaatgtggtttatcattcacttctcctggttggtctaatacttcttttcctttcaaattactgtcaatgtactgctaatgaagcatcatgatgttcgttaaaagtcatacatgagagttatatattcttgtactgcaggtggaacatttgctctttattctttactttctcgg

SEQ ID NO: 77217 - DNA, 488 bp, Carica papaya
  Intron number 1 from transcript evm.model.supercontig_875. 3 (locus evm.TU.supercontig_875.3) derived from phytozome v7.0 (chr-ID supercontig_875; pos 18793 to 19280 reverse s trand)
aggaaaaggtatgataattctctactttccttcctgtatctcttcttttctcaaatatacacatagaccactttggtcaggcacacggatgcagataaataaatcatggcttattcaacagccagtttattatcctgctttcaaccattagtcttttattgttagttttgctcctacttgcccctagggatttgcagttagtaagagtgacagacatcaaaatgttgagaggagtttacgatgtttcctcattcaagttttcaatttataaatcctatatgtgtagttaaaattaattttagacaacaaaagagttgtgaaaggcaaacatgcctatgtaaatttttccttttcatgggaatatgcctatgtaagttaatcaggactatccaacagtttatgtgaccggtggattaacatttgttttcctcagaaaatgtcaactctattggtaattcggcttgcgtttcagagtcttggggccatct

SEQ ID NO: 77218 - DNA, 830 bp, Carica papaya
  Intron number 3 from transcript evm.model.supercontig_824. 4 (locus evm.TU.supercontig_824.4) derived from phytozome v7.0 (chr-ID supercontig_824; pos 16819 to 17648)
gcctaggatcacagcttatgtatctaactatctgttcataattgatatatttatttagttgttttctttaatgcgattaaaagattgattgattagagttctgactttttcaggaaagatcgaacatcttgttccgctttgctgatttgcaacgatgagatcgcatggcttgaggcatttgaacaggctgctaaaattaaaatgcctatcattattcgcttaatccgatactaggcaggtaaaaaaatgtagaaattaagattagtaatttatcaaaatgataaaaaaacaagttattctaaagaaaaaattatataattttttttaatatagaatgcatatattcattaattataattgtaattctaatataatagaaataatttttaaataaaaatgcatataaaaatataacgtaactcaaaattacaaacattatttcttttaatgttggaattttatgaataaaagaagatggtaagttgtacagataatttaatttgtaacatttgaaaactttttcaggttgggcagattaaattcatggtttaacagttccaagtgatggtcggcatcaagtgcagactcttcgtgaaccaataggccaaatcattccattgaattttcctcttatgatgtttacatggaaaatagctcctgcattagcttagtggaaataccattgtgcttaaaacagctgatcagattcccttgtgtgctttatatgtctcaaatcttctccatgaggcttttttttgaataaattatgacttgttttcaaatggggagattttgtttgtggcaggctggtcttcctcctggtgttttaa

SEQ ID NO: 77219 - DNA, 660 bp, Carica papaya
  Intron number 2 from transcript evm.model.supercontig_91.8 3 (locus evm.TU.supercontig_91.83) derived from phytozome v7.0 (chr-ID supercontig_91; pos 936839 to 937498 reverse strand)
ttcaagctcgttctcggagaaaatctcaaatacaggtggtttacttatacatgccttgcgtttttaaagtttaggttatacgtgttgtagagcaagtgttaatttagttagaataggatggagattctatcttcggaaatgacaattaacacactattattactccacaaacatgattttacgtattttgtgctagatttaactattttgtatttgcgatagaggagagaatgaagcttcttccagctttttggggcctgaatacgctgacttttatttttgataggcacgttagcagtaactttggtaattaagttgatgtccccactcatgtcttatatgtcattttactgtatagaacttattatgtagtcagtagagattgtagtactattaatcatgggcgtgcttttttttttgtggtattagggagaacttttcaactagtatacagagtagtatatattgattgaagtgagattacatcctttaacaccctccttcagatggaaccattgttgagttggtcattattttgtttttgaggagaactattttgttttgaggatgaaaaaggacagtaattatagtggaatcttctagctttatctattttttacatgaggtgtatatgtacagctgctgttacttcggggacaa

SEQ ID NO: 77220 - DNA, 681 bp, Carica papaya
  Intron number 1 from transcript evm.model.supercontig_81.1 1 (locus evm.TU.supercontig_81.11) derived from phytozome v7.0 (chr-ID supercontig_81; pos 54182 to 54862)
tccaccggatccgccaccgacgctaatcctcacaggtacgttccccaatttgttttattcatttccgtttttattatgattttaatttgtgggttctgctatattttgcatggtcgtggttagtggtttgtggcaattagatttgaatgctattgtatttgctgaacagtgcgtgtaaggtgcatatattttttcttccttcttttttattgttttaattactgctccgttcgttttctgttttcgtgttttgaagagtacctttgagtttacaacatattggtttttcgtttcaatttgaatttccaacatgtttatttatctatttattcgtttacttatgataattatcttgataaatatgaaggacatgctagtcatattgtattggcatttcagttagttctagaaatgcggcttttcttcatataaatgcagtttagttgagttaccattgagactgtataggctttggcaaacaaagaatttctcatatgatttgcttctgttgtgaaactcgtggaagtttgtacgttttgggtttgcaagtataggaatttatatttagctggggttccttttcgatgtttccgtgcagtgtgttttgagcaaggttcaatatctagttgttccatttacatgcccatcggtttccttggttgtttttcagtgtggagttta

SEQ ID NO: 77221 - DNA, 898 bp, Carica papaya
  Intron number 1 from transcript evm.model.supercontig_95.5 9 (locus evm.TU.supercontig_95.59) derived from phytozome v7.0 (chr-ID supercontig_95; pos 1074881 to 1075778 revers e strand)
gctcgggtgtatcttttaagatggaattttactaataaactaaataacaaaataacaataaatatgaagtaataacaagattatcagaaataataataattactaaaaaataattaaaagtttaataaaataaaataaaacttaatagaaaaatagccaattgatggttttattgtaatttggcgcaattcacatattatcacccggcggtgacgctgacgctgactctcactcgcatactcctagttctaaaaagattgaattacctaacaacaaatcatttaaaagacattgaatcatctttacttttttagacacttaaataaactagattaggattctttaatatgtggataatatgttaatttggtgttaacggataacatgtgggtatatgatagaagaaacaaattcaatcaactcaacaaaaaagtcaaaggtggtggcttagttaacaattattaatataattaattgtaattaaatattaattaattgtaatcaatttaattatatctactgtataaatattcaacaacccaaaaaagacacatgtaggcactatttttaagttttaaatcaatgactgcgttttttttctagaatttgtgaactttgccgctgatcttgaatatacactctcaaattgaagcggaaaattccagaacctagtaacatgcaagagagctgagaaggagtcaacacgccaaaaacaaaaagtcaacctttttttactctaaacacaaaactccattttcagacgcgtacttaataggtttattacccaatagatttctctctctttctactccaaatatcataaacatctccattggactcatgcaataactttcatatcattcttaattctctgccaaggctatctgatccaccgacg

SEQ ID NO: 77222 - DNA, 559 bp, Carica papaya
  Intron number 1 from transcript evm.TU.contig_36043.1 (loc us evm.TU.contig_36043) derived from phytozome v7.0 (chr-I D contig_36043; pos 421 to 979 reverse strand)
caatccctccacttcaggttcttatctgttacttctttcactttttcttttttaaatatccattttctttttaatctccgtttcgtttccgaggaagttagtggacaatgagtcaattttatgtctccgggtggctcccatgagtctaggagaagtgctgtatggtctgcattttttttaattatttctaaagagatattgctttagttttttgagtttcggatgtaattgacgttcggatgcaaatgctttaagctgaaagacttttatttagatctgcttctacattttggttgttcaaaaatttttaaatctggtaaatctgaaggaggcactttgctaaagtgtaactcgcactgtcttggtcagtgctggggatggatttttcttcaagcacaacttcagcctattctttcttttttttttcttcttattataaatttaatgggatccaaatgagggcgctgggggcatttttgggtcaacgtagatctggttatgtaatttttacgcttactttttaaatgttctacttcaccgtggaattgcaaacaggact

SEQ ID NO: 77223 - DNA, 763 bp, Carica papaya
  Intron number 1 from transcript evm.model.supercontig_84.5 4 (locus evm.TU.supercontig_84.54) derived from phytozome v7.0 (chr-ID supercontig_84; pos 449004 to 449766 reverse strand)
tggagatttgcaggtctagattcttgtcattggaggtatgatgtacatgatgtgtttctagtttgttagattgttattttttttaatgtaaccttcctatgttacatggtgcacattcctatgttgctttttttgtttttttttttgagctaattctttcttttcatctctgtgcaaattcttgcatgcttattcatctaaatgaaacactttttttttttctctctttcaatttcataactccagaagcctttgatttttcttaagttttcattatcttgtattgcaattttgacaaggtgattaacagtttagttgtgcaaaaatgttataatttgtttctgaatcagtcttgaaagatagaatagaacatataaaactagaaagttctgaaaagaatcttatatgtgtgtaccactgaaaaacctgcttccgtatgtaccatctaatcaatttgttaatggtaactttttctaagaaatatctaaagttagttcttcaccattaggaagagtttagtcttgtaggacgcaagtctcataatttggaatgactctaaggaattttcaatttattctctttaatataggtattgaattttgtaactgattaactaactcgtgatagtgctgaggtatgctttgcagcttgcatttgctaagaaaatcttactaggaatagtggaagattgtaggccatggatctgatagtctggattattctatttgactttctaatttatttactttgatacaggtattga

SEQ ID NO: 77224 - DNA, 755 bp, Carica papaya
  Intron number 3 from transcript evm.model.supercontig_8.13 9 (locus evm.TU.supercontig_8.139) derived from phytozome v7.0 (chr-ID supercontig_8; pos 980376 to 981130)
tgatatcatcagaattcctaaaagcaaatgttagtactaaatagctcatttcttgtctggcatctctgcaagtctaaaatcaaatgttactgatatacaactagttattacatggatatccttatcaaaagcattagacattggtcaaatgctatctgcactatgcaattgatattaactaaaattatctcttcgacttacagtttgcctgacaatatacagatggtaatggatgcctttttgttatcatgtcaaaggaacttttattatccatgacaataatatatgtaaatttatgatttggttcgccacatttccagtcaaaggtaactatgccaaccttcaaaacaattatttgttaaatgtgtttggcatttgtttaaatactatcatatatagacccagaccgttcaacattttttaaatttttccttatgaacttaatttgaaccttaagtgctttttgttgggtaaatacaaaacagcttgttctcacagttcaaagaataaggtactttagcatcaatcattgttgggcacagtgtagttttcccattattgcctgggtcattaatttttaatagaatatgtctcttctactcttaaccatacttctgtcactaattaaagaattctgattttattcctttggctacttgcttactcttctacttttcaaatatcttgtttattgcccccattatgttcttcactcaatgcgtaggagcgcaaggaatcacttgaagaaatttttc

SEQ ID NO: 77225 - DNA, 984 bp, Carica papaya
  Intron number 1 from transcript evm.model.supercontig_94.8 0 (locus evm.TU.supercontig_94.80) derived from phytozome v7.0 (chr-ID supercontig_94; pos 1081921 to 1082904 revers e strand)
tcgttgctcaccttcgcgacaacaacctcactcaggcaagctatttctgtctactactacctgtgcgttactcgtatattccccttatatatatgcttagatattcatgcaagaagaaatgtggcattgtttgaattggaaatcagaaatgcagacattttggatcagttcggttacctttctttgagtttcaattagaacaaaacaagaaattaaaaggaaaaccttctttagtttaattcatgagaaggtgaacgaccggtcttttgacttgtcacggatttttttttctcttgctgttttcgtttgtataaagaattttaccaactagggtagccgttgaagtgggcatatgatacccatattgagtgttaagttttatgaaataataaccggggttttaactgagatttttgggtagtagtaaatgttccttctgtggggtattttggtatgctttcttgatcattgtttgaacagtcgggttttcattacgagtgtggttaccggctcaagttaagagaaacaattatgagggtaattaaatatttcacacaagaggaattcgcaaatgaatacacccgtgaatcgtgaagtgtagctaaggtagtccttgcccttccctttcttcagccaaaagaaaacagctgtcaactaataaagttgaaatgtccaaaacttaaaccaatagagaatgagaatcggttgtttatatatgtaaaattttcttaacctgcggatctgctaagctgaacgcgtatatcaagtgctaatatcaattaacaaaaatggaacaaacatccggattcaaaatagtagacttttagctccaataccatataaaataatagagttgaatgagtttttttagaagctcaaattcatagtagtatattcacaagaccagaacttattcttttattttccttctgtagtttcttggcgcctattgatgttgcttcaaatgaaccttttaggctgcaa

SEQ ID NO: 77226 - DNA, 1035 bp, Carica papaya
  Intron number 1 from transcript evm.model.supercontig_84.9 1 (locus evm.TU.supercontig_84.91) derived from phytozome v7.0 (chr-ID supercontig_84; pos 693347 to 694381)
cgatcggagcgaggccgagtgcctggattttcaaggtgagtaaactcggtttccttcatcctcgagttgcagatctgacttttgtgtttgactcttctgcacacgacttttctctcagacaccgcaaattttcatttgttttcctctcacacgtcagcagtcagatacacgtgtcgtaacttttaattttcattttaatattccttctatttcattttattttatttttttgtcctctctattttttaaattctattttcttattagtaaaattattaatttttctattaatcataaatattaaaaaaaaaaaaaacaattagtgtaatttaatccaattaatttttgtttcatcccatgaatttagagaagaattagcttcctataaatgtcatatacgtgtgacataaattatagtcgttattaattcgacaataactatggtccgtagacttttgatatgttatgattgatagatattttttttcaatatacatacacatacatatatatatatatatatacacacacacaccctttttgattaaccgtgatgcatgcttgtccaatatgagttattgatcacatcacatggataatgccacaatgatggaaaggatgccattgtaggattcacgtatctaaattagtgactttatagaagctaaattggtgccgcatatgtagcacgagttatatatatatatatatacacacacacacacacatacatatacatatttatatatcagtgtacgtatatacacacacttggcccactatttgctatgtttagtgccttcatcccaacttttctccttttatcaaccatgtttaacttaatgtagcctacattttttatttagggttcttcaaatttgtaatagattatcatccaagttcaataattaatatttattgtgttgaactaggatatctactttcatggtactaaacttatacaatcttgtcccatgaatcttgtatcttgttgttaaaacattccatttctgtgcagcttcgaggactacgagg

SEQ ID NO: 77227 - DNA, 844 bp, Carica papaya
  Intron number 2 from transcript evm.model.supercontig_8.9 (locus evm.TU.supercontig_8.9) derived from phytozome v7.0 (chr-ID supercontig_8; pos 111577 to 112420 reverse stran d)
tgggatattataggcgagcacgttttctgttagaggtgagcttagcttggatgttgttattttgtctgtatttttctttctcttgtttgacgcttcattttgggatactttgctgttaaattgggtgagagaacatttttaagttcttacaaattgcaatttggttcacgttccatcaatcacatgaatcttgtttacatttaagtcttaaggaggttttggaaacgatgtactaagtcttagatttgcttctagtatgcattgttattattattcagttaaggtttttccgtttctttttattttagtttgaattgcacctcaaggatttgaaactgttgacatatttatcaaggaacattggaagttgcacttgtgatcatgtttgtgaatgatataagtgactaaagtagctttagaaaatgggattttcatagccaattgctatttttggcgagtacataggccgtggctctatttggactgagtgctgtagctccaaatatagtataagaatcatcagagtgttttactagttatgcttattgtatgggtaactaagagtcctgtattaatttgacttatatttccatgtactctggcatatgaagggtgatatatttctccatttctatttcccttggttatatcacagaatgtacaactagattgccaaatctagagaagggaatgagcgaagaaaatgtggaacttgttatctttatctggaaaagcctgaaattacttaacaataactctttcttgatggtagtcattcttctatttttaaaatgaatattccctgatctttttgcttctttgatcatgctgttagggagcaaaa

SEQ ID NO: 77228 - DNA, 311 bp, Carica papaya
  Intron number 3 from transcript evm.model.supercontig_954. 3 (locus evm.TU.supercontig_954.3) derived from phytozome v7.0 (chr-ID supercontig_954; pos 15567 to 15877)
tgaaactggagattttcttcaaccttgtattgaaggtgctcattcttttttttttcctgccattatcattcctaatttccctccttttaaatcccacaaagaggactgtgattcggattttcttcactatgcaaattatctttggtcaattagcttgaattaatttagattcttagttgtgattcttgggatgttatatcaaagagtagccctatgagatgtgggaacaatgtgtgtaacttttctctctttgttgtttgttttattattggttagccgcgctcaatttgggttgcacgccgagaagagcc

SEQ ID NO: 77229 - DNA, 320 bp, Carica papaya; identical to SEQ ID NO: 77099
  Intron number 1 from transcript evm.TU.contig_45024.1 (loc us evm.TU.contig_45024) derived from phytozome v7.0 (chr-I D contig_45024; pos 1021 to 1340 reverse strand)

SEQ ID NO: 77230 - DNA, 898 bp, Carica papaya
  Intron number 1 from transcript evm.model.supercontig_62.1 51 (locus evm.TU.supercontig_62.151) derived from phytozom e v7.0 (chr-ID supercontig_62; pos 928162 to 929059)
ctcttcgggctcgacagcttgtaagaaatctcttgctctaaacccatcatggtgtctcctttgcttttctctgtttggatgctaggcacttcaggaatcaactgggcaatgttaatctggataggattttgtgcttacaatctgttaattcattgttttcctgatactgaacatagcacaaataactagcaattgtgtgttcctttctcctcttatttggttgggccgtacgatttgctacaaggggattcgtgtgctttatttcattttcccttcgccttcataatttatcggcaacagaagtgggttgatggggtagagatttaggtaaagtccccgggcttaatcccttgtcttgaaacggaaaagaacatggaattcatacggttaaaggtttaggatacatgttcagacagcaaacttaaactgacaaaatattaaaattctagggttctgattttctagctcttgggtacatattccatactctttagtacgcaatgggggcaagcccaagtctaacgtttattccgttggttttgctttctcttccctttcttttggatgaactattgtatttggcgttgtttcttattcctcgaattttttttcttttatgttatttagcagaagaatctgtgttttaccctatgcttttcagtaaccattgtttttacaacctttgacaccattatcacaactggcatgctctttatcacaatatttgccaccacagacgttactgattgtaaaattcttagggtttatttatttatccctatccattagcttttggtctgccgtgtgttgtgcaaatttcttatttgttatttgtctattcatttctactatgatttccgtaggctgtttcagggcaagcattacagtgttctcccaa

SEQ ID NO: 77231 - DNA, 872 bp, Carica papaya
  Intron number 2 from transcript evm.model.supercontig_92.5 3 (locus evm.TU.supercontig_92.53) derived from phytozome v7.0 (chr-ID supercontig_92; pos 484047 to 484918 reverse strand)
cggccatcttttcagctcttttctgagtatcagaggtaatggcttgtctgttgtactacaattataagtaattgtaagaaattaaattaaactaaatgcagctgacatgtggtatgatttttgcaaagatcttggctcatatttttactggttgagcttgctaataagtaccatttcacatcgaactagacttagatagttctcacctgtaaaaacatttagaacacttgttggctgagtagaacctgacagttttcttgaaattctctaatatggaaaagtgctgaattttgttatggcttatcttttgctctttcactttgatttaattgctgagtagatcctgacagttttcggaatgttagatgagcaattttttcagtgtgttttcatttgttcttatgttcatatgtgaacagtttatttacacgttttgggcctgttgcattgctgcctcattgtttgctgcccttctatgagaaaattgagtacggcactatcttccttgtctctcgccttatgaaatctttcctatcgacaattaggtgacttttcatgacagaacttaatttggttcaacctttgtaagccctactccagacttcaggacttgtctgcatgaatttcttcccgaggaataatgacatactctggatcttttgaggaccctccttcaataatcatgtttccaggatcatgctgagtgcagccatccaaggggttggttactaaatgctgccacaccagtgcagctagctagctaacggggatagtttgtctcctcattgagtagctgtatttgcaaggaatcgcatattctgaatgtcggattttttaacatattttggcttacaggtttttccgcattgtgc

SEQ ID NO: 77232 - DNA, 819 bp, Carica papaya
  Intron number 1 from transcript evm.model.supercontig_71.1 3 (locus evm.TU.supercontig_71.13) derived from phytozome v7.0 (chr-ID supercontig_71; pos 231998 to 232816)
agggattggtggtctgcttttcggctacgatacaggtgacgtaaatgtaaaccccactttatttaaatctctttttactccttggtgtttgtatgggtactttatgtgcttagaagaatggggttagattaagatcaaactaatttgatgttgtttgatgtctgagtcgatgctttatcagtcgctgaattttacaatttggtttctttttcttctgtttttctctttttatgatttaaatatttctgtcttatgtttctcttttcattcgttatagtcctaattctgtaagtaatccccaaatgtgaaacatgttcttatcgtgtggcgctatgtgtggaggatttccttgaattgtggatttgcccttttatctggtttaaggaacttttgtttatctagaaattattagacaaaacgagtcctcatgattccccgaagttaggttatcaaatcatcccaaacccgatattccaggaacccatcatagttatcttgaagaacaaatgtcttagacagcaacagttaaagtcgattaattctgaacaagtagggatgaaagaatacaaacatttcacatggatttataaagacgataaaaagtggcaaataaaaaatgcagactggatagttggaatctggatcttcttaggattagagtttcttttccggcatttctagctgttttttccttgaaaaatatgtgaattttgaacttgattggaatttatggataatgtttgtaaagttactttaactccacctgactttctcggtcttgtaggtgtaatttcgggtgcccttctgtatataaaagat

SEQ ID NO: 77233 - DNA, 805 bp, Carica papaya
  Intron number 2 from transcript evm.model.supercontig_9.10 6 (locus evm.TU.supercontig_9.106) derived from phytozome v7.0 (chr-ID supercontig_9; pos 565787 to 566591)
gggttaagtatttgatttcaattcatttgttcgtttttggttttattgagaattttcttttttgtgggtgtcttttcataaatactacaaatttatagtttttttaatctttactgcgttaagtaatcacgaattattgagcttctttgcccgttgcttagaatgttagtctgccatagctttgcttatggtttatttctaatatcatgtctgtcgtttttccttttcaccggctgaagttaattaggaaatttgaagtgcaaaagctgctatagggacaggacgatttatagtggggctattcctgtccgtccaattactgttttttggtttgttcgaagtcgagttccttcatttcaacaatggaactgcattgaaattggctaatttgatataatggattgagaatgaatagatatggttgcagtaagtgaagaaacgggagtggttttctgtctgtgttgtcccatttttttttttttgaagaaattaagcttcatggaagggttgtagtgttaattttcattgctgagcatatcaatagtctccgggggagttcttctcttgtgtaatagtggattttagtggttaagttcccctctttctctactcaacacagtggcctcctcaagagatatgtatatatatatatatatattattttttttttttttctggctaatgaaattgcttggaataaaaacacaagtgttcaattttgttggtttatctgacacccccctctgccccccctttttttatatttccaggtgtgtcctgtttgcgcgaaaagggtgggagcaga

SEQ ID NO: 77234 - DNA, 641 bp, Carica papaya
  Intron number 3 from transcript evm.model.supercontig_78.7 6 (locus evm.TU.supercontig_78.76) derived from phytozome v7.0 (chr-ID supercontig_78; pos 907369 to 908009 reverse strand)
tcagcgtttcaaaggaaagaactggaaaaagataggtatgcttttagtataattatcttctttctgtaccaccaaattatggaataacactagtttagatctttgattgtacttatttctttatcaatgtttatgtttctttaattatgaaattccacatttgtcactctttccattttatttgattttcttgtaagtaaggtccttaatttagcttttaaaatcttcgtaaatagtcattattgattctttcgggtaatttgaaaagaaaggtagaaaaactttttagggaatgaaggttttgccttgtgtacagaggtagatgtgtagtcacacatactcttttaggcagatgggtgagttggtatagagcaagagaattttctagaggtcactgatttcttcttctccacaatgaaacatttgtatttggcaccccctcagtgccttccaaagttttttttttttctttccattttagctagtgatggtcctattattaaagtcactgcattccatgaatattttacagccactatttttcaagcacaaagtagtacttaaactggtggcttcatttctcattatgaattagcattgtaaacatatggtctgattgtaattggaccacttccagcgga

SEQ ID NO: 77235 - DNA, 624 bp, Carica papaya
  Intron number 1 from transcript evm.model.supercontig_78.7 6 (locus evm.TU.supercontig_78.76) derived from phytozome v7.0 (chr-ID supercontig_78; pos 908264 to 908887 reverse strand)
ggtatgctctaaaagaaaaatccagaatacacagaaaatatggtatattatggagataaaaacgattgattattgtgattatgtacattgttagtatgcatttgctctttctatatgtttaagcacttacaactagtgttcaatagatagaccgatgcaagtagtgatgtgcatatttttcactcctttacctaaatacaactgaaggttttggtacttaataaattttcttcataatagtcaaaacatagatttgtgttgttcttatggttcaacagtgtttaagggggttaacttagaagttgaaaagaactatagagaaataatttttactactatttttcttgtgtccatgactgaaacttcccaatagttataattgacgtatcttcaatataattaaccttgaccagaatttgtttctacaattgcatcgtaggctgctaatattgtgctctatcttgtgttctgtctttcaatcaatgacatttctttgtgattgttatcatggattatgtgcgcgtttattgagcacatggcctctactctatctagaactgattttgaataacattttcgacatttttaggagaactagtggcccaacaagacgttctactaagg

SEQ ID NO: 77236 - DNA, 620 bp, Carica papaya
  Intron number 1 from transcript evm.model.supercontig_8.29 7 (locus evm.TU.supercontig_8.297) derived from phytozome v7.0 (chr-ID supercontig_8; pos 2229187 to 2229806 reverse strand)
gcacttgctgcagaagacacaatctggggctattggtaaagaaatttgattgccacctcgaatctttttttttttccaagtcactctgtcattgaaagagaggaaattcagactataaaatatattttgaatggatttcatgctctacaggataattggctttttgaatttgatatgtaaaaagaattttaaattcagttacacttaaataaaactttattgtttatttgctccaaataaagctttaaattccttgtggtaaacctgaaaaaagaggaaaatagaaggataggatgttacaaggaaatatttcataattggtagctcctaaattagtatatgtttatacatgaaaacatgtatagtgttatgtctgtttggtagtaaagtaaattaaaaaaagggtatctgaaatatgcatagacatatgtttgggtagaaaatgaaaactagaaaatgtatctgtgtaccaaatgtaactaagtctttatcttattcttggatgtactcttgtgtaataatatcattccttagatattcttgtatgatgtgagacgctggcagtaactttataaatctgttatttcttttctccagtctctcttttgggtctagccata

SEQ ID NO: 77237 - DNA, 663 bp, Carica papaya
  Intron number 1 from transcript evm.model.supercontig_92.7 3 (locus evm.TU.supercontig_92.73) derived from phytozome v7.0 (chr-ID supercontig_92; pos 610012 to 610674 reverse strand)
ttcaagaccgattgttccccaacaagcaacaagaggtgattttcttattctcatcttctcgatcggttttctagacgtcagttcaatcgtttaggcttctctcttctattggttctcgtttttcttactttagtttctagaaatacatgaatgggtttacgatgttctctctttcatgggttttgttgatcgtttgtaagatcgagaatctggaaggactgatcttggatttccaagggttttgcttgggtttctgtctcaatacccatttgatcgtccgatatgattttccgatgctctatttcattcagatctacagtgataatcaattaatttttttttttcaagtttttgcttatgggttttcataatccaggatttgattaatgatgttaatgggtttttagattcgagatcttcaacttgtttttgtaactcatattattagaatatcgatcaactgttccattgaacgatcattaatcttttactcagtttacaaccgaacaaaatgtgggtttggtttaatttttgagactgtttcttgggattactttcttgatttgaataaacagtatttctttaacgaaccttgttctcttcctcaatgaacttgcttctctaataggtgaggcagatttaggaggagcaggaaagcagcag

SEQ ID NO: 77238 - DNA, 526 bp, Carica papaya
  Intron number 1 from transcript evm.TU.contig_26180.2 (loc us evm.TU.contig_26180) derived from phytozome v7.0 (chr-I D contig_26180; pos 8227 to 8752)
tgctttttctttcactaaggaaactcttggtggtaaggaaaagatttgatattgtctgagaagttcaattctagatattctcagattttttgagaatgggtgagagccaatttgctcttttgattgtgaaatatcgcttttttgattttttgggttataagccacaagactctgagatgggtttgttgggataagatcaatttctgtcaattcggttggcagaaatagatggatgcagttcttggagttgagggaaaggaataaagaaggatcccaaaagtgttcatcccacagggcacttaagttgatgggtacgtggaattccttcttgctgttgtgcaggtttgtgatccaagtgtggaaaaatggaagaaagagatcaagacgatcccttctgatttgaagatgatgtccaattgattgggtgagcagcaatgcactcccattttagtgggtctaaaaggagttttcttttgtcctaagtgcgaccatcagatgactcttaatgttcaaatcttcaggaggt

SEQ ID NO: 77239 - DNA, 563 bp, Carica papaya
  Intron number 3 from transcript evm.model.supercontig_87.1 9 (locus evm.TU.supercontig_87.19) derived from phytozome v7.0 (chr-ID supercontig_87; pos 119449 to 120011 reverse strand)
tagcgtttcatattccgctatcaaacgttttcgtggtttctaagtatccttgttcgctgtatgttacgattgctttcgaagccttctgcattttaatattctctgggaatgtctctgtttggctgcttcccaaattttttattggtggaggaggtaggtgtgctgagattggcgaaggagctacatttcgagtcgtcgatgaccttcttaattttttttcttgactgtactagtcttcgttggttttggttttacaagtcgtagataacgtaagaatgctgcatgtaattttctctctttgacgagataatagttcctatgctcgatcaagttattcaaacttcgcctactggaattgaaattacttttattcggttctcgtctttaatttgcacttgttggtaaagagtaggtttattttccgccagtctttgtgtctgcttcagtttgcatctaagtaaacaatttgttgcaattgtatgtccgtttttctatttttaataatcatagttgtgtttaatatctcagtgcatcatattcagtctgattcccggtccaatcgt

SEQ ID NO: 77240 - DNA, 855 bp, Carica papaya
  Intron number 1 from transcript evm.model.supercontig_9.35 4 (locus evm.TU.supercontig_9.354) derived from phytozome v7.0 (chr-ID supercontig_9; pos 2458272 to 2459126)
aggtgggatgctttttcccaaggatttatttatgctgtcatgttactgattaaagtaaagaattgttttttggagatagaccaattcttaaaatatttttcttgatttatcttgaaaaaatttacatgaatgattaaaacatgttttaataaaaaaatttaatgaaaatatcaattgcatccttctcttcttttaacagtaattctgtatttgtaacgggcaccaattgacatagatactttttgccccatttcttaaagtttatttgtgagtttgcaacaagtattgatgtttgaccctccattataatgcttgcactaaagtctctagctagttctgtatataacatgacaagtttactgcaataggaaaggaaacaattggtaaaaaggggagaagaaaggaacgaacacggctatgttggcagtgggggaggagtggagtccataaagcagtaaattcttatttaaagaataaaaagttattctttcaaataaatcaaaaactatttgaaataaaatgttgataaccataaagaattattttaaaaaataataaaaatctgtatttatttatctataaatagtgaagtccataaaggggtcctccatatttttcatgcttagatggaagatgtgggtaaaatataaattatagaatttcaatactgctgattcctatttgactaccgctccgaaaaaacaagtgctttctttctgcctttggaagaggaaaagcttctgagtgcattattgcaccttgttgtcaccatgtaaaccattaaatttttttcataccttcatgaaaaaatatgtgcatgtatatctcactagataactcttattagatatcacc

SEQ ID NO: 77241 - DNA, 459 bp, Carica papaya
  Intron number 2 from transcript evm.TU.contig_44694.1 (loc us evm.TU.contig_44694) derived from phytozome v7.0 (chr-I D contig_44694; pos 88 to 546 reverse strand)
gggaattctttctgtaagttctcttcacctgaaagttcttgaatctccaaataactgtcttcatcttcaccaggctagacgagatgaaagaaaagaaatcttatatgtgaatggctatatttgtcatttagttatttggtttaatcatgggagcagaaagtaagatactacatcctgcattggtaaattcatacatcaaaattatggatcccaaaggtccttagaggatgctttgcccaacattatcttttgatgtaaaaattttaaccccagttaagagaaacttcagctgttggaatccaaacaacttcgactagacattttagtagtgtctgggttcgtagtagtctattgttaattttactgaaattacgtttcgtgcatgttttacccactatcccatcttttaacatggatatttatttctttctgaagattgctgcggcgtggaagccgttg

SEQ ID NO: 77242 - DNA, 770 bp, Carica papaya
  Intron number 2 from transcript evm.model.supercontig_87.8 8 (locus evm.TU.supercontig_87.88) derived from phytozome v7.0 (chr-ID supercontig_87; pos 569213 to 569982)
gacggtatgtttttcacgtttttttcagtctgtacttgttaaatatcatccgtaaaaacccaaccgttccccaaactgaggattttatcctggaactggaagcatcttggaggttttgtagagtttctaccaatgacaatgatggatctttatgaaataattgattgaggatgaatttacccaaatgtttaagctgatagtaaatgaacatctagtgtttatatatgaatgctcttactagtaaggctgctaggctgtagtgtgaatgagccacctagccatcatattttgtactgggttttgatttgcataaataaggctgcaactgattgaacgctagatttttgtgtccaacaccatattaaataagtaagttgaacagaaaagcttaaccaatcatatgacaagaatcatgcataatccaatccttattacaatttgatatgtaacaatatggctgccaagtgaatctctatgagtgaaggaatcagtatgagtgagaagtgatattacaattctgcatctctccagaaaatctctctacttttttaattttcatcactttgaatttcaaaaggtaaagtaccattcaaggaaattttcttacaaaaagtagtttacttttcttccatcattcttcttaagatctgagtggagtgcgagagttgtttaaaatatttcactaaatgctgctttatattgttgttagatataactgtttcttggtggaattagtttcttactgcctgtcgacgttgcagaaccactat

SEQ ID NO: 77243 - DNA, 235 bp, Carica papaya
  Intron number 1 from transcript evm.model.supercontig_7.41 (locus evm.TU.supercontig_7.41) derived from phytozome v7 .0 (chr-ID supercontig_7; pos 452059 to 452293 reverse str and)
ggggtgcttctcttgctcatcatttttctcgctcggtatttacagtctctgatttattttctcttaatcttttttcccccttctggtttagataatcaatgttcttttcctttttgattctctcagtcttgaatttttaggtatatggatttgcaattatgtagtaaatatgtggggcttaaaatgcagtttgttgtgatttttgaattggtttattggattggcatgaaggttg

SEQ ID NO: 77244 - DNA, 458 bp, Carica papaya
  Intron number 3 from transcript evm.model.supercontig_7.21 4 (locus evm.TU.supercontig_7.214) derived from phytozome v7.0 (chr-ID supercontig_7; pos 2151866 to 2152323)
atcttggtgcaataaaaaattggatagctcttcaggtggtttattgttttttttttccctcgtggcatagtgttttaagtagaattatttcttatctaaaggatattgtcattcagtttaccaactattagcaactcaacctaaattttatagactttaatgtcagttttgctatttctttataaattatatattatggatgtttctgtaaaaccaagttaccaagtcagttccaatgaaaagaaaacttacaagtcatttgaggagttcaactcattgcagatctcatttgagatggttcaattaagttgtggtttgggatgaaaacaggatggaagcacatcaaatggttttgaaatagttatcttggttgtttactgcacattgattaatcaaaattttcagtaagcttgtacgattttgatgcctattgtacttttctaatttgcagagtgcat

SEQ ID NO: 77245 - DNA, 697 bp, Carica papaya
  Intron number 1 from transcript evm.model.supercontig_9.62 (locus evm.TU.supercontig_9.62) derived from phytozome v7 .0 (chr-ID supercontig_9; pos 310848 to 311544)
aaacaggttatcttcaccaaactaagtacacttttctaaatatgtttgctcaatttttcagtacttttggttggataattgatacttgtatcattctctataatgatgtaggttcaagtcaagggttttgcttctggatatccttcttaggatattgtgttattactgattgtgatatcattgttgcattggtgtcatctaattagtgaaacatattaatttttacttaagaaaattttccataaagcacaacaagattgatggagaaacaattacatattggctgttaaatcagattatgtcgaaagtcaaacttactatgtaatattaggtttaattatatgacttttgagtctaaaccatcgaagcatatatttccagtatggaatgagagtattacacttagtagcttgagcatagtggtagttctttgttagccttgaacattactgaaagtgattcaccataacatgttcaatttggatgtactttggagttattcacaaaattccaacaagaagggtggccattccatattatggcaagcatatatgaaagaattttttgttaaatagataaacctcatttttgaggacgagagttgttgaatgctgatttttttattaaaaattagaaggcttctgagtgggcgtgtgattggaacagtgctgggctatcttggaaaagaaggtgggaa

SEQ ID NO: 77246 - DNA, 800 bp, Carica papaya
  Intron number 2 from transcript evm.model.supercontig_97.3 7 (locus evm.TU.supercontig_97.37) derived from phytozome v7.0 (chr-ID supercontig_97; pos 243808 to 244607 reverse strand)
ttgctgcttttgtattcctctctcaaacaaaccaggtgagggagattcatgattctgcagagtatgaatgtatgtacattgcacaaacttccatggctgtttgaaggtcttatgcaaaaataggttcatttaaaatagtggctttctttcacttaacccatcaggttggaagcttgttaaaagacaagtatttctggtttttgttctcattttccacttgaagtaagattagacaagacttctctccaaaattagactttaatcgctgctatttatgcaagacggctgcggaatcttgaccttttgtggtgcccgatggtgtatagcatttggtctatggtgtatagtctcttagggattagttgggtgattgcaggatcgatgagggatgagctcttggcttgggcagggatatgtaaaaagaaaaattatctttttcttattcctttatcttttttttttaggtgatttggaaagagatgaatgctagagcttttgaggggattgagggaaaaattgttaaatttagggataaatggatacatatttttcgttctttgattttgaatcatgacattatataggatagaaaatattgggaatgtcattgatttactaattgacttgtaaatatcttttatatggatagtacccctttggtaccattgtttatatttatgctatactcttcatatttcaaaagaaaaagtataacggtttcttgggtagttcatgcatagcactttctaagatcttctgtgccttcttgggcaggttgtagcatcagagctatcaactca

SEQ ID NO: 77247 - DNA, 829 bp, Carica papaya
  Intron number 1 from transcript evm.TU.contig_25278.1 (loc us evm.TU.contig_25278.1) derived from phytozome v7.0 (chr -ID contig_25278; pos 6413 to 7241)
tctaggaagtgcaaagactgatctattttacgagcgtaagaaatatggtttcaagaaaagatgaggattttgtacgaagaatcaactagtattctaaatcctgtagtgatgttccaaatatagagatctccaattcaaatgcaggagacttctcgtagacatctctattcatggtaattgttatgaactttgaatgatcagagtgtgatggtgactactgatagtctagcggatttagttatactcgagttacctctgcagttttccaaatgaaccatgcttggtgcattagatgtcacaattaaaatctttggtggttggacttattgtttccattattttgctttgccatttggattatcatttttgtgaaatgctgattgtggtgttcatgtttgttttctttattattaatcatgcttctttgcacaagtttacatatagtttgcttgtctttagggttgaagtccaaaggttagaccagattagagcttatggttagtgtttctttttccttgtcttatttgctattctttctggtgaataggaagagatcacttcctgctaccaaccgttgcctacaatcattatcaccttgtggccaggaagaggttccctgcataatctagcacaccgtggtcttgacattgccggataaagtgcatgttacaatccattacagatttttgtttttatcggcttcctatctgctacatagaagctcaatgtccgtcaaattgtaaagagtaaaattgtagagaatttccatcttctatgatacagagtagatatagttgaaaggccattagttttgcttgtttattttcag

SEQ ID NO: 77248 - DNA, 542 bp, Carica papaya
  Intron number 2 from transcript evm.model.supercontig_98.1 8 (locus evm.TU.supercontig_98.18) derived from phytozome v7.0 (chr-ID supercontig_98; pos 370545 to 371086 reverse strand)
tgcttgtggtttcccggctgcccgcaagaggaaatgtaaatatctctctctatatctctacctgtatgactatatatacacatataaacatttaactgtctggatttgtatttatgtgcttgtggataagtgtgttgatgatttgttgctgtttctgtatgatttgtcattcttgctgtcttggtctacatggaggcttgttttttggctggcatttagtttaatcagttgctcactgatcgatttaatgttgtatgttaatggtctttttttagctttatcaacaattttcaaatgtttatgtttttctgagcgattccacctctcaaattttgttttttacgtgcatgaatttgtttttatttttaattcctagttgtatgaagaaaagattgaatcatatcattttggcaagcgatgttcacattgtgttattaacttcatgaaattatgttcatgtttgtatctataagttgatctaagtacatgctttattcttggttttagacaactggagtgtgaaggcaattcgaaggaaaact

SEQ ID NO: 77249 - DNA, 621 bp, Carica papaya
  Intron number 1 from transcript evm.model.supercontig_75.4 6 (locus evm.TU.supercontig_75.46) derived from phytozome v7.0 (chr-ID supercontig_75; pos 451287 to 451907)
tcattcgcgttgcgccaagcaaggctatcgaggtagagttgttgagcaacctatatatgatttttatttggattttgatttgatataattcggtatgtttgaatccatgttgttctgataattatttgattatatctaccattgggtattcacgttgactagaaagctattgcacactctagttttgtgtttcatccttgcttgtaagtcttgtggcttgtggtcatgagacttctggattatcagcgttatagcttgagaaagttgatgtcttggaattaagctttttgccatcagtatgatcaaaagctttctttctactgccttattttatgttagtcagaaaatgctctagtatccatgacaagaaaacgattgattcatctttcattttggtatgcggatctaggcacttaaacctttgatttatgtcatgttaacaacaaaagttaatagaagactttgcattgaacagggttaaggttctttgccaaaaatccaattggaagtatcataagtttcattttttttgtttttgcatcataaacattgtgttaatcttatttgatactggttcattaaccgcatatacaatttttatcttcctacagttatttactt

SEQ ID NO: 77250 - DNA, 538 bp, Carica papaya
  Intron number 1 from transcript evm.model.supercontig_72.5 3 (locus evm.TU.supercontig_72.53) derived from phytozome v7.0 (chr-ID supercontig_72; pos 1107613 to 1108150)
acaagttatctggttattattttcctggattctttaatattccttgatttgttgaatttaggtttttttgttaaactttattctatctgaatgattaccgaagtaatatgaaattctttggctttttgggaactgaaaatgtgttaaattttgcgaagggtctctgttaggtttttcttttatccaattacagaaaatattctctaatggaaaattcatatgtttgtatattttctatttcgtttgaaactgatcggctttgagttagcatgaacagtagtaagaaagttcgcttttatttttgtagattttcaattttctgtttttgttgagatatttggccagtgctatactatcatcttctttctggtttaccttctatctataaaatgtattttcttgattttgctccaaagtttgtgtttttaatagcaattgctgatacatattcgatatactcttagtttaactttcgtttgatgttgttggcattgttttttgtcattactaggaaaacgtgtgatatctttggagtctg

SEQ ID NO: 77251 - DNA, 956 bp, Carica papaya
  Intron number 1 from transcript evm.model.supercontig_9.17 7 (locus evm.TU.supercontig_9.177) derived from phytozome v7.0 (chr-ID supercontig_9; pos 1104605 to 1105560 reverse strand)
tcttaagcaaaggcttgttgctgagtggccggcaggttatccatcttatctctccctcctttcattttcccgaaatggtcaaagtacgaaattacattttctgttatctggccactcttggagctgtgtcgattttgaggaccatttctataatcttcttcgatttgtcttcctatctgttatgcattttcaaataactaataggcacatgatgctcctgctgcggcctttgatctattttaaaattttaaagagtttgcatcttatggacataaattagactgttggcatgattgatagaggacaagtcaatattggaaaaaactgctaaaaatgcttatcttggctcaatctcattttattgaatgatgcaggccaaaaagacgagtttaataaattaatttgaatcagctgaaaagatcactgttagaattataagaacatgtatggctgacgaattttgtattgtcttatgaaaaaatgaatagtaacaggatttcatgtgtaaagatgaacagtgatgtagttaagccaataatattgcaaggaagttattttaatgaatattttaatgaatatttgaaaggaggggagttactggggttatcatttggagcaaatgaagtaattgaagtgctaaaactctggctttaagttttattttttcctatcttttgttgccatatggattctctttttcccttttgcctctctttgtctctcaactatctttctagtgtgactaaaagatctgaaattacaaggtattttctccttcctcttcttcctttttttttttttgtttttgaaggacatggttattgtgagttcacatggaatatatctaacctcatatcctcatctgagtggtttctattgctgcattttccaagttttttgaccatgttttctgcttcacagataaaacagtgtcaccaaagtcacaaaacgatctg

SEQ ID NO: 77252 - DNA, 696 bp, Carica papaya
  Intron number 2 from transcript evm.model.supercontig_73.7 9 (locus evm.TU.supercontig_73.79) derived from phytozome v7.0 (chr-ID supercontig_73; pos 1005859 to 1006554 revers e strand)
ttaagagatccattcctgaggcgacttctcttgaggtaacttttagcctttctccttttcagttaggtttagattgtttcggttgtggggcagtaaaatttccagaatgatgtaagtttgactgaataaatgcattaatggtcagtagtcttaagagtatgagaacaaatgcatgcacaacttgcaaggtgaaccttcaatttggtcgtttcccgaaatccatgtgtatatggtgtcttttttttcttttttactttttttaatttaaaaaaagaaatttattaaagaaaagtagaatataccaaaagacaagaggataagatatcccacaaccaaaaattaaagaaacaagaaatgcaacaaataatgtgaaaagccttaatacaattttttttttttttgatagaaaaagaagttctattaaaatgagggaaaataattacaaagaagagaataagacatcctccgtatcttgtcaatctataaagccttaatgcaagatatagatccaatccctatgcaaaatagataacggcattccattaaagaaacccttgagctttttctgcataaaggcattctgcaaaataaataataacaaagcatgcctgataatacaaagttctggttgttgtttgttttggtttctgtggtgatgcagattcctgttttgccgggctgtgttaacactatatt

SEQ ID NO: 77253 - DNA, 743 bp, Carica papaya
  Intron number 1 from transcript evm.model.supercontig_9.13 1 (locus evm.TU.supercontig_9.131) derived from phytozome v7.0 (chr-ID supercontig_9; pos 739909 to 740651)
catcacacggcggattctttcatctggtagtagctttctttttagaagcttctgatgagacctataactctatctataatatttggtacgaattatagtttaaaacttatgttttgaattttttcatattcaatacataagatttatttttaatagttcaaatgctgtctttgatcgttagtcatacattataatactcttagtttgaacataatgaatgagtttgaattttcataactttgacatttgaatgatacagattatattttctacaattaaagaaactaaaattgaaaaaaaaagaactaaatgataaaatttaaaatacaaatttttttttaaaaaaatctggattgaagaactttaagagagtttgtgtatgttaaaactaacacaacttttagttttttactttgcttttaattttgaaaaatttaaagctgagtaatttacatgtcaaactttttaaaatttaaaccattcatgtgttcaaactaacagtatttgttacctaactaacaaccaaatcacaagtattgaaactgttaaaaaataaattgtacatattgaatacaaaatgtgcctaatttaagtttccatatctggtcaatcattatatttcagaaaacatatactagtgctattagctttcacttctattgttattattggcagtttgacatgctcctttgtttcatgtactttcagagagaaggattgctgcattcctgagtgcaattgga

SEQ ID NO: 77254 - DNA, 717 bp, Carica papaya
  Intron number 1 from transcript evm.model.supercontig_97.2 2 (locus evm.TU.supercontig_97.22) derived from phytozome v7.0 (chr-ID supercontig_97; pos 153587 to 154303 reverse strand)
gtggaggaactcttcatatcaaggtgagagggcaatcggattttaacttcatacatctatttttgctcatacaatttccgttcttttcccatttcggttggttttgtccgtattttaagtatagtattacttacttttgaatattaaggcctgttttgatattttggttcataatgtcgatcttttgcgtgtttattcggttgttattatagaaatttggaggatatagtatctgggtaacggaaagttgcgggatgtgtagtatggaaatcggaaagtttgatacttttgcagaaagtctgggtttccttttgttgggtttgcgtattgataggtagtttatccaagttaaccatttagtttgttcaagtctagagaaattggtagttgtatttcagattcttagaatgtttttgctgaatatgagaactcttgtaacagctgccttcccttttcttgaagggataaccttcctgaacttcatttcaacttttggcgttctttttagtgacagttagtcgataattccagctttaatttgttgcatttcattgctaatcttcactattgagagtttatgtctaatgtgtttctatggagaaacatacttctagtgaacttgaagcaatttggagaactgggtttgttgaagttctgctcaaaattactcaaaatctctatctgtcttatccaggtcagcaaagcccacagtgggac

SEQ ID NO: 77255 - DNA, 716 bp, Carica papaya
  Intron number 1 from transcript evm.model.supercontig_9.32 6 (locus evm.TU.supercontig_9.326) derived from phytozome v7.0 (chr-ID supercontig_9; pos 2247643 to 2248358 reverse strand)
gaggagcaggcgatcctcgaggaaggtttgacaaagtaagtcttctgtcggctttaattgcgatttctggattttactcgaattcaacgttgttgtggagctttctttctttttttttttatttcttctcttgaacgatattttagcagcttgtgagttgtcctgaattttggagtttacaggattttgatcgaaatgcaattttgtaaggtaaaattttcgttcgttttagattatttaggtttctgtggagtaggtccaatcaggtgtttggcaatggcggaaattcaagttattattttagtttctttgttgtttgaacttaatttagttctctctggaatatttttatgattgtgttagtaggttctgaatgaaggttcattttttggttagattgctattggtttttcttgctttgtaggttgaagttgatgagctcttgtccaatattgctctgtattttagggtttaaatgtattatttcatatttgttcggctgtagtgctgaacttctgagttcccaaaatagtagttgtgtttcagtaatagctttactatctttttggatatttggaacttactattacataaccatacttattgtagaacttgattctatgccaatactggttcttgcatgtccagttcatgaaataatttttgagttttggtatttccttgcagatattcatccgaaccgagtgtaattcgtt

SEQ ID NO: 77256 - DNA, 697 bp, Carica papaya
  Intron number 2 from transcript evm.model.supercontig_928. 1 (locus evm.TU.supercontig_928.1) derived from phytozome v7.0 (chr-ID supercontig_928; pos 13563 to 14259)
ttttattgagagccaaaggagagacttttgaagaagtaagttggtttcaatctaaaagtttggaatttcttttcttggtgcctgaaatcaaatacatttgagttattgtttttagaagtactcttaagtatagtttgagtttaggattgcattatttagtttttttataagcataagtgttctttgctctgatatcatgaaatgtattagggatttaaaagtggctattaagggaaaaaataattattctaattcctactttctttttatctaactaatttacttaactgatctcttaatgttgtcttatattaacaatattaaacaatatatttaaagtaatgaaagtaataaaatatttattttttaaaataaatattttatgcaaatgtggataagaatttatcttttttgaatgagtgaaagcactctggtgctttttcacgtttatttcaacactggcaaagaacatatcaatattttcttaggtggactcagatagagaaatgtacttgttagtgtaaaaacatgaacaagggaggttctgataggagggatattgctaatggtaattgcagattttaacaggaaatgcaaacagcagcaatctctaatcaatataccattatcatttctttgtgaaaatgcaaatgattatccaattttatgttaacaggttgtgggattggcaagggct

SEQ ID NO: 77257 - DNA, 558 bp, Carica papaya
  Intron number 1 from transcript evm.model.supercontig_7.22 2 (locus evm.TU.supercontig_7.222) derived from phytozome v7.0 (chr-ID supercontig_7; pos 2242570 to 2243127 reverse strand)
atactgaaatcttggtaatctatttattcactcagtacgaaacatgtgcgtaaatgtttgtggacatttttaaatcttgttctcttatttttgtttatctcttacggatgttcttttttttggttgtaaacaagtacgggaaagaaaactgttgaatacttattttcttgtttttctttactggtgtgccgtacaagataatctgaatgtctgccctgccaagtttgattatgctgttagcagttgtttaatactgtttccgtcagcataaaatatttggagttagataagctataatgtatgaggaattggagcttcggattaaagtctgagtttccatcttcatcatgtttctaattgcttccacagccttcaagcttaaattaatccttcttcaccattagatgaaaaccaattaattactctattcattttcttctttgtcggccctggagagagacaaggatacgatgttgtgtgagatgattgaatgtttttgttctgattaaatggactctttctactctctatttgacctgattgtagagcatcgcggaa

SEQ ID NO: 77258 - DNA, 460 bp, Carica papaya
  Intron number 2 from transcript evm.model.supercontig_85.9 0 (locus evm.TU.supercontig_85.90) derived from phytozome v7.0 (chr-ID supercontig_85; pos 608276 to 608735)
aaaaatctcagctgttcttggaactgtacttatctgtaagatctctaccttctgcaaattatatttgttaattgcaattttggctcgcgttgattggtgtttcggcattttgaaatcttgtgacttgtttctgtgactatccaatatgttacacttcattttctaccttttgatatcaattattatttttttcaaggctattattatcttgtactttaggggtttcttcataattttaatttatttgcccttcaagtgtatttacatttggaatgccaaacccatgtaaatattatctaaaagaaccagtaatcacaacaaatatttgagttgctgtaaaaccaaagaacaggaggtttctattatttaattaattaaattatttatattttatcctaaaagatttttatattccaaatatgcaggtgcttacctattcatcaccttcttcccagagcaa

SEQ ID NO: 77259 - DNA, 1029 bp, Carica papaya
  Intron number 1 from transcript evm.model.supercontig_80.1 9 (locus evm.TU.supercontig_80.19) derived from phytozome v7.0 (chr-ID supercontig_80; pos 113345 to 114373 reverse strand)
cacgagtattccctacgggatgtgagtattctctcttgctttctttctttactttctgcaatcggcttcttgcatggagaatatatatatatatatatacacacactgtaattctttctttgatcttttacatatatatatatgtatcgtttctataatttcttcagtccgagttttcccatgccccgaatcgtaggcgtaattttttttttttttatgttatatacatgtgatactcttactttcttgaagttctttgatcagcttcttgcatcgtatggatgtagttatagtagttctttcttctttgtttgtatatatatttatatacatatacgtatgtttcttttatattatatttctcgcattgcaatcagcctcttgccatttgccactgagattcatgaatattcaagacttttgtgggaagatgctgagttcttgttccaggtcctcattagaaccatacagtacttgtccgccatcatcagctgctgcacacataaacttcaagattttattttcttgctctaatccttgtatgccatctgtttcttgtattgctgaaaaatatatatatatatatataggtgtaaaattagaactaatgtttcttttgtataatatatatatatatatatatatatatatattatattatattatatgaatcacttctataatctatcatctgaaggttcagattccatctccatcagtttccatgcatacgtttgcaagtcttttattacaatttcttgaatctgcatgaacgattcaaattttatttgtgaacaatgttgggagaaaatttaatttttctgttatatgtacacttttaatgctaatacgccaatattaatttgattacagtaatattaaatttctatattcattgctttatattttatattaaaaatattttttaaaagttttatttgaaattattatcaattttttaatatatatatgtaactttttttaatttacgcagtcagacgattacgtactctgcaaaattagaaacaa

SEQ ID NO: 77260 - DNA, 742 bp, Carica papaya
  Intron number 1 from transcript evm.TU.contig_40776.1 (loc us evm.TU.contig_40776) derived from phytozome v7.0 (chr-I D contig_40776; pos 572 to 1313 reverse strand)
agaggaggttctttgggctccaatatcatccagaagtaagtgggtttgatttggatatgcttcattttcacataatgggaaaattgattgggattcgggtttatgtattttttatttttgatgatatgttggtgattaacttgcttttggcgtgagctggaacaacgtagtgactgttgaccaattacaatcgtttatggtttatttcgttattttgcaactggtataacaaaatggcttctttatggcggcttcaatggcgtgccatacggttctcttgagtaggggacagaatgtgagatccgtttttttttttggctagtagtatgagatgaggatttcagtaattgggagtggagaggaggaatcttttaagaagataaattgtagtcttgccctgtgtctgatactcttcatggaaagcttgctacattctagttttgggagttaaagcttttcttcattgtagtttatattccatgattagattgtggcatgaaattatttgcagaattaagttcaaatcatttcagaagactgctgtagggtttttgtttctaaaaacgttatttatgtttgaagttcgaatcatttgctccagaattaatatcaaaaggagtagttccttttcttgtatgcttcttgttcatgtggaggtgtttatgaagtatttttaaattttaccatcatatatcattgccactttgaattttgtatataggtaacacattcacccggaggg

SEQ ID NO: 77261 - DNA, 348 bp, Carica papaya
  Intron number 1 from transcript evm.model.supercontig_9.17 (locus evm.TU.supercontig_9.17) derived from phytozome v7 .0 (chr-ID supercontig_9; pos 87733 to 88080 reverse stran d)
gcgatatctagtcccgtcactcccggtcaggtacttgctaagaggattcgcttttgctttatggcatcttgagcttcttttgctttagatcttctcttgattccgttgtgtttttgtttggtttgttgtcgttgttactgtcagttctgaatgtaatgtttttgttttttttttgtttttaatgattgttttgattgattcatgtgtgaatttccgtttggttttctgttttgttgttacaattatccttttttctatagataattcaagtttgtgtttgactcatcagccgctaaatgttgtgcgattgcaggtatcatttttgctcggagtcgtgccgataattgc

SEQ ID NO: 77262 - DNA, 584 bp, Carica papaya
  Intron number 1 from transcript evm.model.supercontig_87.1 0 (locus evm.TU.supercontig_87.10) derived from phytozome v7.0 (chr-ID supercontig_87; pos 37860 to 38443)
agtgccaaaaggacattcaagcttccaaattcaatgtgttatgtgccctaaattactctcacctatttttacactcacccatcagaaaaagatagctgctttccttttccttttgtgctttgattattacctctagctctgcagtgtgcttgctgctatcccaacaaagcatctgccaatttttcttctttccatgtttcttttgggtgaatgctaaaatttcttttctagtataagcttacctttgcctttattgtgttcaaaatgataatcccaaaatgggtattggtctgcatgcctaattcacttaaggttcttgatgagattgtgttgatgaaaggcttaagtattaagaaatttattatatttttgaatgaaaaataattctatactagttagattccttcagctatgaaatcgattttaaaaatcaaaaagtcttcttagatgaaaaagaaaaaatcatattcaattgctttgaaatttgaagggaagagagcttaaaattaaggaggtagacagaaaaagataagtacttacacacaaaacaatattataatatatatatatatatataaagggtt

SEQ ID NO: 77263 - DNA, 433 bp, Carica papaya
  Intron number 1 from transcript evm.model.supercontig_65.7 8 (locus evm.TU.supercontig_65.78) derived from phytozome v7.0 (chr-ID supercontig_65; pos 886104 to 886536 reverse strand)
cgagagttccggtaagttttcttataaatttgtttcacttccttttttcttttcaaatcttgatttctgagtttgttagtatcaaatcttgttaccagactagaatgtagaattgagatgtttgattatccatagggctaaggtaattcaaggtttacttactgtctgttgatgtagtttgattgtgaaaatattttgtatatataatgaagaatatactgtgcacatcttaggcattattttaggaggaaagtttgatattttgtccaggttttatccataaatataagcatacttgtctaactataattaaatcttatatcttttattggttcactatttatgttgtgtaattgtatgcatattaggaatttattttcttaacactgtcattgcaggtgaagaaaactaccttctccacttggttttggct

SEQ ID NO: 77264 - DNA, 932 bp, Carica papaya
  Intron number 2 from transcript evm.model.supercontig_9.38 3 (locus evm.TU.supercontig_9.383) derived from phytozome v7.0 (chr-ID supercontig_9; pos 2668159 to 2669090)
gcttctcattgcacaatcaagtaactgatttgaaggtaaaaatcgcagaaacaatttatacctcaatttggttcagccaataattccctatggttaacttatatggtgatcatacttctcatttttctattaaatcaggatttggcaaaactgatgttaattccaggttctcaatcaaattattttgagtttgagacacgatatatatatatatatatatatgttttgtacaatcttagggtaattccattcaagcactaaattggtacaaaatcatggtgaaatacaagaatacattttgatattgtttcttctcaagtactagttcattctcattactgatattttttattttttgtatgtttgaaatctgtcctgtttatattttttctagagtaagtggtaaaataaactgctatcatattaatgaacaatgtggattgactttatgtattgtgattgatgttcgtatgaatgttggccagttttaatatgtatatcatgattgtcaccaagttctggtaagtagacaacactgataccatatctactttagtgtttttccccataatcacaaatagttttagactagacatcttctgtttattgctacaattgtcaatgagtaaaaccttgctaaatgaggcttctttatcctgtcagggtcagatctctaagctgaatattagactacaaatgtgcaatctgtcggactctgcagatatttctttatatggggaggatgatcttcttcctagcaaaagcttaaaaaatttagctttggttttttcaattgctctcttgtcaatccccacctttattttcaagtacatatactatgtctcaagatcaagaaaatcggatattatttctgaagaagtttctctaaataagcagctagcatatcaagtggatctctttttatctgtcca

SEQ ID NO: 77265 - DNA, 791 bp, Carica papaya
  Intron number 1 from transcript evm.model.supercontig_7.25 4 (locus evm.TU.supercontig_7.254) derived from phytozome v7.0 (chr-ID supercontig_7; pos 2471540 to 2472330)
atagacataaaaaactgtgaacatttctcgattcggtgaggcctgctcctatctgcattatattcttgcttttctcaagttttacagaagcattgttagtgtcctccactgcatgtatgtctccttttgttgattctgttggtgtatgttcatgtgtgtagatagatagattctaaatcttccattcactagcatcatatgattaatataggcaatacgtatatatataagtactatataggttcattattttctccttaattgagaaggaatcattaatttgagcttgttttgatctcgttttaactccaaaaatttacatgcatgggcatgagcttctgctcacacttgttcaccccagttaacatccttgtacttatttcttgcccttttttttcatgtgcatgagcttgtgcatacagacttgtccccaccagtttacatgcttctctagtcttttgcttttttatttgaagagaatggatggtggatgtgcaaaattatgaatggtttacttggtagtcttttggtaacctatatattttactagttagataagtgaataatagtattgactcaaatgattttttaatcactagctaatctgcataatggataacgatgtgtgaaaagtgccaacttagaatggagaaagtgaacctataggggatctagttatctcagcaatcagagtgaagagttacactgggtttcttttccatgtaatagataatttttttttttctgtgagtgcagtggatacgtatcagaagttcgcaagagagactgga

SEQ ID NO: 77266 - DNA, 406 bp, Carica papaya
  Intron number 1 from transcript evm.model.supercontig_84.4 2 (locus evm.TU.supercontig_84.42) derived from phytozome v7.0 (chr-ID supercontig_84; pos 379752 to 380157 reverse strand)
ggatattgcgatctgctattcacagtttgctaactgttagctccttttctttctctacttttccatttgtttcctgagaaaataggcaaaatgcagaataagaattaactgataatacaaatatcaacccttttgcttaattaatcttagagaatgtcagacatggaaatccttttctttttctgttcagtttcttttcatttgaatccctatttcagatttgtttatacctgataattatccttctttgacataggacaaaagggtttttggctatttgtgttgacttgaatttccatacatcatttttcagattttttttggccaattgtgtttcttgactatttgttttttccttgtttggtgactgatttttagggtagaaagaaaatttctgaagggaaga

SEQ ID NO: 77267 - DNA, 688 bp, Carica papaya
  Intron number 2 from transcript evm.model.supercontig_9.37 2 (locus evm.TU.supercontig_9.372) derived from phytozome v7.0 (chr-ID supercontig_9; pos 2614445 to 2615132 reverse strand)
gtgggcagaccaagcccgtctttcacaagaaggtaaagatatagttcctaattccatttactgtctatttatgacttttggacaatgtagctagttacgaaacgaggtcggttgatgattatgattacgattattctgtctttgattcgtagtccctttcgattgccttcaactactagttatttgagctttccataaaatctggactctaagaagaaccagagtctttgtgattaataattttcagcagtctttgagtgtataatacatagattgccttcaactactgatcaattgctttagtcttttctataagtatttgatagtaccctttatctttagtttcatttctataggaatcttaaataagaatcataacaggtggagttgatgcttaaataaggaaataaaaaccatgttggtttttctaataagatgtcaatcaacctcagttgttaaaatctggtttgacgaagaatgttattgatctatgttaagtatgaaacattaacctgatatgctgtttgtgtttttgaaagttggactggaaaacgttgaattccacttgtcagaacttggcttgttctgccaaattattactgcttccattccatgtcttctctagaaattgctgatttcatttctttaaacaggccaagactaccaagaagattgtgttgaggcttca

SEQ ID NO: 77268 - DNA, 634 bp, Carica papaya
  Intron number 1 from transcript evm.model.supercontig_62.2 9 (locus evm.TU.supercontig_62.29) derived from phytozome v7.0 (chr-ID supercontig_62; pos 218024 to 218657 reverse strand)
ctctactcgcgctatcgccactcagccttctccaggtacgtacaccgatgcatgtaaatgtgcggtcagtttacctggtcgctacacaagcagttgagtttcttaagttgtttaaaatttttgcgaatttaagcttactgaggctcgttcaattttagttgctttttaatgttatttatttattaattaagtttattatttgatttgcttgtcaggtgtttttaacagtaatgttagtgggacatagccccctccttttttcttctataaatggtctgattctcagttgaggttcatgtttctagggttaatgactttgaactgcaatattcttgtggtgttatctaatatttaccttatagatacttggaactcaagatttcgggacattttcgctaggctataattacattgttgttttatgtttttgtttatatatcatttattatgctctaatttgtttgagcgtatttccttaactcacacgttagctgaaatttcatatgcattttctgttaaattgaatttttcttgaagtcagaaaatgtttggtctcatttctcaacaaagaagcaccaaaatgtctaaggagtgtgttcaataattggttctttgattgggtctgtgaatgcag

SEQ ID NO: 77269 - DNA, 859 bp, Carica papaya
  Intron number 2 from transcript evm.TU.contig_32595.1 (loc us evm.TU.contig_32595) derived from phytozome v7.0 (chr-I D contig_32595; pos 2029 to 2887)
ccaagtgatccaaacctcagggagtacttgcattggtcagttacttatcactccattaatttttactttggttttgccaacttatctataattctaaatcacataataattttttattgacaaacttaataaaaaataaagttttttacccttaaatcaattaatagatacatttttgccttaattttaacaaaaacaattatgtaaagtatgctatgaaataaagctataatattaactctttgaaactaaaaagatgaactaaaaaaaatatcaaattaaataattagtcttattttaatttaaaaattaatagctataacataaactatgctaacttaattcaatgttatattcattgacttttatgtaatattatatataaagaaaaattattttatgtaacatgtaatattcttttattgataatttaatagaaatttgaatttactgatataatttaccaaaaaattatgataccaataaaatatgtatactatacgtgtctatatgcacttattatagaatataattgttgtgtgtgtatatatggacaattaattagctttccctataaatataaaatatttaattctatcccattggtacgtccctgagcaggagtaagctctttctcctgattgattgcaggtcactttcacttcacaaataaagttcacatgctcacttaactccattaatttattaatattctcatcattatttttaaaattttagtactttatttttttttcattttaagtcttaaattaatatataagtcaagaaatattgacgggttcttcaaaatgtaactctttcaggttggtcactgatattcctgcaactactggggcat

SEQ ID NO: 77270 - DNA, 268 bp, Carica papaya
  Intron number 2 from transcript evm.model.supercontig_8.20 8 (locus evm.TU.supercontig_8.208) derived from phytozome v7.0 (chr-ID supercontig_8; pos 1460261 to 1460528 reverse strand)
aaatgtttgtggtcatgctatcaattgttaatcattttcttttcttttcttgttttttttctctggttaatcaaattcgttgttatctccatggatgtggttgctcatttaagttttaatgctactatagtctgatagctgtgcctgtggtgttagatactctagtaggaaaatatttgataacttcaaattttcaattgagtttgttcgcttttgcttattatttgtttgtggatctgttcttggagtaggcctttcaaagacttgg

SEQ ID NO: 77271 - DNA, 819 bp, Carica papaya
  Intron number 2 from transcript evm.model.supercontig_71.3 0 (locus evm.TU.supercontig_71.30) derived from phytozome v7.0 (chr-ID supercontig_71; pos 415550 to 416368)
ctgcacgcacgcgttcgtgttttctgcaagcttgggtaattattctgccatcctcatgtgtgcttgcatttggatcaataactattcttgtttgctgcttgcttaggcacttatataaggctacaagtggtaccccaaaacatttttttctgtcataggacttctgtcagtaattatttataaaattacatttatgattcttgtcattgacgttggtggagtaataagtaaattaaaacagcataaattttagtcaatgctgaaacccagttccaactggatcttgcgatggtcagttgaatttcattacttgttttatgctctaggctcctaatttttaagtttcaatttattactcaaaaaggtaaagttaatagaaacacttcattttgtgatagttggatttttttttgtttatagtacttcatgagtcagaaaacttttatgattctgaaatgccatttctaatattgctagttctagacaactgttagaaccaaatgcataacagaagaatttgagaatagcgaaaaagtgcaggaaagcataaaccaaaagaagaaggaaaaaagatgaaaagaaaatgcattgcagacaggtccaaactagtccattttcatttgctatccatgttcaggaatgttatgtgtcatcggggtgagagtctggttgtccttccatattttcatctcacagaaagatacagcgtagggaaaatttaacatctaggattgtcttgatagtttgggatttcgtctgttaaaaatatcattgtaaagcttgtgtttcatgcattatttcttactgcaggctttggaa

SEQ ID NO: 77272 - DNA, 343 bp, Carica papaya
  Intron number 2 from transcript evm.model.supercontig_74.4 0 (locus evm.TU.supercontig_74.40) derived from phytozome v7.0 (chr-ID supercontig_74; pos 361936 to 362278)
ccctgacattccaactgctgtcaaggttagaaatcatattctcatcaagaatttctatgatgttttgattggtttataacatgtgtttttctcgggatttagcccatagattatgcagtcttctattaaaatttataatttgctctattacaattttaatgagacaacgggatctgttactctaatgcagacgaatctgatgatatcatatctgaaatctaaaatcttgtttatatacaaatagtgtaatcgaggtgacatgtactcaaataaaaaaattgatttgacaaacatttctctgctaataggcctgcacgatcagtgcttgtggcaattttgctgt

SEQ ID NO: 77273 - DNA, 500 bp, Carica papaya
  Intron number 2 from transcript evm.model.supercontig_76.1 2 (locus evm.TU.supercontig_76.12) derived from phytozome v7.0 (chr-ID supercontig_76; pos 219468 to 219967 reverse strand)
tctttttgagcccaggcctggctccaacttttcaggtatgaggttttagtgcaggtggcttttaattatacgtagtgtagttgattttattgctctcaaaataatattggtatatggtgggaattaattttcactaaaatcctttaattggatctaaagttgagagaacttacaaaagcaaaagtattaactctaagctttatcttcatcttgtatcattcctggttcctattttctatgagaaaaaggaatggttttattatttcagtttgaagtttgtaagtttttatttttctcaaagttacatttattgcttaacatgaagttttattctttctgaagttaaaaattacgtattgtaaattttatgaattgataaatttttttatcttggactgtcaaaaaaaaaaaaaaacttaagctcgtccatgaatgtagtgaataaaaatgaaaagtcgagccttgaatatcatctgttcataattctgatgcaggtttat

SEQ ID NO: 77274 - DNA, 665 bp, Carica papaya
  Intron number 1 from transcript evm.model.supercontig_76.1 2 (locus evm.TU.supercontig_76.12) derived from phytozome v7.0 (chr-ID supercontig_76; pos 220034 to 220698 reverse strand)
tcaggctgagaagaaaggtgaatctgttccaacaggttcacaagttttgtatttcaggggtcttcctatttgatagctcccttaactgttgaaaataattaattttataatttaacatgatataattttgtacaaactgaccataaaaagtaccaaaaagaaaaactttaatattaaatatcatcagggcatttaaataatttaacatatttgtttcgtccatatgtatatgtaccaaacactttatttagttctatccatcaatgtcctgttctcttctgtcctacctgtgcgccaaacgcgcacctctgccaaaaccaacagttcttgtgttctaataatcttatgtggtacctgctttttttatttccatcattttggacacaggttgtggtctgagatgtatgttttatccttttttccatgtctttcagccaagatatataagaatatattatggatcattagtgacttggattctccttatagcaaaacagaacttactagttttttctctcttctgatctttgttctctctttctgtactgtatgcatatgcctgcagtaacctcagtcaatcacattaaattgctgttcagtttgattctatatggtatcacatggtcaattctcatgatctgatgtcaaagtttggcagtgggctg

SEQ ID NO: 77275 - DNA, 590 bp, Carica papaya
  Intron number 1 from transcript evm.TU.contig_32944.1 (loc us evm.TU.contig_32944.1) derived from phytozome v7.0 (chr -ID contig_32944; pos 1153 to 1742 reverse strand)
gagaattttcaccccaaggaggacccgaccccaaggtatgttctcctcgatgagtgcttctgtcgatacaattcctttttctcttttaacctttgaatttggagcctccatttgtgatgattatggtttggcggggtgagttttggctgttgcatttgaatattctggattgttgagcgggatcggaaatgtggcttactgcgtgtctgttaatcaaagatttgagacattttgagatgggtttatgggtaattaggcgcaatggggattagacttttaaatagaaattcttagctaccatatgtttttcatctctcaaatgggttttctgcttggattcatttgaatgttccatattttttattgagttgctcgacttctatgttaggtatttcacctattgtggctatttgtgaatctgttttgccatagtatttttctccacctacctagttttcactacagtctcgcacagttttcatgtttttatttggaaagacatttcctttactcatcaacttagcttcacttaaatgcatcttttaatcgatgcagatcaaggcgaaagaagcacgcatccagtggagaaa

SEQ ID NO: 77276 - DNA, 868 bp, Carica papaya
  Intron number 2 from transcript evm.model.supercontig_81.1 05 (locus evm.TU.supercontig_81.105) derived from phytozom e v7.0 (chr-ID supercontig_81; pos 476907 to 477774 revers e strand)
tagtactgctgaggaggaagagttctacggatttggtaagaccttcaagcctaacaaaaacaaatgtgtcaaaccacatgcctcttagaccaagatgacaatgttgtgataatgagttacatcgtatagctgatcctatgtcatgttattgactcagaagtcgtcatgtggttgatgattcaggtgaagggaatccctgtaagaaaattggttcatgagttctgctgccttgtttgctaatctttttcccctggtagtttagtagaattttgaaaattcatttgcattaccttggcaatggtgatggatgccttggaggtaaccttctagtttttcatagaaattcagtaacttcgtgtagctgcaacatttcagttactaaaaaatctccagttattactacacaatattactattttattatacatatttatatgttttttgttctttttgagactatgaaatgtttgaatattaccatgaccttctgtctccaaagcaatgtaggtttttttcccttatgaggatagatgtcgggcatttccttcaaatggtcttttctgatcctctttttcttttctttactcgtttttttaatatatatatatatatatatagagagagagagagagagagagagagagagaggcatagctgtttaaagacggcaaagtatcaaccctaacatttcccatgaggaggcaggaaacccaggagataaccactgaaccaagctctctgtgtttagttcctacatagatttctctgatctttgtcctccatttcttactatttgcttgggagttaggttttttttttctttgttcttatattaaccccctttctgctgcaggtaactttttaaggg

SEQ ID NO: 77277 - DNA, 333 bp, Carica papaya
  Intron number 2 from transcript evm.model.supercontig_81.1 17 (locus evm.TU.supercontig_81.117) derived from phytozom e v7.0 (chr-ID supercontig_81; pos 562781 to 563113)
tcgttttttctctagtgaaacccccaagaagaaaagtgagttaatttcgcaaacctctctgtttaagcattaaggagcttggcattataatggttagcattaaagtggtttgattgattgtcttagtgaaacgtaagaaattattttttgagtaataaaaaatgctttcatggggttgttttcttcattggtaaaaaggattttttttgttcttttttgccgatattgagtgtaaattatgagcaatgtgtgatttatcaaaacaagctacttgctttaaactggtttagattttaacagcttttggctacgtttcctaaatgtttgcagatt

SEQ ID NO: 77278 - DNA, 1030 bp, Carica papaya
  Intron number 1 from transcript evm.model.supercontig_80.1 8 (locus evm.TU.supercontig_80.18) derived from phytozome v7.0 (chr-ID supercontig_80; pos 109583 to 110612 reverse strand)
cacgagtattccctacgggatgtgagtattctctcttgctttctttctttactttctgcaatcggcttcttgcgtggagaatatatatatatatatatacacacactgtaattctttctttgatcttttacatatatatatatgtatcgtttctataatttcttcagtccgagttttcccatgccccgaatcgtaggcgtaatttttttttttttatgttatatacatgtgatactcttactttcttgaagttctttgatcagcttcttgcatcgtatggatgtagttatagtagttctttcttctttgtttgtatatatatttatatacatatacgtatgtttcttttatattatatttctcgcattgcaatcagcctcttgccatttgccactgagattcatgaatattcaagacttttgtgggaagatgctgagttcttgttccaggtcctcattagaaccatacagtacttgtccgccatcatcagctgctgcacacataaacttcaagattttattttcttgctctaatccttgtatgccatctgtttcttgtattgctgaaaaatatatatatatatatataggtgtaaaattagaactaatgtttgttttgtataatatatatatatatatatatatatatatattatattatattatatgaatcacttctataatctatcatctgaaggttcagattccatctccatcagtttccatgcatacgtttgcaagtcttttattacaatttcttgaatctgcatgaacgattcaaattttatttgtgaacaatgttgggagaaaatttaatttttctgttatatgtacacttttaatgctaatacgccaatattaatttgattacagtaatattaaatttctatattcattgctttatattttatattaaaaatattttttaaaagttttatttgaaattattatcaattttttaatatatatatatgtaactttttttaatttacgcagtcagacgattacgtactctgcaaaattagaaacaa

SEQ ID NO: 77279 - DNA, 534 bp, Carica papaya
  Intron number 3 from transcript evm.model.supercontig_70.5 8 (locus evm.TU.supercontig_70.58) derived from phytozome v7.0 (chr-ID supercontig_70; pos 382364 to 382897 reverse strand)
tactcgagcagaattttcttacttacttgtttcaggtaatatggcctaattgcatgatctctagcgtgtatttggatgtttaatggaaccgaaatgacactatttcacttacttgaggcacttcaagataccattgcttccatgaactttccaattgtaaatgatatacacacatatatatatatgcaataattcattgggaaaatgcaattctttaattgtgtttctgccaatgtatatctaagcccctttttggaatgatcccacctgaacaaaaatcttgactgctgtctgatgaaagttggcaaggattgggataacacagttatgattgatgtttttggaggtaaagataataacttggttagcatagtttctttgagttttgttatcctgtgaacctgaagggaaattatattgtattgttgagcaatcttgaaaaaatttgtgactctgtggtaggataggaggtaatcaaatggtgtgactgactttgactgcaaattactagaatattcttttcccatacaggtg

SEQ ID NO: 77280 - DNA, 935 bp, Carica papaya
  Intron number 1 from transcript evm.model.supercontig_81.1 (locus evm.TU.supercontig_81.1) derived from phytozome v7 .0 (chr-ID supercontig_81; pos 1441 to 2375 reverse strand )
aagtttctttgatgtaaattgttcttaagcatgcaagttgatgctggtgttgctttttccatcttctatatccaacctctatttaaccaaagaagctccccaagctttgtttaatcagaggtgccttttgttgacacttgatacatgcaataaatattgtttactatctttcttctaaacttttgcttggtctttcatttttcaattcttttacaactttttatgtatctttttcagaaaaagattgtttgacatcaatgttgtgtcttatatctgtgttccataacatatttttaaagatgttgcaggaaaataatgaataagattgcattgcattaaagattttctttgctttatagaatataaatacatctatacatatcttgtggtatatcttagaaacattatgcatttatttgggaactaatagatcatttttcttgcttcctgtgaaagaagatattattaatatcaggaagcaactatgctgttgtttccttagagctgccaatatctgccttttctaactaaaagatctaggaaaaggcaattaataaatacttcattaaatgctaattctcaaaagcaataatgagctttgaaagaaagcaaagccaaaaacacaaacaaacaaaagatatactccttcactactctctttaggaaaatagaccagagtctattatgcctctactttttgaattctatttagtaactgcaaaattttaacgagaagaattgaaagtaagctttcttgagaatggccttttattttagcacctccaagctgagcttacatatgtttgttccctttcattagcttctagaaatgacaagaaataggtaaccgttattttcgtttgtttttgctttgataatattctgcttcctattttagtatattgtttttcatgctctgttactaatgtgcagaa

SEQ ID NO: 77281 - DNA, 758 bp, Carica papaya
  Intron number 2 from transcript evm.model.supercontig_62.1 10 (locus evm.TU.supercontig_62.110) derived from phytozom e v7.0 (chr-ID supercontig_62; pos 704085 to 704842)
caggttgttcttttctgccctccctattttcttgttgtagttactgatttgctacttgaggtactactgcatgtgaaagtctatgtagaaactctactaagtaggaaagatttccttgattaaataaaccataatagagaacaaactaagtagtatcctaactaaataataaactcattaataataagtctataggtgaacattcttaaaaacgtaatattttagtaatacataaaattacaactattaaatataccttatttatcgaaatatgtctaactttagattcttcctgttctgtatcaggtaaagtataaatttcatcagctaaaccaaatccagtaaccgtcacgatcctaaggacttaatcattctcaaaactgatgtccaaccttctattacaatcatgaaattgaagcaataaaaaccagaaaggagctgaaaacacattctgatctttgttatggtcttcattattttcagcacttgcatcgcattatttacttgtaatatggttcagttcattcatatcttagaaaaggcatatagcaatcttttgcttccagtgggagaggatggactttgagtgtgattaactaccgattaacattttggtctatttgtttagttaacaagtccagattttagttacttcatcttttttgttttttggttggttcggtgctggatgaataagtactccataattttactcgaagattgatctttttaattttggtttctatggattgtagtct

SEQ ID NO: 77282 - DNA, 984 bp, Carica papaya
  Intron number 2 from transcript evm.model.supercontig_8.16 9 (locus evm.TU.supercontig_8.169) derived from phytozome v7.0 (chr-ID supercontig_8; pos 1186963 to 1187946)
aattggaacaaaagaaggctgcccgcaaagagcgggtactattcaaattgtcaattaacttgttgctatttctattgtaattttgttgactttatagttcaattgactatgtaatacgttgttaattgcctttaactattgaatggtggtttttggtgcatgtgtttgagcgtttgttagaattaatctcttagaagaatggcaaattaagtttagtttgctggtttgcaagtgttgggaaccattgctttaactttttttttttttcgtgcttgcttcttcgaagttgtgcgaattctcttcaccacgccaaactatgaaatcctctagtgataatgtggtaggctagtttaagctggcatgtattggtttgtgatcatcaaatcgtaataatgattgaataaaatagagaagaagaaatgacgtctgttgttaacagctagcatcatttgtttcctgtctaatcctttattcgtgtgggttttccacatatcaaataattggttttctttagttattctctatttggtttaggcagtggcttgttaaaagttgacagcttaggcttgattgacaatcctacatctattcacctgcaggcatgttagaggcatactttaaaacttatgtttctgagtgatgtacatgagcagcaaactagaagccttatgtatgagatggattaattgcacagcagaagtattgtatttgaggccttcctaaatatagttgctttctgatacgaagtgatggaaatagaacttgagttcgatgcttttaatgcatgtcaaagcaccaactttgtttttgtacctgtgagaaatagctcggtgaagattaaaattttggtatttaatttttgacgaggagaaagtgtacatggtgatttatagtttaacacctttaccttatattctttgatatggtataactccatattcctcttcaggctcaaaagagaaagcttgggttgcttgaagaaga

SEQ ID NO: 77283 - DNA, 702 bp, Carica papaya
  Intron number 1 from transcript evm.TU.contig_33436.1 (loc us evm.TU.contig_33436.1) derived from phytozome v7.0 (chr -ID contig_33436; pos 175 to 876)
catcccagatcgaaggaagcttgctagaaaaggtctctcttactttcttttatatcttgttcccttttgcttttctccggctaggtaatgatggtgtgtaactgtgtatgacctaatatttgctcatgatgacaaaaccaccgttataatgcccttatcctctgcttcaagtttggtcctgaataatcctttctgcattctctcatgattggctgtagttcctgagacgggatacaggctaggtgcttttttctttattataaggttggtagctgataacttgttactttctatgtaaacaaaagcatagaagttatggtcatattcaaaagtatcatcaaggcttttaaaagtgaaaggcttaaaaaggagatcaagaacccgccaaagttgattgcatcttctattcttgtgcaaattctgcattaaatcatgttctatgattactcttgtaatctttttcattaataatgggcaaaatgagtctcatctgtatctacgaatatttcttggacgtttcttttggagttgattgttggtgtaatatttagtttcttatagaaattgaaaatttgaatttcttatagaaattgaaaatttgaacttatggttttggctattattggattgttgaatcggtatcctcgtaccaatttggttattggtttgaatttttgcagaaagttgcttcattaaaaggtc

SEQ ID NO: 77284 - DNA, 404 bp, Carica papaya
  Intron number 1 from transcript evm.model.supercontig_82.2 9 (locus evm.TU.supercontig_82.29) derived from phytozome v7.0 (chr-ID supercontig_82; pos 477758 to 478161)
ttgttcctccacaggtactagtgtttctttagttctagatatttcttctttgcaatccatggtactcacacacttcaactatttttgcacagacaactacaacatccacatctcaatcaaatataaaaccaaaaagggcagagtctgctatgagaaatagaggttccacatcaaaaagcaaacttaggcatgttatcttttgtttcttatattcaatctatattttttcagacataatgaataatttcaaataattctgtatgtctctctctattagtggattaatgtttagctatatctttggattcaatggttttgagttctgaaaagacattctaatcctccttgtcatggtccgacatatatgtgtctatctattctatatgtttggttcctattgaagt

SEQ ID NO: 77285 - DNA, 575 bp, Carica papaya
  Intron number 3 from transcript evm.model.supercontig_86.2 9 (locus evm.TU.supercontig_86.29) derived from phytozome v7.0 (chr-ID supercontig_86; pos 402724 to 403298 reverse strand)
catacaataagaggtaataatcttattttgagataaataagaggtaacaatcttgttttaaccttaatggtctttctcatttggaacagtgagaaagctttctgctttacctaatctaattggaaaagcatttagtgagcgtggtgttgtcctaaggtttattttgctgcccaaaagctgacgactgagttgacttcttctgagacatgattcttgtgaacacagttgtggattagggttttctttgggcatatttgctacctaactgtgtattgttactttttggtttcttaagttttatacttgtgtgatttgttacttaaagggtatagtttttcttcttatgattatcagggtctatttatttttgtcattttttattaactcattttatgcatgtatagttatagaattacataaacaaacatgttgaacttacaagcatttgcctttttctataagggatatttccacgggttatccttgttattttgtccacatcatccttttgagaatgatcctgcctgtttacttttacagaaaaagacaagaagaaggtaaaagtgacacagaag

SEQ ID NO: 77286 - DNA, 469 bp, Carica papaya
  Intron number 1 from transcript evm.TU.contig_30633.1 (loc us evm.TU.contig_30633.1) derived from phytozome v7.0 (chr -ID contig_30633; pos 1000 to 1468)
gcaatctaaactggaatcgggtaggaatctatcaaaagttgatttcaaggccaattggagcttctttgaactcggataagaatcaaagtgcctaagatgaggtcgcttatgagatagttcccacggtagattccacaaacctaattggcaaaaatttcagggaatgattaattttttgcctcgtcgggtattcatgataatattttcctccccttgtttccaattacaacacccactgttttggtttatgatatctttcatataacttactatggagagaaaacctgtgaataaacagaactttagccggaagttgttagaagattcatgtgtttgatttatgagatttgaggatggggtttctcatttctgtggtgggaaagttagaatattaagttgcttcttgtttctggcatttaaatctgcaaaataatgaatagattcatgggtttttgctttctgcctttag

SEQ ID NO: 77287 - DNA, 610 bp, Carica papaya
  Intron number 2 from transcript evm.model.supercontig_84.1 16 (locus evm.TU.supercontig_84.116) derived from phytozom e v7.0 (chr-ID supercontig_84; pos 870453 to 871062)
tacagagctgcagtcagtttgctttacttgacgaggtatgttaattcatttagccgtaatgatttctttattatactcttaatcattttagattttcattcaaaatgagatcttatcaaaattatgctgatcgatgatatgttttatcagaattcaagttcatccagagatgcttcttctccctgttttgctacttttttctgtcttgagcgtatcactacggattattttttttttttgtttctactataaagtggaccactggtttgtgattgtgttttcttatataaatgcgatgaattcttcatttggagctggttaggaggagtgttaaacatgctcgttctgcttcctctatcatagatatcatccaaaggaacccaaaggttgacgaatgtagaagaccgcgagttttcctgcgaagattatcactacagatgcatccaagtgagagctctactcgttgtagcttctgataatatgttgatttgttagcccataaagacatgacaatcatgtttgagcttctgaataatgcatattcataccctgagcgcttctaaactcttgcatccaaactgaattgacaatagaagataacacgtgcagc

SEQ ID NO: 77288 - DNA, 779 bp, Carica papaya
  Intron number 1 from transcript evm.model.supercontig_66.4 (locus evm.TU.supercontig_66.4) derived from phytozome v7 .0 (chr-ID supercontig_66; pos 19114 to 19892 reverse stra nd)
ttggggcttgaggtaataatggtgggatttagataagaattggaatggggatattagagttaattagagaactaaaccaaattaagtgttttatccgccagaatctgtcaatcccaagacggaaacatcgaaacatgtttatggtgtaacttgaattgaattttccagattgcggcagtgcctcttttggttgtatagcttttccctggtgcactggtctcaagagaaacagtttggtagaacgtttagtagaagggcaaccgtgcaatattcttaaacagaatgtagccttacatgccaaaaggagtttgactttatatagggtggaatatgtatttagtgatttgtcctgaacaagaaagcaattaaggaagagatgcaataaagaatgaggatagattctctacttctgtggtgtttgctcttaagtcttcattctattctgactctgcgacgttggggaacataataagtcgtcaaattaaggattagtatattgtttctttaccatcctcttatctttaagttgatatcaccacttcagagatggaaaaaaaaaaggaaaggaagaaagctagagacatgtaaaaatatacaaagcaggtgtcattttttttttctggagaaattgctgcaaggggatttacattcatagaaaacattaatatgaataaggtatttttcctgtttcctctttgctttgtgttatgctacaatatgaaagaaacatagttatgatctcaggttcttgttccatccgagagcaaaatactgcatct

SEQ ID NO: 77289 - DNA, 639 bp, Carica papaya
  Intron number 2 from transcript evm.model.supercontig_98.4 5 (locus evm.TU.supercontig_98.45) derived from phytozome v7.0 (chr-ID supercontig_98; pos 883466 to 884104 reverse strand)
ggagtgaagtatttttctttaaagttgattcaccggtatactagttgtttcaattttaatcttagcaatgttagcatgttgattttttcatttcaatgtagtgcttaagacaataataattgcttctgcactcaagaactttttcagtaaaggataagattgaatttcatcccactcatatacctagaactggtatcgttgtagcttcatattgctctgtcatttatttatgtgttcttgctttataccacacaaaataattcaattgaatcgataggtcaaggtgttatgctgaaaaagagggccctaaattggaataattttagtattgagaaagatctgtgttattattgttattatttagtttttttatttggcatattctggtaaatatgaagtatttcaatagtttcaaatttgaactatttctttgtcttaatttggattagatccttgataaatatacctattcatatcatcgataggtaactgatgcttagaataaatctgcacctctccatctatggtgtcagtaatcaaattttgtccttgtcttctaatgcagtctttaccttatttcttgtttggttttttcttgaccttgatacttttgatcatttttatgcacaggagttttat

SEQ ID NO: 77290 - DNA, 804 bp, Carica papaya
  Intron number 2 from transcript evm.model.supercontig_66.6 6 (locus evm.TU.supercontig_66.66) derived from phytozome v7.0 (chr-ID supercontig_66; pos 664895 to 665698 reverse strand)
catgtaaagaagaaactccggtttatttctgtagccttctattttttgttattgaagaaaaaaaaagaacatgttattactagatactgaaaataatctgtgcagaaatgcttcatttgttacttgaaagcatttttctacttcattttctaaattcatgattatatatgtttctattcatgaaaatatgtaaaagttggatatatgtgaagtaatcaaagcataaataaaaagttttttgatatcattaaaaatcatattttaaaattttctaattccattattatttctcactattgttttctttattattgactaacttgtatagtattgtgaataaaatatcaaatttagaaaatgaaaactaaaaaatatttgtgtatcaaatagagcctaatctctgtgtagataaaaatgttttctaattttctaaatttatttgtatttatacatgtctttattcataaattaaaaaataaaaactagaaaatgttttcatgtattaaacaaagctataatatatgattttcttccattatcttttacttggtaaaggagcattagacaaagctaaaggaaaaggagtatgttgttactggatatctggaattttttttttttgggtataaatgcagcatttgattcccttaaaactaaaaatcgtgcaatctatgagatagttaaaaatcatgctcttgtggtccatcttccactggatgcatttataggccattctactaatagtcaatttgttataatgtatttgcagaagcagagctctggtctgcagtcatcattgggatc

SEQ ID NO: 77291 - DNA, 514 bp, Carica papaya
  Intron number 1 from transcript evm.model.supercontig_66.6 6 (locus evm.TU.supercontig_66.66) derived from phytozome v7.0 (chr-ID supercontig_66; pos 665737 to 666250 reverse strand)
tgacagagcagtttaaaaagtgaggaaaatgcgactctttagttttctttgtagcgtgtggttttttggcacaccactttgtaaaatattttgtcatctcctttatatttggcacaccaaaggtaacacaataattacatttggaaaatcattcatgagcgtaaaaaagtcattcccatggcaacattttaagaccattcactatatattgtaaattacgttggaagagaacattaattttggaccatttttgatttgcagcttttgctgatttccattttttgatttgagctgatctcctcttgcattgatttatgaacttagttcttcgtttaactgcctgttagtctgttagatgtggagagagagtgaaagagagagaattgtttgtcatcttaaactgtccaacccttcctggttctggataatgagaagagctttttcttctgatatggatgcttcctgctttaatttattgatttagttatgctgtgcaggtgggtcagggctacta

SEQ ID NO: 77292 - DNA, 407 bp, Carica papaya
  Intron number 1 from transcript evm.model.supercontig_770. 2 (locus evm.TU.supercontig_770.2) derived from phytozome v7.0 (chr-ID supercontig_770; pos 20329 to 20735)
agcttcagaagcttctcctcaggtttgtttcactgctaatttatatgagaaatatggaatgtaattttctcttcttttttggattaattgatttttaactataaatattttttttaaaaaaaataaatttaatccgaactagattaaatcgaaatagtatcagcatagattcaagcaaacattaatctaatacttttaatatatgtatttatatatctctaggaaatattcaaacctacttttgtttctcatgatcatacaaacccctttattatatgttacggtctctttatatataatatatattaacaatcagtacattaatgcacatatatacacatatatattttgcaatctgggttgtggctgaaacttcaaagtatgaggttgtttgatttgcagtgaga

SEQ ID NO: 77293 - DNA, 1020 bp, Carica papaya
  Intron number 2 from transcript evm.model.supercontig_8.57 (locus evm.TU.supercontig_8.57) derived from phytozome v7 .0 (chr-ID supercontig_8; pos 388403 to 389422 reverse str and)
ttcttctgctgctcctccaaaaagccttccttctggtacttccccccttattttatatcttttcatgttttaggaatccatattcgctgctttcagtgttttttcatgaaactgtcagcgttgattaacatgctaatctccttttttgattttcttgtgccacttcacgttggatttggtagcaatagtggattcctacttctcaagaaaagatgttcgattgaacaaattggaacattttggggggtgtaacttgttgaatgatttttctgatagtttatgtgtttgatcttgtacctgattgattcattttggaggattgttttgattctactttcacattttctttaatgtcttataaccttttttgttagtttggaaaatacatattcccaaaagaaaaggaaaaaaaaaaagatataattgcactagttcttgctggttcttttttcctctggaacagaatattggctttgttctgcgattgaattaggccctgagtggttccacttctgtgatgattttctaatactgctgctctcagtcggttcttagctggaaaagatacatttcattaaatcttaatgtccatactcacgttttaattttcttgctagatatgcttttgtgatatttgtgacttggctgaaacttgatagtactgcttgtctcagtagatattaccaggaaaaggtgattcattctctatatttatgtccatacttactgtttaaatattcttgcctcatatgccgttgggatattttggacttggctgagacctgatagctggtgactaaattttcactgtttgagagacaatttacaaactcatctttatcaatctggaactatctttctgagttaatgagcgacgcttctttttggtgccttatggttgtggttgagcttttagttcagtagctttatgaatgtttcttctgttgtccatgaacagtgttgagaatgttggtataattcacagattgcaggtactctctggcagtgggtgtaggaagc

SEQ ID NO: 77294 - DNA, 561 bp, Carica papaya
  Intron number 1 from transcript evm.TU.contig_30141.3 (loc us evm.TU.contig_30141) derived from phytozome v7.0 (chr-I D contig_30141; pos 1211 to 1771)
cttttctgagaagctgtaaattttggatgtagctttggttgccaaagaggtggttgatttggtgttatgtaagagcagaggaggcttatttgcaagttggatgtagagaaagccaatgactatgtattattatctttcctcatgtacattattcaaaaaagaaaaatctttcctcatgtacatgtctcgaagaatggggggttatggagagagatggcggaagtgaattgatcattgcatttctttcctttcttttgcaatcttgatccatggaaggccagttgacttctcttcttcaaggggcttacagctagatgattctttgtcaacattgctctttattcttgtaaagaggcctttaagaagatgttcctaaggtaataacaccattcaaggtttgtctgttggaagtggcaacagatgcaatggggtgaccctcttgctatttgctgacaattccctctggttctggagctggacggggaccaattgctgaagctgagatgcactttggtttgttttgcagttgtctatagccttgggattaatctgtataaattt

SEQ ID NO: 77295 - DNA, 872 bp, Carica papaya
  Intron number 1 from transcript evm.model.supercontig_7.20 0 (locus evm.TU.supercontig_7.200) derived from phytozome v7.0 (chr-ID supercontig_7; pos 1969127 to 1969998 reverse strand)
cccttctttcccttttcgctttcgatgtacttatattcgtagttttgggtgtgctttcttcgggtttcatttaatccgaggtgatgggatttgtcgagtggtgaaagatttctctgtctttgttgtctaattatgttaaagtaatttctctttatggtttggttacctgggtttgtcgaattgtttgaaattccgggagtgggcatggtatcttatttgcctccgtatttctctgatttcttaagctttgatactctgtgtatgactgcttaaatttgaaatttatttttgatgtgctttgctggacctggaatgcgtgggatgttgtttcctattgaatgcttgtcgggcattttgtgttgatgaatttttttttatttcctttttttttctttattttgattgttgatggatcagggtttatgatttttctcttgaatttctcatgcaactctgccgacttcatagttgatttatagtacaaatgggagagaacatgattagcattgaggtataatttttctgtaatttgccgaagctatcacttcttaacattttgatatatgcatttgctaatttattgaacattactgttttgatggaagttgcacctcgaagatttgcaatgcaaatgatcacgggaaaaaaactatttgtaaatttatatataacttcggaattaattgaaactgtggaatctgttcttaagtgaaataagattaaaccgagcaagtagagagtgtggataaacaatagctttgaagtagctctcaaactcttgtttaaattgcatgtgaacctagttactcaagcaaatttctcaaagtagttataagttaatcatttatctatccaatttgtagaaaatataa

SEQ ID NO: 77296 - DNA, 560 bp, Carica papaya
  Intron number 2 from transcript evm.TU.contig_29502.1 (loc us evm.TU.contig_29502) derived from phytozome v7.0 (chr-I D contig_29502; pos 9732 to 10291)
tataagctggttggcgagaggtaattgttctattaacaaacaccataactagctcataacatatgcaaattaaacggggaagtagctaatagtttctgagcgattgatcttgtatttacttagcttggagctcaaatggaagtacttcttattttcacatgacctcagtctgatctctcatgcatgtatgggtttgattgattgttctttttgtttgtatccaactgttctgaactggagatgcaagtgggactataaatatagtgtatttagattgtggtatcatatatgtacatgcaaggtgtttatatatatatatggtagacagtaatagaaaaaagaagaagcaaatgctttggattccaatcagcagttagctgggagacaaaatcaatatgatttcttctgaataatataagttagctggaaaatcagggattcctcaggatacatttgagtgtttttgataaagggatgaatatatatatatatgcatgagtggtaagctgacatataatggtgcaggtggggcttgatagctgggcggattcctggacgga

SEQ ID NO: 77297 - DNA, 907 bp, Carica papaya
  Intron number 2 from transcript evm.model.supercontig_9.24 6 (locus evm.TU.supercontig_9.246) derived from phytozome v7.0 (chr-ID supercontig_9; pos 1652706 to 1653612)
gtccacaagaacccggtatcgtcttcctcagccaggtatcttcaatcatccgtatatttttaaatccagttttctctcctattcttttccactttcatgaacgtcaagaataagatgtatttttcaaagattagtttagaatgaaaatacatgcaatgtcaattctatgaatgtagttaaaactagtctatgttgatgggtcccaaggaatcctgaggtggttcaaagattaattatattaaacagacaaatacaaaaatgaaatgaaataaagatttgaatggaattagtagaaccaaagttagcttcatgcccaattcaatttgggttacattattggtaactcttttcttgataaatggtaaaacaaatttattgtggttgaattaaagatacatgtgaaatatgttcaattatgccttaaaaaaattgatttataagtaatttatgtattaaataattaagattttggaaaagaatgacttgaaccaaatggagcctaagagtttaagatgccctggcttgtatgtcttgctctacttgatagtctatctaataaagcaaattaccaaatgataaagttctaagaattaaagggaaaaacccatgacttttcttttactgctttattctcggaatttctcactgactgaagcaatccacactgtcttgagaatttcattaagagcactgcagcatattatagatatatatccattagatcacagtcctagctgcagtagcagcaacatgaaagtgtacttgatgacatgcatgtggcagttttttcatctcttgttcataattacttaaactgtcttctcttcccccattgacaatctttaccctctataactttctaagttgcaattccttttcaacaggaactaattggggctcttcttgc

SEQ ID NO: 77298 - DNA, 498 bp, Carica papaya
  Intron number 3 from transcript evm.model.supercontig_80.3 1 (locus evm.TU.supercontig_80.31) derived from phytozome v7.0 (chr-ID supercontig_80; pos 238032 to 238529 reverse strand)
ctggtaatttccttatcaaattcttattatgcattacaatcattctttcccggaattagttcgatgaccttcttggcttctctttgggctaaacctcatgggaactactcatatatcttcctgtctgttttacataggagttgggatgctatggtcacgggagatgttgtctgcttccattgattttttattactttgtttttgttttcttatcttttccatatttcttttatctcaaaaaaaaaaaatcttttccatatttctttagctagatagcttatctgctgtactttttgtattggtaccttctcttttcagtgatatttcatcttctataaaaaaaagggcaaaattggtataaattttactgtttatactcattactttgacattatgggttcatctcttctagtaatttgttaaaaatctagcaagtttttattatttgcagtttccctggattttaattttctttattttgtttctgaagtacacaca

SEQ ID NO: 77299 - DNA, 446 bp, Carica papaya
  Intron number 2 from transcript evm.model.supercontig_80.3 1 (locus evm.TU.supercontig_80.31) derived from phytozome v7.0 (chr-ID supercontig_80; pos 238576 to 239021 reverse strand)
agcttaaaagtggttcttcctgtctgttttttgaggtaaatttctggacctgtttgtttcaaagcagtcttctgggtcagtataaattttttgagttcgcttctgtaaattgaagctatgatttttgctacctaagcatatagtgtattctctgtttttattttgggacaaacattgaaaatattagtgcaattgattgtcagttatcgcaattcagtttgatttgtttcttacttttgggttaaatgctccattttttataaaatcatgaatcattgttctggtttagtgaaatctttagtgcgaggacactttgatgctaggaagaacagattaacgcactctagtttcatgttctctgagttcttattattcccctgcgatttacatcttattttttaaaatttatgcttcagtgcaggaaacacaaagacctttatctctgg

SEQ ID NO: 77300 - DNA, 1002 bp, Carica papaya
  Intron number 1 from transcript evm.model.supercontig_96.9 (locus evm.TU.supercontig_96.9) derived from phytozome v7 .0 (chr-ID supercontig_96; pos 168904 to 169905 reverse st rand)
tgctcttatcacactcctcgctccattttcttgtaaaatcaacttcatttccctctacatttcttcttaccgacatgcgtgaatttttcgtgtttcttctctatctatctttctttctatatacttatgtcattgtctgttctatatttgaattgattgaccgttttgattataaaatgtttttcaaggtactgacttaaatggattgctagacatcttaatttacttcatttgatatttatttcagtttctaatgatttgaattttcaatcattaactcaaaatcaggacctcctgtttgttgagaagccgttccagttatacgaagctgtttctggaaacaattttattctgacctgttcgttgaaaacgtttactggtccgaaactaatttaatcgttatctgaagaatgcttaagaagcagggaatccattgtctgttgatccgtgattttaaatattagtttctactttccacaaacagataggttatcaaattcgtggattccacaaaattctgtcaccaatgtttatttttgcgtagacgagatttcttgtcttgtttgaatgtgttgaatcatgttcatatttgagattatcgatttgtattatagccttaaagtagtatagtgaaatttccctgtttggaaaggaaatcactatttgaagtttcaacagaactaaaataataaaagtatttttcaggatatacttactcgttttggagatctagatttttgacgaagaggagaagccggtgcttagttgagaaccaaatttgctactgttttatttttggctttctcatatctcccgagtgatggataatttcgagattgcaagttaaagttctaaaatggaacgattatgtcaaccgagtaaaaccagtttattgctttcgaagttcaaactctaactaatttgaattccccatgggaaaataatccttttctttctcttcaaaaaggtacgaggaggatctgtggacatatattgcgaggt

SEQ ID NO: 77301 - DNA, 1050 bp, Carica papaya
  Intron number 1 from transcript evm.model.supercontig_8.83 (locus evm.TU.supercontig_8.83) derived from phytozome v7 .0 (chr-ID supercontig_8; pos 522787 to 523836 reverse str and)
aatttcatagcccgagaaatctactcctggctctggtatgtttatgttaatttatcgactcatccgattatttcaaaaggtttaatttatagcttcatgtctaatctctccagattggaagcttgaatcaaagcacaagttcagaaaatcttatggattgggaagttagtacttggaatttgatacccgtctgattgaactgttttttccagaaaatttaggattggagaaaggtgttaatcaatcctttatacagtatattctaaaagtttcaaacttttcttgcctccttaaagtttgacttttaatcaactttgtcaagctcactcttttttcttcacatatatttttgttttacatcatgttattagctcttctcacatggtttttcttcttgataaaccttttcctagctgctggctatgaccctgaaagccgaaaacagggaagatcatatatggaagcaagcttattatccttgctagctgcttgtttcattgaagagctatattcttttttcttcatgggttttatctgagaatatttgaccagacaaacaagttcatagagttaagcaaccggttgggttttgcaggaattcatctgggtctttaatttttggtatttctaaatgcaataacttgctaaaagaatctggaagtgtgtcttttttatgtactcgttttttttttttttcttctttttctcccgttgctttcttaagtactacgttaggtttataactttattagccatgtctgtatcacctatagtcaaaacttgactaacagtctcagcaaaatagacgcatcctttgtttggcatcagagaaaatcatcgagcaacctctcttctttctttcctttcgttttcccatttaatgccatagcaaatgtccagagagacggatagtgaagctcaaaatccagcaggcccaccaattatgcattgcaaaatatgtacttcaactccattgatcaagggtctttgctcactgtaataataaatttgacaggtgggtgaagttggggaactatctgagatattcca

SEQ ID NO: 77302 - DNA, 238 bp, Carica papaya
  Intron number 1 from transcript evm.model.supercontig_62.5 1 (locus evm.TU.supercontig_62.51) derived from phytozome v7.0 (chr-ID supercontig_62; pos 368168 to 368405 reverse strand)
cttctcttgaagggtgcgttttaatcaatttttctgttattcctcttcgttgattgtgatgaatattattgaaaagtcgtatgagttttttctgttttatactattttgattttagggtttgcaaatgtagctttcttatcgttggtttgttctgtggagaaattgatgataatttgtattgactatgtggattttttggttgttgttgaagcgattatagctttgaaggaggaatca

SEQ ID NO: 77303 - DNA, 775 bp, Carica papaya
  Intron number 2 from transcript evm.model.supercontig_65.3 5 (locus evm.TU.supercontig_65.35) derived from phytozome v7.0 (chr-ID supercontig_65; pos 479405 to 480179)
ttgaagttttgggctatcaactacagtttgctcaggtatttgtgtaggttatctttttatgttgcatgcatgtataggtatattaggtggattatgcaatcccaaaacctgtgaaagtttaagttgcaaggtctttaaactacatggatcaacttcacatacatgagggcatagttattgggtggactctggtttatgtcagaaatccgcaattttttggtgctatttctccttgttaggaaagtagcaaggttgtgacattcaatcttctaaatctaaacatttagatcaaggacacatattcaagtcaaaatggcaaagagagaacacctatggggttgcttaagtggttgagagcaaatctcggaacgaactgtagacctaaatgtcttgggttgattctgcatagggatgggtctaatgttgtcttgccttgtgtaggttccagtaataaataagaaaaggtgaggggagatgttgaaacatctttctctttttgaacgtataatgtttctcagtgaaaaaatacattaggattatatatttgcagttaaaaaaccactggcattttagaaatattaatttgaggtagttttgttaggcactcttgatatatagcagccgtcatgttttattatcagaatcaaattctctttggttgatttacttcggttatcaatattgtgctatattctctatcctaaaattttcttgaaagtgtcaacttgtgaatgtggcaggatcccaattctaagcatttaggaactacagtttg

SEQ ID NO: 77304 - DNA, 829 bp, Carica papaya
  Intron number 1 from transcript evm.model.supercontig_78.8 0 (locus evm.TU.supercontig_78.80) derived from phytozome v7.0 (chr-ID supercontig_78; pos 945444 to 946272)
agcggctcaggtaaactatctcatctatttcttttcgagtccatttgtatggtgagaacataaacttgtattttaatgggattatattcagggagttctttgctgaattttcacaagcacttagtggctactctaaaccactgtttggtttcacgtagaattgaggaggaagatatagaattcaatggaaattaattaaataaagttattccagatgcagactatgtttgggcaaatgaataacgggattcatttcattttgaaatgaattcgctagaaatttgttttgtgaatttcctttttatttttggagtaaataatattgtaaatagtttgtgaaatttaatttctttttggcagttgatttgtatctcaatggtacttttgatagttctctttgtatttcaagaaagaaatttatttatcatagttattttttgttaaatataactagcatgtgtttttattcatacttagaattcatttaaaatttaatcttaatgtttgaagtagcttgtgatatttccaaaagctataatatttccaaatgaatcctgcaaaagtttgggatgcatttgcttcgaagtcaaacactcttgtaatgatgttaatcctgttgatgaaatctataatccacagaatgaacttgatgaaacttttggttcatggagaatggcttgtgatattagatgaaagccctattgtgaacttgccattaaaaaatggtgtttattatctactatcccctgtctagcttttatcattttagcaaaatttgtagctaacagatgaaaatgttaaaggtaaccttataatgtgcatgttagat

SEQ ID NO: 77305 - DNA, 319 bp, Carica papaya
  Intron number 1 from transcript evm.TU.contig_31433.1 (loc us evm.TU.contig_31433) derived from phytozome v7.0 (chr-I D contig_31433; pos 6799 to 7117)
aagtaatcaagggtggccttcagctcagtgattctgtatgtgtatttcgtttcttagatttctttctttttttaaagcttttattcgttatggctgcttaggaaattggagaagaaggaagaaagtgatgaacttggattgattcaattaatttcttgtgaatttctcaagaaaaattccttgtttgtgcggtcataaaatggacggaaaggaaagaaaatttgattgtggatacagtgtaggcttatgaattgtaattgtaaatcaattttgtttgtttccaggctactgtggcagatctccaggaggcaattcataa

SEQ ID NO: 77306 - DNA, 672 bp, Carica papaya
  Intron number 2 from transcript evm.TU.contig_31433.1 (loc us evm.TU.contig_31433) derived from phytozome v7.0 (chr-I D contig_31433; pos 7088 to 7759)
tgtggcagatctccaggaggcaattcataagagaagtaagtgctggatatgcttatgatgttattgattttcttttggcttgttacctagtgatacttttagatttttgctatttatgtagccttgtatatatatatgcgcttgattatttgtaaaagtagttccctggaactaatatctataagtttttgttaaagttcttatgttatttggtgctaagtcttctgactataaacgaatgcaaaaaacttttttttttaatttttggtctttaaatcattgactgctctaaaattccttgttctgctatcgtttggttttgtgttaatgcatgcacacttcttgaaaattgtcaatgatggactgcattgttgaatatggagccaattgtgaagatggtaaatgaaagagactctaacctaaaactgtattttgaactttttttttttttttttaatttatcattcactcaggtcagttttcatattcaaaggctaaccgtaatggacttagctttgtctctgcctattgtgatttacttatatgatctggcttccaaaagatgtgtgtttgaatgttagaagcctcttaatctcatttgattcaacaatatgtgttgggttttacttatcaacagcgaaaaagttctactcttcaagacaaagactgacc

SEQ ID NO: 77307 - DNA, 592 bp, Carica papaya
  Intron number 2 from transcript evm.model.supercontig_9.26 2 (locus evm.TU.supercontig_9.262) derived from phytozome v7.0 (chr-ID supercontig_9; pos 1739140 to 1739731 reverse strand)
ggtggagacttactggggcaacgttaatcccatcggtactttctcattctttctcctccccattattatattattatatatatattttatcttatacgaattactatcactattcttcctgaaattccggtcaccggaatctcgagaccctcgtgtctgttgcaaacggtgggtcttgagtttttaaagatctgtaaccggtggttacaggtccctgaatctcagagggttccagctggggttttcaatcctcagtcttcatcccagaacgacacgccgcgcaatcgataaaaaacccagttgaaacgattttcattttctttaaattcggtcaaaaattgtttccgatttaaagaaaagtcaagtactttcggctgtgtgggtggctggctggctggctggcgaacatgtgttggtaaaatttggggatttgaatttttgtatccggcggagtttgtgtttaattaattaacttataattataattaatgcgagattaataatgtatttaattaattataacaaataaaaagtatggctggtgttttggttgacaggtgtccgcagttgttacgacgagggaaagcgaaca

SEQ ID NO: 77308 - DNA, 460 bp, Carica papaya
  Intron number 1 from transcript evm.TU.contig_24415.14 (lo cus evm.TU.contig_24415.14) derived from phytozome v7.0 (c hr-ID contig_24415; pos 51620 to 52079)
tcgcttgtgagcttctgtaacctttctatttaaagtagcaatttaaactgggcctccgtcgctccatttcaaatttctttgagagcctaatcagttggatcgaaccctcaaatttaactaattttcttggttttggggtcacaatcttattcttaaacagactattaatgagttgattactagttctttgactttttatgtttaattttttttttgtgtttctttactctcttagcttgttgaccagtgaaaccaaccacagaatcgcaaagaaacttgctctaagtttgcgttcattgaatttgtagaattaggaaaactgggttctcaaccaaaacagaagaggaatccgggactggtcccctttgatgatcttttaaattgaactgttgcttcataacaatcaagtgtttggattcacgcagacgcttacttcaggaagactggattggagagatca

SEQ ID NO: 77309 - DNA, 890 bp, Carica papaya
  Intron number 1 from transcript evm.model.supercontig_8.21 9 (locus evm.TU.supercontig_8.219) derived from phytozome v7.0 (chr-ID supercontig_8; pos 1542601 to 1543490)
tacgaattgtagtggatttactggaactgttgaaggtattttcctgagctgaagacttgaatgtcaaaccagtttctttcgttgagtttctgagtttggtatatctcttactttcttatcatcaaaaaagaacttccttttcttgtgacaactggttctaatttgccctccttgattgcgcgaactgtagagtgttcaatagggagaatggttttgatctctggaagtgtctcattggtgacattaatggcaaattttggtgctagagttgctagttcacaaaaattttgttacatgtataatctttttctttcctatattaagcaaactgtagtctgattttgtgtaagaacttctttatttgtttttttccattatcttggtttttatttttcatgcttttccagttttcctttgaaaatgtttaagtttgagaagctgttttcaaaaccattctcaagatagtcctgtttgttagaaaaatttaactaacaggacggaaatgattcaagattgtcctgagtctttagctgacaagactgtttttattccttaaatcatatctttgttaaaacacataacataacttgaaatcagaacatgctcgcatattcatctttcactatttttctttatgaacttaaatagcttcatgtgttaaaaatgtctgtggagctacaattattcttattaataactgctaaacaattactcatattactgtttggtgattaactgtcaagatctgatatctagtgtggatatcagctacataaaataaattctcaaaatcaaaagtaattcattagcatatgagcacagaaaatcctctaatgcattcagaatgaaaattttacaagggtgttataactgatgtagcttttcagctt

SEQ ID NO: 77310 - DNA, 640 bp, Carica papaya
  Intron number 1 from transcript evm.TU.contig_35052.1 (loc us evm.TU.contig_35052) derived from phytozome v7.0 (chr-I D contig_35052; pos 811 to 1450 reverse strand)
gcaaatacagctgttctcaacacctctcagaaaaggtactctacctttttctctgtatgtatctatatatatttatatatttatcttttttgacagaggatattctcatgctcagactttagcctcatgcctcacactgcatgttttgtggtccttgaactcatgaatgtctatgtctatccgccattaaatttctttttttctttttcttctgttttttaactttttatatatggtaaaagcatctctatttttgtcatgttttttaatttgagctcggcagatttgttttagtttttttaacttcaccaactaacaagtattattattattattatttactattcttgttgatatagttattatcttcctgatgatggctgttttatcttttgttttagcaacttaatccgcttgcttcctgatttgtttaacttgtgcctttttcccttttgctgtttgcttatcaatttttcccaaacccacttgtatatctcactctacatatcttatctctaactattgtttagtagtttttctagcctatacttgaaaattttctttgaaagctcatgataattaataaatttatgttgggagaccagaagtgcttctggtccagtggttggttggcctccaa

SEQ ID NO: 77311 - DNA, 589 bp, Carica papaya
  Intron number 2 from transcript evm.model.supercontig_95.3 6 (locus evm.TU.supercontig_95.36) derived from phytozome v7.0 (chr-ID supercontig_95; pos 589271 to 589859)
aatttttcactggggattcctacatagttttaaaggtaagtttttttgcttttttgttttaatctgttcttcttgttttatgatttactctgcatctgaaataggctactggcacagtgcagtggcggcagctacactgcttctctcgaaaaaattagctaagctgttagttatcttgcctagattcattttaaagattgaatgatatgactatggtagaagttattatggggttcagaatgtaagtgcttaacatgtttcttactaacctctttgtttttgttgatcaataaacaattatgataataatgggaaaaaaggcttgtaaagcagatcaggtgttttttttttatatttaaaaaagcatgtggaggctttaagctgtgaaactctgctctttgacatgtagtctttgctttttgtcaaaacagattatagctttgagggagtaatatgaactaatgcatgtagactctgcaattagtcatctgaatgttttatatacagccttcccttgtgtgcaactcttgacttggaatttaaccttcttttgtgcagaccacagcctcaaaaagtggtgcactacgtc

SEQ ID NO: 77312 - DNA, 451 bp, Carica papaya
  Intron number 2 from transcript evm.TU.contig_37706.1 (loc us evm.TU.contig_37706) derived from phytozome v7.0 (chr-I D contig_37706; pos 1334 to 1784 reverse strand)
ctcaaggtcagttgcctggttgtaatagtggatttaatatgcatggggatgtgggtaagaactattgaatctctttatgcttgcggacttctcttggattatgttttctttttcttttcatggtaccgttaaggattagtcacatatatcaactgtagtagtaaataatcatgattaagttttagtttgtgtcttggtgacttattgtgaaaatcttgtctttgttggagagagaaaattttgatgtttggcatttgcttggtagtttgtgtggtcatttgagcattgcatactagaaatgcctttatctggctaaggaattctttaattgtcatgcatacatttgcattgttaccctgaaccagtctgtatcatctttttcctatcaccaccaatatgagatctttgtatacttgggcagcgactgctaacttttgaaactggtattgtg

SEQ ID NO: 77313 - DNA, 400 bp, Carica papaya
  Intron number 2 from transcript evm.model.supercontig_74.6 9 (locus evm.TU.supercontig_74.69) derived from phytozome v7.0 (chr-ID supercontig_74; pos 690388 to 690787 reverse strand)
aaggcagacttggagaaactattttctggcaccaagtatgtgaattcaacatgaaatttctgggtttcttttaatgttttattatgaattgccatcccccacagtaacggaaatgatcctatactactcgaatatatataaaattcttttataattctgctaaaatgtttcagagaaaaaatcaaatttggtctttcatgtattgaagttactgtatcagaagtaccaaatttaacttcagatccaatcatcagtgtgatattttgctccagagaaagaagtgtactcttcaactatgaaagaatatcttgtatcttataaaaattcttcctgaattatggaattacactctgttatattttggaaatggtcactttctgttctaaatgagacagatttg

SEQ ID NO: 77314 - DNA, 804 bp, Carica papaya
  Intron number 1 from transcript evm.model.supercontig_7.11 0 (locus evm.TU.supercontig_7.110) derived from phytozome v7.0 (chr-ID supercontig_7; pos 1000903 to 1001706 reverse strand)
tacgccaacaaggtcggcccgtttcacaaccccaggcaagtttctctctaacgcctgatccatcatcttagggttttgtttctctgatttccttagatttgatgttacttgttttggatctgagtcgatttcgttatcttctcgctcattacgctcttgttagttttggttaagaatatgttgaattacttttgaagagaataaagaaatagtattaagtgtgacttcagctgaatcgaattttcttcatcttatgataaactagttaatggttgagaacttagttggtttcagtctaagtttgctggagctaaacggctaactcaattgtgagtcacttcatttctgaaacattgtttggtggtgccaaattgcccgccttttgggtcgtctgtagcaggatctacttgaaagaagtatttcagaaattcgttaagtttatttcatatattcgttgatgtagaatttaaacactaaacagcacttaataggaagaataaagtcaacctgcgtgaggaattattttctttttaatgtgcataggggcatgctgggtgtgcgtgttttttaattcactctagtttgaatgttttagtgcatattatctcataattaaatagggtaagagtttcaggatcttcttgataaatgttaattgattatgttattaccttactgtatactttgtatctgtatcatcacagagctgcctgtaataattggtactgatttttgtcattttttttctggttttatattcttacttcagtgagacctaccgttattttgatcttccattctgct

SEQ ID NO: 77315 - DNA, 915 bp, Carica papaya
  Intron number 3 from transcript evm.TU.contig_37284.1 (loc us evm.TU.contig_37284) derived from phytozome v7.0 (chr-I D contig_37284; pos 436 to 1350)
ccagaggttaaggagaaactgaaacctgaactaaggtttgttgcaatgtttgagcattaatcatgcagataaatttgatgtttcagaacttggctacctaacttgtatagacttctgttactttaatagaatggattgaatgcattactaaagaggaatgatgagaaagaagcaaccatagtttgagtcggggcacatattgagcactgaaataacatatgattttctaacattaagactcattttctcattgattgttagaaaataagaaaattatgctttcatgagttatagtggcttcttcctgatttttcttatttaatacacatcctccatgtcgttcttctttgaatcttaggggcttatttgctgttttagtacgattacaagccctatgagttttttgcatctcatgattgaaacttaagctgaattacgtcacttgctagaagtttcttgggacttctatgatccaattgcacttcagcagggaccattgcaattagagagatgtgttcgacaatataaacaatttggattgtggaagaggggcaaaaattaaataagatgaataggaatatgtggggcaggattttgaaaccttggtcacctagttccatgcgttcattccacacctgttaatctatttcataaactgtggtagcatgtttcattctactttcaaatagttgaataatctctcagtatccctttaatggaaatagatctttccgtgttgcaagtttgtggagcaatagatttattgttcctttcccaataatctgtaccattatcaaattgataacgtcaaacgttagggtttatttgctgagtgtcgttattgatgttgttcctaattatggatccgagatatgtttcaaccatctgctgattgatttagggcttcacgcagtg

SEQ ID NO: 77316 - DNA, 573 bp, Carica papaya
  Intron number 1 from transcript evm.model.supercontig_97.7 0 (locus evm.TU.supercontig_97.70) derived from phytozome v7.0 (chr-ID supercontig_97; pos 434572 to 435144)
tctttgccaccgttgggggcaatcgggtatcctcttccctcactatgctcattcctagcttcccgtttgtttcttggaaaacctcttgattctctattctttgggtttgtttgaatgccaaatttgatggcacaatatagtggttttcgtgctttctttacattaatcattaagggttatcaagctgcttctggttgtgtaaatgaagcctcttgggttgcttaaatggaggatatgctaataaattattcttattgattttaggttttgtgatttatctatgtaaaagatactgttttgtctgagccatttacttgttttgcgttttgagcttatgctcgggtgagagagaagatgatttagaatttctgttcctggacttgcgagataaacaaattttattagtttctattcaagctagttcaaacctcaaaaggattctgctgaaaagttgtctctttcacctgtatatgttgtatatgttttgagaacactgaagttctatagagaaattatttattgttgcctgtgaagtttttatttttgtttcctttatcaggtaacggtttacca

SEQ ID NO: 77317 - DNA, 653 bp, Carica papaya
  Intron number 2 from transcript evm.model.supercontig_83.6 2 (locus evm.TU.supercontig_83.62) derived from phytozome v7.0 (chr-ID supercontig_83; pos 628668 to 629320 reverse strand)
aatttctggtattacttccattatcacttttatatgagttatcacttttatatgagtcctacttttgttttctttttgtgggagctaattgttaatccagttttaatccgttctgtaaaatatgagattagtgggaaaagtatgggctttcggcttgcttttgcttaatttgagctacataacggtaacggaaggcttaaatttttttcagtttgaactatagacgacgtaccagtgagttggcggtgatcattctcattcatttcaaaaaattgagaaagaaaattcattttctttgtgcatattgattttaaaatattggtatattggttgactgttttagttaatttgattggaatctgcctgctaataattgaaaaaggtgctatgtgaatggtgtatttgacaagcgtatagaggttcactacatagtgtgatatttagtatttgcttaagcatcaccatggttttatttacatgtttcttttcacactagaataataatacatctttcatttctgttcagataaagaggttcttatcaaaatgttaggaattagaagctgttattgaatgacctaccacccaagaaattcatccgcatcaatgttctgatgaatgttgcttgtaggttctattgggcgagagttact

SEQ ID NO: 77318 - DNA, 617 bp, Carica papaya
  Intron number 1 from transcript evm.model.supercontig_62.9 0 (locus evm.TU.supercontig_62.90) derived from phytozome v7.0 (chr-ID supercontig_62; pos 605301 to 605917 reverse strand)
gcagtttttcaggtatatatatatatataagatcagtctcggtgaatctcatgctccatccccatttggtacaaatataatgtcatagagtataatatcaaatactgttagaattagtatatgccgctaatgtttttacagtgtcaatagcataaatgatgaagcaaatgaaaattcttcctgtatgtatagatgttgggtctttttagtttcattcatcttctttaatcctgcaaatgtgtggtatatatgtatgtatttatgtatgtaatgaggtggatttgttcttaaatcttacaccggcggatctgatgagtgatgtgctctgtaaacaagttctcattgttgaatcaaatggctgatcttttaaaatttcagagtataaattttaaagcttaatgtaaaaaaaaaaagataggaataaaaaaagtaaaaaatggcccatgcaggtctcgaacctgcgaccttcgcgttattagcacgacgctctaaccaactgagctaataggccagttatttctatcattcgtagttaaaaaaattcacagttgaatttcccttctgaagagactgctactgcctgcagtgaatcagtcaaaaggaacccaaataaccag

SEQ ID NO: 77319 - DNA, 416 bp, Carica papaya
  Intron number 1 from transcript evm.TU.contig_29302.2 (loc us evm.TU.contig_29302.2) derived from phytozome v7.0 (chr -ID contig_29302; pos 12487 to 12902)
agaaacttttttccccagaagaccaacaagccaaggtatttacttacgatctgctcgtttaatttaatttctatattttaacttataaacacaaacgtagaatttgtaaacttataaaatgaataaattttttaatttttgataaatctttctacatatgaggaggcataacaagaatatctcagatttttcagaagaagtcattttagggttcttaattattactttagtatccgcaatttcatattacataacgatccagcattaaaataatctgaatttttttctcaaaatgcatttggcagtaatttttctaataatatatatcgagaaaaagataatcaaatagttagatttatttccatgcgtaaatcaatgatgaattgaaatgtttcaataaattaatgatcagatca

SEQ ID NO: 77320 - DNA, 836 bp, Carica papaya
  Intron number 1 from transcript evm.TU.contig_24967.5 (loc us evm.TU.contig_24967.5) derived from phytozome v7.0 (chr -ID contig_24967; pos 25910 to 26745 reverse strand)
ctctctacctgcctgagcttcctccctgtctccaggttttttttttctcttcattctcctctttttcccaattttcttccaatttcccctcatctttatgctgttgtaattgaggttttgattcattttctcctagatctgctgacatgcagactcttaatttgatttctgttgatcagatctcgtcttcggtaatacacggttctggttaagtgtctgttatttgcacttattttttcatctcattttccaagtcttctaatccatggaggggaatattaagtaactcaatgtttgatatttattcaattctaggatttactcgcgtacttagttactggaaaaattctgtccaactgattcccttgcgtgcatttcatcttttcaaatgcgacagagttgggcagcttaatggcggggaaaccgacggaagaattttgagattctataggctgctagtatgctatgctggtttttcttcttgatgttttgtggagactgaagaatttgctttttatggtttcactgatttcctacttgtatgtatgtacaagctttataggagtactcagaatgcaacttggaaaagtaactcgattatgtcttttgacttttgtcacttccacaatttattcatgctgtgtaaagttttatctcttgtttgggttctatattacttattagtcctcattgatttacttaaatgtttattggtgaatgtaaatttcccttttcaacattggtcttctgcatgggaatacgtggtaagctttttttcttcgtcatttcatgtggggcttcttctcagggaactacagttagagtggaatttggtg

SEQ ID NO: 77321 - DNA, 954 bp, Carica papaya
  Intron number 2 from transcript evm.model.supercontig_76.9 (locus evm.TU.supercontig_76.9) derived from phytozome v7 .0 (chr-ID supercontig_76; pos 176218 to 177171 reverse st rand)
gattagattatttacatcgggcattggaagtgcaggtacttttttctttcatccatgagctatagttgaaatgttgaaattttttaacctataatatcgaatgctctctcttttactttcatgtacttatttactgatgttgttaagtttaagacaactctggtgaaactgaaagccagattggtatttgatggccataacttttacgcagaattacagtttgatggtttggctttatttgagtttatattctgtcacaaaattaggagaattgttggtcattttatgtaagacgattaagtttttagaaaatttgtgtcaatcatctgcctatgttttaaaagataaaatgagttaaaatgagaaaaagaaaaaaaaaaaaaaaaaaaaaacaaaataaggacaaacaagtaaaacgagtccgaatgagaaaagagggaaacaaaaaggaaatgaaagtctgaatcaaggtttgcaaaataaaataaatatggagaagaagaaacagtttcccttattcttctcaaccacttatcttctttatataaaccaatgtagagtgagaaggactgatctctgcatgtgatcacctctaatatgctatcctccttgtaattatgaaaatttttgctttcaattttctagtttcaaaagtatcatcaggtgagatcctatgaaaataaataaataaataaataacatgatttatgtccgaatgagccaaacatacgggtgaagctataattgtgataaatttttgtttttcttgatcttgaacaccatctgaaactttgaagttctgttttctacaagtaacaaatacccacttgctttgttacagatataagaagagaaaatctttctaatgtgtttgtcattgttagttacatgtttctgaaacatctgtggctgcattggcttgacaggtgatatatcgagatttcaaaccctcga

SEQ ID NO: 77322 - DNA, 406 bp, Carica papaya
  Intron number 1 from transcript evm.model.supercontig_76.9 (locus evm.TU.supercontig_76.9) derived from phytozome v7 .0 (chr-ID supercontig_76; pos 177363 to 177768 reverse st rand)
tcgccattaaaaagctcaacaaccagggattgcaggtagttcttctttatctgcttcctcaatattctaaattctatcataatcaaattcagggtttatcttctattttgcttcattacattatctgtctttactctcaacagctaacagcagctgaatattagcggcatcatattagtttggtttctgtgtttttgagcaaattcggttgttatcaattcatgctttcggttgtttatcgtagatacgacttgattgtttggaagaacaatgtaaagagacctatatccttctcccattatgtttgtatatctatttttcactatatcttcttcttttggcaatcaaagtgtatatcctttgttgtgtagggtcataaacagtggctagcagaagttgagtttct

SEQ ID NO: 77323 - DNA, 537 bp, Carica papaya
  Intron number 1 from transcript evm.model.supercontig_62.1 25 (locus evm.TU.supercontig_62.125) derived from phytozom e v7.0 (chr-ID supercontig_62; pos 791239 to 791775 revers e strand)
ttgtggctggtatgtgttcatggtacagaaaaattttgaagaaatgtggcttttctctctgtaaatcttttcacatgattcctcatctctaattgaaccttcttctggctgacatcttgcattgaagatgatgtttatgagctggttgttttattgattaatttcctgaaagttgggtgcccagaatcaaatcaatgcaccatgaaatgataaattaacatgctcctgcagacggcatagtgtaacctctattcattttttgccttcaatttctggaagcatactgtgtatgctcggtaattctctttcctttgtttgtggtcatatgtgaatcatgatcacactcatgaatcataattgtgtctaatagaaaaggagtaagctcataaatcataaaatgtcttggtaaacagtacaaatatggtctatgatgattttcttattctctttcctgcttctctcatcttggtatatatatttttgctattttcatctggttcaggaagatcgaatatctgaatcaggcaaggaagccga

SEQ ID NO: 77324 - DNA, 957 bp, Carica papaya
  Intron number 1 from transcript evm.model.supercontig_78.4 5 (locus evm.TU.supercontig_78.45) derived from phytozome v7.0 (chr-ID supercontig_78; pos 527993 to 528949 reverse strand)
tctctggttgcttcttgttttgcttataatctcaagtcagtttcttcttcttcttcttccattcacctactgatcttttttcgatttccgtatatacttaatcactcttttcgggtctcagttaacatgtgttgttactttgggttttctatgctcagttgacttcttcacttagtcactgttttcaggtctcagttaactcatgttcttactctgggtttttttatgatcagttgccttcttttacttaatcactcttttcatatctcagttcatttgtattcttactttgggttttctatgatcagtttcactcttttcacttaaagtcactcttttcaggtcccatttaattgtgttcttattctaggttttccatgctcagttgacttttttcatttagtcactgttttcagatctcagttagtttgtgctgttacttttgggttttcagtgctcagttgacttttttctgtgaaatgatactcgcataaccagtgacatctcaaaccgatacagtaatgaagaaatttgtggtcaaagttttatgagttatcatactccatgctcttatcctacctgtttcattttattgaccccggaagaaagagaaaattcaattgaatttgaattaagtgagaaaagaaaagaaaagaaaagaaaaaaaaaaacagaatcatttcactattttccaagaatggggaaagagaaatttaggagatattgtcaccatggaaaaagtaaagaataacaacctagcagagaagaaaagggtgagattatttagtattttcttaatcaaggatcggattatgatgacgttttttgaaaaaatgagtatggcagccttcagatacagataatatttgtaactaacaaagctttgtaattagccctttgcgtaacattgtttgtttttcagttttaggtgttccctttagggagaatataagtagg

SEQ ID NO: 77325 - DNA, 588 bp, Carica papaya
  Intron number 1 from transcript evm.model.supercontig_84.9 6 (locus evm.TU.supercontig_84.96) derived from phytozome v7.0 (chr-ID supercontig_84; pos 715272 to 715859)
agttatctgcgcaagattatcctgttttcactcctgtgagtttacatttctctgggggtctcatgttttgattttttttttttttctttcagttgataatttactgtagtatatttaggttttaaaaacattctacctggaatatgagtttctaagttaatcatgggtgagacatttaggctttattttcttgattgtttatggtaatcatctacattgtgtgtttttacacagataccatgttagttttctctacacggtttaaaccttgtagaatgctttttttaaaaatagtactatatcagaactttgattatgtttaatacaattcattaatcaaaatcagaactttactgtttctctcactacttagataagctctttttcagtttcatggtacattaattaattccttcaactttcatgaactgggtatgtcttatttttgatcaaaatcaaaaggtttgttcatattcaagtgagattctcaaacatagtttctgggtttttatgttgaagaaaagatttattaactttttggaagtacttacagagttacgaagacgaatccttaccgggttatcagca

SEQ ID NO: 77326 - DNA, 506 bp, Carica papaya
  Intron number 2 from transcript evm.model.supercontig_77.5 5 (locus evm.TU.supercontig_77.55) derived from phytozome v7.0 (chr-ID supercontig_77; pos 556655 to 557160)
agcctttctccaagccaatccccttaccagtaagcatgttattataatctatgtacaaaggttagatgtatcatttttggtcatccgactctgcgtctttcatattgtacatactgagatttcatttgttattgcttttctactgagtttctccttaagttaatcaccagctgaaacaaacaacattacttctctgtttaacatgataaaaatgttaagttagtcacaggaaatatttgcttcaactgtatatttcaaaaaaatataaattgcttcaattgtaaagtgctaaagaaaaggcagcgtaagttagtccctgggagtggtgcttgagaatttttgtgctttatatgcatatggaaatataatcttagattgaaagacagttttcttgggagaacatttagaaactcttttggaagcatggtgcttatttggatgctttcttcccctgaaaagaaaaagctgcttacttttatttgattgactattggattgtgcaggag

SEQ ID NO: 77327 - DNA, 546 bp, Carica papaya
  Intron number 2 from transcript evm.model.supercontig_832. 1 (locus evm.TU.supercontig_832.1) derived from phytozome v7.0 (chr-ID supercontig_832; pos 555 to 1100 reverse stra nd)
gcttccgacttcccattattgccatactagacgtactgattaatttcatagtttaaatcttttgcttaattaatcatcttgtttacgtaattaacaatactttttcaacgaattgaaaatatttaatagttaatcagctaatacatacatttaatgattttttacagtaaaaataaataatattatttttttaaaaaaaatacaaggataaaacttcgcatgatctttttaattttcaaaagatgtgaaaataatattaattttcacagatgtattagaaatgatgatgtaaagttaagcaaattgtttatgctctaaaaataaaggactgctttgggtgtaagaaatgtgaattcatatgtttcctaaattttttgggtgttctgagtttatttagaatctaaaacaactcgaagcatgggtctaccttattaataatatcttcgaaaaaaatctcatttgaatacatttgattttctttttatcgagaaacttttactcaaaaatattaattgagtaaaaaaaatattgaaaatactgtaacag

SEQ ID NO: 77328 - DNA, 795 bp, Carica papaya
  Intron number 1 from transcript evm.model.supercontig_652. 1 (locus evm.TU.supercontig_652.1) derived from phytozome v7.0 (chr-ID supercontig_652; pos 2614 to 3408 reverse str and)
tctccaaccttcatcctctttcatttcctccaaaggtaacatcttttttttttctttttcattttaatgcgaaacaaaattatgttgagtttgactctactttttgttctttttcgttttgtgtccatgttgatctgtttctcttttttgctttcttcgctcgtgaactgatgactgcatgagtgaagtcaacagggatttcagcactgcatttgcttttctttacctgagatttaagtagttttaccagttttgtagaatagtgttgtgacccagttgggggacatgaagagaaacatccattcttttgttttaggttataactaaaaagttggtagacattgtcagaaccttttggaccataagtaattgaagaccctgaattgattttcttatttgaatcatatctaagcttattttcatatgctttgagcatatatttcaccaaggcagtaattaggactaatctgaactggtagggcaacaatgattcaatttactattttcagtattatcaatttttgtatgcatatcaacccaactattcaatgtgttgtagatgaatccgattaagaagaaaaaagatagaacctttattatgttatggtagacgtgcaaataaagggtaagaactctgggaaaaaatggtgcccgcatctttttcttttaaaaggccttaatcaaatatgtttacttgattctggaaaacactagttcctcaattttcttttgctctattttttgaactcattttttttctgatttttcatttattttctcgtttatcttcagctg

SEQ ID NO: 77329 - DNA, 677 bp, Carica papaya
  Intron number 2 from transcript evm.model.supercontig_69.3 1 (locus evm.TU.supercontig_69.31) derived from phytozome v7.0 (chr-ID supercontig_69; pos 413554 to 414230 reverse strand)
tcatacactcccaggtatatatatatatatatatattgctagcttgtcgaagaacatgtgtgtgtgtatacactaaatattcgtcctattaattacatatacgtatggacgttcatcttgttttatctaatccttccctccctctcactcggtcgacgaagcagaatggataaatttaaaggattcagaaaaaatacttctccaaaacggtgacttttcaagaagattatgtgaagggaatggggtggcctgggctgggtctgttccgtcctccctggggcctcatggtttttgatttaaaacaagacttttatttgagtttgatctggaaggctgagtttttggagaaattagatttaggattttaatttggggttttcccaaaaatttttctttttcttttacctaaactaatttgaggttttaaataaaatcaaagtatggattatcaaaatatttatttattacccattgcacatatgtgtatatatatatttaaaacgtaattatttaaacaatttatattttggtcttttatttttgttgttttttctttttctatatttttttattaataatataacaaaacgcgattaattaaattttcagagaaaattaaattatgaaagtaatactttgcaggcaattaactcccgaatcggcttggagacatcaag

SEQ ID NO: 77330 - DNA, 747 bp, Carica papaya
  Intron number 1 from transcript evm.TU.contig_29648.2 (loc us evm.TU.contig_29648) derived from phytozome v7.0 (chr-I D contig_29648; pos 7060 to 7806 reverse strand)
tccgagctcgggtaaatgattcaaaaatatacattttcataagtttaaaacatccttcgtcatcactctaattattttttaaaaaattatatgttataatattttattttcaaaaaattatttatcagtaaatcttgagataaattataaattttacaaaaaataagattgtaatactgcatttgatttaaatttaatttatttttattttatttttaaatttctcaattatttaaaaaaaaagaacaaatataaaatctgtatcaacctcaactgtcatattagtttgtacaaaaaaatttagattctttcaaattttccttattcacgtgaatattgaaatctcattatatattttttatgagtgtaaattaagtattataagtagattatttccgattgtttaattatttgataaccagattaattctttgataaatgatcactgtaagtcagtctgactcaatatagtttgaccatttttttttttttgttaacgtaaagactgaattaataattttttttttatcatcaatcaaatcattattcacaatttaaagtactatttttgtatcagttgaatcattgtccactttttttttcttatcaatgaatagatctcttgatttgtataacttaaatgtctgaatttggtataatacttataggatcgatgacaccaatgaaattgatttacatatttgtatggtctttcaggggtcctggtgtggtagtattaatcttatc

SEQ ID NO: 77331 - DNA, 713 bp, Carica papaya
  Intron number 2 from transcript evm.model.supercontig_841. 3 (locus evm.TU.supercontig_841.3) derived from phytozome v7.0 (chr-ID supercontig_841; pos 20428 to 21140 reverse s trand)
ctggtacctctgctcgacctcgcactttcaaacgggtatgactgttctttaaaaggttttgtgtttggcactaatttctcattgacgaaattagatagtctgtgcagttttatgaatgtcctccctttttctttgtttaaaatataaagcaatagtctttgtagtgaagaatggaatcttttgcaatttgttttgcggtacccattttgatgactgcttccagtttgacaaaacgaagctatatttatctaaacaaggagatggcagtctaaaacatgtgaatgtcaatgtattgttctactttcacactgttgactttgttacagtgtacatgaacgattccaagcagttattatcattcttttgtttttgttaaaaaactgatttgtaacattttatccattccttggtctttatcaattgagatgatgcatggaatttttcatgtttgtctatctatcctattaaatttcacggtgattttgttgaagctcataacaaaaagtaatttgtgatgcttttttctttgtatgtttgctacatgattttatcgtttattaggaatctatgttgtaagaatttaagttcaaatttttgtttgataattactctttatccctcactcacttgtacacttgtcgtttcaattaagcagaaagtgcttttaatttgtatcaggaagaagctgaattggaggaagaagaatctgaaga

SEQ ID NO: 77332 - DNA, 655 bp, Carica papaya
  Intron number 2 from transcript evm.model.supercontig_88.4 (locus evm.TU.supercontig_88.4) derived from phytozome v7 .0 (chr-ID supercontig_88; pos 68116 to 68770)
ttggcccctacacttcttctgagctgcgtggtgagttatacaaatgttgattgaaataactagtgaattttctgatttactcctgactttttaatccttgtgaattatttttaatactttactgtaatgaatttggaggactactttatggcaaaaggaaattgtaaacaaaaatatagagccttcagttctttcatcatgccaattggctatagcttgaaattacaaatattttagtactgaaattcactagttaatttctcctttttgaatttcagttgtacaagtaatcaatagcaaggtttcaggacaattgttccatctgtaacatgttcaattggtctaatgagctactgaatcctctgctttccttatttgcttcgcctgcacagagcattgcttaaacgggttcctcttagagagtacacttgtatggtctgagggaagaagcgaatggcagcctttatcttccattccttggttgatgtctggaatttctcaactggcagttgactatactatgggtgccttctcctcccctgtcctattctttttgcatcttttgtttattttgaatgacacctcttttcataaaactagtgatccttatgatgttttctatgtgtagcaccttccaagcttgagaaattgcaga

SEQ ID NO: 77333 - DNA, 574 bp, Carica papaya
  Intron number 1 from transcript evm.model.supercontig_63.2 7 (locus evm.TU.supercontig_63.27) derived from phytozome v7.0 (chr-ID supercontig_63; pos 817662 to 818235 reverse strand)
aagtacacgaggtttcttcgcaagcgcatgaacaccaagccctctcatggcctcattcacttccgctcccccgccaacatcttctcgcgcaccatctgttagtttgtctctccctatccttgaatttccattttaccaattttatatcatttggttgatattggaatatattaacattgtactttcattcattctgttgattaagtattgtgagctattgaataatgattgagtgaacatttttcatctattaggcaaatctgcattggtttgtgcttatgatattatcatataaaaaattgagtttgattttttttttttcggatttgtgttgtttcttttattataaatatcatttttttcttaatacattacctttatttttttgatcaagtacttattttactaatctatagtttataactgatctgagttggatattttttagctggtgagtaacgttattgtttcatagctattagttgataatgggaacactaatttaggattcaacttaattttagcaagggaatttttgcatctaatagagttgtcttgtatttcttgctataga

SEQ ID NO: 77334 - DNA, 417 bp, Carica papaya
  Intron number 2 from transcript evm.model.supercontig_80.2 6 (locus evm.TU.supercontig_80.26) derived from phytozome v7.0 (chr-ID supercontig_80; pos 147093 to 147509)
cagaggttaatttccttgttttggttttggttttctcttgacaatttgattgtcttaacggctactttcttcaatttggaaaatttagcagagttaatttgacgctgaaagaaaccatccttaaatttccttgtttaggagacttcttttttgaaaagttttaccacttttttctatagtagtgaacagtttggcagttggattagactgtgattctggacttgtaaaaaaaaaagttagaagggaaggcttctaaacacatccttaatattacatgaattcgtgacatgggtagctaatctcagttaagaaaatgatttggaaaaagaaaaagatataaacttgttcttgagattaactagatattatttgctttgagcagatttgtgagatttgttagcacaccagaaattcttg

SEQ ID NO: 77335 - DNA, 592 bp, Carica papaya
  Intron number 1 from transcript evm.model.supercontig_62.2 0 (locus evm.TU.supercontig_62.20) derived from phytozome v7.0 (chr-ID supercontig_62; pos 153896 to 154487)
ttcacgagcaagaccttctcagccagaaaacacaggtgagatgaacatcagtatatggtttctatctttttattttttctttgcagattgaagttttgttagtttggttattttcaattcgaatcatttgtatattttgtcgttttatataaaattattaaattttaatacctttttttaaaaaaaaatttaatttgttcaatttttatttttgtgttttcatagttagaaatacaaatacaaatacatacaaaaataaacatttcatatataaaaactcaaatcatgaggattaaattgtcattaaacccacaaaatttagtttgtaacaaaatcaaatcacaagagaaaaatgtaacttttccatattccttaatataaaattaacaccgactttttaaaacaaatgattttacaataaatgcaaaattcattaccaaactcatatttttactactaaaatttgaattcatatacgaattaatttgcaaatgcattttatatttccatttttcaaaaaaaacaaaaacaccctaactctgaatttactcccttcatttgcagaactgtctgtcacagatactggagtgtg

SEQ ID NO: 77336 - DNA, 734 bp, Carica papaya
  Intron number 2 from transcript evm.model.supercontig_70.6 5 (locus evm.TU.supercontig_70.65) derived from phytozome v7.0 (chr-ID supercontig_70; pos 405724 to 406457)
aaagcaagaccaaagctaagaaaagaaaatctaaggtacttatactggttttgtttcagttcgtacctactaattgagaagatttcatctccaagcttgcatgttattgtcgtagacatgttttgcacagagttattctaagtgttgtaaacgactctcttctctgctcccccctacctttaacctgacggcctgaccttgtacaatcagaaacaaaagacagtcagcatttatattttcttatcgaggtttttaatattaaaaatagtcgtttacaaaattattgtggaaaggactatgttgataaattcttttgctcttctgatcattaaaggtaactcaagatattccaacaacaagggaatgtctgtggtcactggtcacgaatataaactgaagagactttgagatcttagtacgaggtctatattttggttaagtttgatatgcattgttttctttttaaaaagataactgttaagtcaatctgcaagtacgctgagctatgataatgacaagtgattatctgtgcgccagtgttatatggctttattcctcaagtttgccaagccctttgtttcaggaaaaccaataaaaagcttcaagtaataatagggcagatttctctgtctctttctctctttgaatctttgtccaaatgttttttcttattggttattgatactcagatttatgtaggataaggttgtggctgaagatattgtcaaggcaaa

SEQ ID NO: 77337 - DNA, 982 bp, Carica papaya
  Intron number 2 from transcript evm.model.supercontig_804. 2 (locus evm.TU.supercontig_804.2) derived from phytozome v7.0 (chr-ID supercontig_804; pos 12846 to 13827 reverse s trand)
aaggagatgtttgccctttgaatccaaccaaatggtgcttctacgatctctttctctctttgtgtgtgtgtatatatatcaaataattttccatactgggttttttagatcataacataaattaatttgtaggggaatcagcacaaacgtagaagacaaagtaaatgtccagtagctggaacaacttcagtttcctttagtcttcccgaagatcttctcgtccttgccgataatattgatgttgttagtgacattttcttcacttaactctctaagattgtcttttaattcaaatgagttttgttaaaaagttgttaatggttaattttcttactaatagtacactccggagaatctccttccacccaatataaatcgcaaatattcgatccagcaaagaactcaaggctggacggttgagaaacggagacgggatactaaaacatgtgatacagtaagtcctttttagtttttccaacttaacaaattagttttttagagtactatactcatcttgagatataaaaggaagcttgataatatttacattcatgtaggattgtagtactacattcataaggaatctaagggatcctttcgatcagttatcgaggtaactgattttatactctacgaaatctatccgaataaacccactcccaaaccaaggaagaagaagacagaagaagagaatagttctttaacaccaccaggagaaaggaagaaggtgggaaggccaaggaagaataaggaggatggggaacaagcgagtgccttagtgaagaggaaggttggcaggccgaggaaggtggtggatggagaacaaagcacttcttctcctgtatgttggttttgagtgtctatatatatacatcttgaaaatgttcaattaatgagtaacattatagtattaaaatattttatcttaagtcttttttttttatatatataggtgcctttggtgagaaatcctagtaataat

SEQ ID NO: 77338 - DNA, 486 bp, Carica papaya
  Intron number 2 from transcript evm.TU.contig_28852.2 (loc us evm.TU.contig_28852.2) derived from phytozome v7.0 (chr -ID contig_28852; pos 9651 to 10136)
gttcctgggtattaccaatactttttgtttgctttatatttgatatgaagtaagatttgcaagtgaaaatagaaccatttattcttttaaaaaaatcagaaacttcactctgaatttcatacatgcattttattaaaaacaacaaaattatgaaattatgaaattatttcaaaataggttgagcaaagcccattatgatttatagaacaaattattcaaacacaaagaaaagattcaaaatattttcttttctaatacagaaattctcatttctttacccttttcatgcatatctctgtcaaaaattaagatttttatcatttgttttggttttgactcttgatagtggttcataattgggagctaaattgtcctataaatagtgtgtgtgtgtgtgtgtatagagaacatattattgtcactaccatagcaacaaaatctggctttgcaggcacgaaattgtaggagaagccatagaagtcggga

SEQ ID NO: 77339 - DNA, 984 bp, Carica papaya
  Intron number 1 from transcript evm.model.supercontig_70.9 2 (locus evm.TU.supercontig_70.92) derived from phytozome v7.0 (chr-ID supercontig_70; pos 620056 to 621039)
acgaactctttgagagaggtattttcgtactctacaattgccttcacaactacgagtcctcaccctaaaaccctaacctcctgcgtgatagaaggaattggcggcagccaggtcgagaggctattggggaggagatttgaagaggagtaaaaacagctggaaaaatggttacgtttcttcttttctctctcactcttgcaacttttatctggatctgaacatctgattttcttattattatcttttcattttatttagttcttgttacttcgttgaatcgttggttttttgaggtttctcacgtaatttgttcatacgaggacgagattttcttgttttcgcttgatagttgatctggttttgatacaactggaatgtatctatggcgtctaagacgaactgggaaactgagacgctatatcttatttgatagtttgcgtaaacctcgaatgcaatagtccttcctacttaatgtgtcattagtatctcatggacaacagacatggatcggcatgcaatcagtctgattttccttgttctgaactgtaattaattcataatttatctaagcaaacgtttctgatgaatcagagtactgagatatatatatatatatagacggagatacaattttaatgagagttgaagattgttgacttgctataaaagtaatcatatatgtaaaatagttccatggcgttatgtagatggcaaatgaagaacatctgatattattagtgtggttttatttgtttaagaactttattttttgagctgaggataatgtagaagtggaagggcaggtttatgttttagaacctcaaaggttgttttagggtctgttttctttgctgcatagagaaattttggttccttttccttttatttatttaattatttgtttatacttctgttggtttttgacctatgtgtctttggtctgttacaggcgagagggctgaagaaacatttgaagaggcttaa

SEQ ID NO: 77340 - DNA, 951 bp, Carica papaya
  Intron number 1 from transcript evm.model.supercontig_92.8 3 (locus evm.TU.supercontig_92.83) derived from phytozome v7.0 (chr-ID supercontig_92; pos 701278 to 702228 reverse strand)
acaagctcaggacactcctcccttgtaattctaaggtaattaatcagttaattaaaactcttctgctatcacctgtaattaatatttacacctaacctgtttttatacattaaattgatttttaagtttccatggcaatttcaaagttcaagatttagtgtaagattataacgtatgtatacgatatatgaaatggggttttccaaattacccataggagtttcagattttcggcgaaatatggttttgatttactggattgaagccgataattttaatgctgtgatattcttccgtgctttttgggctgtttggttcatgagagaaaaaaataaagttggaacattgaatataagacttttcataactttttgactccaaggaattaagccaaaaacgcgtacattagttgaatttagataattcctaaaccacgatcattaattcagttgatttaaatgaaaaacttgaaatcattttctaatcctttttggaaaacaaagaacaagcatctgggggtcaaaccgcatatatccaattttcggtatattctcgtactaagtagtatttatacttcctgtgaatttgtttttcatcaattatttactaacagaaggagaagacttgggttatattacaagttcttaaacaaaatatatgtatatatatttatttctttttgattgaggatcctcaacacagaaaagtacggacactgtgctgcctctgtaaagggagagaaaaaaagctccgtaacctttccatggttagtttctagggttacagtttgtttgggaaagttgcgaagctttttcaactgcgttagggtttctatgtaatctttaatatgtgcgtgtgtggatatgcatgatgattgtttatatatgtggatgtgtgcatgtgttttgttcgacagacagacaaagcttccctgctagcaaaagtggttca

SEQ ID NO: 77341 - DNA, 627 bp, Carica papaya
  Intron number 2 from transcript evm.model.supercontig_98.4 6 (locus evm.TU.supercontig_98.46) derived from phytozome v7.0 (chr-ID supercontig_98; pos 905759 to 906385 reverse strand)
aaagggtatgtggttctcctttttctttcttcctcaggtagcttatttgccgaaggcagaaattgaaccagaaccgcctgtgagggggccaggttatgaccatctggattacaatggtggctgaaaatacaaaaatgaaatataaggaaatgtattattagaatgttaacaattaagttaatttatttcaatcaattaagaacttaaaataattaggatttagctttattaataattacagctctataggaagaggtcttggctttggtttgaaccttaggaaccttcattcctctttattattcatgtatgttgcacacaactggggcctttgtgcaaggtctttagtctatacttgctttcaaccatttggatttgtattctcattggaagtttgattttccacttccatatatgggattttttagaatataaataagaaaattgagcagtttcttttcaatttaaacttatgagataattggccaataagttaacaaatgtcttatcatttttttgtagatgaaacttaacttttcatactagatttctagagatatgcttgctaatgaatgtaattttaaacgtaatattttgtatggaatctaggtacgaacctccaaatac

SEQ ID NO: 77342 - DNA, 601 bp, Carica papaya
  Intron number 1 from transcript evm.model.supercontig_79.4 4 (locus evm.TU.supercontig_79.44) derived from phytozome v7.0 (chr-ID supercontig_79; pos 865644 to 866244 reverse strand)
ccgattatctcaaggtgtactgtgagtgcttctatttatttgtggattcgtacaaatatatgtatagaagtagataaaaaattcttcacttgttatgaagtacttatggttatctaagcataattactatatacagtttctgaaataaatttttttttcctgataccagcttattaaggattttgacatctttatatccagcgtctaagtttctttccattaggaaaattgattccatgatgagtctttgcctaattgtttgatcatagccttctatcgtcatcatgtcttctgttcttttatggattcataatggtttttaaacttggtgttaaaagtttttctaattctttttctgttctctcttgttattaggatctctcttggagaggcttttctgtttttttttttttttctccttgacgtgaatgaatattttgatttgctgcaggaaaaatttttccttatgccgaaatatttaaatggatgtcatatggaaacggtaatctctgtctaccatatatgtgtttaattgcaagtatgcaccctcacttgcctgtagtttcatgtatgattgtgttttgctacttgagctttgtag

SEQ ID NO: 77343 - DNA, 777 bp, Carica papaya
  Intron number 3 from transcript evm.model.supercontig_66.1 0 (locus evm.TU.supercontig_66.10) derived from phytozome v7.0 (chr-ID supercontig_66; pos 116452 to 117228 reverse strand)
gatccagaagaggcagatctgtggctaataaacacgtaaaattcattgttttttttttctatttacatccctaaatcttctagttctcttaatttcattgcctatttccagatttcatacggtaaacaaaataatgctctggtggatgcttcaattccttgtatctaatggtattatcatttttaaggattaattttatgcggcagctcatccattcagccgcccatgagttcaagctgtttatatcagctggttaattgcggaaatcactggaaagatatagtctaatcgtataaataactttccttctcatcattggaaaaatatggtcgatgctttctttcctattgtgcatgactgcagtaactgatgttatgtacagtcagtaaagcattatgattgcaccttcttccattgtgttttatccctctaaggctcagttatctatcttgaaaggccagattctgcattataaacaaatggattgcttttcttactgccatcagctgcaaaatagtaattcttaactgtttgtttttaccttctacaagaaactgccattaaaaggtttaaatttatcatgtattttatctgtaagaatgctagtctaatccgcatttttcaaactgttttgatgatactggagatgccagcctctctggcttcccctggcttttatgctagggtcatatttgtttgtttaaagtaaataaaatccttctgtatttggaaatttttagtgttatgcataatgttactttgcattgcctgatacag

SEQ ID NO: 77344 - DNA, 707 bp, Carica papaya
  Intron number 2 from transcript evm.model.supercontig_85.8 0 (locus evm.TU.supercontig_85.80) derived from phytozome v7.0 (chr-ID supercontig_85; pos 554288 to 554994 reverse strand)
tcttcttgtatgtatatgtttgttttctaatctagctgaaatttattttttatctgtcttgattctagtttcttttggtaattgaaatagagaaactcacctttcctgatgattttgattaaatttgagaaactaaaatttagggtttatattcttttcttgatgttaattggtaaaagaagagtaacactcaacaatttaacaccgaagctatgcaattatcggtttattgataattgtaaaagttacaacaagacaaactttgtcatattcaacaattatgatcgatctctcaaaactttcagttgattaaagcccaaatgttcctgccatggtggattctggtacaacttgcaacatcactaagtttaggcctttataatctagaacatttcttagttgtttcctcaattgcttgcgtcaccaatttcagtttcttggtgagttgggttttcctttcttcctctgtatatcgcagccataacatttgttttaacctcaatttctgattgatcataatctcatttagtcttgtatgttttcttttggcttttggtcatgatttccgtggtttgtggtactatgtcgacttgatcatgatcttgacttcatcttgatcatggtcatggtcatgctcatgactgtaaatctgaatttggtttacaaaaaaattctgagttttggtcttggactgattgcattcagtc

SEQ ID NO: 77345 - DNA, 830 bp, Carica papaya
  Intron number 1 from transcript evm.TU.contig_42599.1 (loc us evm.TU.contig_42599) derived from phytozome v7.0 (chr-I D contig_42599; pos 682 to 1511 reverse strand)
tgattcctgaggggggcgctaatacttcagtagaggtaattctagtttgcattttccttttattctttgttattttctgggatttcatttcaaccagtagatctgatctatctcagcacaaaaatacaagaacttgtcatggtcaaatctcaatccaatgttgagttaggtgcatgttgaatgtctggaaagttttggctcacctgcttaccattgtatgcagaatataatataatgatccattttcttaaaatttttttacacaaggaaaacgagtttcctggtaaactgaatatgaagcggacaatccctatttaacagttgcctttgcacactatcacattgtgctaggcaattttatttttagaatgagcaaagggcaagtggcagatctgactgttgtggatatatatatatatatagggagagagagagagatgaatttcttttaagtggagaaaaatacttgtttgctttcctgttcacattcctgacctatcgcgtgcatgttcctttttgaatgtggcttttgaagagcaaaagttgaaatcctttgtgaaacatatgcacggagttgaagtatttcatgaacagagcctagaaaaattaaaatgtttttaaaatgaattcaactgttgataaaagtataactgtctacagggtaaaaactgaatggatatttaatgttcctgcatcagtacactttcaactgtcagtttatttggagtgctgaaaagtggtgtgtttatggcctatgaatataataaccagttccttcttgcggtcctgttgttgatatatataggttctacctcaggaagcccaacctg

SEQ ID NO: 77346 - DNA, 725 bp, Carica papaya
  Intron number 2 from transcript evm.model.supercontig_62.2 3 (locus evm.TU.supercontig_62.23) derived from phytozome v7.0 (chr-ID supercontig_62; pos 182870 to 183594 reverse strand)
gtgtggctgacaagccgcctcccaattacaaggatgtgagctctctctctctctcttttcgtctctctgttaatgtatttgtagtgctctgaagtaatcatcttaatagctctgtttcagaggttggaccatcgaagaggattttccacatctggtttttctttttagtttctggatgagttgagttccagaaattagtttagctcggagacccagatttattgtcataagcattgataatgttctgaatatttgatgctttatcattcagaaagtttctgaaatcattagtaccagtagccaatcgttaaggataagacagggtttggaatttgcttatttggtgctaatcgttctaatttatcagtttgtttagtgaaataagcagctcgcttgttaggggcttcagaaactacttttgaagtccaacccatatacaaaatagttagatatttactaagatgtcaatagggtccccaaaatcctccattgaatacgaagaattacccaaaataaaaataaaaattaagcactctatttcagttagatgtaattctttgttttttgaatgagagtatgcagtgcttttacttacagcactttcctataaactcccaaagcctcgaagaactagtatggtttggataatgttcatgctgaattgatatattgatttcttgttcattgcaggagccagttgagcctttgaggggtgttagaaggtt

SEQ ID NO: 77347 - DNA, 617 bp, Carica papaya
  Intron number 1 from transcript evm.model.supercontig_81.1 39 (locus evm.TU.supercontig_81.139) derived from phytozom e v7.0 (chr-ID supercontig_81; pos 703127 to 703743 revers e strand)
tgcccgaatcaaagctgagagcccttgtaacacaggtatttagatttcacaacttgtttcccatggcttttgggttcactttttgggtattttgactttatttctctggttagagcatgatcagagttgtgggtcatttggataattcgggcttggtgggtgggtaggatggagctgtgttttgggtgttcaatccagctattattagttattatgttttatttgaatttaaatttgaatcttcctattccttgttagatttaatttgttgagaatatttatgtttaatttttgattgattattagctaaagttggataggtctagatcttttctttgtgctcctgtttggttgctgggaaaatcttggaagataaaaggaaagtttgagtctttttttattgctgaaatactcaatatatgattgattgaacctcttatctttctcaatttcagtctttcttatctctctccccaatcacagagcatctcttcattgataatctcttattgatttaagaaatatgattgattaaacctggaaaattcaatatgcagatgtatccgtagctcttgttttatgtagagattgtatgtttgtaggggggagcttgaagt

SEQ ID NO: 77348 - DNA, 928 bp, Carica papaya
  Intron number 2 from transcript evm.model.supercontig_73.5 8 (locus evm.TU.supercontig_73.58) derived from phytozome v7.0 (chr-ID supercontig_73; pos 823430 to 824357 reverse strand)
acacattaggaaagtataaggtactacatccatagttttactttttattacttcatatttctagtctacaaattttccgaaaagccttgtctcaagggaaggaaaatttcaaaaccttgttggaggattgttacttgagctcaaatccatgtgtttgaatccaccaaaagaacgctttatcttcttatactgtgaatacatagtttatactattttttgagaaaaaaggaacaaatatatggtaacaaagcaccaaatggttttcacccaagtgcaagaagctttacagctcaatcaagatatctatttggtcgcccaaatcctttagaggatgacacttgaacaaagagtgagtaaccataaatccctttctctactaaaaggagaagtaatgccctttaaagccctccactccttgcaaaccaccgacaagacacccaaggaataagaagatgagatttttcctccttttatcaccctggatgccatgtcatgcaaaatctcatcagctaaagaaccagccatcaccaagcacaggccaatgaactcaaagggcatgcacgaaaaatccgaaggagaaaggacaccatagaagagtggattggtgtcgtccaccctcgtgtacaagtagcacccagtcactagaatcttccccctcttttgataattgtcaattgtgacaatccccttttgtccacctcgtaagctaagtttaggagacacattaagcttccagataaggtcctaagggaaaatactgcagggtgaggcaaaatggtttagtttgtattgttaaggtccttaattgaattatatggcctcatttcataattgtatcttcattattatatgcctttcttttttttgaaataatattgttatatgcctttcaggaagttaaacacaaaattctgtttcttctggagat

SEQ ID NO: 77349 - DNA, 728 bp, Carica papaya
  Intron number 1 from transcript evm.TU.contig_42041.1 (loc us evm.TU.contig_42041) derived from phytozome v7.0 (chr-I D contig_42041; pos 450 to 1177 reverse strand)
attgaaatacttgggtattactctattctttagttttgataaacaagaagaataattgcttttttggtgtcattttctgtttgttgactggaaaatttgaaatcatctttggaaccttttgctcttattcattttgtccgggagaaggtcaatcttttcctgttcctttgatttctcaccattaatgctcatgttttagtattcctttgatagaaaaataaatatattagaaaaaggaagaagaattacatcatagaggctaagctatcctctgaaaacatataaacagaaaaaaaaaaaacaaacatgagaacaaatgacagaagtgaagaaaacaaaatactagcaatataaaatagtattccaataccattggattttggaaagaggaatacccctgaagaaaccatgtgctttagccacagggaagttaggcacacaatcctatcccacagatcagtaacaaagtggaaaagctacttgaaaatatggttcatacctgaaccatgctagctgtttggacatgtggaacatcatgttctgcagtgttttccttctctcaaaaaaataaaagaatgttcttcaatgttttccaatatgctagatgctgtttgcattttagactcttacaaatcatgaaactattagtaatagcttgcatgcttttagaattgtttgaaagtccttttatgtcttactgttaatgtgtagaggacaacccccagatt

SEQ ID NO: 77350 - DNA, 314 bp, Carica papaya
  Intron number 2 from transcript evm.model.supercontig_7.3 (locus evm.TU.supercontig_7.3) derived from phytozome v7.0 (chr-ID supercontig_7; pos 137761 to 138074 reverse stran d)
cgcaggtctcgcttgttcccgaaactgaggtttgtttgttctagtctgttgtctttttgctggaaaaatgtggaagatttggaacttttggactacatattttcatcatttcggggcttgaaagatcaaaatctccatttataacaccgcatttgaggcttaagcttgttatttttagtagttttttttatctgggcataccagagagtttctttttggttatttttcttgtcatgagtgtgacttgagcttcttgacatgaagattgatttttcctctttcttgttatgtgtagcaaattgagcaaaagttac

SEQ ID NO: 77351 - DNA, 551 bp, Carica papaya
  Intron number 1 from transcript evm.model.supercontig_7.3 (locus evm.TU.supercontig_7.3) derived from phytozome v7.0 (chr-ID supercontig_7; pos 138087 to 138637 reverse stran d)
tcaagctccatgtaagtatgcaagttctaactgtgtatatataaacctcttcttctgtaatctgtgttttttttaattatattggccaaatgggtattggtgctttttttttctttttcctttttggggacatgagcttttgggatttgtgaacttggttcgtttttaaggtttcttagtaatgggattcgtttggttttggatattattgagggcaatttgagattttctaaatttgggtttccagttaaattggagttatttcctgaataagaatgctatagtcctagaggttctcttttcatgaataaaattatttaattgtttctgcatctgatttctgtttggttcggagaaaatggaggatttccggaaatttgacgttttgttatcttcttccttttctactgctgcacttagcgagaataagactgcatttttcttttgccattttggataactacgaatcaaatccgatgctcttcgtacattattcttgtgaatttacagtgaagtacttatttttgtctatcaggcagaggcagcaaccg

SEQ ID NO: 77352 - DNA, 545 bp, Carica papaya
  Intron number 1 from transcript evm.model.supercontig_67.5 3 (locus evm.TU.supercontig_67.53) derived from phytozome v7.0 (chr-ID supercontig_67; pos 713352 to 713896)
gttctatttcgttcatgttacgcagaaaatcttgtaccccatatcttatattttcttaaaaatcttgcacctttctgacattcacctgatgttatacaggtataacttttctcagatggtctttgaagaaactgtaaatatgcccatcatttttccattatctgcttgatgtttggctagtatttccttaatcattgaataataatcgactctgtgtttggctagtatttccttaatcattgaataataatcgactctgtgtttggctatcttatatgcttttttttttttgcttgacttaatggaatgagatgtctctgtattatccgtacacatttctacatttcctcaccacttctgagattatcatgatgttacttttctttttcccgaacatttgggaattttccttatatgacctctcattttctgtcttttgttttttcccttacacaccattttcatgttctttttttgtattcacttgccctagtttgattgtctttattgctaatgctatgtgttcaaattgtaggagaaccgtt

SEQ ID NO: 77353 - DNA, 904 bp, Carica papaya
  Intron number 3 from transcript evm.model.supercontig_67.5 3 (locus evm.TU.supercontig_67.53) derived from phytozome v7.0 (chr-ID supercontig_67; pos 714042 to 714945)
ttatccgcgaacagagtaatattgttgctagacaggttactttctcatgtttattttgtatgtatgtatttctacagcgattgctttctcatgcttattttgtttgttatactccataatcatgtatgtagtttgacatgaatattttattacctttgatgttggttaagatctaagtcataaaccagtttgttagcagtcttatgctattcaaaactatcctcccataggtactcctgaaatcttgaggctagaaggtatagtcatagattgttgaaatctattttttttttttcatttttatttcaaaaaaaagaaatctattttttccctgagttttttacatgtaaagtttaataatcatcacagagtcaatgatttgtttagataaaaaacccctgtatattacgtatatgacaccaaaggggtgttgctcctattcgaagaatttacaaatcggttggagcatcaataaccctcccaagaaaaaaattgctgcacctcacctttaatgcaagtagaaaattttatgtcaaaaacagtgttgtagataccttccaaaacctaatgagtatgaagtcaatgagcacctaagaagttcaatactccaatcttggttatgcgcaattacatgtatctctatgaaaatctgtttgcaagatgactctgaattaaaatttgatgtttttaaagaaaaccttgtttttacatgttagactgactggcatttatttggatgtgaagtagattatagaggcattaactcaatgtctgtttatgaggtttagactttcgattaattgtggtgattgctcaatcttggttctactacaattcccatcttataatggcctttatttttacattttgcagttgctccgtctccgacgtcctttcatttctt

SEQ ID NO: 77354 - DNA, 903 bp, Carica papaya
  Intron number 1 from transcript evm.model.supercontig_9.27 3 (locus evm.TU.supercontig_9.273) derived from phytozome v7.0 (chr-ID supercontig_9; pos 1854313 to 1855215 reverse strand)
ttagaggtgcgtgtggctcacgcacctctgcagcctgcggcacgtgtggcttacgcacatggaaaacaatatagtgtattggccagcaatgagcggcgatcccgtatggggtggcgatgagtttagttttttgatagttgagtaccaacttaacctattttgttattttagagtttggaaaaaacgttaaaataattttactttgaccctgataccatgaagttgtttttgaagaaaaaatattctctcttcttatttcttattttttgtgttgttacacttaatatatatatagggaattatccttattttaatagggttctaattatattaaattactgaattattagaactctaaataataaaatatcttatttagcatagtatcctacttaatatgaaatctttatcaacagtttgtgaaccatagatcttttaatgagctacaattccacgtgatgtttgtttatagtatttctctctttccaaagaatatattgctcggtccctattatcagtagaatgaaagaacattggtgagttgaataatgagctttctatttaagggttgctagttaaccctaaccaagagtgtgttgtcaggcttgtttctaggggttgccagttaaccctcatcaagagtgtgttatcgggtttcctgggttcttttacgtctctttatgctaccatgacaagatggttggaagttggaagctatataaagtcgattcttggggttgcaaaaaagcaaaggtggtaccagtcgatggcttggtgaatatctagagatctctctagcatgggggtttaggtattagacctgttaacgagttgaataactccgttttagttaaatagctgtcgaggttcatgtcctgcatgcagaggtcattagtgccaaat

SEQ ID NO: 77355 - DNA, 729 bp, Carica papaya
  Intron number 1 from transcript evm.model.supercontig_77.8 6 (locus evm.TU.supercontig_77.86) derived from phytozome v7.0 (chr-ID supercontig_77; pos 1087287 to 1088015 revers e strand)
caaggctgttaaatattggtatattctatttggcttcaagttctcatctttcatttcattaaatattttgttctgcaccaaagttttcgaagaaggcgctgtgggtacatataagctagtcatgctttttaaaagtgaatgctgagatagaaaggaaagtttcaataaggaaacactcccgaatgtgttttgcttcatctctatgaacttttcaactattgggatttgcaatgctagtttgtgtattaggttctataaaaaactctggcctgtaatgaatactgtaggactgtattaatgttaaaaatgttgttcttaggggctagcaccagataagctcaggtagtgaacaaacggaatccatggttccaacgtatttgaaacttgagcttctttgaaagataaaaaatgtaaagatgttaggctatgtatctgaagagtttaaatttttctccgaaatctttggccttatcttttgggtcatgaaatgtatttggaggaactcttggtgcaacagtgaggttgctccattttgaccataaagtcatggttttataatgtgggacctttatgcgctgggttgcctatatatgtagactcaaaactaagatctctgcatgacatgaactgattaagtttctcaaatttccaatccatttatttttttatttatttgtttttcttgtgtaagcagctctgggaagtgccaaataattcactggaggcaag

SEQ ID NO: 77356 - DNA, 1020 bp, Carica papaya
  Intron number 1 from transcript evm.model.supercontig_71.4 7 (locus evm.TU.supercontig_71.47) derived from phytozome v7.0 (chr-ID supercontig_71; pos 727422 to 728441 reverse strand)
gctacagctcagattgtaaaggtaatccatgttttcaagctttcactattaatctggattaaggttatgtttggaataattgaaatgtatttgcggaattacttcagaaagctaaagttgttttggcaatgatatgggaaaagtatcttgtaaaatgataaaaattgatatcttagagaaatcaaattgaactaaaaaagtacattttaaatttcataagttttaatagaatttgaaatataatccttttgttctcatttagaattatctaagaggtctattctgactattctaaaagaaattttcattatctaataattaaataaagtgcaaatttttaagtgagttacacaagagaagctcatttattctaaatatacttggcactttaaaaataatacgttattagcatgaaataattagcaaaaaagagtctatttaattaatgagcgctgtaaaatcaggtggacactgaaagagaaaattaatgggttaatgaagattgtaaacatcaacttggtttgaagaagatttatctgaatttgttgatagatgatgtaggacaaattgggaaataattagaaagaaaaaagtctatttaactgatgagcatcgtaaaatcaggtggatactggaagagaaaattgatgggttaatgaagattctaaacatcaactttgtttgaataagacttatctgaatttattgatagattatgcagaaaaattaggctgcccactctgtcctcacctaaaacaacaattctctttcactgagaagaactattggaaattaatattgatccattcctcagctcatcttttaattcaaaggtacttttaggatttgatatttcataattacaaacttgatgtttcttgggattgcatatttcaatcttcttttacattgaagacagcgtggtaaatgctaactttactgtttgatgggagagactaggagggagagagagagagagcgattctgagtgatagcacgagggattgttgtctttcagcg

SEQ ID NO: 77357 - DNA, 828 bp, Carica papaya
  Intron number 1 from transcript evm.model.supercontig_7.5 (locus evm.TU.supercontig_7.5) derived from phytozome v7.0 (chr-ID supercontig_7; pos 166172 to 166999)
cattttatattgtgaaagaggagattcaagaatctgtaagttttctgtgttgttgcaattgttgttgtgttgttgttatggttcgtggttgtgaggacatagctttcttaattgaaaaaataaagatgatgtcaaggatatagaaaagtttggtttattacttttgggctatatctatattaaaagagtatataattattttaattgtggtctttagattatttatattgtaattctttagttaattgcagctaactttttgctcttgctctttagctaagctcttttgaattaagaaaaaaaaggtaaaaagctagtggattaagtcaggggattttcatgtgacacatttgtgaaagaaatatgtgaataatttgatgcaagtggttgaaagaaaatggatctggaagtatatttatgttgcaatagccatctctaatcttcttaaccttgttgtaatgaacatattgggattttagcacatggaacagaataagtgcttatatgtgctttcttgtgcagataagtacctttaatatggttaggttctgttaaagcagttatttttagtaaatgagatctaggtactgtcaattgaggttatttaagatgagaagaactctcaattttagtttacaaccgtaaattatggatctccaggttggtttattactaatctctcttcctctctcttacttgtttgtgtggttgctttgcttggaattttttttattgaaatgatctccttgcagtcatgaggatatatcagctaacttgttttctgggtcaactttgttagattgataagttgcaatctacttttcgcca

SEQ ID NO: 77358 - DNA, 471 bp, Carica papaya
  Intron number 2 from transcript evm.model.supercontig_85.1 29 (locus evm.TU.supercontig_85.129) derived from phytozom e v7.0 (chr-ID supercontig_85; pos 887758 to 888228)
taccttactccatttcggttttcttacttcttctggtttgacccttttttgctttgtgataacataacttgcataaaatttaatacaagggagaaaatcttgagaatatttgcataagggcctagatttcaaagcaagagaaaaccaggataaaaacttgcagccatggagaaatttgtctggttgcagctctcaggtggtgataatcatcctcataggaagacaaagggcaattgttcttgtaatgagctgagctgattataagataaaaggaaaaaagaaaaaaagaaagaaagaaagtagtggatgccattttgaatctgaaaactgtctggttttgcagttgatttccagagaagttctgatagaggacctcctatatattccagagggctttttttattctcaaagtttctaataaacatagcagtatgtgcttttaacttgcatatatgtttatttgtgttgcag

SEQ ID NO: 77359 - DNA, 447 bp, Carica papaya
  Intron number 2 from transcript evm.model.supercontig_65.1 12 (locus evm.TU.supercontig_65.112) derived from phytozom e v7.0 (chr-ID supercontig_65; pos 1070833 to 1071279 reve rse strand)
atcctaggttggtccttgattgtttagacttcagaatttgattttggcgtttgatgtccaatgaatcaatttgctgttgatgctggtttattttccctcatctgggtttatggttttatggttttttgttgtaatttttggatttcgtgatcatgagtaatttctttctgggttctaggatagaaaatggacttatcaatctggtgcttgatgtttttcctggttttcttgcgagagcaattatttagcccagtgggtttctagtatttcgttttcacttccatttttgcaccgacattaacatttcttagcagtcaattcttattttttattttgcaaattggtctggattcacgtttcaagagctggcattgaagatttagtgtcgttattgtttcattttttttaatataaattcaggaaagcagaattttggatcgtggaaag

SEQ ID NO: 77360 - DNA, 1063 bp, Carica papaya
  Intron number 2 from transcript evm.model.supercontig_8.11 (locus evm.TU.supercontig_8.11) derived from phytozome v7 .0 (chr-ID supercontig_8; pos 130513 to 131575 reverse str and)
cgcttggagtgcaatttgactctcttccttcaaaagtatttcatcaaaatatgggtgtgttgcttaatacttccacttctgttgctttattagactttcttagtggcatgaaaattgcttttagtatctttagtgtggtcataatcactatgtcactgctggttcttccaaataaaattaaaatattgtaaaggttggctttcctaggttggtagacgagagttatgggcctggttgggaagtagaccatgtaaatccaggaaatgattctttactcttattttatgtgtactttttgtgttattttgagagagaaaaaaaagagttttttgatagcaattgctctacttttcatagaactagagatttttgttccaaacctgagtgccctatttacagggtatcctattctagatggtgagtgtttggttgacctcatagacatgttggtttctgatcttctgtaaatccattatatatgggtggtactgtcatagtgcctaataaattgatccatcttattccaagataaatttctcccttatcttgagatggaaaaataaaagaaaaagcagtttgcttcctgatatgagagattttttgctttgtgttaagtcattgggaaattgcaggcttgtgacagataggagtgactggtatagtctttgtgattgttccaatatttattttaaggaagagctttagaatgaatgtgaaagaatgaggaagagtatgttttctatttgatatttatgcagtttcctgtgcagcatgttcaaatgaaaattgctctatgacagagattttaaatatcttatacttttttgacgcgtgtagattctagaaattctcaagcttcgtatgaagaaaaacaaagggcaaaaaaaaggagaaaggtaatggaagtgtctttaactgttttcacggccttctttctgtctgagtcttctcagctttgacagttatttgtacttattgttatgcctcctttttatcttatttaagttttaacgtgccttgttttccaggtttctaagaagagtcttcttgattgtcaggattg

SEQ ID NO: 77361 - DNA, 533 bp, Carica papaya
  Intron number 1 from transcript evm.model.supercontig_8.11 (locus evm.TU.supercontig_8.11) derived from phytozome v7 .0 (chr-ID supercontig_8; pos 131826 to 132358 reverse str and)
acttcagcttcagacccttgaggatttctatacaggtgcacagctttgtctttatatgcaaccctatttttccttttttgttttgatatctgttttaagaacttggattaatctggaatagacttccttttttgtgggtttattcttgtttatgtctggcatgaataataatgagaagaatagccttcttaaaaaaattagaaaccgttttgttctcttcatgttgccagtattttcttgaagctccagattcccctggtgcttaaccaggagtggctgaagctcccaggtttacttgcaaaagatttcttgtcattatgaaaggacaaaaaaaattaagctattgccctgtttctgctttgaaatcaatccataataagggagaaaaagtgccggaaattaggaaatgattttgtttatagttcttttctgtgatcaacatacaatttagctgctgtatagtatattcatgtcattatctaaggtggtggtgttccatgaatacagaggaaaactatcccacacaagaggcg

SEQ ID NO: 77362 - DNA, 447 bp, Carica papaya
  Intron number 2 from transcript evm.model.supercontig_92.1 08 (locus evm.TU.supercontig_92.108) derived from phytozom e v7.0 (chr-ID supercontig_92; pos 821684 to 822130 revers e strand)
gctatgtaagggtttctttaattggttcctttatctgcctggtagcttttatcttcctctttgaggaggtttgttgctctttttaattgtatgctaatatcgggggaaaatggataaaaagatacagcttgagattgtatgtttgtgttgtgccattttttttcaacctgctgattcgtgttgaattgtggcatcaataataatttatgatatttctttgacaattctatttgtttaagtgaacttgatgaatgccttcaatgtctaactttgagaagaaagagggatttttgcatttgttttttcttcattttgacttcagctagaattcaaatcccgatctctattggttcgcatattaggagcttcattctatcttctgagtgtgcctaagtatgattcttcgattcttgcaggaacttgagggaagaccattgagggtgaata

SEQ ID NO: 77363 - DNA, 871 bp, Carica papaya
  Intron number 1 from transcript evm.model.supercontig_66.3 0 (locus evm.TU.supercontig_66.30) derived from phytozome v7.0 (chr-ID supercontig_66; pos 352144 to 353014)
cctggtgcggccactgcaagcgccttgcccccgaggtcctcactctctctcttctctatttatatttatgcacatatatatagtaaaccctgaaaggtttcttggtgaattgtttatgtttggttggtgagaaagctctcgagaagaaaaggaagtgatagattcgtggggtagagtttcatttttctacgtttgtttttgtcgttgtaggagcaaaggaaatgtcctgtagcttacagttggttgatgagaaatattttcggatcggatgttgattgattttagattatcaaacataactcactgtccaatatttgtgtacatttgtaatttcgatttctttgattttgattgtacacatttgtgatatgttttccgttttgttgtaaatcaaagtctcctccttccaaacaaacaaaccagaggggtttgaaggagttcatatctcaaaaaggttcttagttccaattatttggatgtttgatagagagaagacaatttttctccttttgaactgacagtcatgttgatagcgaaaatatttttttctggaatctaaattattgcttagtattgagcattggcgaatatacatttgccccgtactgttaaatcttataatctgctgaagtttcagaattttctccctttaataaaagtaaaagattcttcaatattcttcctgaaaaaaaaaaaagattcttcaattttctttatattgtgtctcatatgaattatttctcgtagctgagttcctgtctttctaatatatgttgtagtccatttcaattctacatctccatcttattcttgtcatttctttcctatttggtggtgctaacttcacaactctttggttctgtgcagttag

SEQ ID NO: 77364 - DNA, 737 bp, Carica papaya
  Intron number 2 from transcript evm.model.supercontig_906. 2 (locus evm.TU.supercontig_906.2) derived from phytozome v7.0 (chr-ID supercontig_906; pos 24924 to 25660 reverse s trand)
cccataaaacccttgggttgtggtgatactggcaggtactatttccatacatttcaagcatagtttaactgacttaagtaactccacatagaaatttttgctggatttgacagtgagatctgatagtttagtaatgttgctttaggtttgtctccctccataagctgacattagagcttgtcaacatatataattacccatctgctatgaacgcttgttttctcaaagttggtttttttatgctacttttaaataaaggtggtaacatattctcttaacatcaaagcttgaacttgtatatttacattctgaaaatcttcctcacattcaacctccaatagtggagagagcagctttagaatcttaattatggtgcctttcaatcattgttattatgagaaacttgctttctggtttcttctatgttattggttgttatttacattcacaatagtaacagaaataagagaaaggtatcttctgtagcttgttcgaactacctgacttatctacattgatatatgctactatcatattcatcagtgtcctagcatgattgctttatgactgctcagcaacattcctgttacttctttctaagcttcaccatctccatgttatagttattacttttcaatactaaaataagtcgtcctgagcttcacctaaatcacctcttgttctttttcttttctgatgcagtgttcatttggttgaactaaaaggaactggtgaac

SEQ ID NO: 77365 - DNA, 696 bp, Carica papaya
  Intron number 2 from transcript evm.model.supercontig_80.1 23 (locus evm.TU.supercontig_80.123) derived from phytozom e v7.0 (chr-ID supercontig_80; pos 1050548 to 1051243)
gattttggaattgggtaaaatttcttcaataccttttaatcataattttactaccatcttttatatatatacatatatatatatatatatatatcatactagttaaaaaatattgtttattgagttttttttttaataaagtagcttctacatatgtcgaataatgtaaatcgtactattttaaatatatttagaaatttaaaattatgaatataaactatgataaataataagttaagtgatatataaaacacaaatacttattaagatattgtacaatataatagattctatgaatacgtattaggtgtcaaatataattttgacctttcaaaatgtcaatagaataagtcatatatgtatgagtgaaaaagaacatgtagctctcaagttatttccaaagaaaatcatttcattatgggcctcctattaagttatgtgtagacctaaaattcatcggtttatacatgttgatattataaggtgccacaaatgtcttattttaattacataattgacctaattttaattatgttgaaagaatgctttagcttgcttttatgatatcatcttgtcatacactaatataaaatattaaaattttttaaagttactctatttttgctaaaaattaaaaaatatatatatatatatatttcaggtttctggatccgcttatcttaggcgactatccta

SEQ ID NO: 77366 - DNA, 649 bp, Carica papaya
  Intron number 2 from transcript evm.model.supercontig_90.1 5 (locus evm.TU.supercontig_90.15) derived from phytozome v7.0 (chr-ID supercontig_90; pos 349785 to 350433 reverse strand)
cacggtacacggtacgtgaaacagaatatatttccaagagatacttaacattagtcaagtggttatcaaaatagcttttatagtttctagcatgatattaaaaaaaaacacacatttcccagtcaagtagcacattgaagaattgagagaatgttaaatggattgtcattttcttctatacttatttgttgggagttctctgtctcatcttcttccaaaataaaatatcatcagtctacacctttgcagtgtggcagtcggatgaaaataccatcagctgtatgtattatactctggggaccaaccacctgatctcttactgagctcttgggtgtgtttttcccttgcaagatcatataatgagttgctttgcttacagacaaacaagttaatttcttttccttttttgaaataaagaaacaagttaatttctactgacgtcatatgagcactgtcccgatttttgtaaatctcttgtgctcattggtaatcaaattgttcatttcgggtcagtatgtatgtcctaattatctcatagcttttgcatctgctggtatggcctttggaatatagtggtcgataactgggtaagagagactaaagcactaaccgattttccttcctccacagccgttgcaagatagtgggt

SEQ ID NO: 77367 - DNA, 993 bp, Carica papaya
  Intron number 1 from transcript evm.model.supercontig_78.7 2 (locus evm.TU.supercontig_78.72) derived from phytozome v7.0 (chr-ID supercontig_78; pos 871670 to 872662 reverse strand)
cttaatcacgaccctgggtacgcgtcgcactggattctaatttccactttatctcctcctcaatttacttcttctggtttttggaattgtattgtactgtacggtatctcttttgtcgagcgtgatgttgattcacccattttcttcgtgtttggtttctatgaaacggaaatgactaagatatgacgaaatatattggaattctttttgagattgaacatgctaatagctttggttttgacgattgagaaagctcgtctctcgagtttcatatgatcgctatactataattgaaaagaaaaaacatctattcgatatctttccctagctctctctctctctctctctctttctctctctctcttttaaattttaaatcttatgcaactgaatggagcagtgtctatttggttgaagaagttaataaggcaccttagcgaatgcttaagctcgatgtttattgtttagttatttagaattatatggattctcataaacgtttgagcaaactgcattattgattaatttaagttgtctaattatcctggatttgaagatttattcacatattatccagaacgcatggcctttttattccattgtgtaaaatctgctgctgctttttgattattgtcattagtagtgaaccttagggtataaagtgaacagtattcacatcaattgcttcatgtgattgttagggttgtggacagtgttcacattgattgtttcatgtgattgttagggttgttggaacgcaggttgacttcctaaattaggaattaatttgttatgaatgaatctttatgaataagcatcaaagtcagcagtcatagtaatctggtttctgtactgaattaaagaaaactgaaaatgtttgtcatggaatggaagataagattttgttttttttggtattagacagttttttattttcaatatctataaatgttgaattcagttttgaactattgtttttcaggcaagcaaaag

SEQ ID NO: 77368 - DNA, 909 bp, Carica papaya
  Intron number 1 from transcript evm.model.supercontig_66.3 7 (locus evm.TU.supercontig_66.37) derived from phytozome v7.0 (chr-ID supercontig_66; pos 406410 to 407318 reverse strand)
catcgtttgatcctttctcgcagctcctatttcaggtacaacccatatataagttgtgtttgatgattgtttgatattttttgttaaattcattctccacccctgatttgcgtgaatcgttcgagtgccgcagattaatctcatgattatgcatattttttcctaaaatacaaagtgcaaagaatactattaaaaagggcatcaagggactgtcaatgcatgtataaaacatttatatgtctatcgaagtatccatgaggtcccataaatcctctatagagtaaagaagatgacccaatgacaaaaatccaagggtctggaaaaataatcctaactgaatcaaaattattcacattattaaccccttcaaaagcccttttattaatctccttccaaagtgcccaaaagatggtgagcggaattaaatccgcttgttttctccacctgttgagatccttccacgcccaaatttcatgtcaatgaatccagtcattgcccacttggttcataatagcccataaaccatagttaaaagctttgtataccactcagacgctagagcaatatgtggttacaagtgtccttagccgtgttacagagataacaagcatttgccataatcatgctccgtctccgaaatttgtttatagtcaaaatgctctccctaccagcctctcacccaaaaaatgatacatggaaatctagttccattgtcttcatgcttgaacaaattcttataaaaagaattgaccgtaaaatactcgttctttgttagatcctatggagggttgtcattactcctgtccaaaatctatggatgtgacaattttgggagagtattggatgtactaacggacttataaatattttttttacaggggcaacacctcattggtgtcatatacgtaa

SEQ ID NO: 77369 - DNA, 603 bp, Carica papaya
  Intron number 1 from transcript evm.model.supercontig_86.1 2 (locus evm.TU.supercontig_86.12) derived from phytozome v7.0 (chr-ID supercontig_86; pos 190965 to 191567 reverse strand)
atcgatatttgtgattccgtcaattctaaccattggtactattgttactgtcctacaacaatatgtttttgcttttgttggctatcaatattcctgcaacctaaggtttcagttcaattaatgattctaacttgttttgttaccctagctttttcagtttcaggcataattttcttacgtgattttgtttttatacatatgtcatatgtacctgaattcgttttttttttttttttggagataatttttgttcattagaatttaaaggaaggagatgatgtttgatgtaaggatagtgtcatcctataatcttcatcttgttgaaaattttattgaaagaaaataaaaaaggctgttcgaaagtcgaggacgcttcctggacgcagagaagcggagaaggttctctttacatgaaaattgatcaaaacagaaacctgataatttgttgaattagattttggatttctatcttcttctctccattcctgttatgtctctgcatgttttggaatcgtttttgactggtaaaaatagattgaacatcttttctttttcttgacatactgatgggtacatgttgaattttgctcaggcaggccaaag

SEQ ID NO: 77370 - DNA, 475 bp, Carica papaya
  Intron number 1 from transcript evm.model.supercontig_65.6 1 (locus evm.TU.supercontig_65.61) derived from phytozome v7.0 (chr-ID supercontig_65; pos 658384 to 658858)
tcacgccatcggtgccggctcagtacttgtcgaaggtccgatgaatttttatattttgattcactttgatcatttaggtcaaagcttttctatttgcttcaaaggaatttgcagaagcaactactttttttaaaattttttttcttttagtttcaaaacaaacagtgaatattgtagaaacgcaaatgagaagaataaatgaaagatgtgaaggacgtgaaaactaatttagcttagcttctttagtcattaattaataaaataaatttttcctaggaaaaatttattttactagcgaaaaatttattttattaattaatgactaaagaagtgaaaaatttactcgaatagcaaaagttctacgttgtaaaagctcaattatagttggttttctaatattttgatatgatttttaattaacatgttttgctggattttcattgtttgaacagacaactattcgaggttggaggac

SEQ ID NO: 77371 - DNA, 444 bp, Carica papaya
  Intron number 1 from transcript evm.model.supercontig_74.5 (locus evm.TU.supercontig_74.5) derived from phytozome v7 .0 (chr-ID supercontig_74; pos 38570 to 39013 reverse stra nd)
ctttgctcttgtctactgtactgccggtatttctggttagtatctctctctaacctttttcttcacaaatttccttgtaaaatcttatatggatatctcggattctcagatctgtttcatgggtttaatcttcctgaagttttttagtgatttgttttgaatttgaactattttaggtagtatctttctctaaccatttttactaacttatttagtatatccttaaaaacttttaagggcatgtaaaattctcagatcaggtttactctgttttagttgttttgagtttgaagttggtttttttttttcttcaaatctttgatcagttgtatatttgtactggaggttgcttaaatttcttaatgcaattttatttagtggatctggtattatgtggtgttggtaacaggtgggcacatcaacccagctgtgacttttggttta

SEQ ID NO: 77372 - DNA, 1029 bp, Carica papaya
  Intron number 1 from transcript evm.model.supercontig_7.59 (locus evm.TU.supercontig_7.59) derived from phytozome v7 .0 (chr-ID supercontig_7; pos 597830 to 598858 reverse str and)
ttctttgtccctcgcgtttccttcttctttttcaggtattcttgagtttctgttattttgttctttttattcatgagtatttcgtgtttttggaaacataatggtggtgcttggagtgataaaaatgtaggctgttttttggttttattcacaatttttgtaacaaatgaagttagagagtcagtttttcttgctaatattggttgattttaggttttctaatttgatgaattgattgagtgattgctacgtgctatatgattcaattttggggtttccagggaaataattttcgcttaatttcttctaggttcaagtttggaatctttgaatttcagtgtaaggtatgtttataaaaaattaattctatttgtacaacttatttggaaattcacactgagaagggaaatgtttatacaacttaataaaaattgagcttttgttccaagcggaaacttagagtgaaagaagaaccgaattttgaagatgctagcatatatataagaatataataaattacaaacttaggaatggagaagaatgcttcaaatattattttgggttacactaaaagaataatccttgcttgctatggttaaaggctatagttttgatggatatggcaagagaaatgactggctaagttccaagtgtggtctctaatggggaaatatataacaattctgcaaaatgaaagaagtgtcaacctcaaaataaataaaactttttcttctcttcttgcagagttgttgtacattgttgtaggttaggtgctgttttttttctgaaaatttcaaaataaacccttcagctgatgcagaatatgctgtgatagaatcttgtgttgttgaagaagtgttctaatcctgtatgacatcattttacttcaatcatctcttaccgttctgcttagctatgacaggatgagattttactagagaaaaatgttttagtttcagagctagctcagtaatatcttttgatttcttttcaggtttgtccttggggttgggtctaaattgtaacata

SEQ ID NO: 77373 - DNA, 317 bp, Carica papaya
  Intron number 2 from transcript evm.model.supercontig_92.7 (locus evm.TU.supercontig_92.7) derived from phytozome v7 .0 (chr-ID supercontig_92; pos 120820 to 121136 reverse st rand)
agagggcaccgtaagttctcctcaactgtttataagttttcatcaatttcattttctgttactcttcaccaaaagtttcactctttaacattttgttttcatgtttaaattgcctgcatgatggattggtagtacttctttggttagtctgtctggtttcctctttccacttaatgagtatggaaacagaggattaatatgatatgccatacatcatgtctagtgggtgattttgaatttcacggtttcttcttttaaggtgattttgatgttggtaaatgcttcaatcatatcactttttaatcacttcaatgcag

SEQ ID NO: 77374 - DNA, 419 bp, Carica papaya
  Intron number 1 from transcript evm.model.supercontig_92.7 (locus evm.TU.supercontig_92.7) derived from phytozome v7 .0 (chr-ID supercontig_92; pos 121281 to 121699 reverse st rand)
gctcaagctcaaaccacagaggtctctctctctctctcgttctctctctatctctcactagatatataatacgtagatattattgtgtcgcttctgtacatgtgttatgtacgcagtatatgtatatatgtatttactcgggtttagcggtattgattttgtatttgtttttccaaataatttggtaccgagtttggctaacttgttgctgcgagtgaacttctttttaagcttaaaagtctttttactttgattacatgtcgatagtaatgctataataggaggaagaatgaggataaaaagagtaaaagtcaatgaaggggaaggatatggttttggtttatacactctattctttgagttctttttttttttctcctaaagttttgaagctaaattccagggcgcgacggagataa

SEQ ID NO: 77375 - DNA, 604 bp, Carica papaya
  Intron number 1 from transcript evm.TU.contig_29394.2 (loc us evm.TU.contig_29394.2) derived from phytozome v7.0 (chr -ID contig_29394; pos 7945 to 8548)
ccattatctctagacttgatcggttggacactgtaagtttgcttttcattaatcttacaatatcttgtaagtttatgtttggatggtttgtgggtttgagtcttataattgataaaatatatatatatatatatttattagacatattgaagtaaattatttaattaatcttttactaatttcatttttaacgttttatatctgttttcaaagtttaatttttgtttgttttttaattataaaaattaacatatttaatatatttttaaatattttaaaaatttagaaaaatttcatctgtgctcaaaataagttattttttttttaaaattattattttttgggttatttcaaatttaaaataaattatcttcaaaatttttaaatatttctctaaattttttattagaacataaaaaatttaataagtacttaaaactaaagtacagacaaaagactgttcaaaacattaataaattttaaaatattttaataaaaaattatttttgtaaaaaaaaaaaaaaaaagaaaaaattaaagttattacacacaagtggtttatttggcagttgaggcaattagaagaaattagaggatccaatac

SEQ ID NO: 77376 - DNA, 1012 bp, Carica papaya
  Intron number 1 from transcript evm.model.supercontig_76.4 2 (locus evm.TU.supercontig_76.42) derived from phytozome v7.0 (chr-ID supercontig_76; pos 863343 to 864354)
tggttgtgggtcggccatcgcttcttcttcagtcggtcagtattcctcttatacctgtccgtttggttgttgtagaaaataggaaaaattgctgaagcttaattagtttcgtttttactgcgttgaagcccttgtttttcgttgataattgattgttgtttcgtttttgctttttatccttaagttgctcggttgagttttacaatcagggaaaactgtgaaatttcaagttttcagtgttcatgtggcaggagatatcgttattttcgttttatttcttgaaaagagaggagtcaaagttttcgttttatcaatgttaaatacaatgtagagttggtctcttatgcttcctatactgtattggagctggtggcttaaccctggatatcgtacgtcttttaccattaacatttgataagatacgtgtatcattctaggtcagttctcgtgagtatgtttacgaatatgtaagcattgatgttttattagctcttcttcatggtattaaattattctcctttcttcttgtctcttcaacgtgtgttctaaatacctatgggctttatgtgcaagtattttcagtggtcaaatagtacatctaaaacaaatttatatttcaagactgttgtattatttgatgctctggtttggaatattaatgaagaaacgttcttaaagccaaattggttatttaaagtagtagatgttgatttacaaattaaatagaatagacaattatatatttggataatgacgtttattgtgatttttttttttttttttttggtaacaaaataaataagtatttgagtggctgaatttgtcaagaatggggaaatttaagttaatattcagcaggcgtggtacttaaagtaccttaaaagcaacctaatctaggctatatctatttcacaggcctgcaagagtggtttaggtgtgattctaattccttacattgttcaaagtaactattcttttaccactcgtttggccctcttgtttcagctactga

SEQ ID NO: 77377 - DNA, 738 bp, Carica papaya
  Intron number 1 from transcript evm.TU.contig_30366.3 (loc us evm.TU.contig_30366.3) derived from phytozome v7.0 (chr -ID contig_30366; pos 7373 to 8110)
actctaaaagttgtggtttggactcttgattcaaagtaagtgtttttgagaatacgttggtttaaaggaaaagtaactctgataacaaacaccctttctcttggagagttggcagcctttctctacgtaactggcagtgtgctttctcaatcattttattgctacgggcgtaagacatgattgctcggttaaaggagatattcattttatttgagaaaggccttcgttcttgatttgggagccaatttaatgaacttcagtaaaagtgggcgaattcattgactcgcaaatgagagtgctttggtttattgtttcaaaataaatgtactttgactcctaggcaacggttttttaaatttctcgggaaaaagtaaaattcatcctcgctcggccagttggagctcaaaaaaagcatgcatgtatgctgaatttgtcttggttctaatcattgttctaatgtaggtcttcaaaaaattgaccgagaaaactatttgagagaaccaaaccttcgaagtctatcggacccaaagtgtagtagtctaaccaaacttcagaccttgtgggatcttttctctgttttcttttttttttttttaaagcaatatctgtggttaaaagagattggtacgtttaacatgcaaggcaactacggagcctggcgtaaccgcgtcaatattatgttgctgacttttctttgctgtaggtactttgtgggaaacttgcttaagcggaaagaac

SEQ ID NO: 77378 - DNA, 535 bp, Carica papaya
  Intron number 1 from transcript evm.model.supercontig_69.9 6 (locus evm.TU.supercontig_69.96) derived from phytozome v7.0 (chr-ID supercontig_69; pos 1068000 to 1068534 revers e strand)
cagagcgcttcttcaccaagctcatcgaaaaggaggttcgcttcttgtctttcttatcgtcttactgtatatttattttctatttttatataatcttttatgtggaagcttaattgtgcgatttggttactgataaactgggtggaagaaaggaacacgaaaactttgagcttcttttcgtttttttgtactttttcctatttcctaaagcacgtaactaatctaaaggaactgaattagtctttttgttaagtagaggatgcattttacttaactccagtacttcaagatccaaaatcgcattatttgtattagtaactaaaaacaatatgttttcagcttgaagttgacaattgatgtttatattttctttctggatgatcttaccattacaaattcagactccggtgtcttacaagttctatccgtgaattcctctcgattggatttgtttgagcaagatggaaagcttattgttggttttgtggttttaatgtactttagggcgatcctcagtcccaagatccggttgtgt

SEQ ID NO: 77379 - DNA, 918 bp, Carica papaya
  Intron number 1 from transcript evm.model.supercontig_70.1 24 (locus evm.TU.supercontig_70.124) derived from phytozom e v7.0 (chr-ID supercontig_70; pos 1068267 to 1069184 reve rse strand)
cagtggcttgaggaagaatctgcttctgcttccaagttagctcctgtctctctcgttatttatgtccgttggctttatatatctgtatatgttttctggtgattatgcattccacttgattatgaagttttatttttctccaaaggtagctttttgaatgaataaggattgtgggagctggatattttaggctatacatcagagatttgtttttggtgctgcatagatcggttcctatggaattgcatatgattatgtgtattattgctctattgcatctaatagatttttgctttcaagatattatgttctggtggatcgaattgttgaagagtgtcttttatatcatttaactgaactttgtgcaaggagcaatccttgcttcctctaaatggtggtggcaattatatttccaatgtcgctgggtaaagtaaatctaatttttatcaccttaatatatttcactgctttgcattgtgtttctaatggctctgtttatcaatgctgccgtgacagtttatgcggctatgttgggaataaatcaagaattattttggaatttgtttggaaatttacacctagctctaccatgaaataacgaaaatccaatctaaaatgaaaattgagctcataggtaaccaagtgaaagttagataattttacaaaaatttgatagaatttaaaatatattatttcaatggtacatggaattctccaagagatcatgtttttatcatctcgttataaaattttcatctcatctaagttaagtgaagcatgaatttttaaagaaattgtattcttgttatttttcaaacatagcttgcttttattagtaaagctatctgtaagttatactttaaatttgattatcacttgctcacttaggttgatgtcctctgcagggccgcagagaag

SEQ ID NO: 77380 - DNA, 758 bp, Carica papaya
  Intron number 2 from transcript evm.model.supercontig_706. 3 (locus evm.TU.supercontig_706.3) derived from phytozome v7.0 (chr-ID supercontig_706; pos 10449 to 11206 reverse s trand)
acctcaaggctgtgagtacatgatcaaactcttaactccatatctacttacttcatttatatatctatatgcaagtgtgagctatgattcttgggtttcattgtcttgaatttctaaattgagttgtttcatgggtggaaggaatcagtcttgggttttgaaagataaatggttttctcagagagtttttagtagttatgaagttcttcaatgacttgggcgagttctttcctctcaaattccatatgggtctagccaataattttattttggatccacatagattgagagagtggaagtatacagacggttcattgagtaaattaaggctgagaaatgggtagtagcataagtgcactggtgttgtttgaattaaattcaagcaaagtttctttcttcgcttactatgatcgtgatttcttcttcccctagacaattggtattttattgtcaattgtttttcagttatttttattttgggactaaactctttttggcccttggaagtgttatatcctgatctatgcaaattagaaaacaagcaacttcctttcagctaaattcagtataacaaattggcatggtttactgctattaatggtggtaactttgcttaccatgtctaagatcgttttatttgatcctcgagtgttgtacctttgcttttatcaatttaattgtatttttggcttataaataatatattttcaattttcctctcaggaagaagagacaaaatcttggaagaaattgattaa

SEQ ID NO: 77381 - DNA, 916 bp, Carica papaya
  Intron number 1 from transcript evm.model.supercontig_80.1 04 (locus evm.TU.supercontig_80.104) derived from phytozom e v7.0 (chr-ID supercontig_80; pos 877481 to 878396 revers e strand)
taaaacaaagcacaattctctgaaaattgcacgaggtatgttttacttctaagtaatcccttttcatctttttgtcgtgctatggaggagatctttttcgtcaatttgcttgaagatcaaacaataattgattggttgaatgatgttcttgaagcgcatgtcctaaattgatgactatatttgacttcataatattaatgaaagatttcaggagatttctttttaaaattagagaaaataaaaatctgacatttgattttctaactttagttagatgtatactttgttatgtctggataataatctctgttctttcatctttttataacagtatctaattttctggtattggcgagattcgacataaacagatttaggttaatttaaaataatatacttataatctttaatttatctttcttctactgaattttgtattctatggcttttataaatgtcaatttcaatgaccaaactagggaaactataagttttatgtttgtatagagttttctgttagtttattttatttgcatataacaatgtattgtacaaaagctatacatcactattcattagttcctagcattcatttttcatttcatattatttattttatttattattataaaattagtaatcaatcagatgaataaacattgcatacttataagattttcactggatattacaagaaaataaaaactgattttgaaaaagttgaagcaattgatatgtaaaagggtttttctaagaagtcaaattccgccatatctcatcaaaatcaaaattttctttttgttacttctcttcttttgcatcaaacacacagaaacacacatatatgtatatgactgcaaatgtgttgttagtaacatcaggaaaaagtagagagaaaaaaggttcatcatcaagt

SEQ ID NO: 77382 - DNA, 668 bp, Carica papaya
  Intron number 1 from transcript evm.model.supercontig_94.3 6 (locus evm.TU.supercontig_94.36) derived from phytozome v7.0 (chr-ID supercontig_94; pos 605849 to 606516 reverse strand)
aattacagagtagatagagaagagaaggtattcttgaggggaaaaaaggagaaaagcaaaaggaacaaaatggcataaaggcaaaatagaatctcaagtttttaatgttgatccatcagtttaaaatgaagacttactaatatttggggttcatgacgaggcgaaagaggtgataatatttcctccaatgtcaaccataaagaagcttcacttcaggtcttctctgctttgcaagaaggtgataaactttttcaagtcttgtttgttcctcgatttattggtgttctagttagttattgggttttctgtttttagattatttttgtggctgtgattactggaggtaaaacagagttgataatgaagcaaaattcgttgtcattatcgttgaggggttaaaccttatatatgttagcattgcaatgttcactaaaggttcaaggtttcggattatgatgggtagagaagggcctacctggtcaagaaaagctgaagagttcttttgcactttagcgacatgtcaggaatgctcaaattatgatgatatgctgaaaaagaatgaaaatcttgttatgaagaagcattagaatccttacggcaaaattttgaaggtctttgaatctattgtggtagaaagaagagggtcatcatcccaaaagcagtcgttg

SEQ ID NO: 77383 - DNA, 858 bp, Carica papaya
  Intron number 1 from transcript evm.model.supercontig_9.25 7 (locus evm.TU.supercontig_9.257) derived from phytozome v7.0 (chr-ID supercontig_9; pos 1709248 to 1710105)
actcaggtttaatttaaatcctcttgcttgaaacccattaaagctctgttagcttccagtggatatagttttagcttgttcatcttttagttttcttcctgttttattttcatcccacttcctagttaattattcatttgaaggtagatattggttgtaatttataaaaaaaaaatttaaatggaatcagagatagaatttactaaatattggaaattaaaatggtattttcattcaaatttatgtatttgtatttttattccataaagttagaatttaagccaaactaaagcatggattttgtcaagttctgtttgagtttgtgctgtttatgggacaagcaggatacaaattaattatctttttaggttgttgaatgttgaaatttaaagttaaaagattttacaaatctattagttgataatctcttgttgttgtctgcttatctttcattgatttccttgcatattgcaatttgatatatgtttttgttatgaagataaactgaaatgtatttaactttagatgccttttctcttttccataccttggttaaaaagtactctttaagttttccttggaaaaattcaaagagagttatataaagaagtcccgactttgaatcttggtgtactgctatggtgtttgatattcatggattgtccctatttcttggtgcttagtcattatagtttactcgctcatagattccaattaactatgataagaagcatttctgctgtaaacataggcaattggctaagttttcttatctcatatacccttttctttcttcccagcttttttataatgatgatttgtaattaattttcattcagggaggaaagccagttacta

SEQ ID NO: 77384 - DNA, 1004 bp, Carica papaya
  Intron number 1 from transcript evm.model.supercontig_91.6 2 (locus evm.TU.supercontig_91.62) derived from phytozome v7.0 (chr-ID supercontig_91; pos 689198 to 690201 reverse strand)
agaaagcaggttttcttctttttttttttttttttttaattttacacttagaaaaaataacaataattatgtttttacttttttacaagtaaaaaaaaaattgctaaataatagtaattattaattatggaaaagattatagtcaatgcttgaaaactggagctggttccatggactaattcatttagtgacaaaatcaaatcaagattagaaaataatggtatttggaggattaagcatttatttgattgatagtttcattattttaattatgaattgttaatcagccaatttgaatgtaataaaacgtgtcacgacgctattagtccattaattagtgcttaccacgtcgctattaggcgtatcaacgcttctgatattacaacggtaacattattatctctctccattgggtcaggaaaaaaaaaaaaaattagtttttaaatttaaaattaaattaaattttatcaatatctgttgcagtgttaattttagttaatattttattcaatataaaatttaaattttattatataaacatttagtaaaagatagaaaaatacccaatatatatatatatatatgcggatacaatattctactaataacaaataaatttctcataaaattatctctttttcttcagatctggtttaaaaaattggattttaattttcttcacaaaaaccctcaaggagaaattgtactagtttgaaaagcttatgatttttctatattatagtataactcttgaccattacatatctatatatactttttttttttttaattaaaaaaaaaatgtagtatactatcctatatatatatatgtataaaaaaaaaagaataaacagacatttatttattattattatacaaaaaggtttattctaaatttaaaatgattaatatataactatattatgttatattttatatttactcataatcataaaattgaatgtgtagctgagaaacgagaatccaactggaccaatcccagc

SEQ ID NO: 77385 - DNA, 836 bp, Carica papaya
  Intron number 1 from transcript evm.model.supercontig_9.12 6 (locus evm.TU.supercontig_9.126) derived from phytozome v7.0 (chr-ID supercontig_9; pos 717671 to 718506 reverse s trand)
ccaaactctcgaagcttctcagtgctcaattgagggtaaaatccatgtcttaagtggctagttttagatttattcgtgcagtttatccggaatcgttgtccttttgctctctaagtttccttttcctttctctgcttttcatggaaatatttttggcagtcgtttgtatgtatagacaataggctatgaaatggaaagcctgtaactcgtatgattgccggtttgggatattttcattcatttcattttcactttatggcgttctatggaggacaaataatgaagtgttctttgaagtagtaaataatgaagtcttaattgtatttgaaaagcatttaagtagaattcatgtctaactgatttgatatttcagaatattttgatggaattcaattaaatgaccacatttagtgggcacctaactcttcttaatctgaagtcctttttcacccatttttagtggtatcaaaattgatagaatttaaaatgtgcttattcaatttgatatgaacttttattttgaaatgaattctctaggtctggataattcactatgtaattgtctaaagaatttatatttttatcaattattaaaagcattgtaagctttttgagaagtggttgattttaacttgtaaagtatttctcttataaatgctgatcgatataccaaagtttctccttctgttttggtttctttctgaaattagttttgttcagccaataaattttggatatccgaaattgaagtttcttttctttttttaatttttctggtgggccaatggatattttacataggcctgccactagtaaggaatatcagtgagcttcct

SEQ ID NO: 77386 - DNA, 801 bp, Carica papaya
  Intron number 2 from transcript evm.model.supercontig_9.26 1 (locus evm.TU.supercontig_9.261) derived from phytozome v7.0 (chr-ID supercontig_9; pos 1733122 to 1733922)
aagataccactgtaagtcatcttacttctctaccagtatgcttgcaaactactctattgacatgatcagaaggcacaatttcacacttggtcctttatgacaaatatcccctcccctcccgatacacaaacacatttatggttgttattacaagtctgcaactaaggcttttggaataaatgttaaatttgtgtggaattcttttatcatccagtttaactaaaagacggtaagagtactgcttaaaataataaaaattgagttcacatgaaacttgtattaaattggagcgacgtattctaaatttttttcaattttgattggatttgaaagataatattccaattctatatgaaattcaatatatactcaattttcttttcaatcttagtacaaatttcaccttttaattaaactaagcatgaatttgcaaaggaattccacattatttctgaatttgttctggatgtagcctaaaagcgcctgttgatggattgatttcgtggacattccccttttatgtttctagtaacccagtccctatcttctaaatcccaattacactgtgctgtttgtttgactttggttattattagtcattatgttatgtaaaattgttaagtaatgtgctgacctaatcagtcatcagtacaatctgcattgaattaaatctcagttttcttaaatattgcagcattatccttgtatcattttgttttgtaggttttttgactggatgcagtttgtatacagaatttgaagtttgtagtgcttaactgtagctttcatgacaggggaaga

SEQ ID NO: 77387 - DNA, 542 bp, Carica papaya
  Intron number 1 from transcript evm.model.supercontig_8.15 8 (locus evm.TU.supercontig_8.158) derived from phytozome v7.0 (chr-ID supercontig_8; pos 1108618 to 1109159 reverse strand)
tggaattggtggctttggtggtcttttccctctgggtatggtggtttctttttttttttaaattagtttttatttttgaatatgcacactctgtttggagatagataaaaaatatatatatgatatcatggtgcaatttataagcaactattatgaacttttttagtctctttccaaccaatttataagctgttagaagagtttataaggtacttaacttttaagaggttatgaactctctttgagtagaaaataagctactccaaactggttctcttcagggaaaaaaaaaattaatttaatcataaaaaatttcttattcgtttatgttagcaagggatagaaagatgatctagttctaatcgacattttatattcaaatcttcggagttggtgtatcgtgttctccatactttgcataataattcaaatgtggaaaagtcccaacatttaaatttgcagtgttttggcttttgagtttcctctgtttctgatcaatttctcccgataatcaggtgattcataccttgttgctggcacgg

SEQ ID NO: 77388 - DNA, 253 bp, Carica papaya
  Intron number 2 from transcript evm.TU.contig_41216.1 (loc us evm.TU.contig_41216) derived from phytozome v7.0 (chr-I D contig_41216; pos 1256 to 1508)
ttggacaggggaagacagttaagcttgaacagaaggtacactaaataatccgttttttctattattttgatgcacaactctgccgctgttaagaaaattttgattgttgcttctttgcaccagattgatcctagtatgcacaattatccaattttctactattttgatgcataagctgttctccaagagtaaaacttaaatatcgtttcttgtaccagatagatcctagtattcttggtggccttgtgataga

SEQ ID NO: 77389 - DNA, 863 bp, Carica papaya
  Intron number 1 from transcript evm.model.supercontig_65.5 5 (locus evm.TU.supercontig_65.55) derived from phytozome v7.0 (chr-ID supercontig_65; pos 626612 to 627474 reverse strand)
ctggaaactcctcatcaacattttctgtctttgctgtatgaatttcttgtccctagaactagggatgctttattatagtcttatatcatcaaaattttagttcttcacctagcttaggcatgttttgctcctttccaaattggattttcactttatcacttcactgaaatcttgaatatgaaatttgttggagtttgtattttaataattccaatctccgagtcacgataatgagtgtgatgatagaagtcaaatcttactcaaattgactgagccaaaattttcctttaaatcttgacaagcttcttcatcatttttcctgaccttgatatttgagtttttgtttatgtgccttgaattttggtttgactgttttgacttggttttggtcatattaaaccggtttggtttggttttgttaatcggttttctttagtttggaaaaatcataatatttcgggtgtattggggtttacaagttaattggtgatgtattcttttctttcaccatagtgaaaatttttgttttctgtcttggccatggacgtagatatatttgccgtatcacgtaaaatcttgaattttttttttcttttactctttgctttgtgtggttgtgtgcgtgattgggattattctcttagcagtttccttatctcgagattatggtggctgtatcactttttggaagacagaaatatctgaattgctgatttcttgtctattttgtacatgtagtttgggactttatttctcagaacgtgaagcaagcaactaattaaatgggttaatcttaagcttgatgtatcactatgcatgatatatgtatttttctctttattctaagatctttgacgggcaca

SEQ ID NO: 77390 - DNA, 962 bp, Carica papaya
  Intron number 1 from transcript evm.model.supercontig_62.1 46 (locus evm.TU.supercontig_62.146) derived from phytozom e v7.0 (chr-ID supercontig_62; pos 910988 to 911949 revers e strand)
tccgttgtggctgtgaaaaatcttctcaataacaagtacgtaaagtttttgatagatacttcttggtctctgtttgttatgcatggaaaaattcctggatgcgtaagttattgtttcaagcttccgttgattcaatttgttagcacacttttccaggttctgtatgtttccctggaaattatcatcaaggttaatttaatgcggaatcatggattatgataatgattatgttttgttttggtcaaagcaaagggacgatgtttcaggatttcttgcttgcctattttatgtttgtctagatccaagctttatcgttaaatgttctgtcttttggctttttttctttccaaaattatcttggactcctggtacatcgtccatctggactctttttttggtgtatatgtcggtatatctacatatatatacatgcagtttctttagtctggagtacttggaaaaagtaaagtggttactttgttctttgttggcttttgttctttttctttttttctttatcttttactaggcgatataattttcatatatcactcaaactttcttttgctaatttaatctgtcatatctcatttcagaaaatttttttaaaaaaattaatctgtcatatgatctgctcaggacagaatcaatggaagaaaaaggaaagcaacaaatagtcttgaccagaccactaagaatggataaatttcttcactagatctactcttttcctacttaaattgactattttacaaacaaagatcaccaagcagtgtgaaaatttaattgctcttttcattaaaaaaaaaaaaaggaaaaagaaaagaaggtttcttatgcaaattttaatgtttgtgaaaatgtttagtgctgattggtattaaagtttgaaagatttgctaagcagaagtaagtatggtgtggcaggggtcaggcagagaaggagttcaaggtggaagttg

SEQ ID NO: 77391 - DNA, 490 bp, Carica papaya
  Intron number 2 from transcript evm.model.supercontig_90.3 6 (locus evm.TU.supercontig_90.36) derived from phytozome v7.0 (chr-ID supercontig_90; pos 571951 to 572440)
agactgctttaatctcaaaaaaagacagggaaaaggttttgcatcttcgcttactcattttttgttcgtggaatgtcttaattgtgtttgctgcggtgtttgagtatttgcttattgtagccaaactactaagtattgtactgagacacctttaatagcagttagtttctaagctaaatccatatattatttaactgtagtgaaccaaaatcaatgaggattttctttgtccgccagttcctggcatgcagttgatttgtggaagaatgaaatgagacgaatgcttttggttgaaatggtcaagacatgaaaaataatgatgttttctattattatacttctccattcctcctgaattaaacatataccttaaaccatatatcatcaggtgatggatttagccaatcttataaaaatcataactttcaacctgcatctttgattttgctacgttagtttatgcttacattgtaaattgatttaggttgaa

SEQ ID NO: 77392 - DNA, 576 bp, Carica papaya
  Intron number 1 from transcript evm.model.supercontig_9.65 (locus evm.TU.supercontig_9.65) derived from phytozome v7 .0 (chr-ID supercontig_9; pos 325913 to 326488)
tgactgccgctattctgctctctgatctctctcaggtgcttgatctttttacttctggcctctgttttttgctttgtttggctgcggagaagatgcacgaaactaagaggaaattctaaaaccttgtgatctcaacttttgatatttcagttttatgtattactatgggaaaagaaatagagtatttggaaaattttcttattgatttgtagttgatattatctggatctagcttcctagttttttgctctttttggctgctgagaatatacaggaaactagaaggaaatatcaaagtcttgatgatctcacctttcggtgttataaaagcaaatttcagttttatttcttacttcgggaaaagaaatagaagatctggcgatttatttcgaacttcctcttaattcaacttatgaatctccaacttattatcagcatatttaactcttggagttttggttaccactattctatcgagttgatcctccatgcaatcgtccgtagactatttatcttcttctgttggtaatgatggaaagctgatttgttttggtcaattttcttttaaggcctgga

SEQ ID NO: 77393 - DNA, 295 bp, Carica papaya
  Intron number 1 from transcript evm.model.supercontig_77.8 3 (locus evm.TU.supercontig_77.83) derived from phytozome v7.0 (chr-ID supercontig_77; pos 1012440 to 1012734 revers e strand)
tctctcacccggataaacccgccttggtacgtacacaaaaaaagaaacaaccattcttcacaaatggattttgaatttttggctgtttaatttcaatttctttgtcgtttgatttataattattttcacactttccctttttgacttctcaaatttaattgttgtttggtttagagacaaacttttgggttttgtacagcttattcttctttatgtgattatgtttgttttaatgaagtctggggttctaaatttccaaggtttttctgggcagttgattgaccctgtagacaag

SEQ ID NO: 77394 - DNA, 785 bp, Carica papaya
  Intron number 1 from transcript evm.TU.contig_33379.1 (loc us evm.TU.contig_33379.1) derived from phytozome v7.0 (chr -ID contig_33379; pos 384 to 1168 reverse strand)
tggaatatgtatggacgaatttttgggtgagtcggaagtcagtcggatgccttgctcgcacctttatcacccaaactgtatttccaaatggttgaacttgaatcacacatgtcctatatgtcgcttccctgttcaacacgattcatcttactggtcttaatttagatattgtagtattcatattgccaacaatagagttggagcaaagtcatgaatgttcacagtgtcagttgaatcgcttgtaagttgtgggtgtgcagatttatgaaagagttgagttgaactaaaatatgtatattgattattattatttttatttcatttcgaagaaaaaaaataatatatcaatatattatatttaattatttttattcaaaattcatgttttaatagatttttttctttgaggaagataattgaaaattcattcaaaaaaaaaaaaaaaaaaaagatgaaacacattctgtacaacaagtgggacaaaaaattaggaggtccaaacagtatttggatatatgtgtggtaaaacaagccaagtaatgccatatgtgagataagatcaaaatttggtgacaaatgaataaatatgtctaccaagtaaagttaattgtaaagaattggttgataatagaagttcgagaaagattcacttttgatcattgggtaaaataagtaagccaagtaaagctaattgtaagttgaagaaatatatttttttatgatttttacgtaatagtgtgcaatttgttttactattttagacgtaattgataggcggcagatac

SEQ ID NO: 77395 - DNA, 477 bp, Carica papaya
  Intron number 1 from transcript evm.model.supercontig_77.9 7 (locus evm.TU.supercontig_77.97) derived from phytozome v7.0 (chr-ID supercontig_77; pos 1198792 to 1199268 revers e strand)
tcctatttgctttttggttcgtatttttagcattgattttccattttgtctgttcagatcagtcttctgaattttgcctttattccacatctcgttgatgttttagtttcccagtgtccaaagaaccattcaacttggcccaaggccttgtaaaaaatgaaaatccacttgattctttgttttgagtgaaataaaaaatagaactcttatttacttccttactttgggaactctgatcagattactttcctctttaatttctttcttcttgttttttgggtgaccaatcagagaacagtaaagattaatccattagttagataaacttgtgttgaatcccccccccccccccaatcccaacccaacccaactccagttttgatagtttgaagtagtgtatatcatgctctaatcaatcaattctggacttttttgctctttattattttagtactatccgagtctcaacagatcaag

SEQ ID NO: 77396 - DNA, 915 bp, Carica papaya
  Intron number 2 from transcript evm.model.supercontig_9.38 (locus evm.TU.supercontig_9.38) derived from phytozome v7 .0 (chr-ID supercontig_9; pos 164432 to 165346 reverse str and)
aaacttcttgctcagcagagagatcttcaggtgctattaccggtcctatttctttgtcttttatatgattatatgtataatatttgaaatatacgatctctatttctgtggtcctacctattaagttgtgtttatcatgaagtatgagctgaaaatactgctgttcaaatagtcattgtggcattgtttcattcattgtgattttgctaaggtttcttctcatcaggaaatatcctcctttagaagcaaatcgggatgcttccatttaacaggcagattgttatttgtatctcatgtgaaaatgtgtccagctttctaataactacttgataataggggctctatgggaagcttgggtaaatgaaatggcaacaatgtactgttgcatactttttttctttctataacaatctcaaagtcttctgagcttatttaatctgtaggttaatttgtcctaaatggaagattaacttgtttggagctgcccttgacttagtattctttttaggttttggcagggcaaaaaagtaacctattttgtttttcagcttgcagccaaaaatctagatttcattatttttgtaattttgctttatgaccaaaaaaggttctctttacttcttgagacctagatgatggacatgtaaccttgcatttcatctcctttttcttttttttttttagaaagaaaattaaaatcaataactgttgtgacattatttcaataacttatctaatttttctcctttttcttttttttatctcctttttcttgttgtgcttatacttatctaatttgtcttcgatgtgctgttactcatctatgctcggttttcgactgtgtcactattttatgtgaaactgtattcttatgtggttatcagggaaagattcctgatattgagaagtgcttgg

SEQ ID NO: 77397 - DNA, 781 bp, Carica papaya
  Intron number 1 from transcript evm.model.supercontig_9.38 (locus evm.TU.supercontig_9.38) derived from phytozome v7 .0 (chr-ID supercontig_9; pos 165350 to 166130 reverse str and)
ttacttccgctctttcctttctccaagaaaggtcttcctctttctctcgcagtcatatcttgattacttcactatttcagctatcaacctttgcgatttcagtatttacgcttggctccttgtgatcttacactgttactccgtgctagtttttatttattattgcatctcgttggagacgaatgagcatggatttactactctcaaatttgaggaacaaacttcaggcattagttcagtgaataatctaaatggatatttacgaatttaactgccttaagtgtgttgttttgaaattcatatcttcgtgttatataccattgacattgaatttgatggttcatgattaaattattctagtttgggaacaattctaatttattcctaatctttttggatcaattaactgattttggtgcgtatttacgagggaaagaaggctattttttatcttacgatttttgatattcttcaatttcaatcatccgggatcttacgaaatttcagtttaaacccaatcgtacacttattctaagctcggcacagctatatttctcattttgaaagtttgtgcatatctatttcatcctttcttctaccaaatgatcataggctgatggatgaactgagtgtttagatggatatattgcccttttgtgcatttatcctgttgcatgcataaggttttcaaattcaatttggtcttataacattatatctagttctaacatatggttccccaataaattattgtaggcttcagcaatataaattggttgag

SEQ ID NO: 77398 - DNA, 942 bp, Carica papaya
  Intron number 2 from transcript evm.model.supercontig_64.3 4 (locus evm.TU.supercontig_64.34) derived from phytozome v7.0 (chr-ID supercontig_64; pos 236919 to 237860)
gaggctcttctgggcacgtatgtctgcaaaagctctttattttggttctagcttgcgttaatttactttgcagggacgcttcattatgcattatgactgaataggaaaaagatgggataaagatgtaaatcatgacttggcagcaaccatttagatctactaaacattttgagcctcttgaaacataaatgacagatctgttgcacaccttgaatttgcctgcaacatgtagtctacattgagatcctcttggattcaattaacaagagatagataagatctccgatttgtgtatttaatttatgtcatcttgatcatttgaatccaaaagtagtttaagaaactcaatttggttatgattgatgtcagtgtgtctaaaataattgattgtggctaattattatgaaacttttagattgatagaaaatgatccagtatgttttttatacttcaatatattacctcacatgcaagtttactaggttaaaaccgtggatcaaacacatgtatcatattttgtgttaaaattgtgttagcaaccatcacttggactctggactatttattttgataccatgtgaactaattgattggaaagagaaaaaaagaggaggaaaacaagactccaatctattatttatactcctaatacttttttctttccctagttaactggggtttgtagaatcatatttttctttgtcatgctgctgttgaaatttctttttactgttcgactgatgttcttttcgtgctatcttatcgacagaaacaaatgttattttatgctgtctcttgattttctagttgcttctgcttgtagaaacctatctgtatgggtgcttaactggttgtagaacttaacctttttattcatgttagtcttacttgctgtgttatcttctaatctatatttgatatctctactcttcatttgcagtt

SEQ ID NO: 77399 - DNA, 1046 bp, Carica papaya
  Intron number 1 from transcript evm.model.supercontig_89.3 8 (locus evm.TU.supercontig_89.38) derived from phytozome v7.0 (chr-ID supercontig_89; pos 606362 to 607407)
ttagagaggatcgggtgattttgtttgatttttccctataatgaataatcatttggatacccaattagtatcatgcccgcctggtacagccttaacaactgaatggtatggctacagctggagttccagcctgtaataccatccctttcctaatagcaattatcaccaaatttcaggaaagggaaaagaacaataaagaaataaggaaataaagtaattaggaaaatatcatgttaacgaacataactaactgagatactttggtgccaattattcagtcctgacaatctcttagctttttgctcgtataaggaaaaaattttgctaacaaagacattattgagtttgattaaacaaagaaggtaggacaaactcataaattgacatttgttttcaattttcttcttggatcactaccagtagaagtgattttatcttcacatgaagtatgttgactgatctcaggattatcgtcaccaaaatcatgtttgggacctatcttttctacatctttgtctcattctaggctttgttgctcatgcgattcctcaacttgtttttctatctttttttccacttgtcgttcatgggaaatactcttaacatctcctttactgtcctttataggagcggggatgctatagtcatgtgatatattacctctttggtgttatttacttttgctatctgttttgttcttttttctttagtttcaattgataaattgtctgctattctctttataatgttttcctcctctctcaataaaaacttcttttttatcaaagaaaaaaaaaggaaatagtcgtatatttgccaattcccccaactaattgtctagtaggaggtctagactgcaaaatgtgttgttgtttgagaccatctgaagagttggttgatcgatccctttctaacttcaaaaaccataggtgtgttttcttccaaaattaagcaagtcatccttaattctcttctgttgtaatattacaatcctgagcagctgtctagcaggaacgctgttccatcatatcttggaacaaaaggaa

SEQ ID NO: 77400 - DNA, 858 bp, Carica papaya
  Intron number 1 from transcript evm.model.supercontig_65.2 1 (locus evm.TU.supercontig_65.21) derived from phytozome v7.0 (chr-ID supercontig_65; pos 371515 to 372372 reverse strand)
tgctgtcacagtgcttgttaaagcttggtcataaggtcagggaacatcttgcttgttggccttgtgtgtctgtttacattagtaaagacagtgaggaaactggagatttttggaatgggaccttcctcttggggaaagtaacgtagagtagaaactaagagagaagttcaatggaacattggctttttctgcgtaaacttctctcctaggatatgtttggaataaatttagaatttatgtgaaattcatttgcagatttacacttatactaactatgagaaacataaattctattagaagataatgaaagttaagttcccataaaactttatgaactagaacaatgcattctaaatctgatcaaatttaatagaatttgagatgcaccgtcccaattctatatgaattttatgaatttaactttttattattttaaatagggcttcaataaaatttttaattgaaaaatatgaatttgtaaacaaatctttgtacaaattttgaatttgttccaagtataaccttaatttggaattatataaggttagttttgcctcccctacaactactcacactcccaccaaccccatgaaccaaagaggttctgaagtttctttttcctcttcttccaatattattcaggtttgtccattcttacgtggtacatcattgagattgctgtatgacatcctcttccatctgtcctctgttgatctctcttgatattttttattggtgattgttttgtagtgtattaatgtgaatgacattagattttgtcatacttatgtgataaacatattatctccaactttcttattgtttctatggtttatgtgaatcatgcaggttgtaatt

SEQ ID NO: 77401 - DNA, 938 bp, Carica papaya
  Intron number 1 from transcript evm.model.supercontig_97.1 3 (locus evm.TU.supercontig_97.13) derived from phytozome v7.0 (chr-ID supercontig_97; pos 109465 to 110402 reverse strand)
actacctcatcagcatcttcagtcaaaccggagaggtattatgcgcacatgtggatgtttatgcttagatgcatttttttaggtataatgtttgagataatacatgtgggcctatatgtcatgctgcttcgtcgattaatctggtagtctttgagctattcttaactggttcatttatttatttttaacaagtatattagcaagacagaagatgttacaaaaagagatagggtaaggcatcatcttacaagaaaaaaaaaggttgctttggtaccatgggatactctgttaaattcgatttagtattaggagggataaagatgatactcggtgtctaacttatttctaatttttttttttggtgtagatatagttctccatggcgtccggggcgacgccaacttgtattatccatttttatttcaaaaaaaaacattcataaggagtagctatttttatgttctaattttccaaaaagcagcgtaattaattttttaagaatatagcaggatagaaacaagaagggccatttttgtgtagagaacatggtatcaagtatgaacacaagtaactacctgtgtcagggatgcacaggttagataatttctggagttgttactctgtcttaaataagcgtgctgctcaatggaacatcagtttgaaaaatgtaaaagaactgtaggagatttataactttttatcatattctcctacttccttcagaaggtaggtatagttctatttctatacatatactttatttatctttaatatctctttccaacttgatgattaagaaggcaatatgcaatgtgtaccctctttgatgccaaatgcaatttgagcttttatgaaaactgttagtttgtagtgcaagaatcaaacttttttccttgtgtataggctgtttcagcaaaggttattcggaataagcagac

SEQ ID NO: 77402 - DNA, 670 bp, Carica papaya
  Intron number 1 from transcript evm.TU.contig_41130.1 (loc us evm.TU.contig_41130) derived from phytozome v7.0 (chr-I D contig_41130; pos 120 to 789)
ctggtgcactgtatcatcaacaactgtcccgtcaggttctcttctatatcctttctcgttactagtctttgttttattatattgtgttctttattatttttgttctttcccccttaaagttcctttcaggagaaaatgcagttgtgatatttccatttggagaaaaagggatatccagaatttgatttcaatgtttgtcattatgtcatctattattgaataacctggtggaatgacttatttttcttctttttttcttttttccctatttttactgtgaaaaaagaaatcacatgttgtcttccttcatacatttgctgctctgactctttcaactgaaaaatattatatgttctaaatcttctaaaggaaattgtctgatttccttccatatcagtctaaagctgaatggagatttttcgtcagcgttactcatggatcatagaaacagcaaacgtaatggaaaaccttaaaatatggctcacataagctaatgtccttgcttggatgatgggtaaaataaattttcacattgatgcttattatttttgagttaatgataactttgaaactattctggttaatttatttcttcttgggagaagataatgttaatcttgtttcttgacacttagttggcagattttgtcagaatcccgctagagagatc

SEQ ID NO: 77403 - DNA, 869 bp, Carica papaya
  Intron number 2 from transcript evm.model.supercontig_8.31 (locus evm.TU.supercontig_8.31) derived from phytozome v7 .0 (chr-ID supercontig_8; pos 255620 to 256488 reverse str and)
tgagattcaactagaagttattcaatcaactaaaggtatctgtaattagaattaaacaaatctctagcaatatgcaaaccttttatagtttagctacaaatgttagcactggaatttgccttcaacagcgataccaagaaatttcatcattctgatatttattattcttttactctctttgaactgtgttggcataatcaaattattttaccatttgtctttagcagttcacgttctattcccacctaactcccctctctatttctcttaatacatagaacttgttgttattctcagcttgcacccccatcttgaattcgtaagtgatagaaattcaattcccattttagttcataggatttggatagtcaaccctgaagaattcaagatagggatatgggtgaaatgaaatatacaaatcaatcctagtattgagactgattggaaaggtaagaatgaggtgggaatggaatcagaattgaacataggcaatcttactattgagtggaaatggaatgtgactttttccttaattgtatcattagtcatagaagcggatattgatcgcttgcagtgtcacacgtgggggcatatcttttctatagcttcacctctaaaacatccgctttagttattatattttctcatatcaattttatttaaaaaaacaagcctactttcatctaggtactgaaagaagaaattggttatcactattcactaagctaccagtataggctctactgcctactacaccattatcctatcatggacctattaactttaagataactatgacccacaacagtttccttgagcaatattgttttgcagaagacacggattcttcagattcagtagctttggcg

SEQ ID NO: 77404 - DNA, 724 bp, Carica papaya
  Intron number 1 from transcript evm.TU.contig_24415.6 (loc us evm.TU.contig_24415.6) derived from phytozome v7.0 (chr -ID contig_24415; pos 19232 to 19955 reverse strand)
ctcaagcacggtattgattctttccatctctctttctgtttttactcgcacccctgtttctagatttcggtttttagggttttatttttcctctacctaactaagttttgctcttcggtcttctccgcgtttagattgctgaaatcagagagtccttttctggattcggacccgtctgatatcaaaaagtgctctttagaagataaatgatgttgggttacttcactttcagtttgtcatatatgctctggtttagtatgagcaatagacgttatgcaggagtttggaccttttgttcctttcgtttttactattaattggagttttaattggctaccttattttgtttccatttgtccgaagtacgatattatcttcaaaatctctgagttctgaggatgtcgaactcatctatatttcatctatatttttggcaatgaaaagtctaaacaagatttcccaagcagttcctatttgtttcttaatgattggaccttattattggtttcaaagtactaattttttactttttatgcttattaattgcaaagtctgctgttttttttccaactcttgttgtttttagttgagattaatgtagttctttcagaatgttctttctatatgcttaagtttgtgggatttgtgtgatactttcctctgtctattgcttattttttcttccctttcttgattcttttctataggaagggctggggtgcca

SEQ ID NO: 77405 - DNA, 527 bp, Carica papaya
  Intron number 2 from transcript evm.model.supercontig_738. 2 (locus evm.TU.supercontig_738.2) derived from phytozome v7.0 (chr-ID supercontig_738; pos 6705 to 7231 reverse str and)
aaaggtatttatttcatctctgctgatctattcattttattgtttctacagcaacattattgtttctatagcgagaaacatttttttttcttaagaagttgtatcaattgtgaaaatacgtagttatctttcacttttttcctgtttgaattatctgtgacagtttgtgaaaaagtggaaagcaagggaagaacaacttataatgaggtcagacagtttcttgaagtcattcttttgttcgcttccagttacatttgtgaatctagcagcttgttatgtgagctcttgttcttttgttgggaatgagctacttgttttagcaagatttggcccataatttatgtttttagtatcatatgatacttgaaagatcttatacactttagcaacaccttctgtaatagagtcagaaattattactagtaaacatatcttttgggtagtgaaggattgtttaatttgcacttcattttttgttcgtttttaaaaaaggaatcaaacaattcattagaggaccaaattggtgc

SEQ ID NO: 77406 - DNA, 574 bp, Carica papaya
  Intron number 1 from transcript evm.model.supercontig_738. 2 (locus evm.TU.supercontig_738.2) derived from phytozome v7.0 (chr-ID supercontig_738; pos 7300 to 7873 reverse str and)
ctggatctcaaggcgcagccgggtgagtcctcttgatgagaatttagctttaaagttatcatgagtcataattcaatgtaatgctaggcggattgtgggttatagggtttttgtgcatgagggttttgaactaaattgagcaatcgtaacttcgtgatggaaaattgtggaatcttatataggtttctgccttcttcatagtattttacggtcgatatctcattggcatataattgctacatatctttaaatggataatttgttcaacattcctggaatagtgttattttatatctagttgttgagataggatcagattttaatcttcgctattcattaatttggtgttctcacatgataaacttttcttcagtttgaatgtgtttgggaaaagttcacattttgtcactgaattttcaattttcttgagtaattgtccgtgggttctgttatgttgtgctaaaatggtagtttgtcaactattatggtatgttctcattgtttctgtataagctattgctttaagttcttttgcacagcttagctgatagtcagtttattaacagcaataaga

SEQ ID NO: 77407 - DNA, 798 bp, Carica papaya
  Intron number 3 from transcript evm.TU.contig_36992.1 (loc us evm.TU.contig_36992) derived from phytozome v7.0 (chr-I D contig_36992; pos 718 to 1515 reverse strand)
tacttgctattgcagctctagactctgttgtcgcggtacttacttcttataatttttatttcttcttagatgcaccataatcatattatccacacacacaaatatacacatcaatgaaatataatcacctatatgacgactcgttaggaatacttaactgaaaatgagttcatgcacaagtgctcaataaagcttacatatattctttactaaagaaaaaacaaaaacatgtaaaagatgcatatttgtgaagtagctaacacaaaattaaaacagtttttgaataaaacatgaatatttctacttccctatgctattaaaataatatgagcagacaatttgttttttttttttttaaacccaacaattgaacaactttaaattatatttttctattcatttattttttgtttttccatctaaaatttttttcttcattttctccactcccatttcatttcttttttattctccttataaatcccaaacatatcttaagtcccaataatatcctaaagaaatgacattgtaattattcttcaccttctccaatttccacttttaatttattgtatgatggatttctttaaaaaaaactatacatttatcaagaaaaagtcatttacttggtaaaaaattgacacaaattaagaagaaaaagaacaataagtaatgcaagacatataaaagaaaataaataaaattcgtttgtatatatatatatatatgcatgaacatatgaaatataactaaatattgagattaaatctaaataaatgtgcagtttggagggcgcca

SEQ ID NO: 77408 - DNA, 702 bp, Carica papaya
  Intron number 1 from transcript evm.model.supercontig_9.29 9 (locus evm.TU.supercontig_9.299) derived from phytozome v7.0 (chr-ID supercontig_9; pos 2034279 to 2034980)
ttttgggatcaagctctgagtacgtgcaaagcaatgtgagtgggatgtttaggtcaaaactctatgactgcttttcttgtttgagcttgcaaaggctacttatataattagcttaatttagctaattaggtagtctatcattttgaatgatgcttccaggaaagtttaggttactgttctgcttaagtttgcactgaaatatatgaaaaaagaaaaactagttataaaacggttgtcatccctttaagaagaaccttttttgtcaatcattcgaataaattcattctagggttgccctctgcaaaacaggagagcccagagcaattaatatgaaataaacgaaggacatatgtttttcttaacagacatcttaaaagttcaaaatgaatgcattgtaacatgtctatgatatgttgaaaatcatttctactgtctttattatctttctttctctccgaacatagatctacccggctacctgcatctacccaatgtttattatataagctgactccgaacggactttctttagtcattgttgattaagtgacaaatactgcataaacatgcaaatttctatttcatccatgcttgataactttaaggtttttgatacaaaaccttagtaacttattttcttccccttttacggctgtgatatgagcagataagtaggtacttctctgatccccaatattattt

SEQ ID NO: 77409 - DNA, 465 bp, Carica papaya
  Intron number 1 from transcript evm.model.supercontig_862. 6 (locus evm.TU.supercontig_862.6) derived from phytozome v7.0 (chr-ID supercontig_862; pos 21796 to 22260)
tgcctctaatactctcaacctcccttcttttagtacctacccgtatccctctctttatctctctctctctctctctctctctatctctatatatatatatatacagaaacacgtatatgtatgatttctggggctttctttttcttgcaaataatgggtggcaatgagatttttgattctttgtttcgaccatgtgggtataaattcctttggttatgtgaggaggaaaataagaagagagatgctaaagtgagaatctttataataaatgaatggttttatatcaaggtgatccaatgttagttgttatcagactggattaagctgagagtttttggtttctggggtgcccacttactgtttgaagaaatgaatgagataaaagcttgagtcttttggctttgttctttatggaaacttgaacccattttgaattacaacatttccaatcatgaaaaatttcag

SEQ ID NO: 77410 - DNA, 507 bp, Carica papaya
  Intron number 3 from transcript evm.model.supercontig_90.4 1 (locus evm.TU.supercontig_90.41) derived from phytozome v7.0 (chr-ID supercontig_90; pos 663954 to 664460)
aaggcttattggtggagggaggcaaaaggggttttcacttagtcctgttgcgaatcttcgtactcctccttttaccaattttcagctttttctttttatcgtttctagttggtcttttagcacttctctttggggaattatcaatttcggctcctatttctcttctctctcgctgcaggatagtatccagctgtaagtattcgttcatttttttttttttaaattttgctctcttgatgttgttttcagaaattgtattttctgggttttaaaatcaattttcccggcacccaaatcgaagtttgatctggtaaagctgtgaaggatcctttagtccatgttatgagtaatatattgagattgaattggagaattaattgttttgttttgttttgttttttatatgatggttttcagtaaagtaatttaaatttttattatcaagtatgaacttaagtgtcatttcctccattttgttgcagctgtggacctgaggtcatcaaaagt

SEQ ID NO: 77411 - DNA, 791 bp, Carica papaya
  Intron number 1 from transcript evm.TU.contig_35056.1 (loc us evm.TU.contig_35056) derived from phytozome v7.0 (chr-I D contig_35056; pos 1938 to 2728 reverse strand)
ctgtggttggtgtctacactgttgtgatactcgcggtacgttccgttctctgttcccggcttggtttccaaattgaagaaaaagtgtcggagttctttagaggtttacgtcctgtttgttgtctatggtatgttttgaagaatgtgatgttcgagtcaactgaagtcggaggctcgctaattgttttagccctaactgaaataattttggttgattatcgtgttccaactttgtagaagttggagttcggatgaaagattcttattgttgcaactagaaaagaaaaaaacaaattgataagataaggacttaaattctttctactggatcaaatattacgcgtttggtatcgtagatctcttttttttttttttttttttttttctaacggtttaaggatataattagaagtggtataaatagactgccactaggacaactttttaaaggttaatgttgaggtaaaggaaggaattaattgctttgtttaaggaagatgcacctgtatattgttgatttacatccaaagattcgcatagagaataattgtcgaagtttggagaacaattgttcttttgattatatttgcattaggtcggtctaattaatgattagtataattgcacaaatttgctatatttatcttgctggaagtatttaaaatactgtatcatgttgtgcttgggttttgactgtagtgttttttacttgtttaatttgcttcttgactcaacatcttctttatgattcatatagttgtggaaaacagtactcttgacaccctttaagct

SEQ ID NO: 77412 - DNA, 446 bp, Carica papaya
  Intron number 1 from transcript evm.model.supercontig_98.3 4 (locus evm.TU.supercontig_98.34) derived from phytozome v7.0 (chr-ID supercontig_98; pos 763365 to 763810 reverse strand)
gggcgattcacaaaaaaatcagtaggtataatgtcatgttttttatttatttattttctacccttacctatcctaagaattcaaaaaaataataactaggactcactagttaaagagaacttgttgatttttgaagaaaaaataataattttgtttctcactctttatattattacatttaaggtatttataaaatttatattctattataagaaaatttttattctaataaaattataattatatgaaataattattctcataaatcctaattaactaactaaataataaactaataaaataattaaataataaaatatgatagtcaccctctctcaagttagtgcaggaatatcacacatacccaacttgtaaaccaatttgcaaacccaaagcggacatgcgcggaagagctgaaaaaagaatcagaaaaggctggtcggagc

SEQ ID NO: 77413 - DNA, 759 bp, Carica papaya
  Intron number 2 from transcript evm.model.supercontig_9.28 0 (locus evm.TU.supercontig_9.280) derived from phytozome v7.0 (chr-ID supercontig_9; pos 1912019 to 1912777)
aggtcgggttcgggttagcgggaacagagaggcaggtttgggtttggcatatatatatttatatttttaatttttattagtataagtatgattatatttatattactataataaaatactgtgtcaggcttgagttggataacctgtaattctaccggtctaaaagaacccaaaaaatccaaacccgctcccggtttggagtgtgttccgtgttactttttataggagcaggtcggtttcggatttggtaaaatctgtccaaaatctgccctgttgttatccctattttctcttgttgctctatttcggtcacaaccatcttcttcgctgctcataatatggagcatgagtggtactaaaagactctaaagagagttgtataggacttttactagaaatttcagaatagttagtccaggaatttgtttgtgcttatcttgtgtgccaatgccataatgtggaacaacttcgatgtataggtctttgacaacccctaccagtaactgctcacttttgtgctgatattttgatggacttcgttgatggcttgcccttatctcattgaaggaccatcttgttggtgctgcttgatcaatttccgagtatgctcattttcctccattgttacatgcttacatagctttgagtgtggctctaagcttgtttaacgacattttttagcttcacaagctgtccatgacaattgtaagcaattgggacgtagcttttcagaggtcttccaaaggagattttctgttt

SEQ ID NO: 77414 - DNA, 966 bp, Carica papaya
  Intron number 2 from transcript evm.model.supercontig_85.1 28 (locus evm.TU.supercontig_85.128) derived from phytozom e v7.0 (chr-ID supercontig_85; pos 828915 to 829880 revers e strand)
gagtcgacgttacacatctgggaagagcaagacaggtaaaagtttcagcaaatttgagatttctttgctattctaaatgtaactttacaaggtctatacatgtgtatatatacatatatgcggatacagacatatacatatatatatataaataatatgagtcacttattaaattttgttttcctttgtttctttcagtgtatctcggtgagtgaaaaattaaagccacttcaattttttgctctatgaagatcaagtacaggagtagtaacatatatacatatacatatatatatttatgattatatataaacacccacacgaaaatttcataacttccttgcaaaatgattaagaaatattttgtatgagcgtgtgtaatgcagggagattcaacacagaagtagaagcagcaaaagtatatgatttatgtgttcttaaactctggggagctaagggaactaaaaccaattttccggtacgtcaatctttttcttacatataagtatatacatgtccatatagatgccatgcatatatagcaagatcttttatcttgtaaattattgtcaactttgtcctatataatataagaaatcttctgtataaaaacaagtaatatacatttttgttttatgcataactaaagatagtatataagttgatgatcaatatatatatatatatatatatatatatttttttttttttttttttttttctgatttgtatatacagaaaagtgattacgctcgggaactggcggagattaaaaatttgagtggtcataaggctttggactccattaaaaggcaagacatatatatatatatatagtgcatatataaaatgctgtctatggttttcttttcttttttttttttttttgagtacttggggtttactaattactctttaattctaaatttaggaggattcgtggtcattcaaatcgaacatcagggt

SEQ ID NO: 77415 - DNA, 677 bp, Carica papaya
  Intron number 1 from transcript evm.model.supercontig_80.4 2 (locus evm.TU.supercontig_80.42) derived from phytozome v7.0 (chr-ID supercontig_80; pos 362026 to 362702)
tgattgtggagcgctcaattcatcgcttaagcaatgtaagtagtattgggtatttaatccatgtctttttcttgtctttcagactttcagttctcagttcagtctctcactgtcagaatcaaattcacagtggtttgacctttttttttttcttgatatgtttcactttatgatcaagtgatttatattttaatccagatgtcatatgtttcactttccttggaagatatccatcccttgaagtactttttaagatatgaatttcttttttgttatcttttcagttaaaaagaactttcaggtctcagcttgcattgtgaacaaagaggggtattcatgcgttataaacttgtggctgggactgaatagttgttttttcaaccatttcctcaagctttccatgaatttgtgtaataagttttcttggtataattcttgaaactgtatctaaatatactgtaatttaggcaagaaaaagcttgcaattaagatcactactttctatacactccattttatggcttaagtcagccgagtttttcccggagttctgaatacactgaatattgtctctagatgtggtttaaaatagattttgctcttctttgtgcgcatagtcaaccgaatgcattttgtttacagtggttgcggaaaactaacagaaaacctctgcttgc

SEQ ID NO: 77416 - DNA, 651 bp, Carica papaya
  Intron number 2 from transcript evm.model.supercontig_92.2 0 (locus evm.TU.supercontig_92.20) derived from phytozome v7.0 (chr-ID supercontig_92; pos 211607 to 212257 reverse strand)
agattctcgttcccataattaaacatgtatttgaagctaaaaccctggatttttctcatactttcatgaatgttaattacatttcaatatcttgagaagaggactagaaagcatttgacattcgataatttagtcaatttagttaattatttcgtgaagtgtgaaggttagagttctagatttcaatcagctaattctattaaaattaattttagcacaaggcaagcttgtccttggtccacgggacaatacatttcagtgggtgtattacctcgttgagggcgggggggtttggataattgcttttgttattttctatcagcttagattttgataatttgtttctcaactcttatttttattgcagaaaatgaatatcttcctgaaatctttgtggcttttgattcatgattttccttttatttgtaaatggttcagcgcctcttgcatccttaggttgttgttttgaaaattttcctgatacatagctaatctctgttcttccttctattccaacccctcatgttattgattttacccctctagttgttcatacttcatacggtggaaaaaagctttttttctctctttgttaatttgttattctttttgcttctttttcacagacattgacgtccaagggattgaagc

SEQ ID NO: 77417 - DNA, 751 bp, Carica papaya
  Intron number 3 from transcript evm.model.supercontig_97.2 8 (locus evm.TU.supercontig_97.28) derived from phytozome v7.0 (chr-ID supercontig_97; pos 192592 to 193342 reverse strand)
aactgggtctgtattatgtctccactattatgctccaaaggtgcttatttagactgcgtttgacattgtttctctgatgcttagaacacctatccatattgcctaatcccagtcttgaaaaagaaacatgagatttgtgattttggcgccacacacaccctcaaaacatatttcgtgcttgttttacaactttgcactgcattgctgatgtccaaaggcttgatgggttttgaagttaattttgattgcctacatgtattcaaagtgattttaagtctttggtgcaagcatgtgaggtatttgttctaattttgcttgtaaacatcctggtttgcatttttttgagttcctagatcgcagggtgaatgaataaggagtatgaaatctgctctgtgcaactaaataaaatttcaattcttctttatcctaattttggcaagttttccagtttttgatactttggaaaatatatagacttttagctgtaatgattcctgcaccaatataggtactattcatcaatatgtgtgtgtgtgtgtgagtatttatttcaaaaaagagtatatgcgtatattttggttgtggtttagactctagttagttttatgcatcttcaaattgcaacttttatcttttatccaattttttgtttagcatcaaaagcaatatgcatgttatagaagatgagttaatgactttgttgtttggctaaacaggtgttcaaattgttgatatttgcttggctacaaga

SEQ ID NO: 77418 - DNA, 1006 bp, Carica papaya
  Intron number 1 from transcript evm.model.supercontig_80.9 6 (locus evm.TU.supercontig_80.96) derived from phytozome v7.0 (chr-ID supercontig_80; pos 748881 to 749886 reverse strand)
attactggcaggtaactataagtatagaaatttatgtatatgtatgtgtatatatataatttctggcttttctctgaaaaacttctgcgaatgaatacactctcttttattaattcatctcgtcgtcattcacgattccactcaagacatcttattttcatttttataatctgcttttggtgctatcccatttcatttttacttaatttctctttaaattttaattgttattgattatttttatgtgggaattttattttcactgtagttcatgaaaattgaattctcaatactaaataattcaaagtggtagagaagcgagattaaagatacagttcatattctaattctacatattgaagaatgatagaaagattagagttcggaattgtaaggagtaaaataagaattgaaccaagcacaatctaccaaaagacaaaagtgaagaagatggaattagctgattcttagaaaaacaaggtctcgtttggttcagttattgcataatctaataagttcattattattattctcatgctagtcttgatatatatataagtaggatataatttggtgatgtttgagttattgccactatcacttttaatgagttatcactactttctattttggcttcattgatgttggtaacttaatcaatacatttttttaatcatgcattttaagattaagataaaaatgaaaatacatggtttggattaggttttatgtgagtcaaatatatctcgtgctctgaaatgatcaatagttgcacgaggcgatgattgagattctctttttggaattttaatatattcgcttaagacttgaaattaaaacgtaagctttctttagaattagacttcggattttgattagcgttgtagaaaatctgctatttattaatctattttgcttaggtacatactgtcttgttttatactaaatagttaaacgtctgtttatggtttctctcagggttggaccctttttgagatactaagat

SEQ ID NO: 77419 - DNA, 995 bp, Carica papaya
  Intron number 1 from transcript evm.model.supercontig_8.92 (locus evm.TU.supercontig_8.92) derived from phytozome v7 .0 (chr-ID supercontig_8; pos 595471 to 596465)
agaggcctcagagtgataggaagatttctgtcaaggtacatctaccttatgttgttttctatgcaaaagtttttttccttgtgtcacagtattcagctcgtcaaggcatatgttcgtattgctttcacatcattttggctttacaaggctgggaagtataggattgatagtggatgggaactggagtaagccttatggaggcgacccgtgaaagcattggtttggtagttttaacttttggagaaatggccatgctttcaatgccggagaacattaatgggattgtcaattatcaaatggccgtatttgttatgttctttacacgcatttgtaacttcttgtttaatcatttcttggtgattgtttattcactgttcttgctcgtatgagatttgtagaccgaacttcctccatttactaatggcattgctgctttaagctatagcattagatttttaatgacagttatgatagcatatgtacacacgtgtttctatactagatataagttcttttccttaaagtgattcaaattgctttaacaagcatttttttcttttaatttgattccaagtgtttgtcatatcccatgtgagctttctactgcataaatttgctcctgattttcagatgaatatcccccttaccacaagcctatttatttgcatttcatgacagttgcagtatagtggtgaaacatatttggtttcttgtttagaaaacactgattcttagtcatacattagaggtacttgaaactgaactatggtgtgtttacatcactaaacattgagtagtagtatcgcatctcttattatgattctgcttatatttcattagggaacttgaaatattttgttccctgagcttctagtgcatctcataaatttttgtgcacttcattaattatcatcgataaccatgctaacagtagcttgcttttatatatcttcttggcaggaaaactggcgaaggccaaagggtattgactcaag

SEQ ID NO: 77420 - DNA, 196 bp, Carica papaya
  Intron number 2 from transcript evm.model.supercontig_7.13 2 (locus evm.TU.supercontig_7.132) derived from phytozome v7.0 (chr-ID supercontig_7; pos 1320117 to 1320312 reverse strand)
ggaggtggtgatgtaagattagacacacaacatcacccgcaaactttcaatttcttctaatatttctttgtttttgtttttgtatttttcttccagctgaactattccaattatttaatcttattaccattccttctttgattttaatttttgactgctagctggagaagggtagagtgatacagacgttactgtt

SEQ ID NO: 77421 - DNA, 712 bp, Carica papaya
  Intron number 1 from transcript evm.model.supercontig_8.67 (locus evm.TU.supercontig_8.67) derived from phytozome v7 .0 (chr-ID supercontig_8; pos 440972 to 441683)
attgctgctcttgctcgcccatccacttttacttggtacgtttgtttatatgcttttccctaatttgaaattttcgattttttaacttggattttcgagcttaattttactttgaaaaagtcaattgggtcaaattatggttgaatttagtctttgggttgtttcgattgttttccatgtttgtttatgttcctgtttttctttttcattttaaaaagttgctgaaaacagtattttcaatttaatacttctgtttaccctttttaaacattaaaaattattgactcctgtttcttttaacatcgtttaagtctcttagtcctttaataattatttcttaatcaatcaaaatattatctcccttcatatatatttgctaaaaaggagtgcttgaaactctaaaacagttacttgcaagcttcgttttctgtttttgatggaacatttgtgagcttaattataaattatatccactaaacttatataagaagctgtggctgctaatatgtgtttggttaaggaagacagggttgtcctgtctttttctgttatctagatcttttactctcttttcagttcatctgatactgctacactatgtacatcttcttgtcagccttcctaggctcatgaattatgtggcatttttgttttatgaatgaactaagagactcttggatttaaaaaccgtgcagggtgtctaaagaatatt

SEQ ID NO: 77422 - DNA, 525 bp, Carica papaya
  Intron number 3 from transcript evm.TU.contig_32689.1 (loc us evm.TU.contig_32689) derived from phytozome v7.0 (chr-I D contig_32689; pos 788 to 1312)
cctacattggaaatacgtgaggtctgtactattgcagaaaacaatcacattacaaatttttactagtataacattgttattctggacgaaagaaagtaaggacttttgctctccaaaaatttgatatattttgttatgtttgcttagagaataaacacttgacttcatttagctttcttctggtcaatgttagagagtgctaaagtgtttaaaaaacctatgatatgttgatttcatttagactttaaaattctcagtatgtcaatgcagtctggatatagcatttgatttcttttatgttaatgcagtttgtgatcattggtttttaactttgggcatttgatattttgatatgtaacccttgcatgttgctgacaatgatagacattgtccatgctcgtgtcaaaaatgatattgcatctttattttcttccagattgagtcaattcataaactctttaagtgaagaaaaaattttcttctcctatccttttgttatcttttcagggtgctataaacttgttg

SEQ ID NO: 77423 - DNA, 298 bp, Carica papaya
  Intron number 1 from transcript evm.TU.contig_36966.1 (loc us evm.TU.contig_36966) derived from phytozome v7.0 (chr-I D contig_36966; pos 1106 to 1403 reverse strand)
tcatattggacaccatcgtagaaacactatcgaaggtacattaagggtttgttctcttttcctctcaatagagaaagatttcatgctagacatataataaaaattgaagcagacttgctaaattcagtgaaaaagattcaaagttattagtacaggtgaaaactaacaattcatatatgctaagaaaaatgttggatttagttcgttgagtttattagttaatgcctttttaagtaagagtttttatttcttctacatatatatatatatatatataaaataatatttgaattatagg

SEQ ID NO: 77424 - DNA, 503 bp, Carica papaya
  Intron number 1 from transcript evm.model.supercontig_989. 1 (locus evm.TU.supercontig_989.1) derived from phytozome v7.0 (chr-ID supercontig_989; pos 3589 to 4091 reverse str and)
aaaacatacttcagatacctcctttggtggctcaggtttagaattctcttcatgattttcacttctcccttactggtaatcttggtagttctctttgcagttcatagatcttctctttaacaagtttgatcactttcctgtgagtttgttgaactgttatgaccactaagttggtctaatagaacatttgatttttgaagcatgatatgatggcttcatataacattttgttgctgcacatgtctccttcctattggagaagaaaattataggccaattacaacccatactaaattctttgttggtagttatggtggcaaagttctctattgaaagagaccattaaaatgcggttcatgaagttctttaaggatacttgtttagaatttcttgcttccctgcaaagcatccgtcttcagttaaaatcctgagtagcacaaatttcttgttttgtatatatatacataatacgggaagtcttcttggcaggtaaccaaatttaa

SEQ ID NO: 77425 - DNA, 220 bp, Carica papaya
  Intron number 3 from transcript evm.model.supercontig_798. 2 (locus evm.TU.supercontig_798.2) derived from phytozome v7.0 (chr-ID supercontig_798; pos 17548 to 17767 reverse s trand)
gcccaactttgcttgaatatattatatcctctaaggtttgcagctgctctcattatttttaagttctatgcctttaggattgactacaagaataatttcttttggtttttctacgtttgctctagtttatggtgtttgttatcaaaactgtttttgaagtatccgaactaattattcttttctggtaataatttgcagattaagactacagctcagttgg

SEQ ID NO: 77426 - DNA, 755 bp, Carica papaya
  Intron number 4 from transcript evm.TU.contig_33695.1 (loc us evm.TU.contig_33695) derived from phytozome v7.0 (chr-I D contig_33695; pos 2409 to 3163)
actttaaggaagagcaggtaggcatggaagtctgaatttccttgtattgatttattgttgttgtagcaaaaataaaactaaatgcttattttggtctgttttcagtgttgttataattatcactttattatttcttcaatttgaaaaacacaaatacaagatatataaggaaccaagttgatgcctaccatcacaagacagctaatttcaagcccaaaataccattaagtggagaaagtagattgcacctgttaaaagtatacagtatgcaactctatcatgcaccaaatagactccacaacactgtcgaaaactcttctatttctctctttcagattttctaaaagaattgaggtatcgtaaggtttcactttgttgagctccttttgtatttattgatgttcttttcctataatagatttcttgtttttccccctcaaaaactcctaaattcgattttacaatgaaagattacttgtgtttgtttgtttatttgtttttttttttctggtttttaaaattgttagtcaatatttaaactattgtataaattttttgcattgttcatcttttctgcatttaacattccttaatatctgactttatcttatgatagtaaattttggtttttgctactattcattaagtcctagattcatttgaggccagttttgtccttgcctcatttccttttacttggttacaggtttattgtttgatatttactaacttgtcttctattatgtaggaggata

SEQ ID NO: 77427 - DNA, 464 bp, Carica papaya
  Intron number 2 from transcript evm.model.supercontig_755. 3 (locus evm.TU.supercontig_755.3) derived from phytozome v7.0 (chr-ID supercontig_755; pos 17109 to 17572 reverse s trand)
aagaacgaggtctaattgactcctatttcttgcttgctcagtaaaaaaaaaagtcctttgtttaatttattagtttgatgttaatggatttatgatagtttcaatcttttttgttctcgaagtatggatacgagcaggagacagactttcgaacaaaaaagagtggagattaggacttgcgatggttgtgtatttgaagaacagatagttaacaaaatagaaagctagatgtttttagattattggattatattaatgatgctggatgcattttatgatcattggtgctttcgaactatggttatagaaatagaacaccagtgatcatttaaagtgcttcttaatacttggtttggtttatgtgaacagcatctttctggctggaggccgtgattttttcagcttgagttcttagttttagttttatcacagttttcagcatctgactgcaggtcaaagacata

SEQ ID NO: 77428 - DNA, 254 bp, Carica papaya
  Intron number 1 from transcript evm.model.supercontig_82.5 7 (locus evm.TU.supercontig_82.57) derived from phytozome v7.0 (chr-ID supercontig_82; pos 952515 to 952768 reverse strand)
ggagtcgattaaagcccttggttaagaaaaaataggggccgtcgataagtctagagaattgaagagactacattccacaattaattatgataaggagagaagaagggagtgcaggcaactaaaatttgactatgttagaatgatctcttgaaaccttagggaaaacaaagatcaaaagaataggggatgtataacggtggaaatttgaggtaatctgttttcatgaaactaaagtaagttccatctcagtcagt

SEQ ID NO: 77429 - DNA, 638 bp, Carica papaya
  Intron number 1 from transcript evm.model.supercontig_95.2 1 (locus evm.TU.supercontig_95.21) derived from phytozome v7.0 (chr-ID supercontig_95; pos 409770 to 410407 reverse strand)
tgccttttgagaagttgtgggataaatttttccaggtatggttctgtttttcctatatgtattattttcttttcttttgctttaatttcaataagcatgttaattgatgctttagtcttgctttttggcattacgtaaaattaaaaaaaccattccatgtattttttcagtaagcattcaattttcatgaaccaaaatttgctggaagaatttgaccttactgtttggcactattaaatgttgtgtatgctggacagaaaattacttaagaacttactgagacttaaagttgcacgtctgctttgttcctgttacatctaagcttaggctatgacccatgagcttcggctagggaaagtaacattggtgaccaaattttactttcctttcacgcacatatcacattagaaatatgagtagcgtattgtcatacagaagtatcaaagcatctggcaattaggaaataaatagaaaattatttcaaaatcaatgaaggatccaagtatgttatatattagtcttgttaaacttaatgcatttaggaagtagacttacaagtatataaactgagcacttttggcattggtagaagttatataactttatgtttgcttcatcttctccttttcgtcagggcc

SEQ ID NO: 77430 - DNA, 795 bp, Carica papaya
  Intron number 1 from transcript evm.model.supercontig_78.8 4 (locus evm.TU.supercontig_78.84) derived from phytozome v7.0 (chr-ID supercontig_78; pos 978711 to 979505)
gagaaagcgcctcgctctcacgtccaagaaacccggttagtgatttttcttcttgctgggttctttatgcactctgtggttttaggaaaaatatgataagtaatatacaatgtttcttcttttcctcttgccaataagtcaagtttgcttttgaggctctttggcaaaagaaaaaacattgaaggggagtttatcttcatctgttaattgggttatttaggttgtgtttggcttgtaacttcttctgcaatttcttagtttggaaagtcctttttagccaaacgattgaaatcaaaatgttttggttgaagtcagagctaaaatatgtttttaatagttttaaatacagaagcttctacaataaatgttatgatagctcggaaagcagtttttttttttcaatatcttttgttagaaagatttgagctttgtggtgcctctgtgtgctgaaatttgcaatgtcccaagtctctagtctagtaagttaagtgggttgtagaaggaaaggaaaagaagagtttttgaaggtgtggaccatcttatctatggaagattgattcatgattgcacttgctcacaccaactctcggctggcagctgtttggaatgcaaatttcttcttcttctgtaaaaaataaaataaaataaaataaaaaatgaaatgaacttgttcctgtataagtttgtttgattggtattttagcattagttcaacaaagaacttttagctgacacatatttccgtatttatgtttcacaggaaagacacagtgcatcaaccattttcgggtcaat

SEQ ID NO: 77431 - DNA, 216 bp, Carica papaya
  Intron number 3 from transcript evm.model.supercontig_69.2 6 (locus evm.TU.supercontig_69.26) derived from phytozome v7.0 (chr-ID supercontig_69; pos 366467 to 366682 reverse strand)
accgtcatagaattggcactagaccttgctcaagggtaagacttgtcttttcttctcttgtattgtttatttttaaactgaagaaatcaagattgataatcttcatcttgaaaattaatatttgatttaatcaaatttttaaaaacgaaattgagatatttctatgtcttccttctttcaggttaaattacctacattctaaaaaaattgttcaca

SEQ ID NO: 77432 - DNA, 646 bp, Carica papaya
  Intron number 2 from transcript evm.model.supercontig_62.3 6 (locus evm.TU.supercontig_62.36) derived from phytozome v7.0 (chr-ID supercontig_62; pos 294275 to 294920 reverse strand)
aggaggcagctcgggcccttcaacagattgaagatgtaagtcttctgggaaaacatcattgtgattatgctggaaactcggttgaattttgttttaagtttgaaactgtaggaagttaccttatgcaaagagggcttttgttgcatctgattttggaatgtgttttctataattcatgtgcatgggagagactaggaatatatggtaatggctttaaagtgctgaatctttttgtgaaatgaattagaccaactttggattcaggttaactgagcatactagaatttagtgtaatcccatgtcatgattacatacgtggtctgtagaaacagtaatttagtcaagtatgttctgcatgtaaccttaacttgcttcttttttttttttctttttcatgtcagcaagtcagactattctttgtatgtacattattctgtgcggaaaagaaagtgttgtacaatatggccaatgaaaagtgacatgaacctaggttcattaaatcacaatttaccattaatgttaccctgagcaggtcatgaaactttgaaattgttattacaaatgccagttttaggatcctgattgtattatttgtcaaaaatgtttgccagaaagcaaagcgtagttatcagaaagatatagctac

SEQ ID NO: 77433 - DNA, 723 bp, Carica papaya
  Intron number 2 from transcript evm.model.supercontig_76.4 9 (locus evm.TU.supercontig_76.49) derived from phytozome v7.0 (chr-ID supercontig_76; pos 989071 to 989793)
accaggtttgttttttcttctcaacacacattttaatactcagtggtatcctttttcatctcactccaccagtacattggtcgcatgtttggtacgtggaatggcctaaaaaaagaagattaaagtagtgatttgtaggttgaatttggacattgttatatttcaacaaactaaaattgagagagtggactgttttttgattcctagtgtacaggattctgggtttaaagatttggttgcaagttcctccttgtgggctttcaaagggatgttggtgataggagtatcagattggattctcttgttggttcagttgagggagatttatacttgtcatgcttaatattattgggcaagccaattggtgtttcagaagtgttttcagcccaacctaggctttgttcctttgtagaggctcttcatttgttgtttctggttttgcaccatttttggtctatttgtgccactaccatgagaggtttcaacaattttattcaggctgttagcttagagatcttcctttatcctatgccaatttatttgtctttctctatttatttttgttcagattgtaacttgtagctgatgttcatggttggtattgattttggcattttatgtctcttatacttcattctttattttttctttttcttgtttatgctttgaaatcattgttttgtgacaggaaaagggaaggagtttcatcgtttatctcgaaac

SEQ ID NO: 77434 - DNA, 905 bp, Carica papaya
  Intron number 2 from transcript evm.model.supercontig_63.9 (locus evm.TU.supercontig_63.9) derived from phytozome v7 .0 (chr-ID supercontig_63; pos 385231 to 386135)
agaggtacttcttgattaagaaaaaattagttagagatatctgtaattttatttttttgatatagttatatattgaacctgctcaaaggactagaaccttggatctccaatgaggccaagacatgacttacccggttaaagctggacaattagatatctataattttagatggtttttgtttagcaaatcagaatcgatatactaggttacaggcattactcaatcaaataagcaatacttaatttttatagtgattgccttgactgcaatcttacaggtgttaggtgcacagagactcatcaaccatggagaattgttcagaatccttgagatgacataacttgttaagattcatttgtgcaatacagaaacagaagatagacttgtgctcatttagcttttaactgtaagcttgaagatgtgtaggcttgtgaacttgggatcataaatacatttcattaatatttaggtaacttgtaatttctacttggcttagttttactcttaaactagtttgatcttcaagtcaaacctcttttcccgatgtaagtggcttgaatttgtctcaaggggttcttcaagcttaagtagatatcaagtttgctatatttattgtcagatttggcttctcatagcttaatttgacatatatttcttactgtaatttgtgttgaatctttttctagaccaagaaatgatttctaggtaaccctgaaagcaacatgtcagcaaactaatggtcagtgataatgatcacattaattggttctcttcatgtccttgttcgctcttgaacctccttgagtttgccctgtaaatattttacatattattttgtagtttcttctacatatctgcttctactgcagggtccttccattgaagagggctgctgagcaaaagg

SEQ ID NO: 77435 - DNA, 424 bp, Carica papaya
  Intron number 2 from transcript evm.TU.contig_31977.1 (loc us evm.TU.contig_31977) derived from phytozome v7.0 (chr-I D contig_31977; pos 128 to 551 reverse strand)
ctgtgcaggtatttatctgtcaaacttacataactatgtgtatgccctcaagagacgacatttattagaaatagttgcactcttaactacactggtatgttgatatgtgaatatctttcttgaaacaacttttgatttgctatttggtgcgacataatcatgcttgctagctcatttgtgttctggggctcgcacatgcttggcaatttcatctagatagttatataggtgactgacaatggggacctaagtttgaaaatgaattgtcattttcataaggttaaaagatgatggaaattttcttttctgtgattgttgattgaaggtggtccttatgttctcattactacttgttttccttgatctatgagttacagctgtttcattcatgcatacttccctttcgcattgtgtagatcaaaag

SEQ ID NO: 77436 - DNA, 233 bp, Carica papaya
  Intron number 3 from transcript evm.model.supercontig_64.5 4 (locus evm.TU.supercontig_64.54) derived from phytozome v7.0 (chr-ID supercontig_64; pos 360944 to 361176)
agtatataatacctagagaaagttacttctacgtaaatttttaatgcttttttaaatattctgacataaaacgctttaatttgtgttatatttagttttagctttagttttgtttgattatccaatacttaaatctgtttctagtgtgcctcaccattttttcttctctctatattctgctttcttatcatgcggaagtctgatctgcagcagattcacaaccttattcctgg

SEQ ID NO: 77437 - DNA, 458 bp, Carica papaya
  Intron number 1 from transcript evm.model.supercontig_82.3 4 (locus evm.TU.supercontig_82.34) derived from phytozome v7.0 (chr-ID supercontig_82; pos 502117 to 502574)
gggtttttgaattttagaagtaaaaatgagtattttgtcaattggaaagaatacagaaatagagaataattgctaaaactttcaaaccgacaagtttgagagctaaaatgggtaatttgtgcattgaaaggaatatagaagcagaagattaataaagaaatagtgattttcagttgctaaatttaggaaaaacactaaagaaagaaaatctataaaaagcttaaatttgtaaaggtgtgattagcaacttcggcttgtgaaaaccttatggccattttgctcttcaagttgtttggggcatcccaaatatgtcattcttatgcttttagaaacaatggaagggataacgaataatttccatttaaaaagtcaaaagcttttgaaggatctttttttcatctaattattttatatggtatccagggtttattggaaggggttagccactcgtttacaaa

SEQ ID NO: 77438 - DNA, 633 bp, Carica papaya
  Intron number 1 from transcript evm.model.supercontig_95.3 (locus evm.TU.supercontig_95.3) derived from phytozome v7 .0 (chr-ID supercontig_95; pos 26794 to 27426 reverse stra nd)
tctcgcttctctccagtttcgataacatctacaaggtataatagtacgtatgatatgtactgtgtctgtatttgttttcttttttcttgttcggatgattttttcttcctttcatccgtttggctgctgaggaaacgaggaaaaggaaatcatttcaatagaggctctttgattttgtgttcacatttttctaagggaaaaaggaatataaatttgtaaatatagttttgaacttcatagttctttattcagttcgatgagtattttctcggtgacgtttctttcttttatttacttccaatcttgaaaatagctttgctttctggagtttttgttctgagtttgaagttttggaacatatcttttactgccttttatcgcgaaccaaacagaagtctagaacacttaaagttacgacgactgctaatcacatttatccggggaaaaagaatcccgagcttctttttagaccatatctagggataattgagctggacaattagttctctagatccaaacttcaaaatatacgttctccactttctgtgcatccaacagtggctttacttgtgaaattggataaacttgatgttctcaggacttcaagtcggggattagtgagatcgaagtgct

SEQ ID NO: 77439 - DNA, 323 bp, Carica papaya
  Intron number 1 from transcript evm.model.supercontig_693. 2 (locus evm.TU.supercontig_693.2) derived from phytozome v7.0 (chr-ID supercontig_693; pos 20148 to 20470)
gggagtggaactatcaccaaaaagacagggtctgagtatgttgtgcattttactaccactaaagggaggatcctttcctctatattgagaagttgagatttcatctccattgggttgaaaaaaaatggatctcttacaaatttgggtgaagttaatcttctcttcttcatcgttttttaagttcattttttttttctgaatctatttgcatatttctttttgattgtcttctagctgtcactttgtgattattattctttgagtttcatttgttgttgcttgcctttttgctgtcattttcttacaggagcttagctttggag

SEQ ID NO: 77440 - DNA, 512 bp, Carica papaya
  Intron number 1 from transcript evm.model.supercontig_77.5 1 (locus evm.TU.supercontig_77.51) derived from phytozome v7.0 (chr-ID supercontig_77; pos 513735 to 514246)
tcatctacaacgagccacgagaagtacttttcgaggtagctgaaataagcttcagttcttttttttttcagtgaaaacaggctggaagatcgttttcgagggacttaactttgtttagtgttcatttcccggggaggtgatctctatgtggattctttttctcctgaaatttagaggtctcatctccaagaaactgttggttgcggctgcagagcacaaatgagtttcgtattatactttgaatttttgtttcgttattttctgactaaggtttaaaattaaataatcacatttattggtgttgcaactggtttatactctgcttctaataatcactcctcgtatagtacctttacggcgtattatctattcagttgatttttaaataaattaattgaatttaatttttatagttctattaatgataattcattttccatttgctacgtcggttgattgtatggcacgatgcttaatctgtactgttgcattgcagaagctaaaattggtca

SEQ ID NO: 77441 - DNA, 494 bp, Carica papaya
  Intron number 1 from transcript evm.model.supercontig_80.1 25 (locus evm.TU.supercontig_80.125) derived from phytozom e v7.0 (chr-ID supercontig_80; pos 1057615 to 1058108)
gccaccgcagtccagattcaagtataacccagaaggtaatttctttaaccctcatataatttgttgtttaatttgtaattttgggggggtttgattttgttaaaatttttaggactacaattttatagttttctgggtttagtttttggtcttgtttgttgctgagaaagtgaggaagactgaagggagaaaatttttataatttagattaccaaatgattttaatgtatagcttaatggtgattttggggccggttttatgcttcttgagctttctgttttcgtttcgttcaacagccttaggtattgttgggttgtgaagcttatgaaatgatccaattccaaagtggaattttaaatcgggtgtggaggtgatcctcaagagagaagggaattgggatattacttaattactccagcagttctcaaaacgctcaaatgatttagtttagattctctttggtagtctaattttccactgtgatttaaaggtg

SEQ ID NO: 77442 - DNA, 686 bp, Carica papaya
  Intron number 1 from transcript evm.model.supercontig_64.1 12 (locus evm.TU.supercontig_64.112) derived from phytozom e v7.0 (chr-ID supercontig_64; pos 781901 to 782586)
tggctgctcatcgtgatattgtggaaacaagtatcatctattttctcttcctcctagggtttcttttattttctttaatgcagatttcctttcccttttcctgtttgtttgaagaccggagaaacacgaaatgagtacgaaatgaaaatttcattttgtttatccggggtttttatgcattttttggctcctgaaaattaaatgctcaatataagagaacaaaatgggaactcgtttccgacaaacagtcgcatatgcatatattgattttattatgttcggtggaatttcgtagaatatatgttggagacgttaaatattttctccagtgcttctttgaagagaaaaacttgctatgatctttgattttataaaggaaaattgagaggcaaaataataaagttgtttgagcatgtcagtgaaacagtaggtgttagatagttgatttttatttaagcataagcataagcattgatgatgagctgatatgaggttttgagaggaaaacaatgcagaaactgtgaagtcagggtagaattgaggctatcattataatatattaaatttcataaataagaaaataaaaataaatacaatgttaaattcaatcatgtagttctgactaaaatttatcttcattctgtgagttagttgataggctgaccagtgagaacagattaccccat

SEQ ID NO: 77443 - DNA, 664 bp, Carica papaya
  Intron number 1 from transcript evm.model.supercontig_8.30 2 (locus evm.TU.supercontig_8.302) derived from phytozome v7.0 (chr-ID supercontig_8; pos 2293228 to 2293891)
caaagatttctgcaacttcactgagagttcttcaggtcagctccttcagctctctgtttctttaaaattcgaatttatgttatgtttctttcatttcagttgtggagttgtttcttgatcgtattttgtaccttctttgggtgctgagaaatgcaagttttaagaaaattctgtctatctacatctgtttggtagttggttctaactcattgagttttctctttttaaatctattctgcaatcaaaagctgtggataacatgagattggatctttattttgttatccttcctttgtttattcttcgtgaacgaattcatgagcgactaaaacgttagggcttatgtgattttaattggggttgcatcttaatggttcgttgtcattagtcatttcctagtagcctttggagcctttacttgttcttattggaaatcttggatttgattcaaatgattaattttgattcgtagtagttgctagtatgtaagtgtttggcgtgatttttatcttctgttcagcatgcgttgtagtttcgagttaggtgttaatttttctggatcacctcctaaaattgtataattgaccattcaaactaccttctgcctgtgtctcatgatgattttgtcgattgatggatcatattgcaggcaatactctttttg

SEQ ID NO: 77444 - DNA, 648 bp, Carica papaya
  Intron number 2 from transcript evm.model.supercontig_85.5 4 (locus evm.TU.supercontig_85.54) derived from phytozome v7.0 (chr-ID supercontig_85; pos 396760 to 397407 reverse strand)
aagaagaagggagtaaacagaccaggtacgaaagaaaagaaggaaagagaaatttttatcttcttttccttcttcatgaaactcttctagtaaaaagttaaaaccagatcacattttaatacccatacgataaaaaaaaatcgatttaactaaacaaaaaatcggaaaaagggttaaagaaaaacaaattatttctgtaagtggaaatactgttcttgatatatatatatatatagatatatatatataatatgagttttggccagccaccaccaccaccatataccttcccatcaaatctaaatttagtgttgagtagagtagtgtaatttttttttcttgggttcctttctttttctctatgttgttggctaactaatatgcccccatgcggtgcacgttagcatgggacgctgctacagctggtccccatctccaaatatgtgttacattacattgcttactctctttctctctctatttttcctcttaattgcactcatcattttcttttcttttcctctcgttttgatctgaatcatcctggttagctctcaaattttcttttctgaaatcttatcagttgttgatcctctggctttgccttgtttttataggaagaaatccaatctgggtgttgcagaagtt

SEQ ID NO: 77445 - DNA, 150 bp, Carica papaya
  Intron number 1 from transcript evm.model.supercontig_64.2 9 (locus evm.TU.supercontig_64.29) derived from phytozome v7.0 (chr-ID supercontig_64; pos 189607 to 189756)
ccgtgaaattgcagattcaaagcttcattgaaagggtatttctagtttttaccttcttcttttgtttatttcttaatgtgttaaaagtgatttgaatttaaatttattaccgcaggttgtaattgattgccgattctttacgttatttgc

SEQ ID NO: 77446 - DNA, 683 bp, Carica papaya
  Intron number 1 from transcript evm.model.supercontig_82.4 3 (locus evm.TU.supercontig_82.43) derived from phytozome v7.0 (chr-ID supercontig_82; pos 554819 to 555501)
agggtattttctgattcgtattttcctaattaacattcttcgtgttggttattaatttatatgtagttttggaaaaatctgccaagacttgacagttttatattcgatttcagctaaagttcgtgacttgacagtttggatgtattttttttaatatgagcatacttgaagtgtttctgttcgggatcttttagctgtttttttagtgctaatataaatgactagcgaaaaaaaaaagttatagtatttatgaaatgtcaattcaccttaagtttggttagctctgtcctcaaatttgaaaatctggttgacaccaaaatgcttattgtgagacgtgacttcaagtttattttatattttagttaagtgtccatacaggttagcttacgccaaaatttagctggtgtgacaccagcaagatgataattctgatacatggcttgataatcatttcgtttagccggtttcttctgggtgttgatagtagtttttatgcattcacatgcattatggtcatcagtgcattgattcttgcacacggcctgttcttgtagctgattttgtctctttttcagccatcttcagttgctcttttttgatgctgtgtttactttatttacattctgtctttgctttaatgggaagcagttttaggagatttcatatcagctctcaacagattt

SEQ ID NO: 77447 - DNA, 874 bp, Carica papaya
  Intron number 1 from transcript evm.model.supercontig_64.3 7 (locus evm.TU.supercontig_64.37) derived from phytozome v7.0 (chr-ID supercontig_64; pos 258407 to 259280 reverse strand)
tccaactactcgggtcattggcggcgtaagagaacgtaagcggtttctgaattctatttgtttgaattaattaatgggtaaatttgttttccttgaattggttcttctggcattgttcatctttaattaacattgctactcggagtcctctgccaccagcacaacaatctgtaactttagccatctggagctttgatagaattgtcagtttttctttgggctcatgaggggctgaaagagttattgagtcctttctatcaaataaccaaacactttattaatctgatcagtccagcttcatgtccttgtctagaaatctccaaattagttaaactgacctcctagctttctttcccattctggtaaagtatgtccatcgaaatgtgaacttttcacttgtaatgcttgggaatgtttgccctaagagcatgctttttctccctttttatggttacgtgtaacaaacatcagcctgttttgactatgggtctcaatctgtcttgaaaattgaaaatgggttcgttgctgcatactggggatagacatgtctccttatattaaaattatatgcaaaatcttcgatgcttttacgaacttataatttccaatgtaattatagactagacaaatacttataattttatttagtataacagaagaaggaaagtgttgactgtttgagaatcaatggctttgggacttttgtttttgtgtaaggtatgtcaagacttaccacaatgatacttctgttcaaaggacaacgaactattctgctgttgttttaatctttcacgagctaacacataaaaatttaagcatatttttgtggatcatatcaggttgcttgaagctcatctctcctgaagaacttgag

SEQ ID NO: 77448 - DNA, 950 bp, Carica papaya
  Intron number 1 from transcript evm.TU.contig_42393.1 (loc us evm.TU.contig_42393) derived from phytozome v7.0 (chr-I D contig_42393; pos 277 to 1226)
gagcagtcccctgatttaaaatctgcccttgaaaggttttattattattattattttttctcctcaatgtttacttgattttgtctctgatgggctgctgctattcttgaggggctaattcatgttcatatttgagtttgctgactgcctcggtggttttctgttgtactctgtactgcgtttcattgttatgttgaaaaactcttgatttgaatgtgtgatatacagtgttgttttctattcttacggaatttgtgcattctaattgaagctacttaattggacaatgaattgccactctgggttatttgttatgaccatgaaggtgcgattgctttgcaaatacattttaatgataaaggatgggttcattggtcattgatcgtcaaaggctttgtgttaggattgctttctaaaatttatgtcaacaattcttttgtctgatatattaacttgtcttcctcatactaaaactatacagtactgtccattataataagtacctgtaatgtttttgtcaatgttttccactcaagcaataaagttattagtctaaactaaataggtatgcactcaagtaattaagaaaagacggcatgttaatgcaaagttcgtaatgctgatgtattccgttggtggctgagagctttctggatttcatcctcttttttttttttttttccatgaaaaggcttttcctgtgtgaccttgttgctgatccttaatgtttacattttacttgatataactaagcaaaatggcactaacacagtttcttggaaaattttgctttaaaaacatcccaagttatcatttgcattttcttgtttcaccttttctactttgacatcttcttgtgaaagaggtaaccttgtaactatctagcttagcatgattgaatcattctattttctacagattaggaggaattttgaaggtgcaagacttga

SEQ ID NO: 77449 - DNA, 388 bp, Carica papaya
  Intron number 2 from transcript evm.TU.contig_30210.1 (loc us evm.TU.contig_30210.1) derived from phytozome v7.0 (chr -ID contig_30210; pos 5727 to 6114)
ttaccaaagaaagcactatagaggttacatgacatctttcttttcttggttccatttttcttttgtatgaagaggaaccatcaatggaaaatataatgtattcattttctccgagtcatttcatcttctctcaactgtattaatttgtcctttccagcgttaatttagctcaatagatatgagaccaaaaagaacacgggaattttacaacttttgaattggaaacctaatgacatctttagttttgagttgttttcttttcttgtctttgcaattcaacaatgcgatatagtgcagcgctatatataaatcatatcttagtttaacatttgttgtttcttggtcaaatatcctattcaggcatctgcgaggtccataaaagaaagat

SEQ ID NO: 77450 - DNA, 975 bp, Carica papaya
  Intron number 1 from transcript evm.model.supercontig_80.1 00 (locus evm.TU.supercontig_80.100) derived from phytozom e v7.0 (chr-ID supercontig_80; pos 797945 to 798919)
aatttagacagtacctctttgcctgccaatcaaaggtgcaaggaacaataatttaggacattagaaatgttgtgcaccttttgttttgagtaaaatttattttccaactaaatggtttatttgattgaagatggagccatcatatattttgcttacagaaatccaattttgtaaatgcttaaagtacttgagggcaaaattagttttggatattgactattgacaaccctagtaaaggggaagattcttttgaatgggtgctaactgtgcaagagggtggttaaccacctcctttttgtgtggtcctgtctcctttcgactttggtctactgcttttgagtttcttggtttgagttgtgcgatggcaggtttcgtggtagaagaaatttgggttggcaggcatctgggatgataagcgtaggaagaaactcatatctcttataccgtctagtggtgttactggaaaggagaaaatagaggggtttatgagggaattgctttctccctcattaggaatagagatatgttccagaccttctgattcttgttcaagggttatcctcttgattcagttgagaatttggaggaccttattgatgacatgttgactgatctataatgtttttagacttattttgcatccacttgtgccttgtttacgtacttttcgactttttcttttctagaacatgatatgccaaatatcttttaaaataatagccttggcatcctattgcaaaattatctatatagaggaaaatgaaagtttctaatcgtaatcatataaataaaagacagttcttgctagttgagcatgccctgaatatcttttttttattcttcagttcatatatgcaaacaagcatttaattgttacagagtaaaatcccaaactatgtattggcatttgaattcagtctcaccaatgtcttgactgcagcttttgttcaagctgaatcgtccctttgaggtcgc

SEQ ID NO: 77451 - DNA, 420 bp, Carica papaya
  Intron number 3 from transcript evm.model.supercontig_7.80 (locus evm.TU.supercontig_7.80) derived from phytozome v7 .0 (chr-ID supercontig_7; pos 740971 to 741390 reverse str and)
cctgagcttggcaaacttagtgacttaagatctctgtaaggattcacaattcggctgtgtgttgatagtaaaattagttttcatacctatttcaattttttttttgttttgggtttaaattaatattgccagaactcatgcctagatcttaataatcctatgctttgttctgcacctgaaactaaaaatgaatcaaaaggccaggggaatagtcatgttttttatattagaaagttttagataattcctacggtcatctcattttcttaaacaattatggtacatctgccttgtctttgtacaaggagtccaaatatctattgaatactgaacgatgttgccatttagttcaccagctctaaatctttttcttcacatttctcagtatattatacaaaaaccatttctctggtggcattc

SEQ ID NO: 77452 - DNA, 881 bp, Carica papaya
  Intron number 1 from transcript evm.model.supercontig_7.12 3 (locus evm.TU.supercontig_7.123) derived from phytozome v7.0 (chr-ID supercontig_7; pos 1168504 to 1169384 reverse strand)
ctctctctgctgcctgtggcaagcagtctaggcaggttcttaatttaaaactttccagtgcatttttttaaaacaattcatattaaaaacttttcacttatgttggaattcagttttcagcaattctttttcaagcattcataaacttgtgtttttacataatttttcagtgctaggtttcttcgtgataaagcatggccttgtaagtagaagcagttttaaggtgttgcatcaaaatgtctgcattttgttttatttttgtgtatttttgtttgttttgttgtttatcccgtgtagcatgctgttgatagaggcgacacttggcaacctgctatgatgtttattttgtggggtagatttttctactgaattcttttcaggtagaaactgacatttgttggggctgattcaggttactaaaagttctttttttatcccccaatatttcataggacctgcacaagtgacattgttgcataactttgttacatagctcagatactgattttcttgataaaatggatagaggtgaatgactgtaaatttgttatgttgaaaattcaggctttatctgtattttctttttcttggtgtgtagtgattagaaaatattgctgaaagatgtgttctttctgtaattatatgaggttgaaggctttgctaattaggcaaatggaagataatgggaaggttggactctcaaaaaaaaaaggataatggggaggttcaaattatttgtccctttttaaaatgagatcaaacaaacttacatttaaacaaaaccttattaaactacgcctcctcttccacttcttcttatcagttctaatgcattttctcgttggttcaggttcaccaatctgttaaatcttcagatcctg

SEQ ID NO: 77453 - DNA, 615 bp, Carica papaya
  Intron number 1 from transcript evm.TU.contig_36361.1 (loc us evm.TU.contig_36361) derived from phytozome v7.0 (chr-I D contig_36361; pos 308 to 922)
gctcacctagctcaggttcacttgcagacatcagtatatgcaactcacaggtggcttcactaacttttatgacctaagcttctggagaatgaagatctgtgactcttttgtcctgactgtggtgtcaaacaatgctgtcttcttttccgttaaatatgctaaatataatgaaaaggaagagggaaaggaatggcaacggaattccaacggaatcacaacggaattattgtcatgttgaacaggaaaaaaatgtactggggtgaagcctgtcttcttcttttccatgcatttttctttcaaagtttgtttactgcttggcgaagtgttttttgtaccatctcgtaaatgatgatgtcaatgatgaaaaaatatattatggaaggggtagaaagttgcttataattggaatatcttgttgcaggtaaagtatattaggttaaacaataatgcttttgaattcttttggtacagaaaagtttttggacaaaggggcctcttgacaatatcttgttctttttgaggaagacccctttgcccgtatctgaggggaaatatcatcagcatgcttttatctggtgtgacaaaatattcattctttacttttgttacaggggc

SEQ ID NO: 77454 - DNA, 831 bp, Carica papaya
  Intron number 1 from transcript evm.model.supercontig_80.5 0 (locus evm.TU.supercontig_80.50) derived from phytozome v7.0 (chr-ID supercontig_80; pos 405453 to 406283 reverse strand)
tccggtcccgcaggcgttacaagcacgcgcttgaggtgagtcggtgtacattcttttcggggagagttcctgtttggttgctaggaaattgtggggatgggaatagaaagtgttggaaaatgtggtcgtttgtcaaagaatgaaagttcagtttgattgaacttgcagttgaattgacattggaaaaaattagtgttctaaatcaattctatgtctgattcctgaaaaaagagtgtgacctattatcagttatttccaggatagcagaaaatttggagccttggctaatttgaaatctacgtaaactatctgatgctttcatggcgatcacttggctgtcaagtcgcgtagcacgatgacagatttctttatctaagtaatgatttcgctcatggaaaaatttcgtcgagaagggactgaagcattgaggctatataaatttaaacccaaaggtttaggatcaaatatgtaatttaactgtggaaatctttattattgaagcttatcaggcgtatagatggaatatgcacaatttttctcgtaatttgtcaagaagaaaatgaggacgaaatgaaaaaagaaaaaattgattataggtgattctagcaggatggatgcaccctctaaaacccacctagagttttgatcatgacaagctgcatatcttaagaattaaattcccttaagcagtttgtcatgtcccagagttcccagtgtaggtctgagactcaacaatggatgtgtttctacttgtgtcatggttctcaagaacttagtgggtgaacattttttactcttattgggatcttgatgttgcaggtttcagagtgg

SEQ ID NO: 77455 - DNA, 875 bp, Carica papaya
  Intron number 1 from transcript evm.TU.contig_31932.2 (loc us evm.TU.contig_31932.2) derived from phytozome v7.0 (chr -ID contig_31932; pos 4992 to 5866)
gttaagttgcagcatcgcagcttcatatcgtcgaggtaatcacgaattcgtcttttaaatttccttttctttcttcgtaactattgtgtatgccagagcaagtcggagcaattagggttttctttttccaggcatttgccactaattagtagtaattctttgtttttgtctagaaatttttccgtttagttgcgtggaaactggaggaaaaggagaggacgagaaatacttgaaatggaaaactgtaattcttgttgttgacctcgtaattgcactgaattaagttattatatagaatttgtaggttataaactgaatcagtaggatacgccgtgcatagttttattggattctcaagtttagttgtgttttaactgacagttgcctgtccagttactgccaacaacttcttgcagggattttagacttttagttcttggtaagtgaaaggcgtttgtttgattaattttgttgttaagttgtgagagcattactattcctggttgctttgttatgaccagaatgctattgaaatatttgtgaactgggagcttcagttgcttcttggtttatagaacatagtacgaagccattaaagtggaagagagaagggaaaagatataaattctggtcgtattccaaataaaaagaggaaacatgctggcattgtacaaatcttgtgacactgataaccagttttaccatgtctaatgagatccccaccttttcatgtggcttgttactgtcgaggattgtggagtggttgctgctaatttttgaatcaggaatttgcagtttatggctttcatgagtttcacctggaacctgtattccttgcagaagggaggctgacttggattacttgttgagtactt

SEQ ID NO: 77456 - DNA, 804 bp, Carica papaya
  Intron number 1 from transcript evm.model.supercontig_909. 1 (locus evm.TU.supercontig_909.1) derived from phytozome v7.0 (chr-ID supercontig_909; pos 9953 to 10756 reverse st rand)
agcaattggtcaagcgcagtttgtactccagattggtaacttccagaacgaccatttctctcttgttttcttttctttttttcctttttttttaaagtttatggatggatgaagaatgagtaagatggaggttaaaattttaaagaaatatttgtagtttttggctaatttaagaagtactttaatgattgatggggaaaggaaaaaaagaagaagcattacattgaaatccagactgcggtgatgggtgccttgcaaaaggcttagattgtaaatgcctgcggtaagaaagttaaaaattgtgcttgatactgttgcccggcgatgcatattttgatactcgctggctactgatatctacatgtctctcgttcttttgtttgttgagtgcccgcaattgctagtatggtacatatatgtggaatttgggacttgcgggttcaagttttattgtgggcttcgttatggattctttttttctgtttttgtctccctgattagtttctaaaaatatctcacatgatcaaaaagaaaattgatttggaagttacaatctgaacttgtgtcatctgcgcttttgtatcttgagtttctgcatctgtatgttattggtacttggtgttttcattgttgatctttcaccatagttgaaaacacactcgcatacttggtgcctttcattttttttttttttaaataaagtgcttttcattgtgttaggtagatgatgtaggagtatatgaaatttcaattatgctttgtgttactcctatatttagtaatgtgctttgcaaactttgtagg

SEQ ID NO: 77457 - DNA, 633 bp, Carica papaya
  Intron number 1 from transcript evm.TU.contig_42598.1 (loc us evm.TU.contig_42598) derived from phytozome v7.0 (chr-I D contig_42598; pos 301 to 933)
ctggtcgtggtagtccagttaccaagtttcaacaggtataacgatctttctttcacgttgctctactgtgcaactaggtttaattaactgccatactactgatgatccatctgtcttatatctgcttctgatgtatatgcattgggcatatgtatacatgtgtgctgtgtataatggaagcaactttcagcttgatacaagtgtagcaggactgagttttaagctctactttttctatatgcttgctaatgtttatgaatgcttttcttttatcacataattgagatttaggcatatatatgtgtatgtttaggactataatccctaagatatgctgagaattttgagtaaacttgcacgtcaagatattatttaattgcgtaaactagatgaggagtgatctggttaatttcgtacaacttaaagataataaatacgtggattcatgttcaatctgtcatgggctgataatgatatttaattactctagaactttttgttttttatcttattcttgattgtgaccaactattcatttccctaagttttaatgttcttataccctctttcttcgtatatcttcttgccttcatttcagtgtccccttctgaacataagctattgtccaccatc

SEQ ID NO: 77458 - DNA, 425 bp, Carica papaya
  Intron number 1 from transcript evm.TU.contig_32507.2 (loc us evm.TU.contig_32507.2) derived from phytozome v7.0 (chr -ID contig_32507; pos 4477 to 4901)
aagaaaagctataaagccaaggaaataaggtagagaggactcttttgaccaggttttctcccacaattttttttaagccttcctttactttcaaatgaaatagcaatgttaggaagaatgtatatgacaaaattgaatttttgagggtcctggtgggtcttgtctactcccaccttagtatcccacccattttgatgaatacgacactggttcttgatcacctgacttggagtcaattcctcaagatgagaacaggataaccatttggtctgtagtttctaccatgagttgtatctcccaatgagtacattcaatctttgtggaactcaaatgcaaaaggaaatgtttatttaccatttcagttatagaatcatttttaattattttgaataggtactcagatactttaaaggcttgtgctttgg

SEQ ID NO: 77459 - DNA, 503 bp, Carica papaya
  Intron number 1 from transcript evm.TU.contig_25049.4 (loc us evm.TU.contig_25049.4) derived from phytozome v7.0 (chr -ID contig_25049; pos 32722 to 33224 reverse strand)
gtgccattcacaggtaagaactactggattggtatggtccagtgtgtttaattacccttagaaaatgagaattatgatatttgattttgaattttttgggtgttattggggatgtactttaaataacgaattaaattccaccatagagatatgttgttagtttcttagtcatcatagtcatcgtctaaatagttgtagtcatcataatagttgtagctgtcatcttcacggacatagtcgtcaggtcacatacattcatgtacttagattactttatgttatgattttctttaaattaatctccacctcaatattttaaattttctgtgctagttctactcttcattctttaatttctcccttttcccggcttgacgtggctgtattactatttgttgaaatatatgcgtgctcaatataaatttatgctattagaatgcccttttctcttctttcttttcttttttcttatactcaattcagagagtacagaaacattgttg

SEQ ID NO: 77460 - DNA, 925 bp, Carica papaya
  Intron number 1 from transcript evm.model.supercontig_83.8 1 (locus evm.TU.supercontig_83.81) derived from phytozome v7.0 (chr-ID supercontig_83; pos 791860 to 792784)
ctcctaccgttggtcttcttcccgctaggaggtaatcgttatctcaaaatcttttctcgtcactttccttggtaacttgatttttgttctatgaaacaaatgtttgtttccccttttgattatatcctctgttcttgattagttctctatgcgagataatcaacggcgtaaatagtttatctggttagtactttgtagcttatccatgtatgtataggcgaagatttgggttgatataacagcacttccttggctgactcgtggtcgctgggattgatattgttgcatttcatttgggtattaatggaggagttctattaacaaaatggaatcttttggttggtgtttgttgacaatatttcaccacctctaattctatattgggtatttattcaaatcaagaggtgggtgagaggttttactcggtgtttggtaatttacacctactggcttcaacgattctccattcccaaaagctaatccacatgcattcctgtttttccacaaatgatttttctttatggaacagagcattgtgtgctgcatcctggatgttacacaggtctaaatggcacttgggtgagtgaactctggattgtctgtaaaaacctgaatcaaaggaaaagaaaattctgctaacaaagagagaaccaaaatgattttttccttatttcatttgtttgtttttctaaataaatagtaaacgtgaattatgctaatatcgtgtaaaatgggcatgtcttctatggtttatattctgatctttttgttttaaaaaatttaaatgattttcatcttagtgtttctagtaacgctaagagtcaatagcaatgagcttattcatgagcaaaatgttgatatactgattttagttccaattttctcaacagggctattgctgactatctttctagtgatctatcat

SEQ ID NO: 77461 - DNA, 446 bp, Carica papaya
  Intron number 1 from transcript evm.model.supercontig_9.31 5 (locus evm.TU.supercontig_9.315) derived from phytozome v7.0 (chr-ID supercontig_9; pos 2099032 to 2099477 reverse strand)
gaaaccccgcacattctttcaaggtaattgttcccggatttcgtttctggtttttgattctcttggttttcgttgctttgacttttacttgttggcatttggattcttggttttacatatcttcttttgaatgtctgtatggtcgccctgatttagtcaaatcattttgagaaaaggcaaagatcgttctgcaacttttggaagtttgcctggtaaaatgagttggtggaggagaggaacacctttttttttttttcttttcccgtttcatcacagtttttggtttggcctataaaatgcttaaattaaaatgtttagctattttgaactattcttaatctctgataatattcattttagtagaagaaaataaaaggaaagaaaatgatatatctacaatcatcttcctctatcttactgtctactttccaggctgcttatcagtc

SEQ ID NO: 77462 - DNA, 767 bp, Carica papaya
  Intron number 1 from transcript evm.model.supercontig_666. 2 (locus evm.TU.supercontig_666.2) derived from phytozome v7.0 (chr-ID supercontig_666; pos 21201 to 21967 reverse s trand)
agaagctcaacacattgtcaattctgctagaagtaattgtgcccttccttaatctttacatgctgaattttgaaagtagcttcatttacaattatgttgatattgtaaaaaacgaagtgttgttgatcatatgtatttaaaccattccaaagtgtctagctgttaaatttatgttggaatgtgtagtttcttttgtatcctgtataagagaaggttttttcgagggcgtgagaagaagtcttggttgtattaatttatacatatgaagcttcttttaatatgtgtagagatgaattagtaatatgtttggaacacatcaacaatttttatggagtttctttggaaatttagaatttgcttaattaggagggataaaaatgttattagaagattataaaaatgatctcgttagaaattccaagtgaaataagaatagtatttcaggttccgcaaattttgatagaattttaaatacatggtttcacttccactttgaattatctatgagtttaatgtttaaaattttaaattaaattttcaccatcatcttggtaaatctggtgtagaactccaaatgaattctgtaaaaatttcttgatttgttactaacatagcttaagattgtttagtatatatccttatgtgtacttgttcatgcattgtttttgagaattatgttaaaatttataaagttttaaaaattgatttaaacatttaatgatatgatcattgattttgatgctttattttttctgtttttagcgaaa

SEQ ID NO: 77463 - DNA, 572 bp, Carica papaya
  Intron number 1 from transcript evm.TU.contig_28699.1 (loc us evm.TU.contig_28699.1) derived from phytozome v7.0 (chr -ID contig_28699; pos 1772 to 2343)
attacgttgagctgctggtgggattgccgagtcattttgacaaaattgtccatctattggcggattgatgattcaactcaaaaaaatcatccatgaacttggtaagtctctaatgcacgtccttcatggtgggctttaccgattccacctttgacggattaggaagggtattggtcaagaaacctctggcagtctactacatagggaaggggagaaaaggaatttcaactgctggggctaaaataatcatttcacctggacagataaaggttaatgttgattgactggatcaccctaattgataacatcaaatcctgtttctgccgctgccgccacaatcgcagagcggtttccgtctccaacccttggattgagtacgcaaggcgaccttggcgtatgtgttggccggctccgatggctttgatactattttgtcagaagtctcactttgataccattttgtcagaagtcttactcatggcttcggacatgagaaaagaaaaagagagagcagagaaaagaagagagattttattagataaattccttttattttttatgcttttagattc

SEQ ID NO: 77464 - DNA, 518 bp, Carica papaya
  Intron number 1 from transcript evm.model.supercontig_64.6 2 (locus evm.TU.supercontig_64.62) derived from phytozome v7.0 (chr-ID supercontig_64; pos 386530 to 387047 reverse strand)
gagccatttgagacctctcttcctgctcaattcaggtttatgctttttttcctttgctctctgcatggttttccgcttgcatattcaagaaaatagagaataaagcagcgtaatataattatttattcttctgagttaatatgatatatcatactagaattaaaaatttaagcttaaactcctttagtttgtctacatatgattactgacacgagattggatttgcccagtcaaaactatcaacttattgttattcttttctttttcacctccagttgatcaattttctgcgttgttgaattatggttttgactggcaggaatacgtagatttgggtcttgcctagtttcttctttgtccactgtcatggtgattgcttcatgtttagttaacttgtttgctgtatttgaatttctttaaatgttctccttgtcgtcatggtacacactccatgacttacttcttttgcttgtaactattcagcctccccaccaaactaaccaaaggagttgagcttc

SEQ ID NO: 77465 - DNA, 325 bp, Carica papaya
  Intron number 5 from transcript evm.model.supercontig_84.7 9 (locus evm.TU.supercontig_84.79) derived from phytozome v7.0 (chr-ID supercontig_84; pos 618799 to 619123 reverse strand)
taaagaaggcaagaggaacttttgtgcctgaagaggtaaggagcataaaaaatttcacattgtttttggacctatctgttgttatatgataaattaagctacaaaatcaaaggcaaaaataagaggcataggcaagttcttggtttgattactcgataggatgaccgaatctagattctctatgacaaattccgaaaattacaacaaacactaatttccataaaccgaaccatgttaagaaaaagtctatttattgatgtttaatcttgtaaagtaaggataggttaaaaaggatatgtcaattattcttttcattttcctccag

SEQ ID NO: 77466 - DNA, 540 bp, Carica papaya
  Intron number 1 from transcript evm.model.supercontig_65.6 2 (locus evm.TU.supercontig_65.62) derived from phytozome v7.0 (chr-ID supercontig_65; pos 665852 to 666391 reverse strand)
tctccgcaagaacaagttcgtagattttgtcggttcgctctctctctctctctctctctctctctctctctctctcccctaatacctttttgcagataccgaatccgtgtaggccttttaatggcggttctgtatatgttatatttttatgtatattcatattcgtcaccctagactgaggaacgaacataatttcacgagtttgggcaaacatgatcctttatttgtatacatatatattgtatattatgggtatgtgtgcacattttgtatgtatgaaaagattaaggcattatatttttctgggttttgacgaagtggagcaatctcacctaattaatggagaaaccacaataagattagactaaaacagtacagaagagacttgcttaatttctttgttttctgtttctcttgttattgccatggatgaatgtgtttctgacttttatatgcgtttttcttttgtgaaaaattaacagtggaaatgcttttgattttcatgagcaggagaatatcatcttgatcttattgtgaggt

SEQ ID NO: 77467 - DNA, 709 bp, Carica papaya
  Intron number 3 from transcript evm.model.supercontig_62.1 02 (locus evm.TU.supercontig_62.102) derived from phytozom e v7.0 (chr-ID supercontig_62; pos 658538 to 659246 revers e strand)
cagaaaagattactttctaagggatacaaaggtttgttggtagaaatctctcatgcttttcatatattggaattttcttacctgctattgataactcttattgtcctactttgtgaagaaaattgtaagttgattgttcatctgtctgaggaaaatataatgttgatgcttaaccttgtgtcagataattatcaaagttcacttccaatcttaagaccttttcccttctgaagtttcaaatgtatagactattcagcatacatatttgtttatgtgatctcattgtgcttgtaaatatatcttgtcccataaaaaactttaattaataaaaaacttcaaccaactatgcatttccttgtattttctaatgaagatggaaaggagggaaaacctaaaatatctgtacatagccatatcttaaaatagcttatttttactaggttactaaaataacaaagtctttgtaagtcatgtttctgtactaccacaataaaactttgtcggcagattaaatggggacgttcaaaggatttaattactatctagctatgcaaagggaacagttccattcttcattattttttaggcttgttatgtgaaaagaaattctaatgttgtggtaaatggctatgtttgacctttggaaatgttcattttctttccctttttgtcacttctatcttcagaaataaaagtgctggaagctgac

SEQ ID NO: 77468 - DNA, 948 bp, Carica papaya
  Intron number 1 from transcript evm.TU.contig_35686.1 (loc us evm.TU.contig_35686) derived from phytozome v7.0 (chr-I D contig_35686; pos 536 to 1483)
caggtgaagcgtgaacaaaggggtatggtagatggtctagacgatactttactgatagacattgacgaaatggacagcgaagagtttttgtcttcgaaaagaaactaatccttctgagtttgtaaggtcgaggaatgtaacttatttgtgaaaatgtcatatgtatacgcgatatatatattttttaataataatttaactgataaataaaattgatagaataaaattttattagaatattagtaaaatgagatacttttttagcttatattaatcatatgtgcatccgcattacacaatcacaaagcaagtcctttgactctctatagagatagaagtcaagagcagtcctttgactctccatagagatagaactcaagagtataaatattcatattctcttataaaactagtgatattaagtatcgaagtgtttgaatttggaagattatgagctctcactcgagctctatctttctttatctatgccgatttagatacattaaatctattcattgatttcgaagccctcgatctcctctgtgatgtacatctgtaactttttttgtttttttgttttctgggttactgtcagaccataaagtcatcctcaacaggttatatcctaaaggttttacagttttaaaatggtgaaatacttcttctttcgaaaatgggccaagtgaacttcttctgcattggaggcccatattgagtgttaagacattttgattacggcccttttcctttctcgattctttttctttttcctccaggaaaatttctttacttgattctgattcctcttcgttgcgagaggaaaacgctggaacctactctctctagaaatcctcagttttccctgcctctctctccccaaacatctgcctgggctgatctgcggaaaccctaggacttaccacccaaaaatccgtatacgacgacttt

SEQ ID NO: 77469 - DNA, 506 bp, Carica papaya
  Intron number 1 from transcript evm.model.supercontig_95.1 1 (locus evm.TU.supercontig_95.11) derived from phytozome v7.0 (chr-ID supercontig_95; pos 269739 to 270244 reverse strand)
taccctacttggtgcttaagtaggttagttcaaatcctaggttttcttctctgagatcaaattttattttgggagtcatttttactgttaaactgaatcagtacaatattatgtttgaggacataagtgacggtgaatggttccttttaaaacaaaacaaaagagtgaaaaaaacaattctttaacctagtatgttatttgatttagtggtgcaaggaatatattgttttggtcttcacatagaaagtttatatggtataatatttgtgtctgtgtttgtctatgtatatacttagtattattatggataaaaatttctttaatagattggtaaatggacctcattgagctgctgtagctctaactaaaattagaacttaaagtatagaaaaataaaaacaatggttgctgtgtttctgttctgtttatgatgaattccttttattaaatgtttcgaagttttacacatattgtgtaaccttttacctaatgtttttaggatcagt

SEQ ID NO: 77470 - DNA, 927 bp, Carica papaya
  Intron number 1 from transcript evm.TU.contig_30628.2 (loc us evm.TU.contig_30628.2) derived from phytozome v7.0 (chr -ID contig_30628; pos 6940 to 7866 reverse strand)
gccaatgtttgtttctcttctctcacttttgttacttcaaatttcccgcatattttggactggattttaaatttcaccacatttggaaagcattctcttaatttccgtcgaaattatataaaatgtttttttttactgtttttcagtagattatgtaaatatagttgatatgttttaaactagcccaagtatttcagataggtcagattctttatttttatgctttgtgtttagcaatatagtaatatttcttgtgtaatactacaaatcggcatagcactataaataggagcaaaattaagtgtaagaattgagttttctgactcgaaatagcaatttagaaacttcttttgcccgattgtatttgcaggtcgtttgtttcaatttctactttatttatacggaattcgtacacttcattaaagtagtccttatatgatacatataattacaatgtagtttctctctcctatctcgaattgccacagcatttcatatttgaacttcgttcctctcatcttagcttcattgcaagtggaacgctaaggcttgtttagaaaaaatagaattattgtggaatctatttgtaaatccacacttagctcaataacaagattgaataaattactatggtaacaaaaaaatcaggatcatatgttgaagtccatatatagggagaattgtacatttttgtttttcttctttttaaatgaaaagtcatgtatctattcatttatatgcactaagagagtgcaaactcatgtataagaagtatttacatatcaatcagattgtcaataagatttccaagactcttaaaagaacaaagaggatgacctttaatcaaaaaacttatagtgccttttgcattactgacttgccatactgtcaggtgtatctttggtacccacttagtataataactgg

SEQ ID NO: 77471 - DNA, 768 bp, Carica papaya
  Intron number 1 from transcript evm.model.supercontig_685. 1 (locus evm.TU.supercontig_685.1) derived from phytozome v7.0 (chr-ID supercontig_685; pos 1190 to 1957)
gaggtcgccgccagagcggaggtttgtgatagtgtgttgtaggattctatctatttcgtattgttttttctatttgtagtcggactatttttttttttcttgcaatgtttgtttaatgatagagtaaaattttgggttgaactctatggtttattggtttgaagttattttttctttgggaaagctttttgaattttatgacaaaactttacagcattcgttgagaagaaaatgaaacggcttttagaaatatatgtcttttggaaagctggtttggtgcttttggaaatgaaattcatttttttcccttattatgtctctgcattatgcatctcagtattattgttttctctttcttgaatggaaggttgaactgttcttggtctcaagaaaaacaaaaaaagaaaaaaagattgaaatttgcccaagtcatgtttttctgaaaactgcttaagacacgttttttgtcatggcccttaaggaaatgcaggaatgaagatgaagttcaaatacccgtttggatagcttctacttctaaaaaacgtttttggctaaaaccaaaagctaaaatctgttcttcatagatttaaacacagaagctaaaagtagtagtttttgaaaaactgtttatggtttcaacattttctttccaatactatccttgactaatttgaaaattatatattctcttttctttcactttatccaattgccatccactactgtctgctagccaccgcctgccacttgtcgtgagattgtgcattt

SEQ ID NO: 77472 - DNA, 500 bp, Carica papaya
  Intron number 1 from transcript evm.model.supercontig_92.3 (locus evm.TU.supercontig_92.3) derived from phytozome v7 .0 (chr-ID supercontig_92; pos 28375 to 28874)
gcttttcttgtacttcataagactgagaaaaagaagtaagatacggcttaatttcttcttttttcttaactttctctttctttgtttgggtttattgaaattcaactttgtggatcttcatttagagcaaaaacccttcataactattcaattggttggtcgtttgactcatttctcgacaagcttttgacccaccagtaatgccaattaggagttgaggagaaaataattaatgggtctttttattattctggttttcttgttagatgatcaattttcaaggatataaaccagaaaatttctgttttgctggctgaatttgatttttgtgttctgggttgaagctattttattgaattcttgattctactatttgatcaagttactgacttttaaagtttgattttggaggctgttggcatgagttggtgttaagaaattatttaaattccagctttctttttgtggttgctatggattttcttctgctgtgtttaggt

SEQ ID NO: 77473 - DNA, 613 bp, Carica papaya
  Intron number 2 from transcript evm.TU.contig_33136.2 (loc us evm.TU.contig_33136.2) derived from phytozome v7.0 (chr -ID contig_33136; pos 1648 to 2260)
atcaagatatccacctccgtgccttacgtacgtgagtatttttttttgttcaatgttgaatgctcttatacctagaaatggtaatttgtgtgcacttgtttgcatatggatgatgtttgtttgggattcttttgttggtaatgttatacaagtaaaaaaaaaaccttaatcagcagctataatcaaactggtgacttgaatatggagggtttgagataaggatctggtgatcaattttttttctgtgcacttgttctttgcaataaatttttaatctgcttttggacatttcagaatgtatttgatcagatctggaatcagagataatctgactattgcatcatgctatctgtttcctgctgcctgcggtttattttgttctgaaagataaacattaaaaattatggaattacttcttttgttttcttttgagaagagcaaacctcttggtgattatgctgctgaaagccttgcatttcaactaaatggaatgaaattttttgaatttatttcataatcaatctttagttgtcatcctatacagattacatactatttttttatttgatcaatttcaggctctcctatccatcttcattgaacttcatacaga

SEQ ID NO: 77474 - DNA, 1022 bp, Carica papaya
  Intron number 3 from transcript evm.model.supercontig_69.6 (locus evm.TU.supercontig_69.6) derived from phytozome v7 .0 (chr-ID supercontig_69; pos 44747 to 45768 reverse stra nd)
taacatttacaggatatcttcctctctttctctatgtaagagacttgcttcttataattttgcttactttcctagatatccatttatgtttttttatgttatcaatatatggggttagcatattgaatgaactaatttgcatcttagttgttagaaatgtaattgggactctttttagtctgtcaaatctaatccttagcttctttgtgctggattttagcactttgatgttgtactgcagatgagatggggtattcaacttgttttcttttagcagtacactctattgcataaaaaagcacagagcaccttttgcttacattccagcagcactcccactcaatgctttatgcattttgttatttttcatatctttttgaagctgcttttcgtaagtggaaagaatttgcatgtacttgaaatactttttcattgtttctatttgattttgggaagacgggatccccaaatgactctaggaatgaaggacaatctatttgagtaattattgttgcttgcaattttcagttagagcagtgtcacatttctggtgctgtatcctacctattgaataaggttccagtgcaagtttaagtagcagagtgtggttccatagcaattttactaactaaatatttgcagcattaccatatgaatatcatactataaatatcttgggcatctcatatttttcttaaatcaaacagatctgtattatatagagctgtgttcaattacactactttctcttattgttactacatttggcatcaaacaagttctagataagcgatgtatactgttacatttttcctcattctgaatcgctaatatctcaaacatatggaatatttacttgtttttttcagtctgtcccatgcttttgacaattttaatgttactctgttaatggaactgcattttcatggattttttgtgtgattgttttctgactttttgggggacaaattcttgagaatactgcagatagtaggccaaaactggtggctggatcccctgag

SEQ ID NO: 77475 - DNA, 547 bp, Carica papaya
  Intron number 1 from transcript evm.model.supercontig_8.17 8 (locus evm.TU.supercontig_8.178) derived from phytozome v7.0 (chr-ID supercontig_8; pos 1230308 to 1230854 reverse strand)
aatctgctcctatctttgtaagttatttgcttgctgggtttttcttcgaattcttctttccttctagctattatgatccccccccccccgcttttgattttaaacattttggagttttaatgtgactgaacggaggatattacatttacttggcttttgttgacaagtggagcagtttgggattcaagtatcaaaatcatctccagtaattgttctcaacatttcaatattgtatatactctctcggattaacaatgttgttaaggtagtaaaataaatggaaatagtatttattacttgaaaggagttgcatctcttcttttacacagactggataattggtttgaaggttttcgtgctcaatttgtgatttacgagtgttgtttcttccaatatgatttatagacgtcttctctaatgagctatatatcagtgttgtcatgtcctaattactttggaagttgttgcatgttaaacccttatactgcaattttatgatgttctctgttcaggcttcaaattgtgctgctggagatagtgctgcata

SEQ ID NO: 77476 - DNA, 524 bp, Carica papaya
  Intron number 1 from transcript evm.TU.contig_45399.1 (loc us evm.TU.contig_45399) derived from phytozome v7.0 (chr-I D contig_45399; pos 264 to 787)
cttagtttgcagcttgggatcaggtatgtttcatgtatattattctccataatcttatatgagatattgatacttttactccagcatctacctttgctcaatttgttgaattgttggcagtcacgatttgataatagagtgatatacgccctcttgcatttacccattttacataattcaaaagtttggacatataagtcgctgttcccagggcaattaaaaaaaatttacaaggagatgtgaagctgaataactggatgagaacaatatgagaatctaaactgggctttttgatcaagaaaacattactactgttaataattttttcttggattttcttaagttattgctcaattatttgtttccttaatttaaagttcctattgtaataaattatttttgaataatttatctttatgtacatttttcttcacttgtcatgttacatattttagttattttgtttgatatgcataagaatattgtcagatatactgtggggaaaattacacctatacagaggc

SEQ ID NO: 77477 - DNA, 542 bp, Carica papaya
  Intron number 1 from transcript evm.model.supercontig_97.6 8 (locus evm.TU.supercontig_97.68) derived from phytozome v7.0 (chr-ID supercontig_97; pos 426684 to 427225)
gggagggatcagaggtgagacaggacatgtgagccttattccccttgctactttttagctgataggcaaagaaaggaacaagagaattttttagggtgcatatgtcaactttgataagattaagaatagttggtttcagatcctaaatcttttattaagggtcatcctctttattcttttaccttattgatattttgatttatatgtaaatatttttgttcatgagtttgcattcccttggtgcatgtgaatgaatgcacatattttttatatttaaaaaaagattaaaataacgcaaaataaagaaacaacttattcttgcctatatgtttttaatatttttgtgttatgaattaagtcctttcgctgaactttatcaatattcctccaacaagagggggaagatccttgttaatgggagccctttgtgtatgagggcagtagagacaccagatcatcttctcttgcaacacaccttttcttaccccctatgattcattatttttgagtttctagggttgagttgggtgtgaccaggtttt

SEQ ID NO: 77478 - DNA, 857 bp, Carica papaya
  Intron number 2 from transcript evm.model.supercontig_97.6 8 (locus evm.TU.supercontig_97.68) derived from phytozome v7.0 (chr-ID supercontig_97; pos 427277 to 428133)
aaaagagtaacttctcttatcctcctacctaccatgtgggctatttgaaaggaaagagatagaagagcttttgagcgatcaaaattttcttttagtagagttagaagtattgggttccataatctggttttcttgtttaatgattatcctcattttggtggagaatttggtgcattttattgatatattaataaatttgtaagtttgtgtacactgatgacacccccttgggcattggtgttcacataacgtggatcttttttctcttaaagaaaaaagatttgtacaccaagacgatgtgaaaagggggagtcataaagcaagtgctttgaggactctggtgcccatttacacatattttccctctcttgtgacgattgtcaacaataaggatcttccctcttgcaccttctcaagtctttttttcggaaaagaaaaaaaaggcaattttgagtaatgcatccatcttcaatttttgtttccaatactttttcgggtggggtgggatccgggagctatggccatatgaggtaggcaagagcatataagggaaatgctaaatccagttttacccatacaaatggtttcacggtttgactattaagttatttaggtagcatttctttgttctctttagtaagctatcagttaaaatctcgatatcaaataaccaagttgtatttgaaatttaattcctcaagtaaaatatagattgttttcatgtgtttgctagttgtgttacttagcatatacaatacataaccatggtagacgccttgctatatgtgactttttttttccatgtattgtttgctattgaaggtagagggttttgcttcagaattcaaaaatttgca

SEQ ID NO: 77479 - DNA, 687 bp, Carica papaya
  Intron number 1 from transcript evm.model.supercontig_946. 2 (locus evm.TU.supercontig_946.2) derived from phytozome v7.0 (chr-ID supercontig_946; pos 6438 to 7124 reverse str and)
agaaacagtcaaattagaggaaccttaattacacggtagcaatttgtttgctttgcttgttaatatcttataatacttttcttcttttctctttttttttttttatttttttctaatttgcatcattgttttttttctcttcaagagtatattgcatcaatcctcaagaaaagcaaataatgcatctttgcaaagccagagctcatgctggtgtttaaattttcattttaattcacaatcctctgaagacacttactttattgcaacattaatttcaattttgtcagttcaacgtgtgttaaatctatatacatatatattttttctacaagacatctcaaatataactaacattcccatggagtaatggtggtaactagcaagacttctgtctacagggctttcaggttcgtattagtttttgctagttgtcatacatgaaattgagtaacttttgaataagaggaaaaaatgatcttcatttgagaatttgttatgcggagggtgtgtactattgtcctccacatctttgtaaacaatcagcaagatgagtaaatagcagataaatgcttcagtatctacacattgatgtctttacatgacatggaaaaagagattctgtttttatacaatttatagatgattcattgattagaacagctggttaatttctgatttgcagactca

SEQ ID NO: 77480 - DNA, 952 bp, Carica papaya
  Intron number 1 from transcript evm.model.supercontig_817. 3 (locus evm.TU.supercontig_817.3) derived from phytozome v7.0 (chr-ID supercontig_817; pos 14500 to 15451 reverse s trand)
attgcgggttcaaggcctggagaggtaacaatttgcatctttttgcttctgagtacaatatcagtattcatgcagctgcatcattgttgttgacttaaggttctcagacttgcttttatttttattgcaaggtttgagtgtgttttatgttgtaaagttgtcacattatattatagtggactttgatggtatatgaggtgataaagagaaggaaaaagttgatctcacttattcccttggctataggttatttcaaaagagagaaaacttaggcctcctgaggttgttgactttcttttttggggactgaagggctcatgattctggacaccatgtttttttattctaggattttttttttctcttccaaggaagattttggaacctaatagatattttgagtgatttgtagatattctcttttttttgtgcttgggcaacaactcctttgttactgtagaaagcactgtaatggccgcattatgcacaaaatgtatgaaaaggaaaacttgcagcagtaggtaaagaagttactgatatgtttttatgaaaataggtaatttcatttgctttcttccatgcatctaggaatagtaatctgagttgaaagttcactggagactcttttctaaatccctagtgatgaagggcaagttaggaaatctacctttttagggatgatagcaccactttggggtgaaaattacttgtgtacagtagctatgaataatacaaaaacctactataacagtactagatgtacaaagcatttagggtttcttagattttacctgctaaaagaataaactgacataaggttgttattaagttggaaatagtacatgtatttgagatacgtataaatacaaaaaatgaaactaagaatagaatctaatgaataagatattactttatagggaaagactgttgaaagtacctaccattttttatt

SEQ ID NO: 77481 - DNA, 515 bp, Carica papaya
  Intron number 1 from transcript evm.TU.contig_42974.1 (loc us evm.TU.contig_42974) derived from phytozome v7.0 (chr-I D contig_42974; pos 137 to 651 reverse strand)
ggtggaacctatcctcctcgtccgataccaatttggtagctcaactcggtttctatttcctccttttcttttaaacttggctcgtttttgtgatttgtgtttgtttcagttagtcacaattaatcgtccttttcatgttcatttgatggagagaaggtagtatatttcagggccttgtagttgtccggggctaactcaagtatactacttttctttgcttttggtggttaaattttttatttttttggatttaatttgcctggaagttcataatgagggtgatttaatttgatgatcatcataatcttggaaatcaaacaaagtcttacttgattgtccattggatgtacgaatgtatggattatatttcattctagtgtagttagcattttattaaattgtttgctggttagattattaattactataacatattgattctttcccgagtttgaagtataatatatgttattctgaataagtttttgttatgacaggaagtcactccaattgct

SEQ ID NO: 77482 - DNA, 597 bp, Carica papaya
  Intron number 1 from transcript evm.model.supercontig_81.5 (locus evm.TU.supercontig_81.5) derived from phytozome v7 .0 (chr-ID supercontig_81; pos 25214 to 25810 reverse stra nd)
ctcattgctcccttttgggtcgaaacgtcatccaggttctgattcgttcagcctttgtatataccgtctgtttatgtttcatgtcgaaacggttgatggggattctggtatatgcatctgtgaaattttttatattttttggttttcctggtgttgctttgtggattgatttgttttgtcgtaatttaattaggaacagaacttctgtttgttcttgaatctttagaaatgcactctggggtttgctgataatatttccctggtttttatcatcttcgactcacaccagcttcccttaaagttttatctacaaaacagtagttttctgcaattttccccgttaagaaaatggatgtaaatgatttttatcagttactcaaagctagacctttattaaaaagggaaaagaagagaaagatcatatgaataacttaaatttttgctgtccgagaataatttaagtaaattgtagtacgtgggaaatgaataacttctatataagaatttcaattaatgcagattcctgagggtgattttagtttgttgagtcttaattttatttttagtcattgcgtgtggcaggatatttttgagtcc

SEQ ID NO: 77483 - DNA, 686 bp, Carica papaya
  Intron number 1 from transcript evm.model.supercontig_97.5 2 (locus evm.TU.supercontig_97.52) derived from phytozome v7.0 (chr-ID supercontig_97; pos 317988 to 318673 reverse strand)
gatatcagtgtcctgctcccaagagacgtaagccacttcttcttctccttcttttcttaaatttagattttgagtcacactttttctgtgtattttttgttatattataatttttctttatatattattttaatagataaatgtacaattttttatttatttttacatgcattcaaaagagtaattaccattaaattttgcattcttttaaatttaaatttctgagtcatactgtttttctatgcattttttgttatattatgatacgtgtctatatattattttattaaataaatatatatttttatgaaaaattattttaaaaaataaatttttaatattgatacaatcatacaaagtaaaaaaacaaaattaaaaaaaaaacataacatttaacatggctttttaagaatgtctatattcacaagtaaaatcgaaaaaaaaaatttattatgataaaaataaaaaatgcaccagttataagattataaattattatataaataaaatgtgaatttttttttcaaaatattttcagaatatatatatatatatatataatgttctctaaactatatgcaatatatttttaaaatcaagtcacaccaacaaattttttttacctttttatttacttttgcatgcatgcaaaaaaataattacctttaaattttgcaggaggcaac

SEQ ID NO: 77484 - DNA, 677 bp, Carica papaya
  Intron number 2 from transcript evm.model.supercontig_69.3 3 (locus evm.TU.supercontig_69.33) derived from phytozome v7.0 (chr-ID supercontig_69; pos 448648 to 449324 reverse strand)
tcatacactcccaggtatatatatatatatatatattgctagcttgtcgaataacatgtgtgtgtgtatacactaaatcttcgtcgtattaattacatatacgtatggacgttcatcttggtttatctaatcctttcctccctctcactcggtcgacgaagcagaatggataaatttaaaggattcagaaaaaatacttctccaaaacggtgacttttcaagaagattatgtgaagggaatggggtggcctgggctgggtctgttccgtcctccctggggcctcatggtttttgatttaaaacaaaacttttatttgagtttgatctggaaggctgagtttttggagaaattagatttaggattttaatttggggttttcccaaaaatttttctttttcttttacctaaactaatttgaggttttaaataaaatcaaagtatggattatcaaaatatttatttattacccattgcacgtatgtgtgtatatatatttaaaacgtaattatttaaacaatttatattttggtcttttatttttgctgttttttctttttctatatttttttgttaataatataacaaaacgcgattaattaaattttcagagaaaattaaattatgaaagtaatactttgcaggcaattaactcccgaatcggcttggagacatcaag

SEQ ID NO: 77485 - DNA, 432 bp, Carica papaya
  Intron number 2 from transcript evm.TU.contig_45726.1 (loc us evm.TU.contig_45726) derived from phytozome v7.0 (chr-I D contig_45726; pos 205 to 636 reverse strand)
gcccttgcaaaggtaagtttctttttgataattgtaggtacttttctgtaatcatgtaactcaatgatatgcttcttgacccgtcaatcaaagaatgtttaggttgggtttacacggattaatttttttctagatgattttaggcatgcatgactccgtaaccttttaaattttaagacttgtttagtgaactataaatgatacaaatacaaaagacaggattcctgtttcagtagatggtggagctgttattgtcaaacccttattatttagaaattatttttgaatgagtccccgtacaaatagaatacagtaatactgtagactctgaagatgaaattatatttttataagaagattaattttttgtactgtttaaatttgatgtattgtgcagagtatctctgatccttggaagcctgaagatccatt

SEQ ID NO: 77486 - DNA, 912 bp, Carica papaya
  Intron number 1 from transcript evm.model.supercontig_8.21 2 (locus evm.TU.supercontig_8.212) derived from phytozome v7.0 (chr-ID supercontig_8; pos 1493311 to 1494222 reverse strand)
gaattacaacccaaaatcgtctctcaggtactgaacaggagccactagggttttaactccattatttccacaaatcacaatgtacgtgcaatgaagagaaggaattctcaaactaccaatggagaaacagttcaaaacccaacttcgcgctcgagattttctcagccagttcggggcaccgacattggatccgatcctgccatttctcgaccgtgtaagattttctatcttgttccccctttaacttctcagtttaatccctcgataatctctcgtgttttgaattaattttcatgaattaccaatgctccgataagtgattgtgccgttgattcgttatccttcctcatttctttgttgaatttgagctccatacctccatttatgaagatagatttctttttgtcttagttttctcgccttttcttctattatctttaaaaaaaaaaaaaagaattacctccttagttttccaactttgagatctctgaagtctaattatgataatttattgccgtttattggtcatagcttgaataataaggccctgtctttgatgaaatcaatatgaaattagtgtatgttaatctgcatttgcttagtttagaggccaaaacaagatatcaacagcagaaaagagtaaagtttataatgatggtaatggcaataacttaattttctcccacagccttgcaaattggcctgccagatttgagtttaattacttttttttatcatattcttattttgtatctgtccgtgttttctcatcttagtgtcttataatgtcatacttgttggtattcaagtttccaaaatcttgaaaaaattattagtcttaaaatagtttgtaacaataaccatctcatatgatgaagtgatttgcagctgataatcctaaaacttctgagt

SEQ ID NO: 77487 - DNA, 705 bp, Carica papaya
  Intron number 3 from transcript evm.TU.contig_29821.1 (loc us evm.TU.contig_29821) derived from phytozome v7.0 (chr-I D contig_29821; pos 4853 to 5557 reverse strand)
acattgtatttgccttttagacaagtgagagatttatggtttcagaccctttatattttgttaaaggctcatgctcttattttcattgaggattttggacctaattactatttttactgatttggaagctttctgtattttgcttgcaccccttggtgtgctgttaatgtacttctctttttctttttaaaaaagtatcaaaattacaccctttattcgtgaaattgtaagcggaacgtttgaagatagaatagaaggttcatcaactaaatcatctcagtttttccctctacttttcctcccaatttggaggaacgaagaaaatgaaactttaaggagggagatgcatactatccgttccttcggtttacaattttatttgtagtggcaagcatgcctagtttctgttccttttgtgttcctttcatattgctctattaattcaaatagtgtaaatttaagggcatagaaggacagcattactgccatctcctagaggagtgtttgtttaccttttattttaacttttaaatttaagtaactccaatccatgaccagcatcttatatctgctagattgtcttgactttgttgtttaggactttatgattctttttgctgttcatgtcatattgcccatgctttttgatctttatggttcttgaagctccaattattatgctatcttcttgtcaggcaaaagctg

SEQ ID NO: 77488 - DNA, 601 bp, Carica papaya
  Intron number 1 from transcript evm.model.supercontig_80.2 (locus evm.TU.supercontig_80.2) derived from phytozome v7 .0 (chr-ID supercontig_80; pos 6969 to 7569)
ccgataacgagtctctcattaccgtatgtgtaccaaatcactcttcgagttcttttttctttttctccagttttttttttttgttcttatcattaaacacttttcttgctttgaagaaataaagattatatatatgtatatgtcttaattgatcgaattatcgtttttggaagtattggtttttggtgcattattttttcttttggggtaaaagaaaaaccagcgatacagtgaatgctacaagattctgctcgttttacaaacgttaagaagacttttctttcttagtttctttgatcgataagtttttgagattgctttccgaaagtcaaattttaatgcttatctaaagcatctctggagaaaagagctctttctgtttgtttatttgttttaaaaatttcggcgtgaggaattagtgaatctgttcaattaacaagtgtcattttctgattagataaatatgtatataatcgaaatgctgtttatgggaaattttgaaagaggtcagtgctgctgaatgctggcctactgatgtttgtttctgtcatatgctttctctcatatgtttgttactcaggaaattggcaaggcattgatt

SEQ ID NO: 77489 - DNA, 967 bp, Carica papaya
  Intron number 2 from transcript evm.model.supercontig_84.9 (locus evm.TU.supercontig_84.9) derived from phytozome v7 .0 (chr-ID supercontig_84; pos 119469 to 120435 reverse st rand)
gagagttggagctctcgggagacgatattttgcacgtaatattcacctattttttctttgaacttgctaaatttattttgtaaatggcggttttcttaattactgcatgatggcatatacgtagttatattcattaatttattagttgatttgataggccccttgccaggcctaaacttagtaacctattctgagcatgattttgatccttggcgcggtgaatctaagaggtttagctgaagacatgcatcttttgagcttgaagaattgaagttaataaagttgaacttcaaatagtgaaatagcatacaaataagttagagaaggagaataaagaaatgggcgtatcattccataggaattctttttccaccataaaattttccctgcacgcacaaggacacaccactatgtcctgcagacacaaggacacaccactctgctctgaacgcatgcggactcaccactgctcatgcagaaagggtgatattttgttgtactctttgacaacagattgtgggatctataaattggaacaaaatggggttattagtgaatgtgaaaactgtaatactttgataagtggtgcatctgtcctgttttcatttatggtgttgctagctttagttgtattaacttatatttagcagcatgcagggcactttccttactcatgaattgatgagtttcactacgatcaaattggagaatctttttactttcaaattttatttgcattattatgttatttgtttatggaaattatgtggatgctattaattttcattcacattttttttttgttttctatttcacatccttccttgttttattaatgcagtctatttgtttctcaaggacatgccttgtgctcacatacaaacaagtgcaaagcaagaaatgtctattgatatgagagtgctaattctttttaatttttctcatcatcctcacagtttcttctcca

SEQ ID NO: 77490 - DNA, 732 bp, Carica papaya
  Intron number 1 from transcript evm.model.supercontig_9.42 (locus evm.TU.supercontig_9.42) derived from phytozome v7 .0 (chr-ID supercontig_9; pos 187404 to 188135)
tggttaagagagccaaagagcagatccaattggtatttccttcttattattcaaaaaccccttgttcttttgattttccctggaaattctgaattatgggaaacaagatatgtgtacttagttttttttatttttttatattttttatctagggatttctcttatcgaaattgtttaattcatttccttgctcaggccgacatttgagttctggccatacttgtgtatttcttataccatctatctgttctttcactgaattcaaatacaaaattattttgggaaacatctcttacactggaagaagcttatcgctaaattatagcaggcaaataattttggtggaattatgtaattttgaaaacttaaccagtgtacttatataccttctagtttttgctgacataattcatgacaaccgtaacaaatgttgcaaaccttgattaaatttgtcaaaatgatcaggatagaatctgtgtagcttaatataatctttaggctcaagttaaggtattgggcgggaggatagggatactataagtatttaaggcacaaatgaatgaaaaatgtccttgttgtgtattattgcttattgttcattatatccctaggagtgtatttttatctgtgaagtaaaactccaagtgctaaattcctttctgaatctctaaacgcttgactggctaaatgttcacaggaagagactgtggaggagtttgcagaaagtggcat

SEQ ID NO: 77491 - DNA, 297 bp, Carica papaya
  Intron number 1 from transcript evm.model.supercontig_67.4 5 (locus evm.TU.supercontig_67.45) derived from phytozome v7.0 (chr-ID supercontig_67; pos 600369 to 600665 reverse strand)
tgtctcaatatcaggagcagttgagaactctagaggtaacaccagggtcaaactttttataacttctttttacctgttagtagaacacaacttttctgtatctgcggggaatgtaatacgttaactaaagtaatcaacaataccacgaaaggaggttcatttcttcttagaaattagttttttttttttccttctttttctgggttcctctgaaggttctatagaagatcacctttttcgagttttgtgtttttgatgattgttcatttttgtggttgtgcttacaggtaaacaact

SEQ ID NO: 77492 - DNA, 593 bp, Carica papaya
  Intron number 1 from transcript evm.TU.contig_26338.1 (loc us evm.TU.contig_26338) derived from phytozome v7.0 (chr-I D contig_26338; pos 13223 to 13815)
aagatctggtaagcttgttgttattttgattttcttttttgcggaaattttttagcttagtttgttaaacctttgcttggttggtgagaaagttaggacttttgttttagtttcttccttttttggatagaaaaagaggacagaaaatttaatagtaggtgcttatgtacaaaaaatttaaaagaggaccattgtcaatgtgttgggcctgtgaactaaatttcatgtgcgattacttggagaatcctgcggaaaacactaatgaggaacttgtttatgttggaggtttggcttgatttatattgtgtttatttgttgagaaaattacagcaagtgaatagtttgtgttattgtctgttttagcttgtcttaaagttcaacaaagaattacctttacaccagagtagcttgagttacttgtttaaagtttggaatctgaggacactgtgtgaattcaaaatggcttttcttacattgggattcatcaagcagtttgcacgacgttctatgggcagtgggttatttgcgtgttcttttgtctgtaaagcaggatgtgaattttgttaatctggatttcttttacttgcagtcag

SEQ ID NO: 77493 - DNA, 752 bp, Carica papaya
  Intron number 2 from transcript evm.model.supercontig_77.8 2 (locus evm.TU.supercontig_77.82) derived from phytozome v7.0 (chr-ID supercontig_77; pos 997191 to 997942 reverse strand)
tcattaatcaagcgtttctactggagaagctcaaggttatattttattgctttcttttcatttttgtttgcttatttgtctgcttaatttggtagcagaagagggttttattcgtttcaacatatcaaattaacttgtaaaaggcttttgagataaaaagaataaaattaatataaggcacgaaggaggtgccgtccatttacaaaaatatttatatctatgttaaagtatcaatgactttcccaaaatcatcccacttatataagtcatgatccaaaattaaaaaaaaccaaatacatgtatccttagattggcagaatatcagagtatcattagcaaaaaataagtgtgatacctctacttgatgagcatctttccccacctttttccctctcaatacctctacctgtaaaaggttatacccttgaaaggttgctggtaaaaaaaggatatcataatcactagttagacaccattacagaatcattaagcagttttagtgcttaagttataacagggaggctcttgatgtatttccacatattgttgctttatattgtttcttttcactatttgtttgcttatttgtctgcgtaatttggtagaagaagaaggttttatctttttcaccaaatcatatgaacttgtaaatggttatacccttgaaaggttgctttctttttgtgcatgaactcattctctgtctttttttcccttcgtcaaacgtctgtctcaaataaatttgacaggat

SEQ ID NO: 77494 - DNA, 828 bp, Carica papaya
  Intron number 3 from transcript evm.model.supercontig_95.3 8 (locus evm.TU.supercontig_95.38) derived from phytozome v7.0 (chr-ID supercontig_95; pos 614403 to 615230)
attgccttatcaggtattatatatatatatatattttgaagtcatatatgcgcattgttatcatatgttctaaactatgcacgtatatgtatatatatgtatatatgcttatgtttgtgattgagctgccaaattataaatgttagtggtctaaggctaatatatagttcatttcaaagaaaaataaaaattataaattttactagaaaattataaaagttcatttcaaataaaattctatacaaactttggaatgatgattttagataaatttttttaacattttttaattaaattaaatatatattcttaatattgtacaagttcatattctaaatataacctaattataatttgtgatatgatgttgatggtaaatgaaattaacttgagaaattgtaagattttcacttcaaggcaaatttactagtagaaaagatttcaatacttgatttgaatttagatgatgttccatcattcttggtcacatcaaacaaaacgacggatccccctattcaaccaggggtgaagtccggttgtgagatcaagtttttatgaaatggatagtagaaatctctatattagaaactaaaattaaatactctaaatttaagtttaaaaatataaattattttttaaatttagattcatttaaacctatcagtgatgaagttcttcaacataaattgttggttcgatagaaaaaataacttgactcaattacaaaaaaactcagtttttattacctttcaagttaaattgacactacttatgtatttttttttttgaataggtgcacacacaattggattctctcattgtagcaaa

SEQ ID NO: 77495 - DNA, 676 bp, Carica papaya
  Intron number 2 from transcript evm.model.supercontig_64.6 5 (locus evm.TU.supercontig_64.65) derived from phytozome v7.0 (chr-ID supercontig_64; pos 401672 to 402347 reverse strand)
ctggctttgagaagtgtttatattcctgggttcaggtaatcaaacttcttttacttccaattttattggagttctcataaacacacacacacacttagttgatcaatggcaaagtaaagatgttgaggaatatattcttgcctggtagtttttgttggaagattttgaggagagctcaatataatattttattgaaaataggaggaagaagttaaaaaaattaattgaaaaactaagtttttatctgtgattgttgctaaaaacctacatgtatgtagttatatatagtcactaatacaatttttaaaatttcaaatacatgaatgatatttaactctaattgatgaactataactacttaggaaaacttaaaaactcgtattaaaatctaattcatgaactacaatcacctataaaaattaaaaaatagatatttatatctttaacttcataaagagtctctaaattattattttaaactccttaaataagttttcttaatttgtaaattattattttttaaccctttagaagataaagaatctccttttaacttgcaaattattatttctaacagttttcacctcaccgtgaactagtgttgtaattacttgagactggttttcatgcaaattacccaggtttttacccaccaagaataacagagagaggtgga

SEQ ID NO: 77496 - DNA, 921 bp, Carica papaya
  Intron number 1 from transcript evm.model.supercontig_66.2 1 (locus evm.TU.supercontig_66.21) derived from phytozome v7.0 (chr-ID supercontig_66; pos 258994 to 259914)
ttgcggagctcaagcaactgtataaggataaggtacttagttccatttttgttaatatctttctagctgaaccgaaattttattgtgcatattaagttatttctccctttttttacttcaatttatgatggacgattttacgttgctggactcagcaaagtgtgagaatggaaattgctatttgcatgaacaagcttgtactggttcacatgacagataattgcttatatttttgtgttctaagtatccctttttcacatgacaaacttttactggttcttttgtaagtgggcttggtttgagaataaggaagaggtaattagcgttgcgtagtatagtggattaagtataatctgaatttgttcattgatagttgggcttatcatcagtcactaaactataaaggtatgatttgggctactgatttgaggaattaattacaagaatttgttaaccaacttttttatttaaagaaaaaaaaatttgttgtcaaactttggtttaccggtgaagaagcttacagctgaaatcctgttgagccaaggttgtgggttgaaaccctggcaagccctttttgtgtttggttggtctcactgtcattatgctttggttttagacgggtcggagtctatgatcacagcagtgagtttcttgattgagagggaaaactacaagagtttgctttatatgcacctaaaattacttgattttcagtgtttgattctgtgctaacatggtttatggggctgcctttttgtagttctggaaggctagtcagaagatggttgagtatttacagagttctgtgggcattatacatagaaatcatgcacctaaaattacttgattttcagtgtttgattctgtgctaacatggtttatggggctgcctttttgtagttctggaaggctagtcagaag

SEQ ID NO: 77497 - DNA, 564 bp, Carica papaya
  Intron number 2 from transcript evm.model.supercontig_74.7 9 (locus evm.TU.supercontig_74.79) derived from phytozome v7.0 (chr-ID supercontig_74; pos 828683 to 829246 reverse strand)
caggttaatggttatgttttgatttgttttcactctttgcttatttttcttagttttggtctggaagaaagttggtatgaggatatccgaccgctaaatatagagaaacaaaaaagaaatattgaagcttttgatctaagaaatagtaggtttctgtttgtttcacaggatcaatgtatcatggttcacctttgttgctgtcagttcttgggccgcttactgttaaaaggttcttgatgagctctaattcgcctttttttatttttatttatttttgctttttaagaacttattatcaggtcgttgtacagtaattataaatgatttatgctagaccgaattagctgtcacaaacttgatagtatcttggagatggtaattcttgttccatctgaaatataaggaatcctttgcataaatcctacttgagctcggtgtttgtgttactatcaaatgtgggtttaatctgtttcttaatttgttctgaaatgtttgaatggtgtgtcaacttattgggcatttcaatgggtgttgcagaattgaaggacaacctagtcatctttt

SEQ ID NO: 77498 - DNA, 568 bp, Carica papaya
  Intron number 1 from transcript evm.TU.contig_38170.1 (loc us evm.TU.contig_38170) derived from phytozome v7.0 (chr-I D contig_38170; pos 683 to 1250)
tagaagaaaaagaagagctcccagtgagtcctctaggacaatatctaaatagttcggtgctttcagtcaatgttattgctattttagaattagaagttaaaatcaattgcacccaatcggtctcctatctcaaacaattatttctccccatcaatccacgtttctcctccatcatggtatatatgcacatatatatacatttcactagtattttctctttgtttttgtgttagttgtaatattcttttctaaattttgtttttcatttcatagttaatacttaatgggcacacatgtgcacacatacacatatatataaagatttatctctcataaaagaagaattataaatacattaaatatgactaattaagatatgttattgaatatcaactattatttacttgaatgatttatatattacttcttaaaatttatgaatttaagttataatatattttcatatgtctttttaaaaaatattgtattacttattgatgaacttttccttaaaaaaaaagatgatactgagtgagattattataaaataaataggtagaagatataa

SEQ ID NO: 77499 - DNA, 813 bp, Carica papaya
  Intron number 2 from transcript evm.TU.contig_35476.1 (loc us evm.TU.contig_35476) derived from phytozome v7.0 (chr-I D contig_35476; pos 426 to 1238)
tgtcctttctgtgaagtcgttgagcaagctggaaggtagttttttctcaattttgtattgagaatttcttgtggttattattgtttgctatagagaagtacccaggcagggggctacagccctttcaagtgaatatgtttatctctcttttagagaagagtagcatgttttcttaattgtttgatttctacagaggagaggaaagaagtaccatgactttttctgttaaaagaaaagaaacattattaggaacagataagaaatagcagataacaaatctgccaacaacagcaattttaggaacagataagaaatagcagataacaaatctcccaacaacagcaaactaacttcaaccaaactagcttcccaatctctttgcaaattagctatgatgttcaattcttctacttagttttcattgttcgtttgaatctatgtttacttttcctttgaatgctgaaatgaattcatgctagaatatattagattgcagtttcatattcaggtgtagagaaattaaacttagactaggcattgtatccaatgtatatgctgcatctattagtgtcaagtttcatggatatgtggctgaaccaacttggttgagtggccgagacctcttcacctcatgttggagagcctcagtttgatccagtgaatgtgtgtcatgctgttagaaactattgtaccaaaaaacatatataattcatggatattgccataagcaaaatgtttttttgttgcagaaatattagcatatgatgaaaatctcaatcctaattaggttataatcttgtcaatgtagagata

SEQ ID NO: 77500 - DNA, 922 bp, Carica papaya
  Intron number 1 from transcript evm.model.supercontig_746. 3 (locus evm.TU.supercontig_746.3) derived from phytozome v7.0 (chr-ID supercontig_746; pos 10593 to 11514)
caagtaagtttgtttgggactttttctatttacatgcaaattaccaattcccttctagtttatgagattattgcaccattcagcatacgaaatatttttttcatgctggtgagctcccgcaaatgaacctatgagcacaagtctaagaaagtctttttccattgatttgagtttttgtcctaaaacaatttttagaagttatgttgccaagtcaattgttatggggatatgcatttttggagctttatatgagaagcggatgtaagaagtttgcatattttacatatataaattgtatattcaactaatcttacaaaatcttctgtccacttatataagaaaacagtataaggtttactttttttttttggttcatattgttttttcgccattcccagacattaaatcacctccttccctttaagagcaaatgttttgaagttttagtcagtatatatttccatgaagtatctgagacaaagttgcatcccttgcaatctcttacaagtttatggtcactaaaaaaagattcatttttgtttcttagagacaatttaccatagcattttagctgagccattgctgattttacaaatgaagttaccagtcagccacttgtcatttggcattcttcactatggtgttagcaaaaagtttattctcggtgctgcttgctctaaaattgttttccttttaaatgctcgctaattatatatctctagcttttctttgctaaggcctattctctatcttaaattttaattgttttatctttagtagctcatgcatttttttttccaagtgcttgtttgaaaaagtttggtcagtgtattctttttttggtaaatgtttgaaatcaaggctttaaggtataatgttggcattgaaatttctttgttttctgcacttggacaggccatca

SEQ ID NO: 77501 - DNA, 485 bp, Carica papaya
  Intron number 1 from transcript evm.TU.contig_34419.1 (loc us evm.TU.contig_34419) derived from phytozome v7.0 (chr-I D contig_34419; pos 2079 to 2563)
cttgcgagaggtacgtgaaattacgcattatacctttgtttttatttacttcttctgtaattttgattgtattctctttttctgtttggttgctaagaaaatgtcggaaatgatgtttctgtagcagccaaaatatcttttttcttttgctgctactcattgtaaagtatgtagttacttgttctgctgtgtgaatttgataggtattatatggtggaatgagatatcgattacatcttatgatggctgtaatttgttagattcaaagtagtaccaagttcagacatgttaacatcaagttattagttggtcgatgacatttattgtggcatatttgtcgctttattggatctctataactggataacatttccgaatatgagtgggatatatatcgaatgatttaactatatatttgctatccattttattttaatgtattttttgaagagggaaacaagctaccaagtatcttgcaagacata

SEQ ID NO: 77502 - DNA, 372 bp, Carica papaya
  Intron number 2 from transcript evm.model.supercontig_631. 4 (locus evm.TU.supercontig_631.4) derived from phytozome v7.0 (chr-ID supercontig_631; pos 24545 to 24916)
gcacatcagagtaaagaacaaacaggacacaattggttcttctctttctttctactctattttctttttgtttgtttattttgatgtcctgtttgcttgctggaaaatagtttgggaaaaagacattagtgtagacttcgaattatggagctatagttagtattatttaatgttaaagatggaaaatttactcgagctgggcctatgccctagtgacattacatagaatttgaactttgaaaagatgttctccttgtgaatgcacttttttgcttattgattgttgattcgactactaaaatttctttgttactatcttttcaatgaattttaacaggtattggtctagataagccaaatccttgggcattt

SEQ ID NO: 77503 - DNA, 804 bp, Carica papaya
  Intron number 1 from transcript evm.model.supercontig_96.7 (locus evm.TU.supercontig_96.7) derived from phytozome v7 .0 (chr-ID supercontig_96; pos 161769 to 162572)
tcaaccgacaccgagggcaagcgactaaagatctggtaagggtttttaactttttcacggattatttttagggaattaggggtttcccgcgaattctgatttatttttttcctttcctactttgttttcttgctccattgatgaatttggagtaacagagactgggtcaggcaggaaactagaatgttctagggttttgttatggttagtcttttggtcttgtcttgtggaaagacggtagaaaaaatgaacgaggctgttcaaccatagccatataactatgtgaagttgaagaatgttaagggctctgagcttcccttgaaaaaatctgacaattttgtagaattcgtttgtaatgcatactgaattttattctaagatgataaaagttgacttcatatgaaatttcatgaggaagatttttattaactgggatctagttgagcaagtgaaatgaactccggaaagtttatggattcattccaaatatagctttcctcttatttatttgttgtgaatttatagtatgtaactggaggagatcattatgctggttagttttctatgtcctttcaccgagtcatttaattgcagattagctgggtggagtgggggcttcttttctttgccttaggatcctccataattaaggatcaagacttttcaatgctaaaatgtttgagtgttgtttctaaaatttctcttatcattgctgagttcttttcctggaattttgtatttgctgtcagatacatttcacaagaatttgattttgctgatatttgagtttgttgatttgctagg

SEQ ID NO: 77504 - DNA, 850 bp, Carica papaya
  Intron number 1 from transcript evm.model.supercontig_69.5 7 (locus evm.TU.supercontig_69.57) derived from phytozome v7.0 (chr-ID supercontig_69; pos 695772 to 696621)
ccaatccgattctcgtttggctatcgacattggaggtacttcatgctcgattgtatttacttcgcttttctttttttggggtgctaactttcttcgttatctatttgttgctacggattttatgggattgttcctgcatattgttattcgtaattagctcgaatcattttctccatttgttgtcaatttcgaatagctcgtctcgttgcgtgctttacactctgttttttttgttgatctgttttttttctactctgaatctgtagcttttttttttctctctcttggaagtgaaacagagtaagttcatagaattcttttattttaactttgcgaaactataaaatttagttcactagttcaagctattgggaatttaactccgacgaccaatcgctgctaccagtaccacaagaattttcctacccaaatcattttccctcaaaagcataaactcaatttgttggtagttctattagttaaaccctcaacaaccaatcacatacattttttaactggattggattatcacaatctctatggcaatctctaccactcaatttgtgggtaacacgtactctaataccatttggaatttccggaccatgcaacactagcccaaacaacttttggagtcagggaattcttttaaaagttcaaacttgcagatgatcttacatggaaattaacaatcatgtacattttcaatgtggtattggattatcacaggaataatagtaaattctagcagtagtagtgatgataacagagattttcttgatctggatattgcattgatgtatgtctattggcaggttcactaataaagttggtgcatttcagaagaagt

SEQ ID NO: 77505 - DNA, 402 bp, Carica papaya
  Intron number 1 from transcript evm.model.supercontig_89.3 (locus evm.TU.supercontig_89.3) derived from phytozome v7 .0 (chr-ID supercontig_89; pos 11060 to 11461 reverse stra nd)
agatctctcccatagtccagactcatctgaaacaggtaattttcttgtggaactttcttgttttcagaatcttgttttgtttccgaggaaatggagggagaacggacgggaatcttatatattacgttttgtatttgcgatcttgaataatatcttacaatcataaggatttgtttggatatgataatttctagggtttaatgaagggaattatttagtttcagtgattcggacgtctgtttattagttagcatttggcttgtcttctgttttgaatttaactgcaagggaaacacactggagtcttggatcttgtgatagttggtggctggggcaaaatagttgtgaatatttttcttacctttttcttcgtcttgcaaaatttcaggtttatctcacctt

SEQ ID NO: 77506 - DNA, 618 bp, Carica papaya
  Intron number 1 from transcript evm.model.supercontig_64.1 06 (locus evm.TU.supercontig_64.106) derived from phytozom e v7.0 (chr-ID supercontig_64; pos 742778 to 743395)
tttatcctcttgggtacgttctaaaacttggaaatgcagttagatctcttttgctttcttttcttcttgcttctgggttattgttcttctgtatgacttcttgtttccgcacttctttttgtttcacggtttaatttcagtttttctggggctatattttaaatcctccttcctcttgattgattgattttttcttttagtttttcaggatttctctattacatcaaagttttctgtaagtgtccgtataatttccgcatacattgtattgatttgatttcttggactgtttatggtttgtctcggtgcaaggatgaagcagcagcattcaatttattaacgttccttgttcttctatccgaactttttataccctctcccattcttgcataattaccgattcttcttgtcactatttgcttctacaccgacgtatatatgtatgtattacattgtgttagatgggtattttccatttttctttttctttttttgggtaatcacagtcttgattcccttgattttccatgttgtaccattgcatttatttgtaattttccttggctgtaaatgggttttgcaggtactatagcgtgcccctttccattggcaatccac

SEQ ID NO: 77507 - DNA, 890 bp, Carica papaya
  Intron number 1 from transcript evm.model.supercontig_672. 4 (locus evm.TU.supercontig_672.4) derived from phytozome v7.0 (chr-ID supercontig_672; pos 21551 to 22440 reverse s trand)
aaccctgaatagtaagcttcgatttgccctttaatttgtattgtcacttctggctaattcctttgctttttttttttttctcttgctagtttttgagtatcgttttggtttcgatttgatatgtcgggatctgcggtggttgttcgcaatttttttttttttttaaaaaaaagatgtcggtggctggtttggttttgttcgctttggggaattatttttgaagttattatttactttttttttgtgtgggttattccattggttataaatgatcgttttgattggtcagatctaggcagttcgatttagatcgctgaccggagtttaattttgatacggcgatgtgattattgataagcaattacatatttataggtattattgaatttcgtttgtttttaagttttccgtggatggagtggtaactatttatgggaattgaagatttggttttaagattttagtgataatttgaaaagaatttgttagcagatttgcttagtcggctcattattcaaccagaagaatagagtatttgattgagtttttggaccaaactgccataagtaattgattgcgtagtcattttatatgtgctaaatcatatatgttggttggatttattttttatgcgcttattctattttctgggtgtgtttgtaggagtcactttggtctttttgagtacacatctcgcacgacccttggatctgtttttgtatttcttgattctctgaatatcttaactgaatgttgtcatagttgtggccactgtttacagaattcttggtgtggaatacttgatgacaacataatgtaaggttctgttgattctctctgttttcatttttgcagtgattatttgtttaagcttttgctcattggagatt

SEQ ID NO: 77508 - DNA, 908 bp, Carica papaya
  Intron number 2 from transcript evm.model.supercontig_75.1 12 (locus evm.TU.supercontig_75.112) derived from phytozom e v7.0 (chr-ID supercontig_75; pos 1042408 to 1043315 reve rse strand)
cgttccgcgctcgcaggttgtacttcagcaacgaggtatgcctttactttgttcttaatttaatggagatattgaaagttagttgcttcgattttgaagccagtttggtttattgactggtgctgaataatctaaatgtattaatcacatcagtagctgatttatcatgtagtgagcattttttttttccggtgaacatagttagattttctgtgctttgcttagattagttggctggattactcgagctcaatttacactggggatatcttttttcaagaaagggttaattgcattgtattaggattcggtaataggattttgacctgtcttgaaagtgtgtttgctttgaaattatactgtaagtggtagaatttgggcctcgtttgatggataggttctttgactcccagctctttgtcacattccctatccgagtctgaagtgtgatggggaatatctctgagtataaatttgctgttcaataaccttgaaagcaccatctttatcacttttaggtgataaaccagtgatgtttaaatgatattaaagtttacctagcctactaacagattatgtatgtgagtgttgtggttggttgattttctaaagttttcttcctcttgtgaggatgcatagttagattgaaaaaaaaaaagtttgtaacagccagcatggtagtaatttaaaaggaaatatggctgcatatttatggatcaattcaaaaagcacataactagcacctttggatggtgcatttacattttttctccctattacttatttgtcttttttcttttcttttgatgattttgatcaaggagcttttactatagtacttgcattatgcaatgcatgttcactagtatgctgatactaccaaatatattttgtgttatggcaggaaa

SEQ ID NO: 77509 - DNA, 489 bp, Carica papaya
  Intron number 1 from transcript evm.model.supercontig_7.14 5 (locus evm.TU.supercontig_7.145) derived from phytozome v7.0 (chr-ID supercontig_7; pos 1437411 to 1437899 reverse strand)
tcaaggttttgattggtgacttctctacccagttggtaaatccccctccttttctcttttctctcttctgatatgctgtggttttggtcctctagtaggtctacagaatttcaattcttggatctcttgatgatcgatcatttggactgacataaaccttttggttttattttttttcgtattgtcaatcacattgagtgtaatgtgttttagggttactgtgtttatgtatatctatatatatttgtttaatcaagcagatgtcaagtcctgtttatggtttttttttgttattggattagtgaccctcttgtgaggaaaaaaatgttcttagacgttctaacctttatcagcatttatcctttttacaccattatgttatttaatatcatattgttttatgacttactctgttgtttttaatggatattaacattaaatctacctttgattgctgtttgtagcaaattccgccagcatttgtcaagt

SEQ ID NO: 77510 - DNA, 579 bp, Carica papaya
  Intron number 3 from transcript evm.model.supercontig_7.10 9 (locus evm.TU.supercontig_7.109) derived from phytozome v7.0 (chr-ID supercontig_7; pos 989809 to 990387 reverse s trand)
aaggtgacaccccggacagagcaaaatacagtcaagtatgattctgaatctggttttaaataaaatttattaagttgatcttgtatgttcgatcaaccattaggaatctgacaaattaatgtctcttctggtgtttaaatatgctcaaaagattgccattttagttgacatcagtatattgttgaaacttagggagaaagaaaagaaaaagaaacaatggtgattatctaggtatccactttgctttatctttgggggaatacaatctttttgaatcaactaatctcacatccatcatgttattctgatatttaacttcctagaattggcatgtttcttttaatttggttggttattttatatttgacattcaaagatgtgatgcagggaatcaagttctttgaaccagaggtgctgaactaagtcttcttgggtctctacaatcagattcttctttgataggaaatcgacttggaatctaatctgctcttcccatttattttgtgggttttggacatacttttattcactgaagaatttgattggttggtgaaacagataaaaggtgcttcacctgaa

SEQ ID NO: 77511 - DNA, 915 bp, Carica papaya
  Intron number 1 from transcript evm.TU.contig_30289.2 (loc us evm.TU.contig_30289.2) derived from phytozome v7.0 (chr -ID contig_30289; pos 6543 to 7457 reverse strand)
gaactccctcgctcgctgtgcaggtaattgttatatatatatatatatataattatatatatacacatatctgtatatatatgttacccatcatgtattcatgtgtgctttctaattttttttcttggaaaagagccaaacaacaagttgcccacttgattagagctttgattaaagctttttagcccattactcagcttcctttttgctcattcaaatgaccttttcctccatttgtgtgcatatacacatacacacacacacatatgtatatatacccactgaagaaaacctacaagtcttcctttttcttctcctaattgattcttcttcacatgtacttggcgatctatacatgtacatatacgataatcgagtacatgtagtaagattaagccaaaaaaaaaaaaagaaaagaagagaaaaagctgcacatgtttaaggggaaaaggtatacatacatacatacatacaaatatatatatatatatatatatatagagccaggagattaactagggagataatattatcgatcatgataattgatatgatattccacttgaagaataatgagatacaaaaggatccgtacgtacataagatattgaatagattttcattttaaaataaagctgaaagcacaaacacattccagtagagttgttttgtactactcaaactctcccacaaagctttttttttttttatttaaaaaaaagcactaactcattaaattaaaggtacgaattaattaacttcttgttaattaaccattagtggtaataatattgattaattagttaattaattaattaattaactttacccaaaaaaaaaaaaaaattattaatttcgtgtccgaccccgtatacaacaggtctgaaacgaaccggaaaaagctgcagattacgg

SEQ ID NO: 77512 - DNA, 581 bp, Carica papaya
  Intron number 4 from transcript evm.model.supercontig_858. 3 (locus evm.TU.supercontig_858.3) derived from phytozome v7.0 (chr-ID supercontig_858; pos 9783 to 10363)
atcaattttgttttaccttcagaaaatatatccaggtaatttcccttcatttggctgagtgggcagctgaaagttaccatcttccaatgttgcttgtctagatctgcttgagtgtttgcatattatattgttttgtaactgctagattttgcttacttgcatggccttcttcactgtgacttagaatgatttcactaactcttttgtgtcgtacattggttgattcttgttgtgctttgagctttactcattatcatcattcttgtgttgtgaatgtcgacgtgtaccataacctaggttggcatttctgtcttggttatgcactaaggcatatgggtacttttcatggatgtctttatcatattaaaaagtgatttaaatgtttatcacaaaaaaaaaaatttaaaagtgatttaattgcgttgtcatattgacagtgattttatatttatccttcttcgtttttcttttgtttttggttgaagaattccttgtcttcctcccctgtaccttgtcttcttctgatataatctttttttgaatagtaaaatgaaaatctaatctgttgtgttatgtcatag

SEQ ID NO: 77513 - DNA, 491 bp, Carica papaya
  Intron number 1 from transcript evm.model.supercontig_67.5 2 (locus evm.TU.supercontig_67.52) derived from phytozome v7.0 (chr-ID supercontig_67; pos 705828 to 706318)
tttctggttttctgaaaccaacatctcgagaggaggtaaatttgagtttttttcttggattgcttcttgagttatcattggatttctattcaccatatcagatagtgacaaaacatttttctcttgattttacaaccataggaataagtagttagagagttgtttttcttttatttttgaaaatgtatcaaacagtttattgctaaaaggtatttttttgagataaaagtatagaaaacatattgatgtgaaggcgccaagggggcgccacccatgtataaaagatttacaagtcaataagcacatctacaattgacccctaaatcgtcaaaatggttaatgttatgttacagaacaacggaaccaaaaaactgtagccatttgtccatgatgttgccaaaaatatcttcatttccataagagactctgttgtttctttctttctaaattgcccagaaagtggcgaccggtataagtctaaacttcttgtt

SEQ ID NO: 77514 - DNA, 920 bp, Carica papaya
  Intron number 1 from transcript evm.model.supercontig_70.1 1 (locus evm.TU.supercontig_70.11) derived from phytozome v7.0 (chr-ID supercontig_70; pos 109463 to 110382 reverse strand)
ccaatcaatctgttgaccttaccagactctttcaggttctatactgacctttatatatataaacttcctgttaccttttgcaattttattagtcaaccgatcgatttttattagtttttttcctggtcaagatactttttgaagggctaatattaagtattggggatctaagagctgaattaaggagctcaacgtacaaaatttaaagaaataatccttttgccttagggtttttacccttggtttgaatgctgtattgtgaattctaggaaacatgctatagggttgaatgatgtgcaggctttatatctctgtttctttgaactatatagttcttttttcttttatttatcttgctgcttattgtagggcaatgaattcatgtgaagactttggttattctaggacaatagattgcacgagatgttaatctggtaatagtctgaagttacagatgggttaatttttcctcttctagagataaatcaatctcaaacgaggttaagaacagtattagcttttaatctatatcaaaagtaaggccaatctctaaagtcaatatcagatataaagactcaggcctcctagttgccattctatagtaaccgacatattgctaggctttttgggtgaatggattgctagttggtgccgcctttgtgttgtttattcttgttgtaggattagaatatttctcagaactacttttgattaattctgataagcagatttactttatgttgtaatgtttaggtttgctggttagtctggttgtatctatagttagtttgatcatactagttagcttatgagaagtttattgttttcctattttgttaaataggtgttcataagatattacccatctactatttgtagtataacaagtatctatccaatattttttccttaggaaaatt

SEQ ID NO: 77515 - DNA, 491 bp, Carica papaya
  Intron number 2 from transcript evm.model.supercontig_64.1 03 (locus evm.TU.supercontig_64.103) derived from phytozom e v7.0 (chr-ID supercontig_64; pos 723901 to 724391 revers e strand)
agctactcaggactaagttttgccatcctatcctggtatgattttaatttggtttacatacagtctacaataatacacaaacatactacatgtgcatgtgctttttaggtgaattgaaccagtaattgattcgcgaggttaataattttgcatttgattattttctttataatcttgttcatgggatttgccagctttatattcttaattttcttgtttagtttaacgctcttcggaattgcataacaattctaatcttcgagtacttttcattctttccttacttcttcttggaaaaaaaaaaaaaaaaccgaagaccagctccttgataacagtactttgttttcttagtttccttactgtaatatgttggacttatcttttcctgctgttgactggaagattcgaggagtagattgcaggagcttgttaagaactgaactgttttatcatctgaaataattttgtaccacaggttcgcctgggctggc

SEQ ID NO: 77516 - DNA, 974 bp, Carica papaya
  Intron number 1 from transcript evm.model.supercontig_81.1 33 (locus evm.TU.supercontig_81.133) derived from phytozom e v7.0 (chr-ID supercontig_81; pos 670421 to 671394)
aaagagaaccctcttctcggtccttcttcttctacgtgggtatctcttctctatctctctcgctattaatctgcatatatatctatatatatgtagttttctctgtgtctatttatgtgtggggatatgggttccggttgggtttggggggagggggaaggaggggtttatgaaatgggggttattgttttatttctgcattgattactttttttattttagattgttgtctagatttgtgtacagaatgtatatagattgatgcgaacatgtctatttagagaagtgatttgtccatgtttctatcactatctattgtcattattaacctttttttttcatgaattggctcataggtagctggcttgatttcaatttggaaaagcatagtgagaagttattatgaacaggccttgaaagaggaacggaatttagggggggggggaaaagaaaaaggaaaaagttataagatacttaaaagttctgaaattttcattggctgagtccaatttaccttaattggggacctgaataacccagataatttacctgcttggtttggattttgttttcaaaatatggatagatatccaagggatgaataggtatagtcaatgacttttcgacttggatttgctgcgagaaaggattgcaagaaaggaatggcaataatttggaagacattcttgctctgtaagatggctaagatgaaagtttttcttttgtggtctgttctttgattaatcatgggtcatgccttaaagtatgaaactacatgtaatccatggttttggataagaaaaatgtaaattctagtttgaaactcgtgccgtaagaatatctaatcttgaagccaccgaatttatatctttgtgatgcttgattttagtttatctgaatccatatcctgaaagtatatacatgtgattacttcatctaattgatttaccgtgtatcctttcagattagagaag

SEQ ID NO: 77517 - DNA, 767 bp, Carica papaya
  Intron number 1 from transcript evm.model.supercontig_81.1 2 (locus evm.TU.supercontig_81.12) derived from phytozome v7.0 (chr-ID supercontig_81; pos 57734 to 58500 reverse st rand)
ggcaggtacgactcctctcattgttctcttcttcagctacgctattctcaattttaattgtaccttatgctattgttcttacttttctttttttctttttgttgttgaaaatttgaattgaaagcatgtgtaattgaaagaatgttgttaggcccagttaaatatatatatatatatatatatatatgtatattaaacaaggtattagtagggacaatcttcttcctttccttttaaaatattattagttgagacaattagtcttctctaggttagacttcttgacaaattgattaagatgaaagttttcatctttatgttgctgaaaaatgttttatctttatcttagtatgagaatcttcttttaggattctcagtttcagattagtgacaaaaaagagacgaataggtaatgacaatacaattaagatgtctgttatgtccccaagtgactaaaatgattccggatttaactggaatttttccaagtttacaaataagagtggtcagtactcatggactttatggaaaccaaaacagaaaaagcaaatatgaatgaaaatttcaatcatggtcggtctggattatcctcctgctctcttgcttagttcttgtaatttgtttcttgaaagttatctttatctaactgtaacgaagcaataactgaacccatgttatttggcaatctgaatcttggaaatttacatattgtgagcctccatcaccaatttaatatgtgtgattgttaggaatatgtgcaggcaatt

SEQ ID NO: 77518 - DNA, 564 bp, Carica papaya
  Intron number 2 from transcript evm.model.supercontig_70.9 4 (locus evm.TU.supercontig_70.94) derived from phytozome v7.0 (chr-ID supercontig_70; pos 629580 to 630143 reverse strand)
atttggtacgcatatacttatccgcctacatacatacatacatacatatatatatatatacatgtatacgttacacatctgtatacaaacacatttattttttctatattaaaatggattagaatcggataaatttaagatgccagcaatatgtaagcttgaatttatcaccaacagctcgagcatcatgtcaagatccagaattacaggattcattttcagacccttatggttaatatactcgcagttgggaagtcatctctttttgtggtccagtttcgttttgaactaaagaaaataataattgcaaaatttttgcctccatcttcattaaaaaatttatatccttgcaaggttgattgacccatcacttgtttttatttcctatctttaatttctacttggtggattactttggattccctttcccttgtcaaacattaattatctccctttgatgtgaggttctaagttggattacaaataataaacttgtcactttttgataatgttaaagttttggaataattggttaatcggggaagaaattgtttgttgcaggtg

SEQ ID NO: 77519 - DNA, 890 bp, Carica papaya
  Intron number 2 from transcript evm.model.supercontig_9.22 7 (locus evm.TU.supercontig_9.227) derived from phytozome v7.0 (chr-ID supercontig_9; pos 1509245 to 1510134)
ttgaaaaggctaaagaattttgccagaccaaatcggtaatccctcttctatagtgcttggctatttctgaattataattgatatcgtgcttattgtcttcttattgttaactctttcattagcatctcattggagaaagcttaaatctccaatagtctttatacttttgtcgtatttctaattatctgaaaactcacagcataatttcatatttgaagtatttccactcccactatggattttccgagcttgattttaaatgtccacatatttaaacataaagaattatatttaagtttctatattcagattgaataaggtaaaaaaaaaaatgaagggagaatcgaatcaaaagggttagcatatttcaattccgaatgtagaggtaggaattcaaaagtttcctccaagttaaatgtatctctcactataagtatgggaatcattatagtcggatgtcccttaagggactgggaattattatagtaactaaacaaaagcagaaagtaataattgaatggaattgaatcaaagtgaagaaaaaattcccgagaaggttaaaaaaaatctagtgaatatttgagagggtggtactgagaaattatcttgctcttaatcaagtttgtttcattttcctcctacactaagccaaagaagagtgaaaagtgatccatggcttttccggaggcaccactgcaataatttatatgcctgcggccttgagaactttgtgtatatcaatgtgtgtggaatagcttagcttggtttcggttgactaagaactaatttcttgctttttcttcaggattttgtaatttcaaactaccttcttcatattttggttattgacaaaatttgatctggttgttctgtttctgtgtaggtgagtg

SEQ ID NO: 77520 - DNA, 700 bp, Carica papaya
  Intron number 1 from transcript evm.model.supercontig_79.2 5 (locus evm.TU.supercontig_79.25) derived from phytozome v7.0 (chr-ID supercontig_79; pos 495832 to 496531 reverse strand)
ctggtgaattcggcaacaatctctccttttaccaggttcgttattctttttcttcttccttttttaaatattaatttttgtaaccgtttctatcttttttaacttttttttaatacataaagtgtagtgtgaatttcactgattgaagggggggaaaaaaagaaaaaagttcctttttggcgtcaaaagttttgggccttggagttggataataactgtttacgtaatttaatgatggagttagcatctgaattatgctttctctggctttaacaatgttctcatttgattacttttcttaattacgtaattaattgattcattttgttgtttgagttgtgaattgctgtttctgattcgacactacgcgtaatttggctgattgccagcctgtttcatttacaatttgttgtttagtccctagaaatctttagatttgttcttttcccggaaattctcaaggtttgaattctaactttcctgttcaaattagatttgcctgatttcgatgtctcaacttagaatcaaaaccttggtttcttcaaatgcgatgtcatgtggctcactgttgcgaattattcttgtcttattttgatttgcgcaatataaatttaccaaaattcatcatgccctgatgtttttttacctccctgctttaaccgcaggtggaccttcgagacaagccagcgctggagaaaat

SEQ ID NO: 77521 - DNA, 1043 bp, Carica papaya
  Intron number 1 from transcript evm.model.supercontig_95.5 5 (locus evm.TU.supercontig_95.55) derived from phytozome v7.0 (chr-ID supercontig_95; pos 1050113 to 1051155 revers e strand)
gaggacgataaggtagtaacgctctttgcttctcctttttttgttcccatgttgtgatttcttctttacggcttcttatttacgtttgtaattgtgtgattctctactttaattgatgaacatagtttgttaatgtcgattcttagttattttttgtttcaattagtgattgttctattattttttttctctctctctctctctctatatatatatatataacattaagcagagttgcggtttaatatgagttagaatttagcttttttctctttgttttttatttgacagctatttgcttcagagttatattcttgttgttctctttgtttcatgttagtgataggattaagtgttactcctttgtgccgaaactatgttttcattcctgtgatctttgcattacattcttatatttttcattttgagttgtgcatgatataaaaaaataactaaggtaatattttgaagaaatgatagttctttaaaatgtgtgaaattggtttgcatatttacattctaaacatagaagtatagattcattccacatatatggttatgagattcattgttccaaacatagtgcaaaaaaaatgctagaatttctttttcttttttggttactgtggttagttcttctcttggcacttggctcctttcttcatatttgtttcagaagttgatgaggaaaactgaagcatcttaagcatgtaaatttgttttgtcccattatctcactttcttctatatgtgcatcacagatcagatctttaattgccctggcatagtagactctagtaaactcaagatgctctcatgttttgtttcatatttgtattttatatgagatctaaccatgagattttatctcaggtggatggttatatttaagcgagatcatctctgttgttgtgtttgctataatgtcgtggaagcagagttttgttattttggttatattttagattttccttagatcagtggcttattgatgactatttgtttattgcagctgggttcatctgttaagacaatagagactg

SEQ ID NO: 77522 - DNA, 644 bp, Carica papaya
  Intron number 2 from transcript evm.model.supercontig_9.32 5 (locus evm.TU.supercontig_9.325) derived from phytozome v7.0 (chr-ID supercontig_9; pos 2223038 to 2223681 reverse strand)
acattaccaacaaacattactggagtgtaagttttaactctgtctttctctctctcaatcaaagtatcattgcatgctccaagaacagttttttatatgatgtactggacacatctattaatattttatagtaattcactaatattatataatgttactattatatagtaactaaattactatgtaatattaaaataattattacataaaagtattaaattattataaaatattatgaagtttttataatattgtattcaatttttactacaaggaaactacctgtggtttttttccataaacatttgaggtatcccaataaaatttcaatagtagactccctcagtcatattccaagactacacaatagtatcttctcttagttaaataaatgacacaatgatggcttttaaatcccatttcattaagttcctattccattgatagtcaattctatacttaattttcatgaagtcttttttaggaaatttttcatattagtcataatggttaagattacaagacaatgcccatatttaaattactttgagagactttaaaatttttaggtgggattttttttttcacttttgccttgtaccttatatttttttcaggatcaactaatctcattccaaaatcct

SEQ ID NO: 77523 - DNA, 969 bp, Carica papaya
  Intron number 3 from transcript evm.model.supercontig_892. 1 (locus evm.TU.supercontig_892.1) derived from phytozome v7.0 (chr-ID supercontig_892; pos 1177 to 2145)
atttgaaggaacgtgctaactcacttctcgaggtaggaaatcgtttgtgcattctaatacctttatgaacggacgtggtgctttctgtgcaatttggttcattttacctttgttgattccttgtagttttccttccatatggtgttatcaaatttctattgcgttaattgctttactgcaatgcaaaatttggcaggaaactcttgccgtttcatttttcactcatatgttacttaacactgactttaatatttgtgacttttacttgccgctggaagtttggagttttgggatgatggtaggatgctgcattcaattgggtgtttatagtgagcagtggcctggcagttcttcagctaggtattaagccctggctgcctagcccaaaattcatgccaaaagttacctagtctctgtttgaaacagagttaaaatctatgtgcccgacaattcactgctatcccaacctacaaaaatgacactcgttcctgtgtttccacgttcacatattgtttgggtttggggtaggtgttgggcatgtgtatatcctgtaacagtctgtagtcctcgaaataagcagtgagggagatttatctagtaatttttttgtgtttccataaacctgataggaacaaaatttatatgtttagcagcaagagacatccatccactcattccttttgtgtttctgtatactggcgtgatgagaattatctctatacttgcatactacagcttattttggtttttttttttttatttattcatgaaaaaatttagggtaatgaccattcctaaacaagtcctttttgtgtctgatagctgattaggaacaacgttacctctacactttatagtgcacctgattctattgttatattttgtaagtgtatgctgttctttattctttgcatgacctgatgatggcctttttcttctaccaggaacttacagctattggtgggagga

SEQ ID NO: 77524 - DNA, 229 bp, Carica papaya
  Intron number 2 from transcript evm.TU.contig_33760.1 (loc us evm.TU.contig_33760) derived from phytozome v7.0 (chr-I D contig_33760; pos 662 to 890 reverse strand)
ttaatttgaaacaatttactgaagttgatcctgaggtgagtctttggaacatttgttcatgtgagggagaattataaggcagttatcctggttcatgtcttctctcttggggatagcatgcaatcaaagtttgttttactttcaaaatttgaaaatgctttttgttaatcattattctttttttttttgtgcagatttttgaagctcaaaataaggtcacagagatcac

SEQ ID NO: 77525 - DNA, 542 bp, Carica papaya
  Intron number 1 from transcript evm.model.supercontig_77.5 3 (locus evm.TU.supercontig_77.53) derived from phytozome v7.0 (chr-ID supercontig_77; pos 546910 to 547451)
gcaacccactcactgcaacattcccaggtatttttgtgtgtgtgtatgtatatatatatatattgatataatatgttagctacttctgttcagtgctaccccttttccttttaaaaattaaataattaattatttatattttagattttacactcagtgttactattttaaataattattgatttgattgttttttaaatggaaattttaatcttacataatttatgcatgatttacctaaatgatgcatttggaagtagtagatagaaagtaacattccgcatatacacgtatttatgaactttagtcagtagctcctgctaatctttgaagataagaataaattaatttcattctttaatatgatttttaaagtttttaaatataataattacttggttttagttcttcttattgccccaaaatatgtttactaaaactaaattttagtaaacatatttcagatgctaatttaataattttgaaaataaaattatacggttctagattcaacggtaaggatttcttggagagaaacagag

SEQ ID NO: 77526 - DNA, 514 bp, Carica papaya
  Intron number 2 from transcript evm.model.supercontig_771. 1 (locus evm.TU.supercontig_771.1) derived from phytozome v7.0 (chr-ID supercontig_771; pos 3652 to 4165)
ttgtcactggtatgattttccttcttttactttcagaaattgacatttattttctttttggtttttgtttttccctgtagattaatgaaggtatcataagttggtggttgtggtacacaaattttttgtcactttcagcatattgattaatgttgggaacatgttcttggctccagggtcccactggttcataggacaaaatttcactcccaaaaatcatatgtatgcgcacactcacataattaatcatatgcaatattattataatatacatatatatatatgcttgagctggaccataatccatacccacttcaccttcttacaaaattcccatttgattattacgaaaccttattacaagtgtacatattggtgggctttggaagcagatgtgaattttgtaattaataattaaagcaagttgcatgcatgcagtgagttagctagggttaaccttcttttgggtatatacgcaggaaaaggagagctcctgacctgctctgccaacaaa

SEQ ID NO: 77527 - DNA, 527 bp, Carica papaya
  Intron number 2 from transcript evm.model.supercontig_96.1 2 (locus evm.TU.supercontig_96.12) derived from phytozome v7.0 (chr-ID supercontig_96; pos 245076 to 245602)
tcaacaggttactatagaatcccctattttgcttttttggtaaacaaaagagttttttttttctgttttttgtacttagcttaattatttgttggaagagaaaaaaacacaggatgtgctatttgaatcattgagccgttttgcataataattcttgaattgttcttggaatgtaagagaaagggctaccttgtaccttagtattttcccatgattaaatcagaaaacgtgtttttggttcatttggcatgtggattcagtacctattttcactattattattttttgtctgtttgggtgtggtagtgattcaagcagattttctgatgtggcgtttttacctttatgtaacttatgagctctttcctagccattgttattagttatcaatatactttatgatctccttccttaattagcggttctccttcaattttctggctttattttgtggaggtttttatgttactacattacttgaaattcgaagattacttctctgattatattctctttttcagtttgag

SEQ ID NO: 77528 - DNA, 1001 bp, Carica papaya
  Intron number 1 from transcript evm.model.supercontig_97.2 3 (locus evm.TU.supercontig_97.23) derived from phytozome v7.0 (chr-ID supercontig_97; pos 170560 to 171560)
ttgaaaagtttactgttgctgaacttatcaccaaggtacaggctcaggagtagagggtttcaatcacaaatgatgagatcactgaaaatacttttcaagtaaggcagaggtacaagtttgggacctcaatttcaaaaaatgaaggtcaatcatcaacaaacaaataaagggaagtagccatcgatttcaaaagattcatcataaaaagaaaaatatcttccttgtggaagttgtggtaaatccaatcatcttgaaagtaagtggtagaagcatgtacaatgtaaaatttgcaaaaaatatggtcattcggagaaggtatcttggaagagaaaaaattaagtatcacagtaaaagaatgggtctcaacaacagcaacatccactttagtaacaggaagtctattttgctaagaaccatgaacatcaggaaagtcatcttttcatgatgactagggcatcttgtgtgaggggaagtgatttctggtatgtggatagtgggtgcacaaggcatatggccaaggattgtatgttgttcaacaacttggatgttaattgcaaaactaaagtgaaacttgacaatggacagttgtggaagctcaaagaaaaggctcaataccagttcaaactaagcgaggtattaaactcataattgatgtgctctttattcctgttttagaacaaaatttgttgagtattactcaaatgcaaaacaagagttattctattttgttcaaaaatgatcaccgctttatttatgatcttacaaatttgctagtagcaaaaatcaagaaaaatgaaattagttatgtgtttggtctaaaatatgcaaatcaatatgtttttgttgctaaagatcatttgacctgcttgtggcataaaaaatttagtcatgacgatgttgactttttgaagtttatgcaaaagagtagggatgtgcttgttgataaatcaatatttcggaatttggataagaaccaagttgaagaaagaagctcatagaag

SEQ ID NO: 77529 - DNA, 546 bp, Carica papaya
  Intron number 2 from transcript evm.model.supercontig_87.5 6 (locus evm.TU.supercontig_87.56) derived from phytozome v7.0 (chr-ID supercontig_87; pos 324345 to 324890 reverse strand)
cctacacttggagcggcaaggtaaattaattctctgtaactttacagttggatttttgttagtgctgaatactaacaaatctaacaatctgagagatagatggaacatccgtattcgatgccttttgaggatcaccatatgttgtttgattaatcagaatgttaactacccgatttgaagctttgatgtgaacatggttactgatgcgaggttggtaaaggtacttcaatggtctcatggtggtttatggggtcaatggtggtgtgatcagattgttcttgatcaccttgattggcagtgatgtggtatagatgttgaggcttgaggtgatacgatgacggtggtggttgcaatgtgatggtggacgatgaagatgaggatagcgtattagaactattttatgtgaaaattcattgttttcagtttttagcatgagcaaggattttttattcctagacatgctttactcctgagttttctgttttctatgccagtcctttattcttcatgctgatgttccttgcaggatcctgaaggtctcttccc

SEQ ID NO: 77530 - DNA, 394 bp, Carica papaya
  Intron number 1 from transcript evm.TU.contig_30608.1 (loc us evm.TU.contig_30608) derived from phytozome v7.0 (chr-I D contig_30608; pos 4354 to 4747 reverse strand)
caacttctgcagcactgttcttgcggtaactctactctttgtttggctagcttacctatatttatataaactcaaaaaacttgttcattagtcaaagcgctgaaagaaaagaatgataatttgtctctggtcttttgctataaataaccagatctttttcattacatctgcaaagaaagtaagcatatgtttacagagacaatatagtagtactggtgggttcttacctataagactggtgaaaacttcatatctatacatacttctaactattatctgatgatttaactatgaaagatcaaagatacacatacatatatatacatctaggcgtatgttttgtttaacatatatattaattaatgtgtttgtttgtgttgtaggttgggattcc

SEQ ID NO: 77531 - DNA, 655 bp, Carica papaya
  Intron number 2 from transcript evm.model.supercontig_7.17 (locus evm.TU.supercontig_7.17) derived from phytozome v7 .0 (chr-ID supercontig_7; pos 266135 to 266789 reverse str and)
tttattaaggtttttctctttggcttatttaaacaattttggcttcacttaaaagcaacttataagcaccctattcaattttacttgcgtgattatccattggctagtctacttattgtgtgcttataagcagtaaaataataaacgcatctctcccaaccttttgtatactgatctaaagaatttatcttcttaacatgtttaatgcttactgtttatccttttccaggaagtcctagatgatatcttatcctcatttttgtattctttctttctctattctttaataatattttttcttttatctaaaaaaaacatctctaatgtttacgtttcttgcaccgtcattcatatatgcagcagaaatactaccatatacttattatttttacggtctactttgatcatatacatccatttattttctaaatcagcacctagatgttcttggttattttatgtacgtagtgtttcacgtacatttctttcacaaccccaattatccatttttgttttttaaaatcagcattcagatgttaaagaattacttagaaatactgctttaagtacatttcttgaggaattcttaacaccttcttctagttacctttttcacttttctaaaagagattttggatgaaaaatgttgtgcagg

SEQ ID NO: 77532 - DNA, 975 bp, Carica papaya
  Intron number 3 from transcript evm.model.supercontig_76.5 9 (locus evm.TU.supercontig_76.59) derived from phytozome v7.0 (chr-ID supercontig_76; pos 1156342 to 1157316)
caagaccaccagaaggcgtagtcgtccctgagacggtaagcatttgtttggtatgaaatttgttttatttggtttgatttgaagaatattcaaaccaaactgaaaatttcagtttataagttttagaagccaaactgaatctaaatagtgtaaaacaaaccgaaacaaattactgtgatttggttggtttggttcagtttgggtttggcccttaattttcttgaatttcctgaatatattataggaccatttacacctcatttgctacacaatactttttaattttcattttctgaattgatatatatttattcaattcttattcatgaaaatatgtggacggtgtgtttttcgagctattaagtaccaaaaaaaacattaaagcatttagaattttgaagtcaaccctcattttcattatcattttatttcttccttgattactacatgtttttatgtgcattatatatgtaagttttaaaaataaaactaaaagatatttttgtatgttattttttcattaaataaatcagttttattaaatacaaaaagatattataattacttatcaaattttacaggttttcttttttgtgttaaaaaatgttagtttgtacataagttgtaaccaaaccaaaaccgaactatttttctattcaaccaaactcaactggaccaaattaggggttctattcttcatttatttatttttggtttggttagcccctatttccctaagcatttgatatcttgctcccaactcactggagaaagctacaaactcttttttctttattgattgcaattggtgatgggtttatgggaattggattaaatggggatgagttgaagttaagaatttacgggagcttatctgtcgttatcgttaaaaagagcaaaaacaatatatgtgcttgctttgagacaatgctttattctgtcagtctatcacaaaggaggaccattcacatctga

SEQ ID NO: 77533 - DNA, 924 bp, Carica papaya
  Intron number 2 from transcript evm.model.supercontig_67.8 3 (locus evm.TU.supercontig_67.83) derived from phytozome v7.0 (chr-ID supercontig_67; pos 1283605 to 1284528 revers e strand)
gtggtgagaatgaattttgtcctattgtactattttggggtttgagaaaaactccgaaattaataactttaaaattacagtttagttctgatatcatgtagattttaaaaaaaaatattaattttattttctcatactctttgtaatattacaagtgggggtatatatatagaatttctaattacgaataaggaaatttacattattgtagagattttaattaattgtactaattaattacatcattataggaaaagattacaagtgaatagtattctcaatagaaatttagaagaaattagaaaggaaatctaacagtagagtaattaatacaatccctaattaacttggaaatttaaatcagtataatctaggaaataaaatcatcactatattaatatataataataacctatttaggaattaaaatctacaacaaacatcaatacttcgaattataaataataataataataataataataataatattccaattattcttctccaaaccagggtcttgtacatataaattcgtatatttatgtatatttgtaagtttgcatgtatgtttatctctttgatatcacactattgatctattatgttataaactccctttcttttgacttagcatccttgtgagaggatgaagacaagatcaaaaagccatcctctaccaccaaacacttacaccaacctgtcaacttaataaatttcactaatccaacatgataaaaatggtttattccacaaacaaccacaagatatcattgcaacatgtaggatatcattatggttttttcgtgtctttatcatgcaatcttatctatgtttgaatcttttatattatggattctagttgttttgatcattcctttcggttcaggctctcggagacctggtggaaagtattgcaggggc

SEQ ID NO: 77534 - DNA, 406 bp, Carica papaya
  Intron number 1 from transcript evm.model.supercontig_877. 1 (locus evm.TU.supercontig_877.1) derived from phytozome v7.0 (chr-ID supercontig_877; pos 1700 to 2105)
aacagccaggtcggttttctcctatctttcttgcttccaccaaccattcttttcttcttcactagttgcaacagttttatgcatttgctttgagtttgtttaaggaaatgattttttaaaagtacgctttactgttcttctaagtgagaaataaaaatactcggtgagtctctggtcttcgaaggaaataattttgtttttctgctttcttttgctccttattcacttctggtagatgatgctgatgaatgttttgacctcttaggatttcacaactgttgctatgctgtgtgctacaagttgtctgttcagaaaattcagtattgtgatcaattctttatcattaactttcatgttaatagcattaactaacgttctgcaggttcttttatacttgacggagtag

SEQ ID NO: 77535 - DNA, 886 bp, Carica papaya
  Intron number 2 from transcript evm.TU.contig_36952.1 (loc us evm.TU.contig_36952) derived from phytozome v7.0 (chr-I D contig_36952; pos 959 to 1844 reverse strand)
cccctttgagcaaggtactgatctatgcattattttagctgataacgaattataatagcggagcttactttgaggatgcttaggcactctttaatagtagaaattattttgatgttattttccaaatatatatatatttgatacacatgggtatttgttgaaaatgaaaacaatgttcagaaaatagtaggaaaattctgaaatgaattggaaaaagcctttttcttcttttcaagctaataccaaatattaccattattttccaaattttatttttcatttttgaacagctatttatatttttatcaataaacatatacaacttcagaaattcaatttcagagtagctttctatgaactgggttttggatatgatatgtgaaaataaacagacaacaggtgagtccagcactaatccaaactaatccctacagatcagagttggaaatggcaagacaaaggttacataaaattggtttcttttttatttttttatatagataaacaacccagttcacactaaggtaagattttaaattatttcattttacttagggtatatatttaaacaattattaatgtggttaataatagtttaaataaattaaataagctaagaagtgattgatcattgattatcgataagataagaaagaggggccttttttgctgtgttatgggttttatagttgtataattcttatcctttctgatgagatttcttcttttatataaacacgaattcaagctgtatgtcttggtaagcaaataatttcaaattataagaattttccagttctaacttgtatagttacaaaatcccatcacaattaaatgggtgatgttcatgattgcagtgactcaaatcttggtagttttcacaaaa

SEQ ID NO: 77536 - DNA, 482 bp, Carica papaya
  Intron number 3 from transcript evm.model.supercontig_688. 1 (locus evm.TU.supercontig_688.1) derived from phytozome v7.0 (chr-ID supercontig_688; pos 3999 to 4480 reverse str and)
tttgggctgttagggttaaactgggttatggctgctaatgtgagtaatgagttgtgggtgtgggtgggcttttgtaaaaaaaaatatcatttgttctttattccacttaattttgggtggtgtggaaggaaaggaatacgagagtttttgagagtatagaaactaactttacaaaaattagagatagatagattcatacttttgcctcttttattgggtcatgacatcaaagatatgtttgactttggtgttgtcataaactacttgattgacatgtaatcttatattcgggtggtatcttcttggtaccttgtgcataataatattttctttttatttcgaaaaaatgagaaagacctatactagagatgatatatatgaaaaattttctgaattataaaattataaatcctaattctatttattctcactttgtgaatcatgcagtccctacaaaaagatcatctcattacatcaaagga

SEQ ID NO: 77537 - DNA, 897 bp, Carica papaya
  Intron number 1 from transcript evm.model.supercontig_85.1 19 (locus evm.TU.supercontig_85.119) derived from phytozom e v7.0 (chr-ID supercontig_85; pos 759038 to 759934)
tcaacttagctctgcttgcttccaccttttaccaggtgcttcactttctatttccaatttaagcaataagaaacagtatatatattattaaatgcatgtttggttccagggaaaaatcaaagtaagaaaaggtttaatgatttcgcttttcctgtttttcaagaaatttctgttggaaattcctcgggttgtagagacgtgaaaatatgcattgggatttaactttctattttaggttaggtgttattaagtgattttctctccgcactgtggagtgaagtatgtactgatctcctgtatgtctggaagtctaaaccctaatcctacagctttatccatttggctagtgagaccgaggaaaataaaggaagatggagaattttttaaaattgttttcccagtttattcacgcatttctagcgaagattaagagttttgctttgctctagaataatacgataaatcagtacatttaatctcttaatagcttcttttggttttcttcattttcccggagccaattagcttggggttaatgccactggaatctcacctgtgttgcggttgaatttgatctgtggggtatatgcatatatgtagttattggtatctgtatatcgacaatagctctatcaggggaagaaagccatcaatttgaatggttcctcgtgtattactgtttcttactgaaagcttttttagacacccgtgggagtaaattactctgaaaaggagacaaggcagaatgaagaagagatagaagcaggagtttcatgctttcagtgtcttaattaacaatgcaatcccatttggttaatttcttcttttaaagaaatttctggtactgattatcaagtgaaaatatctaacagtttaatttttttttttatagcttat

SEQ ID NO: 77538 - DNA, 796 bp, Carica papaya
  Intron number 5 from transcript evm.TU.contig_32708.1 (loc us evm.TU.contig_32708) derived from phytozome v7.0 (chr-I D contig_32708; pos 2206 to 3001 reverse strand)
accagcttttgtctaaagccagacaacaacagaaggtatgttcaatacagaaatctaaacattacttaattatttattttttggaaagtatccaaacttcctgcgctttccaactatttgaggaaacaatggcatgatgatataaaaaattcatgaagaaattatgctctatatcacatcagaggatgggtttgttattccttatttgattactgctttggtggtttgcctttcttatcacttgtcgatgcatcctgggtttctagcaatttgttgtcaaatggttggaggacatcatcaaaatattgctttataagtttatatcctatttcacttataattataaagagaaaattcgagcatctaaaaataaatggttgataatatgcaaccttggctatgatcgaccttggttgataatagtacctctctaatctgttgtgcacgttattatgattttttcatctttaagatttatttatgcatggagtagactatcaatgtaacatctttacaaattcagaacactcagcatcacaaagaaaaaaatgacttgggttgcttatctgacactctttatcccttcttggacaacaaatttctactatcgttagcattacttcttcttttgagtatgatgaattttttctctttgcttgagatttatcagcctgagtacttcaagtagaaataggagcacatgtgcagttgattacaaatttcttttggtctttcatactgtttgttgcctgcaatttcagtcggtactatttctttgctcaggtattggcagaac

SEQ ID NO: 77539 - DNA, 357 bp, Carica papaya
  Intron number 2 from transcript evm.model.supercontig_7.12 9 (locus evm.TU.supercontig_7.129) derived from phytozome v7.0 (chr-ID supercontig_7; pos 1242061 to 1242417 reverse strand)
aaaaatatcatcattgagcaaaaagaagaaatcaggtttgactattatatcaatttttaatttatatagtttattaatatatgaaaaattgatttaatgtttaaaaacatacatatcttttaaaaaattaatttcatattcttacaatttcaaattttatttatttgaaaaaatggtacagggaaatgaacaacgagggagctaatactgtggatacgaattcatcaataaataatcctgaaaagcagagagaagaaattgggtttgattaatttatcaaattatttgtttatatagttttttattataacaaaaattaattttattaattgttacaatatttattcaccaggcaaa

SEQ ID NO: 77540 - DNA, 853 bp, Carica papaya
  Intron number 1 from transcript evm.model.supercontig_9.38 2 (locus evm.TU.supercontig_9.382) derived from phytozome v7.0 (chr-ID supercontig_9; pos 2665183 to 2666035 reverse strand)
gggaaaatttcttttctcagcttctggtgagaaaaaattcttgacctttttcttgagcgaaataaagattcttggccttatctgcaaaatataatttgtttgtttaagttttgtttttctcataccaaataactttctcctatgctttcttctttccttttatttccgagtttgtttcttggactattaagtatacttagttgtcttttcgtctgaatttaaaagttggtttctttgttaaatattgatgaacagtattaattagattcaatgaagaatattaatgaagaagttggttttttttgttagaaggccgccattgaaatattgacattgatcagtattgtgttttagattgcaagctagcttaaagtagttattccgtatgacttggttcaaagtgtttgttcacctggttagaaggtcataatgatacttcaaagtgttactctttggttgtgtttgattcaaatatgttctgttcacatttaattcttagatattagctatttgaaatatagagctagtcatactttacgcattcaatacataattgaattaattttcactcatatcttcaattccagaactatagatttgtattttcacctgtcaagaaaagaatcaaggaaacacctatgtttgatataaacaacagcagtttttatgatttaagtactaatgcacatagaccaggcagacttctctcattgctcctttctatccacttgatacagtgggttttttactcgtttcaaaggcattatcgtcaagaggaaagaagtgccaatttatctaattatcaactttcactgtagatttgctggtaggcttgtttatccacatcatcttg

SEQ ID NO: 77541 - DNA, 943 bp, Carica papaya
  Intron number 1 from transcript evm.model.supercontig_78.6 1 (locus evm.TU.supercontig_78.61) derived from phytozome v7.0 (chr-ID supercontig_78; pos 714371 to 715313 reverse strand)
ggtaacgcatattttctgcctcttttgttatggcttatacttctgttccattcgtgcaacttgtctgttctttcaaatgaatttggatctgttttctcattgacatatggtcttgatgctcacttgtctttgttcttccagtttatttctatttttgagaaatttagtaggtccaaatcttggggtttctgagttttttccttttgaatttttatttggatgcaagttgttctttgggtgtgcattttacaacaggttgtgttggttttccgctagtgcaacctatgtgaatgttacatgttgaatatgttgttgaatatggaagtgccagatgcttacaggatatcctcgtcttgggattagttgccttaatccatactaaactttgaaccacatcattctctctcttttgggtgtcttttctatctcgtacttttaacaattatgagcaactttttggattgttcattacggatcctggaagcaagcaccttgtttcttcttgtaagtattttttgttaatttggccggtattgatccaatagttgcttgtatagataaaatgaggctattaccgtccttcgtgttttgctagtgtgttgtgatagcaccagtgttatggatgtctgtgatttttctaaaacagttttgtacttgctagaccattttcgacgtctactttgtataggttcttttactatatgcaacatggtttctattttgaagttagataaattacatagaattgactgtttaacaaatgattttaaacatggttcccatttgtttgtaaatctgataagttacagagaatcgaccatccaactatatcgtatttggttgtgcgatgtgaagaataaggaaatgaattttaccttactgatattgtcttgtaattccacacgcagtaccttcaagaagaaggctcctaaggccatcaagg

SEQ ID NO: 77542 - DNA, 298 bp, Carica papaya
  Intron number 2 from transcript evm.model.supercontig_9.35 7 (locus evm.TU.supercontig_9.357) derived from phytozome v7.0 (chr-ID supercontig_9; pos 2470573 to 2470870)
aatctctctagaactgaacaaggcctgagcaggaggtgaaaagtttgtaacctactgttttttgttaaacttattcttcttcagggtttttaagcttaatattattcttcttccaaaatgttaaatctagtttatctgataaattgtttgtcttcatgcattttcgtttttgtgaaaatgttccctgatgtttactgtcaaaatttcttattaaaaacttcaaaattttgatttaactaactatattgaagcctaattataagggcattttattgtatttcttgttgttcaggttatt

SEQ ID NO: 77543 - DNA, 711 bp, Carica papaya
  Intron number 1 from transcript evm.model.supercontig_78.3 9 (locus evm.TU.supercontig_78.39) derived from phytozome v7.0 (chr-ID supercontig_78; pos 470944 to 471654)
aagttgatcaggtctttgttttgtttgtcgtgatttgtctggtcttttaattttgacgaaaatgatcttattttattttattctctagatgttgggtttgtttatgcttgtttggagcctgaggaagtgaacagaagtaggagggatttatggtgttgagaggaggtaaatttcaatttaggaacttgagacttttggttctgataaatagaaggaattatgctccttctggttactgtgaaatgtggagacttaattcaagaaaaatgagttccaactgttagaattctgtttagcccgaaagttaaatctagtctcatatttagaaaccatcagaggattttgagcttaggaattcaagttattagcatatttttcttcaattttttcttttgctctctggactagttggaaggtgaagtcttgtttggtcaatgggcggagaactctagtaatggaaatgctggtcaaagttcttgatattgctatcttgcccttttgaggcagttatttgattgttttggcgtctaggtttaatggctgatagaaggaactatatgctctgtcaacggagtattagtagtggtatatattcttcattgaggtgatttctcattcctttgatgtttttttctttggtttcatttgcccttttgggtttatgcatggatttcagtatcttctacttggcgcggtcccatttcccaagga

SEQ ID NO: 77544 - DNA, 644 bp, Carica papaya
  Intron number 1 from transcript evm.model.supercontig_89.3 7 (locus evm.TU.supercontig_89.37) derived from phytozome v7.0 (chr-ID supercontig_89; pos 601654 to 602297)
aaccaggtaaccctaattcactcctcgaaatttcctctagtctaaaccgacgaaatccctaggttccatttgatcttctttcgataattcttccgtatttgcttatccatttttgaaaatatgtgtttgataatgtctctttatctgatactatttatttatccacttttgaaatgattttctggtttgaagatttcgaactgatatcagtgttactctcttgtttctactttcgttttcttttactgttttaatgaaaaaataaatgacatcagatacaggagagagactgttggcttcgtttactggttgtcttcttttccaaaaaaagtattagattttttttctttcaatactgtttgcaaaataaataaaattgtattgttcacatatttcaaacaaaggtttagttgtatttgattggcaagagatatcacgattcctaggaatgtaaagatcgtttttgtgcttacttcgccatattgattaatactgcttttgcgatttttcatttcaatatttctttacttaagccttaggttgaatttttcttgttgaagagtgatgtgaatgccagtttaatataacattgtttaatgtttgatgtagttcctttggggcctgggtcttctaccagatacggc

SEQ ID NO: 77545 - DNA, 576 bp, Carica papaya
  Intron number 1 from transcript evm.model.supercontig_62.1 52 (locus evm.TU.supercontig_62.152) derived from phytozom e v7.0 (chr-ID supercontig_62; pos 932151 to 932726)
agagcctacacggtttccgctacatcgaggcccaggtaactcccttcggtagacaaccacagaactacctcaattatatatgtaaatatccactatataaaaatatgtgcattatgtgaacgtgggtaatcctgaacctgttgccggtagcttaagggaaggtttggaataatccaggatggagctaaattgatttttgcattttctttgttttctggtatcttttggttggctccaaaaaaaaatacgaagcaaagttcatttatgtctggttgttgagaaaatccgagaggagtaatagtgttattatcatttctttatgtccttctctggtatgcttaatgcattgcattctctgttattattctgagacaactataaagcttgataatagttcatatctaagcagatttcttttttcaaaaaaatagttaacataaggaagtttcttatctggattatccacttaatttggatatggcggaatttagttgacgtattcaaattgaattgtgggtcattttgctcacttaaatgttgtacaggacattaaaagggaggcgtgggtgcttacag

SEQ ID NO: 77546 - DNA, 856 bp, Carica papaya
  Intron number 2 from transcript evm.model.supercontig_85.1 6 (locus evm.TU.supercontig_85.16) derived from phytozome v7.0 (chr-ID supercontig_85; pos 72716 to 73571)
ttggtaggcttattcctgattcaacctttaatcgtttgattgtgtaaataaatgaaggattataatatttgttctctggtttggggcatttttggttggcttactcggtccataagatgagcagaaatagattatactgggttgaaaaatctgaacttaaaaattgcatattgggagcctagcttggctggcaggctacttaattccatgacatcatttatgtatcatggttttcttcctcctggatggatgggaaattgctgcctaaatgatgggcagttgagggctctgcctcagggggtgggggaagggtggtgttgactgtttttattgatgttgttggaattgctttggttactaccctatccttcttgctgatgttgctgtgtttctggtggatcgggcttgcaaaaaaagtaatgtattgtcaatgcaaaacaaataaattatttctagatcttgggaggtcttgggattagggcaattggtgaatttaaaaaaaaaatatttctagagaagtgactatggggattcctgaaaaatgaaacgatctctgcacaagagtgataaaaagcaaaatttggtacagaatgtaggatttgtgtttagaagaactagatactcagatggggtggaagaaaataatcaagggcagggaagatttttaggagtatataagttgggtcaggccaaagtgtttgttttttttgggaacacttataatatgcatcaggatgttaatgaagagaacagttactttcttcttctttttcccccttttttgggtgcttatgtgtgaatagcattataatcttttgtagattataagaaggagctgaagtcgcttaatagggaa

SEQ ID NO: 77547 - DNA, 763 bp, Carica papaya
  Intron number 1 from transcript evm.model.supercontig_75.1 1 (locus evm.TU.supercontig_75.11) derived from phytozome v7.0 (chr-ID supercontig_75; pos 159923 to 160685 reverse strand)
ggtattggagtagtagaggattaatgttgtatgaaaggatgaatgtttgttaagaggccaggattcttatcagcagttgacagtgttgtggttggccgagcaatcttattattttagaattgaccatttcatgtcatcagggtaaattgtataaattaatctggttagaaaactcagcctcaagaacagtcgtgcctgagtaacaatcctgtaaggtttcaccagatgatgagtttctctgtaaataacattcaacaatttggtgaatgcttatgaaagacgcagcgcgcaaatcttggatctcctgtttggttttttcctacaaatctaaatgggtgacaccaaaacttgtttttcagacttcagaaacttatttcttggtgattttatttctaaaaatcccgaccaaatagcttctcttcccatttttgttttcttttgatcatggcgataactacaactgattattatatgggtctaagcgttgaagaggaggagagtaatcattaggtgcttgggagttaaataagttcacagattttataaatttttttaatctatttattttaattttttaaaaaatatataaaatctcaattgttaatacataattgaatagaaagtaaagaatctagacccagatctaaatatcctgtttgttagttataaaaaaaattaattaaattttcttaacagtaattaattaacccagtttgtgattactatttatctatagcataaacacacttggtagaaaaacacc

SEQ ID NO: 77548 - DNA, 565 bp, Carica papaya
  Intron number 1 from transcript evm.model.supercontig_63.4 4 (locus evm.TU.supercontig_63.44) derived from phytozome v7.0 (chr-ID supercontig_63; pos 1184790 to 1185354 revers e strand)
ggtgtttcgtttgaaggtatggaacatttgactttcttatttttctctgaaattgaaaaaagaaaaattttaaagaaaaaatcgggtgtgaatatcagagaaaggaagaagcagaatgggggtgtttcgagggagttaaatagacttgagtccacaattaactatgagaacaagagcaaaggagggaagatcgagggtggggtgaagatgattgaccaatgataggaaaaataatttcttggaatgtccgtggtgtaaatgaaaggggcaaaagattaattattcggggatgtcgtaataaatggagccctactgtgatctgtctacaagaaacgaaaatggaagattagtgagattattaaaagcatttggggtatcaaggataggggtggcaggccaatgggatggttggtgggctgattattatgtggagggaggatcatgttcagtgcatggatgttgataaagagagagtgtactttgtcttgtacatttaaaaacagaaaaggagattttacctggatgttcactggtgtgtattgcaggggcaatagaattgaaaaag

SEQ ID NO: 77549 - DNA, 739 bp, Carica papaya
  Intron number 1 from transcript evm.TU.contig_30412.1 (loc us evm.TU.contig_30412.1) derived from phytozome v7.0 (chr -ID contig_30412; pos 1986 to 2724)
ttcttcactgtcaaaaattcattgaattggttcgggtatgtatcttttagcctatttaattttttagatcttgatttttttgcggcactgggaatgcggaagaaaagtccagctacttgttaaaacatgattattttattttacattttgaagttttcttctgaaaatatttttgaagcttttctggtagaaaatatttttttaaagtttgggctggatattacatgtcaatactatttatttggttattaccttcttagtgaatgctccagtaaagctggaagaacttttgacatgtatcatgtactttgataaactaaccttgaagttaattttgctttagatattaattttatggtataggggtatgaagccaatgcaaataggataaaaatttgaagaaaaatagcattcaagttccaaactaattccatttcgattgaaattaaatgtttttatgattttttcgtttataagtggaaatgcaagtttttcattgcacaattgaagataataagtgagttggtctaataatgtattagttatgataaaatatgattaaattttacatatcaaataattaagatacaggaattgaatttgaatataatagactggtagtctaatggaaaagtatcggcctgttttgcaaaaagaagagaacacatctttcatgcttgtttatgtttcagaaacatgcctgatctgtaggttggagcgctagaggaagctgtgaagt

SEQ ID NO: 77550 - DNA, 384 bp, Carica papaya
  Intron number 2 from transcript evm.model.supercontig_9.22 2 (locus evm.TU.supercontig_9.222) derived from phytozome v7.0 (chr-ID supercontig_9; pos 1464182 to 1464565 reverse strand)
ccatccgaacttgggatacccgaacatttcaacaggtaaaaatttatttggtgtttgctgtaagctattatgatcttttggttcttgagtttctcgttttgttcatttgaatttgagagtgaaactacttggttccttttggtaaaaacaattctattctcgttcaattactacctcttaattactttacatatggaaggaattcatagctcacatagttgatagataattgaatccaatcctacagtaaattattttctcctatctttgaagaaaaaaacttggattggaaaaaagttctgtttgtattcattttggtttggtttttgttttgtaatggatactgcaggtgtcttgtatagctgctggccctaatcaagagat

SEQ ID NO: 77551 - DNA, 715 bp, Carica papaya
  Intron number 1 from transcript evm.model.supercontig_818. 2 (locus evm.TU.supercontig_818.2) derived from phytozome v7.0 (chr-ID supercontig_818; pos 15796 to 16510 reverse s trand)
tggtatgaacattcttaacggctcttccttctatgtaaataatggtctttgtggaggaacgtttttaggtggtttaaagcccaaatcttcatcataacatgtaggactggtcttttgctgcagtttgaactgatgtggatttcagtgtgagtcagcttggttgcacacgcatttatagatatgattaagcgtcagattaatgatagaaatgatgctgggagttggattcagttgatagttggcggacggtttttagggagagtggtgttctgcattttagatgtaaatgtactgtatgttatgtaatttaatgaagttagtgttcgttgctcttgtcgccgttttcaaattggagccaaacaaaaggaagaatatttcccgataagaagaatgagatttatagttacttattggtacatctttagaccaaaataagaactggtttcctgtaagtcttgactaaggaattcaagagaatcatttgtttatttgatcattccataaatcaagcatctttatgtttgtcttttctgttagcatgctgaggtatactgcaacattttgatatgcttagctggaattggttatcttagacaactcgacgattgcaagatatattagtcttgattctatcatttgaagaaagtaaaattttttttgtggcctacaaaaatttatagagaagcccagtggaggggcaactgaagtgcaaaag

SEQ ID NO: 77552 - DNA, 943 bp, Carica papaya
  Intron number 2 from transcript evm.model.supercontig_69.4 6 (locus evm.TU.supercontig_69.46) derived from phytozome v7.0 (chr-ID supercontig_69; pos 568559 to 569501)
tggagttcttggtgcttttcttgtgagattcatacttttttttgtttcttcgttcaagaaaaagatgactatatttgctcttgaatgaaattcattatttgctttacaagtggttctctgtatttgttttgcctatctatggattctttactatggtttgtcaacgtattgggatgccctatttctgcttcagctaagcttcattatactttatgtcgttgtttcccattcttgtttccggttgaagaaaactcttctcaatagcaatgcctgttagacacttattctttcaatgaaaatgcaacatttcaatctaactatcttttaacctccttttcaagctttctttttgttaagaacaaattctgaattttcctagttagaaattgtaagataaaagttttccattgtgaaaaagttaagttagctatctctcgacgtattccagagtttccatacgcagtctcaaagtcaaatatataatgatttctgtaaaatttatcatatttctggttcaacaaagatgtgatgcatatagttagtgctgtttaatacaatatgaagacttggtcgtttagaatgtgtcatccatagattacctcgctggatgatgccacgtattgtataacatcctcaatgatgtttttgttcaattgattttattatttgagtttcatttattaccaatgtaacaaaagatcctagttatatgcctccatttatcgtgtcaggctgtgctatgattacatttctgtcttctgcttcttgtcctgttgtggtatttggatgtttgcttctatccttctttactcacttttctctcttttttaaattaatcaggaagaagagtttatttaccttttatactttttatgtatgttttttcctcgctcattccatctaaccaggaggaggagaccttatacgcaaccactcttataat

SEQ ID NO: 77553 - DNA, 443 bp, Carica papaya
  Intron number 1 from transcript evm.model.supercontig_75.7 8 (locus evm.TU.supercontig_75.78) derived from phytozome v7.0 (chr-ID supercontig_75; pos 755842 to 756284)
gtatgtgagaaacttattcttgatgacaaaatacaccagtaaaagccatgtgatttcatgcagtaaatcactaaaatgctaataatctcaaagagcattgatattttgacttgaaaggaagatttaatcaaaaggtggtgatttgctgatgttctttaaatgcatgtaagaatggatacagaagttaacttttgattagattttccatttccttggtgggcttgaaactttttccctgacattagaaaacaagttaaattttcttgaatattttcttaggatttggtttataatgagatgtgattctagggaaacttgttctgtcgaccattataagatgtgattggaggctgggatttacctgtttacttctgtcatttgctttatgatttttttaataacctgcagttcccagtgggtaggattcaccgtctacttaagtc

SEQ ID NO: 77554 - DNA, 607 bp, Carica papaya
  Intron number 1 from transcript evm.TU.contig_28586.3 (loc us evm.TU.contig_28586.3) derived from phytozome v7.0 (chr -ID contig_28586; pos 12929 to 13535 reverse strand)
actaagagaagctcaagatttcgtggcgtaagcaggtttgatatgagtttgcttcaagtttgttcaatattccctcatatgtatgtacattttttatgtagcagctgtgtttgtgttcaactcgtaatagttcatgtatgtttcattttattatttagctggtatctattacactactaataatacaacatcttgattaatgtacgtatagaacaactttttaatgagaataaataagatatacaacccatgactcaaactcacatccctgttgaaagaggtaggaatagccattttccgagtcaagaaatgattgatagggatagagtctttttacttgcattctaatgattattcattaacggcttgccccaagtttaatagttattctccaaacttattatttctctgagtgagaatccctatagccacggcttagaagattggctatgctgatggccacttaaacctttatttttggtttatatgtgtttgtgtgtatatgtgtatgtatcatggacttcatttgtagtagtgagttttgcatgattgagaagttgaagctggtcagtttatgtgattgcctaatattgtatatcagacatag

SEQ ID NO: 77555 - DNA, 758 bp, Carica papaya
  Intron number 2 from transcript evm.model.supercontig_80.1 14 (locus evm.TU.supercontig_80.114) derived from phytozom e v7.0 (chr-ID supercontig_80; pos 927137 to 927894 revers e strand)
ctgcggcaggtaatgtttgtttggcatctactgctctatttccttttccgttttgctttttacaaaatgtaatgattggatattaccatatttcgcatgttgtgaatggatgatttagtaacgtacagtctacttcctgtattgttgatggaaattgttcggtaaagcatgatgtttgtgtaacacccaagtatttttttaattttattcttattatttttatttttctttttttgtatttgaattttttagatttttatttaatttaatttaataaaaataaaaataataataatgataaaattgggtaaaaatattatttggatttaattaaaattaattttgagaaaaatgggtgaaaatttggatcctgagagtgtttttgaaaagaaaatcgaaaaccggaagtaaaaatgtaattttgaaaaattgtgccacgtcaacagcccagtcagtaaattccttatctacaaggatgtgagcttccataatactgtgtatttgcaatgttataggatcaatttggcaagagccaagatctgctagactgttggaaactatatctaggtttgattgaatttgtatattttgattttcttcttttcatggttttggatctgttcacgttaacatttttcttctttttacagtttcaatggtctgtaggttgtgaatattttgttgactttttgtaaccatgaaaatcttttcaatcttttccagtggctaatttggctgcaattgactcagcaaaggct

SEQ ID NO: 77556 - DNA, 330 bp, Carica papaya
  Intron number 2 from transcript evm.TU.contig_45061.1 (loc us evm.TU.contig_45061) derived from phytozome v7.0 (chr-I D contig_45061; pos 406 to 735)
gcgaagcatgtaaggatcttcttctctaatttcatctttgagtggtttttttctctaaagagatgcgacatgtcaaatttatgtattgatagttccaaaaaagggaaacactgatatgtcattgtaatctagcagtctacctaggtattcttgtttggtttacaatggaaaagaagaaagggaagatgtctgaaaagaaaattgttatgctagtgacattaaagtcctatttggacattttgtgcctattaataataacctgcattctaaagtatactctttccaaaaacatcagattactggcccgtcctgtctgttatcattcaaggg

SEQ ID NO: 77557 - DNA, 842 bp, Carica papaya
  Intron number 2 from transcript evm.model.supercontig_66.2 5 (locus evm.TU.supercontig_66.25) derived from phytozome v7.0 (chr-ID supercontig_66; pos 280537 to 281378 reverse strand)
ctgaggcagctaaaacttggatatatccaggttatttttcattttttttattatcattgagaatatgttgagagaatggactaataattaatgaagttgctgaatttgcaaatattgttattatatatttcactatggattttatttataaatcaccgttacggctggtttatttttttaattaattattagtcaattactggttttaattattatattagtcttgatacagataattacagtttgtgtttaagttatcccacttgcaatgaattatttggggaatggacttgtgtaagttatcccacttatcttgattgttgtcttgaaatctctgggatgaaaatttccccagttacttgaaattcgagtttgagtgggataatcatgtttctgttatctacaatgccaatacaactgggtgttttatttatctttttgctatgttgcatatgagaatgcagaatagataatgacagcttagtcatttccatattcaaacattattttttgataaaaatcttctgaaattgttgttctgctcctcaaataattaaggtttttgggagtttccttgaacatctcttcagaatggagatcctctgtatttgcccttatggatcttaatttataatgttggttagaggaactcccaaaaggatattgttaagcatagacgattttaatcctcttcaaactttgaagtttcagaggaacaacctttgtctgtaatatttgcttcgtatggctttaataatgatgttaaagcagtatgcttattttttctcttttgacatcttcaagcagttaatattcctctccgtgactatcaattcgctata

SEQ ID NO: 77558 - DNA, 902 bp, Carica papaya
  Intron number 2 from transcript evm.model.supercontig_71.6 (locus evm.TU.supercontig_71.6) derived from phytozome v7 .0 (chr-ID supercontig_71; pos 40062 to 40963 reverse stra nd)
caacttgtcctgaagaagcactgctcttgcagcaggtactcaactatttcatttttttatccgctgcatcttgtttattgatagttgtttcattcatgaaaaagtgcgtttgttgctgaataatcatggttacttgatcttacgttctcatagtaaaattctgtcagaagtgaagttctttgctcactctctcttttttttatagtaataatctttaaaagtccttattaacttgagtcctatctctcttagacaagagatctggtcatgcctcatgggatacatccccgttaagagtctttgctgtttcagaataaaaaaaaatattctcactgggaatcagttaatagagcatctcaattatcaaatatgaataccaatagaaatagtaatcttgtatttatacactaatatatgtagggttgcaaatataatgatttagaactaaaccgcgggaatcaacttgttaggaattgccaacaacactttgtgtggtaatttatttattcttttgttttttttttcctttcatggtggtggtcaatcctggaaaggcacgcttctgctagtgaatggaaaacctcattgattgcaactatgaggatttggaatatcaaaatccaaatctctgttctgtcgtgggaaaatgtcttttacagagattaacatttgtgcatttctgatcttggaacattacattaatactcgtctatatttgttgctccatctacacaaaagataagtaacgattgtgtattttgctgttcttggaactcaaatattcattggtccctctattctgcatttctctttgttaaaagactcattttgttgtcaatccatacattgatactcattattttgcaggatattcttgaggccaagggatttctgaagcagag

SEQ ID NO: 77559 - DNA, 274 bp, Carica papaya
  Intron number 2 from transcript evm.model.supercontig_65.1 18 (locus evm.TU.supercontig_65.118) derived from phytozom e v7.0 (chr-ID supercontig_65; pos 1098161 to 1098434 reve rse strand)
aatacataaacaatctcctattcaagttaggcttggtaaggtggctgcaatttctctgcattgtttagattgtgttttcttctgtttgtatcatttaagtcttgttcttatacgatatttgttaatgtttgagagaaagaagttgagcaataatcacttcactccttgttttatgtttaattacttcagctatatagacttatagttggactttgattcatgctttctcctgggttttccttttttcttcaaaaggtcagttgtgctgattcaa

SEQ ID NO: 77560 - DNA, 593 bp, Carica papaya
  Intron number 1 from transcript evm.model.supercontig_8.89 (locus evm.TU.supercontig_8.89) derived from phytozome v7 .0 (chr-ID supercontig_8; pos 582239 to 582831 reverse str and)
ctggtggaggagattctaggcttaagaagaaaaatgtgagtaacaaaaaaaaattccagtatttttcggttttctgaaagaatttattaaaaaaaaaaacagttttcaaaattttctatttcaatttccttgtcgggtcttcttctttcttaatctttgggtaggtgatttaccgttcaaaaattttatagaaaacgatttttccctttttttgggggtggtttgatgataactttacgtgtttgggaactaaccagaactcaaaactcagaagaatgtattttcgaagttgtttttattaagttttccacttcattttcagcgcagtttgactttggaatgtaatttttcaagtggaaatttcttttacgcctgatctgacactgggagagattagatcgaagagaaagcgaaatgggtagtttatgcgtgatgtggagtttatgtttcttcctttcctttaatatctgaaaattggcgaagacagattgagaattatgtgtaatctgtgataggattttgacggtgtgaatctgattcttttttttttttttttcacgtttaccaaaaatggcagattcacgggatactaa

SEQ ID NO: 77561 - DNA, 785 bp, Carica papaya
  Intron number 1 from transcript evm.model.supercontig_99.7 (locus evm.TU.supercontig_99.7) derived from phytozome v7 .0 (chr-ID supercontig_99; pos 106353 to 107137)
ggtggactgctggttattttagggtttttatgtgtgcaatttttttgagactgtttgggttttaagttttgagattttagggtataagattctttagctttggtaataactgatgtcggataaattagggttgacttaacttcttagccctttgaggatagaaatctagatattacatataggattcttaagtatcacgcttaaaatttgataattatataattaaatattgaaaaattcttgaagtatgttattgaataactaaataatgatttcaaggagattaaaaaaggatttagaatggcaagattaaaaaaagatttagaatggcaagttaagtattttccaaggaagatttgactaagaaatacaaaaactaataaaattagaattatctcaaaaaaaatatctcaaaaaagtaataaaattagaaatgttattcctaatagagatagaaaataaaacataaatgacctgaaaagtatcaaaataacctatagtaaataactactatatctacaagctatcagcatatctagtatgccaatatatttgtgatgctgtgtgtaagattgaagtggacttgtttatatgcagtgaggaagaatttgagagcttctgggaaagagttcaacaagagttgaattaactattcataacatgaaacttttcatttcctttggcatgtctgagtaatctgatatttaataatgctgtgtctaagattgaattgagcgtgtgtatatgcagtgagagagaatttaagagcgtcaaagaaggagttc

SEQ ID NO: 77562 - DNA, 480 bp, Carica papaya
  Intron number 2 from transcript evm.model.supercontig_99.7 (locus evm.TU.supercontig_99.7) derived from phytozome v7 .0 (chr-ID supercontig_99; pos 107217 to 107696)
aaagatgtaatttaaccatccttttctctcttatttttggtttctatctgtttatgatttctagcagttgagtctttttgttatatgggtgttcctccacgtatttcatctattttattctgcagactaattctatggtatatgcccaatattgtatagttctagatcacacttgaatgattatgttgttcaatatatttctctgcatcctgattttccttttgaattttttttttttggtttcaataagttcaaatatgtatttttagtatttctctagaccatgttttatatgttatgatttgtagaagtttctaattgacactactcatcttaaactatagttgtcccattttcttttctatttcatcctctcaattgtgctgttctttctttcctccaagagccttttggtaacagtataatggacttgtctatataatgttccagtaattgtcaaggcaagcagtggtcctcgtt

SEQ ID NO: 77563 - DNA, 479 bp, Carica papaya
  Intron number 2 from transcript evm.model.supercontig_85.7 3 (locus evm.TU.supercontig_85.73) derived from phytozome v7.0 (chr-ID supercontig_85; pos 517707 to 518185)
caagccttcgtcaggattgcctattgatttgagaggtcatacatctaattttctttgccaaactcttcttttgctttgatgttaaaacagtaagctagagctcataaggtgtctttggttaaattttcatttaatttttagtcaaattctacccaggagaaacattagttctaatatgtgtaattaaaatatgatttgtggtaaataccaccatccccctactttgatggtatgaattcaagctgcaggtggggcgatggtctaatattacataaactagtatgaaagtcaaaagtaaaaagtgattagcaattgaaaaagaatttaaacaaactcaacgtaattatgaacaatagcttttcacttttagatgttccggtgaatagttttgaaaaattaatattgaaaagtcgaagctgtctaaaaatgtatcaatccaatttttgcaggcaagagagcatttattgctggagtggcgg

SEQ ID NO: 77564 - DNA, 292 bp, Carica papaya
  Intron number 2 from transcript evm.TU.contig_40702.1 (loc us evm.TU.contig_40702) derived from phytozome v7.0 (chr-I D contig_40702; pos 215 to 506 reverse strand)
cacattcagtatcaggttaattttctttccatgtaactcgaagttatatatgttcatgttcattttttagtaaaaaactggtctcttaaccaaatgattccttttcttcggtgggtttttgaactcaaataaactatttggaaagcatgaagtgcttagcttgctttcaaatttaaagaatgctgcatttaacaaataattgatactggtccaagcttggaatattctggttttagactaagaagcagcatcaattggcttctccattttttttgggtgcagcatcgctttg

SEQ ID NO: 77565 - DNA, 491 bp, Carica papaya
  Intron number 2 from transcript evm.TU.contig_32648.1 (loc us evm.TU.contig_32648) derived from phytozome v7.0 (chr-I D contig_32648; pos 856 to 1346)
aaggttgattatgatagtctcttatcaatcatttcttttaaatgccttataacttcttggacaactggctaaaatacatgtagtaagtcaacaattgtcatcttgaactttggtttcttttgcttatacgagttgctttgcttattctctctgaaacaaacggtaaatttctcactgtgattagtaagctgaatcagaaatattaacctgaatgaattaagtagggtgccaggtttttcatttttgtcttatttcaaaacatgtttgatctagtcatgggcatgcatgtggccaccctataggtagcttgtaattctgattacttctttatagcatttgttcctacagacatccagcataagttggttattagttttcttcttgtagagtttacatgttaaaattagatttctgtagttgaagagtgaatgatcctttccccattattacttgtaggaattgttgtttcctgttattgaattagctagtcg

SEQ ID NO: 77566 - DNA, 919 bp, Carica papaya
  Intron number 1 from transcript evm.model.supercontig_85.1 4 (locus evm.TU.supercontig_85.14) derived from phytozome v7.0 (chr-ID supercontig_85; pos 63398 to 64316)
cacaaagccgatattacgagaagactcccgaacaggtactgatctatccatacagttcattgtccttgttatgatgcaggacaaaattgaataattaaacaatcaaatcaataacttaatatttataagataatcatatgaatagtttacgtaatacttaagctcgagtaccctatttgtagatactaaaatacaaccaaaatggaaaattttaagtctatctagaaattcttttgaaatttagaaacaagctaataattaaataatctatacaagagaataattaaatagtcctaactaattaaaaaataataaactcataccattaataagctgataggtattagttcctaaacaaactgaacacttaataatacatacactttagaattgtatctcactattggtatgtatgtacgcacattagtatcttcccattctctgttattctaccccacttggtgaaaactaaatatataagttagaacttttctaataattgaagcttgcgaaatttgagtttgttgagaaaacaagaatgcttccaaaattaagaattctgagtttgttttggagtgttttttaatttaaaaaaaaaaagaattctgagacgtagtgaaccaattaggaatcataaaattcatgaaaggaagaatatgccaaacttattgctgctaggagctaggaaaatttttgaggtagtatcttcaggtggagtctcttttttcttaaatcaatgaggatgttatcatttccaaccaaatttacattactgcttacaactaaattaagatatccatcattaagtgactcaattgtgcagtagaaattacagcatctttttttttctcctattaatcatctattaaagttacaagtcactaatttctaccaggaaaggttggaaagaagacggcag

SEQ ID NO: 77567 - DNA, 438 bp, Carica papaya
  Intron number 1 from transcript evm.model.supercontig_99.2 9 (locus evm.TU.supercontig_99.29) derived from phytozome v7.0 (chr-ID supercontig_99; pos 429136 to 429573 reverse strand)
gggttgagtatcagatagacctgagaaccattttagtgagggaagtccttgaagaaaaataaagaatttttctatatctattttgattctgtttgatttaaatttaaattgacaaacaattatgtagatgtctctagtcgaataagagaagtcggaaaaatgaagagagaaatcaatgtgtgttacctaatcgaacaagagaaaccggaaatgaagatagttttcgatgtatcaagtttaaaagaagaaaaataaaccttaaagaaataaagaagaagaatgataaaataaaaaataatttaataaataagaaaaaaatttaagaatataaaaaaataataataattgttagtttaaaaaaaccaaaaaaaatcaaaatattaaagatcatgactcaatcattaaaaaatatagtatgtttaaaaatacagataaata

SEQ ID NO: 77568 - DNA, 1007 bp, Carica papaya
  Intron number 1 from transcript evm.TU.contig_33129.1 (loc us evm.TU.contig_33129.1) derived from phytozome v7.0 (chr -ID contig_33129; pos 1267 to 2273 reverse strand)
cgctgaagaagttccggtctgaagcgggaatcgaggtaggtttggtagtggtgttctgtttggttgcctaggaaacagaggaggaaagtaatgtagtagcgtatgatgtatccagactgcttaatgtgtatatttttctgatgcatttctaatgcaatatttatcactgagaaaatgctttaaacggaataatgaatcattgaaattatagagacgcgatgactttcaaactttgatgatgtcttcccttactttttgcacagaaccttttctcctatcttgaaatttcaatgtaattggtcgtcggtataatgaatttgaccttcttcctatatgttaagctattcaaatcatgttttatgggttagttaggcatgtctgaatttagctccgaaatcttattagtttgatatgtttatgaagtagatactgtatatagtgtttttggactaagaatggaattgagcgatagtaattttataatagattgtttaaaaatttatgtgttgattttaatttattttattatggatgttaaatgaattattcatatccgtactgaggatgaggatttagtaatgaaattcaaaaccacttataacgggttaagtacaaatgggtatagattgcagtgtaagacattagccaagccaaacctgcatcaaaattctaagagtaaataatgtgatcgtcaaaaaattgtttaaacctatatggtatttgaatctatgtggcatttggcttataaaattcgttatatttgtccttcacaaaatctatatggtactgttaagaccacatgtaaatcttctagtttgtagtgtgtttcttcgtatgtgctttctgctttatacttatcttttgcttaaatccaaacaaggatatctttttgcttttatattgcatgccattttgtttttatttgataagattgcttaaacattggttattgaaatgttcttgttattacagaaggaggatttcagatcttcttttgacctggaaga

SEQ ID NO: 77569 - DNA, 154 bp, Carica papaya
  Intron number 1 from transcript evm.model.supercontig_75.2 2 (locus evm.TU.supercontig_75.22) derived from phytozome v7.0 (chr-ID supercontig_75; pos 242861 to 243014 reverse strand)
catcttggccttgggaaaacttgggtaatttcaaggtattaattaattataacaaccaatgaggttttttgattttattttttcttccattttctttttgggattttattttagtactctgatgttgtgtgttctgttttttgcatggtgaagt

SEQ ID NO: 77570 - DNA, 523 bp, Carica papaya
  Intron number 1 from transcript evm.TU.contig_44618.1 (loc us evm.TU.contig_44618) derived from phytozome v7.0 (chr-I D contig_44618; pos 470 to 992)
attattattggtgagttcatattccgttgattcttttgatcattctttaatcataatgttgccactgtgattcatttcctgggttttggtaatactctgtaaattctgcttttctgtgattgctccatgtgttccaggaagtgcttatttagcttcgtgagtttgttttattctactaaactggggaaatgagaagggaaaagtaaaaggaaatggaagataaagttatgtcttattctaaagtatttaacttgctattttgttatatattatactccattgtttccttagcgtacctaaagtagacacaatttacaaccactgtcctcttctgttcatttttcctccgaaacatagtgcaagttgaatgagtattttcagaagttagaagtgaacgtgagccttagctttatctgatctaaaaggtaaaaagatcatgtaatgttgagaaactattcccttttgaatccatcattttgaacagatgtcatgaaattttaatcatgtgtgttttgggaaggtg

SEQ ID NO: 77571 - DNA, 815 bp, Carica papaya
  Intron number 1 from transcript evm.model.supercontig_7.24 1 (locus evm.TU.supercontig_7.241) derived from phytozome v7.0 (chr-ID supercontig_7; pos 2378938 to 2379752 reverse strand)
tccaaaactcgagatcaggttttcaccaaaagaaggtagaatgatgcagaacaagtatatcttaatttggaataaattttctattaaataaatcttttgtaattattattatcttgtcttcttaagttaaataggtttatttagacataaagtattttagttttcttttaggtagattttaaatattataggaattagaatattttaaatttcctcttttagaattttcctttttaattgacgaactatgatatttagtttcttttttggtggatttttaaatattataggaactataattttttaaattctcattttttataattttctttactagttgtaagcaatgcctatataataactagtagctaccaagaaagaagagaagacaatgatgaaatgagaattcctttattgagctttcattccctattataggtgtgtccttatggttattattctctctaatctatcctactcattttacctgtccctacattttttcaccttgcccttaattcttatagcctacctttattcttctattctgtttcccatactttatttttgtcactttgtaggataattctgattctaccataacttgtcttacaacagcatatcttgctttttgccctaattacatgaatttaattataatcaaaaggtcaagagagaccaaatatgggtttgagctgcaaccccccccccccaacttttgatctcaactttaatcaattgttgtttgtattgaggaatttatttgttgcttttttttagaccagaagagcagaattccagagcatagggctctt

SEQ ID NO: 77572 - DNA, 528 bp, Carica papaya
  Intron number 1 from transcript evm.model.supercontig_701. 3 (locus evm.TU.supercontig_701.3) derived from phytozome v7.0 (chr-ID supercontig_701; pos 12347 to 12874)
ctcccaagcagcccttcgtcatcggtaaaacatcgtctctcttgtctttttgcttctactactacgtctctttgctttattgttctctaaaatttcttcatgattttctatttggaagttattaatttacttcctccgagaaaggacaatttctcaatgattcttcgttttgtttttcgcaaaaggagattcttcttcttcttttacttggttatcgctagttttggttagttaattgaggtttttctttcagtgaatcctgtagggagcgagttaggtgtttctctataactcatagctaagcagaactttctgtttcctgttacatttccttgattctcttgagggaaccggttttgctcatatatatttatgtatatggcttcaagttcatgaatcagattcgctcactaattgttaatttgtgttattgtgcgtttgattaatttcattttccttgtctggccgtgcttggttttatgtgattgtacaggagtatcaggtggtacagcttctggtaagacaact

SEQ ID NO: 77573 - DNA, 989 bp, Carica papaya
  Intron number 2 from transcript evm.model.supercontig_611. 1 (locus evm.TU.supercontig_611.1) derived from phytozome v7.0 (chr-ID supercontig_611; pos 2253 to 3241)
tgatcgggtggttcacgaggctacagttgctgctggtttgtatgtttgttgagctgttatcatgctgatctttcttttcctttttttttttcaaaatatttttgattttttttcttttctcaaattaaggatgccataggatagtatgtcttatcgactacagcaaagtctttcttttttggacattaatcttttacctaatattggttatcctgtatctacaattgcattttctttggacttttggcagtcacagtgtttatttcaagtgtgtattaatttctgttgtattaacatctggttcatcaatcactgaggcccaaaattggtgcctattcctggtaaagaattggcgggatgtattgtctgtatgtcgatctgtgatttacctgttaaaatgaactcttttggagagaggatggttttgagtgacattgttgatctttcttattgttgttgaagattttcttggagcagtatgtttgtagtatgctatgacccagcgtgtggaacttcctacaaaacaagttgggcgcatgctgaaattcctaaataacacatgtttccactatatatacttccatgaaagaggaaatttactgcattgtccagaatgaccagtaaatactagtttctttgaataaactggcattcttctgttattccagtttccttgtgtatacccagaataccattttgttctgtggtatccaccaataccagtttcaaattttagttttagtggaaggatcaaaggattggcagtttgaaaagataatagttgctgcaagaatttttctaaatttttattgggaataattacagtcatggatatctgtagtattatatgccacagtttgacgtaagtttcatcttctgagtgtaagtgtttatctttagccactgtgactagtagttgatattatttaatatatttggataaccttgctgcaggagcttatccatcccccctgaattatcatttcttt

SEQ ID NO: 77574 - DNA, 960 bp, Carica papaya
  Intron number 1 from transcript evm.model.supercontig_8.30 4 (locus evm.TU.supercontig_8.304) derived from phytozome v7.0 (chr-ID supercontig_8; pos 2312101 to 2313060)
ccgtctctactctctctcagagctctgaggtaatagaaagaattttgttttttggattcaaagattgtatttgtgatttcattttcggtttatgtttgtgcttaaattgtgtttggctactgagaaactctttcactctatccggtatgttaatatttttttccatgtatagttgagataagattttatttttaggaaaggaagctctggcaaccttggaaaataagaaaatagaaccatggaatattacaggaaactcaagattattactagcaatacttttgaagagaaatagttttcacagtattacttataaatgatactgagagcttgtacttacagtaacactatttactgttatattgtttcaaattcttccgatcctctcttgcaaataaagggtttgttactgcaataggatgcttgtagctttatggttcagttcacttttgcattggagtactaacattagccgttattgtatgactttgggtattcaaatatgattgttgatttacctgagttcatttctggactaactttttatagggctcttatgatctgaagtaacacatttataattctgttgaatgttcaccttttctcagttaaactgaggataatttccgaatgagttcttcaaaaataatttctttgttctcaaagatgggtaatgttgtcgtacctgcaccataagtaggagggtaagaaatgaaatgaaagtcactctaatataggtggtcgtaggtgtacaattctttgtgaggtttttctaccgctttgttatcaatttgaaaaagagttgttaatttcagtttatttcattagactctcgaacatcttctgacatttgttgtagttcatagctcttttgtacttttgagagctgcccttggttttagctaactctattgtactgtttctataaactaaacctcatacattcatctgcaggttgtt

SEQ ID NO: 77575 - DNA, 719 bp, Carica papaya
  Intron number 1 from transcript evm.TU.contig_38643.1 (loc us evm.TU.contig_38643) derived from phytozome v7.0 (chr-I D contig_38643; pos 954 to 1672)
cggagcagggtggtcaggtatttttcacccagaacatactagtttctgtgtgataagttattctctttcattgattgggcgttgtagttcaaacttaatttcattttctttttactaatttcatgtttgaatctagggggtgcaaaacatgcagctcgtgtttaaaggtgtctttttttttagaaatagtgtctaaagggatcatgttagtatgtagtataaacagccactatgattaactcatgcacaatccatttcgtaaatggtttatgatcttcaaacaatgcatgatttgtttataaatgggtaagcccgtttaaacttgtttcatttgtttatctaaaatgtaagatgaactaaccaatcagaaattttaagtaatttgtttgacatgcatattaaatttatttatattataatctcttcaaaaaagtttatatatattatagtatgtatgacatattgtacacgtatatatgattatgcatgtgtattttatatataataatgaattgaatatatatatatatatatggcttaaactatttggctaatcaaatggatgtaaaaagtgtggtcaggttggacttttaatggctttaactcgataatttaaccgaatagtataaagccaatcccacttaagtccatgtcttgttaatggatgatgttaaattttgccagcgtattggagccacaatttcacttctttgctttga

SEQ ID NO: 77576 - DNA, 487 bp, Carica papaya
  Intron number 1 from transcript evm.model.supercontig_9.11 9 (locus evm.TU.supercontig_9.119) derived from phytozome v7.0 (chr-ID supercontig_9; pos 623510 to 623996)
tgcaccaagaccagtgcttgagcagaatcatcaaggtacttcttggctctcctttgattttgtttttttctttcggtgatttggtcgatgagacatgttgtcatttcaataaggtttaaatttagttgggattctgatttctctttgttgactggctatttagatgccttgttttttgaagtaaatgattttcttttatctgggtattttagaattgctttgataaagttgggaatttgttgcatgtttactaaatcatttaggtaaaatattcaaactatgtatttcctcaaattcaaatacagaatgaatatggtgagatgacttggataattggctgatggaaaatgtttgtatatattgctttgtttactcttcgtctacaagaagttatttgtgatgttgtaaatttctatcgttgtcttcctctctttgtgagattaaaatttgtggtttatgcaggatcctccaccctaccttgcaagtc

SEQ ID NO: 77577 - DNA, 1053 bp, Carica papaya
  Intron number 1 from transcript evm.TU.contig_36813.1 (loc us evm.TU.contig_36813) derived from phytozome v7.0 (chr-I D contig_36813; pos 437 to 1489 reverse strand)
acagaattggtcgttcaggtcgtttcggacgcaaggtatatgctttatcatgtaatttccaatttggttaataactttctttgcatttgtctttattattcgtgcaacttggttattgtttatacatcttaaagagtgaagttttatctgtcattcgcctactgaaatctaggacatgccactttataatgctgcttcgttgcaaacccctctaattattattctaggttaacaggcttgtgtgacatgtcagtttaccttttcctcttgcaaaatagattcttgatatgacgttgcatttcagagaaccatatctatctatttgtacatcagagatctcatgccgtgattagaacattggaaaaactacggtgaaatatggaaaatggatttgtaaagagagattctttagctggtttacgattgaaaagtctgaacgggttgtagcttcttgagatggatgagtgctttggagtattgaaatggattatttattcatatgatttctttgtttattatgtttcacttttaatgtccaggcttagattcctctgtttttgcttcatgaaattaaagaatttcttgttagaattaatggtttgcagtgaggtgcagaagaagagttggtctcttgaaatatttatatcaaaatttgacttaatattagttcaatttggagggaacttggtggtttaatttgacctggattgatgtgtaatttagctgtctgcttctggctgtggaaccctggtcccaatgaattctgttataataatgaagcaaggtgtgcattgccctgtgcaatcacaagcctgcagattttctatgcttatgtcaagttttactctctttgatagagtatgatttttatatgcatttgaagttacataagactatgcattgttttttgataaaatttgcaattgtaaccttgttttatgaaaagaaatatgtagtgttttatgattggcctgctagccttgtttagctgagattggcttttttgtggcgttatcagggtgttgcaattaactttgtcaagagtgacgatat

SEQ ID NO: 77578 - DNA, 750 bp, Carica papaya
  Intron number 2 from transcript evm.model.supercontig_65.5 6 (locus evm.TU.supercontig_65.56) derived from phytozome v7.0 (chr-ID supercontig_65; pos 637583 to 638332)
tggcctccctgaagcgacccagtcaggtggcagaggtatgttcagcctctgttcaattcacttgatgctttttcagtctgttattttcattgggtgcatgattgagcagttctgtagcgaaggattttggataagggagtaatgtctaaataaacagtattgaattggtgaatcatctatagtagttcgttaataacttaataccatgttgatgattattatattgaaactgtgctatgtgacctgtatgaatgtcacttgaactagctattgatgtgattgttgggaaaaggatgtctgttggaagttttaatcccctcataatttttctgaaaattgaaataattgaaagcgagacaatgttttatatgtctctgcctccatgaaaaatttaacaaaggcctatgtgagctgaacacgaattcaaagcggatttttttcctttgatgaagcaagcaagattgggtaagtggaaaacctaccaaaaatgcatttggaactgtgaatccatttgttaattgttaaggtttgaggttgatggtgttagttgtcatgaatatcctttattttttgcctgaagggcacgtaaacaaggcgggtggaacccacaattaaagctctcacaaggaggaaattttgtctctgacccaaactggcttgggctagttgtaacaacattagtaacactttttgtttctttcttgtctatgctcaggtagtatcataattacgagcctacagaatatagta

SEQ ID NO: 77579 - DNA, 892 bp, Carica papaya
  Intron number 1 from transcript evm.model.supercontig_973. 3 (locus evm.TU.supercontig_973.3) derived from phytozome v7.0 (chr-ID supercontig_973; pos 11989 to 12880 reverse s trand)
tggatctatccgcttaccatctttaggtaattagaagaagaggaatagaagaacttttaaggaggttgacgatgtggaggattttgtaggatcaggagtagatggttctagagtattggctttttgattttttgggtcgttctctttattctataatttagagctgtaaatactttgtatgcgggttgacacccttttggtgcctattaatatatttttatacttatttaaaaaaatattattttgatccaaaattttatcccagttgttctatattctcatttcattttcatggaattaatatctgaaccaaattcacattagtgataagatctttaatcaatgtgcctagcattataacttctttgcaataggaatggtttttttggcttctttataggccagggcacatgttctttctaggacaaacgtttgtctagtatgcaaaaggaatgggaggcacttacatttatgttttcctcctatttttcgtattctctttctctcctaagaaaatattttcttttccttataaaaaagatgttgaaagttctaaacttgctggaagattaggcaaagaacattttgcgaagttgttcgccaccttgaaaaatttaaattctacaactaactgatgtcatataaactgcttgcaatcagccatttcttccattgaatttcaatttcttaaacttcttatttccaaaagatataaaattagagcatattttttaccagagtttctcaggtttgcatgatgcatgaaagatgtgtgctcacaacttgcagtgctggattctattatgatatactcaatggaagtccttcaatattgtcaaatttctctatctttgtttctgaataagtcctcttatcattgtttacctgcagt

SEQ ID NO: 77580 - DNA, 646 bp, Carica papaya
  Intron number 1 from transcript evm.model.supercontig_8.22 3 (locus evm.TU.supercontig_8.223) derived from phytozome v7.0 (chr-ID supercontig_8; pos 1576574 to 1577219 reverse strand)
ttgcatcgtcctcttcgggactctctcttggtcaggtttggaacatttcttctaatcttctcgataatttaaatctgtatgtttttcaggatttgtaaattaatccgcttctctttttttctcgcttcgttactgggcgatgcttttttaatatgtagtttcttcttctttcaacccgtacctaacatcagatctttcattttcctttttgttttcttctggttcttttcactgttcaaagggttgataaaaaggtgttttatgtctttgatttgttctttagcgagactaattcacaagtctaagcaaaatccttctcgatatttgagaaacaaacgcgtcatatgtttttaactccactctaaaaaatgagataggagacagggttcaaaaaaaaaaaaaaaaagccccagtctgtttcctttttcgaagtagaaaattttgatggggtttttctcttcgtttggttcttggatttcctgatactgcccccgtttatttgttactttaccgtcactatatactgtaggaattaagcgtgtgtttttgctttctttcgagttggggtttcagttgttttgttagattgaaaaacaataagagtcagaaacttaaagatctattgaaaaaaatattccagccaaac

SEQ ID NO: 77581 - DNA, 385 bp, Carica papaya
  Intron number 3 from transcript evm.model.supercontig_7.23 4 (locus evm.TU.supercontig_7.234) derived from phytozome v7.0 (chr-ID supercontig_7; pos 2326376 to 2326760)
gtcatttgttgcagctcaggttagccccccccctttgtttttgaggatttccccttatcgatcttatagtcaccattatcttatcctaaatgatgcataaaagtacattttcttgtcgcttggctgttattatcatgactaccttggttttcctatattcttttgagattaacagaatgaaactggttcatatcgttctaagtttcctctttttatctaaaaaatatttttcgttgcaacaataaagaattacacacatccacttcttatatagaggcgcacatgtatatgcatgcaagaattctgtatgctcagatattttattaacagtgtttgtgtagtatctacagatttttggctctgaagaaccttgcaactgttttcc

SEQ ID NO: 77582 - DNA, 679 bp, Carica papaya
  Intron number 1 from transcript evm.TU.contig_35333.2 (loc us evm.TU.contig_35333.2) derived from phytozome v7.0 (chr -ID contig_35333; pos 2013 to 2691 reverse strand)
gctctggtgagtctctcctccctgacattgtgtatgtttatgtgttatttttggacttacacttgagtgctcttctgtctaatggtgggagttcatttgtgcaaattgtaacgatggtaactgctatattcgtttgatgtggaactgtgaaaacgctggattttttttttgtttcccaaatcccaatcactgtctagtatatttgctcaggatttgatatgctcattggtttttggttcaatatattcttttggctttcatttatttttcaagggtaatcatcttcttgcatgatcggttaaagtttttagtctttctgatgcaatccagaagatggaaattgaattaaattgagttctggaccttgatctttttacgctagtattttagccaatcatctttttccctttgtatgggtttggttcactgatgttcctcttctcagtttcattcctccttagaaactaatagttttagggtgtctggtggcaaatattggtttctgtagttgttgtccttgaaggacgggggagatgcttaggagttccttgatttatgagaatttagtaaataccgctacatcttgtggtcaaatttttcaaaagacagatttgtgcataatatgagcaacactgattttcatagttcatgcttgtttgatttactgtacaggtcttgc

SEQ ID NO: 77583 - DNA, 389 bp, Carica papaya
  Intron number 1 from transcript evm.model.supercontig_9.19 7 (locus evm.TU.supercontig_9.197) derived from phytozome v7.0 (chr-ID supercontig_9; pos 1329946 to 1330334 reverse strand)
gagaaagatttcattctcagtcaagacttcttctggtgaatctccttccactatgcctaatatagttcattttatgtatgcgcgagttgttcttcgttcagcttttgatttggctgttttctaaattttgtgaaatgtggtttactttgtgagttggtgtttgaatttattggagattgaccaaatgttaaactggtaatttatggattcgatggtgaggatcgctgctgtaagagcttaatgccagttatcagtaaagtgaacgatacaatttctactcaagtctgaaaagaactttctgtttcgtagatgatccgttttatgtctttttaaccttcaaacttctgtgtgcagcactcctgattatatcaccccggataatcaaaatt

SEQ ID NO: 77584 - DNA, 727 bp, Carica papaya
  Intron number 2 from transcript evm.model.supercontig_67.7 8 (locus evm.TU.supercontig_67.78) derived from phytozome v7.0 (chr-ID supercontig_67; pos 1174132 to 1174858)
gcgatattattggaaagtatcctaatcgagttcccgtaagtccatattttaaaaccgttacactttttaacttttttgtagtgttcttctttttctgatcgatatgttaattggatcatctcgatagttattcgaaccctaaaatatggtcctgaataatctcttcctgggaatttattatgaattcccattctttacattattgcttcggacaagtagctcgatcttttttctgttttaataatttgagatgcattaagatatgtgtttttatatttgttctataaattgagaattctgatttttttgatgattaatgtttatcacttgcaaaggaactttagctgtggaataaagagattggattccctgggttcatgatgtatgaattgaaaagcattagcagatgacttacctggataggaaagatgataaagaaaatgttagccaactaatacaatctgctcgaaatgtcctttttttctttttgaaagaaaaagaacacagaaaatataaactcgcccaccgcggggcaagaattctgcttgaaatgtccttatgggcttaagaaaggttgtttgattcaatgtggttaatttgttactcagattctaagatactgcttttaaattttgcttgccctttttggaaattgattggctgctaaattagagagattattcactctgcaggtaattgttgagaggtactcaaagactgaccttcc

SEQ ID NO: 77585 - DNA, 1008 bp, Carica papaya
  Intron number 3 from transcript evm.model.supercontig_92.6 (locus evm.TU.supercontig_92.6) derived from phytozome v7 .0 (chr-ID supercontig_92; pos 112481 to 113488 reverse st rand)
gttgttttctttgtaggaggttagaagagacttgtaatcgtgtttatttgggtgtccaatcttgtacaacctttggactatgacttacgggttcctgggattagttgggttatgatggtatggtaaaggaggatatatggacctacaagggtagttgtggtggaaaaagacgtgtggctctactccccttgctattttttggattgtgtggaaagaaagaaataggagggctttcgatagggtggagaaggatattatagatagagttagaaacaggtggttccagactttgggttttttagttataagtcatcctctatatcctttgcagaatttcagggatcatattgacatttttgattgtcatgtcaataattttgtatactggttggcaccccttaggtggttctatttaatgacatatactatttgttatttcagaaaaaaaagtaagattctcttgagagtagtgggaataaactttaccaagttattaattgccaaaaaagtgttaagaacaaagatgtggtactttttccttactatagaaagcaaattttcttgattaattatattcatatcaataaggcttagactcaaaagttctagaagcatatgatgtaaaaatgctttgctagcttcacaaagggttaaatgccttgcctttgaaaacattgattattagcttatttaattttagtagattgtagtggtactttaatttccctttaaaaatatctacgagctttcatggctctgggttttgttgattgcacttatatccttggaatgtcagtttttgacaatgtagcatgcgaagttgttgtccacataaacttcaggcacatctaaggcaatctactcttgcacgtttgtgctctttttttttttttaaaatattcctgatattctggagtttagtttgtggattctgactatttaccaatagatatcctaacttctaatataagattttttctattatcatctgttactaggattgcttgt

SEQ ID NO: 77586 - DNA, 971 bp, Carica papaya
  Intron number 1 from transcript evm.model.supercontig_82.3 0 (locus evm.TU.supercontig_82.30) derived from phytozome v7.0 (chr-ID supercontig_82; pos 479788 to 480758)
gctggaattttaagttagtgctttgacaacttacagtagcccttggaaagctatcaagagtttctatggttctttatccccatagtttgacggtgagtgaagattcttgttttcctctttggaaggagtcatggattaataatgtaatgttggctacttgttttcttgcttttatatatgtcatagagacattttaattgagaaataccctcaaaatgcacaaatattaaagtaaaagcggtagagaaagaaagaagaaaagaattttgatgtggttggcgatgtgcccactccatggaacaacctgcaaaatacttttcactataggaagaaccacctcttacaagtagggtttttctaatatgtagtggaactggaagaacttaagtttatgagaatgctccttataataaaaaaactccataggcctaaaagtattataccatactgcagcatgcttcccccatgcaccctctaataaacctgcattttgtagcatcttgttctacaaagtcaagaagctagaattctgaaaaattagctctcaatcttcttcatattcgttgcgcagttgtgtctccggttgcagacaaactgtgagcatgggatggttttcaggtggccgaaacaaggaagatgtagtttatctcatctcctttgctatgtgttgggtcatttgaaatgaaagaaataaaagagttttcgaagagcatttactatttctggtagaatggaggtcactgattccagaccttgtgtatttagttcaagggtcatgctctccttgatggagagattcataattttttcacttctctgtaaattcagttgtacatgagtgacacttccttggcgctttttaaataatattgtttggaaaaaaaagtatacctggccttggaatttgtctatttgcttaaggattttgttggtaactaagttgtgcaatatctgcagttcggttttcaatc

SEQ ID NO: 77587 - DNA, 539 bp, Carica papaya
  Intron number 1 from transcript evm.model.supercontig_801. 1 (locus evm.TU.supercontig_801.1) derived from phytozome v7.0 (chr-ID supercontig_801; pos 1457 to 1995 reverse str and)
gcactcatcatctacctccttttcaagcatctcaagtatgcccttcaattttcagtatttaccgcttgatctctcgttattgtttgtttgcccgttgttttgccctcaattttgggtttccattgcatctaaacgattaatccgatcattgttgttgcgatcgtaaaaaattatgcggctctgcgtcaaatgcttcgaatttgcgtaaactttgaaatttacgtcaaaattatcgccaaaatcttgctgctctttttcattgtgtgtggtggtgggactggagggtcggctggagctggggtacatggtgtttcgttttcagacagagggcgtaatgacacccatcgccatctttgtccaacaaagtatccagtatgattataaaaaagataatgagaaataaacaaatttagaatttagggatggtgatattcactttgttgcttggtcaccctagaagtttagactctgcacaggtatactatatatatgtatctatgtgatagtgacgcagactagtatttcttcttggtataggg

SEQ ID NO: 77588 - DNA, 634 bp, Carica papaya
  Intron number 1 from transcript evm.model.supercontig_918. 1 (locus evm.TU.supercontig_918.1) derived from phytozome v7.0 (chr-ID supercontig_918; pos 10742 to 11375)
ttcctgagaagaagcgcggcgtgctctccgttcaggttagtgcttttgattaattaattagtaacacatttatttaaattagaatcaccgattaattttcaaaattaaaaaaaaaaaccacactctcatactcacaaatgggtgaaaatactcccccatatatatatatataaataaaatatgtggataaataacaaaatcttttacaattttctgtggagtacttgaaatcatactcatcgtaaagaggcgaaaacacttctttacatatgtacatttgcatgtatacgcatcgatgaatttgaacctcccgtacagccatgggcggaagaactcccttatatatatatatatatatatattatacacatgcatggatgaattaaaacttctaattagtaatagttaatgtattaatcatatccactggtctcgttgactaacctcaactgacgtaattgatattagtagacagaatttggctgaagtcgatcagtaaatctccttattttattttaaatagtttcttataagttaaaaatgatcttaaaatatattaattaatatttaatttaaattgcaacgttctattaaagtttattataaataaatttgtttagacaactgaactgaa

SEQ ID NO: 77589 - DNA, 954 bp, Carica papaya
  Intron number 1 from transcript evm.model.supercontig_73.2 2 (locus evm.TU.supercontig_73.22) derived from phytozome v7.0 (chr-ID supercontig_73; pos 367887 to 368840)
agatttgtagtagggattttggtaacccatcaatttccctcttaaattcttctcttcctcatctatatttcattacatacatatatacatacatgtgtgttagattttgggtgagtgcatagatatatgactcagttctttcccttcgaactaagggttagaccttttaattacttaattaaattgttttcatgattttaacaaagataaaaaattaattaattatatatttgtagggtacattgtcttaatacttattttttcaaagaaccgtttgaaattttatcattttttttatctttagctaaaaaatgtgcgtgtcaaaaaattattgatgtattatataatttttggatgtcagaaagattagtacatgttagaagacggtgtaatatttcaataatatatgattgttgagtttcatataagagttcaagttatataatactagtaaattgagtttaaacttttgatacttaattatttgaatttaaaatattattatgctagtggtgatcggacacaagtggttagaaatagtatcaaaatatctgtcaatttgatgatttggacatctgaatgttgatacgtgattttgtgatgtgtgttcttgatgaagacataaaaaatttgagtattggagattgtaatacttcaattttagtttaatacacattgagaaaatatataattgttcaagttttgacgaagacactaatgatttgactctagaaaattgttagattaattgtgtttaaatcggagaccatatagatgtattatatattacactaagttcatgaatattatgatatggaattacgatacactagactaataagaggaagaatatataattactctctttttgtactgcaattgaattaattggataattgatgatacatatatatatatatatatatatatatatatatatggatgcagctggga

SEQ ID NO: 77590 - DNA, 620 bp, Carica papaya
  Intron number 1 from transcript evm.model.supercontig_96.5 9 (locus evm.TU.supercontig_96.59) derived from phytozome v7.0 (chr-ID supercontig_96; pos 908067 to 908686)
gtcacaggtgcgtagaaatttgtttcttgatctgtttgttttttctggacaattttgaattttaatttattcagagttttttcctttcctttttctcttttatgacgaggtcgaaaatgaatccaagttccactactgctaaaatttgttgaggcagtgcaagtttgtctgtttttatgtccttttttttctttatagttctctctgagattatattcatggagagtgcatatatatgttccatagtatgtggatgatatatcctttttcaaagataaaagtttaatccgttcttgaaagatgaaagcactgcactttttatttcttcacctttttgcttatgttatttgtgataaaggaatggaaaaaggtattatttgttattgtcatttgttcttcttttccattgttttctttcttctcatcataattttacaagaaagctttgataaattaatatatatttttgtgcttcttttctctctttaatctgccatgggtgaggatatataatatatattttatgtatttaaaatcttttcaatttttttgaattgtttaaaaattaacaatggcagctctctgtgtagggttttcaagagattggaattgtgaatccc

SEQ ID NO: 77591 - DNA, 708 bp, Carica papaya
  Intron number 2 from transcript evm.model.supercontig_66.1 27 (locus evm.TU.supercontig_66.127) derived from phytozom e v7.0 (chr-ID supercontig_66; pos 1252954 to 1253661 reve rse strand)
gtttgcagtccacaaacactggttcgtgctttgaggtatgtttctggaagtgtttggggtctctgatacaattttttggtcttccccatgttctcttcaattatagattatatatgtaccaaacattccggataccaaagaaggaacttcaagaatgatctaaataaaattattgtgcacaagcgaagggaaaactcatttagttatttgaaaatttagagacaaatgccatggttgatagagatcatgagtttgatatttttatattttgagggatagcggaaaagagtgtacagacaagccgtatttggttggcttagacataaatttaaaaaattggatttgatttctaaccttttctgtcactatatttaacgttaaaattggcatccttttgattggtttatatcagtttaaggggaaggtgatttgaagctcttttatgcacaaatccactttgtacagcaaactttttaacaagtttctttataaggtttagattgtaatgaagttatctcgacttgactttggaaatcttataattttcttctctaactttatgataaatttaatttttcctgggatatttgatgcttgtgctgcattctcttgttgacaatggtgagaaatattttttgtttttgctgcagtactaatatcacaactacctgattttactttgatttttattacattagagttgttgaa

SEQ ID NO: 77592 - DNA, 608 bp, Carica papaya
  Intron number 2 from transcript evm.TU.contig_34168.1 (loc us evm.TU.contig_34168) derived from phytozome v7.0 (chr-I D contig_34168; pos 1921 to 2528 reverse strand)
acgcggttcgacatctcggcttcaacatcaaagacgtgagttttttaaccgccattattgttttcacctatttcttcttcgtcatattcaaatttatagaactggttattgggtgatactggaatttatagctcgtctaattaccattagtgtcaataaacttcccagaacttcttcagttcttttttgtttttatgctagacttcaattcacgtgtcaaaagatgtcaccttttctgattcaccaattatctttttttttcacccttctaatttaatgtgctcaatgattatattttctcctgcagttctgttaacctcttttccgctagttcagtattcatatataccacttctcctgaaaaatggcgtttcagtgatctttttctttttcccttctaaattaatgtgttcgctaattctattttgtcctgcatgtgcgtcaatttctattagttctgttttcagttagctatcatgtttgtttccatcagttctattgatgaaaaatggtgtttcaagtatctagcttagcacatgcttagttagtaagttgattgatgcaatgaaaatttaacatgtaggtccaaagaccagaagacatactga

SEQ ID NO: 77593 - DNA, 1039 bp, Carica papaya
  Intron number 2 from transcript evm.model.supercontig_794. 3 (locus evm.TU.supercontig_794.3) derived from phytozome v7.0 (chr-ID supercontig_794; pos 8914 to 9952 reverse str and)
agaaggacatacagagtttaagacaagaaattgaggtaacggaattactcaagttcttttgatagcgttctgaacttagtaataacttaaggtttaggaattgaacgatagtgaaatctgttttaaacaaacacaacttaaattgttaccccgtgaaaaaaacatgagctcagaaatgattttaagaaaatacatttatttttcgtcgtttatttcagactgcccttttatgcctcttgctctccatttgatgtttggagtaaatgccctattttttgcaaagttgataaagtatttatacaaaactacaaaaggtttacctaatttaagttaattgaaattatatatttcaaattatattaaaatcatggaatttaaaatttaggttctcaattctacttaaaattctaaataaacttttatttggctataataaaaattttacgatcgtttttaaaaaattgagttgtttcaatcataggctaaatattttatttactcaagggcatctaatggtatatgtttcacactcgctctcatctaatggaaataatcatggggccagagactgaacttttccccctggtaatctgggccttgtatatatcttttacaatcggagcacctaatgatacatgtttcacactcgcactcatcatatggaaattatcaggtggccagagactgaattcttcccctcgtaatctggggcttgtgtatatcttttaaaattagagaactaaatccttattttttgcccatatttttcttctgtgctggactgaacaagtttaggacatctcctgaatactacattgacctgcagtatgtctgagggcttcaaacataaatgtgatatgaaagatatgttagtactaagcatttcttttacaacaaagatgtgcaggctagctttaccatctaactacttttagtttggccaagttctatttgctgaaacataattggatttcttcgttttcatctgacttgatgatgggattccttttaatgctgcagattcttagaaagttgaagc

SEQ ID NO: 77594 - DNA, 540 bp, Carica papaya
  Intron number 1 from transcript evm.model.supercontig_97.5 3 (locus evm.TU.supercontig_97.53) derived from phytozome v7.0 (chr-ID supercontig_97; pos 320921 to 321460 reverse strand)
ggtatgtaccattgagttcctttttctttttttgaaataaaaattgttccttaatcaaacttttgcgcacttctcctactatgtgttcaaagaattccaaattatttttttaataatcatctttaatcttgagatgctgcataattttaatattggctgaaatttttggttcttccattttcaactctagcacctgaaaagttgggtttgattttgttaatttaccatttccttgcttcttagctgttttttttttctacttccagttgtatgctaggcccacctgttgatggagtggggaatcttattagttatttctggtatgtgatggtctaacatcacatcaaattctgtggttcaattttgaaagtcttgtttaaaacaaggggaagaaatcgttgttccagttaataaatggagtgcacaatttgtttcattcaactctgccatgtttaggtttgatttctagaaccttatttatgaattgttgcttgaggattttcaaaattgatgtttgttttaggacgattatctggtgtc

SEQ ID NO: 77595 - DNA, 465 bp, Carica papaya
  Intron number 3 from transcript evm.model.supercontig_62.1 30 (locus evm.TU.supercontig_62.130) derived from phytozom e v7.0 (chr-ID supercontig_62; pos 814055 to 814519 revers e strand)
actaaagagaaggaccttcttggtattgatcaaaggtttgtggatatcatctctttttctgatgtgttttcttaacttgattcattagggtagggatgggatttctgatgtatctttgcagttatctatgatgctttcatgattttttttttttttaatgttatttcaaagatatcttctgtaagtgataaaaaccatcattttgttttggcaattgttcgccttaaacgcaagcccaacgcaagccaagcatatattgcaactgctttcatattttcatcacttattttctgtttgtatattgtctcatcaaacttcaaacagattgcatacatgaatcttctcttgatcctgtcgacttttcagtggtctgtacgcaatggattttcctaaaccatttttgcaactacatctgcagttatatttgttgcctataacttaactagattccacctatacacagtc

SEQ ID NO: 77596 - DNA, 881 bp, Carica papaya
  Intron number 2 from transcript evm.model.supercontig_84.2 8 (locus evm.TU.supercontig_84.28) derived from phytozome v7.0 (chr-ID supercontig_84; pos 293473 to 294353)
gtggagttggggcgtgtaatagatcgtggtttaaggtcatagttttattctctaaatgttgtagctgtgatatatttgggctgtatgctctagcattggacctttcctacaccattcaaaaatgttgaaacatgttcctccaatataatttatgttatttaatgaggacctttctcgtcttccatgggaataatttctcagggactgtcatgatggtggcatcttagcaagaatttaaacatgcaatcatgaaacaaagtaaccggttgcactaggttctcaatttaagagattgtttaatttttataagcaacactaggtcctgaaattcaaggctattttgtcagttagtctagactctcatccagtattctattcttattagtttcttggaatcgtagcttttttttcttcatctcttttctaggttatttctttacggaaaaagctaattgttgtgacattaatgggagcaccctatacaaatggtttatatttttattgtaatgagggtttatactgttgatgcgagtctgtaggttctttgtttctttaggcttttgcctactttgttgctctcttgcgatttttttttttcctttcgaattccacttacttgttttactctttcctggtcatccttctaccatcaaacataaattgaaatagtatgtatctttctgtcctcactgtgtttcttttggacattcagaccctagaattctcaattcttattttcttggaccataaacaatcatctgttagaaatttgatgtcactgccccacagcagaatgcttattgcacagttttagttacaaatatggaatgaatatatttgaaggtctaaagtgatcatgcagggaaagtcgggctgtggat

SEQ ID NO: 77597 - DNA, 822 bp, Carica papaya
  Intron number 1 from transcript evm.model.supercontig_9.17 5 (locus evm.TU.supercontig_9.175) derived from phytozome v7.0 (chr-ID supercontig_9; pos 1095677 to 1096498 reverse strand)
ttccttctctcccggcaagtaccagttgggtccttcttgtttgggtctaattttgtgttttctctactatttctttttgggtctgttcgtatatatttatgaactagagctgggtagtttcaatttttaggtagttggttgcttggttttgatatctaatttcacttacttcacttctgttttatataattttgttggatttcgtgttaagtttgagcatatacatgcctaagctatgttggaaactaatgaattcaaagtcacatttcatcagctctagtaataaaaatgtgtatttgcaaatgaatttttcacaagtttaagtggaatttatttgcttcaaacatggtcttaatgttactatttattcaggaagtaagagtgagaggccttgtatttctatggagtaaggtcagggatcgggggcattgggactaaaatttagtgttaatggcaaactcctgccacctacaatcaatcttataaatctttatcttcttctatcgtgatttcttagttctttttgttattgatgttgtttagtttattggtggaaaacagcttttgttggttgttggagaggaataagaataagcctgtttctgtttcatttttttattttttgattaacagatttttattatttgcttgtgttcaattggatcattgatcgttctttataaattagatcccgatatctttgctttaatctttttcgtagggaaagagattccttgattgttgtgtgtatttattgaagctacatatacactattgtaaatttttcctggttttggatattgtcattgaatcagaatcgaa

SEQ ID NO: 77598 - DNA, 616 bp, Carica papaya
  Intron number 1 from transcript evm.model.supercontig_8.73 (locus evm.TU.supercontig_8.73) derived from phytozome v7 .0 (chr-ID supercontig_8; pos 480504 to 481119)
cttgtctccgatatctccagtgattcagctgctccgtacgatccctttttccttcttaacaaatacactgtcaaatacgattttctactcatgcatggctttgtatatgtattagccgcgtagatctctgcatgaaactggttattgttcatttgcatgtgtgcgttattacttatttcgcttgtttgaattctacaactagataatatactggctggtcataatcccgaatttgaaggcattttaaccgaggtttcccttaatattttcctgtttttgttttgttcaagtcaatatttaactcctcgtgttattacgtatcgttttaacgcttatgtttgatccctgtttctccgttgtctgtttgagtccgctttttacttccttaactgtcttacccggttgaggtttttgtttgaccgtgatggtttagtttgtctacatccaggtttagatccattcagttgtctgtttctatttatcttattggttcgtcgtctgagttgaacgattaagcattatgtttgaccttatgtaaggtgttgatttggtgtttttcttgtcgagcgttggttgaccagagtaaagaccgaggcgtcagggccggtgctgtgcc

SEQ ID NO: 77599 - DNA, 755 bp, Carica papaya
  Intron number 1 from transcript evm.model.supercontig_768. 1 (locus evm.TU.supercontig_768.1) derived from phytozome v7.0 (chr-ID supercontig_768; pos 2487 to 3241 reverse str and)
tccgccagcggcaagtgccactgctcgaaaagaaggtacgcagcgttgtgtcacaggcggcgcattttattaatttatttaacactgccctagaatatagtccttgcatatttaagcttttgactattgcagcacgcatgaaatttattagatgccgtagtaaattcgagtatgctaaaaaagattttgaccctagtgagttaactcggtccgtcaaccctaatcaacgaaacaaacacttatgttcaacattaaaacgataacctgtctttcgctaattcatcaaaatgtaaaataaatcacgaatctgcatacatcctcttattacgaacgagcgacttggtcgattttactgtgaatagtcgagttgactcatactcgctttggttaaatcggtgaatttaaaagtcaacgatttctggtggcggagcagttccggcacatcatgcgtgagaatgactgatgtgttttttagtggagacgggtatcagaacttttgatcctcggggtttgaacagttttctctttattgtcctatttctaatactgtgggctcgctgctttttgacctttgaaaattgggacaatttcgcctactgtacacattagcattcctggcgcacgataagaaatatatttgtttataattttatagatcatataattgagtaaattaatttgaatattttatttacggtttttttcattttaattaatcaggaaaaatcgcgtgaagagaaccatcagagtcccag

SEQ ID NO: 77600 - DNA, 936 bp, Carica papaya
  Intron number 1 from transcript evm.model.supercontig_81.8 9 (locus evm.TU.supercontig_81.89) derived from phytozome v7.0 (chr-ID supercontig_81; pos 375392 to 376327)
gcttccatcattgaatccggttggctggtaatgtctttctctctctctctctctctgtctctctctctctttctatatctctctcgctgttcacgaaaatattacatgtatgtatcgacgagtgtcgctttccctgtttggatgattctcttcagatttcgagatgttctcgttgttttttagccttagatttgttatctccgatgttcgttcttatttttggatctgtattagtatttttctgcgcctgcatattgaggattgaagtgtgtgattgctgttgctggtgttgtgtcttgttgatattctgcaatggctgcagcatttgatgttgatgtttgatttgaagtgataattgaggtggttgaaccttttaaaatttttaatgttgtttcaatttgtgatttctattttggctgcacttagtggtcttctagattaaaaatgaggtggtgctaactggatcttcttcttccatgagtgatttgttaagaaactgttatcaatttgatgatgataattctcgtttcgaaaaacctgttgtttatttttggtgtacttgtttgacctctggattctgattaggaaacaaatgatgcttaggcctgtgtaaagaatgtagtagcgctcttcttcctcgtttaatttcttcatggttccacctttcaacagtcctgttgtactgtacttttgtttctatatgggaaagttagttgatgttttttgcatggaggaatgtagatgtgttgttttcctcgtgaatttgtctggtctgtaatcaggatcagttttgataatatcttgaattagttcatacagggtttcctattcatgctcttgatagagtaattttggaagagtgaggcacatttcctgaagcttttttttttaattgttgcagtatcttatcactcatttcactgatttccaactagc

SEQ ID NO: 77601 - DNA, 585 bp, Carica papaya
  Intron number 1 from transcript evm.model.supercontig_66.4 9 (locus evm.TU.supercontig_66.49) derived from phytozome v7.0 (chr-ID supercontig_66; pos 555741 to 556325)
ataacagtaaaggtcagtttgttatttagttaatttgttgatttttgtttgtgagtttcgttatttgtttgctgaggaagtacgagaaagggataaagaaagacgaacaatctcgtattttaactttgcttgtacctattttattggcatcaagtcgggtaatattcattctttgcttcagggactcagggtagagagtgaaggaagcgcaaaaagaatttcttctgatttgtgactaatgtgagagctaaatttgtttaggctaagttcactttggagaagatgtaattttattaaggtgtgcgctatggaaatcctgggactcatacacgttgcatattagtttggcgtttatttgataatttgagatatgattttatgaataaaaactcatgtaagctatgcatcaatctgtcgtattctcatttgaatggatatgcttattagttcttacagctacaagatagaaaactttggtgttttattttcttctagtactgcaactactactactactccatagagatggaggggggaaactggctaatcactctgtatatattggtgcagaacttaatacttatc

SEQ ID NO: 77602 - DNA, 651 bp, Carica papaya
  Intron number 1 from transcript evm.model.supercontig_62.4 7 (locus evm.TU.supercontig_62.47) derived from phytozome v7.0 (chr-ID supercontig_62; pos 348269 to 348919 reverse strand)
atctccgccagaagatcatcaagcaggtacattctcctctcctttcttccttgatttcttttttgggttgtgtttggcatgatactacgtatgagactgttagattgctaagagcttatttgatgcaaaatggaaatccattgacatgtctggtttgtccatttggtatagcataaactttatttatctgatcatcttgccagtactatgtataggtcggaatttttcagtctcatttttatatgttctaatccttaatctcgagtaccctttatttcgaaacaaatctccaaaatgcacacaatcacacaaagtgaagagtaaaagtaaaagaaacataagattaaacgtgattcgacaaacctaactacatccacgaggaaaagtgagaagaaacttttcattatgattttaaaaaaaaaagagataatagtacattactaatagaattgtaaatctttatataaataaagtattagaattttttctcaaaatatgcaccgaatattctacatgatgtacgcaaaactatcccaaaatcaagtcacgataaacacccttatgtaatttagttaaatactttgatattaagcacttatttaatccaaggatggtttgtaaaacaagcaggtggaataccaattcagtgac

SEQ ID NO: 77603 - DNA, 974 bp, Carica papaya
  Intron number 3 from transcript evm.model.supercontig_86.3 (locus evm.TU.supercontig_86.3) derived from phytozome v7 .0 (chr-ID supercontig_86; pos 27778 to 28751)
agctagctggtttaccaccggactttcttaaggttaatattattgttctcttcttacattccgtcagtttaaagagttcattttgaggaagtggaaggaagtaaaagcatttgtcagcttgcttaatattttcgtattttgtttattctccagttacatatttactgaattttcgctaatttcaaacttggcgtggaactttagactgtgaaatggcacaagaagagaaggaagagaaaataagagaaagaagaaagcaaaacgaaaacaaactggagatctcaaatttctatttttttttaaaacttcattaattttactcaaaatcatcaataatagacaactttcaattgaaggtgctctgttaaacagaaaattaaaatgtctgacgctaggaaattttttatgattctgatttttgtgatctcagttctttgaaggcatgtgtgatgcctataaaagagtgcctatactgattatctttcgtaagtctattacagctaatctttagagtacttgagacttgaaatctccaatttgttctcctttgtttccttctcctatttctgtgtgctttcttcttatcccagagtagaataggctggtttcaattcacttgcctttatggcaagttagagttgattgaagtatctcagcaataactgtaactggaagtgagtataggagctttgaagatcatgaatgctttatggcaatattttgctgagattgtgaattgtttctatattttgcagaataattctaatatgctgctatatgttagtgaaatttctctttatgaaagtttcctttttctttccttttctttgtccataaaagtcaattacttgctaactgatgtctgcattctctggacaattcaacgaatatttattctagtacttatatatttattgctaattttggacccttgcccagagtttcgacaaagacagaagtggaaaattcaaaat

SEQ ID NO: 77604 - DNA, 1048 bp, Carica papaya
  Intron number 1 from transcript evm.model.supercontig_62.7 (locus evm.TU.supercontig_62.7) derived from phytozome v7 .0 (chr-ID supercontig_62; pos 45810 to 46857)
acaaggatcctatatttgtcactggtggtgataaggtttgttctgttattttcctcttcttccttttcaaactgctatagatcagatgttatgtaatttgaaatttgaatggtattttcatcgttttacattttcactagctattttaggctttagacaggtcaaggtgtgaaaccttacaggcatgtgagcttggggttattttactgcttgtttggcatttagcagatatctttaagttgattgattttttatggaaattttcaaaattcaccattactgttatcattgtaagagaagtgatagtttcataggtgttagctaatataacaggtgaattttaataatgagacagtgagattgaatcctgttttcacccggtttaagggatggtgggcatgctaacttcattttgtagccaactgaaaaggcaataagaaacattttaatactgatccgtgatgcttcaataatctagagttaagccatattggtggtgacttgcggtatttggtgtctcttcattccgatcttcttttacatgcaaggggaagctgctttggctttttggcgactcttgattctatcacacttgtcaatgtagggactggcctgagttgggttccatgttccttcaaaataggacggttttcacttggaccatttgctgagtaaggtcttgatcactgattaagtatcgaaatgtttcatttctggtagtttactgaggagttgataagattgttttctccataggccaaagattacttatgaacttctcttgaagcccttgaaactgtattatgagcttaaaaaataagtagatatcaggaattttgtctctttttaacatataatctagtttaattacgtcttagaaatataaaatggctttagtgttgttttgttcctcttgtttatgtagtttgagatgaattttcagtggatgcaactgctttttgcagtttggttatattttgttcttgttctgaactttcttacccatggtataggagtggcaatcttgttctgtggggtgtaagtttgg

SEQ ID NO: 77605 - DNA, 1029 bp, Carica papaya
  Intron number 1 from transcript evm.model.supercontig_61.4 2 (locus evm.TU.supercontig_61.42) derived from phytozome v7.0 (chr-ID supercontig_61; pos 1285727 to 1286755)
cattaccttcactatatctgttgcaggattttcaggtatggttccaataaattatttacttaaattggactggacccaacttttctagctaaaagattaatgggttttacgtttaatcaaacgtttgccattctgggttgtttagcgtctttttctttagtgtacgcccttttctgggatgtcacgtgaagaagctgaagacgaatgctccgtttggttgtcaaattttctaactgctacatgtatgcatgtatgaggagatgtatggatagagttgagatcaggtttctccacaatcgcatcttctccgatctattgaggctttgggaactgccttaaataaacacttaaacttgatcttgatgcttgtggattaaacttcaatcttaatgtttcagttgctaattttgtactaatcaggtttcttattatccagcttaaatcagaaatattaatagttttccaaatttgtcatagctccggctttgtctgtggaataattttggatttaggcttcatatgaggaaacatgtttcatcatgtatccgcatgtggtattttttggttgccttgtgaattctggttgagatgcagaatttacacagtcaagacacattctgtcaagtcggattttttcttcccttcccttttgaattagcatttctgaggggttgacacatttctgtcttccttgggttccgctgtcttcgagctttattactttcttttagagttgaggattgaaatgcatttgatccttttttcccttttccaaaagtcagatcttgaaagcttatatctttttaataatatatcaagtcttttattcagtggtggtggtgaaaacaaaccattaccaggaatgaaacaaacatagtgataagtaagcatcttgttgttatctatcaaaaatgtaaaaattggttgtattatgaccaattatatggagcctacttaaaaaaattccttcatgatggtaaaatgttgattatttcattaaattaaaacaaaaatctttggtttcagagt

SEQ ID NO: 77606 - DNA, 792 bp, Carica papaya
  Intron number 1 from transcript evm.model.supercontig_9.60 (locus evm.TU.supercontig_9.60) derived from phytozome v7 .0 (chr-ID supercontig_9; pos 298632 to 299423)
gtggctataattcgcattataaggtattttgtgttgcatgcgtggattgtttgctggtagaattgtgctaatgagaagtgaatcctttggtgagttgggtcgttagtggaatgaataggaaattagtgtttttttttttaaaaaaaaattcttttaatccaatatttatggtgtaagtagagaggttaattagtgatgctgctgaatgctgtttgttaggtaattgtttggatagattttttcttgaagatgcagctgtgtcctaatcttcaactacattgaattgtgaattctgtttctttaatggaggtttattcaaattatgatggcattgtatcccttgagctttctctagatgactaaccatttccagcacttccctctgttgcctccacccaaacatccattcttccagggaggatggggcaactgaagggggccagaattactaatgatggaaactggttaaacttcaactttgggatatgtattattctgctgtcagaaatgttctcttcaatggtcaactatattgatatatgtgtaatgtcctataaaaatttaatgaatttgtttttagcagtgatctaagtgaataaaattttcaagtaattggtgtgattcttgtccactggtccttcctaatcccatatatttgcggtcttatatgtttttcttgcattttgccatgtaagtaatattattctcctaactgagagtatcttctgaatttgcataatgattatagtccagttacttatttgagtgcccttcaacagtacatacgatctc

SEQ ID NO: 77607 - DNA, 846 bp, Carica papaya
  Intron number 1 from transcript evm.model.supercontig_91.4 9 (locus evm.TU.supercontig_91.49) derived from phytozome v7.0 (chr-ID supercontig_91; pos 541327 to 542172 reverse strand)
atcctcctctgttggcaaacgcacactcttttctcgtactgctcttcctgtccaatttatatattttttttccttaatataatgtgaatttgatctacttttagttctatttcttctcgattaacataacttcatcattcttttaaaaggatttgattcctgacatgcctactccttttctctgttgtgccacttacagctcttttcggatttcgtttttattttttcgcctttcaaggtgaaagaagtaagtaaactagtatctgatatcaacccctgtttgacggtttttgacggggatggacaaaattataacttccttatatcgtacttaacctctaattatttgcccgccaaagtaggatgtcctaatttatctgacaatacttttttgtcctactagtaaatctctattttactttactcttttcagccaaagaaggatgaagtcaggaatttcatttgtcttttttattataattaattcccaaacaaggattgattactattctatgtactttgttttaatcttgaacttccaaacataatgttacccttttgtctacgtgttcattgtaggaaaattacttcatgaactttgctccttatatcacatcttaaactcttttttaactttatgggtatgcttattgtttgttgataatttctttcattattagtaaagtagactccctttttctcttagaaattaggtttgtatatttttcaatttgtaccaaacttctgtcgtcagaattgtgttttgttgtttacatactcaattattggtttcaacttgaactgtgtgcatgtctgttctaggattactctcctgtgattttgaag

SEQ ID NO: 77608 - DNA, 614 bp, Carica papaya
  Intron number 2 from transcript evm.model.supercontig_8.19 8 (locus evm.TU.supercontig_8.198) derived from phytozome v7.0 (chr-ID supercontig_8; pos 1394213 to 1394826)
cagttgttctctggcctgtttcaagaaacataaaggtgcttatttgcttcttcttccaaatttctagatgctaccacgttgttcagggctttttttgccctaaactatgtggattgtctggtagttttaactcgaaacgtgcatttaacaaatatgaaatcatgaagaaaatctcttctttttttttcctaggtgggtgttacaaatgtaatgatgttatccaataaatgaatcattcaagcttgtgccacaaacataacgtccttcgcagtacaagttagaacaagcatcgaggatccacttgttatataagaagtattttctagttttgttttctaaagttatgtatttcaacataaaaatatagagtgattaacagtgaaatatgatgaatataaaacttttcaaagttacttttagtgttctaaatacgtgttgtttgtttgtacttcagaccgcatatccgcatgaacacagtttgatgtaacaaacagagctgggttttttattatgttttacatactcatagttttctgtaccaatagtgggaattaatgtaaaatcttataaatgatgcagaaactccttgtgctaaaccagaatccactgaggaa

SEQ ID NO: 77609 - DNA, 480 bp, Carica papaya
  Intron number 2 from transcript evm.TU.contig_25278.3 (loc us evm.TU.contig_25278.3) derived from phytozome v7.0 (chr -ID contig_25278; pos 28014 to 28493)
gagtcctagcatttgggatacatttgctcacgctggtaagttccctctttactcacatctgcctttgacttttttttttttctttttggtagatataaattgtaaatctctgataacaattgaaacttttcttgaggccttcagtttgtggttttagttaatgtaacagtgaaaagtcacttgtatgctgaaaatcacatgcagcgatcaagatttgaaatgaaagtcccaactaggtgaagaggattaagagaaagagatagataaatagatttatctctccatatatgtaacttataagcttgatcgcttcttatggaccggtgaaaaacaaagaaacctctttggttgccattttgatcagttcagccaaaaaacttcagtgtattccagtatatttgttcagattttgctgaaacaaacacatacttataatggtgtatgattgatctaatcttcttgagctcgaaatttcaggat

SEQ ID NO: 77610 - DNA, 772 bp, Carica papaya
  Intron number 4 from transcript evm.model.supercontig_67.9 (locus evm.TU.supercontig_67.9) derived from phytozome v7 .0 (chr-ID supercontig_67; pos 120102 to 120873 reverse st rand)
ctgtagcttcacttgttttgggaataaagacagaggttagttttttgttcatttgaattcttttttagactaagaagaaattctttggaggacacctgtctttaatatgcaggtaaggtcttatttgcctgtgaaatatgtgctttgatatgacttggcattggcgataccttgtgactattacactttcttttttcctgactataagctactagctagcctttgataagtaataatgctctttaatgtgctaatgaactctgttaaatccaaaatgtgctagaggtagaaaatgcaaatttatcatgtgaaaaatagattgttaatgttatttgatcatcacatggatattcataaagtacccaatgaaattgtggagccatcagaaaaagttgtaccatgaatggaatatgctctttcacaagctaccatactgcatattttattttcctgttcaagagctttcggtgtatgcttatcattctttaccactatttgtttcatatgttatctctcttcttttggctcgggggaatggttggtagtggactgagggtatatttcaggtctagttttctgatagatttatttattttgggccctttctccagttaacctttcctttacttttttacttttgagcatgatttatttttgcttttagtttatttctaatttctgtagctcttgagaggggaggttcacttttctctcaatattgacatttctaactctgctttttggatattttttctcagggtctggaagaagg

SEQ ID NO: 77611 - DNA, 495 bp, Carica papaya
  Intron number 2 from transcript evm.TU.contig_26638.3 (loc us evm.TU.contig_26638.3) derived from phytozome v7.0 (chr -ID contig_26638; pos 7094 to 7588)
aaaagctttatacttgcaggttttttactaccctatttcttatttacttttggttttgtgtcttctctgtttggattccttttatacttgtttgattgctaacactctgtttgactgctgaggaagttttagtgaaggttatggaattatttgttcctaaatactgttcaccatttgacctaaattgagctcaaggctcaagaattttgttgcagttttagtatctggggtcgagtagtttaaactcaaaatgctaaaaaattttattcttgttcttcagcttttttgtttcttaatgttttttcattttcaacccacaaaatcatagaactgattccaagttgttattgacagtaaaaagttgtttatgtgatctataatttctctggatgatttatggtatctgcatgaatgggtaattacagatgaattcttcattcaataatttaagacaatattgattcttttactttctccttttgtttagtggaaaag

SEQ ID NO: 77612 - DNA, 809 bp, Carica papaya
  Intron number 3 from transcript evm.TU.contig_26638.3 (loc us evm.TU.contig_26638.3) derived from phytozome v7.0 (chr -ID contig_26638; pos 7601 to 8409)
aatacttcaaagaagatccagaactatttgacgtaagatgtcttagagtttcttttattggtagttaatagtctgtctgctggccctttttttctccttgagattgtctcagttacattggactgcaatatgcattgatatttgaaggcttggttaagatttctattgctgatagccttgtattattttgatagatactgtgtaccatgtgctccctatcaaaatttaagagaactcactggttcttgctgtatttctcatggcctattaaactgtgatgacctctagattaatttgataggtgacctgtgtcaggcatgacactcgtgggtgtccgatgcttttcttttcttttttttttctttatataaggctgtattttgttatgtttgacattttcttagctttctttaggtttatattaattttatcatttaatatcaaaattcaagtacctgggccaatttggactcttattaatcgtgttcacatttgtttgcctctaaacattgtgaagtcagatgcttggatcgatatccatatcagacaactgtactaaagtccaagcgatgtagatttgaccttaggcttagtcttcatagacatatgtgtttaagcttatgctttacctatcctttccgaaacttcttggtgagcctacatcataaccgtcagtggtgattatcattttagttcttgtatcttcctctcgttctctatatatgcaaattgccttaattttttcaagactctggcactggaattgaacatttcggaattatgattatttagtttacattgccagtatc

SEQ ID NO: 77613 - DNA, 668 bp, Carica papaya
  Intron number 2 from transcript evm.model.supercontig_7.61 (locus evm.TU.supercontig_7.61) derived from phytozome v7 .0 (chr-ID supercontig_7; pos 612277 to 612944 reverse str and)
ctgcagtatatgttggttactagtttcctatcatccttgtttttccttgagtttccaaggtaggtgtttgttcctgatgtccattttgtgatccatgtatagcaaatacttctaatctaaatatattcttccatgaaacagttaattcctgtgaccttcatctttgttgattctttattacgcataacaagttctctctaatctatgttttcctacattctttatttccgacggccttttgaattgactgaatttttatgaggaactgaggatttctaagatttttgtgattcataatcgatccttcaaattgagttcaaacaaaacattgaaaatctgggtgcaatttattcgtgtatcaaacaagcactctccccttggtctgggcatgaccagccagttatctaggaatcccgggtttccaaactcgccactgatccctgtttagggatcagatatcataagttagaacttcatgcactaatttgataatttacctttattttttctttcctcacttgcttttaagccaaacagatttaagaatccagaaatcctttaatcttttaaacgtttgctatttttctttcctggacacctcttttcctcctaagttatttcatctcgaagtagactcaagcttcaattggccagtttcacatatcaca

SEQ ID NO: 77614 - DNA, 1029 bp, Carica papaya
  Intron number 2 from transcript evm.TU.contig_33516.1 (loc us evm.TU.contig_33516) derived from phytozome v7.0 (chr-I D contig_33516; pos 791 to 1819)
gccagggggaattacagaaggtatcttacatcatctgaaatttggtggaattgctctgtgttgttacattggttgagcactgcttagaaacttgttgaatataaaggcagttgattattgaaaaaacttcaagtaaaatggagatgggtcattacagtctaggcatcataatacactccttaggtcttgtaaagagaaaatagaaataatagattcctgagtcttgtcatatgatatagactgtgtggttctagctctttagtagaagggttaatttctttattattttaaatgaaatctgctcgaggttagataatttcagatgcaagaacacttgaatgagttatttaaaggaaaggggccggaatcataagctaaagttcacatgtgcgtagggtcaacagattaccccttagccactagatgttacagacagaaagaaagggaaacaagggagaaggaaaagccctcatctgtttactgtgattctgctcaaaccagaattgttgcacaaataattgttgcccaaactgtatttgtagtattaacctctaatattcagttcagctcctgaataactacgttatttgttacagaaaatgtgccaaatacatattaatagacctcaaaccaccattgaagttccagaaaaattatggtaatgttaaataaacagttgctactgccacaatggaacttattgccaatgttttgaaatggctgtttgctttatatatgcaagacgtagaagaattctgttctgttataggaaatgcatgggccacataccaaatttccctgaatagaaattcatgcttttgacttggaaagttgtttcttcctacgcactctttcctgcacaaacaaaatacttacatagctatttaaatccattgagagaaaagttggaaatggatgggctttgcccaaatagtagaacagttcttgaaggggaagtttgtatagcatgaactagtaatttatgtgaattgcttaaatactgtttaaatattacagattgcaaaagca

SEQ ID NO: 77615 - DNA, 155 bp, Carica papaya
  Intron number 1 from transcript evm.model.supercontig_8.75 (locus evm.TU.supercontig_8.75) derived from phytozome v7 .0 (chr-ID supercontig_8; pos 487076 to 487230)
gactttgtgagtatttttttttttctctcgggtcttcttctttcttcaccagtattctgtttatacctacgtttgtaattccacaacgatcttgtttggttgcttattaatttttttgagtatgcaggagtattactacaagaaaagcagcagcc

SEQ ID NO: 77616 - DNA, 593 bp, Carica papaya
  Intron number 3 from transcript evm.model.supercontig_9.28 1 (locus evm.TU.supercontig_9.281) derived from phytozome v7.0 (chr-ID supercontig_9; pos 1917683 to 1918275)
cggttggtcattccccaccaaattgctatcttcaggtatggtttcagaaatatttttttactgagccttttttcgcttttggacaatacaggattagaaatgatgatgcttcctcatctacttatcaaaagttttatttattgaatctcactatttatcggtctatggcttactagggattaattgagttatagcaggatcggtgagggatgagctttgggcatgagaaagaatttgtaaaaagaaaaaaattgtaaatcttattctattaactattttttgggtaatctggaaatagatgaacaatagggcttttaaggggattgaagaggagatatataaaattaaggatagatgatttcattattttggttttttgattttaagttatgacttatacaggatagaaaattttgggaatatagttgatatactaacagatttgtaatattctgtaaatggatggcacccttttggtgccgtgattaaatatactttttacattttttatttcaaaaaaagaaattggacctcactatttatttttgtttatggtagggtgattttgatattatcggaggtgggactgcttt

SEQ ID NO: 77617 - DNA, 501 bp, Carica papaya
  Intron number 1 from transcript evm.TU.contig_26638.4 (loc us evm.TU.contig_26638.4) derived from phytozome v7.0 (chr -ID contig_26638; pos 20027 to 20527)
agggaaagtaagttaaattttttggatttctagcttttcatttctggaatatctttattcttgccccctgaattttgagagcttgctcaatttggggttttttcttgctgattcaagaaaaaaggttatgggttatcttctgattttttgattggtgggaaggagttgttgggttagatttccaaaagtggtgctgcccttctgatcttttttaatatgggactctctgcggatatgaaagtgaaaaaaatttcagttttgggaatgatttggttgtttatgagggtagaaagtaactgttacactcctattctatctgtatgggatttccaatgtttagcaaatgctttgtttgatcgatgattggtgtttaactttctggacatatatgtaaatagatgtatctatgtgtataaatataaatagaaagggtatttgatcgtttatggttttgcttctccttcagatacaataatcaaactgttgctgttaaggttgtat

SEQ ID NO: 77618 - DNA, 507 bp, Carica papaya
  Intron number 1 from transcript evm.model.supercontig_997. 5 (locus evm.TU.supercontig_997.5) derived from phytozome v7.0 (chr-ID supercontig_997; pos 21458 to 21964 reverse s trand)
acttgctgattttccaagaccgcgtcgactcagttagtcctgccatgaattccaattccgcgtcgactcaatggttgtcgtgcaggacctttctgctttctccttctctttttatttccccctcctcttgatttgctttacagaagcgtctctaatcccacacccaaaaacacaagtactctcttcttcttcttcttcttcttcttcttcttcttcgtcttcctgcattttacattggcttaatttcatttcattttgaatttgtctgggttcctattttgtgtatagtcggtttaatattatgggagttttgattttgggcaatccatgtttttgataggtttatccttgttcagtaaggttccttgctggagatggctgaggtatattgtacatatatatatatatacacacacatatatattagatattattcagtttaacctcaatctcagtaatgtaattttctgtggaaactgaaatggatgacaggagggtcagaaggtt

SEQ ID NO: 77619 - DNA, 796 bp, Carica papaya
  Intron number 1 from transcript evm.TU.contig_41748.1 (loc us evm.TU.contig_41748) derived from phytozome v7.0 (chr-I D contig_41748; pos 163 to 958)
aggttacagagagtctggttccaagagttttgcaggtgaaagtcttctggttccgttctctttccttttttatcatgttgtggaaaggagaaatggttcgtgcagtaatgctcttgtaattcataaaaaagaaaagggaaagaaaattgagggaaaaaagaattattgcttgcatttgcataataaaatgatactccgaattaagtcatctcggaatattgaaacttggctctaatcgggtttcaatgttatttacttacaggtggctaatctttaattaacttagtagttgagagaaaaggcttttcttttagaactaacctactttgttgtgttaaatggactacttatcccgtcttaattgatttatttatttattcatggagttggactaaaaattcgatttggatgcttatttatttggcaccggacactgatattaaaagcctacagaatttgatacagttgtgagaatgaagagctccataaggttggaatacatgagtattcaaaaccaaaacaaacaaatattcagaaaacatatcaaacaccaataatgacaatattaacgaagttgcaagatacattgtagtttctacggaactacaatatatcgaaaaggcatctaagaaattatactttgcgtggggaaaagatttgctcttgtctccgagaaggaatactcaaatcattaggaagcaatgctttattatctctactttagttgtttctctatgtaatctgaagtatccttgatgcaggcaagtcgacagggactgtgactttcttgaacaag

SEQ ID NO: 77620 - DNA, 616 bp, Carica papaya
  Intron number 2 from transcript evm.model.supercontig_61.4 4 (locus evm.TU.supercontig_61.44) derived from phytozome v7.0 (chr-ID supercontig_61; pos 1326930 to 1327545)
acaagaatcgccaacgtctctacttatctgaacaggttggttctgatccttctgtttgttgctactgatatctgaatccatgaagctttgcaggtatttttctgctgtctctgttatgtgaatatgtacccaagaaaaccttaatcttatcttccttgcgtaatgcttttgaattctaaattccagtggcttactttcttcacttcaaatttctccatttaggtactcgttgattttggtttaactagtagtatatttaaatatatcaaggtctccaaggcccgtgatggaccatataaagttgtttcttgtgcatcacagtataagattggttctttgtaatatgcaggattttaccaattctttcctcttctcataaattggttttcatttctattgtcagactgacggtagtgtccccaatgctcttgttatcactaattgttagtttaactagtagtatatttagatatattaaggtctccaaggccagtgatggactatacaaagttgtttcttgtgcatcacagtgtaagattggtcctttgtaatatgcaggattttactgattctttcctcttctcataaattggttttcatttcttttgtcagactg

SEQ ID NO: 77621 - DNA, 416 bp, Carica papaya
  Intron number 2 from transcript evm.TU.contig_29394.1 (loc us evm.TU.contig_29394.1) derived from phytozome v7.0 (chr -ID contig_29394; pos 1570 to 1985)
caaaaccagatacaagaggcacaaaggtatcctcgtaattggatagttttttagatctttctagttttgtaaatcctgagttttatgcatattctttttccattaattatatatgacttgtttggtttttcatttgtaagtttcaagcaatgaaaatgccattaacttctgggcttcgtggcaaaatgaatagattatattagggtcatagattcagaagaaagttttattttcttcctgccaagtcactatccaatccgttatgagtttgtttttgttacgtcttaaccaccttacacttatcgaatatattgcccaagtatctttccatactttgaagtaagtgattgatttatggatcacttattatgttacttccaggtagccctgctattcttggagacagagaagaagat

SEQ ID NO: 77622 - DNA, 569 bp, Carica papaya
  Intron number 1 from transcript evm.model.supercontig_8.30 1 (locus evm.TU.supercontig_8.301) derived from phytozome v7.0 (chr-ID supercontig_8; pos 2283492 to 2284060)
aagtcccttcggcgcataattagcgcctacctcaagtacctttcttcaattcattattttcacttagttttcttttttttttttttttaaatttttgttccaatcatgaagtcgctacaacgatcaaatattggtaatccattcacgagattcgttttttcaccgagtaaattcacaattacgtgacgatcgagcgatcgattttttatcgagtgcaaaaagttttttgagcttgattatcatacgagttggaaaatgaagcttggaaatttcgttttatcgaaaatgtttcatgttacctattcagattttttcttattcggagaatcttaaacaatttcactcgaagaaacttaccagagagttttacaaagggattgggtatacaatgttgacagtgatgttttaatggtatcatatgataccgctactttacctacgtatctatgagacgaattctcgtaatgtagtatttattttcttcctgttgatgggattaacgatgttcccttttattgcatgtactttctttagctacccagaagctgcagaagaggatatcaaaagat

SEQ ID NO: 77623 - DNA, 583 bp, Carica papaya
  Intron number 2 from transcript evm.model.supercontig_8.30 1 (locus evm.TU.supercontig_8.301) derived from phytozome v7.0 (chr-ID supercontig_8; pos 2284064 to 2284646)
aaaggtcatttaagaagataccacctgtacataaggtactctttgatttgttcagatttttttttttttgtggcgagagaaaaagagtaaatatataaacaagcaaaggggttgtcgccctgtacaggaaggggaattcatagatgatagctatgtgtcgatattattgaattttttaaaatgtcggtcttaacttcttgaagaaacgaactctttaaacagaaccaagattggaagcctctgtatgggggcttagcctgtttgttgtctcagctatttcaatgctaaactccatttttaagtcacaggagatctttgatgctagtacattatggtgctgtcttctgtgagtaatgtgctaagtcactcaaattggcatgccgcataacgggactaggaattttgtatgttgaattaatgtgaaattcacttctattgcaaaatatgaggagtcacttttggcttgtctgagatgagtgaaaatgcatttaatgacattttatattggccctaccaattcttttaagagaaacaaatttttttttcaggctttactatctcactaccctatcaagtacaaaaa

SEQ ID NO: 77624 - DNA, 737 bp, Carica papaya
  Intron number 1 from transcript evm.TU.contig_34650.1 (loc us evm.TU.contig_34650) derived from phytozome v7.0 (chr-I D contig_34650; pos 1937 to 2673)
ctcttcaggttaattcaatttttttaaaattttttgtttcgtgatttttttttctcagtttactcttcgttattattattatttttcaataaaagagttaaatctctgctgattcattcagcaacttgtcttttctttttctttttccccttctgttctaatgaatttatttattgtcattagcggattaataatgtgccaatttttttgcggtttgatttcaaatttagcaaatagagaaccgatttgtacttttgttggcagcattatttattagtctgctttgtttgtttttctttattacgttgttttcaaattagattttgcgcgtgttaaatgtaactaacgacattggcgaagtaatctatgcttgcttgctaaaaaggaaaattagtttgaaacatatattatttttcttttttccgtttaaatgatataatctaaatggaatatgagcatgtttagttaattttttttgaagcgaataaggagaggtgatataggtaaattttttgcaatctttgttttgattttatgttgtggtttatacctgtatttgttgtaagatattgtggcctagctggttagaattacccgtgacaatttacaggattctaacagcatgcaaattgttaaattttggctttgaaccattaattttctatttattgttttgttatttgttcttttttcacaattttgtggagttcgatttgccacttgcaggtgccaaaagg

SEQ ID NO: 77625 - DNA, 886 bp, Carica papaya
  Intron number 3 from transcript evm.model.supercontig_9.27 6 (locus evm.TU.supercontig_9.276) derived from phytozome v7.0 (chr-ID supercontig_9; pos 1875358 to 1876243)
ctgaagttgttccagtcagtcaatcacgtgaatctgtaagctcggctacttaattgtagtttgtgtttcgattttcttccaactttttcttgtgcatttattttgttcaaactctctcttgtgcttaacagtttatataatttctttcctgccttctggttaatatttcttgtgcaataattatttgtttgggttgtggtatttttgcatcacttgtttgtttttgtctttctttttttctttctgttttattctcatgtttgaccaaatggacattttagaagacgtgggagaatcttttaaatatataattaacaaagtatggtttctccaagaaaagaactaaaaaaggaatgaagcttcaaaaaaaatcagatagaagaaaaagagaagtgaaacaaattgtcgtttatagaaagtactttttcagtgaaggttatgttgaggttccattgaacattgcaattggaagagtttttgcttcttgccttagggcaaaccaggaaagatccattcttcatgctgataatttttgccaattatgttaagatcaccagcagtttacttcaatgtttataaaaaaaattgatttaaaacagggtttatcaatgttttggggatttcaaaattatcttgattggtacttggtaaagttttaattactgaaacgaaattgctttatggatgatgtagctttttggctgtatctcttgtatgcttcttaggctgtatttctgtaaaaagggagctttttgtgttcccttggttttttcaatacatcatttagtgaaaggtactttgatatgtactatttatgattgtcaaatatttaaatttcacctttaatcaaaaaattttgctaaacgctttccatttggaaggtctc

SEQ ID NO: 77626 - DNA, 521 bp, Carica papaya
  Intron number 2 from transcript evm.model.supercontig_70.7 3 (locus evm.TU.supercontig_70.73) derived from phytozome v7.0 (chr-ID supercontig_70; pos 494946 to 495466)
cgtggttagttatcttttttgtttcttttcttggtttgttactggtgaacttccatgttgcgtttctttattaattacttcatccggagctttacttaaattattttgagctttggtgttagatctgcttgcactttcttgattgaatctatttagttcgggttattttggttgaatctactttagttcaagtattaatactgccatctatttgcaagtgtcgctgatccctctatagtctattctttgttgaattggaactgtagtaagcttcagtagctagttgtattcagtttacgatataggtttttctaatttattagggttttatgctttgtttgtgggagcatcgaggaaccaagttctgtgttattaaccttttctggctataagattatccgtggaagtattcttattagtagtagtaactttgttgtcgttaagtataagctgctagtctgctaatattttaccatacttccataggcaagaagagggcttggacttactgcacatattgt

SEQ ID NO: 77627 - DNA, 656 bp, Carica papaya
  Intron number 3 from transcript evm.model.supercontig_81.1 31 (locus evm.TU.supercontig_81.131) derived from phytozom e v7.0 (chr-ID supercontig_81; pos 663659 to 664314 revers e strand)
cagaggtaattaatttctgtttggacaaattttgattgtgtttatttatatatccatcttgggaagttctctgttctttttaccgaattgaagttcttgttaactatttttccaaagttgcatgatacatgtaatgtttcatttacatgtttctcaaaatatctggaggataaaaaggaagggaagaatagggaaagttactaacacctctatactgtaagcagtgtataatatgtgtctttttgatttggacaattaccccatataaatgctatttctaataaatataacattctttaattaatctaatttgaacttaaacaaattgaggatagaaatatagtttattctatttattttttcttacagttacactaaaataattatattcttctctacctcacttataaaaacaactgcaatgggtggattctgttgtgtacttaaagactgttttcgagctaggctggaattgaccttgatcccacttaattagtagattcttaagtgttaatttgtccagttgctttattctaaaccatagaggagaacggttcttttttttttttctttttttaattctttcctctccgcttgaatattaagttggcgtggatgtagggcaggaagatctttcgcaggtatttgccttagca

SEQ ID NO: 77628 - DNA, 196 bp, Carica papaya
  Intron number 1 from transcript evm.TU.contig_33491.1 (loc us evm.TU.contig_33491) derived from phytozome v7.0 (chr-I D contig_33491; pos 2669 to 2864 reverse strand)
ttctctgcatcctccgcttctcctgtaaaaacccagtttgaggtcagcttgattctttactttttctcctttttcttttctattttcgatctcaaccgctgattttgatttatgggtaactgttattattattatttttttaataatcgaatatttgtgggtttatttggttttggataggggtgttgaaggagaa

SEQ ID NO: 77629 - DNA, 651 bp, Carica papaya
  Intron number 1 from transcript evm.model.supercontig_92.8 (locus evm.TU.supercontig_92.8) derived from phytozome v7 .0 (chr-ID supercontig_92; pos 119357 to 120007 reverse st rand)
tggtacattcatttacttatcaggattagtctagaataagtcgaggaataagataaaaattaataagaattgaaccggacaaattgttagaagattttagatatcatggctatgggtttatgctaggaattgtacttgtgtgggttgtttatttctaggttctacattcttattaagcaagctttgcgtgaatattgattttgaacttttgatggcaagatatgctttgtgacaattttatctgtaaatatctaatagaattggataaacaaagagggaaaaatgagagaggtttgcaattgtatgcaaaagagtatatgttgctagcttgttttattgcttctttattttcttatgaaatatgtctttcttgacctgatctggatacggaactgagggaaaaatatgacaattttcagcttctaagaaatggtatgtcggtgggaagccactatggtcttacattaatccaaattttgtgttgttcagcagaaaattatgttagaatgaccctattttgaacactttcttaggcgttactttaccagccttatttaatgaattgggaattctgctctcatgttaattagtttgtcagagtttctcaatgtttatatgttttatgtaaaaaaattattataagagaagagg

SEQ ID NO: 77630 - DNA, 312 bp, Carica papaya
  Intron number 3 from transcript evm.model.supercontig_728. 2 (locus evm.TU.supercontig_728.2) derived from phytozome v7.0 (chr-ID supercontig_728; pos 8912 to 9223 reverse str and)
ttcatcaactgaagggtagtagttccaggtacttattgcatttttcaagtgattaactagtgggattagtttttacgatggagattttcgaaatgaatggtgttagtggaacaactatgaatgaagaagactagattccaatatatgaatgttgctatagttttacagcaaaagtagttagaaaaccctaatttgatgccttttttattttgcaatttgtttatttggtcaattgtactttgattgtttgcatggaaaattgctctatggttaacagtgttggtgctgtgaggattaagaatatctgcgtcg

SEQ ID NO: 77631 - DNA, 654 bp, Carica papaya
  Intron number 1 from transcript evm.model.supercontig_69.9 (locus evm.TU.supercontig_69.9) derived from phytozome v7 .0 (chr-ID supercontig_69; pos 131975 to 132628 reverse st rand)
gtcaccgctccaaggtactctattaatcatcactgcgtttcaatttttgaattacaatgcttgtttcttgtgagttgagagagagagagagatacgaaggtcttttcaggataccctacatccattttgtttaaaatcccgcttcagttagtaacttattacatactggggcaaaattttttggaagctcaaaattgaagtttgtaacttgagaaaaatatcagtcacctaccccgttttccccccagtggattgatgactgactgctagtaatttgctaatggaggtatttcaaaaaataatttgctaatggaggaatgtgaacagtcgtaaatgtatagaaacatggccagaatatggacagcaaaaattttacttttatctaaataagatgattgtaatttatttatgagtttaatggaaaaagggatttatctctctcgacattctatgtgaagaggcatgaattaggatagttggaaatacaaagagcctgcttcaactgtgtatgccagctgacttccaacaaagcaaaaaatttcttttcttggctctttcaagagtggatttaaatttcaacaggaaaaaatgtttgtctaatttaactttatcacttaaatgcaccaggatctttctctttggcaaactcttgca

SEQ ID NO: 77632 - DNA, 362 bp, Carica papaya
  Intron number 3 from transcript evm.model.supercontig_62.9 (locus evm.TU.supercontig_62.9) derived from phytozome v7 .0 (chr-ID supercontig_62; pos 71906 to 72267)
aagaaggtttgtattaggagctagagatgttatatataaagcttataattaggctataagtttgcagacatatttgtaatgtgaagatcacgttgctaataagttgttttggcttatagaagtattgccatttaatcaaactcagtttgttactttattgtcctattcctccactcttattatattgagtgtctcagattttgtttttattgatggccttcgtagctattgtctgctcattttaattttttaatgataaaagggaacaagtttgttcttcatgggtcctccactttttgttagaggtaacgattttttttactaatatgtggttttcctttaacttccacagttctcttttg

SEQ ID NO: 77633 - DNA, 629 bp, Carica papaya
  Intron number 1 from transcript evm.TU.contig_47777.1 (loc us evm.TU.contig_47777) derived from phytozome v7.0 (chr-I D contig_47777; pos 172 to 800)
ccgaaatccagcgtgtacgcagtacaaacaatcaggtatgagcacttagctttgacctctggaaggaagagattacctgggaaaaataaatcctgggtaagattctttggtccatttggcatcaatatagcagggctccaaaacttatcaaacattctttagtcccagatgtcgtgtttctaccatctctccgttagaggaaaattaatattttcttcttatcttttacttatttcaaaaaaaaaaaaatcttcttaccttttactataaaattgcactacagctcattcggacatatgtatattaacttaccttcagttagaatgcttctgatattttttccattgacttcctccatatccttgccattgcaaacattttgaatctaagcacaaaggttagcttgtatcacttgagcaaagggcaatacccttgaactcaaaaagtaacttaggaaatcaatccttagaacttgtcaagaaattgttaaaggctttatggatacagaaaccatctagttgtttctaatgagttttatggcctatgcaattatttacgtggatgaaaatctttatattaatttgcaaattgaatatttatcgtaattttctttgaaatgctggtgcagt

SEQ ID NO: 77634 - DNA, 402 bp, Carica papaya
  Intron number 1 from transcript evm.model.supercontig_92.1 5 (locus evm.TU.supercontig_92.15) derived from phytozome v7.0 (chr-ID supercontig_92; pos 173725 to 174126)
gctccgttaattgacttggagaaggtttttttctctctttctctctattatgtatttctacaaacacactatcttctaatccacgatcatataaatcatttctccccgttgcaccgctatagttgatttactgcccaagtagatagttacctagcataagaatgcatcgcgagcttagaatttcctgaaatgttttgagtgttcctgcaattcttaatcaatgacttgtaacataaagcggtgtaacgaggaagaagaagaagatctggaagaatttgtattgtgtaattcgttgttttcaaatctgtgatatcaagtgcattctagttttgttcaacttttttttttttgggattgttgtttccaggaagctgagatatcagcctctatcagctcaggcgc

SEQ ID NO: 77635 - DNA, 984 bp, Carica papaya
  Intron number 3 from transcript evm.model.supercontig_73.8 9 (locus evm.TU.supercontig_73.89) derived from phytozome v7.0 (chr-ID supercontig_73; pos 1187276 to 1188259 revers e strand)
tttttgagaatactccctctgctgcagttggagaggtcagtcattttttcatggctgttttctttctttctttttcttgactgctctatccttgtattttaatgggcactgcatctgtgttagtgtttattgttcattttcttttcttttttttttaaggattgttaagttgtgttgggaggacaagtccaacttaaactgaaatgttttgtttctaaatgttttagaatccaaagcgaagtgaatttggttatacattaaactaaataccagagcaatattcagtttactgaaccatgatactttgaattttattaatgtaataaattttttttacctttttatttttatttttaattaactatttatttttaatcacatgaatgatacaaattgttgtgaaaatcaaatgtaccaaatatttttaatataatgtatacttatttataaaatatataattttttcttatatatgtattaaatatttaataactcatacaaatgaaaagtcaattttttggtttagtttgtttgtaaaccagatcgttggttttaatattcagaccaaattgaaccattacaaattagcctggttggttcagtttcttggttttcaccagataatttatacccctaaattgtaaatagccaagtagtgacaaattgtacttatgcatttaatccctttaggccaaaatatactgataatgaatgaattttcagataatctcttgtttgcaagctgaagtgatcttgttcttttttgttatggactagatatgtgatttcgcgataataccaaaatgacatattatggttccatgacattgtaactgatttttttgttcttttttttgggtttctttcttgatgcatgagacttttgaataggtgcatgctagttatcttgtttatgtgctaatccttgacatggtcatgctttattcagattggtttagacaaaggttcacaaggaaagaagat

SEQ ID NO: 77636 - DNA, 366 bp, Carica papaya
  Intron number 1 from transcript evm.model.supercontig_905. 1 (locus evm.TU.supercontig_905.1) derived from phytozome v7.0 (chr-ID supercontig_905; pos 4535 to 4900)
tttgcgtgccgtttcgcaagtactctccggagacagtatgattgcaactgtaattccgtttgtttcttttatgtttgttctgttttgtttagtctctttttgctttgactagtgactgttgatgaatttccaaaggaagattattatttttgaaaaaagtctgtccagattttgttgctcgcctatttgtgcctagttaggtgaaaattccataattcattgctataactagaacctttgctcaatctaattgcttcatgtacctctagtttgatatgaattttatattgctgtctttcgagttctgatactgctcgtaattggcgactaggtgaggaataaggtactggaatctaaaggagcaat

SEQ ID NO: 77637 - DNA, 1005 bp, Carica papaya
  Intron number 2 from transcript evm.model.supercontig_8.91 (locus evm.TU.supercontig_8.91) derived from phytozome v7 .0 (chr-ID supercontig_8; pos 592137 to 593141 reverse str and)
tggtaagtaattaattaaaaagcagtaaaattcagaaaactttaattctacgactttcaaaggtggtccttttgagttttctgatgatgaaaattacatgcatgtcaactttacctcttcatttctgtatgtctctttgcaagcagagttatttatcgaatagttgcagcgaatcaagaccaaaaacaaattgaactgttccttttactcagcgatttgccattttcttgaattagattaaatatctcgttaatcaattagattaaagatattcttaaattgatcaagcacggtatattcgttgtcgatttgtaaaggacttgtgacccaaaaagaactctgaattgtaactctaaaatggtcattgaactacaaccatacgaagaatcacattagggaaaatatatggacccaagaccgaaccagtctcatgtaagtttgaattgacttttttaataatcatcattaattaaaaaataattaatgaaattaaaaacaaatatatagatcataatcattctctaaactccatagataataaaattaataaaataattaaatatgaatacataattaattttttaaaattttttagatttgccaaattatatttgatttaatctattctggtcccatttgaaatttaaaaattcttacctgagacttatacttaattatgagtgtagtgacatttttcttaacatatgtacatatagatacataatgagaagaaccaaataggtattcagagaagtacaaaaaaaaaagtgttaggtgttcagtttttaataatatcatggatttgaataaaacagtttttttttttttttaatatttgttctcatttgaaagacatttatatattatcttgattaatatttatatcagataatatgtatatttgtactaaaaattaaatctcttgttaaacatattgcatggagaatgatggagcagtatattatttttatatgtattgatgcagttgtggaggtgttagagaac

SEQ ID NO: 77638 - DNA, 711 bp, Carica papaya
  Intron number 1 from transcript evm.model.supercontig_887. 3 (locus evm.TU.supercontig_887.3) derived from phytozome v7.0 (chr-ID supercontig_887; pos 14785 to 15495)
acaggaataagtaagagagacgaattgagcaactcaagttttaatttgtggctgatgctaaaagctttcaagtacatggatttttatatgtacaacaacaactattactattaatactactactactaataacgctactcctattactaatatttttgttaattttactactattgttacatctattgctgatacttttgctactactgctaaaaccgctattactgctactgctactatttttactactgttactactgttactaccactgctactactactactactaataccgctacaactattactattactactactgctattactactgtattatatgtaataacacaaaaaatcaagtttattttaataatattattaactatctagcatttttttttcagatttccttacttgaattaattaattaattcaaataaagaaaaaaacgttttgttgccatattaattcaattgaagagaatttgaatgtacaaatcaacctacaaatgacaaaatgatcaattaagtttgatttatttttgttagaaaaaaataaaaagatagactagctgaatataatatttgttaaaatattaaaggaagaaataacagagactaattgagaaactcaagttttgatttgtcgttgatgttaaaagcttttaagtatacgagtatttataggtactactactactactacta

SEQ ID NO: 77639 - DNA, 589 bp, Carica papaya
  Intron number 2 from transcript evm.model.supercontig_74.4 1 (locus evm.TU.supercontig_74.41) derived from phytozome v7.0 (chr-ID supercontig_74; pos 372373 to 372961)
ataggtcggcttggcctgacgcacggcagtttttggtatatttttactcactaaacttgtatttgctcgttgtgaacatactgtgtatttatttcaagttttaattaccaaattcctcgtctatatttgcaaattggttcatgttctattttggcattggtttactgctaaaaaggtacggggtcttgcggattaataaacactgtgtatccagtgcttgcgggattggaaattgtttaatttattagcatgtgcaaatatgctttgatctttttcgacactaacatgattttctcaagtataaatctgatttctttgctataacgcaactattttgcttcttggatggccactgtatccttgtggtaatttgattcattcatgtcaaatttaactagcttttttaagtatgatatattgtatgtgtatggtctttagggaccttttaattcgccgtcatagatatcatcataattaaagctggatctcactctgggcaaatgaatttactggacattgacacgtgatttcttgtccttgcaatatggaatcttgtagctcgttaattttgatttggtgtaactatagg

SEQ ID NO: 77640 - DNA, 645 bp, Carica papaya
  Intron number 1 from transcript evm.TU.contig_41055.1 (loc us evm.TU.contig_41055) derived from phytozome v7.0 (chr-I D contig_41055; pos 169 to 813)
taaactacttctacagtcaagttgggaggagagaggtaatttttgggtgcttttttcttcgaacccctcaaccctcttcctgactcttgagaaaatataaaatgagatagatgttcttataacttgagagttttcttattgtctcaatggggctcataaaattttgaacgcccatcctcatgataatgagggggaaaaataaacaactcaaccacagtaagttggtttataacttgagagtttaagatacaaggcttaatttgatttgattctatttcatcctcactcaattccaactttttgatctttatagtacttttgacatgagttagaacaaaaatttgtatgttaaacctcccctccaccttgacattgaacttttagagggtaggaattaaattcatatgaattaaaaaggagaattggacttctatttttaaagaattcaaagtgggggctagaggtaagatccaaaacgtaaaaatataacgtaatgccacagaatcaatgtcatttctcaaagtagtgctgtatggttcagtttattgttggtaataataggaagaggatggaaaaaggtgcagaataaatttgaagctaataattccatttccatggtgtgtgcagaaggagaggcttggtgca

SEQ ID NO: 77641 - DNA, 658 bp, Carica papaya
  Intron number 1 from transcript evm.model.supercontig_88.2 3 (locus evm.TU.supercontig_88.23) derived from phytozome v7.0 (chr-ID supercontig_88; pos 499326 to 499983)
cataggtacacatagaaagagcaggtgtgcgctagggtggccacatgcttgagtggcttcaggcaaatgaggctgcaaactttcttagttctttttcataatagaaaagcaaaagcacaaacaggccgagagaaatcctgaaaagagcttacgactgatatcatgtggaatttagaggggaactttatttcttatcccactgagaaagagcaaatacattgctatatatagtttttacaaagagaaaaatagaaaactaattacagcaaagtaaatcaaattaaatccccgtatcagtggaattccgtaatcagtaccccataaatttaagaagattagatttgaaatggaagattggaggattttccaacatgtttttggatattaacattgatacttgtgaccttataagagacactgagattctcataattatagatgggactgtgtcttttcttctttgttctttgttttgtttcatcttgttggacaggtgtttggttcatttaatttgcattcaaaagtttcagttttcagttccacattagtaattatttccaaagagaagtaacattaatattatggccaatattggttcccaaaagaaattaattatgacctatcaatacactatatatgtattcatgtagattggttt

SEQ ID NO: 77642 - DNA, 971 bp, Carica papaya
  Intron number 3 from transcript evm.model.supercontig_90.1 3 (locus evm.TU.supercontig_90.13) derived from phytozome v7.0 (chr-ID supercontig_90; pos 301235 to 302205 reverse strand)
attcacagggcgcagaaactgctgttcttctttcggtatatcactttctcacaaaataaccacctagtcaacttgtcatcttctctgtcattttttgccacaatttcattggttatctgattcgtctttttttttttttttgagataaaagtgtgaattgtattgatgagtcggcaccaagggggcgccaccaatgtacgatctgatacgttgtcttaggagggagattctaaatactgcattgtgttttccgaataggctagcaattgtgataattcagttttaggaatcacagtatggtgttttacagcatgctgaagcacactataacatcttcttgactagtttgcgtaaatgtactagatgctttgcttagtctttccaagaaaacctctaagtttggaagcaaaatagtaggagaattatgggagagagaatgaaggaattaccttcataactgtatgaaaaatatctggtatggtgtgttaagtcttctgagttactcaagtaatgtagaaatgttctatgttttttgctttttgtctcgatgaaggagattcaaaccttatacctataatccaccagtcttcataattggtttcacgagtcaatactcctcttgtatctgatgcaatgtcataatgattggagatccacgatactctgaacatagagcctggtgtgcctccctatccttcagatttatggattctagggtctttttgactctaactgttggaagattattgaagacgacctggtcagggtggttcgcaatttctttgctgaaggcgctgttaagccctaagtttgaattcaaattcattgcccttactctgaaagttgaaagtccttcacttttttaccaatgccatcatatttttctttatgggatatttgaaggaggttttgctttttttttcccccttttttcagggtgcaacgattgttgatctatctgttgtggtcac

SEQ ID NO: 77643 - DNA, 729 bp, Carica papaya
  Intron number 1 from transcript evm.model.supercontig_90.1 3 (locus evm.TU.supercontig_90.13) derived from phytozome v7.0 (chr-ID supercontig_90; pos 302418 to 303146 reverse strand)
gatgtgcgtaatatgcttgcattcaagtaaacctgacgggtgtagcatgcttttttttttttttttttgaaaatcgataaatgtagcgtgttattaaatctataaggtaagcagcatgtatagagataagtacaaatataggaaaatagagacatttgtgtatattaagaaagcttgtaacatctgttatactctctctttccctcctaacaaacacacaaaaaagagaaaaactaaaggagctatctataagaggagtgtgatctatttatgatctgaacaaaaaaggtttacgtatgtatggtatctccccttatcttcccactttcaagagaaagaccctttagagggagttgatggactcgtacaatcttatactccaccagtgcaaaagccggcgaaaattgatacgtgaagtttggagtgttggttttaatcttgaatgatgtgaaaatgatctggtgcattttccattatgaatacactatccctttccaacttatcatggagtcaagcttgtttgtttttagttttgacgtaggatgctcccctttctgtgcctctctcggatatcagttgatttttaagacattttcatataattttatcatgtacattatttcaacatgatttctctagaaggtgctttatgtacaagatcatatatattgtggagattttagaaatcaattactttctaattgcagattaaaactgttaaagttagca

SEQ ID NO: 77644 - DNA, 1056 bp, Carica papaya
  Intron number 1 from transcript evm.model.supercontig_74.2 (locus evm.TU.supercontig_74.2) derived from phytozome v7 .0 (chr-ID supercontig_74; pos 21976 to 23031 reverse stra nd)
gcactggtctcactgccatcgttacaggtttcttttttctatccttcactttttttctttttaaatcttgatttctcttgtttatctttttaattaatagaagtattgtttggtagccgagaaaactgagaggagaaacgctcattcgctttgcaatcgcttgtattagttatttataacttgaattttgagttcttctttttaacctttattccccttttgctaaagattatatatatatatgcccatttttgtagtttcactaggatgcgtacggatgagaaactattttgtttcttagtcgatttgtttgtcggatggatggtttccattaaagcataaacataatttaaaatggataaccttgtctaatgtattttccgatggtgtctaaaatttaactgttagattacttttgttgggtttgtacatatatcttaatcaagccatgttcatggatgaatgataagtatgtgaaagataattattggtatttctggtctcattatgaattgaatggagaatgttgtctgcgattcatttcgtggttactctatcatatttgctacagacgtgaagttgacgtcggttactgtattttttttttcctggttgataatttaataaatcatgatccttgatttccatagacaaatagctaatgacctaaattgggtggagtgaatatatggctcatgatgattgaatatgtctgatttcatccattgattgacattcattgagtcagtttcttctagtacatattttactgaaatcattttcattggaagaccaagtcttcctactcttacatcattcttccctgatgtgtaattctagaaatcctaatataccacgtaaagtttgttgcagttactatgattttgccaaattgagtggtgcatttctcccatgatttgccttttcatttctgtccaataacttcctgtcagagcagtattgagctagtgatagaagtgttcgttagtcacatcatagtgcttatatcagttcattccaggaggatcaagtggaattggtgtagagacagcacgt

SEQ ID NO: 77645 - DNA, 461 bp, Carica papaya
  Intron number 1 from transcript evm.TU.contig_28523.3 (loc us evm.TU.contig_28523.3) derived from phytozome v7.0 (chr -ID contig_28523; pos 9166 to 9626)
cacggagggcggacacctttgagaagattgataaggtgagtgatctcgttttgttaaataaatcatttaattccaagatgcttgatagttgaatatctggggatgaaatggcatagaaatgtagtttgtttgaaatgaattaaaaaattatcatgttattttagattgttcatgaatttctggttaagtatggtaattttgactgaagtatcaatgatgtcaataagagcaatatcaaagggctgtttatttattattagtttttattttctgtttgaaattagaggttgttgtagttggtctctggttgagatttgagtattatgattttcgacctagctcttctgcttcatttcattaattcatgtttgtcttttaagttttgacaattatctaattatcctctttttgtttttctatttccctcttctattgatagattgggcaaggaacgtatagca

SEQ ID NO: 77646 - DNA, 733 bp, Carica papaya
  Intron number 1 from transcript evm.TU.contig_28899.2 (loc us evm.TU.contig_28899.2) derived from phytozome v7.0 (chr -ID contig_28899; pos 10039 to 10771)
ctaaaagccttcaagtacataggtatttataagtactagtactccttctactactactactaatactattgctaccactaatactgttacttctattgttgctactactgctactactactacaacaggtactactgatgtagccgctactgctgctattgctactattattactatttttgctactgctactactactactgctactactactgccactactactgtattatatgtaacaccataaaaaatttaattcattttaataatattattaactatccaatattttttttttaactttctttacttaaaattaattagttaattaatttaaataaaaaaaaagtttcattatcacattaattcaattgaagaagattttgaatgtataaattaacctacaaataaaaaaataatcaatttgggttcatttgtttttgttagaaaaattaaagagatatgctagctaaatataataatttgatgaaatattagaggaagtagtaagagagactaattgaaaaactcaagttttgctttgtggttgatactaaaagccttcaagtacatgattatttgtaggtactaatactactactaatattgctatgttactactactacaaatactactgctacttctattactactattacttttactgctgttattactgcaactactactacagtaggtactattgttactgcttttatttatactactact

SEQ ID NO: 77647 - DNA, 947 bp, Carica papaya
  Intron number 2 from transcript evm.model.supercontig_83.1 (locus evm.TU.supercontig_83.1) derived from phytozome v7 .0 (chr-ID supercontig_83; pos 2526 to 3472)
gatcttgtgtgtatccatcttctttaaggtatgttaaatcaaactcttctcttcctcttctttcttgtttcttggattggatacttgtgttttcttgattaaaatttttgacatattttattgtgaatataatgcaaaaacgttgaatgattaattgattaatcacaggggtaaagggttttatttatttattttattgataataggtaaagggttcgtttagatttgatcttcttcatcttcacgtatttggaccagtttcagtgcttcactttcatttctttttttcttttcgtttttgaggaatagtttttgtatttttatagtcaggtgtaataaatagaacaagaattggtgtgggacactgtaccatactacccattttgatatctaccgttagattctgccacgtgtccatgttcttaaatccattaccgtccatttcccaggtagtactctcagttttgtcttgtcagatcaggctctttgatcttttcaacatcttgggttgctaactttgtttggacttagccgtgttgtttccgtcaatcattttttcacagcgttaaaactggactagtaaatttttacagttaccctctacttcaaaacggttcaacggctagtacatttacaaccgctatgatgtccggaaacgatgccgttttggatttttgtctgattgaggttgcatagtttttcagatgcacttatctgatcaggtcccatcaagatcaaataaattttctgctgtacattttccttaaaaaaagaaaaagcacatttaaacatctgggttcagttttcacaaatatcatgttaacttatttataataatcaaaggtatgtatacacgcatatattttctttcatttgtaagttgtaacaagcatttgcactgtaatttttcagcacagcaggtgggttacccaccaccacatcttcaa

SEQ ID NO: 77648 - DNA, 821 bp, Carica papaya
  Intron number 1 from transcript evm.model.supercontig_71.6 1 (locus evm.TU.supercontig_71.61) derived from phytozome v7.0 (chr-ID supercontig_71; pos 908721 to 909541 reverse strand)
ctcacattggccctttacaggtgatcaatacttctcttgctatatgttaatttctatatttttgaaaaagtaatatgaattttgttttatttgttgaggatgaagattttgttaaaaattaacgtagaaattataatttattttatttattagtttttaattaaataaaatttatttttaaaaaaataacaaaataaaaaaaaatataacaaatagtatcagagtcaagaaaacaaatgaattacttacattaatgatcatggatatgtaagaaaaaaaatagagagaaaacaaatgaattacttacatcaaatataacctcaaacactttttctttgctttcttctctcattttcacaaaaaaaaaatatatatcaattacgaattatgaaaatacaaacataccctacaatttttttatttatgagatgtggttgaaaattacggtgaactctcaccattcccgcctcatccaaatgcatctcaactcaaaagagtcacaatgaaaaaaaaaaaaaaaatccaagtttaaagcaaaaatgtttccatactttttcgatttctaaagtgatttttacaaatattatgagttagtgaaaccccaaaagaaatatggaacttgccgaaaacttagtgcttaggcaatgatttttattttcttttctggtactgtgtaaggtagaattcaaagtctgggtttaaccatcttctaaatatttcatttaagttagatcaatgttgatatcaaactttttagtaagtattatatgaattaacgttaatcagttaactaagaaatcatatgtgattgcgcagtccgg

SEQ ID NO: 77649 - DNA, 878 bp, Carica papaya
  Intron number 1 from transcript evm.model.supercontig_75.8 (locus evm.TU.supercontig_75.8) derived from phytozome v7 .0 (chr-ID supercontig_75; pos 113941 to 114818 reverse st rand)
gtggggattgcaacagcttaggtatgacttcatcatttctacatgttcaactatttatttcaatttcaatgtccatttcttgcatgttaatattgttgattgctgcaattaattagtcattagttatttgtttttcctcgggagagaaccttgttgcttgttaaatttatcaaactaatacttaggcagctatctgttgcacttgcagtgcaagtaacccatttattctgcaagtactagtttatgggccaagcttgtaacatgataacctacattgactacaaacttcaaaatctaagcatagaaataatcataacaaatatgccaaagttacaaaatcattgctttatccgtttttctttcaaaaacaaatcgttgttatttttaaatgaaatggtcattggttatggtatgaagtttgcttggcactacttttgtcaattaagttccataagctcaaagagcaatctcattaacgagcaaactatttggctagctattgccaacatgttagaaaggaaaccctgcaagatataacttcctcacagacaggtggtctgcaagaagtagaaatttttaaaaaccttgcagcacaggaccatttcatggggggtttggcttgagcaattagagaacaaattattacagataagtcatcacagtttatctgcaaacaaaagatcaagagagaggggagaaagggaggaagaggccgactgcaaaaattgttgtccataaaatatatctgtttgttatttgtcgagagtccccccattctcccattttcttaatattgcacatgaaagaaatgggtattgatatgtgagttatatacaaatgttgatacttgcttttgctttcttgttgtctcagttcat

SEQ ID NO: 77650 - DNA, 308 bp, Carica papaya
  Intron number 3 from transcript evm.model.supercontig_90.4 9 (locus evm.TU.supercontig_90.49) derived from phytozome v7.0 (chr-ID supercontig_90; pos 905540 to 905847 reverse strand)
tattctttttagctacggaaggtaatttatgtgttggctttttcaatattatttgttgttagctatctttgtttttagactctatctaatttcttagctttgatcattgaccatttctagtccaacatgtatagagttagcaccagttttcttcttggcatgaagaaatccatgattaacgttaaatgggagttatgatgacagaatcagcaacagaacagcttgtttttattgataaggtcaaaataatgaagttatatgacaccgttcttattatttctaatattagagtattcaagagtttccaa

SEQ ID NO: 77651 - DNA, 875 bp, Carica papaya
  Intron number 3 from transcript evm.model.supercontig_81.8 4 (locus evm.TU.supercontig_81.84) derived from phytozome v7.0 (chr-ID supercontig_81; pos 362055 to 362929)
agacaaagtcaactggttgatcaagtactggtgcagtaggtttattttggaccagaagaaccaactgggaagatgtcatatttcttggcaaaagaatggtgcaataagcatgccataaagacccacatattttattatttcatatataggcgcacatatatacaataaacatttcatatcgtgctccataatgatcagactgtacaactatattcaataataataatgcagtccaattggattaatagatgttttgaagattactttagtttgagtaaataatcatgccaattctctatcctgcttacacgactaatcattttagagtaaatatttatatttgttataaaacatcatatagggtgtaaaaacccatagaatatccatgatttcattccattttcgcaagaaaaaatgcagagaaaatctattaattttttttcctgtcaatttaccaactttttctcctttaaaaggaatctccacccttacactgcttaaaccttttccttttcttctctccatttaaccttgtacgcatcgaggagacaggacatgtcttagctgtgctcaatgattttgttgtaagcatctggtttcctgcacatgtactggctatggcttttttacaactaattgatgaggtcaatgttttttaatagtgaaaagaggtagtattggcttatatactgccaatttaaacccataaaatataagctattttgttttgtgggaagagttaatgcttgttgactaagcaaccattttgatttctaataattctgcaattctttttggtattctcttatagttgggagaggcttattgtgaaggaagatcagtgaggtttctgctgtgttaatttgggtccagcc

SEQ ID NO: 77652 - DNA, 990 bp, Carica papaya
  Intron number 1 from transcript evm.model.supercontig_91.2 0 (locus evm.TU.supercontig_91.20) derived from phytozome v7.0 (chr-ID supercontig_91; pos 232085 to 233074)
gcctcccatttcctccacctctgatctcgcctccggtacttgtctctttgtttctttaccttctctatttcttctttactctctttatttcttttgggtgctcgcaatttttgattttttttgaacagtattatcatctactcaaacccttcttctgctgctaatacttgaatgttgaatctactcaaacccttcttttactttctttccatggatctttttctttttattttttttctgtatatattgtgtctgatttactggctaatgttggctccgcctgttgagatgaaaactttctcattcatgttggtctgagtaattctttagttgattagttgttgtgaggtcactaatgtgattggtaactgttgtaggtcatttcttttggttgagctctctctctctctctctctctctctctctcactcacacacacacacacacacacgcagaaggaaatttactttgatttgaggaagtttcaaataggaaacagtttatggaacttcttactaatgttttgctttagctttttttatttgagaaagttgcaggttttttcttctattattttcttttacttaatgttgtttctcattctgctgccactctctaataagaaagttaaattgaatccagctcttctattttactttcactgttacttaaaagaatgtgtcattgagaaactttatcaactcattttgctaagcacccccatctgcatttgctcatgtggtatatgttcttttctttcactctctttgctgagtccttattttcagttcctcctctgatcagagtaagtattggtcatttgtcttgaagcttgtgtaatcatatcctaggaattgcaagtacagttttggaaagtgattattgctttctcttttgggatttatccatcagaattgcaagtaaagtttgattctttctctcatcaatttgatagaaagacaggtcgggaatcatcttgagggagttcca

SEQ ID NO: 77653 - DNA, 669 bp, Carica papaya
  Intron number 3 from transcript evm.TU.contig_28352.2 (loc us evm.TU.contig_28352.2) derived from phytozome v7.0 (chr -ID contig_28352; pos 10854 to 11522 reverse strand)
ttggcctactagggcaatacaccaagtaatccaccatttttttaaaccttgatgctcagcatgacaaaaagttaaattgacatccccaaaatccaccatacacacagttacctacattacaagtaaacatttagaagtcccaggaaatggacttgacaccaaatctatatacttggccttcaacgtgcttctaacgagtacattattgataatctcccacttagtttattgaaacagaagatttgttttgctgtattatgactggtttgggccaagctcttcactaggatcagggagtgctaaaataaaattagaagaaatcaaaagacaataaattgtcctctatttctgtccgtacaattagtaatatatgaaagcattcttaaatttacaagaattttcttcccacataacaccggtggtccaacataaaaataaaaatccaccataaattatacatacattcataactaacaaactattgtaattgggtggtactcccttaatacctttgtgaataataatactttcatcttttatttaaaaaaaataactaacaaactgttaattttatcaagttttattatagtgtttcaatacttatctttctttatataaactttttgttctttttatgttttcctaattgcaggagtaagcgtcggaagt

SEQ ID NO: 77654 - DNA, 810 bp, Carica papaya
  Intron number 1 from transcript evm.model.supercontig_69.5 4 (locus evm.TU.supercontig_69.54) derived from phytozome v7.0 (chr-ID supercontig_69; pos 661554 to 662363)
ggagggactttcttattcgtaacaacggtcaaaaggtgattgacttggtctgagactgggaggttttcttttcttctttctttagttctttagtagctctactgtctacgatccatgaattttctttactcaatatgtgatattttacaaagcatgtagactttctttatcagggaaagcgcacgtgattcacaattttcatttctgaatttaattgagggtggctgcaaaataggatctatgtatttgtgggggggaaaatgacaatctatgtggaaaccatttctagagacttttcttgtcatttggtaattaactatctgcttaattataacttagcaggaattgactgtaagctgtagtgttagggattttcatagtggacggtaagtgaatttagtttgatatatggagggtacaattgtgattatataggttatctttagaacaaataagcttgatgtggaatttatttggatattttcatttattttgctgagaaggggtgagggattttttgccttttttggtgaaaataagtgtaaattcccaaaagaatttcacaaacaaaattaatttgtccctaaaattaacttgcataaaattcatttttgtgtaaggtgaactgtaaactgtattcagtgagctcggttaaatgattattttggaaaggaatgagttctgttaattgagtcaaagtgtttatgtttggacacatgcccttattagaggtatgaatggaacggaatcacatactaaatgcctaattttacaggttaaaattgatagcctgaagggaaagaaacttgg

SEQ ID NO: 77655 - DNA, 807 bp, Carica papaya
  Intron number 1 from transcript evm.model.supercontig_9.38 0 (locus evm.TU.supercontig_9.380) derived from phytozome v7.0 (chr-ID supercontig_9; pos 2657151 to 2657957 reverse strand)
taactcaggtgagagaacttgactccgttgtcgtaattgattaaatctgataggatttccgttcgtagattctttttgaaagcttgtactattgaagtgtgttaatgtttaggaggatgttactcgatgagagagattttatatgctctttcagctcctctttcccgttgagcaattgttttaattaagaaatgagtttatttttagttttctcttttgtaactttgtgtttgaatttggagaaattttggcttgtttcccggggatttaggttaatgttgagtgtagcttagcaatgatatcgagtgtcttttgctacagtccatgagacatatgaggtggattagttttgtttcttgtaaaattggttttcaatccggaaattttggaattctgagtatttgtgttagtaccaattgggatactgctttagttgagatctttgaatctattttgggcctaagacatgagaattatgaagcagaagtttttctggaaatttctgtttggactgtgaatcttgcaaagctgtgttccttgttgggaatttatattgacaaagatgttctctcattcgaatattatgtaattcttgcttttctatttgaaaaatttggcagaatggtttcagctgttatttggtgatgcaatatgcgtctcttataaacctaaacagttgtttttgcctatttcatgatttgttcaaggcaactgaaaaattcgtggctgcactcagttttcatcttcttcacatatatatcttttcatactattttttatgtgacacagcttattgggaaaacacca

SEQ ID NO: 77656 - DNA, 599 bp, Carica papaya
  Intron number 1 from transcript evm.TU.contig_28877.2 (loc us evm.TU.contig_28877.2) derived from phytozome v7.0 (chr -ID contig_28877; pos 11366 to 11964 reverse strand)
gtgaaactgagcatagagaaggaagccgactgaaagtatatcaaaagagattaaaacacatggcctgatcgggaaaagaattggcacgcatggcaccttccaattcaaaggatcatacatgcatctgtgtcaattgaaggagagatcctgacattcgatctttagcataggacacagggagggcaatcaataggagtatttaatgcaaataatgtaaatggtttaggaattgccagattcatcttcactgcttagagttttctgaatctggctctcgggtttccggcgacctggacagattcatggctttttaagtatcttttcttatatataatctcatattttcgaagacttgaacatggcatgaagtattttggatattttctcaactttctcactcaaaatctctatctctcctcttggttccgtctctatctcctatatttctattgtcatctattctctctctgttttaccgctcaactaaggtacatctcacaaccagcttttgacacagaaactaagttgtcccaagacctcaactataaattgatttttttttgtcactttgtaaatttcaggaccagaacttggggaga

SEQ ID NO: 77657 - DNA, 504 bp, Carica papaya
  Intron number 1 from transcript evm.model.supercontig_9.16 1 (locus evm.TU.supercontig_9.161) derived from phytozome v7.0 (chr-ID supercontig_9; pos 974281 to 974784 reverse s trand)
gcgggaatcaaggtgacgactatagattctgttaatgttcttctctgtgatcatcttcatgtttgtttttcaattttttttttcgagagcaaacattgtttctctgtgtgttcatgtgtgcgtgtttgatgcatcgggtcgggtcctcttatctgcatgtaggattgtttcaagaaaattgttgtattttctttgactgctatcattatttatttatttattattattattaaaacacaaacacttattattattatttatttattggtttctgggtgaaaataaatagcgttgaatattatttttattttattttattttttcattttctctttctatttcttatatgagcctccatataaatttggaataaacaaaagaaaaagagaaaaataccagatttttttttcttttttattttttttctccttaattattgggttaattataattttatatatatatatatatatatatattgaatttttctacactcaggcggtc

SEQ ID NO: 77658 - DNA, 402 bp, Carica papaya
  Intron number 2 from transcript evm.model.supercontig_95.5 3 (locus evm.TU.supercontig_95.53) derived from phytozome v7.0 (chr-ID supercontig_95; pos 1043048 to 1043449 revers e strand)
agctgcaggctgctttaggtactgcaaagtggcaggtgactggacttatttccttctaattttggctttcaaacctcggttcttcttgtaaatatatcaacttagatcttagctagagaaacttgtggaagtcaaaggaatctacagtagtatggaaacacaaatctcagttaaactgtttccataaaaatgtagatttcaggcttcctaggttgtagttcattaagatcaaattctaccttgtttgtttttcttacatgctcttactgagagaggtagaggcctattttaagttttgagttttacctgtgactggtgctctatgaaaatagtatattgaaagttttcaatatgaatgttgaaacagttggaagagtttgagagggctgtcaggttgagccg

SEQ ID NO: 77659 - DNA, 672 bp, Carica papaya
  Intron number 1 from transcript evm.model.supercontig_95.5 3 (locus evm.TU.supercontig_95.53) derived from phytozome v7.0 (chr-ID supercontig_95; pos 1043529 to 1044200 revers e strand)
tccgccgcagaggaggttcaagaatctgcagatatgtatgttttccccccttctacttttcatcgaagtaagaatagattgtacggtgttgggattctggcgtttggaattcatgtgtttgattccctgcaagaattctcggatgtctatgttaaaattcttcacttaacttattttttaaaaaaaattcttcacttaacagttttttttttcattatgagggtacagcttcttttaggtgttataatgattatactttatataattaatttcaggttacattatttttagtgtattgatttctaggttcgttgtaagttatttttgtcgttggaatttgataactttttctaaaggatttttcttactaactgttgctgagaaatttgaagcaagtttagaaactcatgttgaattttttgtttgtttttcattttttttcctaatgctattcgcaagataaagagaggaccgtcctgtttgttgggaattttttgtcgcagaagtgtttagattgcaactttgtcgaaattctcatatggtctaaaaatttattataaccaaatatttattttcttctgctgccactcttttttatctgagggctccataaaagctgatggctttgaataatatacgtattttctctcttccttgttcttgtctttcaga

SEQ ID NO: 77660 - DNA, 717 bp, Carica papaya
  Intron number 1 from transcript evm.model.supercontig_73.3 6 (locus evm.TU.supercontig_73.36) derived from phytozome v7.0 (chr-ID supercontig_73; pos 494697 to 495413 reverse strand)
ctggccggcttttggtgctggaggttggtttgtggtggccggcaatagaggctggcaccttagattttttgtgtcttattttggaaatgaatgctgattaggatttgtgaaggaggcttaaggttttttcctaaagctcaaatacccatgttaaggatggttaaaagtggattttgttgaataacacaatcttatatatatagttttgtagaatagaaaattaaataggtaattaattaaataaagtataatttatccttaagcgctcttttttttttgaataaatttatcctaaagctatttaacctaattatatatagtgcactctctttaacagtttcaaacattaagctttttggttaagggtcatcctctttcttcttgaaggtcttggggacctcataaatattttgttttatatgtaaattttatatatgagttgcaccttcttgatgcttgttgctatatattttattttttctttcaagaaaatgtatatacacgtgcagaagtggatttttttatagtctatccctgtttgcctttattatttggcttttttatgctttattttgtaatggcatacaattttgaacactacttcttagatgggttagtggctcgatcggttcgtgattgttcttgttctgaaggaattctttaccatatgcttgcagtgttatgaatctgttggcagaaatctattcacaggaagag

SEQ ID NO: 77661 - DNA, 664 bp, Carica papaya
  Intron number 1 from transcript evm.model.supercontig_83.2 2 (locus evm.TU.supercontig_83.22) derived from phytozome v7.0 (chr-ID supercontig_83; pos 286032 to 286695 reverse strand)
gcatctcacccgcaagaagaagcaggtgctcatgtattcatctctcttcccccctttgtctctctctctatatatatgtgtgtgtgtgtaactctgttttctggttgtttgtgtataaatatgtttctatacagttattgctactctatatatgcctgtaccaatagaagggtgcatgtatatatttcttgaatatgtattaggtgtatacatttacataccaatttggtgattgtgaatattttatagtattctcagtaaatggctggttgctttgaccttctacttctttttctatatggagtttgttcttctcttccttataattcttttgattaaaagttagccgatgaaaaattgaaggtccatttgcacagtaatctcctgtatatatatgttcattttcttgggggtcatatgctgaaacccataatttccaggccattgataatttacaagaatgattaagattgaaaattttgtattggatagttttcaaacaaagttaaatcaatcaaaattgaaagatgagaagtttgaagtagatagataagtccttttatgccaatagtaaattgaaagatgaaaagttatgaagattaaagtgtgttagtcctttatgcatatagttggagtgggaagagtcacaaaggttgtcggatcg

SEQ ID NO: 77662 - DNA, 593 bp, Carica papaya
  Intron number 1 from transcript evm.model.supercontig_73.1 0 (locus evm.TU.supercontig_73.10) derived from phytozome v7.0 (chr-ID supercontig_73; pos 207792 to 208384)
agctgcctacttgctttcctccaagaagcccaaaggttagatctctctcagtaaattacttgagcttctcttttctttgccttcccttcttttctcttccgtgggagaatttcgattgttgttttctccggatccgcggcactggttgttgccaaatttcaatggttgatgttggttctatcctttgcttgtgagagaacatgtagaaactgcttaaatctatgctactctatggtcctgtaacgaatacatgttgggtctctttgtggatgaaagtatttttctttttatttgattggagaacgaattgtttgaaggtaaatttgaatcagaaagaagttttcaagcacttttatccttatcttgtgagtttaaaaaaccgagtgaaagaactgtgccctttttctatgacattgaatgacacagctccttcgctgggatggtgcatgtatatgtgtacatatatatatgtatgtaagtacttttagatattcaaaagttggccttttatttgccatattaatcgtaaactggcttacacttggtatgggtttgcaggctgcctggatcctgagaaattcaaggagtttaaa

SEQ ID NO: 77663 - DNA, 1028 bp, Carica papaya
  Intron number 1 from transcript evm.TU.contig_30962.1 (loc us evm.TU.contig_30962) derived from phytozome v7.0 (chr-I D contig_30962; pos 3179 to 4206)
tgctaatactactgctgttactactgatactgttggtactactactgctactactactgcattatatgtaacaccacaaaaaatctagttcattttaatagtattattaactattcgatatttttgtttcggatttctttacattaattaatcaattaatttaaatgaggaaaaaagatttgttgtcatattaattcagttgaagaataatttgaatatacaaatcaacctacaaatggaaaaatgatcaattagcgttgatttgtttttgttagaaaaaaatgaaaagatagactagctgaatataataatttgttgaaatatgagaggaagaaataagagatactaattaagaaactcaagttttcatttatggttgatgctaaaagccttcaagtacatgagtatttataggtactagtactccttctactactactactaatactactacaactactaatactattgctactgctaatactgtcacttctattgttgctactactgttacaacaggtactactaatgtagttgttattgctgatattgctactattattattatttctactactgctactaccactgctattagtaatactgctaatactgttactactgctgccactactattgtattatatgtaacaccataaaaaatctagtttattttaatagtattattaattatccagcatttttttttcagatttctttacgtgaaattaattaattaatttaaatgaaaaaaaaagtttcatttccatattaattcaattgaaaaagaatttgaatgtccaaattaacctacaaatgactaaatgatcaattagaattcatttatttttgttaaaaaaattaataaataggctaactgaatataacaatttgttaaaatatgagagaaagaagtaagagagacaaattgagaaactcaagttttgatttgtagttgatgctaaaagcttccaagtacatgggtatttataggtactactactactactactactactactactact

SEQ ID NO: 77664 - DNA, 1029 bp, Carica papaya
  Intron number 2 from transcript evm.model.supercontig_802. 1 (locus evm.TU.supercontig_802.1) derived from phytozome v7.0 (chr-ID supercontig_802; pos 11661 to 12689 reverse s trand)
catctgcttttcagtgctaatcgttgggagaagaggttcctttcttatcttagttggtttaacttttcttagttgttagatttttgcacttgataaaggcagccagcttctcagttccctatgttagtatgtatatagagaagattgggtttcttttgaagtattttgcactttctataatctttctacgtgggtacaagtttttcttagaagactatgcataagaatttatgaaacaagaaccagttaaatggaagttcacaccttttttttttttttttgcttacaatggatacaaattctatattttgctttatatatatagatatatatttatctcaaaaaagaaatgtgtgtactagcataggaaggcatgtttaagatgatggcggggtcgttaagttgcagtgagaaacttttggtgggtgtcggaggggatgggcatcctagcatcaaaaggaatgtttgtgatgttagtccagtatttcagttgctgtgagaaagcaagcttgtgcttgtgtaggcattgctagcatcagaaaacattgtttgagatagtgattcagtatttttagttgcaatgaaaaatcaaagtacaaaatttcttttgaacactgaactttacgatataattgagttcatggaacttgcatatttgagattggttttgagatcttccatttagtatagcatggtcactcaatttggaaaatttcatgtgattgtttttgtttttgagggaaaagaaaatgcgactaaaaagtggcaacaaatttgcagttgcaacaaatttgcatgatctattgtcttcttggtaggtgattagtatttttatgatgcaatatattgcagcgtgcaaaatatctgcattctttggcttgaatagagctagtcgtacccctataaagcacttaatatccattctctcatgcttcgataagggagaaccggacatgttgaggaccatactcaatagagctactacttatgttttaacttaattatctgtgatatttttgcagatcactg

SEQ ID NO: 77665 - DNA, 951 bp, Carica papaya
  Intron number 2 from transcript evm.model.supercontig_7.18 (locus evm.TU.supercontig_7.18) derived from phytozome v7 .0 (chr-ID supercontig_7; pos 270050 to 271000 reverse str and)
tcattactgtgcttgaaccatttctgtctaaggtatttttgtcaatactttatttcatttgcttacttctttcaccaaaatttcaagtgtgcaatgctttcttgtcgtttgatgagtgaaatttagtctaagaagaaagttttaccctttgtttatgacaagatgcttggttggaattatatatattgatcttaacatggaggaactagctactgtttctgacgtgaatctaaaccaaatttgtattcggcgatcttttcctaaggattgtttgtattaattgcaagtagcaatcaagtatatagtaaatttgctaagcctaactctaatagaaaatttctttcaatgtgctgtgcaatagtatttagctgcatgtctggatggttagacatatttttctcccgggtatcttacaaatttgtggtttctcaaaccattgctacctcttatccaaagtgttgatggtggttggatttgaaaattcgatcaaatgcatgtcggattagtggagtgagaagaaatttatgcaattgagaatttttagattgcaacttctaagcaagcagagagctgcatccacatttgaatttatagtcacttctttctctattttgcaccgtttagcacctgttcatttttggactatgtttcagttttgaaagcaaaaaaaaaattagttcttgaaaatagttataactttctcatatttgcttaaaatgaaattttagaagacaatttgtgataaagaaaaatattttccaaaagtgcaaacaggggaaatgcatgcctcttcgtgtctctttctcccctcctaataatggtcaacatactcaatcccctctaggctctgaactctagctagccatgcccctctatctttactctcgttacattgtcttttttaaccccctcattattattattattattatcattgttatttttgaagtc

SEQ ID NO: 77666 - DNA, 697 bp, Carica papaya
  Intron number 2 from transcript evm.model.supercontig_82.5 1 (locus evm.TU.supercontig_82.51) derived from phytozome v7.0 (chr-ID supercontig_82; pos 838725 to 839421)
tggactctttggttctacattgccaaccactgtaagtgattgtttatcttatgttttgtcaatcagaataagtgagtttgtatcatctgagggttgaagtttaatgattcatgtaaatctcaataaaatcaagtgaatggattaattatgtgctaatatgtatgagtcatatttgaagaagttgtttgcatgaccataaccttttctagttttttttggtagcatatatgcaaaatgcaactactttccctttgatgtagtatactattaaaacttgtaccatagttaaggacattccttttatgcatttctttttgtattcagcagactgggttttgtaatgaataagactgcttatgtgcagcaatggatgcttagtcagagaaatagttgaaagagttggttttctgggggcaaataatatatggaattgcttttttactccgagattttgaaaaaatttatattcaggcttgttcaagattcttaatagggcatatgtcactagaagaactttgacaagaaggtaacagactaggaaatcttccatggttgttgttcggggtgtacatgttcctataagaacttttcttttcatattttcaatccttttagatattaggggaaactactagttatttacggtattgatttgaattactctctatgtttgttcaggtctatctagaggtcccaa

SEQ ID NO: 77667 - DNA, 570 bp, Carica papaya
  Intron number 1 from transcript evm.model.supercontig_84.5 3 (locus evm.TU.supercontig_84.53) derived from phytozome v7.0 (chr-ID supercontig_84; pos 442389 to 442958)
ttaaattggtgagaagccttgaattatctcatgattattgaatgttgtataacttatgtaagttttttattgatttggtaatttgtttacggaagcatgatttgttttatttgagttgatcttttgttataactcgctgtttttattaaactgaatttattagtgacttgttcttgtttctttatcttaaagcactattgtggttcagtgttcaggaatattatatgactaaatggccggtacatgatttgtttcatataagtttgataaaaagcagcattatggtagctcattaatgaagttagcataagaatttggtgttggatgctgctcatacctgcgttggagaatgttataagaggaagagggttattttgctgaatagtgtaacttcaagccaaatgccaacttgatgaaaatatgctttgattggcttcttagaccagtttgggaaatgctctaccttaattttttttacctttctttgatgttttttaaatatttttttctaaacgatgatgtcttctgcctgcagcaaatacaaaactatttcacatacaaagcggtgag

SEQ ID NO: 77668 - DNA, 937 bp, Carica papaya
  Intron number 2 from transcript evm.model.supercontig_84.5 3 (locus evm.TU.supercontig_84.53) derived from phytozome v7.0 (chr-ID supercontig_84; pos 442987 to 443923)
aatccaccccagtataggtggttctacaagtaagtcaaatcctcattttgtccataggctttccttaaattcttgaaatgttttaaacagacatcttacatgacatctcgattttcaacaaggctttaggctaagttcagaagaacaacatcatttgtagaattcatacgaaatttccatttcgtttaattaggagacaacaaaattccattcagatgataaaaattgtcattttataaaattcaagtggaattatagcagtgtcttttaaattccattagtttctatagaatttagaattctactccaattccatatggaatctctgtaggttagtttttatcatcctctaatactatttatagacttttttttgttgcatcttagttgaactatatgttgatctctaaattaactctctgaaactaatccatctcttttatatacagccttagttgttaatgagtaggttttaaaaacatttagctttatgagtacaatgataatattgattaactactggttctaaagttcttatatgcataactgttatgtttctttgggtaacacataaataaaaatgaagttttaaaactagggatagatgaataaactattttggttctttgatctcgagtcatgacatttatagaatggaggattttggaaatgttgtagatacatattgtaaataggtggaaccccattggtgctgtttatttaatatacatattacattttttaattttaaaaaaatggttttctataatccaacttattccaaacccaaaatttaaacttttacttacttaaagtaatttatagtttatggaaattccttgagtcagtaacgatctatgtgcccttgatccgaaaagattgtagttgtagttttcaatgtgtttgatttcttttcatttttcacagttttgttgca

SEQ ID NO: 77669 - DNA, 446 bp, Carica papaya
  Intron number 1 from transcript evm.model.supercontig_70.2 1 (locus evm.TU.supercontig_70.21) derived from phytozome v7.0 (chr-ID supercontig_70; pos 165162 to 165607)
gctgctgctatattgaaggtgcattggcttatttcgcccgtgattggcttccaaagccaatttttatgcttgtttatcttctatatcgtttaagtgggtcagtagagataggaggtgagtttctgctctagaaacactttatactattatactttgctggagattaaagatttgaattaagttaatgtggcaattatacctaataacttgcttcatttgttggccctatagcctgaaacaagtcatgtctgtgcctttctccactctgactgattttctacttttcctttggttgggccaagttcatcttgagttctgtttgcttaacaagtcatgcatttctgcagccatcatttcataatacatcccagattgttttgtatgctcaagttcttgatattttttatttcatgtttacgaatttgaactccaggcgcttctcgact

SEQ ID NO: 77670 - DNA, 214 bp, Carica papaya
  Intron number 2 from transcript evm.model.supercontig_70.2 1 (locus evm.TU.supercontig_70.21) derived from phytozome v7.0 (chr-ID supercontig_70; pos 165677 to 165890)
tcgatcaccaggtaagaataaaagctaatgagaagacatcctttgcttaatctctttttgtttttctttttccttcaaagttgcataattacgagcatgttgcatctttcgtgatgatagatttcacattgttgcttttttttggttattgatcttggttaacgtttcttctgatgttgctactaggcttcagtatcaggtagagcaaggagag

SEQ ID NO: 77671 - DNA, 1021 bp, Carica papaya
  Intron number 1 from transcript evm.model.supercontig_78.3 7 (locus evm.TU.supercontig_78.37) derived from phytozome v7.0 (chr-ID supercontig_78; pos 460671 to 461691)
gattcgggtaagttagcagtacacgtagccgtttgattcattcaataattagcacccttatgaatccataataattagtaatcttgtgacttcaatattgcgggaggcatgtgactagaaaatccccgtttgaaggatcaattgtctaattgaaatatgacactttgcatatctcataatatacactttgaaagaatcttgtcatataactccatcgttatcttgtttgtttttcagtacaaactatcaatttagtattccaattatgaaatattgggaaattggcttttaatttttagaagatcaaacttagtttctaaaattactaattcattttaacatttgatttttaatatgttttttaaaataaaaacaacagaagtctgtctgtcaaatttctgatacttttactgtagaagggaaaaaaaaaaacagtttgagcatggaggtaattccaaaactcagaataaatttttatttttttacattttgttaattaagttattattacacatgaagaacaatataatcaaatattctaataagaaaataacacaatcaagctttcgtaagatataatggttgatgaaaatagattcttgtaaggtataatatctgcttaaacagttaactaattgtccttaatgaaaatattttcttgattaagtcatatatatatatatatattttttttcaaaaatatgaaatgagttactgttattgcttttgtttataataccataaaacagcctgggtttactatttataaatgtcactgctccacccaaaacgatgctgagttccttcagcataaaagctgtctgcacaacttgttatcctcatagttggcttccaaatgcttttccgtgaaaatcatcaattgggtgaatcacgtaaagatctactccaaactgataggaagctccagccttttccgatttatggtgatttgactttgcattcccatgtttattgaatttgattccaagtatataatgttttgacagatcagaaactttca

SEQ ID NO: 77672 - DNA, 457 bp, Carica papaya
  Intron number 2 from transcript evm.model.supercontig_81.9 0 (locus evm.TU.supercontig_81.90) derived from phytozome v7.0 (chr-ID supercontig_81; pos 384113 to 384569 reverse strand)
acgccagagccatccccctatcctcggatcacaaggttagtctctctctctctctctctcccccccgcccccctcactatgttagtagatttgaatgagaaactcgtgatgttagaccctgtttggaaggcgtgaaaaaagcctgcaatacttactccggaaagaaagaaagaaagaaagaaaagaagaactaatgatgaccctcatcctccctttcgtgctgattcatgctgttcactttctcgtaatacaaacattttctcatatcaggtctaagtctccatacttttggctttagtgtataatggaaaaaagaacgtacactcggttcctgtttccttagactaatttgactttaattctctgtcgagactcctgatgtgtttatatttttttggggaaaatcttttggaaatgaacagccggaccgtccagacgagctgaaccggatccaaac

SEQ ID NO: 77673 - DNA, 940 bp, Carica papaya
  Intron number 1 from transcript evm.TU.contig_39085.1 (loc us evm.TU.contig_39085) derived from phytozome v7.0 (chr-I D contig_39085; pos 489 to 1428)
agaggcatctgaaagtcaggatttttgtcctcaaggtaataataatattctcaatgatgcgtttctattgtatattgtgttgcgtcaacacctgtgccatgtacacagattaaaggaagagttatacataaagaaaagcacagaattttaactgattttcgcaatgtgtctactccttggaaccaactgcaaattttttacaatgtgaccaactgcctcttaccgcttggattttacctatatacagggaataggtgaaaacctaattttcctaaaatgttcccttaaaaaaaaaacctggaacgcccaaattttgaacaataaatcctttgaatatgagccactcaacacatttttccagaacacctaccgctgtttgtcttttgatatttatcttgttgcatggtcaaaggaagatcaaagctaagtgcattaagtcctggtgtttgtattatttcaaaaaaaaaaaaaaattaagtcctcgtgtttgtaacccttgaagagttgtttattccagtgatgattatggggtttgcttcatttctttcatatgtttgtgtttattgttggagccatttacaactttcttcatacgccacttgtttgacattatgtgtttatctagttcattaacaatgttacttcgaaggtgtgttcatttcaattctcattcaattttgtcatctttttgtacttttaactgtcagaatatattatattacaaaatttcctcttcctataaatcctacatatcaagaattgtgatcattatatagacgagaattcatctgacttgagccaaatgggtcatcatggtcattaatatgcagagagtttactatttatgatgaggcctttgttccttctcaatattaggctctaaacttcgtaaatagacttatcacttttatggaataacatctgtacttattgccaacag

SEQ ID NO: 77674 - DNA, 925 bp, Carica papaya
  Intron number 3 from transcript evm.model.supercontig_72.2 2 (locus evm.TU.supercontig_72.22) derived from phytozome v7.0 (chr-ID supercontig_72; pos 622985 to 623909 reverse strand)
cgtacaactttacttggacatctgtggtaagctttgcatgcaagtttaataggtttttcttgctatcatcacacaaactgctatttttcactagtgcttctcaaattgtttataagcatgtttttctttacattcgatgcggtcaacatttcaaatgcatgtattatttatacgttccacttgacttgaatttcgtggcaggttccatctgttgtgcaacaaagaagcaagctaattccaaaatagagttcttacttgtttttaggaacaagagagaaagatcaactgatccactctcctcaaagaaaaaaacaactgatcaatctttcttatttaagaaaaggaaaaataaacttatcaaaatttgtccatacaaaggttaatcagttgttctttggggggagtgattaacaatagctggctgcaattgcttgcgtaagttcattgaaaagaaaatcaattagtcgaagacaccctttgaaagttgattagaataataggttcctgcttttattggcacaatatcatatgagaatctgagaaagatttttgaatgctatagcaattgcctacttagtcctcagtgtgtggggacctcccttgtgcacttgggtaattaatacagcattcaggaattaaggaactcaaaagattatcatgagagttggactgaccatgtatatttacgaatggttaaccacgtcaaaccttatgttgtcaaaataaaaaaaccagctgacttcaaattgttgcatttactgacattttattcttcattattgtaaatgaatttggagttcttagttctctttgttatgaaccaaatatattttacttgcagcttgtcacggataccgtaatgattcagactagttttgtgttgtttgcagtttttcttagtcctctcttgcagcattgcagttgg

SEQ ID NO: 77675 - DNA, 907 bp, Carica papaya
  Intron number 1 from transcript evm.model.supercontig_86.2 5 (locus evm.TU.supercontig_86.25) derived from phytozome v7.0 (chr-ID supercontig_86; pos 360935 to 361841)
ggaaaccctttcagcataagacccctgaacctgaggtctctctctctctctctctctctctctctctctctctctctctctagtttattctggtttccaactataaactcaccagttgtttgtaaaaatttatgcagtattttagcactgtgcatttactaccactaccaaatttgggtgttctgagtagtcggagtataactattgatgtcacctagaattttgatctttctcaaatattagatgcaattcgttcttatatgcttccttagatgccctaatatttgttttcgtggagcatattcttttttacaactggattgagctctgaatttgttgctaagttttgttttcttcttgtttttttctggctctcgttgtgcctcaagcaattataatgtgtgtgaaccggctagacttagtgtagatttcaattttcaatgcctgaaattgatcaaaatgttcctcgttacaacttgcaagttgtagctttcaggaggcccaccaacaacagatgctcaataatctggctttttgacctatatgtcctctcacaaaattatagctatttgattaaatggttatatcgttcgttaatccttgagcattgacctaatgatcacatctcgagtacttattttaacttcaaatattaagatattgtttaagatattataacttaaatgattaaaatattataactttcaatcctttaggggtgcttgctgatttttcatttgtttagctttccttatttttcctttttgtaatttttagaagcaaattctcctcctggacttttttgttcattcacagatatacaaaagatgatgtacatgatacttccattgtattttagtgtgcattttaccattattgctgagaagcttttgtttgtagccgcgtg

SEQ ID NO: 77676 - DNA, 525 bp, Carica papaya
  Intron number 1 from transcript evm.TU.contig_40107.1 (loc us evm.TU.contig_40107) derived from phytozome v7.0 (chr-I D contig_40107; pos 1127 to 1651 reverse strand)
gagaaggtttcggcctagatagagatgttggccatcgattttttttgtcctctgtcatgtttgtgtttttagttaatggtaaggctagagagtggtttcgtggacatcgtgggtcgaggctaggttattctttatctcctttccttgtcaatgttttgagctgtatgctcttgagaggttttgagacagtggtttcaagggtctcaagattggtcatgataaactggaagttttccaccttcagtttgttgaggacaagatctttttctttttatttatattttttttgaattaaaaagtatagagtaccattaactacaagcaccaagggagtccaagcccatgcacaaaaatatttacaaatcatgtgatatctattaaatcaccaaaatctttcctggagtataaaggttgacccattacaaaaatcttagggtttgaaaccatttcgctctattcttatcaatatcctctcatctgcatttgatttccaggatttgaagctcacaattctcccaatccggc

SEQ ID NO: 77677 - DNA, 744 bp, Carica papaya
  Intron number 3 from transcript evm.model.supercontig_98.6 2 (locus evm.TU.supercontig_98.62) derived from phytozome v7.0 (chr-ID supercontig_98; pos 1101342 to 1102085 revers e strand)
acttttttcataccaaagcctctcggggagaaaatgtaacatatatggagaattaggaaacaagaagagggctgggaaatggatttacggagaatggtagaagtctttcactctcattatagctcggtttatggaaggagacaattggtaatatggagttagtcctaatttgtggaagtccgggccacaaaagtaatgaatacacaacttcaggaatcatacacaggaaagggtgtccttcatgcacttcaagaaatggatcctacaaaagtgtcaggcccagatgttatctcccctgcctttaaccaaaaaaaattctggtcagttgtcaaaaataaggtgattattttcgtgttaggtgttttgaattatagaatgcccactacttagatgaatcattcatttgtttctttaatagtcttcaagcactccatctgacttttagccgattagtttatgtgatgttgttatgaaactaactacaaaatgtattgctagctgaatatgctcctgtctgatatagtccatgaatctcaacctgcattcatctcgggtcatttggttcctgataatgccctcattatctctggagttgtttcatttcacgaaaactggctcaaactctagaaaatgattgttttccctgatattagatgtcattaaagcttgtaccatgtagcttagtcttatcttcagtatatcatgttaaaactaggttttcatccttcctttgcatctttggtc

SEQ ID NO: 77678 - DNA, 1000 bp, Carica papaya
  Intron number 1 from transcript evm.model.supercontig_9.13 3 (locus evm.TU.supercontig_9.133) derived from phytozome v7.0 (chr-ID supercontig_9; pos 753044 to 754043)
gctacgattgtaagtgaatattattaatcgcatttttatgtttgataaaaatccctaatttttttatatataaagaatgtctattctataccaatttctaatatcagttaactttttctgtaatgtgatgcttgacaatcattttttaactttcgatatctgttagtttattctataacgtgatgctcgataagtgtttttttttaaaaaaaataatttttgttgatgtttcaatattgagcatcccagttgttatttattgtcgatatactagaaggtgatgtctgatcagtgttttttttttttttgaagatgatttgttaattcttcagtattgagcacttaagttattatttattatcgatatttgttagtttattctacaatatgatatccgatgagtatttttctttttgtgaaaaatgatttttgttaatgtttcagtgttgagtattccagttattatttattatcgctacatcagtgtataatttttaaatttaattgttttgatttacaactatatatgattgattggatatgaaaaattttatgataaatttcaatgccccttttagttttttgcattaattcaaaattttattttttttatatttaagctcctatagtttttttttttttgataaatttcatataaaactattaatttttttttactgttgtatcatatattttgtttttacatggacttaactgcaaaaaaaaactatggaggatttaattagaagataatccctatattttgagcttaattacaactgagttcattgataaaaaaaatatttataatttagtccttttattctaaagaaactttacatcttaatccactgaaattatagtaaatatttttttttgagttgaaaatgtatatattcattaattaaatgatataattttgagttgaaaaaaatttatcttttttatataatttttttttttttacagagatacaggtataaaaggcgtcataagaaaa

SEQ ID NO: 77679 - DNA, 849 bp, Carica papaya
  Intron number 1 from transcript evm.model.supercontig_91.6 3 (locus evm.TU.supercontig_91.63) derived from phytozome v7.0 (chr-ID supercontig_91; pos 720821 to 721669)
aaggtataataaaacttaaacatgttcttccttcttcttcttcttcttgttattattattattattattgtctaccctttgcggatgattatgattaactttgattatttcttttttaaacataatttaaacactcataacaatataattagtactttaatcaaaaataaataaacttaatttcttgataaaaacatatacaaaatacataattcgatttgaactcaactcataggtaaataaaagtataaaccataaactaacagattatttcaaatacatattaacaaatttgaaatatatatttgattttcttttgtttacatatctattcaataaaaaattaaactttcaactatttagttacatcttgtttagatagttagtatttgtacttctttttaggagaaaatgagttagaaataaattgcatattttacatgtgacttccttaaaagtttacttatattgttattagtgtggaattattggagtgtattaattcaactatggagttacgtaaagtaataattattagtacaatcatgcacgactaagtaggttggaaacatcatatacagtatatatatatcctagtcttagcaattcgccagctttatggatattccacgttgtcttatatattccatttgtcaatattaagccggcagcaagaaagaacgtgattacttcaaccccactattttaagattatatatttattattatgatagataatatataataatataaaatcatcagtatagatagttgactctttataaatattttacgatataattgggttacctgtacatatatatatatatatacacacacacagagcaa

SEQ ID NO: 77680 - DNA, 711 bp, Carica papaya
  Intron number 1 from transcript evm.model.supercontig_97.2 6 (locus evm.TU.supercontig_97.26) derived from phytozome v7.0 (chr-ID supercontig_97; pos 187433 to 188143 reverse strand)
gaagcgagtttggtggaggaactcttcatattaaggtgagaggggaactggattttaacttcatatatttttttgcttgtacagtttccttttttttcccattgcggttttattaccttacttttgaatattaaggcctgttttggtatttttggttcgtaaatgtcgatcttttgctggtttgtttggttgttatcgtataaatttggagggtatagtatctcggtaatggaaagttgggggatttgtagtatggaaatcgagaagtttgatactttgcagaaagtttgggtttccttttgttggctttgagtataggtagatagtttatccgagtttttggtttgtacaagtctagagaagttggtatctgtatttcagattcgtagaacgtttttgctgaaaatgagttagcttatgaaccgctttcttgatgttctttgaagggatagctttcccaaacttcatttcaacttttactttctttttagtgacgattagtgggtattccggctttgatttgttgcatttcattgctaatcttcgctattgagagtttctatctaatgtgttttcatggacggctatggtatgaaatatacttcttgtgaacttgaagcaattgggacaactgggattgttgaagttctgctcacaattaatgaaaaactcaatctgtcttacccaggtcagcaaagcccacagttggac

SEQ ID NO: 77681 - DNA, 589 bp, Carica papaya
  Intron number 2 from transcript evm.model.supercontig_72.4 1 (locus evm.TU.supercontig_72.41) derived from phytozome v7.0 (chr-ID supercontig_72; pos 976507 to 977095 reverse strand)
tataaggccaaatttgtcaattcgagaaggcataggtatgttctatcttattgctaagaatatttttgctttgctaattgatattattgctttaatattgcaaaaaggaaacttgtatctagagagagagacagagaaaaaagtaaactttattcccaatttaggtttttgaattcctcatatatatatatacacatactcttcatacatatatacatatatataccgtgtgtgtttgtaaattctttcttctgataaaggtgaaatatatgccagtaaaaaccaataaaatatctgggctaggaaaactacattaatttctcctgatttgtcatcaacctagctgattgtggtttatcaaatatagaaacttttgatgttgttctcaaaatatgataaaattgcttaataatatgtatttgcgtctagcagtgatgaaatatatattgtaaaatgctttgatatggaatatatattgtaaaatgctttgatatggaatatatattgtaaaatgctttgatatggctttttacctttctttgtactcgtgctgtttggcaatgacgcagagatcattgtttctggagga

SEQ ID NO: 77682 - DNA, 413 bp, Carica papaya
  Intron number 2 from transcript evm.model.supercontig_65.1 24 (locus evm.TU.supercontig_65.124) derived from phytozom e v7.0 (chr-ID supercontig_65; pos 1148715 to 1149127)
cctctgtcgttgattgcctcatcacacaccccaatgtatgcttctgtcttcttctgcgctctcctggtagtgttcgatattagttggatagacaagtgtagggaatggtaattgtaaattgcaactaattggtaatattttaagcctcttgtgcatatgtttttgaagtttactgaacaccgaactgaatggtgtagatgttaaagaggaataaggtagaaacctgttgtcgcatttaatctttatatgctagatttttgggtcatgttttggtctcttaataagttataatttaggaaaagattgaagtacgccctgtttattagttttaaattgaagaacttattgaatccatgcttaagcgtatactgtatttttgtcttcagtaaacttattactctctcaggtgctta

SEQ ID NO: 77683 - DNA, 541 bp, Carica papaya
  Intron number 1 from transcript evm.TU.contig_33159.2 (loc us evm.TU.contig_33159) derived from phytozome v7.0 (chr-I D contig_33159; pos 4356 to 4896)
gcgatagggtgagttgatgttttgattcccagattgagtttgtaatatatgagattttagaatttgactttggaatatcaaaaaggagaaagaaacttaaataaagttatgaagtcattatttctattgtttttcggagttggagatctgttttctttggttgtttgtttttgttttccttttcagtttcttatttttgatcatgaagatttgtggttgttaaacaaatgccgacgggacaagttgatgttttgattcacttattgagtttgtaatatttgagattttaaggtttgacttttggatatcaaggagaaagaaatttaaagaaagttgttcgactcattatttctcttattattattattttttttaaatttggagatatgtgttctttagtatttatttttgtttttctttttagtttcttatttttgattgtgaggagttgtgggtgttaaacaaatggtggcagggtgactcttctgtgaacatatttatttctttaggtgccactttgtctcaccgagacttgacggtg

SEQ ID NO: 77684 - DNA, 858 bp, Carica papaya
  Intron number 1 from transcript evm.model.supercontig_677. 2 (locus evm.TU.supercontig_677.2) derived from phytozome v7.0 (chr-ID supercontig_677; pos 2168 to 3025 reverse str and)
ggctggagagaatttgcaattgactctcctcataggtatatttttatatatgttatgctagggtttgaaggttgatgtttggattataatgattttaagttagaattgttgtggggaaaatcgaatttcttttttgggggagtttgattcatttcaaaagttcaacatcaaatgggtatttatatagccgtgaagttgcctactcccaaccacaattatatatggaaatgttgtgaaaataaatcctgaatacaatcacccaaagtaaagaacaaaataagaaaaaacataagattatagactcttatatatgcaaattattagagtttgtttggaaatatttccagaatgtattgaactactcaaagaatatacatagaatattgtctaaaatatacaccgaatatttcttagaatcaagctacattaacaggaaatttctttaatcaagtttctcatgtacagccccttctgttgatttgagcttatacttcgaaattcttaattatttacaatggtgtgcgtataaatatatatctatatggtttagtatatatatctatatctacttcagcctctttgaaaagtgaagagtgtgtaaatggtgggtttgttttgtttctgcaactcatgctgtagtctgaaaagtttggactctgtttttcatagtagattcgaattgtaaaaacctgtttttatgcgtttcttttggtggtcatctatgtgtgtgtgtgtgtgtgtgtatataagtgtgtgtgatattatgaaatcattaaggtgaatattgaaatgataatcgattgatgaattattaatactgaaggcagagttgcactcaaccatcttttccacaattgg

SEQ ID NO: 77685 - DNA, 508 bp, Carica papaya
  Intron number 1 from transcript evm.TU.contig_34209.1 (loc us evm.TU.contig_34209.1) derived from phytozome v7.0 (chr -ID contig_34209; pos 292 to 799 reverse strand)
gaaattgtgagtaccaaaccttattaagtagaacagagaatattttacctcctttttctgcagtcttatatctgtgatataagggattgatttaggaattcataagattgctttttttcctctgaaaaacaaatttctcccttttcctcctgtgtgccttcctcttcaaacttctcaggttgaaaaaaaaattatttgaggttagattgcaaaaagtgatgaaattgtttgctgctaatttttttcttcaaaaaaagaatcatgttcgccttattttccccttatgttgctgaagtagcctagatgaacagattcaaaaatttaaaaaggtttgagactgctgattcaagcagatatttttagagcattttgtactcccctggctaagttttgctgctactttatgaaactgagggaagtataaagaagcatagtctgataaatttttcccaaagaaagttgaaaggagaagaatgctttaaatatttttctgatgtgtttgcaggga

SEQ ID NO: 77686 - DNA, 640 bp, Carica papaya
  Intron number 1 from transcript evm.model.supercontig_8.18 1 (locus evm.TU.supercontig_8.181) derived from phytozome v7.0 (chr-ID supercontig_8; pos 1307540 to 1308179)
gaggcactgaatcttcaggtgtgccgaatttcgttttatttttatttatttgattttcttttttggttctttgtcgtttggttgatagggaacgttaagtccttattttatttggcttcacacaacagtatatagttgtcggcggagccccttagggagtgttgttttcagtcccttaggtatacttttccagacttaatcgatcttcctggttgctgggaaacgtcagattctgagcttcgttttgtttcagggtttttctatattgaattgtacgttttcccaggaagtatactaattaatgactagccccgtgttgtaaccaagtacaaatctgtgttgaatctatgtgtattttctcttgagtggagaaatgcttatggatgtgtaggtctagcaactgctgtttaatttaataaaccgaaattgctttttgaacgataaagaaaaagttaattgcattcaacttgtgctgtcaagccaagaaattgagcagtttattgctcaccttcacatttcagttcctttagaatttgtttcaactagatcagattcacactaatgatttttattcgggataattactttttttttattgtgatcaggggatctgggagaggtttggctaaaggccttcttc

SEQ ID NO: 77687 - DNA, 656 bp, Carica papaya
  Intron number 1 from transcript evm.model.supercontig_85.1 0 (locus evm.TU.supercontig_85.10) derived from phytozome v7.0 (chr-ID supercontig_85; pos 50522 to 51177 reverse st rand)
tgcaggtctcattctttcccttatacggtgttgcaagtctatatgctgttcttctgatttcgtattttttatttggttcatctgggttgacatatattttttcttgtttgttccttcaattttttttttcttgtttgtgttatctatatagagttttaatcttttagaacaattcttagcaacttcttaatttacgattggactaggttagtccatgatctatattatggtagaagattttggttcaaattggccatcgtcgtatgcattactgtcgtgcctaatccaatggccttttctattgcattttatgctgccacatttatgatgcattttcttgatatgctggcttcttatgaagaatcaaattgtatttattgttcacttttggtacagattttgtactatctttgaattttttgaatcaattacaaatgtttcattttgtattcgatgctctaatacttgaagatagcatcttaaaaaatatttaaagtcgcacacaatatctggaaaatgtatgctgctagatgtagcattaagtcatgcatgtttgatgttctcagtctccattcagatttaattatatacctgattgtttcttctgttggttttatgtaggtcagtgacctttctctaagtgactacatcggagt

SEQ ID NO: 77688 - DNA, 545 bp, Carica papaya
  Intron number 1 from transcript evm.model.supercontig_94.5 6 (locus evm.TU.supercontig_94.56) derived from phytozome v7.0 (chr-ID supercontig_94; pos 790053 to 790597)
tttcgtttcagatttctgcgtacttcttcatccgggttctgtttctgtttctgtttttccttttctttctgttgggttctttctttcctgccatttcctgggatatcgaataagaatctggttttgtcagaatcttgtgctgctatagaccttcctcaatggagatagttttgtttcctgagtttagtaaattctatgttttcttctaacgaccatggcatgtcagatccagaactttgtacgaattgtgaataatctttttgtttttgttggtaacttgtgcattatataatttttttttttttaccaaatgtacatatttgaagttctatggacgttgttttgcgtttgatttcgtctttgaatgtttgggaaaatgtttttaatgcattggtcatttagctagtaaaatgtccggattgtttttatcttgattatggtgctttttttttaaataatatcttgattatggtgttagagatttgcattgatgtgaaagtataaatgtgaatcgttttcttggtttttctactgcagtaaatttg

SEQ ID NO: 77689 - DNA, 945 bp, Carica papaya
  Intron number 1 from transcript evm.model.supercontig_9.31 8 (locus evm.TU.supercontig_9.318) derived from phytozome v7.0 (chr-ID supercontig_9; pos 2139603 to 2140547 reverse strand)
gcctcccttccttgctctagggtttgttttctttctttttctggttcgcttctccttttttttgttttccttttctggttgaattggtagttaggcctgttacagtgaatttctctgcgattctttaggattctatgatgtcagtcgtgttcgtttattttttttggggggctaaaataggaaattcgagaaatagaagttcgatatcatgtaggttttgtggtcaatagtggtttacgggctacgctcgtgagttgtttattcagtgatttaaatatatatatatatatatattcccgcataagacgacggattctttcttctgaacttttttatctgaatctcttgtgtttaactggtagttggtgcctcattctgttcatttttgagacttttagttaggctttctttttcttatttcctgaaattttcaatataagtatgttgggtttttactcattaagtaactaatgtactggaaattggatcttgcaaactgatctacctctgctgtcaggaatgatgttttatatttgtgtgatgaatttggactatttaatgcaatctagaagttaccattaattggatctttgtggcctataattgttgtgtttagaaacaagtttatgctaatgttgcgatggttttggtcactaacctgttaaatatcaatgatggtaatggtaggatgatggctgtgctgcaaatgacatgtaattacaggaattctgttatttggggaatgaaattggttcccttttgctaattctgtttcttttattttctttaatgtttttggggtttggagttcagatgatgcctagtactgggccattaattgcttgttgttgattttatgtagagcctttattctgcagtaatggagctcaaaaacttttttttaataactctttctctactacaggcaaggagtggtgtgtgtgt

SEQ ID NO: 77690 - DNA, 978 bp, Carica papaya
  Intron number 1 from transcript evm.TU.contig_24654.1 (loc us evm.TU.contig_24654.1) derived from phytozome v7.0 (chr -ID contig_24654; pos 4419 to 5396 reverse strand)
tccgtagagctctcttgagagtctccgctagtcaggtcagtccaatttactgtctaggatcctcatgtcaggtttgtggaggatatacacatcagtgaatgtctacttttggttgatctgatttgtgtttggtagttttgtgatgtttttgaagtaatcgaaaatgatcggtttgagttcaatgtcggtgttgaattgttctcgtcttgaatttttctcgttgatctggcgatgggaataattgagttgtaagcaatgtaaccgttagttgatctgctggaaactatgtcgctgaatataggaagcggtaatcatttatgtcgacagtgttgataatttatagtagctagattacatagctattcacagaacaattaaaatgtcattgcagaatgtttccagttaacaaattttctggccttttctccgataatttaaccaaagttatcgttaattcttttcatatgctgactgcaagtcttaattcttctgagatctgttttcttgggattcctctggtctataaatttgctgctgtcgctattggaatattgaacttttatattttatcaggatgtgcttgctgcctttttctttggatgacagactttttttaatatatttttcttttgttgttattcgaaaattttccattaagatattgttgttatgttttaataatgccggttctttattttgcataactttatttaactttattctgtttgcttctatatgacagttcatgttcactgtctttatttgtatgacagttcatgttcaatgatgtcgataattcccatcctcttttgaatcttcaatagtttgaataagctaaagtcatgttttagctattgatctttgtttttggtaagaattaaccatgaaaactgttatttgatttttcctgtagtgaatcttctcataaatgtaattgctacaggttggaagacgagttgaatcggtggttcttccact

SEQ ID NO: 77691 - DNA, 1014 bp, Carica papaya
  Intron number 1 from transcript evm.model.supercontig_96.2 5 (locus evm.TU.supercontig_96.25) derived from phytozome v7.0 (chr-ID supercontig_96; pos 406690 to 407703 reverse strand)
aaacgggaccactctcaggttctaattctatacgtgctcacttcataatttcgcttcttttttgtttttcaactttttattccgctggtttatctatgtttacttccttaatttttgatgccgacatacgtagtgagattcataaggctttgtctttaatttcaagcatcatatcgagcttttctagtctttatattttaaaaattccttgtcaattgctatttgattggtctaaatttgtttcgttaacttttttgctcattgaatttcgtaatttgtggaaccttttctggtaaattcaatggcaattaagtgctggtctgaagtaaaggaaagcttgctggtctgagatgaaagaaaagcctggttctttgtttcttgacgaaggcttggaaaggtttaagcagtgtttgaacaaaagaaagaaatttatggagatcacaaacttagagcaagtagaagattgtgaaaattttctcaaaaatgataaaatttaatttaatgtataatttcacaggtacacggaacaatatgttctaaatgccagtaaatttcacttgaaattgcagcaatgtactttaaattccattaaagtttattacgttttaaatgtaattgtctcaattctatatgagatcttatggtaaatttttatcatcttctaataaaatttacatcatcttaaagtaaactatgtttactttttcaaatgaatattacaaaattctggatttgttctgagtagccttattgtagttcattctctctttcttctttttttattgataagagggttagtattattcattctgacaattaatggatcaaggtttttttggtgtatcttctctatagagttgtacttcatttgttgctttaactgtttcccttgtaaaattctggtgtttgtttatcggtttgccagtagaggggaagaaggaagcatttcttgtatgagaaatttgagtctgggacatgttttgcaggttcggtatctcacacttctcataatcg

SEQ ID NO: 77692 - DNA, 383 bp, Carica papaya
  Intron number 1 from transcript evm.model.supercontig_70.4 9 (locus evm.TU.supercontig_70.49) derived from phytozome v7.0 (chr-ID supercontig_70; pos 327823 to 328205 reverse strand)
gtgtgtgttcacttctcaatcttccacattatgttctcgtttttattccctgatctgctttgctatctcgagatgatacagtcgaatgatataatcctctgttttctggtttcttgtagacatgcatatacttgtcttgcttctcggtaatagagttctgcctttggttttctgaaagtaatcttaggcttctttctatgatcttttgtttgagtggtgtacaactaggaaaaggaggatatagtgttctttcttgttttaggttatagcaagcgtctcttttttttataactgattattctagtattggtttgaaaaactaatatttggtgtgatttgcgaggttaggttctccagaacgatattgacttgttgaatcctcc

SEQ ID NO: 77693 - DNA, 676 bp, Carica papaya
  Intron number 1 from transcript evm.model.supercontig_8.20 4 (locus evm.TU.supercontig_8.204) derived from phytozome v7.0 (chr-ID supercontig_8; pos 1441863 to 1442538 reverse strand)
gaggttgcattctctagaattcttccttcttctcatgctttgaatgtcagcggtacttatggctgtgtggctgcgtgctttgtgcgttcgcacattagaatacgtagcttatgtctgactatgtttgtttctttcaagttgttgattgatttcgaatttgttgagtctgttcgtagatgtgtttgcctggatcctaagttaaatatactccttgatgcttgtattggtgttaaatgcggcaataatctagaaacgcggatttgacaagttatgtcgtggaatctgttttaaatgctatatcttatttccagcttttatgtccggtaatgactgaagtacgaattggaaaatgagtttgtgtgcaaccctttttttgtttatttagttgtgaatttaacctatctgctcctgtgaacggttgcactgtggatataatataaggccgtttcatttccttcacgatttcactttttttgctttgtttagcataaatctaaggaccttatgaagttcttaaatgctaaataaatcagggttgagtcacagacttaaagaccttggttcttttgggtggaagaagttatgaataaagaaagtaacagatacagcaattgcttaaaataatgattcttgtgctgcaggtttcttcacctacaattgtggttgaaagagcagg

SEQ ID NO: 77694 - DNA, 894 bp, Carica papaya
  Intron number 2 from transcript evm.model.supercontig_87.3 2 (locus evm.TU.supercontig_87.32) derived from phytozome v7.0 (chr-ID supercontig_87; pos 199104 to 199997 reverse strand)
aagacaggcttaagaagcaagatacctttgtccgtgtaagcttgatgattattattgttattatttcttttttcgtttcctccttatttgcttaattgcttatatctctataaatagtaatttgacttggcattgttctattttctccctttttgggggcatactctgttgattacaagccgtgtctgctacttttttcccttttaaaaagaatgctttttcttagtacaatcttcagttcaataatttcgcttaaatattctccaaaaaaagaaaagatataattatcatgtgtacttggacctacagtcttgagatgggtttgtgtcggttttaatgatttgtagtattaggtcgaagggacattattagttttatcttggtataggttttataattacctaacaaaagtagttttataattttgtatgtaattttttgtatcgtgtataatctattgtttgggagcttagaaaacataaccatgttccaccgggtttgtttagaattctgtctatcgttatcttggttgatactcttagattagtaatgtttctccccagaggaagaattccgtatttgatatgaatattaagcctgagacatgcagtcaacatgttgcttagttgcagactttgttggtttaaatcaatagataaatgaggattttcactttgtagtttggtgatgctgagaaagactttatcaatatgtcagtagtggtaaatgttaggttgtttatccatccttgatctttggctgctacagtatggttactgaggtccctgtatttgtttccttttcacatgattatgttcacttcttttcattttaccttgcccatttgttggtagttgctttcattgaatatcctaaatcaatctctccacagca

SEQ ID NO: 77695 - DNA, 562 bp, Carica papaya
  Intron number 1 from transcript evm.model.supercontig_66.1 22 (locus evm.TU.supercontig_66.122) derived from phytozom e v7.0 (chr-ID supercontig_66; pos 1181728 to 1182289)
tccttcttcaacaaaggctttaaagcagctaagtgattgatctctccttattcttttgttctttctatatggattttattttctttaaattgttaaattacttttttgagattgcaaatttggatggatgctgaactttctcagggttctatttagtttctgagaaactgttggaaagaaaaaaaaaaaaaaagagcaaatagagaaagctcgccatggtagtagtcgaatcaaacactttttcctcttgtccgggttgttttgatataatcgcagattacttgtttctttattgtgagaatcaaagcaattaggttttagggctttttcttttcctcttttctttcgttttctcggcaactaaacagatttgacggtggatcgagtttgaaatgctatttcaaacatgaagaccaattgcttgctttatgtgtcaatgttggacaattttctcttttcctcatcatccaagttgcaaagattaagagtagtgtcaatttatttttttattttttgctgttttgcagtaaaaccctacttaaattgacaattccgcgaataa

SEQ ID NO: 77696 - DNA, 599 bp, Carica papaya
  Intron number 2 from transcript evm.model.supercontig_66.5 7 (locus evm.TU.supercontig_66.57) derived from phytozome v7.0 (chr-ID supercontig_66; pos 615749 to 616347 reverse strand)
tggttgtgccagaaattgcaactgagacaaatcaggttagctttttcttttttgtgcttttctccagaagaaatctgagaatggcaacaagattgtgcaagtctgtgaaacgagaactgaagtattactatgtagattaacttgttaggcaaactgtaatccatttactcttttcttcttattgtagttttgtgtagtggaaaataaaattaaatccccagggggaaagattcagttgaggtccttgaaaaagaagaacaaccgcatgtactggtgatttgtggttgaacattatagaaagagaataaatgttgaaacgttaagcagtgatggttgattattgattttgatttttgttcgttaattgaaataaagtgatggtaattttgatttgtcaaacaaatatattgaagagagatttatcagtagtagaaacagaagggaaaaggatcagaatacaaagtaaaaatgggttaaaaagctgtagatatgtaaattatctaggtgtctgtaaaaggggtattctacttatttattcttatttttttggttttccttcttggtttggcagatcgtggaggaaggaaattccgtgccta

SEQ ID NO: 77697 - DNA, 677 bp, Carica papaya
  Intron number 1 from transcript evm.model.supercontig_74.9 1 (locus evm.TU.supercontig_74.91) derived from phytozome v7.0 (chr-ID supercontig_74; pos 960546 to 961222 reverse strand)
acggctctatccgctgataactctacgggaaggtactccaatttcttcttcttcttcttatttctctctctcgctcctttttttctcttttaatcaaccctttatctgggctgttctaatttcttcccgtttatgcacttgcacacaatgtaatcttctttccaattctatggtttctgttcatatgttgccctgctcatcattctctgttttctatgtattctctccagttttgcatgattcccgttgcacatcagacccttgtctttttgctccgtgattcgtttaatataaatctgattcttgcaggaatttccacgagtgtattatgttttattgggtgaggtctatgatttttgaatattctgttgattagtatttagtctctcatctgatttaggaagtcgatttcgtgttccttaatctgggtccttgctcttaccatctgccctgctttctttaattagaacgatttaagaacactctggttaccttttcattctcatgtgaccagcgtaaaaataaagatttttttaatccaaattcggatttgcatgtcattgttattgttactggtttgaatgagaaattttggatttttatttgggtatttgactgttatgtgtttgattgggaatgcagcgaaaattgtctttcacatcttgcacctctagaag

SEQ ID NO: 77698 - DNA, 300 bp, Carica papaya
  Intron number 2 from transcript evm.model.supercontig_9.36 1 (locus evm.TU.supercontig_9.361) derived from phytozome v7.0 (chr-ID supercontig_9; pos 2504811 to 2505110 reverse strand)
acaaaagccacgtatgtgcaacaaggagttaaaaacagaaaatttgaatcattaggtggtgatggtgacttatgtacctatgtacacatattttgttgtaagttttgactatgttaaggtctagtagggtctgtggtcaagtatctcactgcttttcattgatctaattctttgtttatgcgtgtgggagtggatgaagatctgcatatgtgttaatacctgatactttgtttttttcttatatacatttttaattatttatgtacctgtgattcaggccttcaatcaggtttagtgctg

SEQ ID NO: 77699 - DNA, 717 bp, Carica papaya
  Intron number 2 from transcript evm.model.supercontig_7.18 4 (locus evm.TU.supercontig_7.184) derived from phytozome v7.0 (chr-ID supercontig_7; pos 1885074 to 1885790 reverse strand)
tgaagctgaggtgagttgtgcctgttttggtaattttccaatcagaagaaattgtgctttgaaatcagggactacctgactgttgatatttttaccattatgtggttgacgcgagaaaatgctcatacttggcatctagtttgatctctttcttcttattcatttgcagcaagattgcaaatcttttgttttcttggatattggtattgtgagatatgttgttatgggtcttctgtcttttgctagaagaatttactgttcgctgaaaggttctcgtttaattggtttatcgaggtcctaccatctgttgttatgttttgtcgttgatttgatagttttcttatactttttatgtctcttcggagatgaggagttccaaaggtgaaggagagaaaaggaactaaataggaagagctttccttcaaaaaaaatgcatctatgtcaaatcacaaacatttgaagttagaagccatgtgtgcgtttgcatgcatcactctgtgggaggaagaaatcatttctactccaaggtggtgtttctcttagttaggttgaacatgcatatttgtctctatgttgctaaagtaaagctttctcatggtgatcagttttgcaacccatataaaacttggttttatgtcggctactttctattctaaaataaattctatggtttctgtgataggcttcaagacatcaactggacttgggacatttcag

SEQ ID NO: 77700 - DNA, 1033 bp, Carica papaya
  Intron number 1 from transcript evm.TU.contig_27842.2 (loc us evm.TU.contig_27842.2) derived from phytozome v7.0 (chr -ID contig_27842; pos 5446 to 6478)
agagatcagcagaagataccgccaagcaaccacaggtcttatatcgacaatcgatttaattccatcaaatgcagtttcttttaattcttatcccctttcgatatactctttcttatgcttaatttgtttattgttcactttgattttctaaaagttttagcgcacatgtatataaatgtagatttgaaatttgctccttgattgtgcaattaggttttagttatagattggagtgctgatgagaaggggatgattcaattattcaatattgcattatgaatgatgtgtaaatgttcagtttttcctattgggggattatatataggctgatgttctctagttttcttcatgttggtgggaaattcttctttagtttacagctttgcctgttgtatttgtgtgtgcatgacatttttacattaatattgaggcccttatttgaaaggaagtttcatttggttgactcgaggagaaagtgatgcttggagcattcatcaagttcaacacattttcagtaaactgtggagtttctaatggatttttgtgctaaaggaatactccttttgtgaaatttagatcagttggttgggaaataatttgtttaacattttaagacatacttgataggccaaatgataaagtatagcaaaataatgtgtttaaggatgccttagtgatgcgtcaattatagattttaatcgataaaaaaacttccagttaagagttctcatgttaggaagatgcgcctttttttttttttcttttggacgtttgttccataataggatcactaagcacctggagtttatagcttttggagataagacacaatttgaattaagataatgaacaaagagtagaagatgggattgttgaatatcataagctttggcaaagggctccttaatgttgggatgtacaatggttgagattttttcatagatctgatttcaatgtgtttttgacaaggatcttctctttatggctccttatcacaggttccaggatttttcgggtttccagcttctgcaaa

SEQ ID NO: 77701 - DNA, 747 bp, Carica papaya
  Intron number 2 from transcript evm.model.supercontig_99.5 (locus evm.TU.supercontig_99.5) derived from phytozome v7 .0 (chr-ID supercontig_99; pos 97721 to 98467)
ttggatcgaggagttcaggtgaattcattttttgctctgtaattaggttcatcttcttaaatgctctcgtttctaacaacaattgctataaagatttgtgaaatgtagatgtaacacaattgataattctgtattgcgaatttatatgtagttcaattttccagaaaatgcaaaagtaatgctgagcttatacaaatttttctaagtgcgggcagggtagttttctgtttagtcattagtttctatgtaggaccaggttgttgctttgctatacttgaagagtttcatttagagttggatatatctgagaatctccaatcaatgtggttgggagatggctgggtccatcttcaggttgcagctcactttagctacctaggctgaaaaaatgaattattctaggtatggcataacatggaacaaaagttatcaggatcaaaactgtctggtttccattagaccctttcttctcttttggaatatgatgcctgcccaatacttcaggatttatatgataaaacaatgttaacttgattaaatttaccacttttgttggagaccactataggatttcctttctcttcttggctcttctgtgttagattacataaatatgcagaactaaatttgttttacagaaaaaggagaagtcgatattttatgtgcaacaaagtcattggccttctaattggcggttttccaacactgctaggtcttcccagcgaagggtcaaaaagctctaaatac

SEQ ID NO: 77702 - DNA, 364 bp, Carica papaya
  Intron number 1 from transcript evm.model.supercontig_9.7 (locus evm.TU.supercontig_9.7) derived from phytozome v7.0 (chr-ID supercontig_9; pos 48394 to 48757)
ctggtcctttccctgaagccgtcctcctcaaagaggtaacaaccttttgatgtcgccatattttctctttttcccatactaatttaccatccttgccattttagaattctactaccttaatttgttattctctttaaacttcttgaagtaattttcgccagttttctggcgtttgattatgtgagtactgtaaaagatgatgtctttttgttgggtttaaaatgttgaagctgtttatctttcgaatttcgtttaattattggtttccttttttgcatcttctttgtaattgagctatctggtttattttgggataagaggtttattattattattttttaactgtagaaaaaagttcaggaag

SEQ ID NO: 77703 - DNA, 648 bp, Carica papaya
  Intron number 3 from transcript evm.model.supercontig_9.7 (locus evm.TU.supercontig_9.7) derived from phytozome v7.0 (chr-ID supercontig_9; pos 48958 to 49605)
tggaactgagtaagcatatgcgtgtgtatatatatatatttcttttcttgggggctcataagtaagtgaatttagttaattcctcagaaatatgatactttttaattgtaaacaatacttgcatttggtattgaagaagtaattgtaaaacccacaggacgttactggtcaaaatctactgtaacgtaactttcaagtttatgccaatgtgatgtgccaagtccttttggagtttggtgggtcatgctacatctggcctttgtttggaacaaatgaacaatggaattttatgttatttgtaaattatttgaatatggaatttatttagaaattttggtttgttccgaaaatggtagaaaggaaatggattgaagaaagctgttactctgtgatgctatgaatatataagatgtggtttggcctaatccaatttgcttgtttgagttgaagcaatttgcctctaattagagttgcttgaactacagaaacttttcctttttgtgagatgcacaaaggtttaattgatcttaagctgtggcttacatttcattcattgaacctaacatgctcaattgctcgtataacttacaatatacactgtcttcgttgtttggacagtgcgccactacgaagtggtttatttaatcc

SEQ ID NO: 77704 - DNA, 374 bp, Carica papaya
  Intron number 1 from transcript evm.TU.contig_34934.1 (loc us evm.TU.contig_34934.1) derived from phytozome v7.0 (chr -ID contig_34934; pos 605 to 978)
tagaaaaggttaggcaagcgatcctttcaattttcctgtttctttctttggaatcattccaatgaaatgttaactgatgaacacttaattcgaatgtaaagaaaagagattgaagacaagttagaaaattcatgtataagaattccaatggcacctatacaaagaaattctttaatgtaaacctctactaaagtgggtttttttggtttcttgaacatgtatatacatctttagaaagcattagcttactgtttatatagatttactaagatgtctcctaataaacctgatgaaattctgttaactatttagcttaagagctcaaattttacctttcaggttctttcggagattagaccatacctctcaggcac

SEQ ID NO: 77705 - DNA, 831 bp, Carica papaya
  Intron number 2 from transcript evm.model.supercontig_99.1 (locus evm.TU.supercontig_99.1) derived from phytozome v7 .0 (chr-ID supercontig_99; pos 2722 to 3552)
gggttctgtttatttaacagtgttgctattgcaacatgttttctgttaaatgaaagagtaagagtcagttttaatctttagatatagttttcttacccaaagttatcaatcaattgctttttttgttagatgtatagttgcctatatggatttagattagatgtttctttttccatcctttaataagttgtttccttgttaaccgtatatgtttttctatttttcagccaaatttgggtctaaaccaaatcttgtttgttaactgggatgttcagcatggtaatggtactcaagaaacattatggaatgatccttgtgttctgttcttctctgttcataggtacatatgaaatctgagccatgcttattcatttgcttgaccatcgtgattcacttgttgtataagtcccaagcttttgtcatataaagataaattaataatgtcggcaagatcttcacgtcctcatcaaccagttatatatgctggaaagtagtgtttctttgttttatggacatatgcaaatgcaattacttttcacaacctgagcaatgtctatatgtctgtctggccatccaagaagcatattcaaatgattatagttctcctcagtagaatgtcgaatgtccataatgtccactttctcgtacttgttagttcataaacttcaattctcttggtattcaatgcatgtttcttagtcactctcatttagggacagcacagttttaattgttctaaatggaagcttattatttttattattattattattatttatgatgtgtttttcttaactatataaaatgtgtaggcaaaaggacaccctttct

SEQ ID NO: 77706 - DNA, 618 bp, Carica papaya
  Intron number 1 from transcript evm.model.supercontig_9.15 2 (locus evm.TU.supercontig_9.152) derived from phytozome v7.0 (chr-ID supercontig_9; pos 934909 to 935526)
caggtcgaggtcccttgccgagtccccagtgctaggtatataacatgtcgaagacgcatatataaactcgtgcttatgtacttctaattttgtgggtgcttccaaagttttgattcttgaactggatgttgatttgagtttgaaacgtttaggtttttgtggtggattagatctgagagaaataatctgtaactatttgatttatctactcagttacttgaaaactgattgttctgagggtgagatctaaatatgagctgagatttagctgcattatgtctggaatttagctcttttagctcatgtagaggaaagagcccctgtttgtttcccgagaaaaaagcctggaacttttgaagtctgtaattaaaaattttgccagacagttgtattggcttcctcagctccaaagaactatttcgcatgtcctctactgttctatttccagtattccagttttcttttgtcatttagcagatagccagtgttgaatttgatcatcctccatattctctatgttagaactcttgtatatttgattcttataaattatggttctaaaacttgctattcccttgtttattcagtgccagtgtgtttggagtatcagcagaatca

SEQ ID NO: 77707 - DNA, 343 bp, Carica papaya
  Intron number 1 from transcript evm.TU.contig_28380.2 (loc us evm.TU.contig_28380.2) derived from phytozome v7.0 (chr -ID contig_28380; pos 8421 to 8763 reverse strand)
ttcccaagcgatccaagctccactcacctatccaggtagctcttaccatctacctatttgatgtctagttttaaagatccgagtgtataacttccattttcattttctttcgtgttctcacattggatatatgctcaaacgagtttaagaaatcaataatgtttgcaatattcttttcgtttgataagcttttttaaaaaaaaaaaaaattccgtggttgatatgtttgtttggaataagagaagaaatggaaaatccatgtgaaatatattttgtttcctgaatgatttctgccgaaaattttaaattttaaatttcaattttcctgttcggcagcaactga

SEQ ID NO: 77708 - DNA, 650 bp, Carica papaya
  Intron number 1 from transcript evm.model.supercontig_9.38 7 (locus evm.TU.supercontig_9.387) derived from phytozome v7.0 (chr-ID supercontig_9; pos 2705454 to 2706103 reverse strand)
gctcagctactgcctgtcgttcttctcattctcaggtgaatttctcagtttgagtcgctgctcccattttagttccatattatcaagcatcttcccgcttgagtctggaaaatttccctgtttcaatggaaaatacttttgtacatagcagtataaaatatttggtcacctgggtcggtatttggttgttatttattaatttttttcttttttgagccttttcccattcacattgattgtaacattgttagtgtttaaaggaggaattcaatatacactgacacataaaactatctgattgctcttttacatttgttcataacccatgtttcctcctgagtgatgaagcttaggtgttaggttagaataggaaatgagttattatagtatggttaagttcaagaatcatcaaagcacacagtttttttctgccatcaagaggacatttcttatgctcctagcccttgaaccaatatttcagacagtcaacggttaatcaattatctggtgcatttttgtgtagccagtttttcttgatatacttttaaaattttatatttgtaattttatatgaccaaggttttattttgtgtaaatgaaattgttgacctgcagatttgtttccatagtggtttgcgacccattgctcc

SEQ ID NO: 77709 - DNA, 444 bp, Carica papaya
  Intron number 1 from transcript evm.TU.contig_35275.1 (loc us evm.TU.contig_35275) derived from phytozome v7.0 (chr-I D contig_35275; pos 2291 to 2734)
cttcacctttatctgtcgttagtattttcctttcttatattattttgcaattcaattattagatgtgtttggatttagggaagtagaaggaaagaaaaggaaaggaagggagttcaacccttgtttccttatctggaataaaatattactgtgagtaaattaaataaaaaaaattttaattttccttcttctttaaattgggcagaatagaaatgaatttttgcgagaaagtttgattttgtcaaaattaccaaaaattaagtgttactgtgtaattaataaacactctttgttaataaagaggatttgattatctggtaagatgtggtggtagtgcatggctcatgcagattgctgtgtaagtaattaaattagggtatggattaaattatctttgtggtaattgcagaaactggttataacgacaaagagtgtggaatatat

SEQ ID NO: 77710 - DNA, 609 bp, Carica papaya
  Intron number 1 from transcript evm.model.supercontig_95.1 6 (locus evm.TU.supercontig_95.16) derived from phytozome v7.0 (chr-ID supercontig_95; pos 358791 to 359399)
caagtaggagtttattttttaaaattccacccgttccatagagtttcattttaactactgagcttgttttcttttgatgtttttcttcaccataaatgtactgtaattggtgaatgtacgttgcagtgtaggttatttccattttacttcctgtctaggaaatattttgtgctagcaagtatctgttgcttttagattaattccttttgtatttataagcttgaaacctgtctgccagttgtttgctggggtcactgtgaacttaccattgttttttgtgaattattttgtactctatacggtgtggagtgataaagatacccattgattgatctgttaaataattttgctagacacaaaatttgagaaataactgtactcagcgatcatacagagtatgatgtgtgaacctaaattagggacagaaagagttagtgtcacagtggaaatcagctgtttgagtagcgtggaatctcctttgaaatcattccttttttctgatggaatacttgtttgcttgccttcaaaagacagtttaacctcatttcttgcacgtattacttattaaaccaaggtactatactggttatccaaaagatcttgggccat

SEQ ID NO: 77711 - DNA, 1049 bp, Carica papaya
  Intron number 3 from transcript evm.model.supercontig_95.1 6 (locus evm.TU.supercontig_95.16) derived from phytozome v7.0 (chr-ID supercontig_95; pos 359583 to 360631)
taggagtaactatacaaaacatcttgataaggtacttgaggaagctgctgcagagttctatccgagtataaaatttatgcgtgtgagtaatttctggtaaatggaggtttgacttgatatattttgccaaaatttattgttgtaaatcacctgtagatatttgtcagttgtttctttcttcatggtttttgttctttaatgaatttgtttttgggaatttcaccggaaaaagcatgttcatattgttttctttcatataagcttcttaaaaagaaggcccaattgcagaaacagaaaaagaaaattcaatttttcatccaaaaccaaaaagcatgaagctacagtacaaagtattaagcttcctgctttgcatccttgtgatatgaagatgcactcacgtaccaaaggaatgtgtgccacatacaaaagcaactcaaaggaaagaaatctacaaggtccaccaagttctgcttccttgttgagatgtgcactaaaaaccaagaataaagggtatacaaccaaaattttctaactatatgaaaagagttttccacctcacagaaacccgcatgttccctagcctaccttgcagatcaaaagattgtgagagagataagagctctagcttttgagctcttaccttgtctaaaacagacccctgtcctgaactgagggcatcagagaagcaagtaaccagcaattgcagcatttttcctttaaatagttatactctttttttttaatgtttaatgattttgaaaagtgaaaacaatctgcacaaatactaaccaaatatatttgtttatttcgaaataacaaagtgaacagaatagaagtcgctaaatgccacctattgattttgcataatgtagtctacccctgaaatctgaaagcaacttatgatattagttcaaactcttctggatagttttgttatctccttaaggcctctgttgcttattctcaccctaattaataaaagtattttgcctcttgcttggtccttgttttcaggttgagtgcccaaaatatcctgggttctgtataac

SEQ ID NO: 77712 - DNA, 561 bp, Carica papaya
  Intron number 1 from transcript evm.TU.contig_34179.1 (loc us evm.TU.contig_34179.1) derived from phytozome v7.0 (chr -ID contig_34179; pos 1078 to 1638)
ggcatcaaaggtaattatctactttttgttattctggtacatgtgtgttcatggtaggcttgttgagttagatgagtcaaacgagtagcactctctttagtatctttcttctaatacaaatgtttgcaagcttttgatctataagttttatgcagtaacattgataaaatatgttgggcccttacgttacgatctcttcgaatatcttgagctacaacatggatatagttttcagtgacttggtaactcttatttttttcattttaaatgagtatgttctaggttgtaagaattagaacacgtgattctcctggttactcagttcaaaaaatttgttctatataatccaaattaacactaatacgacaattaaaactaaaattgattaaattgaaaattaaactaaacgcatctttgtatattgtaaacaatacgagttacaatagcttactacaacacactaatcatcttagagttcttcccattgcatggtgctgtttttgctaatttcagcaaatctgaatgattcgattcagataatccgtggacaagttagtaaag

SEQ ID NO: 77713 - DNA, 694 bp, Carica papaya
  Intron number 1 from transcript evm.model.supercontig_836. 1 (locus evm.TU.supercontig_836.1) derived from phytozome v7.0 (chr-ID supercontig_836; pos 1981 to 2674)
caagtgcagtaatagcagaggcaagttatgcagctgatggcagaggagatcacagctagttacaggagaaggagccacattttgcggctctattttttcatattgcttccggcaatgaagaccggtttgattgctagttgtggtggccagctatgaaggctggcctcctctttttaggattttttttatttcagcataaggttcataaaagattatataaagttttaacctagaactctgataccatatgaaaaatggttgaatatttttctatcaaatattagagttcggtatatataagttttctatagtagaaaaagaactatttattacatagggtatattttatcctaatgccctttaatctaattatatactttctttaacacaactgtttaccacaattcttcttttcctcagaccgtccatgataagaattcttctccaagctgcttcctgaccaaataagtcaaaaacttggccttcagcatccaaaggatcatatatttgtctctatttgccgtggaagaaagaaaagagtcgtcaacaaaaactaagccattattattgaatcttccccatcccaaacatcgaattgtggttctcctggtttaggtccgatgcctagaatataacttattttctttttttccttaaagaaccgcaacgagacaaaggcaccttggacagagac

SEQ ID NO: 77714 - DNA, 831 bp, Carica papaya
  Intron number 2 from transcript evm.model.supercontig_73.5 9 (locus evm.TU.supercontig_73.59) derived from phytozome v7.0 (chr-ID supercontig_73; pos 831107 to 831937 reverse strand)
aagggggaacattggcactgtgccaacaggtgcatgggtttcctcttctagtatgctttgcttatctagatccattgtgtgcgtagtttgtgtttcaaccttttttttcttcgctaaaacttaaaagttcaatctttttatccttcactaaaacttaaaagaggagaagaagaaaaaggcaaccgatccatcttaggtagatgcagaacccttttattgttagattaaatgtctgacttctttctttagtataaagggtatattgtaatatttatgataatttaacttttttcttcccctgcactcctaaaccaagcaaaggattatggcattctctcatttcctttgcttttataagttttagacatccaaatgagcaaaacatttgcaactgtaatttggagattgtgactttccaatttttcagttaaaccagttgatcagtgtgaaatagtaacaatatgcatccttttcttggctaattcagtatgttgtggatgctatttataaggcagcgagatataccacttggggaatctgtggggtcttttaaggcgagtcaatcatatagcaccaatctaatgaaagctttttgtttttctgaggttgggttttcatgtttagaacttcgaattttgagatagttttttcaaatcaaacttatttcctcatttcctttctcttctttttcgtttctttcttttactaatgtttgtgctaatactgttagaatctactcagatgttcgtagccaatgttgctttagtaaatttacttccaccctttacatgtgcagccaaggagatcacgaggtgtttcacctcttgtcct

SEQ ID NO: 77715 - DNA, 776 bp, Carica papaya
  Intron number 1 from transcript evm.model.supercontig_78.9 3 (locus evm.TU.supercontig_78.93) derived from phytozome v7.0 (chr-ID supercontig_78; pos 1103686 to 1104461 revers e strand)
tggcgtctgattcctcaaggacgcgaatcgatcaggtcctttcttaatccggcagttcttttcaaaccctcgatgcttgcaatgttcactttatatttgaattctttctatacattgatatacgtacacaagcactgatacgattatctttgatactgaatcaagaagtttcgttatccgagcctctttttttataacttttaaatctttaatatattcttgtaaactctgttactaatctccgaggcagctctgatgaagtagaatttctttgtgaatttgaattccatttcgatactgatatttctgcagagaatatatttggctttgagaaactggaaagcaggataaattgtggttttgaacagatttgctttgttgttttgtagtaaaaatgaagaaatggtattcagtgcccgtggaaggatttttttttttcaagaaaaatggattaatatgcacagaggaatgcttcccacgatcaaacttgtgtacaataaagaattcagtcaattctaattagtgctttcttgggtcttaaaaatgacactggcaatatctgatttaatgtttgtaggaaataagttaaaaagaatattgtaaatgagaactggagaagttacagtttcagagctaggctacgctcatcatgttcatgaacagaaagagagcatgaaaaattctttttattgaagtttcttttggcgtgaattttatttgtttgttggatattgtttatagttctttgcatcgaggaagaggaaatctctatcacc

SEQ ID NO: 77716 - DNA, 928 bp, Carica papaya
  Intron number 1 from transcript evm.model.supercontig_77.1 2 (locus evm.TU.supercontig_77.12) derived from phytozome v7.0 (chr-ID supercontig_77; pos 116672 to 117599 reverse strand)
gtggcaaaataacttttccctcgtgccttaagctggtaaatttttgtttttccttttatactactgtttctaatattcttgtttagtttcatgttgttaaatgaaatccctgctttaggtttggatgtttgggttggagattggttgagatttgaaatttttttggtttcatattttacttctcttcggttttggatcttttaattaggattttgaacttatctggcttggaaattatgcgtattttgttttggtttatgaatgtctgaagttagtggtcagcagggtctacaaacttattgtatcttttagataagattccgtctaatcaatgtatggttttgtttcaagaaccaaaatttggaaaattcaataaatcatgactttgtagagaggattgtttgaattgtctcataggaaattctcaggtattgaaatagttgattggccagataaaatgtaggcaagatgaacacgattaagaaatgaaatgcccgcaactttgtgataattatgtacaaaacaatttggggaagccttattttttaagactttattgtcatgtcagtaggcagattttattagggttacaagaaaatatgtactccttttgagttgctttcgacagagcattatagtaatgttctttttttagattaatgcaaaattttaaggaaaagagaagtcttttcgacttattattactatcaattagaaatcgtcggaagttagcaatgttgtaattatcttaaatctcattcttcgcattatctaatgcaatatggaaactggcaattaatttgcttaccttttgttcatttgggtttatggtatatatgttatatatggttataagatttgtagttaataatttttgcttatttctaatgcagccaggtccacgcgatttccccaatcagtgccttat

SEQ ID NO: 77717 - DNA, 659 bp, Carica papaya
  Intron number 1 from transcript evm.TU.contig_33663.1 (loc us evm.TU.contig_33663) derived from phytozome v7.0 (chr-I D contig_33663; pos 1856 to 2514)
tacttgccacaggcggcgctgacttcgatatcaaggtattgggctccgaaattactcatttctctctgttaatttgtttttcccaggcatccttttttttttttaattggttaattataatctttttttttgttagctgatggtagctggcttgtttgatgctacttttgttagccattattttaaattatgctgtacttggttaaaaatgagaaggtggaaagtgaggcgtaacggatttggaaatttgagttcttctgttcttttcccccctctgtaaagcatttgcacaaaagaggcccatttccgtggaagtggaatgctggtgtttaagttccaatttgcctttgtttgagaataatgaactgaatggaagcatcttctagaggcaaatttctggcatttcctgtccccaatttggtattgccactttctggaaccagacataaatctaagtattttgttcgtcttgtggtttgcatggaatcctattagtttgatgattttcgtagggaatagatggattttgaatggaccaagtggtataatgtctctaggaaatcaacgtaactgttagtctgtttttcttcaaaaagtgacagtcttttatatttgaaatttcagctttggctgataaactctggccagcagaagaaaat

SEQ ID NO: 77718 - DNA, 832 bp, Carica papaya
  Intron number 1 from transcript evm.model.supercontig_97.1 (locus evm.TU.supercontig_97.1) derived from phytozome v7 .0 (chr-ID supercontig_97; pos 5284 to 6115 reverse strand )
ttccctcagtatgttcctattgcgtgatgttattttacttcttctgaaattaattcatgttcttataatttttcaactaaaatggtgttatgctttacatggtggtgactggtaacatgttcgtcttccgtagtatattcttgtttgatgtctaatcattgtgtcatctctagtaaatgacttgcgtgtctaatcacggtgtcatctctagtaaatgacttgtgcattgtgcaaacataattgttattaggtgattttgttttgcaacataaatcctgttagtttggtttatgggtccacatatttgcacagagcaatcaatcttatagtttccactatagagtaatatagttgtacttagggagaaagcttgttctttactataggaaaagaagaattacagagatggaagattaagtacgtagcctacctaaaattaaaacaaaagaggaaagagaaagactagctaatcagtgcaaagagtttatccttttaaactgataaaagaactatctttagagttccctttggtgttagtacatacagaagctagaaaacagatctctatggtattagcaggtggcaagtgatgattcaaacactcctcaagtagctcctagaaaagtataatgcttcaagtataattttgaagcttatctcaaaaaaaaaaaaaaaaagtataattttgaagcatgtgcactcagtggatattattttgcataagccagcatgttgcaatttgttattcttcttgtcacataatagttctttttttctcctctttttcctgggaacagattttcctattcttgttgaattgttgagagaattt

SEQ ID NO: 77719 - DNA, 693 bp, Carica papaya
  Intron number 1 from transcript evm.TU.contig_33972.1 (loc us evm.TU.contig_33972) derived from phytozome v7.0 (chr-I D contig_33972; pos 2450 to 3142 reverse strand)
tcgaagcgaggtactctctctcggaccgccatttagttgttttttatatgtttatgttctgatgttctgcgggtgtatatgcatggactgtgttgttttttgctgcatgtttttgttggcttgtttgccgagaaatgcgaagaaaccgtaagagaaatagatctttgctaatgtcttaatgatgcttcatttcttttgaagtgttgaattgccactgcctaatcgtgctaattgctaagctgcctggatttgcgtaagtttggttcacgagaagttttgttttactaggttctagagagagagtttcttttttatttctctattcttggcttttgaacgattttgtttgatttatttacgttatatttgttttcttcaacttgtccgataagatcgtttcttttgattctttgagtaattgaaataaattgtccctagctaattatccttgtgtagaatcctgttattgtgatttgcgacttattactattgttttggaaaatttaagaaacataattcagctaagcatcatttatgaattagataactggaattattggattcttcctccgttctttttttaatctctggatatgtttgcctgtgttagggatcagagagagtagtctttttttaattctattttcatgatcttgtacaggacgcggaggaactgctggaaacaagttccgg

SEQ ID NO: 77720 - DNA, 585 bp, Carica papaya
  Intron number 3 from transcript evm.model.supercontig_73.2 6 (locus evm.TU.supercontig_73.26) derived from phytozome v7.0 (chr-ID supercontig_73; pos 396519 to 397103 reverse strand)
gtggatattggaagtggtaataattttccttattttaaatatatttcactggatatcctccctttagaaatgttgctaatatgctagcaatactcttctctctctatctcacccttacctctgaactatctttcacttttgtgaatcactaatgctatttcacttcccctaattagttataaaaacggtattctgtctctgtcctgggcaatccgtttgggatgcatcctaaacttcagtgtttttgcataaacttaagtttctatgcactttgtgctgctgacgttcatgattgcagcaaaaaatggcttctaactcgtgtggaatggaacataaatgttagtctgttactttatttcataaaatttgttctgaattttgctcttgggttgattttttttgtactgattgtgcttcgcccctttgattttatttcttcttttacgagattgcttcttggacttacataaaatattgtcatttttctattatgaacattatttgtaactccaggaaggaaaaatgtgactgtctgtttcaagtataattttttcaaaaattgccaggtagtggcagatttctgat

SEQ ID NO: 77721 - DNA, 797 bp, Carica papaya
  Intron number 1 from transcript evm.model.supercontig_77.1 6 (locus evm.TU.supercontig_77.16) derived from phytozome v7.0 (chr-ID supercontig_77; pos 189993 to 190789 reverse strand)
ccctgcaagcattgcaaaattgtcgttgcggtatatacatacatacatacaagatattgatatacatacatcgatctacgtaactttcaacttcttaatttgggaaaagattcgctttatgaatctctgttatattcttttgtctcttctttttcttttaaagagaaagtcaaacaagattttgatcagtagtctttgcttctgcttctacatttcaggttcgcaggtttttttctttttaagttatttcatctgtctcttttcattttcttcctgggatttcttccttttacattataatatatatatatatacactttattgtatctatgtatatatctatatttgaatactggtgggttactttcaatatcaagtccccatcaaagattattttctttccttcttcttttgcagtcagatcaaagaaaagtaacagcaaaagagtgaggggaaaaagaaaaggcaaattaaagagatatcagacaatttgttattttcaaagcaattccttattttttttttcatattttttaaagaattgaattgggttattcctatattcaaactaagcactaaagtcgaggcaaaagttgaactgtggattactgcatcaatatcagaaaacctttgttttttctcttgtcttgattgatatcttactttcttggatcaagagaaagaagatcttttacagatccccaagtatattcatcttcaaactaacctctggatcaatggcggtttctgggtttaatttttttttttttgtaaatttttgggcaggtgagagtccc

SEQ ID NO: 77722 - DNA, 795 bp, Carica papaya
  Intron number 1 from transcript evm.model.supercontig_80.1 27 (locus evm.TU.supercontig_80.127) derived from phytozom e v7.0 (chr-ID supercontig_80; pos 1068746 to 1069540 reve rse strand)
gctcttcgaagatccgcctgattgcaagccacaaggtgagttaatcagttgattctcagtctctgattggattgattaattgattatttactggtttaagagtttattcctattgtttgtatctcttaaatttttagagaattctgttattttgctggtgaaaagacagctttggatttttaatatatgcaaaaaaatttcagttacattcatagcgggtgaggatggtgtgtttcagtaattgattacaaagtcaatttccttttcttcttttgtttgtttccagcgattttctcaacttattcttttttttctctcttttttttcgaaaaattttgtaaactctgttctcattacatttccaatcagaaaattaagaaaagaaaaaaaaaaaaaaagaatcctaggaactttcttatatactccaaaatccaaacacaaaatttggcagcagttacagttataaacaattaataattacatatatatatatatgttatacgaatgtatttttctgggtggtaagtttcagctgtttgaaagtagtattagatatatgtattttcttataatattcaattatcatttattatgaactcagacttgttcacttattactggtctatctaacgcatctttgtattgtgaaaagcttcgagagtaataaataaatattcaaaatagtaagaaaataaaaatgaatctcatcgcatacattaaataaaaagggtatatatatatatatatatacattgagactaatgaagtggtgttttgcagggtttttgaaggatc

SEQ ID NO: 77723 - DNA, 749 bp, Carica papaya
  Intron number 1 from transcript evm.model.supercontig_953. 2 (locus evm.TU.supercontig_953.2) derived from phytozome v7.0 (chr-ID supercontig_953; pos 8157 to 8905 reverse str and)
atcccagtttgacccttctactcaagttcttgaaggtatttgctacacgtacataacttttttccagagttctatcagtttttaattcttgggtgtttgtttttaacactgaaatggatgaatttaatttgtttgaaagaagatttagaacacattacatggtgagacttttttatggctgctaaaaccctagtggtgaattttgtcctttaggtgtatggaaagtagcttccatagttaattaaaattaaaaatttagtggttctcagtgtaaattcttaaatctacttggagttgaattttattcttttagagtgaattttattctgtctcaagtttattcataaattccacgaaagtagtttgatttccccccccccaaacacaggtcatgtttgatttgtttctcattcaacttttactacattcaattatttaattattaggatattcttgatatattataaaattacattgtcattttcatgtttaaaccattttcactcccagcttaatttcgccggagttgtggattgtatttttagtttctttaagatgaattgcaactttcacttagaaaactgcaagctgtaagttcagccctgtgaatccaaaatgggggtttcttctaacagatattaattattgaatatgatctgtggttttagttcaaattcgttatgcttgaaatgaatcaatatttagtttcttctggcttaacaataaagctcttgcaattacaggaggtg

SEQ ID NO: 77724 - DNA, 985 bp, Carica papaya
  Intron number 1 from transcript evm.TU.contig_30574.1 (loc us evm.TU.contig_30574) derived from phytozome v7.0 (chr-I D contig_30574; pos 4059 to 5043)
caagaggtaagacaattttgaattttaaacactaaatttgaaatgtgtatttcaatccattatttcggatgatgaatgcatgacaaggagttaggaaagtgagaggatgaggtgaaatattgtagtaggactatgaattgtgcatcatatgaattatttgtatacatttacacgacgactattatgaaatagggaagttgtgagtaaatactgaatcagtggaggctgttgaaggtaagagtgattttatttaaatcaaatttggtgatcagctgaatatattttagaaatgaccagatctgaaggggttgagttgggaggaccgaataagatagtcaggtgacgataaagcatgaacggatactgagaagtggagaaggaagagaacgagtaggttatgatatggaaaaattggggaaaaaggaaatggcaagcctagatccaacatagagatgaaagagaacacaaatatgctatctttacatagaaactgagcaggggaaaaaggtaaaacagaatagaaaaccattggacccaaagaaaggagaactgatgaagaaggatagaaaatatatagaatgtataagattttagtgtgaggaaatatgagcgggcatgtaggggaagtgagcctaagctagggaaatagaacctgaaaatttattggttgtttctagtgtgcaggataattgtgtgtgagtgtgtggccgactagtggctgggatatgcttgataaaagcattgtatgttggttgatattatatgtggcgacacttgatatacatgttgtatgtgttaataaaattgatgtgagtggcccggtaagggtcgtttattttgtattatgttctaattctgtaatgacatctgattgagtagtaatgtaaggttgggaggggatcaccagaaggtcagtaggtctaatgcaatatgttatggatgatactcaatactattaccttgtctgctaatctatctgtaggtt

SEQ ID NO: 77725 - DNA, 354 bp, Carica papaya
  Intron number 2 from transcript evm.model.supercontig_937. 2 (locus evm.TU.supercontig_937.2) derived from phytozome v7.0 (chr-ID supercontig_937; pos 7588 to 7941)
ttttggcagagccagcggaagtggtaagatagcattctcttaaatggcaaaatacaggcttctttttttaaaataaagtgcaggcttctttatgctgtgattatgtgtttcatgatcaatctgttatatgttgaacttaatggaactagtgacagagaatcaaagatcttttcttccctttttcgtgggaatttcagaaattatttgtagtcatgaggatcttcaaaacattgtcctgttatgtcaaattaacattaccacctatcatgctgattgtttttctcttgtttattctcacttggagcggggttcttttcaggttgcagagtaccttgttccaaatatcaggtccat

SEQ ID NO: 77726 - DNA, 594 bp, Carica papaya
  Intron number 2 from transcript evm.model.supercontig_83.6 7 (locus evm.TU.supercontig_83.67) derived from phytozome v7.0 (chr-ID supercontig_83; pos 660623 to 661216 reverse strand)
acgacatcagattcctcaagatttggtttctctacgtaaaacacatgccctttattctttatcgcgttgacaaattctctccgtacaattacttttgggtttcgttggagtgattatatggtggaaagtgagatgagagttaactaattatgtcgatcaaatgctttatactttggtttcttgaactatccagctggttgatttggcatttttttgtggggtattttcttttcctcggttcagatgtttctataagttaatttgcttgtggcttttagtatcaggagttgctgaagacataaacatacgtgtttatagatatttagatttcatgttcaattttgctattgaaggttttctttttcattttttctttttgctttttcttacgggttaggagaagggtatttgggttcaatctgtttaatggttgccaacttggccattaattttgattggagattgagagtgtttccagtataattggccggtttcctccatgagttttggatattttcggtgtaatttttttacgagtttgaactgtttgattcttcagctggagggtagtaaagattttgagaaggtttttag

SEQ ID NO: 77727 - DNA, 776 bp, Carica papaya
  Intron number 1 from transcript evm.model.supercontig_83.7 3 (locus evm.TU.supercontig_83.73) derived from phytozome v7.0 (chr-ID supercontig_83; pos 698561 to 699336 reverse strand)
ctggttcgagacagccctaagttacgccccttctcgtaagttgtccactcttcttttgtcattttctctcgtctttctcttattttcttctgttgtagttctcaatcatccggcgtctgaatcgaggaattttaacttaatttctactcgattttagattcggctatttggatttttgctttttagctctcgattttatgaatcgtgatattcatcttacttcttgtggaatcgggatactaggttctcggaagttgctgaattttagacatttccgttcatttcctcctcttctatccgcatttccccagtggccaaacttagggttagggtttaggaaccaaattgttctttgattcatagtcttgattattttaggctaatttgagagaggatgggtaaatttggcatgcaaaatttaggtgtttaataatttaacaatgtgtcatagagggtttagcggtgaaattaaaggaaactgaggatgaaatcctaccctcacttgtctttagagtaaaatttcttcctaattgtgaatgtgaatgtgaatgttatggtggttttagggctatctctagggcagccaaactagtctgtggtatgggactcctaagcaagagaacaaaaacggtgaaataaattgttgttttaggatggttctctagcataatgctgatagaaaatgctacattaggtagttattcctttcctttcatgcatttttaatttgacagagctttaagattttcttgttttcattatttcatgcagctttt

SEQ ID NO: 77728 - DNA, 718 bp, Carica papaya
  Intron number 1 from transcript evm.model.supercontig_8.31 1 (locus evm.TU.supercontig_8.311) derived from phytozome v7.0 (chr-ID supercontig_8; pos 2435493 to 2436210)
aggtatttcttttttatttttagtttctcttatcctcgtttttcatgcaccagagctatagagtttcggtatttgtctaatcttatctgttctgcttgcttctgtgacatatttgatgttaggaaaacgtgaatggattttgaattatgtgcttgattttggttcaaacattttggtggatgaatgatgattaaagcaagcaaaagcaattttaacgaacaactgttttctttttttgaaataacaaaaaaagcacgtaaaactgcaatacaaaaagtcattactcctggaagcaataaaaagttgaaaaacaatgatagtttaatagaagaaaacaattttaacgaacaactgttttaaagttgatgccaataatcccgttttcttatatgattacgctagacgttctctggttttagtgatggtgtgcttttgtaaggttcactatgtttttttactgctgctcgattgctgatgaagagaagaaacggatgttttgatttttgatgagaaatagggagatagcagcttatttgagggtagctaactcatgcatcgggcatccattggtggaaatcttttgctatatttttctcttttatttaaacttttcatgtgaaaattgttaaataaaatgcctaatgcttctttggaaatgcttacaagaaagtggatgatacaattatcttttcttgccagagaggaagagaagaagaag

SEQ ID NO: 77729 - DNA, 531 bp, Carica papaya
  Intron number 1 from transcript evm.model.supercontig_81.1 38 (locus evm.TU.supercontig_81.138) derived from phytozom e v7.0 (chr-ID supercontig_81; pos 697920 to 698450)
tagccgttaaacagttgaatcgcctcggtttccaggcatgaatcctcttgacccttcgtttctaattactgattatgttgtttgtgcttctcttctaactgatatatgtgacttcacaaatttctttaggtgcactttgccatcttgatcctttttgggtttttgctctttcttttctttaaattctctgcgccaaattcaaatgtgcaaatctgagttttattttgaccctgcaattccatacccgtgatatagatttagaggttatgcattgtttgccaatggggaactctattttccctcatagaacagaatgattttgtgaagaacttggtcattttttaaggtgattaggaatgattttaatcccacctcgtctgttaagaattagattttgcaatggcttatatttattgtgccaacttttatcttgacttgatactcggggttatataatttgttctttaagatgattaatcttatgggatttctcttgtgttttttgcattctagtattcaggggcataagga

SEQ ID NO: 77730 - DNA, 850 bp, Carica papaya
  Intron number 1 from transcript evm.TU.contig_44202.1 (loc us evm.TU.contig_44202) derived from phytozome v7.0 (chr-I D contig_44202; pos 448 to 1297)
acgcccaaagacacgccggagcttcgtgagaagctgtgagtctcttcgctttcgatttccttctttaaagatttattttttatagttctgattgatgatcgagagtcgttgctttatttgctataattctttcgtgtcagtgtcgtttcttaggtttgaagcaaggattatatcttaattttcgaatccctgtagtttaagtatgataattttgagatcgatttcacagcaaattggcaatgtttatttcccttattgtcttgctcgatagagtttattttattttatttttttttgagaaaattgctcgatagagtttatggaactggttgtttgcgtgaaaacgagagagtttgctttgaaattgggtactgaaaagaagcctgtgggcttaagttattattaggtgatataggagtattccattaggtaaggtcgaatggtagaattcattggtaattgggacacaaaatagaatttctgcttttgggatggcaatttgttggtcgtgttctccttcaagttgatcgtgtgcttctttttctttttctttttccccattttctttcgatattagtattctcgtgaagtaaccgtggatatcagttagcatgttttctctctttctttctctctctctctctctctctccttttcttttagttcagcacatttttagtctgtgttttgggtcaaggcctttttcttttcttttgtgcgcaacttgttagccccaaagagcgtcatataatttttattattgtttattattcactattttgagggcttgcatgctgaatgtttttaatatacaggcacaaaacaaggcttcatattgggcaattagtga

SEQ ID NO: 77731 - DNA, 539 bp, Carica papaya
  Intron number 2 from transcript evm.model.supercontig_62.1 29 (locus evm.TU.supercontig_62.129) derived from phytozom e v7.0 (chr-ID supercontig_62; pos 806064 to 806602)
cagtactgtttgaggtactatcatttgtgcgtgctcacttgtagaataatatttttctttgattccttttgcagtgtcttattttctataaatgtgcctttgtgtcacaactttcatagcaatataactcattgaaagctatgttttcgttatgaaagcttcattgattttccttcctgggttgtgatttgtttttgggtgtattcagcgagaagttaaaacagaatctgtgtttcggttgtttagagttggcctggcttaaaatctggaagaaaaatttgtatttaggcagactttttgattattttattcaatctttttgttcttacttcctattatgtataatttaactttatgcagggttacttatttactaataatactttggctgttcatatattgtctacctgaggtttcttgttgggtatataatttagttattgtatcattattggaaccatccgttggttacctacatactgctggaatgtaagaagtgatgctaagagcgtttagtatttgttatttgcaggaagctg

SEQ ID NO: 77732 - DNA, 527 bp, Carica papaya
  Intron number 1 from transcript evm.model.supercontig_9.26 6 (locus evm.TU.supercontig_9.266) derived from phytozome v7.0 (chr-ID supercontig_9; pos 1783224 to 1783750)
gcagcttgcatttttagcaatcaagaaagcaacaggttgctgtcctaccagtatctttcttgtctataggtgaataaagttataaaccatacgaaatttacatcaatctaatgctcttttattgcacaagcataaatggtcttttatgctgtgtgataaaagttgtgaatactagtgataaaatttgttaggagtttaccctttaaagctttgtggttgtgaatttcaatgtacttggcttccagggtttgctttaataacttaaagctagaatttttgctaattgaagagactgttatctagggtgatgttttggtctttgttttgctttatgttttactagttctaaatggtacttttgtttcaagagtgccttgtaattatttactattttacaatttttttcttgttctgtggtgtgagcttctatggtggaatggcttttagaataattataaattttctgattctagttttgtgtttcttgttgggcttggtttttgtaaatggaataggaattgatcgaa

SEQ ID NO: 77733 - DNA, 714 bp, Carica papaya
  Intron number 1 from transcript evm.TU.contig_47417.1 (loc us evm.TU.contig_47417) derived from phytozome v7.0 (chr-I D contig_47417; pos 201 to 914 reverse strand)
aagtaagttaaaccttctgctaattacgtgtttttgctatcttcttatggtagaatgaatcaagtgtagagtattaattcatcttatgcttaggtaattaacatattctacaagtgtaccaaacagtagttcttatttgtttgtccttgctcaaaggcttaatagaattctaaccaattggatatgatagtttgaggaaatcgggcaagaatacacaagaaactttggcagttgaatcagtggtcatctgatattccagggagattttattttatacctgtagcatgtttcagaagcttggaagtcccaaaatgtttgatagtcattctacgtggttatgcgcatatgagtctacagatagaaatgatttttcttttgtgttaaccatttcccaactaagttttcagatgttaccttctgttctcttatacttttagggatgatacctgctgaataggcacactgtatatttagtcagaaattaggatttatggactgaaaatgcaattctcgtggaacccaatggcaaaaggtcaccaatatttcacagtctgcatttgataatattacgagtgaacatcatagtgcaagtctacggttaaattttgtttttagtcggacagttgggtattagtccctgcaactgttttaatatttagatagttgatctcgatgcagccttctaaattatattttctagcaaacctgttaata

SEQ ID NO: 77734 - DNA, 489 bp, Carica papaya
  Intron number 3 from transcript evm.model.supercontig_94.4 4 (locus evm.TU.supercontig_94.44) derived from phytozome v7.0 (chr-ID supercontig_94; pos 641087 to 641575 reverse strand)
atattgatagaattgtcactgagaagaagtaaagcttctgtttttcatgttcctattcagtctgcttttattgttaattaaatgaacataaatgtggttttcatttacttattgattgctgcttaaattatgaattagtcaagcaacggttctacaaatttgaatgcctgagatgaaaagagattagggaactgttattcatgtgattgctgccgtttaaagaagacaatggaagtttttgtctttattaactccttgagtgagcctggctagtgtggcttggtctacggggatgcttcctttgaagcaatggtgtgccaaatattcacatttttaaatgcctgataagatcaataaaagtagaaactacaacatagctgtccatattaatgtgtgtatgcataaactcagatggtaaaaaatagcaaaagtttttgatttcagttagtgatcttaaattcaggtcagaagtgcaaaaacttattggcc

SEQ ID NO: 77735 - DNA, 717 bp, Carica papaya
  Intron number 2 from transcript evm.model.supercontig_70.1 06 (locus evm.TU.supercontig_70.106) derived from phytozom e v7.0 (chr-ID supercontig_70; pos 815208 to 815924 revers e strand)
tgctgcaattgcagcctggtctgccttgaaaaaaagtaaaaagataaatgaaacttctcctttcccatttttagattctctctctcttaactttttccaaaccaggttgatgaattgatgatcaatttttttttataaaaaaaatgggtttatttgagaaactttgaaagagaaaaagaaattttggtcacctttcccattttagattctgaaattttgggctttgcaactcagaatgatgagttgatgatcaattttttcttgggtatgtctgatttgcagcatggtctctctcgaagaattgtaaaagaaaataaaattctcatttttctcatttttagattctaaattttttatctttccaaatcagaatgatgatcaattgatcaattttttctgggtctgttttaatttgcagttgaaatataaaagaaggaaaattctcacttctaccatttttgaatcctaattttttaatctttggatatcagaatgatcaattgatgattaatttttttctgggtatgttttgatttgcagcctggtatgtgttaatccttgaaaagctgtaaaagaaaaaaaaatctgactttcccatttttagattttttcttttcgaatccctgcaaatgaggataatgaattcctgattagttttttctgggtatgttttaactcacagtgccaaatttggattcattaacaaataaagaagtt

SEQ ID NO: 77736 - DNA, 797 bp, Carica papaya
  Intron number 1 from transcript evm.model.supercontig_74.6 (locus evm.TU.supercontig_74.6) derived from phytozome v7 .0 (chr-ID supercontig_74; pos 60292 to 61088 reverse stra nd)
ccaagaagcctggctgcgagaacgacttcgttttggtagctttattcttctacacttgcttcccgattcttcaactggctcttgcttcatttttacttcttatgttttttgttttgttttttttcctgcgttcgtgacgtttctatgactgtaaacagtggaaagaattgtaaatttctgtttgatgtttttgtttttcttttttctttctgcttttgcggtaaagaattaggcaaatgtgtatttgaccgcgtttgttggtaatttgctactgaatactcaacctaaattcagttcattatagttaaatttctgtagaattatatatttttctcaatctcttcatatttacttcggtctttaattagaggtgcggtctgctttttcattaatttctcacacatttctatttttcactgcgttttcgcctttggagatatcttatgcagtaagtacttttttcccggggggcggcgtggggaagggaaacttagtgccttttctgttttgtagtaataactgattatgctcgttttggtagttaagttttcagtaggggtagcggtagaaattgaaaatcataaaatgcatccttttcaatcataattctgtggccgattatttttattttgtttctagattcatgttaatgaggagcgcatatacaatattggcctagttttgtttaagaaatatggcttgtatttgggtctaacttctttcttgttatgacacctttgttgtattttgtttttcaattcaatcatggttttcttcctataggtgaaagttcaaac

SEQ ID NO: 77737 - DNA, 519 bp, Carica papaya
  Intron number 1 from transcript evm.model.supercontig_8.17 3 (locus evm.TU.supercontig_8.173) derived from phytozome v7.0 (chr-ID supercontig_8; pos 1204060 to 1204578 reverse strand)
cccaggtacacacattcatttctcgtacatccactcttttcttcctttttcctaaactacaattttgataggttacggtttgagttgtttgttctttcaatacgtttctgtaaattttctttttgagattcttggatgctcttatatctaatattttgtaattttcatttgtttagttaaacatttaattttgaatatgtattataaacgcatatatacaaaagcccatttttataaaactttcaacatgatgattacttcatgcagagcatgatcgagttaatctcttagttgtccttcgaagtatcaactaatcattgatggggttgaaatccgaatctctgctcccatattaaaaaattatgttatgattaatacgttcatcctaataaattagttgattaatacgtgtatatttgcatcctaatgaatcagtcaatggggtggatatatgtaaaagttgattaattatgttaaaatgcagctagttgagaaggacccggaagctgcaatagtgtt

SEQ ID NO: 77738 - DNA, 637 bp, Carica papaya
  Intron number 1 from transcript evm.model.supercontig_92.8 1 (locus evm.TU.supercontig_92.81) derived from phytozome v7.0 (chr-ID supercontig_92; pos 685653 to 686289 reverse strand)
ttccttaacaggtaagtgggctcaaatagttagttctcttctccctgtttggttgctgggaatttgggaaatgaaagtgcactgaattttctagtggtctgtactggggatctgagggaaggaatctggaaatgcaacgtcgttcgctgcacttactgggtttattaggctatcgggttattgaaaatgtaagatttaggattttgctttgtttcattttgtttagctccatggcaagccaatcgtatgttaagatatccggtcattgtttacttcgtgggatttgaaatttctagacttcattgattgaatttactctctaatcctgtaacattattttgctttagttttggctctgtgatgggaactaaacaactacagtttgcttatgcaattctaaactcttttgttgccatattgatcatcttggaggttcatgctggtatcttaaatctttgagatcaaggaagtctgataacaccatttatatgagtgcagcagagttgagcaattcaattttcacagaatcaaatatcagctttattctgctccttttgttttttggttggggggagggggagttgtaagatctcacacttgcaatttactatcttcttcttgttgcagaacatttgtg

SEQ ID NO: 77739 - DNA, 475 bp, Carica papaya
  Intron number 2 from transcript evm.model.supercontig_861. 1 (locus evm.TU.supercontig_861.1) derived from phytozome v7.0 (chr-ID supercontig_861; pos 16879 to 17353)
ctgtatttttacaggtactgctatctacattgctcgtggtatttgattttcttgcacatgaacatgttaatcttgagctagcgtttgaaatttgaatgaaattttgaatccaggaattgctgctagttcattgaaaatcattttgtttagttacttagttcattgataaccaaaacctattgcatgttcatttggtaaatttgatctccataaagcagctagatatggcttgattgaaaccaatgtcgtctgtaatcaacattgaagaccttactgtataatgtttgttgtagtaaagtgcttactgtatttatccgccagctttgatctgcatcagttttgatggttggaattggagaccttctttttgtttccttttctcaatgaatatgcatctctatccctttatctttaagcattctggtaggttcctatctagtccttgttttgctacatatgcttgcagatttgcaca

SEQ ID NO: 77740 - DNA, 961 bp, Carica papaya
  Intron number 1 from transcript evm.model.supercontig_72.6 (locus evm.TU.supercontig_72.6) derived from phytozome v7 .0 (chr-ID supercontig_72; pos 274121 to 275081)
tcaggattagctggcaaccttgctggtgttttaccgtaagtacctttaaagtgcggaacttctctgtggtcatctgatctttgcatcacgatttcttattattgacacaacttatgtactttagagaactaatctaatttcaaagccaaaaattactcactatcttaattctttgagatcttctttcttggcgctttagctttattaattattaaactaatgttaacaaataatttcgtgaaccttaatgagcagacttaaatatgcaaaaccatccatatcaataataaattatgatcttgaattttcattattattttggagatgcaaaagatttaagtgtatgaagtcatctgtatctggataaattatgatcttattttttatccttattttggagcttcaacaacaaaaaccattcattgcagcatatcaactttataagtctttttgggggcgttgttgtttctcatcctcaaaactacttttcaactttgtgaacttcattagactggatagttggatttcattctcatctatgacgctattttttatctaatggagataggggatcttcaataatttttggcagctctaaaattgatggttaagtatttttcttaacttctggtgaactcgcgtgtgcacgtgcacacacacacacataaaaggaaaacatgcactgattatgtactatcaaggctgcagcctggcatctaagaacagaaaataaaatctgaattggttttggaaaattcatatctaaacatcctgtcttcacaattaatggtgatgataatcatgggtgttatttccatgcctataaagaaataggatattatagatgattgagtaaataacttctgtaaagatactgtattaggacacttgtcttcttaatggaacctatttggttgttaatgtattctctgcagggcttccgcactatttgttggtgttt

SEQ ID NO: 77741 - DNA, 496 bp, Carica papaya
  Intron number 1 from transcript evm.model.supercontig_75.4 8 (locus evm.TU.supercontig_75.48) derived from phytozome v7.0 (chr-ID supercontig_75; pos 475059 to 475554)
acctcccgcgtcatgttagtttctgttcatgcacttttttgttgaagttttcaattcatttcgttttttatatttatttcctttggtaatttattgttgttgatttggtgaaggttttagctcggcagtgtttaatgataatttttagttttttgacctctgatggtttctgtttagtagctaagaaaatgttacaaggaggagggaaaattgaaaacttaggtcttaaatgcttcgttgtttcagtttcgatgctgtgattcggtttctttttaaatacattttcatttccgatatcttctgttttctttcaattgtgagaaacagaattcaacatttgatttactcatgttcttttttttttcttcgtccatttctgttcagtttcctgccaaattcatgaataacattctatgtacggttttagatttatatttacgagaaattggaaattttaacagagagctgtgcaaagatttgttcaagaagtgggcga

SEQ ID NO: 77742 - DNA, 423 bp, Carica papaya
  Intron number 1 from transcript evm.model.supercontig_74.8 2 (locus evm.TU.supercontig_74.82) derived from phytozome v7.0 (chr-ID supercontig_74; pos 844216 to 844638 reverse strand)
ccgggttaattccattgacggcggcacaaaggtattcggccttctctgtttcttccttggatatttaaaaactgttgggatatggagaataatgaggggttctggggttttccttgtcgaaattgacgaagcttgaagcatgaaaattttataattttttctttttcacaaagctaaccttttcgatttggactctattattatctttagcccaatttgttgtctaatgttttcgtaatctagaaattagaatataagaatattgatttttcgttagatcaaaatatgggtgtttggactttgatctttaagattccttttcttaacacttccgtgttatttttggtttgtttattaatgggttaggtatatttttttgtctatgcagcaagtctggcttgataagcgaacaggtggtgtctg

SEQ ID NO: 77743 - DNA, 474 bp, Carica papaya
  Intron number 4 from transcript evm.model.supercontig_904. 4 (locus evm.TU.supercontig_904.4) derived from phytozome v7.0 (chr-ID supercontig_904; pos 11584 to 12057)
ttaagttcttcatagttttagtggaaaactgggaagtattcgtgagtgtctgatatgcttaattacttcctgggatgaaatttattaacaagaagaataagtgcttctttggaaagaagaaaagcattgaaaacaaaaagattatttgtattttccatacatacatttttgtcactcgtctaaatgtttcatcatttcgttcaaatcgctttgaccttccagagcacatttggcagataatcatccgttattatactcataatattttcatataaatacaggcatagcattagtaagtgcatttatacaatgaaagaatgcttcacaaacattctcatattcaatcctgtttatgccttaaatgttcatatgtttttggaggactaaaattttttcattgaaagaagaaagggtacataactttgatttcaaatgtgtattaataattttttccattgattttattcaggctac

SEQ ID NO: 77744 - DNA, 748 bp, Carica papaya
  Intron number 1 from transcript evm.model.supercontig_8.29 4 (locus evm.TU.supercontig_8.294) derived from phytozome v7.0 (chr-ID supercontig_8; pos 2140780 to 2141527)
tagaggacccagaaagtagaggcagtcccatcaaggtaactcatgttggttgttattttatgcagtttttagggctttgacaattccctgctgatttaaattgactgatcaaacgaggtaacctatatatgcacaaccttactctttctcttctagtgattttagatgaaaaaaccaggctacagaatagttatttaatagtttgaaaagcccttgctgattgttgacacaattgtgggtcatttctgcttttgtggcacaggcaaaccccaaaagccaaaatcattactttttgttggcaaatatttccctattctgccgattgtgatataaacaaatatgtacactcgataatgtccatctacatgaatgtctatacctattctatacttgcacaattgcaaacttctgcttatttcccgaattaaatttttttttcctgcatagttttgttagtacgatcagtattaactactgtcatgtgtgaaactcttccagactgcaataaattgtgtactatatatttgaactgaaaagaatctgccttcttttgtaactatcagagtatttaaatcgtaagtagatatatttattatcaaacataatttgctaaacaaaacttataagtgtttgactgtgcaaatgaaatttggaactcataattgacctcctgatatttttggaaggcgagtgattcaaaatttcttttcatgttattgattctaatgttgatgtttacaggctgcta

SEQ ID NO: 77745 - DNA, 292 bp, Carica papaya
  Intron number 1 from transcript evm.model.supercontig_65.6 0 (locus evm.TU.supercontig_65.60) derived from phytozome v7.0 (chr-ID supercontig_65; pos 651003 to 651294 reverse strand)
cttggcgctgcaatacttctactggtatgtttttaagggcttgtttggttgagtttttaaattaattcagttaattacttgttaattgttagttaaattatgtttatttgaaatagaaaaaagaaaatccgaagatttatcaatatattacaaaactattacgagatataagaagttacacggactcaaacttataatttcttataaagaaaaaactacggtaactatttaattaagtagtagttgataaaataaaaaaaatttgattatagggttttatagaatcggatag

SEQ ID NO: 77746 - DNA, 506 bp, Carica papaya
  Intron number 2 from transcript evm.TU.contig_40329.1 (loc us evm.TU.contig_40329) derived from phytozome v7.0 (chr-I D contig_40329; pos 705 to 1210)
tgaaggagttgggaacctgtgatctttatccacaagtgagttgcattctgctgcctgcattttagtatttcagtgatgtaccatgtcatgaaattactgcttctgttttttttttattctcattatgcaaattctcatgataattaattgaacatactggaaggatacagatggatgtgctttcactttccgcattgtagacttatagtaaattctttatagtttaggcttctcttttctgttgaataaccataaatagtttccagagcttcaatggactgacatcaagtgatgttaagaaagctgtctaaagaagataatggaaaactattttatgtgtattgatcaattatttgtcactgttttaaattaaggaatttgtgatttgaggaagatttgattctaaaatgggttgctctatttgttataactaagtgcatacttgtatacgtgactttctgcttctttttcttcatgttatgtacagagcttaaaacacaacccaa

SEQ ID NO: 77747 - DNA, 319 bp, Carica papaya
  Intron number 1 from transcript evm.model.supercontig_74.5 7 (locus evm.TU.supercontig_74.57) derived from phytozome v7.0 (chr-ID supercontig_74; pos 549876 to 550194)
agggcacaaggtatgtattctattcacgatttatgaagatccaacccaaaacctataggatatctgatggattccaaaatgtatacttgtgtttatgatgatggaatcaataaaaaaatgtagaggacttaaaaaaacgtaatttggttgtttgtcttcttattcgttgattgaaagggaagtgggttgtgtcattttatgatcttcttaatgacagaccaattgtagcattgaacatcgttgtggttgttttgatcaaattgttggcactttgattttgtcttgctgattcattttgagaggagaatacctttagcaa

SEQ ID NO: 77748 - DNA, 514 bp, Carica papaya
  Intron number 3 from transcript evm.TU.contig_32252.1 (loc us evm.TU.contig_32252) derived from phytozome v7.0 (chr-I D contig_32252; pos 3522 to 4035 reverse strand)
ataagattactggtagggcgcacctaccaatttgatgattcttgtttgttcttttttttttttttaatcttaaaatttcttgtttttgtttcaaaattttcatttgggcatcttgctataaaagacagaaatgtttgttaataatcccagatgctcgagtaattttcaattttccaacccaagattcaactcaacttccttctgccctttttctttttatctttttcatctctagcctttcttttcttgaatttttattaactccattcacatgaaggttccaagaacatgtcatcaagtttggatattcttctttctcagtgaaaaaaggaaaaagtttgcatattcttcacctttacagtcatgccatgttcaatgcttactgttccgtttttgttgttttcctctacttgataaaaagttcactttcaaagactaacttccatttctggaaccttttcgtctttttctcctccccatctatagccagagacaatctagttttcttgagaag

SEQ ID NO: 77749 - DNA, 910 bp, Carica papaya
  Intron number 1 from transcript evm.model.supercontig_82.2 5 (locus evm.TU.supercontig_82.25) derived from phytozome v7.0 (chr-ID supercontig_82; pos 462711 to 463620)
cagcttcaacaccttcaggcgacgggtacttttatttatttattattcccagtttagatttaacttagttgtcgatttaaatcatatcattcaatttatcaaagacgcttcagtttctttgttttttaaataaagaaattttagattcaggtgatgtcgctctgtatttgtcgatcagttaacagtctattgtcgagaattgcgtaacatcagttggtgatttagattcatttgctttgatataaacgttaatttattgatccaaactaattgatgggaatacaggcttgttcaggagtgagcttacaattttgttcaagtacgttaatgttaatattctcttattggtgtattcttggattattgtcagtaatcaatgcgcatggaagaggtccttcattatagtatccgcgtagattaccaattggctgcatgtgattgttcagatggtgggaatttgcatttgctggggcattagagcatataaataatttttatccaactagaaaaccaataaattgagtactttaagaatgaaaagctagtgaactctctttctctgtgtctgtcaaagaaaaaaagaaaaagaaaggaaagcaagtgaaccatatttatcaacttcctttttgctttggcagaacgtgggtaagtgttttgaattgaagagttgtgcataatcttttctttttggcataattttgttaagagtgtctagaacacatgctatgtttataggcatatctggaggttcttcatgatattgatgcataattttccctttttattccaaaaaactgatgcacactagattccaagtgctaatttctcctgacgcatattgagctacattatacacttcctgtataggcactaattctctctctctcttttttatgcagcatcattgtcg

SEQ ID NO: 77750 - DNA, 666 bp, Carica papaya
  Intron number 2 from transcript evm.model.supercontig_96.3 4 (locus evm.TU.supercontig_96.34) derived from phytozome v7.0 (chr-ID supercontig_96; pos 480035 to 480700)
tcttagggagggaaagcagattactactggtaaaggtgataatacattctctccccctttacttcttctggtttataatttcatcatttattagctaatatgctcttgagcttgtaggtgtaattttgtgtcgctaattttgacattatggtatttaagactgtttttgtgcataacaattgaacaaggagtagtttcttccctgtctttatataaacaaatctttgcatacatttcagatttgctcttttcttctctcggcgtttggtcaacaaggtttaatttaaacagctacctgtctttgatgtctagttttcatatactggtgctgagaggaaaataataactgcccctgtggtgtctgtctcttacaacttgacatgctacattgcatgcaaaacccaagctcacggtaccatgtttacgtggttatcttcttttacttgaaggccgtctttccacttctatgtaattattggttatattgtatttaaccagtttcattatcatcgagaaagtgctgtaagcaacacttgatgagtccgtaaaatttgtccattgacgtgttctttttccctaaagtgcccatgttccctttacactgcaatcttcatcctgaaaggttttcccactatcattttcaggaattaatttgtcagctgagca

SEQ ID NO: 77751 - DNA, 1009 bp, Carica papaya
  Intron number 1 from transcript evm.model.supercontig_71.1 2 (locus evm.TU.supercontig_71.12) derived from phytozome v7.0 (chr-ID supercontig_71; pos 197548 to 198556 reverse strand)
cgattgcgtctagtcgctctcaggtgaattttctatcttcactttctcttgcgtgctaatctctttgctttacttttcatgatcaacgatcactgatgaggcggcaaggtttgggtaaaatgaaagaaagttttagattcgtttgcttatcataggacggaattctgttttaatagggcattcgggtttgtttggttactggttgagttgttggaaactgggttcatgtgtattgtttgaaagtttatgcaatcagcgatgaggttggcttaatctatcattattcagcctctctgactgaagttgctgattaattcagactgcctcgcctcgttcacagtttctgagaaatttcaggaaaagaattgtttatgccagttaggtgagtctggtggcgtaccaacaccatcagtcattttatagagatagagggttcggtgacatcgttttagtctcctttggctgtcaatttcatttgagatattgtgtaatgatcatactacaatattgccgtcagtttacttggcttgatgttaatctggaatctgggcaatagtaatttgaattttttaaataggatttcacactggttaggctagtagcactcctttcctgacttgttttttctggaaattcttgaaattttctagggcttgagttttgaagaatgttttcattgctaattttctgtttcaggttgctgtattggatattaaatttgcatgattgtgcctataattgaactaaaaaattcgggcacgtcgacaaaccttgatttccttgacttgacacttttgaagtcttaatgctacatgtgctatgcatgtgtttcatttttatatctctcatgtcttgattcaccattcatatgaatgctttctttccattaagattctttgatgttccccagggcttgtttggtttatttatcgtgttttcttagtgatttttacatatgtggttttctattccagcaaagttattctgttttaaaggaagctgatataag

SEQ ID NO: 77752 - DNA, 681 bp, Carica papaya
  Intron number 2 from transcript evm.model.supercontig_850. 1 (locus evm.TU.supercontig_850.1) derived from phytozome v7.0 (chr-ID supercontig_850; pos 19228 to 19908)
tggacgattgtctcttcaagcttgttgttgccacggtaattttcatgatggaaccgttgtttatattgctgtttttcagtttttgttcttgatgatttcattttcgttgttttgttgattgcagattcttgtcatgaaacgacattagtggcctgtagatcctttgttcactactctgtttgctaaattgaattatcagtttttttcttttttctctcagttatttaaaaacaagatacctgcacagactcttctgcttcttgtccatacttcattaaaaagattagattgttgctcagaattaaaaaataagatttaatgtttttgatttcacatgattaaatagagcctttcaagtagctatatattaaagactatattatagggtctttcccttttcatatatatttgtacgcatgtgtttgtgtgtaatatttagttgtattatggttagggtttgagagatatatccattctggttttcagaatttttaaataatgaatctggattcatttgtcccatggaggaagtaactttgactgaatcacgtaaactctctatttaaaaacaaatcctttgatctatttgtttattatgtccaacaacagaggagattggtctaaaatggaacttttaatcacatagggatcagctagatctggcattcttggagaagctac

SEQ ID NO: 77753 - DNA, 635 bp, Carica papaya
  Intron number 2 from transcript evm.model.supercontig_80.6 5 (locus evm.TU.supercontig_80.65) derived from phytozome v7.0 (chr-ID supercontig_80; pos 505973 to 506607)
gggtaatttctcttttcaataactattgtagttttcactttattgtcactttagagaccttttctccagttgtttcttggtttctaaatttttattttacagaattctttcatttttctcatggttagctgcgtcctttacagcctttgacttctgtaccacttttttcgtttcaatttctgtcttttttttgttctttcttaaagctgtttgaggaactaatttcattgttcaacttagtattagtcctatcctagctagtttggtctataattaagctgttatgctttagtgcatgccagatggaaaccatttactagcataagacattcgaaacgttactgctttgaagttgattgtgttctcatgcacaaaagtggcagttcagattccactttgaaacattatgctgaactatcataaaggcttcgttatttgattatgaagttatagaatattatattttttggaaggttataatttgactaagtagtgtgcttctggcatgtgaaccaatccataattattacaattatggttattgtcgttattgttattattattattattactttcttgtctaacatctctattttgtcattgttacagtgaattgctacaaagtgagtttctta

SEQ ID NO: 77754 - DNA, 681 bp, Carica papaya
  Intron number 1 from transcript evm.model.supercontig_82.4 0 (locus evm.TU.supercontig_82.40) derived from phytozome v7.0 (chr-ID supercontig_82; pos 538088 to 538768 reverse strand)
gtaagaaaattctaaaatttttcatacttcattctcaattctcggtctctctctctctctctctctctctctcttctctgtcttactctcactttctctctaatttctgcttcttggagtttatatgtctaagactcctgacaaatgcatgcttggaaccttttggataatttagctttacgccaacttgcttcattaaattactttattaactgttatctttggtttgcgtaagccaaaatttattagtctatggcatcgggttagtgttttacctgttctgacctactttttacccaactgagtttctctttactaatcttttttgtggagttttgcctgcatcattgttgcgacaccctcacctctttggttttaaattaggaaggttcaagtttagccaattcaaatgcaatgatgaatgtttctggcatttgtttccatgccaaatgatatttgttttattgctaatttttgaattttatcacccatttgtggttttgatttgcttatttctgattcttactaccttaagtgtagccgataaccaccttttgcttgacaaattcaaataaaccgatcagtttatgcatttcgtcttccttcttacaaacccttgcttatttgttttttatttttttttcttcattcagctcaaatcaccaaaacttatatctggcc

SEQ ID NO: 77755 - DNA, 564 bp, Carica papaya
  Intron number 1 from transcript evm.model.supercontig_73.5 7 (locus evm.TU.supercontig_73.57) derived from phytozome v7.0 (chr-ID supercontig_73; pos 816745 to 817308 reverse strand)
tgattcaacggcttcaaagctttggtggagggtgtgatctctgttgtgttccttgcaacctggttcttcttggctagtctctcttgggagttttgagttcatgcttggttaaaaactgttcagtcaatcatgagaagatctttaaacctttcttcccatcgttcaggctaattgaaccattttctctgaaacataaaattcaagtaccatgagaattttggaactcatttgttaaaatgtgctagtgatccttcatctgttgctaattgtttatgttttgtatattggtagaatgcataaactcatagaattgtttttcctttttgggaaaaaccaaagaggcattaagacctaattttgtttccctactttggttttaaagccttgctatcttttttgggtatttatgtttgaaatttaagttctttccctgttaattttggttttccttacgtcaacagttgtgcacggtcccattatctttccacaattgttagtgacattcaattaattaattaacttgtcacaggttatttccaatctaacttctgttcaatcatactt

SEQ ID NO: 77756 - DNA, 356 bp, Carica papaya
  Intron number 1 from transcript evm.TU.contig_28082.1 (loc us evm.TU.contig_28082.1) derived from phytozome v7.0 (chr -ID contig_28082; pos 528 to 883)
ctggtatatccgtccagaacccttgtttgtttctgcgttttttgttttccatcttctcgtgttgtgactgttttcatttacctattcgtgatcttgctttatgcataaaggaattgaaatggttttgtggctgctaactaatatactttcagattaatttggagaatgtatggatgtgatttggttgagtgagctcaatgttaggtttttctttaatatataattttcgtatttttccacatttttttcgggtgggtgttgatctgagaaaatttcataattaatattcaaaatctagtgtttactttttttaatgtcttgtacaggtgaaagattgggtcgcggtatagttactg

SEQ ID NO: 77757 - DNA, 876 bp, Carica papaya
  Intron number 4 from transcript evm.model.supercontig_65.9 0 (locus evm.TU.supercontig_65.90) derived from phytozome v7.0 (chr-ID supercontig_65; pos 960567 to 961442 reverse strand)
acaattgtgcatttaaggtcagatatcttgtgttctttctttccgcacttgatgcaatttgactcttaattttggtaaatttagtgtaagatcatcatttttttccttagatatcttactggagaaactttctcaaggtgatttcgtgaacatcatttctgaatttattaacctgtatactcatactgtccttgctttggtgccaagcacattacaaaatcataaggtttaactgtcagttagaaagattcagctattaacaattatcacgaaaattgacaattatgggattgggattacatgatagaaagtttctgaaggtaatcttgtgactcttgtttctgaaatttttaagctacattgtgattatgcagctgctaaagcacataaggaaacagcatatgtttaacgatctcgtaggaagatctaattgttgacatttgtgtgacaaattgcaaatatgggatcctggatttgcataatgatggatttacttattggtaatcttccatgggagagattatgagtttaattgtgtgcatattgactacataaaaattatcttctatatggccatttctttttgtttgttgttgtttgttttccttgtgctacatgtctaagtttccatatcctcgtatagatatgaaggtaattgcttcaaaatgatatcaattccagaacttatcttttgatggtgacctgcgttcgtttattgaccgtccaggaaattgctagacagttatgtgtggaacatcaactggtgttctcaaaaatggtacaatatgattgctattttttgaggtcagtgaatgcatttacaacttaaaaatattgccttcctgatgtccggataactttttcaggcatcctttg

SEQ ID NO: 77758 - DNA, 561 bp, Carica papaya
  Intron number 1 from transcript evm.model.supercontig_87.7 6 (locus evm.TU.supercontig_87.76) derived from phytozome v7.0 (chr-ID supercontig_87; pos 481847 to 482407 reverse strand)
ggtatccccttctcccctcatttcccactttgttggagttggtttgttcttgatttgttactcatttttttttttttatctccttcaaggctgcaaccgttctgattttggacacgattcgtttcgtaattcggatctgattttaatggagatttttattaatgtttttgggtaactttactttcggccgatggattctaaaatcatcatccttgttattattattttatctttccttcttttagtttagttttcatcgaaaagtttaacgaatagttctgctatatctaactcttgacttttagtaatagaacttatagaagaagttgacatgttgcttataggtgttataataatcaaaggggacgtggttgatgtgttcttttcctcttctttggaaataatattgtgaaaacatgattctgctttattagttagatgttaaattctgcgttacttttttgagtacttataataactgtagaataaaatgcatgatctaattgtcttatctgcatggtttcagcttctgaacacgcctacaaggatatcttaactagt

SEQ ID NO: 77759 - DNA, 518 bp, Carica papaya
  Intron number 2 from transcript evm.TU.contig_37714.1 (loc us evm.TU.contig_37714) derived from phytozome v7.0 (chr-I D contig_37714; pos 1638 to 2155 reverse strand)
gacaggtaagaatgtttgatttctcatcctcaatgtgctatttccacagatcttctcagaactttgatttgtattttttaaattaatggtgagatatcattctttgttgtagtcatctccaccaccttaacaaatcacaacctgtttatgtttatgttttgtttcctatgcattatttttatgcaagtaccagcaaggaataaatagaaaacaaaaacctttttttgttttctatttattcctcgttggtagttgcaattgtttgcaatatcatttagtgcgggtaaagataattaatttggagtagaagttgccttactttattgaactgattctagtgatgtgcatattttctttttaggcatatattggtgcatctgatagctcctgtggattcctcattttcttttcaaaatttattacagatacatgataatatttggttattccaaaatgtaacttcaggttctagtattttaacaggcttttcatgtgcagccatttgaatatctctctgg

SEQ ID NO: 77760 - DNA, 586 bp, Carica papaya
  Intron number 3 from transcript evm.model.supercontig_64.6 6 (locus evm.TU.supercontig_64.66) derived from phytozome v7.0 (chr-ID supercontig_64; pos 405256 to 405841 reverse strand)
caaagctcaggtcattttctttggtactcttactatatataagtaaaagtaaatgtaaggacgaataatgatctcttttgccttcaaaacttgtttatttgtttgttgttcaagcttgaagcctcatttatttgggttgctggttttttcaatgacagttttgtctctttttggtgttgttctcgttttgatataggatacttagacaacttaaccaaacgtgtgtggggcggggggggagagacagcaaagctttctttttttttttacatgcttggcggttatgtagagggggtttgcatattctcaacaagcacaaatatcgaaaaggggttgggaagaaaaagagaacagccgagagaaaggataccgttttcggccatccctttacttcccctagcgttaaaagttgggattcctgaaagcttttggagagaaacctctttttattaaaactcccctttttcctggttcctttttcaggtgttacaccaaggcattattatttactctctctgcattctattcataagtttcctgtagtttaatctctcatgtttgtttttttttttttttgttcgcagaa

SEQ ID NO: 77761 - DNA, 331 bp, Carica papaya
  Intron number 1 from transcript evm.TU.contig_46170.1 (loc us evm.TU.contig_46170) derived from phytozome v7.0 (chr-I D contig_46170; pos 509 to 839)
agtccgattcaggcttccccagcagattccgcacggttcgctataatgtaaatcgaggtataagatgaagttttgagtagtgcaatatgtaaagagtgagtttcttggtggttacggttggagttgtctttgctcatcaaaggccacgaggtgtttggtgttttgattgagagggaataagacactgtgtataatctaaacaatgaataaatatttgtaaatggagtcttatgtaatataatataaataatgaatttgtgcaaagctttactggttttttttttttttttttcttctcgtccaattattcatcaggggagttgggggagaa

SEQ ID NO: 77762 - DNA, 771 bp, Carica papaya
  Intron number 2 from transcript evm.model.supercontig_69.8 7 (locus evm.TU.supercontig_69.87) derived from phytozome v7.0 (chr-ID supercontig_69; pos 990909 to 991679 reverse strand)
acaagtttgcttatctcatcagagagcaacgcaaggttctgaatcacttttctggcctcctttctgattgttttcaaccaaaactctttaaactcgttttttgtatacctttgatcgttctgttggtgatatcttttgcttaagtgttaatcgttttttttttgggtctgggactgttagtgtttcttttttatgatggaccatagatggtttgtagatccaagttttagtgtttgtttggaaaaagaattattttgttaagaatttatttggattttttatgcttagtgaaccatgaaaacatgaaaaatcaaccccaaatgaatggtaagtgatactgaaactatatatttcaaattaatggtaagtggaactgaaataatagatttttcgaattttacaaaattgattcattttggaagtgaattatgattgtttaaaaaaaattattcgtttgtttgttttttattttcacaaaatcatttaaaagtatgctagatagaatgagattacagctataattttgcgatgaattccacaaaataattcttttattccaaacatagtcttaaaaagtgaaaagaatcaatttatttgtttcaataatggaacatgaatgtataattagctggctagattattattttcattaacccttgttctttccttctctccctcttacggaagaagttcactgagatcttattaatgttgtgggtgaatgcattttgatcagatttaccaacccgaggaagaggaggaggtcaaagt

SEQ ID NO: 77763 - DNA, 713 bp, Carica papaya
  Intron number 1 from transcript evm.model.supercontig_776. 6 (locus evm.TU.supercontig_776.6) derived from phytozome v7.0 (chr-ID supercontig_776; pos 22895 to 23607)
atctccctaccagccgtttgcttggttcagtacctgtaagtcctgattcatctctttactgcttagatacatgataatatctgtttatgttttgatgatagtgtttttcaagttgaggtttcttcacttttttcgttatgtgcatgacccgatctgaacttaacagcgatctagtgagattaaccgcttttaattttctttcttgttctttaacggttttggaagaatgagactcggttgtaattggggaaatgttttatgttcgtaaaattttatgctggaaatggtcattaagaaatttggggcttaaactcaattaatcttccattcattatgtgattggttttggtttatggcagtaaactgcaaatttcaggacaatgacatatgggttttttttttttaaagagaaattcagaaataattgcgggagatcattgaaagttaaggatttaatccatttatgtaacgtgttgataccatgcttctaagaagattcactatctttacttcactgtaaccaataacaataacatttacttttctttagttgcttaatgcctcgcttacttgctgcttacataaatagttattatagttatgtgtcggagtatctttctcttttatatcgggaaaacctctcaaatactctatccttcctattttgtcatcgttttattatcaacttttccttcatttgtaggcggtcatca

SEQ ID NO: 77764 - DNA, 430 bp, Carica papaya
  Intron number 2 from transcript evm.TU.contig_35072.1 (loc us evm.TU.contig_35072.1) derived from phytozome v7.0 (chr -ID contig_35072; pos 926 to 1355 reverse strand)
atcactctgtttttggtaaccatcaaagtttatttttctttattttcttttattctagaaaagaaatagtttattaatggagcaccaaagggtgctatccatgtagaaagaaggagaactaatatagcatcagaatgacaataatcctctagatccttgtagaagaaagccggtttcgcttaaacaataaacatgggatttttaacgacatatccctaaccctacaaaaggaaaaacgaaaagcgacatgctaaaaatttcttctgtgtctttccttctaagaactcataaactagccaagcggatgggagaatagtaatggaacctggtattttatacttttttgtatgttttttgtttgtttaagtttcatatcatatagtaaacatgatggtgaattctatttcattttcattttgtacagcttcta

SEQ ID NO: 77765 - DNA, 759 bp, Carica papaya
  Intron number 1 from transcript evm.TU.contig_31610.1 (loc us evm.TU.contig_31610.1) derived from phytozome v7.0 (chr -ID contig_31610; pos 1968 to 2726)
ttgtgggctggtgccgttgctgcgattgtttcaaggtttgaacttctttccttgattttttttttcttgaaaagaattaaatacgcctgtcatatggtcagatatttgtgtttcttatagtttatttcataatccgtgcacgaccttagagctggagttacaagttatatcatatattcttgatggtttttactcattgtctataactaatgtcattaacttcaatgctcagacaaaataactgaggaaaacgacaacaagcactttgatttttaagttttatcaaatccagtagcaagcaacagaagtttcctcccaaatgtgaaagtgactttttggcttaagtaacttcggagtagagaaagcctagctttctatgtatttttccctttttgggtaaatttacaataatcagaacggcatgactttctctgcgcctctagctataacatcagaggagaaaaaggaatttttattactagagtgaaagtgatgaattttctacttcccttgttcgcaataaaagctttcagggtaatctattttcataaaattaatgaggaattcatgaacgccatctgctgctcaataaaagacttatgcttagcttctgtgaagtcccggcttttggtgttctgcttcttacttgattgtgatttatgatttattaatataaattatttatttttgttccacttacacagaattgttgttcttgtgacagaactttgattgcacctcttgagagactgaagttgg

SEQ ID NO: 77766 - DNA, 343 bp, Carica papaya
  Intron number 1 from transcript evm.model.supercontig_70.6 2 (locus evm.TU.supercontig_70.62) derived from phytozome v7.0 (chr-ID supercontig_70; pos 398267 to 398609 reverse strand)
caccaattctcttctctttcatcttccgtgcagaggttagggttcttctttcttaattttcatcttctttgtttctaaattttctttttgctgctgcaaatagatctttattgcttctaccttgtaaaagctttgatctttttttccatattatcctagcaaaattcaggggttgggagatggtggtcgttgggttgtgtttatcatttaatgtctgttttgggctggtttcaccaatttacggattatttttgtgttttcatttcacaatttaccgatcggttattgactatataatctagctaggtaggaattttgttttgctgataaatctgtaggatca

SEQ ID NO: 77767 - DNA, 559 bp, Citrus sinensis
  Intron number 1 from transcript orange1.1g024231m (locus o range1.1g023215m.g) derived from phytozome v7.0 (chr-ID sc affold00002; pos 1684473 to 1685031)
ctccaactgcaaaactgaactttcactctcacttggtaaataagtattttattattattattcttattttttaatatagtaatgcactcttcttattattggtttgcattgcagcctttttatgttacattttctacttgctttgtgtttctgttgtttttcaagtctataaaatggcaaaagttatacataactatgtatcggcgtttttacttgtttcaattatagataagttgtggctgctagttgaaattatatatgttctaaggttcgaattctcctcacatcagggtggtaaacggattggtttatgaaatatgaaaataaaatgactttttttttttaaatggttggtgaatgtgtctatttattttcctttccctttttcttcttctaaaaaatttttttatcttttgtttgattaagtccagaattcacagcaaaagggctatgaagttagtcatcttttttcagggaaaaaatattttagttatttggtcatttttgttttttgtccatggtagaaagtggagcaaagtggacaggtacctggtggtgt

SEQ ID NO: 77768 - DNA, 764 bp, Citrus sinensis
  Intron number 1 from transcript orange1.1g000614m (locus o range1.1g000616m.g) derived from phytozome v7.0 (chr-ID sc affold00022; pos 1380872 to 1381635 reverse strand)
ccaaagtcaaaggattccccgcttggcctgccacggtatgcaacgcatcatatatctctttttgtttacatgattaatttcaacaaccaaaagattgttctttaagtgattgttagttcaagaatatgcatttagttagggttttcctggtttggtttgagcgtacggtctgggcttgctgggttgatctttattagggattttgttaattgggtgtgcttctcggtctgtattgaagtttaatttcttgcccattgttaattgattcttttcctaactgtaattggtatttgcatgttcttgtgataggacttatattttcagtggactgtttgatcgatataatttttatttgttgggtcagtttttgtggttatttttgagattatttgatgaatcagctttagaactcccaaaccctagtacctaaaaaaaaaattacagagccatttgtttatatctcattaaaatgagggcttccagaggaatctatttattcttttttctggttaagtcgaaaattgagttaaattctatgggtattttatttttttctctctttatgctattgaaatgcttctggtacccaaaagaagtttattctttagcatgtagtactttcagttttacaaactgaagtcttgaagtcacaattttttacttttttcaaaaattgctttgatttttggttggttgaccattgccttttttttttttttttaatggcaggtaagtgagccggaaaagtggggctattcagcgga

SEQ ID NO: 77769 - DNA, 1021 bp, Citrus sinensis
  Intron number 1 from transcript orange1.1g042063m (locus o range1.1g042063m.g) derived from phytozome v7.0 (chr-ID sc affold00064; pos 79695 to 80715 reverse strand)
gctgcatcttactcagtgccttcagtaagctctagagccatgcacctaccccttgattaatttcttctctttaccaaacacatgcattttcttctatctttagctctttaagcttctccattttgcttttactattattgttaaatactaagatgctcttgcaaaatgacatttccaacccttaattagtttagcaatatgctgtaatcataaattctcaatttctagcagttctcaagaattctgtagcgctagaaatatttgttctatgaaacaggcatgcatagctatgaatacagtttcactgctgtcaagtgagtactttttttctttttcttttttaatcaataaaaccactttacatattcaagtttcatcaattgagcaattcgtttctaatttcttctttggtttatgctggtggtatatgtcattgttcatatgggacaatgtctctttagtctttgcattcaattattttattaataaacggtaaaagattattatttaattaaaaaaagaaagaaagaaagaaaagaataaggaaaagagggtaaatgatttttcagatgaaggcatatagtatctcatatttgtcagtttatttatttatttgctatttcacattaacaagtactatttcccttcacattttctccaattaaatatctgttttataatattgttcaatatgcgtatgttttatggaagactagctatctcctattgaatttgatgagtaacaacattctttttctcgattagatttaattttaaggtggatggaacataataatactacacgtagcaatgattaaagaaaataaatagattaagaatgaacttagtgctaaaattattgatcttagataaaacgttgatcgttttgttagtgtagagcaaagttttgattctagtagaaattcaaaaattatgtcaaaaagtcacatagtttgagtaattgatgagagaatttcgatgagcagatattggaagaagaagggcggtttgaagcagaagt

SEQ ID NO: 77770 - DNA, 938 bp, Citrus sinensis
  Intron number 2 from transcript orange1.1g030958m (locus o range1.1g030794m.g) derived from phytozome v7.0 (chr-ID sc affold00024; pos 541242 to 542179)
agtgtgtccattattggaccccctgatactttatagtgagtgaatttcttattattgatttgttttgttgttaaaattggattttatgtttggtttttggtttttgatgatgttatgttttggattttcggagttttgctaggttttgttttgtttttaaagaaacaaagactgatgtaatttgtggaacaatttaatcttgattatttaacaattgtcttcatcatttggttaagacgtgtgtctatgtgaaggagatgacatgatttccgagtttgatgatgcggttttgatttatttttttgataaatttatcatgttctttccttcttggtatagtgctttttgttttgatttattgaatgctattgatatcaatatcctcataaattttacttggtagcttgatattccagggtatagcttttgataggcaatcgttcccaattattttgtgaatcatggctgcattttctttgacctgaaacgtacatcggtgctgtcttttctgaatcatggttttgatcttacacttttctggatgatgatatttttgcacagttatgggtccgggctggtccttctttttaatccagcttgcttgttaaattttaaccaggagcaactggatcttctggttcccttaaaatgattaaagaactaggaaattccacaagggacactattatcaaggccccagtttctgtatatattggacttctagatgagaaaaatattaccaagcacatagcataggaagtaccattattcattaagtgatgtgttattgttttctcttttgttaaggacatgatattggatgccatctttttcatcacacgctaatggatttaaatctgaatcttttataggtactgaaatgtgagcctctaatgttaattgactattattttgttgcagtgaggggggattcttca

SEQ ID NO: 77771 - DNA, 591 bp, Citrus sinensis
  Intron number 2 from transcript orange1.1g039303m (locus o range1.1g039303m.g) derived from phytozome v7.0 (chr-ID sc affold00244; pos 125 to 715 reverse strand)
gtggccctctcaggtaataaaattattattagattaataaacttagaccttgtgctgatctaagctgcactaatctttcaaaatcatatctcatcacctgcacaaccaaaaaaggcctctagtatcagtggatgtacgagtgcattaataacattgtacgcatggtagaatttagttacatatatataccgtgtagaatgatcaacataagattagataaatattgatatgtattgaagatattatctcacatcaactgagaataattactaggttaataacataagtgaggcaatcctcaaatcctaagccattttcggagtataagttaggctcatcagttttttatatggtatcagagttagagtcaattacgagtgggatcactctactttatcgtgtgataaggactagctaggcaaaaaaatccgtattgaggagaatattccaagtcaactattaactcaactagctagctagtagccatattctttgacgtctataattcttatttcgtgtatgattaattatatatcaaaattctggtcatatacaggagctcacacaataggacaagctaggtgcttattg

SEQ ID NO: 77772 - DNA, 727 bp, Citrus sinensis
  Intron number 1 from transcript orange1.1g031929m (locus o range1.1g028393m.g) derived from phytozome v7.0 (chr-ID sc affold00263; pos 39874 to 40600)
actcctcctcctgtaagttccaaacttcacttcacttcgcttttgtttcattactgtaattttaaactgttttgttaatgctatgtttatgattcacatgtttatcaaacagcatagctgctgtgtattctagttctaggttaataaaaagcacaacacatatatacaataaatatccttagtgttgtgggcgtgtgttagcttaactagtaaaacctcgtggggtggcggctctagggctgaaaaagggaaaagggttgtgacacttcgtggtttagcgaaatagtcatggagactgcttgtttttagaaatgatcgcatagactcctttttggacaattatgctcagatgaatcactataatcaaagggcgttattatcctaaaaggtgtctgtctaactgtttctaagaataagattgtctctactatcatttcaccaaaccgtggggcgcttgtgctttccccttgaaggtagaaaataaagaatgcccaagtctggtgatggaagagaaagtatagcaattgattttctatgtttgattaattaaattgggtatatggaatgtaacataaaatttgtagcaagttaattgcaatgttattataattattatcctggtgcgattgcttcttccttgtggcagtgggtaatctagttttaaaaattttatggtgatctgtgcattgcagaaagtgagccctccttcatcttttactatagtcaa

SEQ ID NO: 77773 - DNA, 477 bp, Citrus sinensis
  Intron number 1 from transcript orange1.1g000739m (locus o range1.1g000739m.g) derived from phytozome v7.0 (chr-ID sc affold00024; pos 117545 to 118021 reverse strand)
gcacccaggcctcagctttcccatataattcataggtttgcatggaaaaaaaaagtttattatttatttatttatttacttatgtataacttttagtaataattttatgtattatagaacatggtaattcttgatatctatcaagcaaaattgcaatctttttggtcaaataatcaggctgtattgcatttattttgatttaatatcactaactatgcagtgaatgcaattgtttgcgtcatttatatatttttttcctaacttttccttatgcttttgtgttcattgtttagtttcagtttgcagttatagcttaacttaaattgttgctcaaaattcgtttttaattgttggcatcttattaatgaagtttgttcttctcttggttgtttctataatatttgagaattgagcttttttaagtaattttacgttcttatatatggtattcattacttcctattttgctcagtagtg

SEQ ID NO: 77774 - DNA, 600 bp, Citrus sinensis
  Intron number 4 from transcript orange1.1g004046m (locus o range1.1g003719m.g) derived from phytozome v7.0 (chr-ID sc affold00002; pos 3780190 to 3780789 reverse strand)
tgatcattcctccattccgcgtaagctacgttcaggtatgttgtttgtgaatcaagaatgataaatttttcattttatatctcaaattattttttttttaaatacagtttttttttttttaatttcctactttttctgttagttgtggggctaatagttaaagtgttaccggtttaaatatcatgttctatttagtgggtcttccgggaagtttccttttttcggttttgcttagtgatttggattttggattacgacttaagcaaaatgaagccttttttgcttttcttttctttcccccctttttttcccgtgtaagcagaattttgtttgtttttattttttaattatacttaatacactggtgttgctactttgatggtgcattgattcttttgaaataataatattgtatttgagatttttgcctcctgttgttctgaagctactttttgaagggaaatacttttaactttctatggaaaacaaaaaatgttagtttatttgaagggaaagaaaaagaatattttgaagtattaataatgtatgagaaatttggatttaactcttacagcggtgaagaagcgaaatcccgaatct

SEQ ID NO: 77775 - DNA, 478 bp, Citrus sinensis
  Intron number 1 from transcript orange1.1g004046m (locus o range1.1g003719m.g) derived from phytozome v7.0 (chr-ID sc affold00002; pos 3781418 to 3781895 reverse strand)
aaggttgttaaattgtcactttgctgcaattgcttcacatttttcatttcttttaattttttctctttaatttgctttatttcacgaagaacctgattctctgaacacgaggaacgaattacttttctcttttctttccttccttttatttttttcaactttttttctaatatgaagctttttgtctcatctcatctcatctcatctctctcgctaatttttctgagcagctagaactaaaactactcaaaactcacacacacacagagaaagcagcggagaaatatctggcaactaaaattgattctctctctctttagaaatctcaaacgccacttttgtttttcctttcactttctctcctctaaagtttgagaaaaaaaaaaacaaaccgaagctctttgaatctcatttttcttatattttaatgcgttttgattggattatagatcgaattggagggcgtgagggagagcag

SEQ ID NO: 77776 - DNA, 893 bp, Citrus sinensis
  Intron number 1 from transcript orange1.1g020903m (locus o range1.1g020903m.g) derived from phytozome v7.0 (chr-ID sc affold00002; pos 2757468 to 2758360 reverse strand)
gattaagaggtgtgattggatcacacccaactctggtaagtgactcctttttttaaaaaaaaaaaaaaaattgcgcctcatggctcataccaagtttttgagcgtccatttctgattatatcaaatgtggaaacttaaacaatggcttgaaggtcattcctgacatatcccacaattggaggttgttatttgttaattaagaattttttatgtttctgatttgctaccattttgaaaagtaacaaggttttggtagttggagccatgcaaggcttttgctgattgtataaataaaactgctgctgatgggttgctgcacaaaatgggatttttctagtttcgttaatgctaccttaatagtggagtcaagcatgatagtttagatttcatttaacagaatgaagcgttaatcatgtatggcactgcagagtagttgttgaataatttagggccaattgtattaccgaagtttaaggttcatgttgatcattaatggtggcaaaactatcatggccagacttttcaatactgcagcttgggttgacatcgcattgctgatgaagaccttaaataagatgatagcctttttcttgaagaatccggtacatcttcagacatcgataatttgtggatttcaacagcaatcagtaaccattgattctacttagtgttctagcatttgaattatccaaactgcctttttctttgaatccactaaaatatgagtcgtttactcatctagacgtttaggatgtgattcatatatacataatatcatcacttctattcatatatggcttatttatttgcttgtcttttttgaaaccaattatctactcactgtagaacatctgttttatacttaacagatccactttatatttctttccacg

SEQ ID NO: 77777 - DNA, 807 bp, Citrus sinensis
  Intron number 1 from transcript orange1.1g017906m (locus o range1.1g014118m.g) derived from phytozome v7.0 (chr-ID sc affold00071; pos 384340 to 385146 reverse strand)
ctcacttcgagatcgaagtgaagcccgaagacaaggtaggaatcttgctgccatttattagcttaattgtcataaaaattcaaattttcgtgtcgtttctatctggataataggatactagattgttattggaacaattagggttttaatttggttgtgggcgtggtcttcttttggttctagtgatgtttctgagtgaattgattattttgttggtgttatgagagcaattggattgattgattagcatatgtatttggatttcgtgtgaatttgtgctttgaatgtgtaaatttggataatgttgggtctttgttttgttacaaagtgttatatgtattgagtttgattagtgtgatacagaatttatactgcttggcgtttacaaaatagatgatactctcagagtgtaatgatcatttgaaactgtctatgaaaagtttgaattgaaacatgtgccagcagctgcttgctgtttatgcacactaataaatacggtgaatgtgaagcgtggcgtagatgtgatggtattaagccagtatgaagcagatggacaactgtagatgtatttgatttgttcaaaatgttctataatgtttgtcggtgagaatttttaaaaagtaattcattaaattttgttttggttacttatgtccgctggacataagtgtgtttattgctactcttatttctggctttgacatctgtttggaaatggtttgtaaatcggaagtcctatcattttgatcgttcaatttctgtgcatttaatgtttgttaaactgacattttcctcctcaggtttctg

SEQ ID NO: 77778 - DNA, 605 bp, Citrus sinensis
  Intron number 1 from transcript orange1.1g032677m (locus o range1.1g032677m.g) derived from phytozome v7.0 (chr-ID sc affold00756; pos 23309 to 23913)
aagaagggcactccgtggacagaagaagaacacaagtatgatttttttgaaaattttttatggtttgtcttttaatttttttttgctattttgtttgtctgataatgaaaatttgctttgtttttgcaattcaatcatatggataactttaaatttttgagggtttattgcaaaaaagtatagctcattagaaacttttatttattcattcattttttttaaataaaaatactatttttacatgtcagcctgtttgtttgctatgaaggaaaatgaaaagaaattttggatattgtaaagaatctgcacatcattagttttacattataaaatgaattagacaagcttccatttgtttgatttagtttgaagattgcttctaatagataagcaaattgtatgccctgattgaaaagtgcgaaattagatatgttttagattgcctttgtgaatccattaattcaagtggggtttttgattggtcatagttgacatatacatggtattgcatattgctaatacatgaatgggagattttcttgctcatttttttcacggccgttgtaacaggttatttctaattggattgaaaaaaattcggcaag

SEQ ID NO: 77779 - DNA, 1049 bp, Citrus sinensis
  Intron number 3 from transcript orange1.1g005698m (locus o range1.1g005703m.g) derived from phytozome v7.0 (chr-ID sc affold02443; pos 7317 to 8365 reverse strand)
aagacaaggaaactaaacaaaaatctaggtacataacttgtcagtatttaacagtttacattttatgctttttgctgatgactttgcttttaccttcatcctaatttgagtaagtttattgttactttatatcttgagtttattttatgcttcattctaattttttgttgtgaattgccatgtctgatgatcaccagtctttaacatgaacagaaagacattctatcatttatttatgttctgcatgtgggttcagttttatatctttagaagtttattgccttatccatttgtctgaaacacagtacattaaaaaatatgtatgtaagaacattatttctgatatccaaggttagaactgccgtcctgagagtcttatgtcattgttttatgttttaatttgggtgaaggtcaatgcaatacatctattattgctagataggtattagttctgtacctttgttaatgtataagttctgagaaacttagtgacaataacacaaagacaaactaattgtaggacttatatagatgaagtttattcatataattttgaggattaaaagaaacttgtttgcattctggcggcaatcagaaatagactatgtattgactactctgtaattgttctttttatcacgtaaggaaatggagacagtttctgcaactggtgttatattttgctcttcgtttttttggtcagtagtgcataagatgatatggatatttggtcatgaacaataggtggttgatttgtactttctgtgcatagtgtatattttccttgtgtgattcagtgctttttttcctgaaatgtatgtttactgtcaaggtgccaaggctgatgggagtttctctatgcgattgtattcttttaagattttctgtgcttatcaaatattatttgttgctcaacttaaaacatgttagtcttggaagctattcagattttgctggatagaccaaatactggttcatatttgtgatattttaactgattactttgttctgcaggtcaccttcaacctctcgtgcaaggtcaagatcca

SEQ ID NO: 77780 - DNA, 763 bp, Citrus sinensis
  Intron number 1 from transcript orange1.1g047991m (locus o range1.1g047991m.g) derived from phytozome v7.0 (chr-ID sc affold00226; pos 155283 to 156045 reverse strand)
gtcaacttacgccctgtgcttcctggtacttctttttatttatactatctctttgttttaatttactctgcttcgctcccagtggcttggccgagtagttttcagtcagctttatttagttagtcactcgagttagaaatcctgagtaggaggcatgatgcccaaaaaaaaaaaactctgcttcttttttttggttttgattaatttctcttttcctttgcaggtcatatccttcttccgtttatgagatcaaaccatgtaaactatggtgtcatttgacatgtatcaatagttgacctgcataaactggttgcatatccgccctgtccgagtaattagacttgcttctttaacaaatccatcccctaaacatattcatccaattttatttgtttgccttgtataaaatttctagtagtaaacttttgtgtgaatctgctttttgcataatattgcgagtggaaaattcaggaccaagtgattaatagagttgttttatgtaataaattcattgttctgccttaatatccattaggtgtgtaggcttgcactctgtcagagattggtacaatattaggaatgcttcatgctgctgttataaactttaggcacatcccattgtgtataattttctcttgtctgcatatgctttcatgtgtgtgtgtgtgttcagagctttagttcagctgtacacttaacaatgtgtacatgtacttgtcgtcccaaagcgtgaagtgaagcgatttgctgatcttactgctga

SEQ ID NO: 77781 - DNA, 479 bp, Citrus sinensis
  Intron number 1 from transcript orange1.1g023564m (locus o range1.1g015878m.g) derived from phytozome v7.0 (chr-ID sc affold00002; pos 3743543 to 3744021 reverse strand)
tagaagacacgcattccgctttttctaggcttgaggtaagttttagtttagttttttcaatttcttttttttttttttgtgctttcggtatttccgtttcattgcatgtcaaatttgtatcttgaattcataattatttgttaccttattatgtttattcaggcttaattgttgtgcactcaattgcattgacacattttctggttatttgatatctcttataggtcttcttgaattgtttgtagaagtcttatggttagtcaaaattaggtacttcgtcaattcgtacttttgaaatatgtgtttgtaactgtggtgcttctatttaactttgaaactgcaaatctaaagtgtattttacttgacagctaatgtttctatttcaaaagaatagttgtggactaaaagcggcagcacctcattcctgtacatgccattaatgtaattgctttaatgatttttgcagttgaaacaaacaa

SEQ ID NO: 77782 - DNA, 774 bp, Citrus sinensis
  Intron number 4 from transcript orange1.1g011495m (locus o range1.1g009886m.g) derived from phytozome v7.0 (chr-ID sc affold00002; pos 404974 to 405747)
gtactgctttgagagatatttgattgcttgcttaggtattacaggacgtcttgatcttgcttgctttctctcatgttcggttggtagaaaaatgtttactatcatagttattagacaactagctgaaatatgcgtaaatacactatacgtgttttcatagtacaaggcattgtttaataatatgaataaagcattattgtttggtaaggcattgtttagtaatatgaatagaagccatattttgtgaagaatatcaataccatgatatgcacgacttaaatgtccatgttacaatgctctgttttacttaaaagaaatgatttaaaataataatgtgcagataaacatcaaagttcgttgataaactaaaacagagaggctatcctgatgtatgttacttcatctcttcaatggcaacatgactcagtttatatttcatgtatgatgcacatgtcacccatgcattatgtgcccattttcatatgcacagaagacattttaaagattatgcctttgtgctttggaaataattttctgtcagaggttacttgcattatttccccgcttccattttgttattcttcttaaaataggcatctcttagctaatatcttatttttctatttcctaaaatcaaatgtgatagtcatttgaatattgataaaagtttaatttgaatattgataaaagtttaatttgaatattgataaaagttttctttctgacctgacaataatgctgtgtacaggtggagaggaaagaacaattgaattc

SEQ ID NO: 77783 - DNA, 671 bp, Citrus sinensis
  Intron number 1 from transcript orange1.1g016267m (locus o range1.1g016305m.g) derived from phytozome v7.0 (chr-ID sc affold00191; pos 126278 to 126948)
caaatttaggtactgaaactttcaatatctttaattgcacattaaatcagtgggagtttgggactgtttttggctttgccgatgtgaaggtgtagacatgtctgctacttgtttatgcaaagtcagcttatttttcatgtagttatggcttcacatcgctggtttgtaaatcaatagaacagctctagccggagaagttagggtttttgatttagatgctattaaagtttttgatttttctgtagtctttttattaatgcctctatcaggtttttggtttagtgttcttctggttcattttgtatcaatataagttatttttctttttttaaaaaattaaattacgtctttgtaatactgaactgtttactcagtgatgattgtcacatcaaaattgtgggattttttgtctttgtgcatttgcattacagacggaacaaattttgattttttgaataatctcaactattcttgttttggccttgatgaggtgttcgtttatttgtatctttatggacgggaattggttaagaaaggatgtaataaacatgtgatgtcatatgatctgatattatgttgaacaattattctgtggagatttgtgaacaatcttcttgctcaagatttatgttattggatttatattgcagccagggctggcactgctgaaa

SEQ ID NO: 77784 - DNA, 647 bp, Citrus sinensis
  Intron number 2 from transcript orange1.1g033748m (locus o range1.1g033267m.g) derived from phytozome v7.0 (chr-ID sc affold00024; pos 1054504 to 1055150)
gtcaccggcggtgcccctaacaagctatccaagatgtatactttctctctctcagtatctcgctctctcgctcactgttcttgtttgtatatttgtctagttagattatttattacattgatcgtgttggtttatgcatttgaattgcttttttctgttgttttaagatctgggtaatgtttacttttcgcttttaaagttctgttcggttgaaagattttttcgttgtctttttattcatatttcagttggcttagttgtgctttagtgttgatttagcctagtaaagttaaaaattgttttgctgatttgatttccaaaaaagttaggattatttttattaaattgatgaaaactattccaatgtaacatgtagttgttcttacatgaattgagttgtatgcttgagcatgattttttgggtagagtgatatatttatcaagcatgtgcagctaagatttggcttgagcatgaaattttggaatattttatcaattgatgactcatctgtcttcatattctcctaaattttatcttttcttcattacttggcatttttggttggggtataattatcattaaatttttgttggattgtgttgtggatgcagcaaggtggtgaggttgtcgatcgcacaagtgttga

SEQ ID NO: 77785 - DNA, 1031 bp, Citrus sinensis
  Intron number 3 from transcript orange1.1g010306m (locus o range1.1g010278m.g) derived from phytozome v7.0 (chr-ID sc affold00044; pos 375645 to 376675 reverse strand)
gaggaaggttggtaggattgataaatttcattgtagcgcttttttgtcagtacaaatttattttgagaaagtgtataaagtgcaattgtggttgatggagataacttttagacctgttcaatgcctaaatttggctttgttgcaatcacataaatatgatcaaaattttgaaatgagaaaatttcaatcaaaatgctccaaaactgaaactattggattttgatggtttttttgtatgtgatatatataactgtgacttactacacattttgatgtaattgtggttggttgtagccctcttgagtgaaatggctttgtttttttttacttgcattcaactctatgatgtttgtgggatcctttatgggagtaagaattatttctcgctggacggaatagtttctcttcatatggtagcatttcagttgatcatgcgtatttatttttatttcaacaataataaatgtagagccgtcttattttcttcaacagaattttaagttaaatcttaatgccatgcagtagcttttcatgctgcttgtggatgcctgttaggctagtgcttttgcaatcaaactggttgctgattaacctgttggaatgtcagttcacttgcatttgcccttcctccattgagtgtagtttgatttattcgggaagtcaattatttgctctgttttgaccttatatttagcaattgtagttgctaaaagcattacaaataattgctgcttcaactgtttagtacaatagaaatcgttttggtttttctcacttctctttcctgcaatttggagccatgcccctttttttcacatgttccgaattcccctaagattatttgtaaaacaccaatctcgttgttcggcaagagagtaatcttttttgcattaatagtgcattcttcttgtgccccaatgaaactacaaatggctacaacctgtcatatgaattagatttgaaaatgttttacaaattatgttttgatgcttttagattcagaggaggtgcaagcagtatcccagcctgtt

SEQ ID NO: 77786 - DNA, 518 bp, Citrus sinensis
  Intron number 1 from transcript orange1.1g010306m (locus o range1.1g010278m.g) derived from phytozome v7.0 (chr-ID sc affold00044; pos 376846 to 377363 reverse strand)
ggtaagctatcacgcgctgcttcgtttcaattttcactatctggagcttctcatcgaattgcgatttctttttaattaattgtttttgttggatctgctgatttttatttgattaatctctgattgtttatgctctggtctgatttcagttgaactgtccgttacgaattttaattcgttgtgatatttttcccgattttgcggctgagtatataaatgtttctgtgcttcgtttattttattttgcagtggctgggaaatttggttgaagtttagtaaaatatcttggaattgtagtttgtgtttattttttatttaaatttttatttttcatgaatgcatgatgattctggtgttgcaataggagagatttgttttatgttggcatgatgaacttgttaataattatgtttgtattctttgctgatgaccaaatgttcaagaaatgttgtaattaacttgtttgagttcaccaattggtagatattgaggaggatatccgctcattacagcttgac

SEQ ID NO: 77787 - DNA, 717 bp, Citrus sinensis
  Intron number 1 from transcript orange1.1g010807m (locus o range1.1g010807m.g) derived from phytozome v7.0 (chr-ID sc affold00063; pos 622455 to 623171)
ttggcaagtctgataagtggcttcagtgccttgaggtttttttttttggttcaatttcaattttttttttttttttttttgtgcaattttggcttctgggtagttggagtttgttgagtttcttgtgctgtcgcttgtgtgtatgttttctataattatgattctgaattgtgcgtttgagttttcttatggcgtgttttgaagtgcttttgacgccactataagcgctttcaagtatcaaaattgtaatgtctgcttttactgacttgttgaaataggcacaagctcttttttcattaaaaaacaatgggactgttttctggagaagtacttttagatgagggaaaaaaaaaaagaaacgctcttgaattgttttcttgggaagcacttagtatgtgatggttttaagtggaatgctttttagcaatgtcaataccttccgttagtggtcccatatttcattttagtcctagagagagatgtttattcgggccttatacatgagcattgtgatcatattaagattaactcatagaaatgcaacataatgagtattaatctatgatggcattgagttaatacaatttgacttattttgtgcaaagggaaaatgagtttagatctaaggtgtgtcaatgtggaagttggcattgccatggtgaatttcttcaagcaaacagtttgcctgacttaaatattgcatttttaggtgttcag

SEQ ID NO: 77788 - DNA, 777 bp, Citrus sinensis
  Intron number 1 from transcript orange1.1g034433m (locus o range1.1g031420m.g) derived from phytozome v7.0 (chr-ID sc affold00002; pos 1893357 to 1894133)
tgatctgggagtgtatcattcctggcaagactggggttagtctttcttttactgagagaatgaaagttgtgatttttttttttttgggggggcggatggggggcgcctttgtataaagttttgatctcgaagtttaaacctttgaatgattcaaggtactgtgtattagttaggggttagaattaaaagttgttatatttttcatatattcttcaattatctgtcaatgttgttttttaattgtatgaccttttatacagcattgtctgatctctgccctgcggggattactgtacagttttgtagttcttatcaattttattcccctgtttcttgtcccgcggctcttttcaagctgcccagtaatttggaagatgtagtctcagtttaaatttgctggatgctccaaattccattcttgtctaaatgtctcatcaactaaaagatcgatattgttgattacgtttttgagatgcaaacaatatcagatgattagtttaacagacagagtggagatactggtgccatttgcttgtccactattgaatctcctattttagacaattttatggtgatttacaattttattttttttcccccactgaaaaaaaaaaaaaaaatggcagggcttagctttaagttttaagggatgtgtatagttactttcttgttagtacccatagtgattacaatgagatgttactgcctcatttgaatagtaccatccttcttaatcttgcagactgattgggaaggtggctactttcctcttactct

SEQ ID NO: 77789 - DNA, 497 bp, Citrus sinensis
  Intron number 2 from transcript orange1.1g030878m (locus o range1.1g027713m.g) derived from phytozome v7.0 (chr-ID sc affold00024; pos 1320793 to 1321289)
acttgagtgatcgtaagtttgccttttgatttaaggctcttttgttttatttatatttttcatttgaatatgttgttgtagtaatacattatgcttacatgggctcttttgggttgttttggaaatctagagaagatatgcaagttgtataattgccaattgtgtagaatttaaagcagtttggaaatgcattgcaagttagttgttaatgattccttggttttggttgatctggtttttgatctcaaatgcatagagttaaccggttcttgtctcaggctcattaacaaatttcagctaaagttgattaggtatttcttaattgtcttgtttgagttgtttgtttgttatttttggaaccttggaagtttgttttcatagtttattttgaaattgttaaagttgcatgttgcgaccttagtgttgttgggtttttcaagcttttttgtaaggctgctgcaagtataactggaaaccccttttgttaatctaggttg

SEQ ID NO: 77790 - DNA, 742 bp, Citrus sinensis
  Intron number 2 from transcript orange1.1g031314m (locus o range1.1g027613m.g) derived from phytozome v7.0 (chr-ID sc affold00002; pos 1418845 to 1419586 reverse strand)
aactatttgaacaaggtaattcattctttggagatttttgacattatctgaaatttgaactaatacagtcttatcatcagtcgctttctgatgaatcttgttaatgttgttgaatcctgggttgtggttgcccaagaatggaattgagtattttatggcacatgagtttgtcttgtcgtcattatttctgtttttgtgtgaatctattatgtgcgcttgagcctcacagaggcttccagttaataaatctgtgatatcaagtatctaaaagtgcaccattgcattaaaattttgaaagttgatgctttgttgctcatggaagtctacggttttaatgcctctatttggtaagctggactttttgccacgtactgggggagagttttttattgtccttgggatgcctgacaccatcctatttagtcggtgtcaattattcttgacgctatgctgtttaagagttggttcaggaccaacgttctgtggcagtttctttggacttcccttttgctttaaataaattagaaaccactgtcgcagtaatattagaccattatgccactgatgattactttccacgattctgaacagtctctttgacctcttcatttttatgaccaatataattctggtagttaattatgcttgtctttgttgaagtgttttctactgcaattacatattgacattgtgttttaaatttgcaggctcttgatacgttcaacacggctgttgtatcacc

SEQ ID NO: 77791 - DNA, 1008 bp, Citrus sinensis
  Intron number 1 from transcript orange1.1g019803m (locus o range1.1g018368m.g) derived from phytozome v7.0 (chr-ID sc affold00002; pos 3547288 to 3548295)
tagggttgtttcacccttgctggctccttcacctggtaagctttgattactttttcctctcatattattttatatatttataaattttatctgtttctgcttgctataatcgtgtacaacatttgttattttttgttacatgaaattggtttagtaagtagctgaagtgatatgaagcgatacagaattgtttctcgtgtcagtttctgttgggtagtttttgtttgtgcaagcgaagcttgctttgacttgctataactgttttgatttctactgttctggttctgttgtaaagtaagtgtcgtgtaagattgtttggtaggtgaattttgagtttcccatcttaggtattagcaagaaacagtgtgtttcggtttttgattgaagcatagggtgtttgactagacgagaatttggatcttgctttggggattggagattacttagcaacttggaagttggtacaattattcaagttttttcaatcgtatttgtagaacttatggctcccaactgggttggataccagtcatttggatatttgttttgtgtgatgcatatgaggtagtagttttttatgtggaactggaacagcagttaccatgtttgagattcttatgctttaacttgacctattgacgacgtataattggttatgcagttgtggttgtgcttggtgattagccagtctgagaatgttgtatgtgttttttttcccgcttctgcatcttaggacttctatgaaatttctgtcctgtagttacttacagttgcttggctttgttgtccttatccatcttccatggaaggttatttcagcgacattcagtgtcatgcatcaagtttcatcataggctgccttgagtgtgacagggttgatcttgtctaagtctagaagttgttaaatcatatagtcattggattattgggtttccttcacatgatgattacattgtcacatatcaatgtttcctgtgcagggattggcaggatttgtttgggcttctg

SEQ ID NO: 77792 - DNA, 728 bp, Citrus sinensis
  Intron number 1 from transcript orange1.1g001892m (locus o range1.1g001737m.g) derived from phytozome v7.0 (chr-ID sc affold00002; pos 2308480 to 2309207 reverse strand)
cacgctttccctttctctctcttcttccaggtactttctccttccaatttacctgcctgtgtgcattattaaatttctctaactgctaattgtattatgttttcttcaattgatttttaaatttgattaattttgcaaaggtttgttcataagaactggtgctttttgttgttgttattattattattattattatttgtgcttgtggcggtttctgctatggatttgatacattttccttttttaagggaaccctaatgtctgttagtttgctgagaaaatgttttggagactggaatgactactgctttataacttttgattttagtgaaacgtttttctgtgcttcaactgatgtgcgccaaaagtattttgctttgcgcatgcgtgtgaaatcataatattaacatagattctctggacttatttacttcaaaattaataaggtctgacttcattttcattgattttgtagtagtcaatcaaataaaaaaaaaatgatctgcagttacttaaatgctaaggtttgctttcttgaaagttgaaagaaatattgaactagggtatcggtaagtttggtaaaaatatgtgatgatctttcaccagtttgtccatgccttcgattaatatgattaatcaacttgaatatattagcatttcttttaatgacattggtttcattgaacttggcagtgcggcggaggtggtctgtaccagagttttggttc

SEQ ID NO: 77793 - DNA, 706 bp, Citrus sinensis
  Intron number 2 from transcript orange1.1g020508m (locus o range1.1g018502m.g) derived from phytozome v7.0 (chr-ID sc affold00053; pos 275861 to 276566)
tcttctattccaggaggtacctatgttgatttatttctctattttacttgaagcatgcgtttcattttttaaactagccaattcgtttgtttgatttagaatttaatttcgtctggaacttagtgttttatgtatatgttgatttgttttcttaatggtagtggctggagattgattttatgtggattggtttttgttctcagcgctatgaattgttacttaaaattagcaattgtagggctatttgtacatgttgggttttatcatttggcttactattttctataggcgttgaagtgaaaagaaatttgtttaatctgtaaaaatttcttctcatgtattgatgccatctgttttcacaattacagggttttctgttaacttgctgtcatagcaatgtctagggtgcaattcttaataggacgggctttttgagcaatgatcaaaatgtgtatgtgagtgcattttctgcctaagtaagtttcagtcagatatctatgagtcgaccagcaagttttgtataattgattttcatgttatgtggaattgtcaaaaaggtgataatggcttggatcctataagcagtaatctgttaggtgctcaatgtagtttgtagctataagttacaacgcaatggaatgcaatccttatatatcacaaatgatctttatgtaaatgacagtgagtttatttttgatcccattaa

SEQ ID NO: 77794 - DNA, 808 bp, Citrus sinensis
  Intron number 3 from transcript orange1.1g032315m (locus o range1.1g032315m.g) derived from phytozome v7.0 (chr-ID sc affold00354; pos 103295 to 104102)
ttttagctgaagctggggctgttcaaattttttgtgtcaaaccatgtaagatgtttttagttttggttcaaacttcagtgattgacatacaactattgattccttttgggtttaatgttttacatacagatctttgtggtgacggctgcatatcccgcatcttctttctgtgtgtctgcactctagtgacaaagaactttaggaattagctccatttgcagtgcttctacgattggagcctttatcatgaaaattttagttgtttagttggcaatgatagtttttattacaattataaatttttttaaagtagtgttatcaaagaatgaaaaaatattgttaaataagtaaaataaattttagatattttaacattttataaatacttttcaatctctactcccaaaaattcaaaatttgagcttttattagtagaggcaaaataactcatttaatctacaaaaactctattcagaaaataaccaaacaataacaaaaaatttaaaaagagtttgtacgattaaataagcacttatgactattgacaagttatatcaaacaatcacttagattagaaattttttaattttacatttcattgttgtagaaaaaaaaagcatccatttgccctggctaaaagactttcttcaatgaagaaacctctactaagtctttccttttaagtgctcatatggtagagtgatcattttgcctgcaagaggcatcaggatcgaataaaaaattataatttattatgatttctgacatctgtattaatataacttttatgtgttttagttgatacctg

SEQ ID NO: 77795 - DNA, 900 bp, Citrus sinensis
  Intron number 1 from transcript orange1.1g046895m (locus o range1.1g046895m.g) derived from phytozome v7.0 (chr-ID sc affold02069; pos 584 to 1483)
atactctttcaagcttttctttgtggattatttgggtaagttgatggaaatatataatgctgtattacaaaaacctcaaaaacctacaaaatccctagtgatctaaacatttttgtcgagcaaaaacttcatttagtggattgaagggaagaagagggctcaaatcaggaaataattctaattttgagattatttttggtaattgaataaagacattaaaagtaatgtgatgcacagctgtatcacggaaaatctctcctatgcatggccatgtagctgctgacctgctgtttaatagctttaagttacacttgtcacttctgtttcttttggaatctacaaagcatgcaaactctttctttaccaactcaagtatcttgaatgagacaacgaatcctaaacaatctttggtacgcggcattaatttagttaattaattttatcaaatataacatttatctttacagctaatttattattcttcagattttatttatttccttttaaaataatttaatctatttttacaaattggtttatgtcaatctgcatgcaggggatcactatctcaaaatctgtacttggagagcttggtcctgacatctgcaacatttgcttcagccatggctaatctcgttccagctattacctttgttttgtcaatatctattgggtacagttaattttaacgcactttaattcatggccatatcattttgatcatcgtaaatactttgatcatcctaaatgtggaggaaatgatagtaagactgcactgtcagaaacaaaataattaaaatcggtgttggctagtttattcaccgattttattttatgatctttaattacaatcgattgattgcagattagagaagcttggaataagaacacgggcaggga

SEQ ID NO: 77796 - DNA, 731 bp, Citrus sinensis
  Intron number 1 from transcript orange1.1g002309m (locus o range1.1g002309m.g) derived from phytozome v7.0 (chr-ID sc affold00002; pos 4713435 to 4714165)
tcggtgaaggtgagttgttcaaaccatatggcgcctttagagcttctctattctttatctttatttccttcttttggttgctgcttcattatatttgttgagagtggagctttttaattcattatagctgtttattaattgtttgaaggctgatgatctttcctcttttttgagcttgaaagtgactgagttcgagcgaaactaggcttagcttcatgaatatggctttcccatagtttaaatttgtatttattactttggaaaaaaaaaagaaaagaaaaagaaattgagctgtagtctgtggagggaatctgattcttattctactgcctgtcattttatgttaacgagttacatttttacgtattcttccgactttatttgtttgataagtaaagtgaagaaaaacgagttggcacaaaagctctgaagcaactgggtcaattactttcatgtttcctggtgaaagcaggatgttgtaataggttagattgggttgatgtccttgtttctaattccggaatgtagtgattaatcaattttgatgaattttctttccctgtccttcccagtgtgcttcatcaatcatttatttagtttgaatttgctcaattgcttaattttaggattgatatttttctacttttgcatctgtacattagatttgcttacttatatgtcatttatgttttctcatgaatttctttttctttttcttatctgtagagtca

SEQ ID NO: 77797 - DNA, 949 bp, Citrus sinensis
  Intron number 1 from transcript orange1.1g013519m (locus o range1.1g013519m.g) derived from phytozome v7.0 (chr-ID sc affold00002; pos 4606717 to 4607665 reverse strand)
gcaagtaagttctttcttccgttcttttcacattttcctgcttttatgatcttttcatcctacccaccctctgtgcattaacgtccgtccgtaaaaaacatcatcaccagattcagaatcaaatccggatcgttgctgttttttcatttctaatacgtatacgtacgtactttccgtactatcaattaatttatctacaaatgtccagctcttttctattccacaataaccagccggccgactgtcatctatgcaaatattaattcacttttcagtttcatttgtgtatattttcacaaccatattgttacaattttttcccatatacttatcttgtttttttattactcatataagattttcaatataacgaaaagccggaagaaattgtaattaattgctattcagaaatcattgttaactaatgatattatgtgtgtgtgtgtgtgtgtgtgtgtgtatgtattctagccaataatggtactaaccgttaattacgcaatgcaaccatgacgacgacacctgtttttcatttttatttttatcaagcttaatttgtacgggtctatgcttcacaacgcaccaagtcaatgttttttgaaaattcaaaaaaaaaaaaagcaaaaatttcctagttgactaagcaaaaattgaagaatattctttgaattagaatattttaatttctttgaaaactgaaagaattttgtattaataaattaacttagctaacatctagctagctagccagccagccagccagcctagatcatgaaattgaatcctgtacaatgacaaaatggatgacgcaacaccatgtttttcagttaagcgggagatcgatgcattcatattttatattgctgggaaaattagttatacaaattttaatttgggtgggttggtgggtgcaggccgaggtgaaattcctgggaaaattttctcatcc

SEQ ID NO: 77798 - DNA, 851 bp, Citrus sinensis
  Intron number 1 from transcript orange1.1g024033m (locus o range1.1g024033m.g) derived from phytozome v7.0 (chr-ID sc affold00128; pos 43820 to 44670 reverse strand)
tttaaaaggctcatactcattggaacttctcctaggtacatactcatacctttctctctagagagccatcaaaaaataaataaataaaaccaaaaaaaagaaaatttatttttttccctatacttgcgcatatgctaagacttctattttcagggcgattcttttacttttctttttttatatatatttttttaaatttggatgaaaataagaaacttcatccactaaatagtaatctttataactttttgttaacatttgaatccgaattcaggtgactggatgcacaaagcttcttttgtgaactattgactcatggctaaataaaattaaaacaaacatgttttgtaaattctgtggtaactttgctgcggctttaatggaaagaagaagaatattttcagattgtttttcattttagtttatttttcccccatgtttttgatattttacctaacataactgctttgactacggaaagttgtcgtttggtgttatccatttgccttcgatctcgagacaaacatgtggtcgcaagagatctagttaaagatattgccggcttctctatcttctgcttcaattgtgtggacaatggaagttctaaacgcatggttcaagtattagtgtcctcaatcattagcaagcttaatattagcaaacaagttccttaatttttggactggttcttttgcttcttagcttaagcttatttgtgattgtgaaaaataataatctatctcttaattattatataactatttggtccatttttttttccatgtttatttgctgcaaacgagatcttataaatttatcttgcaaatttatgtgtaggtacatcaacacag

SEQ ID NO: 77799 - DNA, 910 bp, Citrus sinensis
  Intron number 3 from transcript orange1.1g045286m (locus o range1.1g045286m.g) derived from phytozome v7.0 (chr-ID sc affold00002; pos 549856 to 550765 reverse strand)
aatttgttcaagaagtggctattctaaggtgaatagtttgaagtagttaaagttcatgctatcccttgaaatgaattattacttgtatttgatataataatgtcaccgttgatcctctacatagtcattctggtgcctctgggaggcacatctactagctactaatttataattgtttgttaatttgatcaattcatgtgttggtactacatactttaccatatgcctttgtttgatttgatgttacatgtttaattgattaatctagttaaacatatgaatcaacgacgacaagtgcacttcatccaataccattcagttatttgtaacttggtttatcattctgtgtaatcattattcatatttgatgttgtgtccctgtgttcatcatctggacttgagtaccatatgatgaccttacaaaattcatgatttctgcagtacgtacatcatataatacaattaaggtatgccaattttatatccagaaaatctacagcactttgtgaatgattaatccaatagaaatttatttacagacttcaatttattgagttattgggtattcttgccttttctttgaataaaagattagaagatctacttttgattattgcttgaaatcactatgttgttttctcatattcaacttggaaaataagcatctaaatgcttggaacttgcagaaactagaagaaatttatcgtgcattgggttattttcaaaatcttttatattaaaaaaaaaagaagaggggggggggggggggaggcaatttatcttttagtcttattatatctctagaacttttggttatgctagaatgatttttcagattgtttagatctcgcatcactttcatgttctacatgcagggaggttcaacatagaaacgttgttcgttttatag

SEQ ID NO: 77800 - DNA, 790 bp, Citrus sinensis
  Intron number 1 from transcript orange1.1g018509m (locus o range1.1g018499m.g) derived from phytozome v7.0 (chr-ID sc affold00071; pos 473242 to 474031 reverse strand)
ccaaactctgacgatcgaggatcttctaatttcaggtaacaaaaataaatctcaaattcagttttccttttgccgttttgttcttcaattgcttggggcttttgcaaaaccctagctctctgtttggtttaatcgctaagaaattttttgaatttaatttcacgctttaatgtaggttcattagaggctgaattatagtatttagtttcagctgactatgtactcgaataagctcgtaatcttcgagcttaaatgaagagaaaaatgaaaaaaccaaagtaaaatctctagttctatgtttttcgttttctgccaagaactattgaaacaaattgaaaacaaaaaatgaatcattttgtttagtaatgttggcctcagttgagtgaaatatgcaatgttagttgactgatccagtgatattgcaacaactgtgaaccgcggttgagccaaatacataccaagaatctcatgtggatttgcgtatcagtacactgttgtactgaattattctccgaatgacttcttgtgtattgttttggcgtttgagttgtaagtgttaataataaaaaaatcatttgttttaattttaggtagttccacatgtcagttgcaagaacagaaatgaaaaattcttagcttttcaattttcactccattggtatttgcttattttttctctattctttttggtgctggatattcgtagcaagtagcaacttgtaatgatttacttttctatgcacgttttccactaggcatactccattacagatacttcatataattgcaa

SEQ ID NO: 77801 - DNA, 465 bp, Citrus sinensis
  Intron number 1 from transcript orange1.1g004773m (locus o range1.1g004595m.g) derived from phytozome v7.0 (chr-ID sc affold00002; pos 2790190 to 2790654 reverse strand)
cagaattcaggtttttttatttactcttagttccatttaattattggaaaatttgagagaaaagacaataatgatgtggtgaataacctgacttaaatggtttccggttatcaatattttgaatcttcttgtaccttaattcactgtatccagtgcctcttctgttttgacgcacacaaactgctatgtttggctggcatttagaaacatctacctatgtacaaattaggaacttctatgttgattcatataactgaataccaagctaagactcgccaagtttcctacattagccttttttattatatatgcatattactgcctgtttgcttgtcaacatgacaacatgtatactgaatgtggatatgttcccatgttttactttctgatcatggttcatgtttcctgttggcatacttgcatttcattttactttacagcctccctgctaaattcacgaaaggg

SEQ ID NO: 77802 - DNA, 679 bp, Citrus sinensis
  Intron number 1 from transcript orange1.1g021863m (locus o range1.1g016060m.g) derived from phytozome v7.0 (chr-ID sc affold00044; pos 96435 to 97113)
aagtatttgccgcaaggggaaaggaccagagtatgtcaatttgaaaattttctttttccttctttcggttatgggaatcaaaacgaggatataattagaagaatattcgaaattctgattggggttttgcattgcttctccttcttgaatttctaacgtaacggacatgtgtgattggatggaaatgaccaaaatgcccttgagttctgtttggtatgataaatgatgaattgtggatggaatttggtgggaaatttttgtaattgtacttaattggatgataaacatatctaatgataaagctactctttttaccgtctcagaattgtgcattttacaaaattctattaagctgttatgaacatatcatgacttcaacaaccattttagctgagtttctaagggtattttcaggactaacatgctgaagcctcactttgaaagcacgacaacttagagtttgctaagtgcccctcttttcttggtagctgatatttactgccctcgtggacacttgacagctagtgatttcagccattctttttggaaatattcatgcccattttaatttaactgtcatctgtatttaaatgatttcactgaagaagacactttataatttgatttgaaatttcctgtgttaggttcagagacatagggattaccggcagaagataat

SEQ ID NO: 77803 - DNA, 622 bp, Citrus sinensis
  Intron number 1 from transcript orange1.1g015236m (locus o range1.1g010984m.g) derived from phytozome v7.0 (chr-ID sc affold00064; pos 492272 to 492893)
gtgtcgggttaacccctgaacccggctttcatcaggtaaaaataccttgttcaattgtgatgttggaaaaataggaagtactatataaagatctgaagttattatctgagcttaacagacttgtgaaattgcttgtgatcttgttggcccttgtctctgagaataggtaaatggttgcatcaatggacatttgttgaaataatacgcaatactgaatcttttagatgtagtgtaaaatgaatctatagtttgccatgttcttgattgtattgtcacctggttgtagatactgaacttaggaggaaatgaagacttctgtgctatgtgctatgaagagatttgagatggtttctcttgtctgtttctttttgttttttctatctgaatggcacaattagtttgttgggtaaatctgattattgaccgaggaagttttgctcatgtgaacatttaccttagggtggttaccatagtgaaagagttgactttttaatgtctgatgttgattggttgacttattcgtgttagtactgttgtttttcctcagataagattttggcttttgtcagtcatgtggtttaggagtcaaacttctgagtttattttattttgccagcttgac

SEQ ID NO: 77804 - DNA, 448 bp, Citrus sinensis
  Intron number 1 from transcript orange1.1g015712m (locus o range1.1g014666m.g) derived from phytozome v7.0 (chr-ID sc affold00002; pos 1111215 to 1111662 reverse strand)
gtaggactttggcttacttgctgcctcttgttcaggtattttcatattttttgttggttcttaattttcaaaataagtctcacagggtatgcttgaggtgctgcgactttttgtattaactaacttttgattttagttgatataattatgggtgttaagttatgagatcctgccaaaactgtaatgttctgcggctgcctgctggctacccacatctttattttctgtaattcttaatgattgatttctcttcaaatttcatcgtaaatcaatacattaatttttctttaaatattttcttctgtttattgaagctataaaatgattttcatttgtcattggtcctgatcttgattggaatataggattggttattttgacgacttgttaataggtgtattctcaattagatgaagaacatcatttacagttggttggtattacgcag

SEQ ID NO: 77805 - DNA, 535 bp, Citrus sinensis
  Intron number 1 from transcript orange1.1g014520m (locus o range1.1g011764m.g) derived from phytozome v7.0 (chr-ID sc affold00002; pos 375379 to 375913 reverse strand)
gaggttttctctttttttttctggctcagtcagttgaatctagtgataatttgttgtaaatctagaatagcaatataattgtaactgttgtcctaaagtggtacaacttttactcgacggatacttgacagctgatgattccacatccaagtttcttttgtctctcaatttgagtttcttgttctgtgttatgtgctttttcatgtgaattctgatatgacgggattctgttcagtattcttttccttttaacttgctatttgatgggtgtcatatgtattcttttccttttaacttgccttcttgtcactttagttgttagtttcctgcttctttttttactaggcaatttggatgtgacttttcttgttcttgtttctcttttgtttacctcctgtagagtaaagcagtagttggggaagagtcttaacagttcttttgttgtgttcttaaataaagagtggccaagaaccaaactaacattagcatatgatgtacaggcccaggttgctcttctgttggaggaggtgctttc

SEQ ID NO: 77806 - DNA, 656 bp, Citrus sinensis
  Intron number 2 from transcript orange1.1g010719m (locus o range1.1g005666m.g) derived from phytozome v7.0 (chr-ID sc affold00024; pos 1107008 to 1107663 reverse strand)
tcgctgaaggagctaaaatcttgcaagatcgcattgtaattacgttttcattatttctttgtttcgctctcaattcgagctcgattttagctttgatcatggcttttcaggagaaatagctggctcgaattgcttaaacgcaccgctttaggtttctgttgattaaattttgatatgcttttatttggagctatgtgtctggttctacgcttgataagcttcatcttcttagacaataccaaaaaacatttgtatttgttttgagttttgcataaaatgggtcacatatggtaaatattttgtatatttgaagcttattaccaaccgttttagggtctgtttgggattgagttgatatagcttttgagtaaaggaggaatccgccagtctagggggttgcattatgaaatggaatcactagctgataagaattgcttagtgttatagcatcaaagctgaaagttgtttatgaatatattgcttgctttgcattcataatgaagctgaagcatgatggtttcaaatagcactcagtttatggtaatttttgaagttcgtttgcattgaattgaagtttacaatctagtgtatgaaacttgtgttagttgtttgcaaattcagggggtacggagtttcaaaagtgtgaaccaaacaat

SEQ ID NO: 77807 - DNA, 390 bp, Citrus sinensis
  Intron number 1 from transcript orange1.1g000580m (locus o range1.1g000546m.g) derived from phytozome v7.0 (chr-ID sc affold00058; pos 122341 to 122730 reverse strand)
acgccagccacccctacacgactcaccctagagaggtacattgttggtcaaaaattcaatgcatactttcatatttacttgagttagtttgttttataagaaaattggtgccatgtcagccttatggtagtttgagttagtttttatttgaatatggatctatcagtttgtgtttcaaagccattagttagaataggggggaatatttaatcatgcccggtggccggggggtgggtggagaacgtgcagatgcttcttcttggaagtaattcctaaaaaaaaaaaaaggggcaattttaatgcatccccagtgagtactgaagaagcagctcattttttacggttaataattttattgcagtggcctcctttagttgaggtggtagatac

SEQ ID NO: 77808 - DNA, 552 bp, Citrus sinensis
  Intron number 2 from transcript orange1.1g007755m (locus o range1.1g007755m.g) derived from phytozome v7.0 (chr-ID sc affold00024; pos 1086643 to 1087194)
tccattgcatattgctgcagtccaagggcatcgtactgattttaaatttatgtttcatctgattgtgttaagttttcagtgttggaaaatggaagatatggcatgtgaactgtgaagctacttcctttgtttactttaaagattgttgttgccatgaactagaatattttcttagatatgtgttaatgcaattattaaggtggatactgcaagtctatttcatgataatttcaaggtgaatataaattgagaatctttgatcatggtttcaagggcctctaaaaagtaggcttcctttttttttcccattctttttgatgtacttaattagtatgattagctactatttagcatttaacccaccaagtactcttagcaatgacatagagtcaaagttctgtgtgaaatatcatttaagaatgtgatggcatgagatgtcttacatttcatagtaaaatggtgatatttctagttttggtttcgtaaacttctaagagtctcacactaataattactcatttgttgcagccattgtccaagtgttacttgatc

SEQ ID NO: 77809 - DNA, 416 bp, Citrus sinensis
  Intron number 2 from transcript orange1.1g006859m (locus o range1.1g006859m.g) derived from phytozome v7.0 (chr-ID sc affold00053; pos 253633 to 254048 reverse strand)
ctcaagacaactaaaactattggagggtatgtagccagttgataagctcgctgatgcagtttgtctacttggtagctgtttcaaatatttcctttattgatttctgcaaatatcaattcatttttttttctgtgtaaataacacctcactgtgttatacatttgtgcataaacacacaaagacagacacagaaacatacaaactagctgttttttggtctgggggagcaggtgcagagggttgttcataaatcataatgtagtttaatgataattgcatagcaagtgaaagttttcctgccttcctttttttttccctctctctttgcaacttttgtagatcaaaattattaatgggtgccttatggtatttcttcttcagaacaagactacttcgtgccaatctgttacagcctt

SEQ ID NO: 77810 - DNA, 943 bp, Citrus sinensis
  Intron number 1 from transcript orange1.1g042570m (locus o range1.1g042570m.g) derived from phytozome v7.0 (chr-ID sc affold00002; pos 3809282 to 3810224)
gattgaatttgagactggtaagagaccaagaccagaagcacaatcacaagcgccaccatagaccagggcacgttacttgccatatcatccaagcctcgccttgtgaaaccaagcctaaaagaccagactaactgcgcagcaaaaatcaccaccaaaggcaaaatcaaaagaaacagctttaagttgagcatagtgtactgcatctgcaacctgtactttatgtaagatgaaactgtcataagaagaataataatcccaaaaatggcaagtaaaggaagaggaggtgctgaaagggagcctagagtccgctctgtccagccttgcttccatgctggccctctgctttctctgtgaaacaaacccatctctctttgatcttcaagctttttatttgttctcaaactttaggttttgtgaagctggctagatacatttatatatgcaaactgcaaagtgcttgctttggtataaattctggggttttgattctatcttcaaccgaccaatcttttagccatggtgttgattgttgataccaaaatattttttttactatttttataaaattttgtatcagtataagtacatataaagtaggaatatattctaaacgattttacttgcactctttatatatatatataaaatccaaaattaagctccttctgacgtgacttcccggcttccggccttcccctatacgtggtagaatcgatgcgcgacaagtgacatccatgcattgcaccgtcgcatgagattgtgaatagtgggtccggcccaagtcaagcccaaattcataaagttttgatccgtcaaattggattagtcattcactttattctgaaacgacaccgtgctgctaatattttctccgctgcggtttcagtttttgcgttgaaaaccttcagccccgaaacggcaggctttttcacctgacgaaaat

SEQ ID NO: 77811 - DNA, 816 bp, Citrus sinensis
  Intron number 1 from transcript orange1.1g029455m (locus o range1.1g025114m.g) derived from phytozome v7.0 (chr-ID sc affold00063; pos 206902 to 207717)
ggtgaaggtttcgtgtactttcaatagcctttcaggtagttaccattgtatctcaacaatttatgtgcttaatatgctcatattttgattatttggttgttcatgttttgtgaattgaaccaaaatatatatatatatattaattttctaaattatgacactgcaatcaagaatgaatttggtctgatcattagattggtaggaattgggaagttaacgagtaatgtaagtttaaggaaaagattttccttttttaaagacaactttttcctttataaaaggtttacataattataaaggattttcattaataatagaggcaccagaaatgggagcctctgatcttggttgtctgatgcatgctattccatgggcaattaacagtaccgaaggtctaatgatgcgtaatagcgagcttgtcaaagcagtagtagtaggattctgtgagtattactcaaagcttaggttggtagagtttagaagccagacttatgctaagatttggaatttaggttgcatggtatgtgagacatattctgttcagttgaatagtctggttagctaaagaattgctcaccataatgctgtctttaatacaaaaatttgtacaccttctagcttgcagggaaggtttttaaacctgaaactgccaaggtagaaatatggattaaaaattaagatattagagcagagatttcctggatcaagtgatcatgaaaatcaattacaaaatataaactggctacatgttttttcatccagtattaaaagtttactttaattttttctttgcagcttcagtattggaatctggaa

SEQ ID NO: 77812 - DNA, 658 bp, Citrus sinensis
  Intron number 4 from transcript orange1.1g026076m (locus o range1.1g026076m.g) derived from phytozome v7.0 (chr-ID sc affold00071; pos 531009 to 531666 reverse strand)
aatttcagtggggaatcggttagttctgtctcctatttcagcttttaaattacactatagttccacggatgtcagttctccattttcacatggcatttgcaaatggctgtcatcttggcccaatagatgccatgttgagaattgttaaatctcaaaaaggattaaaaaaattgagcgtgttccattagctgtccaagacttcttttggctccttattttatttgtttgtgatttgatcctgcattctagattattatgaaaaagttatttcaagtgtccaaatttcatttgtgtttggtacaagacaaggctcttttcttgaaaggatttaatctaggtggatattccgtgtatgatgcacttctgaggtcttacatttctgtaatggctatcaatagcctgaaaaacatttattggtgttgattggctggcatttatcaattaggtctaattgttttgattgttccattgaatgtatgcttgtttgtctctaatattcctgtggtttctcttctttcctccttaggcttaataagtagatatcttttctcattagttagttgtagtcactgaatgatagtcatttctgttcctattttttctttcttttcactattcttaaggtcgggcctcttgctgcacattatcaagtaccgct

SEQ ID NO: 77813 - DNA, 902 bp, Citrus sinensis
  Intron number 1 from transcript orange1.1g003262m (locus o range1.1g001672m.g) derived from phytozome v7.0 (chr-ID sc affold00207; pos 102014 to 102915 reverse strand)
atataaggtcaattactgctgttccagttaaagaggtaatctatggcaggactgttttggtggttgactatgatgaaacttttttagtgtcataatactttgaattgtactccatctgggataaggctgtaaaagagcttatctcgagttgcactaagttgtttgaatgtgtgtgtgtgtgtgtttttaaacacagattgaacttgaggctgcaattaatctcagacatagctcaaatcagttttcaactttggtttgttgaagtctgaacctgcttactgctcaaacctgtttgtgagcttagtggctatatcacataaacaaatcttatgtctcatttcaaattcctatgttttaactataatattgcatgtttatgacaatatgccgtgttatagagtttataaatggttacgtatgttgtatttttcgttatgaatataagatatatttcagtttttaataaatttcatttatttcaaatggtaaaatatatatatatatgtagtacactcattagcaaatcaaagaactttgggactgttcttccctgtttgatattttaatcaaccatagatttctgtttgagcttgattaaccagcgataaagtatcttaaagagctaaactttagctgtactgggaagcttgatgcatagtttattttccctatccacatattatttcttgggatgtgtaaagaattttgctgcatgccttataattgtgggaattaaaatgaagtttgtgtattgtgtttgttaaccagggactgttttgtcgtgtgttggttcattggtttttgactttcaaatgttcttgtgcttttatgtaacttttttctttatcttctgtttggtgattgaaggactctgaagggctttcagaagcagaacgggactt

SEQ ID NO: 77814 - DNA, 409 bp, Citrus sinensis
  Intron number 3 from transcript orange1.1g030849m (locus o range1.1g026579m.g) derived from phytozome v7.0 (chr-ID sc affold00002; pos 382253 to 382661 reverse strand)
tagcgggtaatttctatttccttgaatccatttaacatatttttggagttcagattgatcttaacacaatctttagataattcaaagctcaaataaacctgactagagcctcaatatgtttatgatcaaagatacctgtttaattcgtattttttattgtttaatctaagacatgacttctattaattgaatggatcatgcaacatatttattacaatatatatcacatgttattctttaccccaaacagcatcatttcaaatcataacctccactcatattttttgttagtgaaaaatgattcatatgtaaacacgtcaattctagttggaagagaatccaaacttcacacattaattgcttgtgctgccataacaatgctctgcaggggcacaagctggagctgaga

SEQ ID NO: 77815 - DNA, 710 bp, Citrus sinensis
  Intron number 3 from transcript orange1.1g023406m (locus o range1.1g023210m.g) derived from phytozome v7.0 (chr-ID sc affold00073; pos 440280 to 440989)
gtggtaagtaatttgtcaaagcatagaacttgattatgcatgatcaacctgaatgctggtggtgcccttgcgttttagcaaagttttgatgaggtccaaagtgatttgtcacctaatgaaatactattttagtctaatcttttttttttaatatctcacttcaattctattgttgttatgattagaagcccattgtgaccatccttgaccagcacaatggtgatgagaaatctgaaaataaatttcaaaattaaacaaagttactctaaagaaaagagaaacctatcagagtttgttactgatggaaattgattctctttcttcataattaagaaagggatgtgagaattacccaactaaaggatgatttttgaaatgattaaattgttcttgtgttatgtttaaaaaccaaattatatttattaataataaaaataaaagtgtagagtgtccattttattggggcatataaggacttattttatacaaattttgaaaatgtgaaccttgttaaaattttactaaaattccggtgctcacaagcaatatcataatattcacgccaattggttgtaattttttgcttggttgatcgttttttaacctttattttaacgtttagcatctttatctgccaatcaatataccaaatctcatgctaatgcctagtcttatttgaattcaagggagttcatttgtaaatttctata

SEQ ID NO: 77816 - DNA, 811 bp, Citrus sinensis
  Intron number 1 from transcript orange1.1g032299m (locus o range1.1g032312m.g) derived from phytozome v7.0 (chr-ID sc affold00354; pos 58039 to 58849)
gagaagctcccttgtaagcaaatttagctgtctttgtatgttttgttatatttccttttgagtaattttaattaggttcctttgtcatgtgtattgttgttaatctacatggctgttatcaaattttcaatgatgtggcttttgattcatagctattatatagtgaaagctggtagtttactaaacactttaacacaggtgctttctaaattaagcagaactgtagccgttaaaaatgactttattattcgtgttgattgcaacataagattttttttttaaaaaaaataaatcaaattaaaacatacactttttgggtctgcactctaattttgataatagaaggaggtttcttgaaaatgaaagcgagttgtaggtcgaataagccctgatgcaatgttgaaacaatgttaaacccaatagcctatttttataggtagggcctaagattgttgtcttctaagctcttatcaattcttcatctttagtataatttacagtgtcttattattaaaaaaaaaatgtttggtgaattttctctgtctggcacatgcaaataatggtacgacgaaatgtctatcgacgggtgaggagtttcgttctttctaccaatgtggtttggttcaaggattattggatgccttacttcttttgattcctaatgaagtcagagttatactgcattcattaaagtcaaatgagttttcggatgacataaaactggcggtggctaatctagtcatgaaaattgaatcttatacttgttattgatgcagggattaatcattttcataagacacctagcagggag

SEQ ID NO: 77817 - DNA, 875 bp, Citrus sinensis
  Intron number 1 from transcript orange1.1g005876m (locus o range1.1g005363m.g) derived from phytozome v7.0 (chr-ID sc affold00002; pos 1946331 to 1947205)
ttttttccccatatcgatcggttgattccgctcaggtaaatctctcttatttgttttcattctttaaagtaaaaaaaatactagcgttgagttattatttgctttggtttttgatttataaaaccagctaggaaaaaaaatgcctggttaataatcagctcatgtgtggacgcgtctttgtttatctgctcacctttctgggtaagaaattacgggtccactgtagctcgtcttgaaatccttgatttttttttcctttatctaagttttcaaaactttttaacgcttttgagataattttcaatattttaattccaacttctgctgttgttccaatatctgctgctgctgttgatttatataatgtaattgttgcatacttgcgttggtatgacgatgtagctgtaatgttcttgatgtttatcctttcaaggaaaaatttaaaattttttgagctttgatgatgtacatttatatttgtatatgtggatgcccgtattgacagtaaaatattgattgattgatcgattagtttttcggtttacttaggccactactgctttcttatgtttctttgtgaaatcgataagcctgttggcataatcgatggctgtttatggtccatcttacagtcatattcatattcatgccgttgcggtctaattgtatgcatgtcgatgaatggatgtatgaagtttttcatattcatatcgttaaatcaagctgcttgtgcaattaggtcaagttgtcttctatttaatgccttttatatggctgcatcatctgggagtttgtttaccagcaaaaattaatgttgttctccttgttttactgtggcaggtttgctgtctttttttttggaacgagaaagagta

SEQ ID NO: 77818 - DNA, 601 bp, Citrus sinensis
  Intron number 1 from transcript orange1.1g017713m (locus o range1.1g016160m.g) derived from phytozome v7.0 (chr-ID sc affold00024; pos 920490 to 921090)
gtggcttgttttgcagcttttggtcttgttaggaggtagaaaattttaagttcactccttgtacttctgtgcgtggattgttttattgtttttggttttgactgcaaatgattgaatttttctttttagatatagaaagaattgtttatgtatggtgcctgaagttaaaacacagcatatctgagcttctagtatgattgtgattatttatttattctttcttctgtatttgtttacaaaactattgaaaccccaaaattagttagtaataacctggaaataccgagattaattcattgagtgatacagaattctttctcctttaattacaattactgatcagttacagtaactagatttcttttgctgtttctggttactttgaagttttaatattagtgttggatactgatgtgaaagctgaccgatgagaacagaattttggaacttatacggtgtactatctttctgttgttccttgttataagtcatgcatggttaagtgaaatatgggttaaccctgtctcagttattttagaaataattgttatgtttcttggattcaggtccagaagataacgtggctgaatactatcaacag

SEQ ID NO: 77819 - DNA, 552 bp, Citrus sinensis
  Intron number 3 from transcript orange1.1g010548m (locus o range1.1g005908m.g) derived from phytozome v7.0 (chr-ID sc affold00022; pos 1180114 to 1180665 reverse strand)
attcaggtacatcaagattcaagatgcctttactttttgtttcccggattttgtttgttgtcacaagttatgcatttggactgtgaatttgtatgaattcagttctggagttttggtcttatctctgctagtttacttatagctgtaggcattaggaaatttccagcaccgctctaatactagtaatgatggaacaaaattttgatagaaataaaacagatagatgttatacttcaaagtgatacaagacaaattcttctttgccaaaaataaaaactagccgaagcatcacaaagtaacaaaaccagaaaggataaagatagtgcattgcccaagccagaaagcccgggggcgtgtctgcctggaataagtatagacctagcttgcttttcttgccatggaagatcttctttcatgatttatggcagtttatggatgtatccttatcttgattttgcttagattaatgtatttgttttgtttggtcaattggtctacaatcttgtcatttttaactcaactaactaaaatttccttctttgtaggtccctg

SEQ ID NO: 77820 - DNA, 761 bp, Citrus sinensis
  Intron number 1 from transcript orange1.1g041737m (locus o range1.1g041737m.g) derived from phytozome v7.0 (chr-ID sc affold00002; pos 1615691 to 1616451)
gctcggtggagcctttgccggtctccttttcttcagtcagtctctgcttctcctttttcttttattatttttctggaagatttgattgatacgctcttgctttgcttagatttgttagatatcgacgtgcagtatttgcttttcatatctgaaatgtcttgcttttaaaatttgactgtcaattatgggaataatgtgcggcttgcttgaatgaacttatgttgaactactcaaattttggtttaaatttgtttccttttgctgataatgaaatgtcttcatgagccgctgctgttatatttctttttgcacgtgttgcttctgtatctgtccccatactctgtctctttcagtttgtgacttcctcccttaacctaaagaataaccattcctcggttcttcttgctcctagaaaaaagaaataagcttgttttgtgattagaatagtgtgtatattagtctgtttcctctaggtaaatatctgctctgcttcttcctgcatttgcaagtaacatacatccccattattctggcttttgttgaaatcatgacacagaagggaagaatatcaaattagtggctcatgtgatatttgggaaagtttctttgcatgttcgtttactgatcactttggctctggcattttggaaactggtgtggtagtttgttggtttttaagttgacgtttataaccttcccaaattaacaatcttaaatttaaaccagggagtccggtgactcgctgggcatctgtagctttt

SEQ ID NO: 77821 - DNA, 674 bp, Citrus sinensis
  Intron number 2 from transcript orange1.1g016301m (locus o range1.1g016251m.g) derived from phytozome v7.0 (chr-ID sc affold00022; pos 538558 to 539231)
cttggcataacagtcagtggtcagtgactgggaaggtaaagacatgttgtctctcgttatttgaccttgtgtgcagtctggtattaccagttggttgtagttatatttacctctatttcatttaattgtttatttataattcttctttcagtttaccttatgaacacggctgtggttttcttttcatgttttcgcatcactgcttaattaaaagacttgattgttgcctaattaaaagacctgattttttgttctgacaaaaatcaaatgacatcgtacttttgtcttgagttgtggaagaggatcatttgtataattgcacagtgttattaatttttctttgattttttgttctgacaaaaatcaaatgacatctaccttcttgagtttgtggaggaggattatgtgtataactgcagcattactaatctcttagcaagttaagagtcataaatgaaaaccagagtactttaattattattcacaaaatcttcagttttggtggtagtttttggcaatttaggtttatcgggattatgtcaatagaactacagcgttagttttgttttctttatatagtcattcaagctgatttccagagcttttcaagtttctgatgatgtatgcctttgctttcaggttgctcaagataaacagttcaccaccaaaaacga

SEQ ID NO: 77822 - DNA, 696 bp, Citrus sinensis
  Intron number 1 from transcript orange1.1g029308m (locus o range1.1g025685m.g) derived from phytozome v7.0 (chr-ID sc affold00120; pos 224188 to 224883 reverse strand)
tcaaaggtcttgacaatttatccatttcggatcaggtaccttctttatttattttttatattttacttcttgttcccttaggattctacttgcagatctattaaaattgaatagatattagttgttatttttgttatatttttcatctgatttggtctctgagaaaatatgtgcggctgttttgtttgatattcagagaaattgtgagtattgtttatagatttgaaaatggtcggtttctattttaggtattaatgaaaagaaaaacttaagattgaatcttttgttttgtgtcttgttttctattttttttttaaatttccctgctttttatcaggtacaaaacacaacgttagtgcttagttttggctctggaaaaatcgtgggattactgagagaagagagattgcactcaaaatgttttaaaagtctctcaggttccaacattttgtacatttatgatgcaaaatttgcttcttctttttgccctttttgggtttgattctgtgaagtaatgaattgaagcgaatttcgatgttttggggatcaatgttgttgttagtttgctgtttagagaaaccatttttaagctttggtcattcatcattgattggttgtgattgtaggttcatctttatttcattctagtgttgaagttatacagttggatttttttcctctcatttttagggagaa

SEQ ID NO: 77823 - DNA, 504 bp, Citrus sinensis
  Intron number 1 from transcript orange1.1g023738m (locus o range1.1g017699m.g) derived from phytozome v7.0 (chr-ID sc affold00354; pos 107310 to 107813)
tcgttttgcgcgaagttcgcggctgttccgctgaggtctagcttaccgcttaccaatctctctcgtatttattcatatattcttaaattttaatccaatttattaaaatttcattttcgtttccactagatctgaattaactgtttgtttgtttgtttgcgtgtgttgatagttaatatcatttttaatattgcatgtagaaaatagaaattattttatatgttaaacgtaaaatatacataaatttaaaaaataattttatcctattgaatatgaaaaaatttgtgaagaagatgagtataatgccaaatgtaacagttaccaattacactgcagtcatgtacataattagattgaacgttgattggattgaagaaagtctctaagtctgaggtagccaataatttgttttattgatccggttgatcacctctgattgttatgcttgattctttttagttttattcattttaaacattttgatttgactacagatatatctct

SEQ ID NO: 77824 - DNA, 465 bp, Citrus sinensis
  Intron number 1 from transcript orange1.1g018997m (locus o range1.1g018997m.g) derived from phytozome v7.0 (chr-ID sc affold00002; pos 415697 to 416161 reverse strand)
gtttggtgagttcttttgcttttctttataagtttccttgcattggcaacttgatgttgaataaatggtagttcatatgaagttatatagattttataaaatacccagatttaagtcaataagtttaagctactttagcaaagtatattgctttatgtgctataacctggttaacttgctttgtacagcagagttaaaaattgaaaatgttgagaactcctattgtgaggttatttcttgtttacgttaattggatgctgttgcagattaattttttgatcaagctttatttgtaccaaagaatttccttgtttcttaattccgtattatttgtgtatcttcttacacataagagctggattttttcagcaattattttattcagtcctaaatttaatttttgcatgaaggctatcagctatgtgatttttgttgtcctgctactttgcatttttctaccaggca

SEQ ID NO: 77825 - DNA, 513 bp, Citrus sinensis
  Intron number 1 from transcript orange1.1g009824m (locus o range1.1g009670m.g) derived from phytozome v7.0 (chr-ID sc affold00024; pos 814451 to 814963 reverse strand)
aaggtctgttctttttttttatgtgtttgtttgtttggttttttttttctttttcccgagttcaatagaacgcggcgtttattttggaattgttgtttattgaattttgtatgatttttctgtatgcataaattcagttgcgttgttggatactcggttgtacgttttttttttttttggttcgcagtttcaatttataatttcaatggttctactaattgagattttttgtcctaattttggtgaaatatttgaaaatttgggtttatggggttttgattgtagtcttttttttttgtggatttaattggctgttgaaaacggttagacactattcatcatacgtgattgtgcttttgacttttgattaataaggtaaatttcgatcgatctgctttaatgatgatttgtaattgttgtctctgaaataatatttaaatttgcttatttcttatctcattttttttgttttttgcagttacagtaaccaatcgggctatcacagcactgaaa

SEQ ID NO: 77826 - DNA, 844 bp, Citrus sinensis
  Intron number 1 from transcript orange1.1g010679m (locus o range1.1g010679m.g) derived from phytozome v7.0 (chr-ID sc affold00071; pos 98641 to 99484)
ctgacgatttgctactgccatctatctctattctagtaagaataaactacgtcgtctcttgtcagcggttttttttttttaaaaagaaaatataaaatcctttaattagggttatttcaaagttttttacaagcagttttcttccaaaatcttcatttgtaaattggcagtccaccatatgattgttatttaattttttttttgtctttttttttatttttcttaagtttctatttgaattcttggggtttagtgaagcatttgaaaccttaattaatagaagaaaaatatatttttagtgattataatgttattttgtaagttctatcgctgtggagacagctttcatttcttgcctgctgtaaggtgatggtaacatgcaggagttattcgggttttgaatttgacttcagcattgtcattgacgtttcttgattttgataatcttattgaattttactacaattttttagaaagtggaaaatgggttaatttcaattgtttaaccatatgaattccttcctaatcagtctttgaatatgtgaatacttcccataatctgtgtgataattgcaaactcttgactgatatgctttcaagtgcttcacataatttgtacactgacgagaagattttgtaattaggaaaaatgtaaactttgcattcttatcttatcttaatttcaatctttttattgctgtagttgagtatgatttgtcactgtactgcttctagttctagaacttgccaagtactttcataattacatttctcattttccctgctagaaccagcttgcttattgttggtatttcttgtatcaggtcataactgagtgattgag

SEQ ID NO: 77827 - DNA, 798 bp, Citrus sinensis
  Intron number 4 from transcript orange1.1g029868m (locus o range1.1g026003m.g) derived from phytozome v7.0 (chr-ID sc affold00022; pos 145490 to 146287)
tgggcttctcttgccacacacaaccacagaccaaggtagttttttcattcaactcatgttagttggttttaattataattattctcgtaaggtaacgataaatttctcattatgccagttctagatcaccactttcacttttgtaatttagtactatgacaatatataatgttataatcttaatctatcttgatgtatcaataaaaattactatgcttttaactcatctcggcatcatagataatgacaatatgtcatcattgataacttctagttggatatttcatctgttgttaaagctgaaatccttctgtgctgaatacattaaagtacatggctgtccctcactccttctttctctgtttttgtggggatacaaagtgtgattagtctatatcatgtaataaaatattattaaatttttcaagtttcgggcagggtaatttgctcaaattaagaaggaatctttctttactaggcagtttggattttttttatatcttttatatataaatattattttttccccagagtttgacaatctgaatagtgagcagtaatgaagtttgataaatttgcttctgtaagcttttatatgtaaatatgtaagtgttattattattattatttttaacaaatgtaatcattgatcttgatgaactagtttgctctgctttacttgttacttcacgttttgtttgattatgttgttgaagagcttcaacacttgaggaatagtctacctgatcaagttgttgtccagcgtattgaagagaggctatctgctctgggaaattg

SEQ ID NO: 77828 - DNA, 198 bp, Citrus sinensis
  Intron number 1 from transcript orange1.1g034040m (locus o range1.1g031319m.g) derived from phytozome v7.0 (chr-ID sc affold00002; pos 3284602 to 3284799)
accagctcatctgctccttcacgaaaggtctctctctcactctccatgaacaaacaaacgcgcataattatttacttattttttgaacgttgcctaatttcgttttaattcttttctgtaatttttgatttgattgtaatttttgactttttattttgcgtaggctttaagcaagatcgcaagtaatagactgcaaaa

SEQ ID NO: 77829 - DNA, 429 bp, Citrus sinensis
  Intron number 1 from transcript orange1.1g010612m (locus o range1.1g010365m.g) derived from phytozome v7.0 (chr-ID sc affold00253; pos 19672 to 20100 reverse strand)
accctactcttgaatttaagcttgaaagagaccaggttaaggctttaatccaggtatatgtatatttaactatttgattagatgtacttgaactcagttgatcagttaaataaatctactacttaaaaccctagagcaatttaactgttttatattacttactaagtttagtaatttatttggtttctaatgatttattcaaatacttcatatattctttgcatataaccaacaaagaatcatgagatacgtacggtttgtacgtgtatcgtaattctatccgctagtcgtacatacctcaaatgtataaaaactttaatcatgcatacaaccatcaaagttgtttattgttttgaaaatcttaatcacattcgattttgctttgagtttttaggaccttttagctggtggaactgagagctcaacggt

SEQ ID NO: 77830 - DNA, 582 bp, Citrus sinensis
  Intron number 5 from transcript orange1.1g024281m (locus o range1.1g021599m.g) derived from phytozome v7.0 (chr-ID sc affold00024; pos 1194988 to 1195569)
aggagccgtagttacagtagaggccgcagcgacaggtatatcatcccttatttgtaatgagattattctccttttatatagatcaacaagtgatgaaacagttgcagtttgcttattcttttcttttgagtgttgaatttacaggaggtcccaccacaacaaaagccagctgaaaaatttagcttttctaagctagtgtgctactgattcttcaagtcttgaatttttatactgctttttgtgtttttccaatttaaatatgattaaaaataccctatgcatggtaaaacttgaagttgtgagctctcttttttgaatttttgttactgaaaaatttagcttttctaagctagtgtgctactgattcttcaagtcttgaatttttatactgctttttgtgtttttccaatttaattatgattaaaaataccctatgcatggtaaaacttggaagttgtgagctctcttttttgaatttttgttactgtttactgtttcttgtttaattttatttatttactcattgtatcaatttgcaatttttcagccgatcacgatcgcctgtaaagagagataggagtg

SEQ ID NO: 77831 - DNA, 450 bp, Citrus sinensis
  Intron number 1 from transcript orange1.1g046025m (locus o range1.1g046025m.g) derived from phytozome v7.0 (chr-ID sc affold00002; pos 4998828 to 4999277)
tgctggcttttgatttgtttattagagctaaattagtaattggaaaagatattctggataaattttatttttatgctttttgattgctggttttgacgattgaagtatcaaaattgtcatcatgaatatatatatatatttttggcgttatagaatagattaaacagtagaaaggagagaacaaataaaaaatttgggagaaatagaagagagaatgcagatgagagaggacgaaggaaaaattttagatatgaaagagaagagagagaaattttaattcaggtcatcctaaatctagatcttaatttccacaaaacttttctctaacaactcttcatcttttctttaccaaatctctggaaaggtcaaattttaattcctttttctccgtctccagtggcctttccttttctatttttttgttttttgttgaagccgtgtggattgagg

SEQ ID NO: 77832 - DNA, 786 bp, Citrus sinensis
  Intron number 1 from transcript orange1.1g030159m (locus o range1.1g023513m.g) derived from phytozome v7.0 (chr-ID sc affold00120; pos 45504 to 46289)
tcttgaaatccgaccacaacggctgctctgctgaggtaatacagtaattttgttgtttgtttatttgtttgttgtaaacggtgatcagaccagacatggtccaggtgtctacccaattcttgtaataatggtagggacctttacatgtctgggaaattaaagaaacaaagtgtccatcgtttcttgataatcatcatttcaatgattacacaagctacatctggactctacatctaatatttttattgggaatcttgtagaatcatcttgaaaggtggtaattttgtattattattttgaggatttagtgtttaggctcataatttgattgattgaaaaccaaaaaaccctgtgttccacccatttttttttaaataaattccctacgaatggaataatgtgctttaatttatgaagtgtcacgcatttgtaacattatctgctaccagagaagttgtgaaatgaagtgagtcacatgatattatgaagacaggaattttatgggtatcggtgaattagatgttgtaattctctgtatactacttgtttgttgggtgcaactgaactatgaaattggcttttgaatgaaactgactgtagaatatgcatgttaaaggtctttttatcagcttgagatgcctttcaaggctttcacattattttcttccattatacatgtaccatgatttgttttgttagatgagacttgatttggcaagtgagatgactttgattgtcctcaatctatcaggtgtttgatactcctcacttgccagtactagttgg

SEQ ID NO: 77833 - DNA, 700 bp, Citrus sinensis
  Intron number 2 from transcript orange1.1g017038m (locus o range1.1g016305m.g) derived from phytozome v7.0 (chr-ID sc affold00191; pos 126278 to 126977)
caaatttaggtactgaaactttcaatatctttaattgcacattaaatcagtgggagtttgggactgtttttggctttgccgatgtgaaggtgtagacatgtctgctacttgtttatgcaaagtcagcttatttttcatgtagttatggcttcacatcgctggtttgtaaatcaatagaacagctctagccggagaagttagggtttttgatttagatgctattaaagtttttgatttttctgtagtctttttattaatgcctctatcaggtttttggtttagtgttcttctggttcattttgtatcaatataagttatttttctttttttaaaaaattaaattacgtctttgtaatactgaactgtttactcagtgatgattgtcacatcaaaattgtgggattttttgtctttgtgcatttgcattacagacggaacaaattttgattttttgaataatctcaactattcttgttttggccttgatgaggtgttcgtttatttgtatctttatggacgggaattggttaagaaaggatgtaataaacatgtgatgtcatatgatctgatattatgttgaacaattattctgtggagatttgtgaacaatcttcttgctcaagatttatgttattggatttatattgcagccagggctggcactgctgaaaatggctctttcttatttccaggggacaat

SEQ ID NO: 77834 - DNA, 766 bp, Citrus sinensis
  Intron number 3 from transcript orange1.1g044757m (locus o range1.1g044757m.g) derived from phytozome v7.0 (chr-ID sc affold00053; pos 35266 to 36031)
aacaaggtatccggtttaatgtttcttgagattttgattgttgattctcctgctcgtgttgaagagtgatagtgtttgtgctttcaaggtggctagtagaattgattctccttgtaactaaaagaaacaaattttatattggcactaaatgaagcaagctttatattagcactgattttacagaccaaggattaattaatatggcaggctgggaaaaaagaacattaatcatgatagcggtacattccatttgtgacctaatgttttgtctcttaatatctcttgattaataacatttctggggcgcttttgccatggatttgtcagagttaaaataaaatctgactgtgactgggtggttgaagcgtctgctttcctattaggtttttttttttcccagaatttaaaaggtagggagtggacaaagccaaaataaacttttaactccttagcccactagaattcaaacaagggtggccaattaaagaaagctacttgataatcactcactcaagcctctgagagctgatcagagaaggataggagatgatgtgatgtgttatattttctagtagagatgatatcttaattagtgcattcaacttttttgcaatctattagtgattcctttcattaatccttgctgaaaatatttttgttggattccttccgttagtcttctgtgaaaatttttgtgctgtttcttatgtgtaataaagtagttctaaagccatggttttacaaactctctactaggttctctcct

SEQ ID NO: 77835 - DNA, 489 bp, Citrus sinensis
  Intron number 2 from transcript orange1.1g013940m (locus o range1.1g013940m.g) derived from phytozome v7.0 (chr-ID sc affold00002; pos 5031620 to 5032108 reverse strand)
cctactctcgtttgcgccacaatcttaataccaaggtacgtatatacgtgaacgtgttcattcactttcactgtataacaaactaagaatcatcacgaacttaattagttaattagtcaccgcgtctacacttactgctcatcgttgtcgttgttgtttattatatatatatatatatatatataacacacacacacacacacaattttattcttgtagattattggtacatgggatgaccatgattatggattgaatgatgccggtaaagaatttcctgccaaagtttctaatcaaaggcttctccttgatttcttagatgagcctcttgacagtccacggtgagtggttccattcatatgtatgatcaacaacttcttttttattatcatccttcctttcatttctaaatttcaattgctttgccttttcttcatattgtagtcgcatgcaggctggcatctacacatcatatacatttggacctgt

SEQ ID NO: 77836 - DNA, 439 bp, Citrus sinensis
  Intron number 1 from transcript orange1.1g042782m (locus o range1.1g042782m.g) derived from phytozome v7.0 (chr-ID sc affold00002; pos 3297362 to 3297800 reverse strand)
agcttgacgtcgttacaggttcttttctctttaatttattctcttgcatgcgtcggtctgtctcaatattgattgcctttttttttttcaaactttttctagtttatcaattttttttaatatattttatatattttcccttgcgttgtttcttcttttgttttgatttgccgaactttcaactcttaaagtatatattttttttaatcatgagtgtgaagagatggtttttatcttccggatcatgtacaacattcattattctgcagcaaatatataatttcacatgtggttttggcgttttgggtggttattgatatgtcatgatttaattttattggtttgttgactgtacttgtacatacttccgatatgatgtacaaaagtttctcagagtttcaatttctggtcgccacacaggtaagggagagcttttaac

SEQ ID NO: 77837 - DNA, 945 bp, Citrus sinensis
  Intron number 1 from transcript orange1.1g030781m (locus o range1.1g030777m.g) derived from phytozome v7.0 (chr-ID sc affold01359; pos 25278 to 26222 reverse strand)
aaggtatttcaacttaagagaagaggctggctaaggtgagctaaaatttttcctgccttgagtaattgcgcgatcattttttgttcaacatcttagtattggttcgttgcatggtcaattgtgtgaatttgttctgagagtggtaaacaattatgatgtgccctttcatctaccagaaactgtgattgaattgttgttttcttgcattcgagaatttggaattatgtatgacaatgatctagagggtttcaataattaagagtgttctcttttcatcgctcttttaactacaaagtgctaacgactgagatttgtcacatttgttactttatgatcaagtgtcatgttcttttcttctggttcttcttctggtaacaactttcttggttgagatctcttttatgctgctgttattgccatcacattttgaatggataacatttgagcatttctactactgatagtttattttaagaagctatcctttggccttcctgtgttttttgtgaactttcttgagctattaccttgatgacattctctttgctacataatacatatatatgatcatccagtccatgaacatgaactttaacttaagcatggtcttagtagcattgaacttctatttttcgagtattataatttatttttatttcttgtattctggcttattttcacttttacttttttgtgtgcatgatagaaacttttaaggaatttgttagttggaaccaaacaatactaaccgtttccagactttgctaatggttattcacagctttctaggcttcctatattcatgtctgtttaccctaaagcaattatctttttgcagtcatatgaccacatcaaacataacgctctactatcaaggatttgtataatttttgtctaatatgtatcatgtatgtatttggtcaacgcagacgacaggtcttttgg

SEQ ID NO: 77838 - DNA, 599 bp, Citrus sinensis
  Intron number 2 from transcript orange1.1g008049m (locus o range1.1g008049m.g) derived from phytozome v7.0 (chr-ID sc affold00002; pos 1464945 to 1465543 reverse strand)
tttcagctacagaaggtcattactttacttttaggttgattttgatttttttcttcttatatctcattcaattttgtgtttattacaataaatttttgagaaaaaatagcaatagcagctctatttgaagtcatggtaataactttggagagaatgaatctgtgagtttaatattaatattactttgtgtatctttattaattgagttagaacattcttgctctgtacatataattggaatctgaaatgtattatatcacatttcagtgtcgtctaaattagtgggagctccagtcggcatctacgtgttttttttgtttgttttttttcctgtttcacatgagtggaatgcagggacttgatttatttcctttttctttgtcacttgctactggaaatagttccttcctatctggtgtacaatgtgtaaaatttacccataattatgtactggtgaatttgcagaagtatttgctaaatgtttagaataactgatggtaatcccttcttgtgtgtttgcattttgattgttggctggggtttgaatctgacaaatgttcttgtatattttcttctcagacaactatttcgtttatctg

SEQ ID NO: 77839 - DNA, 926 bp, Citrus sinensis
  Intron number 3 from transcript orange1.1g024889m (locus o range1.1g023475m.g) derived from phytozome v7.0 (chr-ID sc affold00002; pos 4845108 to 4846033 reverse strand)
ggtaagttgtaagtttgattataaattaaaatttgttaattactaaagtccacagcagaatcagtttggcttctgctcctccctttgtgcttttgtcaaagctaatggacttgcaaattttagtgttagagcttctcgccttgcatgtgactgactgactgactgagtaactctctagtcggccaggtcatggccctgcactccatgtagagaaagatatgcatatttccctatattggcctttatatctgtttgtaagtgacagctttagggtgaatgtgtcttaatagccttatgttgtcaatatgtgatcatcaattctttcctatgtctggtggaaagattagcagtcgttcagtttaattgggtacatctcctttgcaactacatttctttcttccatcattctgttttcctttgttgccagtttatgcatttaccaatcacaaaattgaatgtgagtttagggtttaagttgctctaggaataattaaacatttccctagatttcaaggttgatgatgtggtccaaactacagagatgtgacatagtgtgattggtaattgcaggtggtagttgcagatgatatgtgcccaagttcaatgtttattgtacaggcaagaatcatgttcttttttctataagaaccataaaagaaactgataaatcttggtttcagttttcaggtctatcttttattagtttattttggatgtactagggatggctccttcatagaataggagaatgttgcctttagtgcagatggtacacttggatcccatctatgctatggataatgtatataacattcaccatttattccatgcagtgtcatctctcacacctacattctcaatctacccccaaagttttgttaatattgatattccgtttattgaatggttgtcgtacctatgcaggt

SEQ ID NO: 77840 - DNA, 450 bp, Citrus sinensis
  Intron number 2 from transcript orange1.1g009125m (locus o range1.1g009108m.g) derived from phytozome v7.0 (chr-ID sc affold00071; pos 541847 to 542296)
ggttaagccccgatcggtgaaagctcaagcctccggttcggtttctctctttttctttttgtcaaaatttttttaattgtcaacttcggttgattgttatagttctaggtctattttagagtttgtttactgattccattatgaatcacgggattgcatattgattgaatttgtttattgttattggttttggtttgaattgtatgctttttcacgttttgtatgataattttcggctaattttataattcttcgtgcgttgatgctctctagtgattcaagtttgtatcgcttgtgactctttcgctataaatagtttcattctgtaaatgcaacgccttttgttttttaatgtatattttttcagtttttaaaatttatgttttgatgagtggcctatgaaattgaactacagctggagacattgaagaagctactcctttcaagcct

SEQ ID NO: 77841 - DNA, 923 bp, Citrus sinensis
  Intron number 1 from transcript orange1.1g026823m (locus o range1.1g026823m.g) derived from phytozome v7.0 (chr-ID sc affold00022; pos 377744 to 378666 reverse strand)
cgtgccactgatccaccagccaagcctccagctaagtaagtcatttctttcttcctctttcttttttattttttcatttgtttctgtcggcccgctcccttgtgaatccagtttcttatgctctatttatggtactgcatgattaatcatggcatcatgggttagggttaggttaagcaagcttagagttagcctgtgtgcgtcattgtatgtcagaagtcagaagagaggaatttttatattatcatcgcttcatattttgtccagcttgagctcacaaatagatctcgaagataattacatattataaaatgaaaaattgatatcaaagcccaaaaagagttgcagaaacacaagcctccgtattaatcttctacttctacatgtcatttgtatttttgtaattagggctaagctcatcatgatttattgagctagctaagagatgattgatacaattctctctctatctttctcttttttctttctttttctttttcttttaaatttttttcctcccatcaataatttcaaaattagctaaaaacttacaatcttattttgcttcaaaattgtgaaaattttatcgtccactgcacaagctatagcaagcaaaatcttgtggcatacacggtgctgacaaaaatttcatggcgaagcaaaaatcaggccacatgtttagacgcatgaattctcaattaattccccgtttaaacttcataatttgagtctcgtacaccttgctttcttaacttctttactcttataatataaaataaatttctctaattcccttctaacaaaaaaatgtcctctaattcacagttgaatgtttaacaaattaataaaggtgattaatattgtatagagtggaatttcaattttcaggacacaagttgtaggttggccaccagtccgatcgt

SEQ ID NO: 77842 - DNA, 812 bp, Citrus sinensis
  Intron number 2 from transcript orange1.1g024147m (locus o range1.1g024147m.g) derived from phytozome v7.0 (chr-ID sc affold00002; pos 3800480 to 3801291 reverse strand)
ttgtaagtcctctcatttagtgtcatgaatgttgcctgcttgcttggaatattaaccgtggcgttttctttttcttgcaataattgatgatggctcaatgtctgcgaaagctaggatggataaatcctaagattcagttttgggcacttcccttagcttacacatatgttgattagtttgaaaattgaatttctaagctcttgtcctgctttttattaagtgcttaaaacattttcttagtagtttgatgagtgtttctatggaggtttgcatttcagatgttgataccttttctcacattccaaacaatttatagtccagaatcaaaacatgctggaactcaactaatgggcttatcggcaatcatgctctcactgtgtttattatggggtctaaaaagcatcttaaactttcctcaacctgtgtttaggttacatattttgtactctggaatctggttttctaattctttatgctttttgggatacttcttgactttgttaattatctcaattatggagttacttgaactgaaattaaaactttgcatctggtatggtgtagctctttgcatcatggtttgcctttggttttattgtttcacgtgtcttctattgtccctgcagactttcttggatctgctatttatttttaggcttattaaaaaatcatattttttgaagccttttgtgttattcatttaatttgtttgttaaaagtttcgtgaatttattttgtgttggtcttctgactctcgctttttttacctcgatgtagttgataccttgtgctgttctatcttttctcattca

SEQ ID NO: 77843 - DNA, 389 bp, Citrus sinensis
  Intron number 4 from transcript orange1.1g032996m (locus o range1.1g032710m.g) derived from phytozome v7.0 (chr-ID sc affold01495; pos 15681 to 16069 reverse strand)
tcttcacattgatttgaaaaggtatggtaaagctgcaaaagtcagtttgttacttttttttggattttgatctaatttttattcaatggttttgatctaatttttgtttaatggtttgttatttaaattattcttgcatgaatgaaacacaaataaatggaaaaatcttcaacatgttctgctattggtttgctggcaatttatttcaaggatattaaacttatttgtaaattaatattcttttttattggcattttatcacctttctgaatgtatactgaatgctgtgttccagcatccttcaataaatttaaagttgatttcaatgtttccttatgccaaaactctggtttctctttcttctattccctcttgctgtctgcacacag

SEQ ID NO: 77844 - DNA, 1012 bp, Citrus sinensis
  Intron number 1 from transcript orange1.1g032996m (locus o range1.1g032710m.g) derived from phytozome v7.0 (chr-ID sc affold01495; pos 17088 to 18099 reverse strand)
aggaaaccatcaccaagacaccaactccacctcaagtaagctttaaatttttttattgtagaaattctaagaaattattgtagagttttgaaaatctgtcgaaaatgttgggtaactctattgtggatttttctctctgttttgtcttaaattgattagagttttgtcttaatttttcaatttagttattttctggggttttcatttcttagttggagtatggatttctaataaagatcaaattttaaaattgagttataagttatttgttactatttcaagttgctttagttttaggattttgaaagtgggggtaatctggaaaagctttgtggttttaatctataaacaatcatttgaagccgagtttgagattgagaatggctgctagagtggagattaatgaagacagtgagactaacaagggcagcatgtcgtcttggattagaagcttgatcagcctatggatgaagaagctggcaggcttagaaatacgtacagagaaatatgcaagctgggttatagtggtttgataagctggttctgtttgatttggtggtactctgtttttgaaaatgttgttcatggttttctacattcatgcttgataaatcataattttcagaatttaaaagaagtgaaattgtttgcccagaaggaagataacaattaagtctgtatttgagaagaaagatggaagacaacatttaagaaaagcagaagttaaatcctcggtgcagtgtagatagcgtttttgacaaaaaaaaaatccttaaaacggcgtcgtttttggaatcttaagggtttgactcggggtttgactcggagcaaacatcagcactgatataaatttaattaataaatttttatttttcttcacacccaccataattctaaatacacccgctatttttaattttattttattattagaatataaatcgaaaacagaaaaactaatacctacttccctaatcctaaatcctagttttcaaatttaccgacgctgcgc

SEQ ID NO: 77845 - DNA, 551 bp, Citrus sinensis
  Intron number 1 from transcript orange1.1g034633m (locus o range1.1g034633m.g) derived from phytozome v7.0 (chr-ID sc affold07430; pos 78 to 628)
tctcaggtatgctttcaatgaattgggttcctttttttgtcgttgtttattatcctatttgaccatttttacgtctgggttcatgtttgattcttttaataatttgtttgtatttagattcaagaattttaatataattctgtcaatttttgaattgaaaaaaagaagatttgaccatatgggattttcacgcctcgaattattgaacaacatatgcaaaatttcccttcttttgaataatttattctctgttttattgataatatgtatgaggatcaataaatcaatcctatctgttggctaaatgttgatgtgattgattatataagggatcagattatcagtaattgtacgtagttatatttttttttctttttgtgatgcagaatttttaaagattgtataatctttattatgtgtaattgagatatgtgtacaggttttatgatctacaaaaataactttgtcgtcttaatttgaggattttttaagctttttcatgcgcacattaagttcatgtttgattgcagaccgttgtccttaaggttggc

SEQ ID NO: 77846 - DNA, 1060 bp, Citrus sinensis
  Intron number 3 from transcript orange1.1g024132m (locus o range1.1g024132m.g) derived from phytozome v7.0 (chr-ID sc affold00682; pos 16285 to 17344)
ttgcaaatttgaggccagcaactgttttaccacaggtagtatttggtttagctgcaatttacgaagttttcactctttcactgtacttgcttagttctggaatcttctgtatacaaatttgtatcagaatcatttgtttaaagatataagcataattttgctagttctcatacacttgcatgtaagattcagaagattcacattaagagtcactggcttaatttttccatcaaaatgaaattgtattaaataataggtcaaaatgaaattgtattaaataataggtcatattaactgcattaaaagtgtcataacaagtgtgttcgctttttatcaaagttaaataactctattgctgtgttaaaaaaaaataaataataataataacaaagaagaaatacttgttttgcctctcatatatgtaaaatgatgcctgtcatagcaaataatcttttgtaatgccaaattaaagtttaagatatcaaatagggaggattcaatagttaaatcattgtataagtcttgcatcattcactatgtttggcttgatattcatttaatttaaagtgatatatgttgagtcaagactcaagctaccaaatcctaaacttttatatgacttgaggaaaagatttctttttctttctttcttgtagacatactttgtttttcgtctgcaagatgcttggtgtttaaccaagtaatctttatataagaaaaaatttagaaattgcctcaaaacaatttattcaatcaagttagcaaattttatgccgattatgtatgaatgattgtattaattgtagcatgattggcatacaaaatatagtatggctcatccaaattaaatggagacttctacttaaagaataattatgtgggagagaattggttaaaattgttatttatttgaaactttttgtgtgaacatgtgtgccttttgatttctttttaaacaaaacagaaattaaaaaattctggatttgcttctacttgagatgtctctttctgtgttactctttcagttagtggactcttccactttgaagaaggaggttgc

SEQ ID NO: 77847 - DNA, 529 bp, Citrus sinensis
  Intron number 2 from transcript orange1.1g026742m (locus o range1.1g026383m.g) derived from phytozome v7.0 (chr-ID sc affold00024; pos 1223306 to 1223834)
accacctttttgacaatatcaagagtatgctttcctccctattgctcaatgtaggaacgtttgttcagtgtactgtttcggttcatggaagttgctagtacattattgagtctctgtgataccacattacatcagtctggtaaattaattgttttattatttcattcttctattgcatactttttagagtcataaatgcaaatatacaggtgtttgtgtttttttcaaaattccttgggcataaacaacaaaaactttggcaccaaatgtgttatgtgcctgccatgctgtaattgaaagctgagtatcacagtcggtggaaaactgacgaaataagtaaatgtgtttttgaccatcagttgtgcactgatatttagtttcagtctgttcttctctaagatcaattaatttttttcctcccatagctttgattccaaatatttaggctgctggtgcacatgtgtactgacttttgacagctattcatggtgcagagttcacatctgaaagttgtgggatatctgctgat

SEQ ID NO: 77848 - DNA, 784 bp, Citrus sinensis
  Intron number 2 from transcript orange1.1g033201m (locus o range1.1g027062m.g) derived from phytozome v7.0 (chr-ID sc affold00058; pos 560865 to 561648 reverse strand)
atagtttcacttacaatctctgccaggtttgttgctctcttttttgtttcttgatttctatatttgattttttttttcttttgattcattgttattgttattctcattcgccagattcatcgcagtcctacttgtgtctaaccaaaatgaaagtaaatgttttagaatgtcagtgaaattgaatttttttttaaagatctgttattggtggtatgctgcaagaatttgaatttgaaaattttggagatggcatgattaaaagtaaagtgtttgatgattcgtatagatactaatgtccaacaacattaactaaggcaagctatagaaaaagtagatgtgttcttctcctagtttttctattaattagctaatacaggtggagctttaagggaaaaaaaaaagcccttgttaatagtctgacggaactagtatttatgtaaggttacatatataggcaatctggcaggggattgtatcaatctcccctaagattttaaactattcttgaaatcactgacttgtgcttgagttattaacatgccatctggaaggtcttcttggagtgaacatagctggttgttgaatatcaaatgatggttgttttcctggcaaattattttgcccattatgcaaatttgttagcttatgaaaagttttgtaggaaacacaggaaaatttctgttttcgcattgcttgtgaaattgttttctggttttctctcttactctttaatcggttaaaaactatttcttctaataagttatctatgacatttttgaagtat

SEQ ID NO: 77849 - DNA, 700 bp, Citrus sinensis
  Intron number 4 from transcript orange1.1g004667m (locus o range1.1g004548m.g) derived from phytozome v7.0 (chr-ID sc affold00181; pos 258785 to 259484)
cgatcttctggaaaagtacttacactcggttgaaggtataacccccatgttttcctatgctctcatttgatagactggcaaatcagctaggtttatgaacaaaccttgtaaatcagaaaattatgtatcaaaataagccaggttaagaactgatttttgtactatgttgaactctgttacttcttttcattctgataaaattgaatttaatataatttggcctttcaagagctctacaagtagctaattgcttttgatggtgtgctatgctattaaggagggttctttgcgaagtaataatgtttcgtaaagaggttctgtatctttcatgagttggattgtagagaatgattttgaaaaccctatgaggatcatcagcagctgacaatgggtattgtatcttgcatatgcctcaacattttcattagtctctctaggttttcaatgttatgtatcaatggagtgtaatattgagaatagcttcattcatgtttttatttctatgaagtcatataatttctatcttaattttgttcctgatttgggttattttcttagttggaaatatgctatttttgcttctagtctttgctacgctctggcttcttctgcttctctgtttctaatcagcctaatgatacatattctctgtttaaatttttcaggtcctttgcctattgattttggttgctgattttct

SEQ ID NO: 77850 - DNA, 932 bp, Citrus sinensis
  Intron number 1 from transcript orange1.1g007480m (locus o range1.1g007480m.g) derived from phytozome v7.0 (chr-ID sc affold00022; pos 464912 to 465843 reverse strand)
tctgggttactggctattgagaattttcaccaagcgtaagttttatttcaattacggctattatcattatcaattttttttgaattctttttaatttgaagctattttttgattgatttatggtgtcactagtttttaaaaatctaaacgtgctcttttgaactttattattgtataagatgaacattttttagctgggcttaaaatgtttcagtgatctatctgtgtcattatggttttttaatgcaaagctaggagcttgtgatggtattttgttaaggatgttaggaatagctttattgctttagaaaaaggaaaatcatttttttttccctgaatgctgataatgggaattcacgacgagtataattacgcagcttaaatgaaattgtgacatagatgtaacatgtattcaaaggtttcatagagtataaaaaataaataaatgagtattaaagtatgatttttaaatcagataagctgattcccctgtttctactaaaatctgtcaactttgagtgatgaccattaggactcacagagtagcccagtgaattcctagtataggatattttggtgggcaatttgaattcattagaatggtaggtcaggaaatgacaaatatgaggtaataaataattctttttctaaaagaagatgaaaaggagcttaaaactttgtgcattcaattggaaatttaaaatcattttaatctaatggaattagtattgcattctttagatgctgtttgattcttgcatttccattcctggtgagtgaatgaaataagcaaagtaaacatttaaggagtcacttttattggaattaatgaatgtgtaatctacacacaaccatacagtactttgtttaaggcctgtctgatctttgtgcatctaggtttcctattgtggagcctgatcctggtcatacaa

SEQ ID NO: 77851 - DNA, 336 bp, Citrus sinensis
  Intron number 1 from transcript orange1.1g025725m (locus o range1.1g025725m.g) derived from phytozome v7.0 (chr-ID sc affold00063; pos 324403 to 324738 reverse strand)
gccacatcctcgtgctcaacgtcattgcttgcgcggtaaatttttcttcgattttttaaaaatcaaaataatttttattcatcattataataattttttttttgcattgttaaaattttttatttttagaagtttgatgttgaatgttacaagttttggcattggagaaaattttatattagcttcgttatcactaatttatcataattgcgtagttattaattgaacctgagggacaaaaatgaaaaaaaaaaacatgatgattacttgttaattttgattgatttatgattctttgcaggcggcagtttcagctacttggcttttcttctctgc

SEQ ID NO: 77852 - DNA, 639 bp, Citrus sinensis
  Intron number 2 from transcript orange1.1g012995m (locus o range1.1g012995m.g) derived from phytozome v7.0 (chr-ID sc affold00002; pos 3238535 to 3239173)
ccttcaggtagatttttgtatttgtgtctggttataatgtttaccatattttaagtgtttcatgctagttcatttagaaatgctcatttcatatatttgtaactgtcccctgcgttgcaattatgctttcatgtgaataaatgttgtattaagagattaactatataaggatttaatattgttccctttaggacatgttcatattctcttcacaagtctagtttgcttaaattaattttgttgttgggctacaaactttcatactattgtattatagttcgtacattgagaacttctcatttccctgctttcaactgcttgtagcgtgttggttgtcgttgctggacaattgggttagttttgattaatgttgattgaggatgtatgtactattggacactgttttagttcgatggtgcttaaaatagaactgtgaaattagaacattatctcagtccataaattttgggatgtgattatgtgaaacatggttctttacctgcttctgttccctttttctgtatgcagccataagtaatatgtttcattgaacatatcctctgtgtgtgtgtgtgtgtgtgtaaagcatttttcatgttatatttgatgtttttctgcattattgcttcagacttatcc

SEQ ID NO: 77853 - DNA, 331 bp, Citrus sinensis
  Intron number 1 from transcript orange1.1g031645m (locus o range1.1g031645m.g) derived from phytozome v7.0 (chr-ID sc affold00053; pos 83684 to 84014)
gaggtaaaattctcatcattgcattttctaacacataaattttcgttggaaatcctcgtttcttactttgctactgctgtaatatctgtcatatgaagtgatagttaataataataataataataataatcctaataataataataataaaataatctttgattatggttagtactgtaacaacacctcaggtgccagtatacggtaaacgatcaagaagaaaacagtgatcctcaattgttgggctaatagacaagcatataataataataataatatttttttttttccttaagcaggtttgctgtgagggcaaggcattgaaaaaatt

SEQ ID NO: 77854 - DNA, 915 bp, Citrus sinensis
  Intron number 1 from transcript orange1.1g024970m (locus o range1.1g019052m.g) derived from phytozome v7.0 (chr-ID sc affold00291; pos 106302 to 107216 reverse strand)
gttgaagaaagctggcgcttccggtgttagggcaggtatttcaattattgaatttttcagggaccttttttaaatgttccaaaatctgtgtcctgtgtgattcatttctgtttagtgtatatttttgctcatctacgtctggtaagttagcaaatatgttcaatcatcataacaaagtatgaatccatgggggatgtagtcaaaatctcatcttgggtatgttgagaatcaaaaaggctattgagcagtgaggtgaatttagtgtggtggtataagtaatataggaaaattttgtttgatattaattgggtatctgaggaaaataattctaattagattgctttagttgtttgaccatttctggtatcttcattgcattgagcggctaggcaacttcaatacatgccgttgcaattgtgtcattatcaattccctagcttatgagagaatgtcttgtcactaagtttaaggaatgaatgtgacagaaatgattctgtgtagatgctagaaatacctggaggatctacttttggtttgtagttgttcgttggttactttgatttcttcttgcatttatttggggtttatcttcattttttggcactttgatacatctctttacttgatatttatgttaaaaggaataattttgtgatccaaatctcttggaagaaataatgagtgagattatgtgtgaagtccattttcttcgaaaaattgaaatatagaaatttacttttctagtttattgactatggtggattctaattcttgattttttctgttttatttccttttctgttttgtgaagtagcttcctgattagttactgtgcctttttcctatctataacaaagtttctctaaaatttaattcatcattgtttcacaggatttggaggctattcttacttgt

SEQ ID NO: 77855 - DNA, 734 bp, Citrus sinensis
  Intron number 3 from transcript orange1.1g013536m (locus o range1.1g013534m.g) derived from phytozome v7.0 (chr-ID sc affold00022; pos 312944 to 313677 reverse strand)
ccaccaccatatccgagtgtctccatacgtgtaagtctttccaaactcctttctttctgattattatcgttttttgctttccaattctgttggtcttcactttagctcatcttaatttctacgttttcttgccattttgctcttcttattacgatctgggttcggattatttcccagtctttttcttcatctgggtttcgttggttgactattattcactcgctgttatgctttggagatcaaaggactttcaaatgcttgctttttgggatgcaaagtatcccctatttcgatacttctcttcgtgattttagatatttgattttaaaagtgattgcatgctttgatatattttgcgcttatttagctcatactcctttattttcttgaggttctaagctgtgcgtacatctctattaattgtcagctttacctgtatgagcgataattgcagtcaatcattggttagtttgatcttaacgaactaaccgctgcttgtcacagtatgtgttcattgcaggtgaatgcttacgggtaaataattaaacactcattatggccttagccttgactttgttataagatggcatttaccgcttgttccctttatatatatatgcagacatattcatgtgcatttgatacaaacaatatctcttctggttttcttgggtctttgcaaaattcttatagatttgtctttgaattttcttcagtttgcaggaagtgtatat

SEQ ID NO: 77856 - DNA, 555 bp, Citrus sinensis
  Intron number 2 from transcript orange1.1g022276m (locus o range1.1g017548m.g) derived from phytozome v7.0 (chr-ID sc affold00002; pos 3385296 to 3385850)
tcagtgagcaacagcttgtggactgtgatcacgaggtttgttcaattggttgttatctttttaacgttagttaaatgatgaaaattacagattttgactgattttgtttgatagctaggatgagttgtataatttctaatcacaaacagttagttatgatggtaaatctcaaagttagattggattctcactctcagaatttatgataaagaatttatatgtcagtttccttttttcttttaatttctaatgttggttcttcattatgttaatctcttttttttgttggtttgatattgttggatcccataatttgaagttttgtggtgatatataatatcatataactatccacaatatgttgggcttgtgctttttgtattctcgatattgactgtttgcattccttttggatgtttgagttgcttggacggctccttctcaagtctgaactcacatctcacatgatcaaagtgtatgatttgacaaatataattatgtttattaatgcaagttttgtttcatttttcagtgtgatccagaggaatctggttc

SEQ ID NO: 77857 - DNA, 514 bp, Citrus sinensis
  Intron number 1 from transcript orange1.1g015398m (locus o range1.1g008339m.g) derived from phytozome v7.0 (chr-ID sc affold00002; pos 622000 to 622513 reverse strand)
acccagtttttatcatttttttcccttgtgtgctggtgagctaaatttagaggttattgttgtttctgatgctaaatgtgtcatgttagtaaggtcagaatcataattctgttgcagagtggcacttaagattggttggtgtattttgattgccttgatgaactgtataattgacagtgtgctgaagcaagttgtgttttcgtagcatattgctttcttttccatttgtatcaggtataaattgtttttggttcatacgttcatttattaatcataagttattaatccattcttgggataacttaacattgtctttatgtttgtagtctggttttattgtttgcttgtgtgtattgatgtttctctttgaaattttattttctttagatgggtataagatgttatttttgatgtatttgaaaataatttttatgacagatttcatttacatgcactttttagctgatattatgtaaaactttcctataggtttagctccgattcagaaacatcc

SEQ ID NO: 77858 - DNA, 579 bp, Citrus sinensis
  Intron number 3 from transcript orange1.1g032062m (locus o range1.1g027907m.g) derived from phytozome v7.0 (chr-ID sc affold00024; pos 973297 to 973875 reverse strand)
ccttctcttaccaatcctcctgaatttgcctctctgtaatgctctgaaaactctcttatttttttcctttgcctatttgcaaaaggttcgatttgaggttgtcattttctactagtgttttaagcaacaaggctgtttggttattgtttcttggattgattacattttgtctgttgggtttgtttagatcattttgcacttattttctgctaatttaaatggtaccttagtattttcttgtttcttctcgttttctatggaaaatgtttccttgaatttggacagtaaatatcttttgtgtctcttttgttttgacttatgatagaacctgtagaaatcgtaaattgcatgtccagttagctaagtgccaaaatttggtcataattttctatttctttctttgaaaattttattgttaatgtttttatgtttatacttttttcatttttccataatagcggcttccttatttttgcctcttatatgcttattgtaattactacgaattttatttaaattgattgtttgctctgcggtattttagtggatcaaagatattcccatcttttgtcaatttct

SEQ ID NO: 77859 - DNA, 561 bp, Citrus sinensis
  Intron number 2 from transcript orange1.1g032062m (locus o range1.1g027907m.g) derived from phytozome v7.0 (chr-ID sc affold00024; pos 973981 to 974541 reverse strand)
cgtcacctcatcaatatcagtgacaagcctcagtatgtaaaaaatatatcatcaagctcttttggtaacagaaagtatgcattacgcattttacaactctaatacaacagcgagaaaataaaattatttcttttttaaagtttattgatgggtataatcgaaaactaatttttacacgaatgttaaaaggatcctgtgtcatgtgggtttggaagagaaaggcagttttttgtgtggtgtgatagctcctgccgaaggcctaagcaattgggttgttgtgatatttggaatttggttaagggattgatcttatactccaatgcacagttaaactaataaagtaatcttttaaaataaaaaaaaattaatattcactccagttcagaggattccatatttgattcttttctgcaagagtttgggaaagaaagagaggctttttgtgtgctgtgatggattctgtcaaatgtttaagcaaatgggctgttgtgattttttaggtaagcgattgatttctttcttactatttattttaatttcataatgggttgtaataggttt

SEQ ID NO: 77860 - DNA, 646 bp, Citrus sinensis
  Intron number 3 from transcript orange1.1g002729m (locus o range1.1g002431m.g) derived from phytozome v7.0 (chr-ID sc affold00161; pos 281014 to 281659)
atctcgccattcgctattatctagttgccattgaggtttgtgtgcttctgtgaacctttccttccctcttagatattgcctttttctccaaaaaagtattgttattatacccttttcttttcatctgtggttattctgctttgactcttgaaattggtgtttgtaatcctctgaattcagcattactatgtttttcctcagtagtatgcattgttaataacagagtgatatatttgctcctttcaaatatgaagcaaggaaacatagttggattttctattgctaggtggtgttttgtgaattaaaattagttcatgatctagggctgtgtaagtgagataaatcattcggtttttaatatatcataaaggttgagcctgatgcatcaatttttttttttttggtgggcttttatgtactttaagtggactttcactctttttgagtctgttttgttgtaattggtatctttgtattcctttgcatctatgaattccacttccttgtcagcgttgcatctagaattcccatttcttgtatgctttgcgtctatgaattaccattccttgtatgcttgaaccttgttgcagtaattgattggttttgggtttctgtgtaacactgcagcttcgccccaacttcgctg

SEQ ID NO: 77861 - DNA, 790 bp, Citrus sinensis
  Intron number 5 from transcript orange1.1g004186m (locus o range1.1g002777m.g) derived from phytozome v7.0 (chr-ID sc affold00002; pos 2592095 to 2592884 reverse strand)
gctctttgggctaaggtgcatattttgatctttcttttaccttgataattcatgtatttctatttgatttttgatttatcttattaatggacagttagtatgtttgtagctgttggtacgagaaaatattgcattatgatgggaatttgtgtatcagaatcttttgggttctatcgaacatttagctagttttatccttagtgctatgaatgttgaaataatagatttttttttttgttgggggggacaatcagagttgaactccttcctcacatatggtagatttgcttcaatggtaaagtgtcacagggtttacctgatttctggatactatcagtctcggatcaatattataatagtttgataaaataatgaaccttcagtatgcaagaaatcaagccaggtacatgtggtatttcaaattgaattggactgcagttcccaggggtcctacagtgaggattttcatttaccttttcttgttttggcttccgtttaaataagaacctggcttggttctcttattgtgtcagtggttgtttacatgttctatttgtcgcttgatctcttcttaacatgtactatgtacatatgttcattaattggaacgacaatatgcaatgatgggttaatctggtgtgcactatcctgggcgatatgtttaaattcccttggttatgtgttgtgattgcagaagtcgcttaaaatattgtctgtgattgattttgctactctaactctcaaattggatgcaggaaaataaccctacagttactactcaaagaaatca

SEQ ID NO: 77862 - DNA, 907 bp, Citrus sinensis
  Intron number 3 from transcript orange1.1g004673m (locus o range1.1g004673m.g) derived from phytozome v7.0 (chr-ID sc affold00002; pos 4773595 to 4774501 reverse strand)
cctccagagattacgtggcagggaagacgtttcaggtttgcttttgttcatggtgtttttttctttcctttcccaaaatatgattatgtacttctgatggagcctagaaaattgtctccttgctgattgaattgatccattgagcttgagccttgcctccagtgtttggtggtgtgcatgatcttcttaaatcaatttctgatgaaaacattatgtacactgcacagttgactgaatttttcagtaagatttactatctgctagactaagcacatggaatatggactaccctagtttactcggttcttaagcattgacgatttggttggttcaattaatatttttaatatgtggctcaaagcttattattctacttcaactgaagtttttcattgcagtcttttgctattgctagtttaatgagagtcaccatcttgatccagagttctgaaaggacgtctttaaaaatcagatttatcatttccaaagagctctgtatcgacttcagatacatttatgagtgcagaattttggcactaagattctatttaaaaaaaagaaaaatattgaagcttctggatcttcattgtttgatcagattcatataaatgcatcaaatcagtgataatcatgtactacacagcatgcaacttaaagcagttgaaattctcatatcgcttctcagttgattttatacattcaccgaatgacaaggactgaattgagaaaggaaaaagtccacagatattttgtcacaaccattctaattgacctcaattattgtggcttagtaatgcatgggcagttggaaatttctacacccatcctatctttttccatttaattcttgatttgcgacaatttgatcatgtttgtcttgctaaattttctttaatccataggtgag

SEQ ID NO: 77863 - DNA, 944 bp, Citrus sinensis
  Intron number 1 from transcript orange1.1g029445m (locus o range1.1g025286m.g) derived from phytozome v7.0 (chr-ID sc affold00002; pos 64719 to 65662)
gtagtagagcttcttacggtacttttgtctccgaggtatgttctttacataatggcattgtcatttagttgagatctaaattcgtatggttgattgttttatgcctaaatgttgctttagatacttgcattttgatattattgagcaattcttggcttggaccaatcaaagctattgaaattggtttagatggtgaatttgtggacctagttggtacaatgttcttatttttcaatggaaccgaattaaagattgttggtggcataacaaaattacagtgtcatgcttaatgcaatagttgatgtaatgggtgtattttaagacatgctaagactgtgttgtagactggcggcatgcaagtttgggaaagattgggttgcttatatgtctctcagtaattgcaaagcggcttctgtctctggggcacctgtgtcttttagagatgcctttgattttctatttgccctcaactggaatgcgaagatttagttcaaatgttaaaagtacattttttttaccatttgattactgaaaatttgtctcactggggaacagatttgatgaataatgaaatttgtcttttgagtccaacgaaacgcaagactaccaattttcatcttttcttccccgctttcctctggcaactaatagacgaaatattgcttaggccatatgctcattttataaagttccttgatacaaatgcacggatatatgctgtttttgcttaactctgaaaagtttagttacatgaaaagaacaaactgttcaatagttctgttagaaattatccatgacagcttatctcaaagcagttgtaatgtcacgttgtttcatttaattgtcaatgattatcaatgttcacttactgtcaaataggatgccatgttaatctgttctaattgctaggctgtaaggcttttgggacctccagcaagttttga

SEQ ID NO: 77864 - DNA, 497 bp, Citrus sinensis
  Intron number 1 from transcript orange1.1g022776m (locus o range1.1g018386m.g) derived from phytozome v7.0 (chr-ID sc affold00002; pos 3806850 to 3807346)
ttaggtcagtatttgttgttttatgcgtgttcttgtttatttatttcttttcacattattggttctatttttgggatctttgcaattaatcatagtatttaagttctctccaacactgatagtctaatatggtgagttgaataatgaattatctgctaaccaagaaaacgtatcagtcctataacatgtgaattcagcagaaacaagttagacttggttaattgggatttcaagtgaggggctaaatgggttaatttggtttgagtttgttgggaattatcatttaaatttactctttataatatcaataacactgtttctccattttatataagttaatgtggccggggcaacaataatacatttagtagtattttttactcaaaatttttaggatgattaggtattgaggagtatacttattaagaggctcgacgttcttgtttaacataataaaacgaatttcattacattgttcgtaattgcagagtacacag

SEQ ID NO: 77865 - DNA, 480 bp, Citrus sinensis
  Intron number 2 from transcript orange1.1g021216m (locus o range1.1g016684m.g) derived from phytozome v7.0 (chr-ID sc affold00002; pos 4705735 to 4706214 reverse strand)
ggcaccactgctctaactgcacttatttttggaaggtaatctaacttcaaagctgcttttgttttgaattttctcttgtaaatcatcccttatcaccaccagtgatgctggaaattgtctattttggattatacataacgatattgatttgtacagtagtttatatcaagctgtaagtaaataatataacaagagaagaaagaaacaagaggtcaggagcctcttctctgacattatgtatgattttgcgggtgttgattagggttgctaactcaaatttgacatagataaagaaggataggaggtgacagtgggaggtgacatagctcaagatagattgctaaagtgaatttgtctacagatattgaccatctcttgattgaaaacggaaattctatagttgtatcccacacccagagaaccaatcgtttgaattgctgctgacataattatctcttcacaggaacctgataattgcaa

SEQ ID NO: 77866 - DNA, 524 bp, Citrus sinensis
  Intron number 3 from transcript orange1.1g004025m (locus o range1.1g004025m.g) derived from phytozome v7.0 (chr-ID sc affold00024; pos 79094 to 79617 reverse strand)
aagatcaaggaattaggtcttgaaggttcgcaaaggtacaaagccctagtcttgtgatctttttgctcagttttgattctccaataatgctacattgcatcctttagtgtagaatcagcgtgttaagcacttgtgttggcacgtactcatgcatataaggttattagggttcaaactcattttaggggctctgtcgctcaatattatttgttttgacactattttacatctcacttcatttgcaacttaaatttactctggacatgtttgtaactttgcttaatttcgaaagcacaacagtttgagtactttgtaaacactcactttttcttcttgttgatttcattttcttcatctctttcttttaatggatttttggtttggtcttggacacactgtgtctgctgttatggatgtatgtgacaatttacatggggtgtgggatagtgttggccattcaaaatgtccgtgtgtcaatgagtttgtgatatttggtttgttttgacttgtgacatgtggcagag

SEQ ID NO: 77867 - DNA, 657 bp, Citrus sinensis
  Intron number 1 from transcript orange1.1g015693m (locus o range1.1g015693m.g) derived from phytozome v7.0 (chr-ID sc affold00233; pos 99104 to 99760)
ggaagccctctcaacataaactctctgaacctgaggtttgactttctctatcttttgtctctttttcattgttacctcggaagcaatttttcttcttctagttgattgtggtctgttatgaagaatgcgattcaacgatttgcgaaacaatgttgccagtataaaatttttgttaaccaattacccccttaaggctgattccgcaaggggttcttataattcagttgactgatttactttgcctgaggagtgaagtaacatttcaataattgtgtgtggtcggaccgtagctttctttagccgcaataaagagaaacttcggagccttgtatttcttttggcttggtgactcttcgattctgcttctactgaggcattttcgtgcaaaacttgcctcagatgggtcgtatgtgccaataaatgtacgcttgccctaattgttggtgttttcggttttcctacattgtacctatgtttgtcattggaagatgctttatgtcgctcgtagagcccctcagagaagctagaagtttactttgtcatttccttcacataataaaaatattcggcttggtatcttgtattacatttgcatttgtagatgtttgattttcagattacttgattgtgtgctgagaagtttctgttgttggcagc

SEQ ID NO: 77868 - DNA, 500 bp, Citrus sinensis
  Intron number 1 from transcript orange1.1g042966m (locus o range1.1g042966m.g) derived from phytozome v7.0 (chr-ID sc affold00053; pos 438231 to 438730)
aagtctatcaccctgataaatatcaagctcctcatgtatgcccctcaatcatttatctgcttttactttatttctattgtaaatttgcttatccaattgctgcgtcgttttctttcaaactaaccgaagttgagtttgattgtgttttataatgtgatattttgcttatccaaaatcgtgtgcattgtgtttatgaagacatagcactgtaatactgttaataatagtctttttcccctttttttttaaaaaattattcatatgtttttttctgtattaatcttcaatgcattgttatagaagcagtatgtgcgtcaattgttaaacttgttgctctttaagcatgattaggatcttgtttagctttctgttacgtatgcctcttgtctcagcaatgcctagtaattgaatttttactaattaatatgagcgtgaatttggacgggtttgttgattttgtgaaagtggttactgaatttttattaaatcttcattttcag

SEQ ID NO: 77869 - DNA, 465 bp, Citrus sinensis
  Intron number 1 from transcript orange1.1g029570m (locus o range1.1g028145m.g) derived from phytozome v7.0 (chr-ID sc affold00002; pos 986024 to 986488 reverse strand)
tcactctgtctcagatccgtcaactcttctgtcaggtggtcagttctgccctcgtcctttccactttgatctattttgttccgttgtttcccgagaaaatcaactaaaattttattttattttatttttatttgatctcgcatttctttaatttttctttgctgtgtttgcctcagtgaataattattgttaacttcttttagttttagcatattcggaaatccccgattaaaaaaaaaaaaagtttagatttttgttttcaattgtttaaagttaaaatttgttcatgtcgtgtaattgatgggaatctctgcttatgaatctttgtgagcatgtaatgagaaatctaagaagatttttgagtatgtgagtttcgataagttgactgactgtgagttaatgcgtttatgaagggccggtgattaagaaattagattgtattgtgtgtccagatgagaagaactg

SEQ ID NO: 77870 - DNA, 701 bp, Citrus sinensis
  Intron number 2 from transcript orange1.1g032658m (locus o range1.1g032658m.g) derived from phytozome v7.0 (chr-ID sc affold00022; pos 505076 to 505776)
ggccaatttccaggtcatctcgtgccggtatccaggtactcaaatatcacccttgagtaacttaaaacttcgcagcatttcttttatttattatttttttatacaactaagttttaatcattacttgcggattagtttgtgtctatgatggttatttatctagaattttgcttgctaggtcaaaagaataatggacagtagcaagtgggcacttgtaatttgatcttagttgagcatgttggtttgtgttgcaaatagaactgtcggtattttgtcttactcaatgttaaatttctaaatttattgtagacagaagtgtaaaactaacatggggatgttcgcttgtatgtatcagatttattagtggttaatgggatgcctctgtttgtgtgtgtgtttacttgatttgttatagtttttgttacctgagttactgccatttttagtatttaggttaacattttcagtattttgagttactatttctggcaagtatttggaaactaaatgtagtgagcactgtattatacagctcaccttgtgctagctgttgttatgttatataacataagttataccagttgatgtctgcttggtgaagatatttataccttttcagcatttgagtttagattttcttacagtttctgttttgtatgggattagtttcctgtgggtcgcattcaccgccacctcaagtc

SEQ ID NO: 77871 - DNA, 488 bp, Citrus sinensis
  Intron number 4 from transcript orange1.1g025060m (locus o range1.1g024701m.g) derived from phytozome v7.0 (chr-ID sc affold00053; pos 89726 to 90213)
gaggtgttgtagagttctgcgaaggtggacctccggtaagagccagttttaattcaagtttgttctacagattttattaatatctaggactctcttatctgcttttgggtttcctataacttgaattttgtatagattgatatttcttggctactcaaatagataaatcctttttaccataactgttgcctctgttttgttaatggaataatttaattgggcttttaactttcaagctacttcactctcctcaaagttcctttgctttttcaaatttaagtttttcactcatcactgcattgtaccgcgatgcataagcatcaaaaagtacctacgtatcagtgttagttatattactgtttaatccataactgatcataacattcttgcaattttttattctttacttatgcagatagaacaaaaattatgattctgccatttattgattgtataggttaagaactttgtttccttgggagggcctc

SEQ ID NO: 77872 - DNA, 967 bp, Citrus sinensis
  Intron number 1 from transcript orange1.1g037817m (locus o range1.1g037817m.g) derived from phytozome v7.0 (chr-ID sc affold02327; pos 1102 to 2068)
tccccgagaatactattggtgtagagctctcaggggtaagctcagaggactttaacaagacaaacttggatctgtcctttgtaaaggacaatgatcaagggccattggagtggatcccttatatccataggatcttagctacagttgtggatgattttgtaagcaaattacttttaagaccagagttattattaatgaatgattttgttttaagtcttcatttatatatgggaaacggatacctacactcttaagatttgagaaaataatcatgtataccccaaatttttaataaaggatacactctcaagatttagaaaaataattatgtatactctaagtctttaataagggatactaagactctctttggaataacatagttgatggttccacataattcgtgaaacttcagttgtattgtaaaatttctctgtaaaaagattagttaaatggtttgatgttaagagcctgaaatctcgtgatcatgaaatggcacaaatcttcgagtgatgtgtcgacaaacatgacatatttttaataaaatttgtatactcatgaaattgggataaaaagttaggctccctagcattattcacattattattagcaacataaacagaacttttcactatagaagacgaaatcactcaaataaatcacaataagtgctcagttgattactgttctctagcaaatgttacaatttttcactttgaaagaagttgtaattaattgctatcttttaaagccacgagtaattgtctgacactaagcaaaacattaggttcctggatcatcgagcatatttaccattaacttaacaaagaagtctggtgtatttacctttgctacatatattttaaactcactccttgtcttgctacgagttgcaagaagtaaaatggttataacatttgtgccgtcaccagggtgcgtttcctacataatttctcttacaactcct

SEQ ID NO: 77873 - DNA, 522 bp, Citrus sinensis
  Intron number 2 from transcript orange1.1g027042m (locus o range1.1g020039m.g) derived from phytozome v7.0 (chr-ID sc affold00002; pos 1766044 to 1766565)
tttctctgttttgcagggttggaataaaaggtgagtatatcttctcacttaatgaccgatacttatcttgagttctgatttgtgttcatgagggaggcaggcaggtgatttgttagcgttacaagtgatattgtaggtgtttatttaagatggttccacttccagtttttttgaataatagaacttggaattgtagctgaagttagttccaatacttcacattttttttgctttcatgctttatgactcttattttcattttttaagtaataattattgtgtttattgatacagtttttttattttccttttttgggttaaagttaatatttttctatacaaattttgctgaaattttctatttttttctcctcctgataaataagaaacaaatgacatcgtctcaacactcttttttaaattttatctgcttatacttctgtgatttactaatggcttagtctatgaatcactatctctggaagttgtaattgcttgaattttgttttttcaacagctggg

SEQ ID NO: 77874 - DNA, 582 bp, Citrus sinensis
  Intron number 1 from transcript orange1.1g014895m (locus o range1.1g011745m.g) derived from phytozome v7.0 (chr-ID sc affold00002; pos 3679307 to 3679888 reverse strand)
ggtcctactggcgacttgatcgggattctcaggaggtcagtttctttctttgttgtctcttttcttttacttcgtgttgcatatgaccctacggattttggctatttttgctgttacattttatcggaggttcggtgtgacatttgttatgtgctagttaagttgtttaatttgtatgcaatggttggtatctgctgcgaataggattttgaattatgtacaaccactttaacggtgctgagtttacaatgctttctggagtcgcatcgcattcattttgcttggcttatgttacaagaacatttttttttttcaattaagcttctgcagaatggattcgctagagtagatacttagatgagcctacatacttaaatacagttcagcttcagagtacctttggaagatttttaatgctgtcctatatgatggcattttctgtaatattaaaatggaattatgatgattgccaacttgacacttggttattttgctgtcatttgatttgctttatagaatgattcctgaaatttcacttccattgcagtattgaaatatacaagcataataaagaagagagga

SEQ ID NO: 77875 - DNA, 709 bp, Citrus sinensis
  Intron number 2 from transcript orange1.1g005382m (locus o range1.1g005363m.g) derived from phytozome v7.0 (chr-ID sc affold00002; pos 1946497 to 1947205)
tggacgcgtctttgtttatctgctcacctttctgggtaagaaattacgggtccactgtagctcgtcttgaaatccttgatttttttttcctttatctaagttttcaaaactttttaacgcttttgagataattttcaatattttaattccaacttctgctgttgttccaatatctgctgctgctgttgatttatataatgtaattgttgcatacttgcgttggtatgacgatgtagctgtaatgttcttgatgtttatcctttcaaggaaaaatttaaaattttttgagctttgatgatgtacatttatatttgtatatgtggatgcccgtattgacagtaaaatattgattgattgatcgattagtttttcggtttacttaggccactactgctttcttatgtttctttgtgaaatcgataagcctgttggcataatcgatggctgtttatggtccatcttacagtcatattcatattcatgccgttgcggtctaattgtatgcatgtcgatgaatggatgtatgaagtttttcatattcatatcgttaaatcaagctgcttgtgcaattaggtcaagttgtcttctatttaatgccttttatatggctgcatcatctgggagtttgtttaccagcaaaaattaatgttgttctccttgttttactgtggcaggtttgctgtctttttttttggaacgagaaagagta

SEQ ID NO: 77876 - DNA, 1038 bp, Citrus sinensis
  Intron number 1 from transcript orange1.1g011128m (locus o range1.1g005730m.g) derived from phytozome v7.0 (chr-ID sc affold00071; pos 181202 to 182239)
caacactgaagaatctagcatcggtttgagaagtaaattatcgtttccaaaatttcttcggggctgggggttttgctttttcaaattttgttttatgtttaggcttaccaaggggtttggtttttgggcgtgtacggaagatgagatttttgttgattttaagatggagttttgttttgcttgttattatgatgcagattctgtaattttaaaattttgggatgctttagcttaaaagaaacaaggaattattgttgggcgttattgatgcgatatatttgcatatgctatattgtggagtttttaaaaaaatggttaaaggaaacatgtaactatgtaagcttgatgaggagtgttggagctaagtacgtgccagtagaagataaactatgtgtgtaggctatagcagcatcttatgatgttataacaattgcattaagctagaccatattaattattagtggcaagaatgtcggtagtattggaaatgaaagtatcccacctcactcttggagaatgagatctgcaatgtccaaatgttcttcttcacatgataatatcagtttgacgaccaatcctctactctgctttcactgttgtggctccatgactttaccttctgtgcctccatggaggttacctttttgccaaccaagcatggcactaacatctctctgtctcccaatcatgtggcatttagcttttatgccaccctaagcggactgtcttgctactgctgttttgcttcctttaacggtcaaagggatattttctgtctgctgttatattcttattgcatactactaatatcttcagggaaaaaggctggattatagatttttttttccctcataaattatcctgttggttgtggtggtgaaatgttttgctttgaaaataaggaaatttcttctcttttagtatatcttctttccttttattggtgctataaagatgtaaacattattgtggttctaattatgtttcctaactttgcagtaagatcgtttggaacagaagggcgaagaaaagatcggt

SEQ ID NO: 77877 - DNA, 748 bp, Citrus sinensis
  Intron number 1 from transcript orange1.1g003929m (locus o range1.1g001373m.g) derived from phytozome v7.0 (chr-ID sc affold00002; pos 805635 to 806382)
aggttgcaagagtaagtgccctcaaatttctcttctttttatttggatattaaccgacatttgtgcattgtcaaaagattggaggagcaagcaagcaccttcaagatttgatttgatttgatttgattttttttaatgatgctttcagtttttctaagtgatttttaaaaatcatttaaattttgtgttgagtgggttcttgatctataattagctcatattggcattttctttctattttttttggattttttttagatttttctattaaagttatcttttaaaatgcttttctgatatcagttattatgttttagctgcaatatctgaatttagttttttttttcttcttcagtgtaattgaatgattttcagctaaatatttttgcttgtctgaggagtattcttcagcgtggtagagttttacaaaatgaaaatttgtaaaatttcattttaacatttttccttctcttgtgcactgttactatggtgcctggttttaagtaaaaggtttcttgtgcttctgtttttgtttatagatttcagtgccagttaatgattttactgcataaaattttgcaacttcagtgttgcatggggatcttaccataatttttccgctgaaatcagtgataattaaatttgttgtaagaaaaattttccaatttctttaatttggagatgaatcttactctagctaatatgaattgcaggtaacatctgttaaagaattgagtggtcagatttg

SEQ ID NO: 77878 - DNA, 846 bp, Citrus sinensis
  Intron number 3 from transcript orange1.1g031276m (locus o range1.1g031166m.g) derived from phytozome v7.0 (chr-ID sc affold00002; pos 3727278 to 3728123 reverse strand)
cttcccctgcagtggctccggtgctcgtaagtaactctttagtccttaaattaaatttacttatttctttagctatatatattttttacaattgagctcgaagggcaagggcatacgtaatttcgtccttacaatttaaacattggttggtgattctaaaactggcttatgggttttatgtcgtgttggaaaatttaggatatatgttgagtgtttcacaccgtgctaaacaaaaattatgtaattgcatattatgctttgacgtcgttgtctcgctgtattggtgtattagcagtccaaaacatttgtttattttatctgatgtttcagaagagactaaatgcatatttatttaaacacttgtttccatccaatttcagaaacgcttctgtaaacttttttccccttttttcttcatcaactctattgtcttggcccacagatgtgtatgttattaaattccgaaccaagcttagattctgggttcggtgtatctcttactttgattttgttttcaacttagaagattgttatccacaatttacacatatgcattgaaaggagtatgaatcagttacattttgaccagtagcatcaaagggagcactgctatgaaatttagaatggtaggatcatctttcttatatagtgccattaaattctgtcttcaagtttccatttcttacctatatagtgtgccaatgaaatttgattagtactagctcaatataacaaatatttttcatggttccttgagatgatcttacgggattccttttatgtggtattttggtatcatgtcaccatctcagccctttatggcatctagaaagatgcaggttttgc

SEQ ID NO: 77879 - DNA, 851 bp, Citrus sinensis
  Intron number 4 from transcript orange1.1g032987m (locus o range1.1g029495m.g) derived from phytozome v7.0 (chr-ID sc affold00022; pos 339606 to 340456)
ccaacggtttgcgctgtatgtccaatcaatgcctcactgcttatatgatttttcatttaaggcttatatattaatggtttatatctaaagtcttgctctggtttgaatttggaccaactcttattagtctttgccaaaattcagtatgatctgagttcttttcaatcatttgcattagttgagagattttctcgtcaaacgatagtctatttatattcttcttgtttcgtcttggattaaagatttatatttattattgcacttttaacttgtattatatttgctccgtttgtggtgtatatttttggttttctttttgatttaaaattgtctttggaagagtgttgaagctcagaatttttaaatgacaatggcatggagtcgttgcacagttgatttactagatatttgatagtagtgaaccaagctaacagccaacatgttgtaaaaggtacatgcttggcctgatgatagattgtgaagtctcagcatcaagactgaatatggctgaactatcctcctcagattcttgattaagaaattaatagcaagtaacttgttcctaacattttgttgtaactcatttatttaaatttggcttgtgtctgttataatcagtggagttgcacctcggcttgtcatatagtggtcaaagtgattcaagaactttagtatccttaaataattacttgtgataagtcctattgtcatttcttgttacatgacaagcctgcatctggtgtaaactatatttctctccttggtgaagcaactaagtttgaagtcattatgttttctgaattccatgatctacagtgtcccttggattttttgaggatatttacgttcct

SEQ ID NO: 77880 - DNA, 831 bp, Citrus sinensis
  Intron number 2 from transcript orange1.1g008165m (locus o range1.1g008165m.g) derived from phytozome v7.0 (chr-ID sc affold00053; pos 338347 to 339177 reverse strand)
ccacgggtgcagtgaaagaaggaaaaaatttcctcgtaagtacaacgtgtgtcaatttattctccttattttcttaatggcttctgataaatctgtgggttcattcttcgacaatttggaattcgaatcacatgtttttgttttccttaaatttactggcaataacttattttgtgaaattctagctctgacctgtgaatttggtcaatgcttttaggtttgtataatttacaagctatagtacgaagaagtgaatttatcattttcatttgttgaaattgtaaagcagttactgaatctaggtttgacgctccaaaaagttgcctagtttttgtatttagacctcatttgcaggagtatactatattcaggtcaattagctggtaacactcttgtttctttctatcattatcaattgtttcaatgggtttgtttgataattagcttcttgaatggactgagagcttgttactagcatagggttcctgtgtcagccaagaaagggccactccagttttgaaagattgtaagttgttggtgattttcctaggtgtttccaccgataatttgaactatggtgcatgcatattttgttactactttctctaactcgcacaattgttggtcctgcttagcaaaatatatgcagtaatcagtttctctaggttgaagaacgtttacatgttgatgcattattggaattgattttatgaattccttcctatcatcgcatgatcttgcactctatatatatatatatattttgatttttttctcggctctaacactgccattcttgatatttaggtgccagaagtgagcggtcatcaa

SEQ ID NO: 77881 - DNA, 636 bp, Citrus sinensis
  Intron number 2 from transcript orange1.1g015762m (locus o range1.1g015587m.g) derived from phytozome v7.0 (chr-ID sc affold00024; pos 1004626 to 1005261 reverse strand)
aggagaaggatcacattgagggatttgctccagaggtaagagtttgagttcttttgcacgatggtaatatgaaattttggtaacatcttttgtgtagaatttcatctatgtgattcgtatgtcatttttcatctgtcataacagtgaaatcatttttaaactccttggttactcttttggaaaatgttcactttaatgtggagtgtgacttacacagttactcttcccttcaggaacatgttggaatgttccttaaatatctgggttgtctgctattggaaggagtactagtgatctaggttataaacatgcatctcttgtttgtgttgcatgcaaacattttatagagtttgttttcattagaaactgatccatatatttcttcccacttctacttttgtgtttagtaagtagtattgtgttagctgcttttagattggaggtgtttggttaaagaaaactcctattctatattgtttattagcttttcttttaagaacaatggagttcattcctttactatatttttctgaagagtaatttgaaaaatgctatatggcaaaggaaagaagtatgaacactgggataatttactttccaggttgcgtgggtgacaaaatcaggcgaatctgattt

SEQ ID NO: 77882 - DNA, 550 bp, Citrus sinensis
  Intron number 2 from transcript orange1.1g029084m (locus o range1.1g026322m.g) derived from phytozome v7.0 (chr-ID sc affold09216; pos 425 to 974)
aatgtaagatgctggataaatatcggaggatgttgatgtaggattggacaaatgactattccttttcttttaacttttgttttcattctttttagttggaaacagacaaacttttatagataaataaagggagaaagatttccaaagtaaactagagttccacatactaaaatttcattgaaggaacagattattaccaaagggcttctcatacctgatccctggatttaggtttagttgagctgacagaggtcatgtattgattttgtttgattgggcttttttcacattttagtaaattttgggacttgtatgctgtttgaggtatagatatgcgtttgttctatatggttagtaggtagcttttattggactgtctttgtttcccttgtgaacctctggttcacttccatatcatcttctctttcattttgataaaattcttatgtttctggtacagagcataacttccacaatttacataattctgtatttgtgaataaaattaaattttttccttacccatcatatctttatgtatcagcttact

SEQ ID NO: 77883 - DNA, 668 bp, Citrus sinensis
  Intron number 4 from transcript orange1.1g029084m (locus o range1.1g026322m.g) derived from phytozome v7.0 (chr-ID sc affold09216; pos 1184 to 1851)
tcaaagtcaaacctgacagattttctgtgattaaggtaatgatttaggcttaaaatatttgacctgtttgacattgaatgttattttcttttatcatcttaaacatctaactgaatcaaagtactagtattatttgtttataattgggagcttacaataattttctttggttgtgctgttccaaagcctgcatagctttggttgttttgagccccaaatcagtaacatggcttttcagcgtgaaggttttaggggtgtacatttgggtgtgggcgtgcatgtatctttttctttcaccttttacacctggattccattcatgtggatgcacatgcataagcaaccacaaaccccctgaagtggatcttcactgtggtaggggcttactaaaatattaagggtaaaaaatatatttttgtttatatttgattattaaagtgtataagctgtttctaaaaatgttttagcactgtttttttagttcttccggaacttgcatttgatagttctgtgagcgactcctcaactggttgaacttttgacttaacaatccccatttccactgtatggaaccattatcatgttgcttcttttggtgagtctgttatgaacccaagctgttcatgtatgaataaagtttttcattcccttttatttatttgcaggaa

SEQ ID NO: 77884 - DNA, 911 bp, Citrus sinensis
  Intron number 2 from transcript orange1.1g032767m (locus o range1.1g032767m.g) derived from phytozome v7.0 (chr-ID sc affold00034; pos 11783 to 12693)
ggtctcagctctaaaactcgccctgtaagtctttgaattatccgatatttcatttttctgatatttctatattcatgaaagcccgttaactgttaagtgcaagtcatactaatatttgtgtactcaaaaaccaaaacttataaccaaagtccaaaacgtcgtcacttgtcaaccaccaaactcacgtgttactttctataaggtcaattatttcgggccccatttaaccaatcaggcatcgaaattgactccaaatttgatgggtgccattcattataaattgaatatatccaggactaggggattatacttataccttaaccaaaacattatgcgttaagtgatttcattagtatgatgttggagctaaggtgttaatctatcgatcctagtgtcagctcattgttactgtttttcaaattaggagtacattttaggattttttgttcacaacttcagatgatttgttttagattcccttacctaaatttggtccattatttatgtaaatcattattatttcttgtttcaaaggaatggagtggtgttaaatttcatgaatgtggtagtatatacaggacaataaaaatgggtcaatcaaatatttaatttgagtgcatccaggaatttaaaatgaaaagaaaaagtaaagagaaagggttatcaccagaaaagcgcctgggactaaacttcttgcttaggctttaagatagagcgacaactttagctcacaaaacacttgtgactaattgaggggttttgacagcttaccagaaattattttgaaccttaaaaactattctctaaagtagcctattcgttcccaagtttctagattactgtataattaattgatctggttttttggttgtgtagggaaaatttccttctttactcttcccaattgagat

SEQ ID NO: 77885 - DNA, 583 bp, Citrus sinensis
  Intron number 3 from transcript orange1.1g032767m (locus o range1.1g032767m.g) derived from phytozome v7.0 (chr-ID sc affold00034; pos 12741 to 13323)
actctgaaggaaggtataactatgagtttgcttttaaatattgtttcttacaagggaaagagtcggctaaaagtagtgaagcatctacacattttaatattattcaattttcttgttgttaaggtttgctattctttattattttattcatcttgtagttatacgggcatccgtatcatgccgtgctccatagggtagccttagtctcaagacttgattctcttttgagttttgtccaagtaaacccatgataacgattggaagttaatagtaaatgaatagatcttgttcaaagatgaatgttaaaaccaattacagaagatactaggttagggccaaatcctttttgatttgtcaagttagccagaacatattttcaaccttaaaaaacaccatagttcatttcaagttaatgtgaattcatatgctctttgacagatcatagattgtgtgaatgaataaaatacttgttattgctcattacacttggattattttggttatgttgattctcaaatcatttcatttacaacaaatgtttttcataggtttgttccttcaaagtttgaagaaattttcacca

SEQ ID NO: 77886 - DNA, 609 bp, Citrus sinensis
  Intron number 1 from transcript orange1.1g032421m (locus o range1.1g032421m.g) derived from phytozome v7.0 (chr-ID sc affold00022; pos 896850 to 897458 reverse strand)
ggtatggtttcgtttcattcatctacgtctctgattacttgtttatgttttactcttcttctcttttaattcgttagactctgtttggctgctgagaaatgaccataaaataatgcaatacaatatttatttgttctcgctcttttttttttattaaatctattttactaacctgatgtgcttagagttacaatataatctgattcgatcataactgcgttctacatttttgtcgtgagtccttgatggcaattgtttttcaactttaggcagttcttgagctaggaaagtaattataacattttactattctgatgttttgattgaatggaattagatttaaaaacgttttttgtttaatttgtaggcacttttagaaacaaatggttgttattgaggttctatttattgtctttagtttttgtacttttgcttggtttgaaattacttaagttgtaatttctctctttttttgtgattgattatttggcagtctttagcctcaggttcttttcagtacaaaatgttatccctgtttttttcatctttcaatttggaaaacttagggcatgtcaacatgattctcactttatgtggcaatgcagaccg

SEQ ID NO: 77887 - DNA, 396 bp, Citrus sinensis
  Intron number 2 from transcript orange1.1g024063m (locus o range1.1g018502m.g) derived from phytozome v7.0 (chr-ID sc affold00053; pos 275861 to 276256)
tcttctattccaggaggtacctatgttgatttatttctctattttacttgaagcatgcgtttcattttttaaactagccaattcgtttgtttgatttagaatttaatttcgtctggaacttagtgttttatgtatatgttgatttgttttcttaatggtagtggctggagattgattttatgtggattggtttttgttctcagcgctatgaattgttacttaaaattagcaattgtagggctatttgtacatgttgggttttatcatttggcttactattttctataggcgttgaagtgaaaagaaatttgtttaatctgtaaaaatttcttctcatgtattgatgccatctgttttcacaattacagggttttctgttaacttgctgtcatagca

SEQ ID NO: 77888 - DNA, 183 bp, Citrus sinensis
  Intron number 1 from transcript orange1.1g038216m (locus o range1.1g038216m.g) derived from phytozome v7.0 (chr-ID sc affold00063; pos 189652 to 189834)
agctgccatcaaagcatctgcaaagaggaaagaatgtaagcttctcttcttattgactgattaatttgtttattaacaacaggctcagctgttttgtgcttaattttttctattctacattttgaattccctcgtatttcattctcagctggcaagtcatcagttctattggatataaagcca

SEQ ID NO: 77889 - DNA, 906 bp, Citrus sinensis
  Intron number 1 from transcript orange1.1g013543m (locus o range1.1g012960m.g) derived from phytozome v7.0 (chr-ID sc affold00002; pos 3336901 to 3337806 reverse strand)
agcagtgactgaggtcaaagatcaagcgagctgcggtatgtttattgaactttctttcatcgattaccttgtcttgtgttttcattataggcatttgactgattgagttttggttcgacgtgcaatatattagtttgacttctaaccataagacggcatctgatccatttttggtttttgacataataagaccctattcttgtttcacttttgatcattttagattgaaaaaaagcttgagagatgagtaataatatggtacctagacatttttacctttacacaagtttctttctttcccctgggtttatgtccctctggctggcttatttattgtttttttgtctggcttatttattgtttttttgtctgcaataatagtgctttataagtattctctgatgtttttgaaaactggacatgcttgaatctttcagctctaagaatattcacccatttcctatgcgttaattggctttatgagcaaaacagtggcatgaaaacttgcatatatagcttgataactttcacttgtcttgcttttttattcttcatgggcttcagtcctaggatttatacttccgtatgttttcccctcacttggttatatatgttctgtttctcgtttctaattatcaaactggttagcaagttagtatccaatgaagaagaagatacaaagatgtggctcagtttattgaagattgtttgcttatatatatatatatataaggtttgtgcccttgcatcagtttaatgcctccaaattatgtattggaagatcttgctctgctttcttttacggggcacaagttgcagatgatacttcttatacaatttagaaataaatcaagttgtttgtatttgctaggtgcttgttgggcattttcagccacaggtgctatt

SEQ ID NO: 77890 - DNA, 735 bp, Citrus sinensis
  Intron number 2 from transcript orange1.1g025796m (locus o range1.1g025796m.g) derived from phytozome v7.0 (chr-ID sc affold00071; pos 465564 to 466298)
tcgtcatcaaaaaggcttccacattcacgcttcatgtaatcttgtttactatttgtttcattattattgatcgcttcctattttattcgttattttttttttccatcagagtttcaagaagataggatatcttaatattactgacttttccagtttttcctctgttcgagggaaatgatgtttgttcactagtttatgcatcaagtctttaaaattgtgaaatggctgcaatactgttaacaactggagaaagtattttgtagttcaaaatattgatttcggctaaaaatttcacaacttggtgctgctcagagatcaatgcctttcttagttgcttgttttggtttcatcaaagattacagtatactaacatccactcccaaaggccgctaggcaataacaacttacttggttgacattatggaatcaagtgtaagtttgattgttattctgagtatatgctcaaatggtcacttctttcctcttgatgctttaaataaatttttatagaacttttgttagtgcgtgtgctctctgtcctagctgcacatgcattgcagaactttggagcattagcacactattaatatagactattccgttcaccattaaactgcattaaatgcttttgccctgcagatatgcctgtgttattagggattaactgcctattataatatcttccgtacaactttttcagggttgtcaggccctcagcttgttagtactgtgttc

SEQ ID NO: 77891 - DNA, 656 bp, Citrus sinensis
  Intron number 1 from transcript orange1.1g011842m (locus o range1.1g011842m.g) derived from phytozome v7.0 (chr-ID sc affold00002; pos 570463 to 571118)
gaacggaccaaacaccatttaggtaaattaaaagatcagggccaccacagatgtttcataaactatgtcgttttggtagaacatgaagtaatacttttgttaattaagggtacttttgtaactacaaacgaaagtgtttgatttaatgattcagtcactcgcttgtcatccaccatttatgcttaaggttaaaatgattaaaacccgccgtacgggaaacgcaatgatgaacttgtgcttcctcagttttagtaacttgtcatggaagttttgttggttgttagtttagttgctaaatgccaactgcctgaagagaggaacaagttgcctagtttcatgggtcgtgattaagcattaccatgtctcagaaaattgttatcatcatcatttgttattttttcatttctttgctactgggtggtgatgacatgtagtaatgtaatatcagaaatttttaatgcaagttaggttacttatgtgtatgctgatgtttgagttaaaaaaatggaaaacttaaagaaggtgaaaaaattgctgcttccaagattttttttttttttccattttttgcacattacttcttttttctattttgtgaccagttgtgttgactggtgtcattgtttcaggttatccttataatctggacttcgatt

SEQ ID NO: 77892 - DNA, 527 bp, Citrus sinensis
  Intron number 1 from transcript orange1.1g025724m (locus o range1.1g019437m.g) derived from phytozome v7.0 (chr-ID sc affold00002; pos 629679 to 630205)
tcggctgcaagttcgtttgttctgctgttaacaaggtcgcttcgttttttaattccctcgtcttgtttggtctagtgatttagttcgttgtctctgaaattcgtattttcggaaattcgggagaaactctgttttgtggatcaaagagagaggaaaatagatggcgtaattcttaatgttgttgaaagttatattggaattgtctttttagttgaaggttatgttaggaaataatgtgctataattcgaatgaaatcactagcaatgtgaaagccagagttaaaatattagctgcaagtgaaaaatagatattttatctaacattttaactgttgtacgcttggagttacgtggaagcagaaatgcttcaaagaacaaatcttgaaaacaaagagtagaggtttcttggtctctgtctttgaattgctgtaatcatgtggaccgtatacataaaaagaagtcttctttgacccctgtttttactttttgcaggcgggtcttgccaagctaattggacttgctggaga

SEQ ID NO: 77893 - DNA, 887 bp, Citrus sinensis
  Intron number 2 from transcript orange1.1g008851m (locus o range1.1g008795m.g) derived from phytozome v7.0 (chr-ID sc affold00002; pos 1173832 to 1174718)
atctgcagggaggttggtcctgttgtgtcattcaggtcagttttacaatttttttttggggcgggtggggggttatttttattttttttagtcagctcttgttttatagtttcctaatatgcttaaactgccatgaaacttgtactatgagtttaggattatttggcgagcgatttaagttaggtgagataatgcatcaagtgcataaattgaaacccaaaagaagaaaccaccttgagtcaaagcattacaagtaggttttgtgattttgtcattatatgcttatgataatatgatagaaatagttcacgctcttgatattatgtcctttagaacttttttttattaactgtaatcttttagtggtattcattttgatattttctggcttttacttgatgttgctaagattcatgcccaactcttttgatttcctctgttctttcttgcattactgttttatttcagttttaccccaattaatttgcttaaactgttggtggaatgagttcgtgattgttggtaagaaaactataattaattcattgaaagcatttgaaaaggatgtcccacttttcaagtcaattgcatgtaaactatgacgtcccatgtgtcaagtttcggatccctgtttcataagcaatatacttatatttaattcgagcaatagttaaagctttttatgaactatgctcgttatcaacctataaatttgatataaacttgaaccttcttggcaatatagaataagcgctgattatactctgggtttgcctttatttttaatttcatttttctttatcaaaatggtaacctgttggtttaaactatttctgtttcctttgctttcagattagttattgatagagaaactggaaaaccaaaag

SEQ ID NO: 77894 - DNA, 796 bp, Citrus sinensis
  Intron number 2 from transcript orange1.1g013682m (locus o range1.1g013004m.g) derived from phytozome v7.0 (chr-ID sc affold00063; pos 452832 to 453627)
ctgaaggtttttaacttttcgcttgctggttggtttattatattcataattatattgttcaatttcatttgtttttagagcaatttgaggattttgtttttcattgatgtgaatatgttgctacgccaatactgtttaacccataagctatttatattcaaatcaaatgagaacaatgttgtcataccatctgttccatttcaaattagctaggatactataggttagttaattctaatgaataagtttggcaagatggtggtgatgttcttcacatcaagcttggtattttaggtacttaatgcttgtgtttgatgtagcgtcatgtattcatttctgaagagagataaaaaaaagttctgctctcattagcaattcactaatcttgttttggaggtttgggtgataggagaattgagtactttccttttctggtattgggctttgcttcaacttgttaaggcttggataatatttaagagatcaagttggtagagagtttgtactacctcagttggcaggggaagaagtggtaacattagagaatttgcaaaactaattggtttctagatagatgattaataagaaactccttgaatttccatgctgaggttctacagttacgtaaatttgagctgttatagagttttaagaattttgagtatatatcgtccactattttcatttgatttatgcaaatggttttccgaaatcaagatatatttccctccctctttcctttgctatggagtataagcttggtttttgtaattgttgctttctttcttagcagttg

SEQ ID NO: 77895 - DNA, 594 bp, Citrus sinensis
  Intron number 4 from transcript orange1.1g034878m (locus o range1.1g033786m.g) derived from phytozome v7.0 (chr-ID sc affold00120; pos 152138 to 152731 reverse strand)
ttgtaaataaacttggttctttgtcttctatatctcttattgtgcacaagcgagtttttatgcgcgggagaagtttatatcttcctcatgtccattctaaaaatcttagttttggtttaaattgccatatcatgtgtacttttgtgctttattatcaggagtgaagccatttgatatcattaggattttgaattagcatccaagcatcttctctctcatctcgtctgcaggtttgatgacaaatcttggtttaaatgaaaaagaaaagaaaaataatgattatgaaggatggtgacagatatgcttggtgtttcttcaacattgaacatcttaacaattttcttatttttggtaaataatgtatttaatatgaacattttatgggaagttagctcatttaagtcttgccaaaagttacatctaagtgggtctcgagctcttattttctttgctgtcaaatctctgtggtaacctagattaaataggaaaaaaaggggaaaaagctttgatcattgttgaactctctttattgatttttctacttctaatgccactgcaggttgggataataccttggttaatattgtctacaag

SEQ ID NO: 77896 - DNA, 593 bp, Citrus sinensis
  Intron number 1 from transcript orange1.1g034878m (locus o range1.1g033786m.g) derived from phytozome v7.0 (chr-ID sc affold00120; pos 153358 to 153950 reverse strand)
gttggcaactgctaaggagaaggaacttgcaaactgtgaggctaactgcagtcttagtcgtttactatttgtttcttttgacttatactgttaaatttacatagtactttcttctttctctttaacaaacttgacttttgggggactctataacaacttatatggaacatttaaagagtttctggagtgtctgatgattagtggtatcaaggggaagattttcttttatgggtggcaagcctatcaagataagctattgtctcttatttgaatgtgccacacctaacaatttcattctgtaatgatggtctcctgactaccagcattgtcaagacttcaaatctttgtcttcctaaagttactgtaccaaaaaccaagaaccttttagagtatgaattatctgttactagaggtgtatgctaattaatagagaacataaggaatcttggtcaacgactttagttgttatgctgttgctttttgtttgttgcttttattttcccttgttataactgtgtttccttactctgatgaaagcttctaactgttatatttgtcatgcagatcaagaatcacagagcaaggagatacat

SEQ ID NO: 77897 - DNA, 696 bp, Citrus sinensis
  Intron number 3 from transcript orange1.1g023516m (locus o range1.1g023516m.g) derived from phytozome v7.0 (chr-ID sc affold00053; pos 226107 to 226802)
gttgaagccacaagaaaaggttgttgctcggcctggtaagttggctggcattgggtttcttatatcattttattcttgttggatagtgaaatacatgtacaggacagattttggatcatgtagcttatctctttgcaatcttcatatgtgatgtaatcacagtcaatagtcatacacctgtcttccgaagtcagcattttggtctgtccattacacatacattaatttttttgacgcagtgatctgctttatgcttgatcaatgctcttccattttatgtctctgggtcgtctcatcttgtcttgcctttacacccttttgctagttgggtatgcaccatcatcctcctggcttcagtctgttattcattatttggtataagttaccttcactggctaggaaaatttacttaacactccttgaaaatgttgcttgactggaaattagtttgccattggacccttgtaatagggacttcttgcaatggatatttacgtgcttgccgcttggcatgaggattttgccataatgttgaagtaaagacatggggattgcttcataaaatagacaatgttgccaaaggccatgtccatgatacatgcagttcaatttatgaattttgaattgtaagacttgtcttcttcagttatacagtgatgactggttgaactgagagacgaataaatttcaggttcc

SEQ ID NO: 77898 - DNA, 997 bp, Citrus sinensis
  Intron number 2 from transcript orange1.1g008651m (locus o range1.1g008651m.g) derived from phytozome v7.0 (chr-ID sc affold00002; pos 2465377 to 2466373)
cattgagttgttggtacgtaatgtctcttactgataatcttccctcactcaatttgttgatttcctataagctcctcaaattgtggctcttaattcttgatattgatccgttactgaaatgatagtccttgtttttattgaaaacaatattgtatcgacgagtgagttactttgtacgatgcttctaccgtcatatataaatataaataacgtacttgcatgcgctcatatcatatcacctaccgtttagataaatatatttgtttaataaaaatccacctaatgatttgtccccaatctgaccatctgagcatgatttatttagcaggtagctagtgagattagcaatggttaatgacgcctagccctaatttacaaaatatatatttgatgactatgggaacttagcacaagttatcgttcacttgactccaactttgcacaacagccattaatatgtttttctgcaaaattatgtaccatcatagattataattgttaataaatcgtgatttcagctctatacaacgtaagaatttgttatatgttctttttttttttttgccccacatactagtaagatcatttctttttctttttcttttttctaagagataactttttatagcctttatgaagaatgaagaagaataaaataaaaccaaacgagaccagtcatgatttcaggtcagcacaacaaaagaagttgttagatgtctcttttggttatgccggattattttcagaaaaataatatttttgtagctaattatattaagaagagtaatcctatcaccgggaaaaaaatgatccccatcataagcatcccaaatgatttgtctttcttgtggagagcaaaatggtgaattgaaaactattcaaaaatcaaaagcaccatctgcttaatcattgtctagaatatggtggatctaaccatgacagatcaataaacatatttgcagggacttgcaatcctggcaatacaagcacacgcaca

SEQ ID NO: 77899 - DNA, 507 bp, Citrus sinensis
  Intron number 3 from transcript orange1.1g025860m (locus o range1.1g025860m.g) derived from phytozome v7.0 (chr-ID sc affold00022; pos 864181 to 864687)
gatctgaatacaggtgagtccagcctgcttagtgaagtcatgtgatgcggcgcatcggcatcatcatggcataagcaatgtggtgcagcttcattggtttttgatattattagaatctagttgttcaccagttgaaagcactggttttttaatttttaattctgttgcccttttcacttcagctttttatgctgtaaatattaatgaactattttgtgtaattcatggtcatatcatgatcccagaggttgtgttatgaaggatcacagtactttatatatgcacaattagtgtgccatgggcaggaatgataatttcatttcctatcctatataattttccgatttctgtggcatgaatcacagacaaaacccccagttgaatctgctagcatctgctgtggtttgatgtccttaatgtgattgcacttcattagcttaatggacagtttagtaatcatctgctttcttcattgtcgttttctctctcctatttacagtggaaatt

SEQ ID NO: 77900 - DNA, 724 bp, Citrus sinensis
  Intron number 4 from transcript orange1.1g023900m (locus o range1.1g016688m.g) derived from phytozome v7.0 (chr-ID sc affold00002; pos 3288957 to 3289680)
gaacacctggcattagtgatcctggtactgaattggtgagtatgttgtgcattctgcatttgtattttggtttctttgcaaaagattatgacatttgtagtgaaagagtaacaatcttatggaattacattgttgttgtgtataataaatgatatcctctatttccttattgtatcatttaaatattctcttgatataaatatcagaacgtcaatttacctgcatttcattaggaaactaagccaaaacaaccaggcaagtctggaactgtatgctaagattctgtattgagtgttgtattggttctgggaacaatgtttttttcgtctcccaccaagttgaacagctcgggaaggatttgtcttagtttgactaggatgaatcagattttatttcatacttccattcactctctgcagggaacctaatgtactttctcagtgccaaataaggttgaacttccagatcgtaatcagataaaagctgagccaaaattgttttactttcaacattttgatttctgaatagaacaagtttcctcctgaagaagtgcactgctttattacctgtgttgttctgtaacaattccttagtcctttaaggatcataaaccacacttcaaattgctaaaattaattgtgaaaattccctggaaatttctacttctaattcatcacaaagaatgcaatcattatgtattcaaaatctttatacaggcaaaatt

SEQ ID NO: 77901 - DNA, 846 bp, Citrus sinensis
  Intron number 3 from transcript orange1.1g043334m (locus o range1.1g043334m.g) derived from phytozome v7.0 (chr-ID sc affold00588; pos 30311 to 31156)
ttctgtattcattgagtaactattgtgcgctgcaggttagaagatattctaaataatttaattgtgatggcaaattgtggggaagttagcaattaagttgacaggcttcccctactttcacatattcagaagtatacatgttataatttttgtttgaatcttgcataacttaggtacggttgatgtctttagttgttcaatatcaattgggaaataaagcaaaccagtgaagactgtgggaaaaggataatgtgagtttgacagatgctgagaggagatagggaaacttgatctgaaagatttttttttctttttctttgccctgattttagttttttcttagtgtttaacctctttacaataacattgattcccatagttcatgtttctaggtgcactcaacaactatctgttatgtcttgtggatgactgagaaagtttattcattttgacagattgctttttgaatacagtacaagtagattgactaataatgaatatattgtatcaagttgttgcatttgaaaactgtgcatgactgcggtctttatcacttttattctcaaggttcatgttgacctaaatttaaaagccttggacgtttggaaaatctatagcactgagtttgcgaaaccttttagtgccctcaaagattgactgcttcaattgtgttttcaatatcttgtttttaacatatttgtatatattatgaaggctaagctgtgtaaatgagagatataacgtaaaaggtcaatacacagctgtgtcaccttttacttcttctttatttatttattttctctgtatgcagggttttgtggaggatcagtttggcttaggtctaat

SEQ ID NO: 77902 - DNA, 558 bp, Citrus sinensis
  Intron number 3 from transcript orange1.1g034424m (locus o range1.1g034143m.g) derived from phytozome v7.0 (chr-ID sc affold00053; pos 356927 to 357484)
gatctctgcatcattatcaagtacggaactattagtcctcttctagatgtcttccaaatttttagtgatatcagaacaaaggaacacttgtttagtaaactattttttttcccttgttgatttacccataccttctaaatatgtttggaaaactgagaaggttcgtttgaatttagtgctgcatgtgagtttcttttgctttttgtgtccgataccggtgactttcttcctaccattctaaattcttaatgggtgtgtgtatctatctattacattgtattttcttgtttttgtatcgttgtcagtcctttctccaagccaatatgctctgtaattatattaggacacacggaacatgtgtcactgtaacaataactaaaaacttttgagacataataagttggagatgcccaagaggtaggcactatgattacaattctaggagagaatgagactgtattgctgagcacaaatacttttgcttgagtttgtgtacatagaatgatccatttataagtgattagaatactatggtaacttaactgctccttctcccag

SEQ ID NO: 77903 - DNA, 768 bp, Citrus sinensis
  Intron number 1 from transcript orange1.1g043518m (locus o range1.1g043518m.g) derived from phytozome v7.0 (chr-ID sc affold00024; pos 311376 to 312143 reverse strand)
attgggccctcgcaaagcatcgtcgtttgaagaaggtaacttcttagcttgtagttgttttttttttttttcaacttggatgcatagctttggaattcttcatttatactggactgatttacatcttccttttgatgcctttttccacatttaggcctatctaggttaggagaactgaatcttggtagtgtctgatactaaaactatatactgaaatgatactgtcttttgtgaattatcttttgtgtatgagaattcatttgtttgccgtggatgcctatcacatctactgctatgcgaatctacacattatggttacattatatacacattagatgaataatatagatgcgcacataagttcagaagtggctgacggtgtggccagacttggataagtagactcaatttctcggatgttattggatcagacttttatcttgtctgaaattaaactatcaaattaccttagttcattcagatcaagtgttgcataattagtgctttcttgttcggtttagatcataatcagatttatttggaaacctaaattgcttttggctattgcataaatagagagggtatagttgttacattaactggttcattgaaattatattccaggtaggaaaatcaattgtaggcatttgaaagtcttgataatcttgattcctgaaaatgagagcattgatagttttccaatattcttgtgttgttttatatagaatgttttgcttacgttcaccccttgtgatctgcagctatttg

SEQ ID NO: 77904 - DNA, 516 bp, Citrus sinensis
  Intron number 1 from transcript orange1.1g000918m (locus o range1.1g000918m.g) derived from phytozome v7.0 (chr-ID sc affold00002; pos 2285566 to 2286081)
ggtttattttttcctgtcaaccaaagtccaagaaggtcagttcgttgctttgttaaaatttcagaatcattatactatatttttattcaaattgtatccttggctaatagaaatttattttatagtttatacatctatgttatttgcattttaaagttaaccagcgctagaaaaatagcatactgtgattaatgtgcttgtctttgattgggattgtattcatttttaattttggtgttaatactcaaatacagtcctatgaaaatcaatattgagtgcgtgaaagtgctttgtatatgagacatctgagtgcttgtttcagctagagcgaaaacatcacttaattattgtgtcattcattttgctctgcattgtttattattgacatcgtgcgcttggttagtgaatgtttaaagtctgatcttgttgattcttctgagttgtgttttaccattgatatatagcttttctgtgggagcagcattcaagacgtagttcattcgataactctgattc

SEQ ID NO: 77905 - DNA, 552 bp, Citrus sinensis
  Intron number 1 from transcript orange1.1g033820m (locus o range1.1g033820m.g) derived from phytozome v7.0 (chr-ID sc affold00233; pos 220883 to 221434 reverse strand)
gtctgtgagaggttggagggcggaagagatctgaggtaatctaaatttctttatctaattcgctttcaatgtcaatttagtttcgtatgttaaaaaatggaatggatttggtgtttccacgctgtctgtcaaattgtcaatgatctgatttgattagttagaattatgctaaagttccgttaaaatggtgaatgtgtcgagcagactccaccaaaaaaaaaagaaaaagaaataattctttggtggtctggtgtgttaaatcaatccaatcttcttccatcgaagattatggactggtcctacaaatttgcatgcactgatcttttccattaattctttggtggtctggtgtgttaatataagatggacatcttctcttttgtaaaactaattttctaagtgcactaacaattttctgcacacattcaggaaatgataaataatagtcttttgcaaatttcgaatgaaagaatgcttctgctttgttgatcactaattaaaaaaaaaaatcattcagggatctgtaacagagtgattcagcaattttttttt

SEQ ID NO: 77906 - DNA, 763 bp, Citrus sinensis
  Intron number 2 from transcript orange1.1g001744m (locus o range1.1g001744m.g) derived from phytozome v7.0 (chr-ID sc affold00024; pos 1155060 to 1155822 reverse strand)
acatagcatcttcagtggaccccaattcggtcgaggtaattttttatggatttaaatttaattaaatgggttgttgatatttagcattggctgtaatgaattggatttttaggcatctgatatttagtaggatcaaagtttgtttgattgaattatgaatttattagaattggattataatgcatttttgtggatgtgatgaattgggtttgaggtttttgtctttgtcttgcaagtttgaggctctgttgctgtatgtttggaaggaaaagtggtttagtttggtgaagtgaattgatttggatttatagtcagcatttgtggttgggttgagttaggaagttttgattgtatggaaagttttttcgtaccctagcgatcttatattatagtactgattaagtgattgtaaacacatggtttttatcttagacaagttttcgtttcagttgggatcagagaatctaatgttaacataagggtgacggttgcatatgctgtaatctgtgtggatttatgtttaggcagaagccttgtcgtatagtggtctcaattgattgttcagaaaccattttccgttttatgttggctacttggattactaagcttgttattttgttgtttcttttcattatgtgtcaggtacttttaaaactcttatgaaatctgctattggctgaatttcttccatttgaaattgtattttggttgaaatttgaacttttatttgtttaacattttcttttttgttttcagaatcgat

SEQ ID NO: 77907 - DNA, 624 bp, Citrus sinensis
  Intron number 2 from transcript orange1.1g030711m (locus o range1.1g030711m.g) derived from phytozome v7.0 (chr-ID sc affold00034; pos 516426 to 517049)
cctcaggtgggtaccctgttagatgctctgtttgtgttttagattattattattactatatatcatgttttcatggagaaatatgaagaaaataatagatgttaaccatctatgatggctttttttaatgattactttcattttctttgaatcctattaaagagggcgcttcttattaatattttcagttttactattagtctgaattacgatttgtcattctcaacttgaagaatttttttaacgttgttgtcatcatctcatctcatataggtcaggaaatgacatgagagttgtctacttgattttctctcctttcaccttacctttatctataccgaatataaaccagatctctcttatgggttctgtttcctaagttatttagaaaattccataagattatctgtgtcttgagtgtacaacaagaagaattttggtagaggttacttagaaatgaattcttgacatgtaattatgccaatttttgaatttcactgttggtgtgtgcatatgttagataatctttgttgatttaatacgggattgcctaatctttgttgatttaatatgggattgccaattttaggggggtattgaagacggtgaggaccccaaattggc

SEQ ID NO: 77908 - DNA, 591 bp, Citrus sinensis
  Intron number 2 from transcript orange1.1g024052m (locus o range1.1g015328m.g) derived from phytozome v7.0 (chr-ID sc affold00002; pos 3497918 to 3498508 reverse strand)
agtcgtttcagagtcattgctgttgatcaacttgggtaagctctgtttcttttgaatttgcttcatgcttgattaattttgtattacctgtgtaattttgtaatttgcttccagcctttgttcttaaaaattcttgaatttcatcatttgattgtttacttgtgctcataaattgtgggggtcaataaatttagtaaatgcttgatttgctttttctaaaatcaatatttctctacattttcatggatttttgactaagaaccttgctgatgggaatgttcctccatggttgcctttgagtatggttaattgcacgtgttagggatgctgaactattattatttaatacttggtagtccctagttggactcattataagcttcttatattttaaatagtttctttccacccatactgcaagtctttttggtcatataaacctttcatgcaccgttgaagaagcattctctagtggaatgcttcttactgttgggttctttaagtttagatagaacttttatatgctcatagtgtcccttttcaactacttttgcagttgcggtggatcaagcaggcctgactttacgtgca

SEQ ID NO: 77909 - DNA, 668 bp, Citrus sinensis
  Intron number 2 from transcript orange1.1g038495m (locus o range1.1g038495m.g) derived from phytozome v7.0 (chr-ID sc affold00073; pos 54124 to 54791)
ggaagctgtgcaccttctgtatctgctgctgaactgtaagcccgcatcattttgttctcccattattatcattattatgggtgttagtaaattgaatcacacgcagttaccgttttagccactcatctgtttttgtattgactacaggtttgctcttcttttgttttagtctagttagcttcaatattttgttagattatcttgtacatagttcaaacatgtttttcatagcattatcagaaagttttgtcaacctaagcggccaaatcaaagtaagggcaagaagaagaactagatgtccaaacctcgtatcagattaaccactctaagtttctgtccatacatgatgcaatatagaaccagttccaacccttttaagtggtagttttcagacaagaactctaattagtgctctctaatactttgagctgttgttttttttttttattttactttttaatttcaagctgactagcagagcactttgagtgatcttaaaacttactgctactctcatctcctctctgataaccccattcattcgtatgtttgagatttaaagttggcatgtatagatttgctcatagttgcaacactttcctaacaattttttatttcttgattggataaaaggtccgaaaatatttcgtagattctgctctggttat

SEQ ID NO: 77910 - DNA, 499 bp, Citrus sinensis
  Intron number 2 from transcript orange1.1g019010m (locus o range1.1g015757m.g) derived from phytozome v7.0 (chr-ID sc affold00024; pos 10424 to 10922 reverse strand)
gactcgctaagggcaattttgtctgatcctgtcacgtaagaccttgttgatttttattttaaatttatacaattcgtgtgtatttgttttagttttgattactggttgagatacgttggggttggagaattctaatcatttgatcaatttggttaatgatcttcacaaccacttgtaatttgtttattttgcgaaactaaagatgctgtcttgacttagtggttttagatgttagttttttgttactgagatgactttccaatgtggcatggcaatgttgatcaacattgcttttcagctcgcattaggagcttatcatggaggatataatctgaaaatgttggctcttatgtgactgggaattagctttctattgctgaaacaattttattttgtggttttttctttcttaatagattttttttatttaataagtatttcctgacattattagtattttttcatctatcttgctttttcaaaattcaggggaaatctc

SEQ ID NO: 77911 - DNA, 469 bp, Citrus sinensis
  Intron number 2 from transcript orange1.1g030179m (locus o range1.1g023387m.g) derived from phytozome v7.0 (chr-ID sc affold00002; pos 3722651 to 3723119 reverse strand)
aacgtggcttttcttgtcgtaggtgaccctttcgggtaatctgaattttcctttattattattatcattatcattgtcatcatcatcatcatcattaattcattattattatttgtctaaattggctttttaatcatgtttttgtgctttgttaattgtttatcactgggtgtgatttcatgatctgtcatggagtagtcagtagaagtttccattttgtgaagaataatttgtaaatgggacataacaaaagcttcaaaccaaattgtggaactgaaatagaagtgtaatagatcatggtggtacataatgcttttttgaattattcaaatctgtctgatggatgttttatttgagttttgtagtttctttgttgttgcctttactggcgttgctttattcttgtaaagattacgatttggtttgtgatgcagagctacaacacataccgatctggttgttcgagcta

SEQ ID NO: 77912 - DNA, 554 bp, Citrus sinensis
  Intron number 1 from transcript orange1.1g014778m (locus o range1.1g007200m.g) derived from phytozome v7.0 (chr-ID sc affold00100; pos 165589 to 166142)
ctgaaggtatgtaatatcatttaatgttttattttctgtattttttttggtgatttagttctgttgactttggatgctcgttctttgtttctctattactgttgctaaatcaaactatctcgttctttgtttctctattattgttgctaaatcaaacttacaagttgccaagaatagaaaaaaatgtttttcatagtagaaaaaaccaaaaaaaaaaaaaaaagaaaattaaaaaaccgcaactcacaatccgagtttatggattttcagttaatgggttgacttggattctgagattagttcgtattgcaagatgttccctcttcgaatgcctttacgatcaccaattgaaacttaaaattggttataagctctgactatttctatattttgatggctaattggtttaactgaatagcataaacagctggtcttttgtaatgaagcgagttatgatcaaagatcggatatttcatgtctattatttgatatttctaatatttgagaccagcacctgaccattgttttattttggaaaacaggtgacgctttga

SEQ ID NO: 77913 - DNA, 714 bp, Citrus sinensis
  Intron number 2 from transcript orange1.1g021505m (locus o range1.1g013684m.g) derived from phytozome v7.0 (chr-ID sc affold00002; pos 4142337 to 4143050)
aaaaggtatgtactattaagtctaaagtgctcatctagtacacaattttagattttttttttaaatttgaaaaaaattgttacatcatatggcttagtgatttttttaaattttgaaaaagttcagaacagtagaccagagtaatttctaattatatgtatatatagacatcaatcctttaaatgtctagacaagtaataaattcttgtcgcgagttgggcaaaatttgtttttgcatacatgattgttttttattccaatacttaggtccattgcatgtgtgtctcatgtttgaacaagtaaaacgtgtttgtctatgccttgctccttagaagccacttccaaataaagccaatgtgtggataagaaagagttccctcttttattttttcacctcattatttatatgtagacagcatacacttccctatcttttcttgcatcatcacttgttgattactttatacaatgatatggacaaatggctcattatctcatgtgacagataggacagtggtcatgatcctgacaagctgccttctgatagattcactaaattaaatataatttttagtctagtaattggttaattttgaaccttgaaattttgtaattggtgtaattaagtagaaaattaagcacgaaatataatataattgtgcatgcttttattgtgtaggtacccgtatcttccctggtgggtaaaacggttgg

SEQ ID NO: 77914 - DNA, 1011 bp, Citrus sinensis
  Intron number 5 from transcript orange1.1g023815m (locus o range1.1g023815m.g) derived from phytozome v7.0 (chr-ID sc affold00541; pos 103785 to 104795 reverse strand)
gtttatacttgtaaccgcttattccattgatgtaagcacccaattggttctctgtatagcatatttgaagaatgtaattgaaattcaagttaattttttattaaaaaaaaactgatatgttactatcaccaatctacaaaattataaaatcataaatcagtcttgatcctatcatgatatagttcaattttatattatcatattaaaggttcatttagaattactttcgggggactttagagtaattttgaaaagttaaaagttaattttggtatttagtaaatttttttaaaaatcacttttggtaaaattatcacatcctataacacattttgaaaaggagggaaagagtaacttttcaaaatctaattttgacaatcacttttacacttaaaacaattccatttatatcctcatataaaaaatctaaaattatctttgttagttttaataagattattatttattacaaattatgttaagataacaaaaaaactatgatataaaatatttatttgagttatcaattattatatgtacacaataaaaaaatattttatatacatgtttgaaaatacttaaataaattccgttcaacattatgactatttaatcatttacattcttacagcagattaacaataagatttattaaacacatacgactatttttaaaacttacagtacttttaaaaataaattttactaaactttaactgattttcttgacggctgattatttatatagtacagctaacacaattattctaaaaaggtacaacattaacaaattaaccctaaatgcccttttccctaactaatagtaattcaaaaacttagagcctacggtgcatatttattagaatttggagccattgaattatccaaaatatttccctaatagtataatttttgccaagcttttttctttttatctctctcaaaattgattacctgatctaaattcatgatctaattggtctttttgatcttgcagcttccctttcttag

SEQ ID NO: 77915 - DNA, 531 bp, Citrus sinensis
  Intron number 1 from transcript orange1.1g002374m (locus o range1.1g002380m.g) derived from phytozome v7.0 (chr-ID sc affold00120; pos 184189 to 184719)
ccaacgcctcaacctctttagatctggttcctcaggtcagtctttcttttttttttctttttttaaaatttttgtcgttgaatatttttgtggagttatacatgtgggttgcttgattgattgatttaattatgctttgttgttattttacctggctgtagcagatcggatatttgctagttaccgtttctgttcttcttcttcttcttattagtattatttgattttgattttttctttcgaaaataattgaatagagttaggttacgctttggtggttgtgatttgaaagtaaaaaaaaaaaaaatccgtttgatgaagcctggtagagtcgtcttagaaagaattgttttggaaaggaggcctattaattaccacttttagggatttttaaaaatgttggtctgatgggaatttatgttatttggcgggtgatagtctttgcttctgagtaaagttttttgggcttgtggtaacatgtgtttattttctgcagatttttgtgcaaatttgaaattggtcgaatctttt

SEQ ID NO: 77916 - DNA, 510 bp, Citrus sinensis
  Intron number 1 from transcript orange1.1g001236m (locus o range1.1g001236m.g) derived from phytozome v7.0 (chr-ID sc affold00002; pos 517401 to 517910 reverse strand)
ccgaccgtgatattgagcaggtctcctcatcatttttgacatttcttcgacatttttcttctatttttcaaaattcttttttctctctctctctctctttttaaactaaaaataaattttttcatcgacactgttgttacgtttattagaaaccgaaattataaagtttaataatgagtttgagtattctaataatagaataaaatttaaagcgtctatcgtatttctacattacaagtatgataatgatttttatttttggagctaattttgtgaagtaacttacaaatagatatttctcaaagtttggtttttaatttatgtatattaactatcttgataagttcacgtgatatgctttgtgatacttcatgatatctatcgaatgtcactgtgcatttttgatctagagaaattacccgcgaccatttcttgttaacgtaaggtttgtaaacgatcctgctggtttttgcaggcattaattgctttgaagaagggtgctcagcttct

SEQ ID NO: 77917 - DNA, 713 bp, Citrus sinensis
  Intron number 1 from transcript orange1.1g014985m (locus o range1.1g014985m.g) derived from phytozome v7.0 (chr-ID sc affold00044; pos 234496 to 235208 reverse strand)
catacggtgtcgtttacaaagccattgatactaaggtaaaaccctagctctttttcgcaattgatttattttttaattttttgataagaaatttttagttaatattaattgatttccatttaatctgtgaacagaaacaggatgataattcttaaattatttttgtttatgagatattattttattttgttgttgagaatgttattttttttaaccaatttatagaatatacaatgtactgcctaggaatagtgaagtgactggtatttaggctttttgaattaattaatatccatctaagtattttaattgtcactttaattcttttaatcttttgtgaatgtttcaatatgttaaacttgtttttattcttactatttcgaatattaaatgttgattggtaactgggagattttgctgtagtttgggtcgaaacttaaattggaaatctagaattgcatttttttttcctgttgttttcatttgaattttaaggtactgaaccacattaatgtgttaggtctggctctggcaaaagaattggttaatgcttgtctaacttgaactaacaatatctataattttattttttcattttacttttagttttactattttttttttaatttttatgaaggtgtgaatggttattgaaaactgggtgtttgatttgttcagacaggacagactgttgctataaaaaaaattcggct

SEQ ID NO: 77918 - DNA, 966 bp, Citrus sinensis
  Intron number 1 from transcript orange1.1g041135m (locus o range1.1g041135m.g) derived from phytozome v7.0 (chr-ID sc affold00071; pos 131604 to 132569)
cctcctcacagaagtcaggtgatctactgaacattgctcagtcattttttaagttatggccttatggtttttgattctttaggttttcaatcttgactcattgttgtttagatatgtactagctctaagtaaaatcactgtgatcttgtagatgttgcctgattaaataggacctgtaatcaaatggctcttaatttagataaacagtactgaagtgtaatatcattggtcaaaagaaaggaaagctcttgctttaaactggatagttgtaaattgttccttctatggaatcaaacttcgttttatttttttttttttgaagaaaaaaagaggtaacgatatgtctataacaacatatgagagcatgcatagtgtgtgcgtgcatgtgcaccatcttttgtgaaaagttggcaaattgacttctaatgtgattactgttgctgtacattctggaaattgcattttgagatgatatttttcagggaactatatgcttatttggatgtatcttcaatctaaattattgagtttattgcaaagcaacatgttgattggcaagtcatactaatttcaatatattcttttattttttttggctcatagtttttactttttagctcattgtttttgggcctggaatatgaaccgtggttcactacatgttgtccatttgtttcagacattttaggtcatggatatcgaggtgatgtgctgcaatgttcgttctagattctctctctacaggagaggatcaaatgttctctgctttctggaaaaaaaattgcatggctatctattctcatgttttctaatttgttattgtatttgaatccattcttttgagtttgctctttggctagctataacatatatttagtgcaagtgaggctaatgaactataataattagtttaattgcatgtgctttgcagattcagtatttctaaggccacattctccagctccc

SEQ ID NO: 77919 - DNA, 717 bp, Citrus sinensis
  Intron number 1 from transcript orange1.1g016276m (locus o range1.1g010307m.g) derived from phytozome v7.0 (chr-ID sc affold00058; pos 333274 to 333990 reverse strand)
gcattcagcagctcgatttgccaattcatttcgcagtgagtctctcgtcctgttttcccttttttcttagaaatcaactagggtttctttactcctcttctgagcttctatttatcatctttgaattatttgattatttgggtttgttttgtatcttaactgagattcaattatctttagggttagttggtcagtttaagtgtaatcgtcaaatgaattaaaaagaagctttaaacttgatcagaaactgaagtaaataggaatttagcttccattttgcttattttggcttccgtagcatttcactaaaccaagtagtgttctctaggtgtagtgtttgcaatgtatctgaaatttgcttctgttagtggacttatattaccgtttaaggggtaattattttgctaaaagagatttaaaatgatgaatgctattgcctgttttgtgatttcctaagtattggcattaagaactctgaaaccgatgagtttattattatttgtagctatttctgagataatgccacccagtttattttgaatctttttaacattttgtataccaatttgaagaaaaactattgtgccaatgaaggatttcaagatcatattctttctaaatcttcttttgttatccttggttatgcatttaatatctctgattaacaggatagtctcttatgttgtatcacattttctctgttttctgtctaggttt

SEQ ID NO: 77920 - DNA, 718 bp, Citrus sinensis
  Intron number 1 from transcript orange1.1g045998m (locus o range1.1g045998m.g) derived from phytozome v7.0 (chr-ID sc affold07028; pos 1946 to 2663 reverse strand)
agtaaacgaacttccttcatctctccttccttcaggtcccattcactttgtagaaactaaagggtattttagttgctcaaacacctttagcttctgcccaagatccaaaatcagattcctagatgcttgtctatagatgacttgaaaaagatttaatcaagaacctcaactggacagaacaatcaatggtttaagaatcaaagaatctaatcaaactaaagaataaagaacagaagagttttaacgtggttcagctaaatcacttagcttacatccacagaggaacaagacttcaggcttttattgaatgaactcaagattacagagaatttacagattgtatctcatgaaaattaaattccctcatatgagagattaacccccttttatactcatgattcgtagccagctatctgcaccagaatcggctccttttagttgctgataacctcctggaaaactaattccagatgctcacgtgcaagccatgcttcatcaacgacttttaacggcttctcattagaaccattcacgtgcgcatcatgtgtttcactaacttaaacgacagtcactgataccgttttagttagctttgtatttaaacaccaaaacacactcttctcaagtcattttgaatgccactgaattgctttcactggttactttacacacttcaagcaattggtttagatttcgtgcaaaaattggataaggtaaa

SEQ ID NO: 77921 - DNA, 752 bp, Citrus sinensis
  Intron number 2 from transcript orange1.1g014072m (locus o range1.1g014072m.g) derived from phytozome v7.0 (chr-ID sc affold00064; pos 383163 to 383914)
ctctagaggtttgctctaaatttaagtttcttgcagctttttcatttggcttttttcttcctgctttgcatatctaattatgtgtttttgatagagtattgtgtttgttttgttcatcttgccattatctgtcgtgattataacttttgtggtctaactttcttttgttcattaattccttttggtgtcttatataatgaatgtaaaactttttgttacagttccagtctccacacatctcacttagctcaaaatagtatgtaaaatatcgaatgcccgcttatctggtctctgagtgtcttaaatactgaaacaagtttcactattgtcatcttgtttgtgctatttcaacctgtggaaacttccactatccatcctcaaattagattatcaccaaattgaaaacaatgcatttcatcacaaacattggagatcattattcagtttatgcatggcttgaaagcattagtagtctttttggtgaactattgttcaatgatttgaaatgttaagcacaacgtttatattttaataatgacagattatgatggtaagagagataagaagggataaataatgattttgattttcaaagattaattagtttaattagttcaataggttacattctcattacttatgaggtataccatataacattatcgatggttgtgaaaataagcatggcaccttctcatccttgtatattctgtccaggcatcatcatcaggacaacaggactgtgtggcttt

SEQ ID NO: 77922 - DNA, 519 bp, Citrus sinensis
  Intron number 1 from transcript orange1.1g027129m (locus o range1.1g019062m.g) derived from phytozome v7.0 (chr-ID sc affold00024; pos 551118 to 551636)
tcgtcactttcaattattttatcagttacctggaggtaattatgatttcatatttttactgtatttttttttttttttggtttgtttaagcaatgtgagtgtggctattgctactggtttaaattcagatctgagaagtttggttgtggggtctacattcagttgattgctttacactttccttgtttttgaagatttgattcaatttacaactcgagtttggtgcagtttggtggtacgattttaaatctaattttttttccccataatctggtgtgattgtggttagttttctatataaagcttcaacgtttgagttgtatatgtcataagaaaatctgggcttttgagtattgtgtgtaaactttcaggtgatttgagttttggcgtgtgtcttcttgatctgtttgtgtgtttgagttcaagttatgcgagtgttttgtgcgtggcttttgagtgatttgatgattgatcgagttgtttggttgttttggttcagtgatttaagaatttcgacga

SEQ ID NO: 77923 - DNA, 672 bp, Citrus sinensis
  Intron number 4 from transcript orange1.1g010669m (locus o range1.1g009763m.g) derived from phytozome v7.0 (chr-ID sc affold00512; pos 72711 to 73382 reverse strand)
ttccagaatgtatgcgtttctgatttattgccctgtgccttctgtgttaaatgtataagtttgtctgtaaggatgttttagtcagtacttaaaaagaatttgacttttgacttcatttgtttttccataaacgtcttttttagcatattactaatttgctgccaagttatcagcttgtaataagctctgattcttacggagatctttttctttccatgtaacatgcagtctcccagcttttagcctgtgtttttcatccatattattgtattgtttctttatcattaggtctcttcattccataataatttagaatgtacgacatagatattatgtctcagtcttttcttgccaattacttctatgccagatttatccagtatactttacaagatagagctatcgtaaaatttttgttttgggatcccttgttctgtgctcttttaattttttaaatttttttaatttttaattttgaaaagtgatacatcttttataaataatggtaattgtacattatttaatgcatttacaatttttttgctgtaatattgctgatatcttggcgacacttcttcaaactcaagattttaattgatactaaattttatattttaatatatgattctttatatatttcctgacagtcacatcgtttgtctaattgtagga

SEQ ID NO: 77924 - DNA, 422 bp, Citrus sinensis
  Intron number 1 from transcript orange1.1g024742m (locus o range1.1g014891m.g) derived from phytozome v7.0 (chr-ID sc affold00024; pos 1199065 to 1199486 reverse strand)
ctgctgagaagttggctgaaagtagtaatatacaggttatattacatgcttgtcccttttgcaagctgcttgtgtgcagatatctttcttttcttttttttttgactggatttgtgatattttgaacttatttttactcgaaactgaaaattcccatcatattataattaacaccaatcagaggttttggggtttgatctattttccagcataggtaggatagttctcttgtttgtctcatctgtaaatgagttttggtattttctatttgcatggatcagaaatctgatcaaaggtattgcagtatgacttaattgattatgtttgtatatggtatcataggttatatcttgtgtgctggcatctaaattgatcttcgcatgccaggatcttgttgatattgaggtattccaagaagcaaa

SEQ ID NO: 77925 - DNA, 814 bp, Citrus sinensis
  Intron number 1 from transcript orange1.1g010489m (locus o range1.1g007428m.g) derived from phytozome v7.0 (chr-ID sc affold00044; pos 723919 to 724732 reverse strand)
gatcctcacaagaaggtctgtctctctatttcagatctgttttgttttatgtttttgttgttttttttccccccaatttagtcttgtttgctttttaaggctctttggctaataatctttgggtttgtttaaaactattgaagatgccttcaagggatcattgatttgcttggttgcataataaccccattgcccatatccaatgatcatcatattctttctaatttttgttgtgattgatgatggatactgtggtattcaaatgttcgtctagtgtaaaaagaaaaagaaaagacagttcgtggttttggatcaagaacatgtttactttgtggcaaatgcagtttaaagtttggaaaagaaagcatctagactttcattatgattgtgacgctcatttaggtttgagcaaaagcaagtgaagaacccactttttgctctttatttagcattgtacaaaaccacttttaattgatacttgggatgggtttatgagcttcctgggtagctatttgagtcttgtgatatttcaaactcaaaatgaagctcgtgttctattatggttttttgagttttctaaatcaatttgctggatcttctgttgcttataactagttgagcaattttgctttcagttgtgcttgcatctgtcatattaaatcttcagatttatagttccatagccatgatagactaatagaacttctactatatccttatgtgatatgtaccataattgttcgttctgaattctgtaatcactggttgctaagtgttatgcagagtgcactagaaacagaatttttcacagagt

SEQ ID NO: 77926 - DNA, 642 bp, Citrus sinensis
  Intron number 3 from transcript orange1.1g019350m (locus o range1.1g011182m.g) derived from phytozome v7.0 (chr-ID sc affold00402; pos 103311 to 103952)
ttccaaggttagtaacaagtaggatacattttttatgcatacatcaatgtcgcgtttaagttgattatgagtcttgtactgaaatagatatttcatctttcatgaattgttcttttttattgtttttgtgcatattcgtaaactgagagttataagaaactaacgtcttaaacaagaatgcatgtaggttattcgtagaggatatattcacttcacactcatgttgatggtggtatgtattaatgtcaagctgatgcttgagtgcaaggcatcctgcggcagaatgcaaactgaagaatggattagtttaaaattattaaaatttaattgtattgcaagagcaaagactttgatgtatggtcaaaagaagttaaaaggactttcatggtgaattggcaagagtggagtctgtctcactttataagtggctacttttggttccgtatctttgagtgtatagaaaaggtctaaaactgtgtgatttaataatgtatagatgtttctactattttcgtttttacactgcttgtataagtttgccattcaagattgatttgtgtggctcagcttgtcattcaccttgttacttaaatatgtttccttgtaggcacaagattgcttcatttgcaaaaaaggtggtca

SEQ ID NO: 77927 - DNA, 710 bp, Citrus sinensis
  Intron number 3 from transcript orange1.1g019194m (locus o range1.1g019223m.g) derived from phytozome v7.0 (chr-ID sc affold00022; pos 1452868 to 1453577)
gacagtcacgcgtgtcaatcaactcaaggagttgggtatgtgaaggttcaattgttattttggttttgatgagcttaaatgaagttttatttgtttgaaaataattttgtggtgcaaatgctggcctgcctgcttgcagattgttagttttttgtttggtttggatgtaggcacaaaagatgttctgtagacatatttacaacataattaggcaatatggatgtatttgtatttgtatttgtatttgtatttctctatgagtaatgttaatgggttaagacttgatgctacgactgaattttgtaaaaggaacatataagtctggttgcatactcgttctttctatttccacctgtgaatactgatttgttgatagtgtgcgatcaaattctgataacttcagatgcagttgttgccttgttggaatagttatccaccttgaaacatttaaaacttttacccttattggcacctgggttgattgttatgttgaaaaatgagctaggggacatttgggcgaacatccattgaagttcatattgcaggtgtagtgcagacaacataggttacatgtggaacgtatgttggttgccgatttagtttgttgctggtggcattattgatgctacaatatctttctcaaagaataagttcttctcttctttcacctttcagcacacttgcttgatagtggaagtaaagttttgcca

SEQ ID NO: 77928 - DNA, 273 bp, Citrus sinensis
  Intron number 1 from transcript orange1.1g031670m (locus o range1.1g031514m.g) derived from phytozome v7.0 (chr-ID sc affold00233; pos 64842 to 65114)
ttaccaactctacttctgtaaaaaaaaaaaaacctaatctcttttatctcttcatttcacttagctttgagattggactagaaaccctaaagcaatatttcaccaacaagaaagccggaaatgaatacaaacaaaatttatttttcttgatttattttatccttgattatatatcccatctgctggtttttagatgagagtgaaaaatagaccgagttgatggatcaatatatggaaatgattattgatatgttgaatttgtgtgattggcag

SEQ ID NO: 77929 - DNA, 877 bp, Citrus sinensis
  Intron number 1 from transcript orange1.1g008185m (locus o range1.1g008185m.g) derived from phytozome v7.0 (chr-ID sc affold01127; pos 24952 to 25828)
cggtgctcatagaatcccttatatttgcattggaggttagtttttagctaaatccaaaacttcatccttttattatctttctatgcttttgattccaattggctagttctaagcgcatgccttcttttggtagtaaaatgaaaagtaaatgtagatccatatgtcttttagaatcctattaacgatggcattttgcttggttgagttgactgactttactgatccttcaagcttcttaggccagcttaatcctgaaacaaactttacagactgcaatgttttatttgtaatgttgtattagtacaaagtcaagcatcttcggaactgttggtttttaatatttaaatggaagtgattcaatttagactttggagacatcgatgtggatatattgtttcttataaatgacaaatcttgttattatcctttcggctattgaaatgttttcgttgtaatcctgatttattgcaatgttgaggatggttggttaattgtaaaacacaagtaattcagttttggagatatcccgtttgaaccataatttttattctatcttctatctccagaactcaagctgttttctcgaagatagttgattgattatttatttttagcaaattcttaagactatagaagcaaagaaatctaatcttgtgacctggggcatgggaggcctaagtctaaggaatgactagggactcattctgccaagaagtttgcagctgccctttcagcttattagtcaaacaaacaactaagattgcaaatataacttccaataacttaagtgattggtgatttattaactaattagaaattctcacataaatcaaacttctcagtctttctgcagattttgtcctgggggccgttggca

SEQ ID NO: 77930 - DNA, 507 bp, Citrus sinensis
  Intron number 2 from transcript orange1.1g014723m (locus o range1.1g013394m.g) derived from phytozome v7.0 (chr-ID sc affold00002; pos 1315163 to 1315669 reverse strand)
gtgtcttggttgcaagtaacaacctttcttcatgtcctttttaacgttggtgtgttttaagtgattcttaataggtagtccacttgcccattagggtatgatgtaattgctatttttatgatgaatttattcagtttggccaggggtgtgctaataattctgctacagatgttgccatcaatctcatttcttgtgacctttaataacaaaacattttttctgaatcataagcttctagtgggaccagcatggggcactgaccttgatgattgacttatgtgtcatgtatggctgtgcttgtttacgataatctgtttccatttaagagaggaaattctatgtgaacagtccctacatcaagcttatttattctatgttcgtttgttttatttacttttttttttaatttgtaatggtagttaaatattttgtcactatgagaacctctaactaattcaaactctcgtcaaaattcagtggcgggaaattcagctggtattaaaatac

SEQ ID NO: 77931 - DNA, 552 bp, Citrus sinensis
  Intron number 1 from transcript orange1.1g014723m (locus o range1.1g013394m.g) derived from phytozome v7.0 (chr-ID sc affold00002; pos 1315851 to 1316402 reverse strand)
tactctttctttcgacgatatcgaagctaatttcggtttgtgcttttttcttttgacgttctgttgggtgctgtgaaagtgcgggaaaatgcggcaattttctttttcctttaattgatattttaatggaaagtagtggttgtattcagccgagctttcgaattgaaaaagagttttttttttccctgtttggcaatgaaataagtgttcatttttgtgaaaaaatgaaataatctctatttggttgctgggaaagtgcggaaagtatagttttctattgatattatccagggaagtagtagctttgtttacctgagctttagaattgggagaaagtgattatctttcaatgaaataaatgatctttcttgcaatgatattgaaataattatggttaactttttttttaactttgttttgaatttgttgactttctgtttggtttctcagaaactgtgggaaaactgaagaaatttgaaaagtatctggtctaatggttaaatattgattatttcagctccagcgatcaggggttcgggagactgcggggta

SEQ ID NO: 77932 - DNA, 570 bp, Citrus sinensis
  Intron number 3 from transcript orange1.1g038172m (locus o range1.1g038172m.g) derived from phytozome v7.0 (chr-ID sc affold00002; pos 859405 to 859974)
tcgagaaacctggatctagtaagcttttgtgaagctttgattgagttattcataattcctagtgactacaatttggatgactattttgtgtttttagcattcatttggagaaaagaggttttgaaaatttgacattcctgtactattaagatataatatcactaaatgtgatgtgcaatgtcattcttctggcttagcaaacagaatagtagcatattatttgcaaatttaatgatttgtgtctgtttgattgttgttttttactattaattcatggttctatcctggataacaaactcttcagtatttctttgcaaatattttggtttcaaaaaattaattcgttgatgtaatttttttttccttttcggtagtcttatatttggattgtgcaatgttttgtatcaaattcgactgcaattttggagttcttataggactttattatccatgatcttgtaatattaggtgaagaatgtatttttttttgttgaaaattcttatcttaacaatatttgcttcttttcacctttagagcttcacaagaaggagacctgtgaggctgttacc

SEQ ID NO: 77933 - DNA, 636 bp, Citrus sinensis
  Intron number 3 from transcript orange1.1g019565m (locus o range1.1g019277m.g) derived from phytozome v7.0 (chr-ID sc affold00002; pos 1489776 to 1490411 reverse strand)
cttactcggttggtcgacaattacaaggtatttttcaatctaccttgacgaatatagtgatcttgaaagtggctgaattggccatatgttagtttttgttgtcgtgcatgcattttcatgactgctgtaaataagtaaataataaattaataatctgggtaaggcattgaaatatatggtaatctatgaaggctgaagtaactgttgactttagcttgtaaaaccttttcaggaaatgcaagctgctacttattatggtatacatttttcctttcttacccaagagagaagaaacttttattacttaactgtggaaatgctcaaaaataatgattaagtatcatacttgtcatgcttcgggagcatgaaaagaggtgcaactttttaaacagctcaacagtatggtattgattgtgattttgcttgtttgatcttcgaatatctctgatatgtgctctttgacttgccttgccattcatcttgtggaaaatagtgagcctgttgtagtcaacttgttgcagatgacttcatcacatagtctttgcttgtttaatagttttcatttaagtggtgaacctgactgtattctttttgtttaagtctttctgcatttcttacttttaattttacgtgcag

SEQ ID NO: 77934 - DNA, 679 bp, Citrus sinensis
  Intron number 3 from transcript orange1.1g001199m (locus o range1.1g001105m.g) derived from phytozome v7.0 (chr-ID sc affold00024; pos 253879 to 254557 reverse strand)
aagcttcgtctctttctctccacctggagttcaaggtaactaaatcttccttcagctcactcacatttcacttgtttgcttgttttttttttttcggctagattcaatcaacattttgagttttaagaacgagtcttaaatttgagaatttttttatttttttggttttctattggctcttcaatttatttcatgcttgctgtagctttcagcactgtcggtggtgttattttactgcatcatcattaatattgttaatattttttttttctcatttgctggatctgacttcaatgcattagtttttgttaaataatttttgtgtttttaattagtttctaaagtataattcaaacgtaccagtggttattcaatgagtttgctccgtaaaggtaattccaataatgcttgtatccgtgaatcctgcaaatgcatagaattgattttgtgatgagttttcttttatttttaattttttttcaaatttctcttaaatttatttccactactattggagtaatatctgcacatagtttgaaaatccttgggaacttttggtttcattatactttacataaaggaaaattgaagcattacatgatctgagtctagtttagcatttcgttgatccttattagtctattctcagtttctggtgcttctgagccagtttattgaa

SEQ ID NO: 77935 - DNA, 621 bp, Citrus sinensis
  Intron number 2 from transcript orange1.1g028246m (locus o range1.1g025852m.g) derived from phytozome v7.0 (chr-ID sc affold00002; pos 2780079 to 2780699 reverse strand)
ggcaggcctcggtatctatcactctggtgtggaaggtgagctctaactcatttggcacatgcatttgtgtttcttaaattttgtactgggattaccgtatgccctcactgtagttattgactttctaaattatgaataatttgatgcttaaaaatataatttactgtctgctaaattcttgctggcaatctcaaattgaatttcgttaatgatgttatattatatgaagtgtcgatacgcatttaacagtgcaagccaagtgctgtttttgaaagagtaaggaagagataaatttcttttctcttcttcgtaggattaatagtgcataagcaaatggaaggcgaaaaccgaagcttcatatatgaggcttaaattatggcagtgccaattacaactgtaaatttataatcaaacctgcttttaaagatacagatcattgtcctcatgatgtgggagagggaatataggtctattgtgaacagctagtaaactgatcagttagttatacagtaaacaacagttgaaacttttacatgttacatctatttctcttcatattacgctctagtttcaagtgaagtttcagattttctgatctgctgcacctgctctgtgcagtcc

SEQ ID NO: 77936 - DNA, 774 bp, Citrus sinensis
  Intron number 2 from transcript orange1.1g021324m (locus o range1.1g014261m.g) derived from phytozome v7.0 (chr-ID sc affold00002; pos 931111 to 931884 reverse strand)
ctggtttccatttgtatcttattggcacaaatcaggtcagatggtttctcttgttttcatcatttttggtatgcctaattatttttttgtggttactagtcactagtcagccactgctattgctgagtttgacaaactttatttagttctgaactgtggcaaactcctctatggtagaatttgtttgtaggagcacaaagctgtgcagataaaatcttatagctaataatgttttaaatggtacggcatgccaccgtaggaagattcaaaaacagttttcaaatgcaatcttaaaaattaatctaaatgctataaacaacaataatttcttttggttgttttctgagattctgagcacatcgtttcacataactagaaatagcattctttaacactagttttctggaattcaaatcacccccattaactacgtggtgtcaaatgtggctgataaggtggagaaactaaattttaaagagttgatcatcaatgaaatgaatcttaatatgagtagaggccagggtgagggactcaagtcttattagtgaagagaaaccaaagttaaataatgtttttatcggttgctttactttctgagtgcatttatgtcatggttggaatgatagtttttagtcagtgcagacctgcaaatatatcaacaatcttgtcctgtcaaagtttgtttcctgaatttataaatgatgattaattcatatggtcaatttctttcttggtacagctaaactaatttgctccatattttccagactacat

SEQ ID NO: 77937 - DNA, 470 bp, Citrus sinensis
  Intron number 1 from transcript orange1.1g021642m (locus o range1.1g021599m.g) derived from phytozome v7.0 (chr-ID sc affold00024; pos 1192874 to 1193343)
gggtttcttcttcttaactctctcgccctcagcaggtgcgcctctctctctctctctctctctctctctctctctctctcattcgttttaactacagttcgttcggtgctatacccaatcttctttgatcgattatctacttttattacttgatttgtttcaagattaaatatttaattatttcttcatgtttttttcggttttcagggttcgttaacagctatatgtgaaattgtttacgaggatttaattgagtctataaaagctgattgactgtgaaattatttgtacctttaattattctagaattcctgaatttttagatcagcatatgaacctatctattaggtgatataatacttgtttgagggcgttattaaattgtgaaagtggctgtgtttgtgtttgtttttgtgtgaagtggctaggtagtaattgagtatgatttgatataatttaatgcagaaaaa

SEQ ID NO: 77938 - DNA, 741 bp, Citrus sinensis
  Intron number 2 from transcript orange1.1g021642m (locus o range1.1g021599m.g) derived from phytozome v7.0 (chr-ID sc affold00024; pos 1193447 to 1194187)
ggaggtaatttgatagttctttaatttggtttttattcatgtaattttggattggagtgagtccataacgtggcagcttgtattcactgtctgtaccaaactaccaagtttaattttcttttatttttttattttttttttttttttggtgttcttccaaagagtaccttacagttcaaatttttctttgttttatgttttgttgccgttttgggctcctgtatgatagttagtgatgtgtattttcttcctaatttttgttgcactattctttacaatgtatggccaaaaaagtatatataaattggtcttctaatagggtcttttctggtcttatgtgcgtaaatttaatggtccttgacttaggttctggggtttagtggcaataagttgtgtgtggaagccaataaagcctttgccaagctctttaagtgcttgacattcaatatcatttcaatatatgtgtgagaaagctgcagccctccacgtgtcttgtgtggtttaacttgaatgatcttgttgaaggtttctgggcttttgcctaacctggaggtctatggtgagaggttgaccttggtggatttggcgagtctttctatagtgttaatgcctgtttttatcgaaatggcaacaatctcaaagtggtgtttagttcatctgtgaggggcgaagtatcaacccatcgatacttgtgtcatgatggccttactgtttctggcacctgtttacgcagaattcgcg

SEQ ID NO: 77939 - DNA, 928 bp, Citrus sinensis
  Intron number 2 from transcript orange1.1g016622m (locus o range1.1g009574m.g) derived from phytozome v7.0 (chr-ID sc affold00128; pos 61605 to 62532 reverse strand)
ctacttctgttgaaggtagtctttttccttatccaagacaaaccataaagctctttactttgttttgataagttccatatccgtgtaaaaatattacgttgttcgctgaattaaagggtatgcttgagactgaagtgatgtgctgtgctatgaattggaatcactagcagactagcattcaagtataagtgggtacccagttggtacacattatgtgccaatcggaagtgtgagtgtttacttaacactttacctactaacataccccaagtaagatatgccgctttgatgtaggacgcatagggttattttaaatttagaaattcttattaaagtcaatattatttttgatttcatatgactgttatctgataagtttgatacctttatcttctttctctttttctaagaaactgattcatgttagagcttaaaactactgtttgggctgttagctaccggcttaaggtttttaggtcaagctgtaacttaaccatgataaccaaagctagattcctagccagattgtgttggtctcagtgctggactggtggactttttgtctgagatggaggttgacagttccacattagctagtaaatggaaaatccacaggatagatgattccaactaatatgctagtcttttggatttgacaaatagacccaagggcccaataagagtatcaagttctagcacccaataagagtattaatctctaacgtgctaaactttgaaaaggctaatacgttgcattctagtcgtgtgatgatgaatttatgcttcttgtaatgttgacgtcatcatttctattctttctattagcaatttgcttcttctgacttttatcattttcattttctacacgtttccttttcctccttatctttagctggtgtttctgcagtatctactggaacagctgaga

SEQ ID NO: 77940 - DNA, 822 bp, Citrus sinensis
  Intron number 1 from transcript orange1.1g032586m (locus o range1.1g032586m.g) derived from phytozome v7.0 (chr-ID sc affold00402; pos 54060 to 54881)
aatttctgcaattgtggctgttttggttgcatcaggtacagttatttgctcctacccttttcttctttattttgtacaagtttttcttatcaagtcatatcttaaagttattcaaatattaccatcactgatgttgaattcctgggaattttataaaattgaactggctgaatttctaactgaagatgatggtagccctttatctgctcagggtctctaacatttccttttgatgaaagggagggggtggaaaaaagggagaaagattgaattctcatccataatttgttaattataacttgtaactctacatgttaattatctatttatcatcatctgttagtttcccaatggttctttggttcctgaaactttttgtttatgcataaacaaacataactctcaacctgctaatttgatttcccaccagttgggccacatatatactgaggatagtatattagtgtgatacaaactgctaggtctctctaccattccatcttttctttcctcttgctcttaattgcctgcgaatctgttgtttgctgattggttaatgcctatgtgtgttcatataaacctgccaacctacctataattaattggttaaagtttccatggatctatcattggcttgcttgttctttttcatcaaattagaccctccaaaaattctttgtatattatttaaagcttgactgtattcttgttaaaatatcttgggcacttcaactaatgtaactttatgtttttttcaacttttgttttggatatttgtgattatcaggttggatagggttcttctgtgttattttgttggct

SEQ ID NO: 77941 - DNA, 424 bp, Citrus sinensis
  Intron number 1 from transcript orange1.1g046968m (locus o range1.1g046968m.g) derived from phytozome v7.0 (chr-ID sc affold00073; pos 522888 to 523311)
aaaaggtggttattattattattattattattattattattattattattattattattatttcttcttcactttcattcgcataggtgtaatttcattagactcaaaatcaaatttaatgactcatcttcctagaagttgtcttaatttatatatgatttaacagtattattgttattattaactaactttacaataagaattataaaaatgtctcaaattaattagatgatcggtaacatggtgtgaattatatccattttacgccttacatctctgttttcctagctaattcatattggatttagcattagatttgatttatgtgtttcaagggtaattaatttgtttgtttttttttggttccttccaaaaatgaaaccaatttgaatataaaatgttgggaggactgcagagattagtt

SEQ ID NO: 77942 - DNA, 980 bp, Citrus sinensis
  Intron number 3 from transcript orange1.1g019096m (locus o range1.1g011622m.g) derived from phytozome v7.0 (chr-ID sc affold00643; pos 33520 to 34499 reverse strand)
tccaatttgtctaggtactttctgctttgcaccatctgaaacttttcttcctttcctttttggccttattcttcaacatgctctttttattattaaaaaaaaaaaaaacttagccggctctaattaattcctattcaagaggctatttgggattgctcaattcagtccaatacaatgttctcccagttatactaatgatgatatgtttgtcaatttagtaaattactaatctagtgaagtggcatccttcaacgttcggaaactggctctaacttttaaataatggttttgaaacttgcaaaagaaaactttagttaaaaagcatgaccttgaccaaattgaattgtcggagaacaatggaatagctacctcagataattgaattgaggtaacttaatatgagtgaaatactttgataaaacaattctacaaattgaattgaatgctatgatgctatcatgttggctgattcaatcatcattgctgtagtatttgagatcttgagttaaaagtgatattacctgggaggaatgcagggtgctgccttagtttaatgggttattttaattttcaaaatgtgtcaacttaagcaaagcttttattgaaacagaaaacaaagatgcccgagaaaggcaggagcattgtgccagcatataagtagaacattgataaagttgagaatcttttgggagtcttaacttttattgtacaggctaaggatataattttcattttttccctgtacagggattataaaaaaaacacgaactgtaatggaatgcctgcaccgcttttgcagggaatgcatagacaagtcaatgcgactagggtatgtgacaacattggccatattattgttaaatattctgtgttcatgcctttgtcccagctaattgtatcagtgactcaaaatttatgattctgtagattatttgttaattgaatttttgtacttaaattgacattcaactgcaggaaca

SEQ ID NO: 77943 - DNA, 454 bp, Citrus sinensis
  Intron number 1 from transcript orange1.1g021686m (locus o range1.1g019738m.g) derived from phytozome v7.0 (chr-ID sc affold00002; pos 2953082 to 2953535)
tagcagagaagcccaggttgtactccttggtgcaggttagcggtcattcctccccggttcttgatatgtttgatcatattatttattacacactgttatcagtaatgcagctcaaactagagtctgtgaggtccctaagctttcgtattatcaactgaatgaataacgatggacccacaccacaaaatagatataatccaatctaattcatggaaacatgcaaacatctaatctttcagttactaccatttgtaagaaacagctgtggtaagagactgttaataacaaattttgggtagatagcttgcatcaatgcatcacagattcatggcgtcttccaaaaaagaaaatcagtctctgcaattcaggaatagaaaactcataattatagtaaataataaattcagtagcatttacaattatcaaaagcttagcgagtcttttatctgtagga

SEQ ID NO: 77944 - DNA, 1031 bp, Citrus sinensis
  Intron number 2 from transcript orange1.1g000126m (locus o range1.1g000115m.g) derived from phytozome v7.0 (chr-ID sc affold00053; pos 322130 to 323160)
ggagggaggtagcgtctctagacttacttgttctggtattgttcatttcctactttaattcctaattaagctattagggtgttttctgtttttagaaattggaaaagtattgcttgaagtggtgagttgctgagttaaataaggtgtctttttttcagttattattaataaaaaaaagctgttgtttttggaatattatttgaagttagataactctttctgcgtttgtgggttggattcatttatgggtgataaatgattaccgagctagagttttctgtgagataatttgctgatattttagagaaattgttatttaactagcctacgaatggttcttgtggcaagtcaggctttttgatagtttagcggagttgacttttgaatttgggttttttgttaattggggttgaattttaggttctgagaatagataggtacaggtttctgttagttatcaatgctgggatatcgctgtttaactcttaactagttttagggtacatcttaccgtattctattgggttctgtcatgcaaagaatatttatggccttgctctgtgtgctctttcattggaagcatatgcagttgtgctacttttgcattttttattttttgtggatgtagtgagttaactattgattaaaattgtataatcaagatttctactcttgggtacttgacataggtgaggtgtgtggataggtgaggtgtgttccacaaatcagattcatctatacttattctgacctgcagacatgctgctgatttattgaaaatctaataaattctaattgtttactgacgttcggtggttgaagttatataatttttagctcataagtgtttgttttcatgggaaacgtgtatggctggaaattcatagagcaattgttgtggtttgtactaatcttgtagggatggtcttcaaatttggagacttggtccttgcattatttgtgaggtctatctcttgttcttataattttctctctctggttcaccatatgtatgttgtaggcgtacaccc

SEQ ID NO: 77945 - DNA, 498 bp, Citrus sinensis
  Intron number 2 from transcript orange1.1g011669m (locus o range1.1g011669m.g) derived from phytozome v7.0 (chr-ID sc affold00233; pos 43100 to 43597 reverse strand)
cctggcaatcttaaggtccgtctctctctctctctctctctctctctctcatcgctgatcaaatgttcacgtctcttctatgattttttttcttttattttcgtttttttttgtttttttgtcatcttacctgcacgttaaagattaccgctaatttcacagacacgtgtcccacagtgaagctatgtggtcccaccgatgtgtgcccgcagttaatggtttatccttgcgcttacataagcttacttaactaagttacttctgcaagcatcaagagctgtaaaaatataaaattttgttaattatctgatcatatatttcattgttctagagtttaaaaaaaaaaaaaattcgcttctaaggaatttcaaaagtggttcttgaaattttgaaaatgataggcatcactcagcacatgaaaattctagaaatttagaattcttgatttattgtgtttatgtaggtggttttctttacaaattcgggaacggaagcgaa

SEQ ID NO: 77946 - DNA, 550 bp, Citrus sinensis
  Intron number 1 from transcript orange1.1g033152m (locus o range1.1g032476m.g) derived from phytozome v7.0 (chr-ID sc affold00512; pos 98616 to 99165)
tcgaagcgaggtcagttcttctctcgtctctcttgaaactgttgttacatttgttttcattatcatttactattcgcatcatcaacttatgaattccgttttttctcattttctgtttgcttccccgataaaaaataaaaattgaacaaattcacacgcttagatctcttgctgttttaagaactgtcttaactgtttgttatataacatcgataataagatttgattttttttgtttgtttcagaataaaataatgaaatattttattttattttcagaattttttgtgtctatagtgaaaaaaatgagtaggtatttatgctagaccctgtaaaaaaagcactaaaataatattaattaaatcagaatcgatgcttttcttgttggttttactaggaaatctttttttaggatggaaaaagaaattcgttgtctttgatatgggtttgatggtccagttatttttttgtaagatttttgttaatatatgaaaatttgtgtctccttttgtttgtaggacgcggaggatcagcaggtaacaagttcagg

SEQ ID NO: 77947 - DNA, 525 bp, Citrus sinensis
  Intron number 2 from transcript orange1.1g003953m (locus o range1.1g003953m.g) derived from phytozome v7.0 (chr-ID sc affold00263; pos 21916 to 22440)
gactcctcctccgccgccggcgccgccggaaccaggttagtgttctctttttttcattttttgggatattggattctgttcttctctatcttgttgtttgctgtaatttaattagcgggaattgcttgtttgtagtgtttgattcgagaagttaggtttttttcccgccctgtatttacatttaataaatttctaagcttacccgtttagtccatttagattgtaatatgtgatgtacaaaaaatgttgttttgtttaattttaggaaactacaagtttaggttttgtcatgtccttccaataagcattagatttacattcctgatgtggtgggaattttttaaatgtagtgcttgtagctgttcatataaatgctattgtggaaacttctggcttgctaatgaacctgtagtttgttcgtttaggtttatgtgtatttttttaatcatgtttgaagcaatttaattggatcctaatcacatatgattttttttattaacagaggcaaacagtgaagcaacaaat

SEQ ID NO: 77948 - DNA, 568 bp, Citrus sinensis
  Intron number 2 from transcript orange1.1g035483m (locus o range1.1g035483m.g) derived from phytozome v7.0 (chr-ID sc affold00058; pos 591560 to 592127 reverse strand)
taggtacgtgattggcaaaaacaatagatccttttttacttctcattttgcggaagtttgcttaaaaaaaattatagcgttttcattttttgataaatttggtaaaatatcatctaccagttgatttatgttttgtgtaaacatcaaatcttggttttatttattttctttactgacataatttactccccccccaaaaaaaagttaaattgtcaattatttgtacttctttttaatgatttttgactaaataaatataagtttgatttgaaggacaattgtataaacaaacactaaaatatagacggaatggagatgaaactttcttctagcaagagttaacggtaaaatagagtatgtgagtaatgacattttgtcgaatatttcaacttttatatttgattactattcaatttcatgtaaaattatgcatatacgtgaatagttttagagttataaagaaggtggtgaagaaagaagattttagataagaataaactgatactcataataaattcaactataattttcaggattagggtgtgacagtggtacaattatcaatatt

SEQ ID NO: 77949 - DNA, 881 bp, Citrus sinensis
  Intron number 2 from transcript orange1.1g045269m (locus o range1.1g045269m.g) derived from phytozome v7.0 (chr-ID sc affold09754; pos 833 to 1713)
gtgttacagaacattcttacagatccacggctaaggtatgtattgatgcaattagtaatagaatctttttggaacagtacttaagccaatggttgttcatgacaacccctataaaactaagttttgcacacaactgacaataagaaactcataagccttgaagttttcttattcatttggtcctaaatctctctaaacctgaaactatagtgattgatgtgtgtttatgactttggaatcatagatttaagccccagcaaatgccacagaagagggaaaagaagatacaaaattgttcattagagggtttgggaaattataaggtatagcttgaagtttaaaggaccccactcccttcattctgaatggcagccgtgattcactaaaggttggcatcgctttattagcattttgcagcatctcttattctattttcgttattttctagaaaagatgagcattgtctccagtcattcatgatgaacaatatgactaacacacgtactctttttattgttgatgcttggtcaaaatcactataaagtttgagttttttgtggctatgacctatctctttacttttgctggccaattctcctagccaggagaatagttttgatcccttgccagaaatcagggaaagctgcttttattcgttccatatcagtcattttatttattgacttgtaatttccacttgtctgttacttttatgtggtatcagttcatttgtgtgaatttgtatgattagcttgcatgtgtagactattatcactttgttaacagtatttcatctaagattatttataccggatgtgtcctatgcgcatctgtcttggttgtacaattacaggttgttggtgacgttgcccttcaacttc

SEQ ID NO: 77950 - DNA, 905 bp, Citrus sinensis
  Intron number 5 from transcript orange1.1g021419m (locus o range1.1g018602m.g) derived from phytozome v7.0 (chr-ID sc affold00058; pos 409599 to 410503 reverse strand)
ccaagctggtatgataactacctagtttatattttttggaaaattttccaacatctctcttgcttgatcacctttccatgaatgcattgtattcttatggtttttcttttatggtgatcaatgatataatttattttgttttttccacttattaatgaaggggcatgccaagataagctttctttgcttaaatgcatagggagattggcttagtggttgcattcgacaatgcattttgctaaaagccctttgctctgtttaagctctagataatagtttatttgtaattttgaaaaaagtttttccttttgggatagggaagaaagccaaaactcttttcctttactgtgaagtgtaattggactgcaaataacttaagatcatatgggtcatcctgaattcatctttaatattacttttagataatagttgtcttgggtgaagggaagtacgctaaaaccttataaagatgtgttgttcagctcttttatggttatcaaggctagacaagtaattgtgtcttagttgaaatgaagaaaaagcataggtagcttttgggagggagtttgtgtctggtctgcttttgcctcttgtttctatgaactgttaggattcgtcttatttctttattgatctaaaatgtttaggggtttaaggattgtttgatatagatggatatctttcagattagaaggagagatgattaaacttgctttttcacatttcgggtttctagatatcttttgttgagatttggttcccattttcttcattttctatggacatttgacccacaatgtatctcttttctttttccgtttacctacgattttctctatttgttatcaaaactctatattttattcactccacataaaaagagaatcccgacgcagggaattcct

SEQ ID NO: 77951 - DNA, 449 bp, Citrus sinensis
  Intron number 1 from transcript orange1.1g010463m (locus o range1.1g010119m.g) derived from phytozome v7.0 (chr-ID sc affold00002; pos 2085724 to 2086172)
aactacttgcaaggattgcaagatcgtaaagagaggttcagttctttaaactttttttttttgtttctattggaatttgacgtgtgtcgtctagaatcatgtaaggccggagaactagaattcagtgcttgcggttttgttacttattatgctaatgtgagctgcatttattttatagattgatttcccatattgagagtagaatgtagatgcagttcttcatatattgatgttaaattcgtaactggtttgattgatcacttgacacttaattaaggctagaatgttaattaattgtttatctagtgataatttaagagtagcgatgcgtatctttgccttcatatgagatagagaaaaggcaaattgaatttatttgatctaattctgaaataaataataataaagctttatcaatctgagcatattttaggcgtagagcccttcaa

SEQ ID NO: 77952 - DNA, 760 bp, Citrus sinensis
  Intron number 1 from transcript orange1.1g033952m (locus o range1.1g033937m.g) derived from phytozome v7.0 (chr-ID sc affold00058; pos 326758 to 327517 reverse strand)
gctgagtgtttgtctcgtcgtccgccgcagttaggtacttttctttatctttacctgtttttttttccccccccaaatatttctttgcagttactgttgttgctattgaaataaataaatctcgtggtggaattgtttttgaaatgtctctgatgatgtttaactatattaactttcgttctactgagaaaacaattatgcggaatccatatggcgacctgaactgaggagactgtttatgtgctttgcttctttttcatttatcagtcttatttttatcgctccgtttcataaatgagactcgtgttattttgtgctttatttttcgtactttttaggctattttttgggcgatatattttgagttttatataaaattttaatgttcccgaaccagtgttgtgtttaatttaagctgtctctgatgatgattgaaaaaaaatactttcgttcttccgagatgatacatgcggaaacattttggagacctgaactgaagaggcttacatatacatgtgtgtattcccaatctggtccggtattttaaaatgtgggaaagtccggaaaagctctaaaccatggtttaaaacttaaagctcataaacgtttctctgactttctcgcactttaaaatttcgaattagaatatttctaatatatatatatatatatataagtttttgaacggaagacactcaagtgatggaacttgttctctgttgcagcattgccgcggatcccgtcattcgaaaagtagaac

SEQ ID NO: 77953 - DNA, 672 bp, Citrus sinensis
  Intron number 1 from transcript orange1.1g010796m (locus o range1.1g010760m.g) derived from phytozome v7.0 (chr-ID sc affold00071; pos 279845 to 280516)
ctcaattctcaccttaggattcggtttgtataaaggtacgtacgcagctgtcccactttttcgcagctgtagattcttttaactctattttgggtctgcaattctaagcgcttctgcgtttgtgaagtttgtttgcttaagaaaactgatgtcagtaaccttaacaaacacaaatatttatgcataaatacgattacgtaagcagataatcatccattggttgttgtatagcttcctggattcctgaagttgatcatttagtcgaaatgttgtttgtggagcaccgtcatgcaaactttttttcattctgattcactactttatgtatatatttgagctaattgtttcacccatagataaaagttactgtctagcttaattaaacttattttagtcgatccgaagtatttgtttaaacctcaaacatacaatgcgattgcactgctctagactctggtttttacatgtgttaggacagtaaaatattgattgcagcagtttcaattatgttgaagggatatagcttgcctttctgccttttccttttcttctataaactgatcaattttgaagtctctttaattctctaacatcgtagagcagtttgtttacatctttctttaaattgataattattcatacagtactgcttgattctttgtccagctttgc

SEQ ID NO: 77954 - DNA, 488 bp, Citrus sinensis
  Intron number 1 from transcript orange1.1g008837m (locus o range1.1g008837m.g) derived from phytozome v7.0 (chr-ID sc affold00002; pos 4271252 to 4271739 reverse strand)
cgatacggagaaaataccagattctgacttatccggttagtgttctgttcattgtcacgttgtttttctgttaattaacttgacgtcaacaagttcggtgaatatttaatttaacggcaatggcttatgcgttccgtgttttggtacattttagaaatttgttcttttggatctgttattcattgccgttatgacctcctgctctctctttggttgctgaatattattgtaatggctcagattttctggtattctggtattaaagttgagtctgttcgttaaaaaaaaaaaaaccaaaaagaaaaagaatcagtccgttcttcgcctccatttctgcacctgccaaacaggacactagatacagattttctgttctatttatcaattgatctcagagtgaaagtcctctaattttcctttttattcttttggcggtgttacttgactgtactttgatttgtattcgtatcgtttcagaaatcgaatta

SEQ ID NO: 77955 - DNA, 457 bp, Citrus sinensis
  Intron number 2 from transcript orange1.1g001314m (locus o range1.1g000731m.g) derived from phytozome v7.0 (chr-ID sc affold00024; pos 618137 to 618593)
aaaatccactggaggagcttgccgaaggttttgacgtacgtaaggacctaaacctatttccgttcttcacagattctttcgcaaatttttttgttcgcattcgctgcttgccagtgaagataagtaatttctgacacgctcacccgagggtgcacacattctgttgtgtgtgatgcatggcacgaatatagacatttggggcccaattgggtcctaacaagaaaatttctttagctgaaatatctgtttgtctagttcatatccgccgtttgagggattggaggtgtaattaaatgtctgcatatcatgtaccggatggtttagaatctgttgttgatggcgataggatatatgcatttatctatatatctatatatatctctgtgtgtgtttctttttctttttcactttgagtgtgttttgaaattttgtttattgaactttgttttcctttcag

SEQ ID NO: 77956 - DNA, 314 bp, Citrus sinensis
  Intron number 2 from transcript orange1.1g032127m (locus o range1.1g026701m.g) derived from phytozome v7.0 (chr-ID sc affold00024; pos 787794 to 788107 reverse strand)
aagagagtaagatacccgtcagaagattcttctcaaattcaatgtctatgctcggttggataattttttcttatgtcaaacatgctttcagaaacacccacatggattttgctttgattttgagctctcaatttaatgattaatcttacaagccttgtttctctcttatattgaactgtgcatttttggtcacttacagtgaatattttcatttcaagcataaaagatgctttaacaaacatgttttaagttttctaattctttatctcatggtctctattaattcagacaaaagcaagaggcggctgctactg

SEQ ID NO: 77957 - DNA, 558 bp, Citrus sinensis
  Intron number 1 from transcript orange1.1g018881m (locus o range1.1g012729m.g) derived from phytozome v7.0 (chr-ID sc affold00024; pos 1184999 to 1185556)
ccaaactcactttctcatcctcatctgaatccaaggttagctgaattcacagaactatcttacttcctttctgtttggttgctgaggaaatgcaagaaaagaaaagagaatttaaatcatcacgttacatgttgttttgttagctttaaattgcatgcagccatgtttgggctttgtatttttcgttttcacttgaaaaaccttgacgtcgtacgcataaacacatagcaacgtacgtacataaatgcgaactctattaaattttgatttaggatccaagctcatgttagctaaactctctcctgataagttttttatttagctcgaaaatagtgtgaggtaagtgtaattgaacaattttttcaattatttttttcatcgattctgtgaaagaaaaggaaacagcataaacatataatagatacttacgagttaacgtccattgatgaggaatgcggtgatgattgttaactgttaaatgatctcactttaggtaagttgttgcgttttatttacccgttaatttatgagatttttgtcaggtattgcattccatag

SEQ ID NO: 77958 - DNA, 494 bp, Citrus sinensis
  Intron number 2 from transcript orange1.1g018881m (locus o range1.1g012729m.g) derived from phytozome v7.0 (chr-ID sc affold00024; pos 1185619 to 1186112)
tcagtgctttcaattgggaaatctgcatacgggaggttgttatacacttctttgttgcaaatactcataagtcataattatgcctgcttataacttttatttaaattggaacatggtagcatagttctgaagctccaaatgtctgttcattgtttagttttaatttgaggtgctttcagtgtgtaatggaagttaaggaagttctcaaacaccatttttgtggttaatggggcatatcacctttttattttgttcctaggataggttgtttataattgaacaggagaaaatttaaagaagcctcgagtctgattgtttcatgattatgacaatgagtgtgtgtttgttcttcctcctttctgtgcttttgtcatctcattggcatatgctaagtcatttttcctttcttccttttctaattttatatttattattattaacgtttgaatctgaatgcagatcactgtttgcttctgagaagcttcgaactggag

SEQ ID NO: 77959 - DNA, 600 bp, Citrus sinensis
  Intron number 1 from transcript orange1.1g000362m (locus o range1.1g000298m.g) derived from phytozome v7.0 (chr-ID sc affold00002; pos 1543625 to 1544224 reverse strand)
agattgctttgacagtaagtcatgcttttaatacttcccattttttttgtttttgacttttttttttccagataacaaagagctcaaagatggtaattttgttaatgtttcggtgggggtgaaatctttgagattttgttttgtttgacatttggtgggatgctgaattttttttttttgacttttattgattttatccgattttttagatcatttatctgtatataatctgtgttttttttttcctctcttgatcgtttctgtgttctttgaatttttagctcggtacattttgagttggtaaagttagcaaatttttttttaaaaaaatttggataagctactaaactcatttgttggttgtttttttttttttttttcaattttatcttcatttaagtcggtaaaaaatttgaacttttgttgggttctgttcatttgtttatgcatgatttatcattttccttatattttgaatttgtttgtacactaatgaataaacgtgctttgatcttcatttctgagatatgagttgttaagaattgtatattgtatacaaatacaggtgctttgaagacttagtcattgatcctgagtttc

SEQ ID NO: 77960 - DNA, 938 bp, Citrus sinensis
  Intron number 1 from transcript orange1.1g032863m (locus o range1.1g032863m.g) derived from phytozome v7.0 (chr-ID sc affold00002; pos 4524935 to 4525872)
attgccagctcgagaacatcacttacactgctaaggcactctaattagctattcgtttgtttaattattgcttgtttttgacttagtatgcgattttgcgcaaaccctaaatttgatttttttatgcgatttattgatctgatgaatgtaacatctagattggtgaattttcccaggaaagtcatagtgaataagccgttattacccagtggctgctaaaccctgatgttttgggttttagggaagaatatgatttttgaaatttttgtgcagtggttgttaaaccctaatatttgggttctgggtttagtatgattctgaatttggggtttgaattatttaatgatatgacatggcataggataaaaactttgaaaagaaatttagcttgttattatgcctggcttgtcatggaatccatattctttcacagagatatttcagaataataaaactagatgaactagagatgatttgtcttctttattcactgatgattagaagtccctgaaccttttttttatgccgatgccaaatttttatgttttcttattggtttcacgtaaattattgggggcaaaaaaaaatatatgtatatatatatatttgactatgatatctgaagaggcaaaagagatagagggaggacggtagggagcacattgaaataaatagttgcttaggtcgtgcttatctttttgtcctggctaagtggcttgtgtgtaagcttgaatctaatttgatccttcaattgagtcttgtatacttttctcaaagtcgtcatcctgctctaatgattttttctttttcactattttggttgtgtactagacttttgtactgaaattatcttctatttatgtagatctttcaagcttgaatagttatttatttatttatttattttactgaatttagtcagtttctttctcaacagg

SEQ ID NO: 77961 - DNA, 651 bp, Citrus sinensis
  Intron number 3 from transcript orange1.1g003993m (locus o range1.1g003719m.g) derived from phytozome v7.0 (chr-ID sc affold00002; pos 3780139 to 3780789 reverse strand)
tgatcattcctccattccgcgtaagctacgttcaggtatgttgtttgtgaatcaagaatgataaatttttcattttatatctcaaattattttttttttaaatacagtttttttttttttaatttcctactttttctgttagttgtggggctaatagttaaagtgttaccggtttaaatatcatgttctatttagtgggtcttccgggaagtttccttttttcggttttgcttagtgatttggattttggattacgacttaagcaaaatgaagccttttttgcttttcttttctttcccccctttttttcccgtgtaagcagaattttgtttgtttttattttttaattatacttaatacactggtgttgctactttgatggtgcattgattcttttgaaataataatattgtatttgagatttttgcctcctgttgttctgaagctactttttgaagggaaatacttttaactttctatggaaaacaaaaaatgttagtttatttgaagggaaagaaaaagaatattttgaagtattaataatgtatgagaaatttggatttaactcttacagcggtgaagaagcgaaatcccgaatctatgtctccacctttaccagattcaaagaagctgaaccatacagtaggtgaa

SEQ ID NO: 77962 - DNA, 761 bp, Citrus sinensis
  Intron number 1 from transcript orange1.1g022666m (locus o range1.1g010984m.g) derived from phytozome v7.0 (chr-ID sc affold00064; pos 492272 to 493032)
gtgtcgggttaacccctgaacccggctttcatcaggtaaaaataccttgttcaattgtgatgttggaaaaataggaagtactatataaagatctgaagttattatctgagcttaacagacttgtgaaattgcttgtgatcttgttggcccttgtctctgagaataggtaaatggttgcatcaatggacatttgttgaaataatacgcaatactgaatcttttagatgtagtgtaaaatgaatctatagtttgccatgttcttgattgtattgtcacctggttgtagatactgaacttaggaggaaatgaagacttctgtgctatgtgctatgaagagatttgagatggtttctcttgtctgtttctttttgttttttctatctgaatggcacaattagtttgttgggtaaatctgattattgaccgaggaagttttgctcatgtgaacatttaccttagggtggttaccatagtgaaagagttgactttttaatgtctgatgttgattggttgacttattcgtgttagtactgttgtttttcctcagataagattttggcttttgtcagtcatgtggtttaggagtcaaacttctgagtttattttattttgccagcttgacatgcgaggggatatgtttggaatgctttctgcacatccattatcacctttgctgtctcttcatcatttggatgctatcgacccaatcttccctaatatgaacagaacacaagctctgcaacatcttttcaaagctgtga

SEQ ID NO: 77963 - DNA, 874 bp, Citrus sinensis
  Intron number 1 from transcript orange1.1g016561m (locus o range1.1g009840m.g) derived from phytozome v7.0 (chr-ID sc affold00024; pos 281320 to 282193)
gagaaaagaatacggtaagcttccattttgacccccccccaaaaaaaaaagaagaagaagagagactttatattaatttcaagtttataaatatgttattatcactaagatggcgacgttcacacaggagaatcaccaatagtctagtactgagtgtgaacatacatatgtaagctggctagatgctaaaattttgccaaataatgccaggctgtgtgatcagtaagtcaactttacttgcataaaaggtgcatggctaggtctactcgttcagtctgactgaaacagctcgccatgagatcgactacgactaatttagtcggcagattttattattttttccaatttttatttttcactaatatgtgattcttttattgcgtgtattacgatactaatagtgatatattgtgttccaaggactaataatttaaaatttaaaacatatgtataacctaacgactttctgatggtgaatgatattttattcttatgatgatagattttggtcaaatccaaaaccagttggctcaaacctggcttggccccctcaataattaaaatctagatatcctcagaaccttaattaaggtaccccaacagtttaacacaatcattgtacaattctaaaacattagttattagtagaagtttgtatctattctgaacattagttttttcaattaaaatggactcaaaatggggatgagttgttaaaagacaattattttacttgtttttctacaaatttattgggttagaatttgtgttttttaacaaaatttttgtactgttcatccgcaaatttttatttgtgatttgatttaaaggcatggcatggcatgcaggtccaatatacacgtattcaacagga

SEQ ID NO: 77964 - DNA, 749 bp, Citrus sinensis
  Intron number 1 from transcript orange1.1g019948m (locus o range1.1g019948m.g) derived from phytozome v7.0 (chr-ID sc affold00053; pos 160196 to 160944)
tcccgggtcatcgtcgagtcgcgaacgcaagaaaggttgaattatttatttattcattcgtttgagttttcggttgtttacctactactttgaaatctctgtgtaattttaagcttaatttcggtgtttttccagttgtcttcactgtaattttggtgttaaaatattctagtattataaaattaggtcatagagttcgggcctggaggagcttgaaaattcgatttcaagggtcattcacgctcatctctggatagctagcaactagcgtgatggtggttttgtagtttgatgtctgcttgggtgttgttactgtttaatttcttggataataacacagtatggaatttgttattgaactggaattagagacggtttaggagaaaattaaggactagcgtctttgttccaaccagaaaggaatatgattttaattgaattttatgctattgattcgtgttaccatgtcaaaattctgatattctgatgagagcatctttttgtcagctatgccaatttaggtttattatctattgatcacttagatgctgtttaagatagaggaatggaattagaaaactgattgttcagtacaaaaaatgtttaagatgggagcatgatgctctggattacctttagattccagaggtattgcaggagcccattaggatcatacaattgtatgttatctgccttgaatgtcctgtttttcttctgaatagcttataattttgttctgcaggtgttcc

SEQ ID NO: 77965 - DNA, 815 bp, Citrus sinensis
  Intron number 1 from transcript orange1.1g025763m (locus o range1.1g025763m.g) derived from phytozome v7.0 (chr-ID sc affold00034; pos 433925 to 434739)
tcttaactcttcagcattttcaggtatctttctttctgttttctctctaaatgcaccaattgcatttgcatgtgtcttatttcaaatttccatctgtatttcttttttctttttttaataaatcaattgatcgtccaatatgttgtgtgaactggggaagttgccttttttgcttgaattaaatgggcccatttgagattttatggttagctcagagaaattcccttgttaacttgtttgcgaagtattgaattcatgataaaacgtgacaaataaagggactgctggcttctgagttcctaatttgaaatttttgaatgctgatgatatcttttggaaattactctcgtttgaacctattttttggcaagacaaatagttaattgggtttgttcgaataatctggaaatttacaattttttttttgggggggttgggggggaagaattagtcaagagctttgaaattgaataccagtgatctagttgagtatcaatttgttcaaactgcttaaacggatttactcatcgtgtttatttttgttacccattggactatctctattttgcttagatagaagttgtttggttttttattttatttcctcaacttactgtgatttcatagtaattgtcttcaataaaattgaatttacgatgagatgttatatcctattattatctttgcatgatatgttttgtggagtcagctttgttcattgattttggttttgtcagaatactggctgtagtaattcaactttgtcttctggtggtatagaaattgagctgaacaactatttgcttctggcacac

SEQ ID NO: 77966 - DNA, 974 bp, Citrus sinensis
  Intron number 2 from transcript orange1.1g009253m (locus o range1.1g009253m.g) derived from phytozome v7.0 (chr-ID sc affold00244; pos 57717 to 58690)
agcattcgttatccagtaagcttcttcaatatttaactctttatttgattttgaaaatgttcgagcattaattaaattgaaaattttacttatctagtcattttcatgaatacattatcaaaactagccatataacataatttctactatagtagtcacatacagccaatctgtaccaaaatgcccttaaaacaatccaaccaaatctttttgacacaggcgatggttgccatcacccaaggtgtggtgtggggcgacgcctgcaagagctgggcaagagttattcaactttggtgggtgatgatctccgggcgatagtagccatcacccgcatgtcacgcgggcaatggtttccattgtccgcaagagttcctcacttcatgcggcaatggagagttgcaagttggttgggtttggttggtttgttttaaggataatttagttcaagttgactgtatgttgctattatagtaagaaattttgttatatagctaattttgacaatgattctatataagacacttaattggtaaatttctgaattaaatttgtgtaccttttttttttttaaattccttgtgttttacaagataaagggcatacatgtcgatttttacccaaaaagtctctcagcattgctgaaatgaccaaattattcctgttatattgaattttgatttcagtcattgcagtaggggcagggagctttttgaacaaatgggtaaactatgtccttatgcgagaaaagacaaaaacactgatccagatcttataatcccattggtttcttgcattttctaatgatgagatgatacaattagttattttgaattttgaagactggttttcttacttcttttaaaggcattgatcatgtcatgtgtttgggtccactagcatcgatggatcttgttaaagcattgcatttttggaatgtagctattgaaggggaattggaaactgcactttttaag

SEQ ID NO: 77967 - DNA, 336 bp, Citrus sinensis
  Intron number 1 from transcript orange1.1g032662m (locus o range1.1g032662m.g) derived from phytozome v7.0 (chr-ID sc affold00002; pos 3542116 to 3542451 reverse strand)
gaggaaaggctccgaggaagcagctcgccacaaaggtgtgtctcgctagggtttcatccttttgtctttttccctagtctgtttggttagaaggaaaattttcttagagaagtggtcggtgttcaatgttttctacgcaatttgattagaaattacttgcgggaaaatttgcatgtacgtttacaagcaaacatttctgtcttcagcctagggtttcagtaatttattgcactagttttatttcttgctgaatggtaattcttagttagatctgagaaattgattttccaattgatgtaaggctgcaagaaaatctgctccaacaactggtggagt

SEQ ID NO: 77968 - DNA, 782 bp, Citrus sinensis
  Intron number 1 from transcript orange1.1g028974m (locus o range1.1g026015m.g) derived from phytozome v7.0 (chr-ID sc affold00002; pos 2094446 to 2095227)
ctgacaaatcaggcgataaagagccttggagcctggtatggtatcatatatctcttcttcctttgatgtcctttacaagcgctaataaaatcatgaatcctgaccaagcttttatgcataatattaagaaagaccaacaattttgaatattttgtcaactttccttcgtgatatatttggtttctttgatgaactaatcgtgattgaattggggttacctgaaggaataggtaaagttgcttggtttattttcataagggttatcagattaggtcaatgacagtagtttgataacgtcaccatgttaaggtcccaaggccagtttagtattgaggtctgtcgtgggaaaaaagaaaagaaaagaaaaagttgtagtttttaaatgaaaatcggcaatgtagggtaaatgtaatttttacacaataattgcgataaaaataataatataggcttttcattatgcttagtgtggaaaaatttaactttaactttcaaattacaggaaaaatttaacttaactttcaaattacaatacgcgtttaccaaatattttaaaattacggcttctcaacgacacgtttgaatggctttaagctttgtttagaagaaagtagataaataaaaatgcaattaagtgccaaaatcgatttatgatgttaaacctttacatgtatttcttaaaagtgcttcttgctcccatgttctcagttgaaatctaccttgtttgtttaagggtttctgatcacaatgttaattgcatatcaggattcacgagtaacaga

SEQ ID NO: 77969 - DNA, 789 bp, Citrus sinensis
  Intron number 1 from transcript orange1.1g029775m (locus o range1.1g026301m.g) derived from phytozome v7.0 (chr-ID sc affold00034; pos 662178 to 662966)
aaaaaaaattctcaacttcccgattaaattctctggtgaggcaaattattcacctctactcttctttgctattgtttgtatctaaaatgatgacccttttgtgctttaaccatttcgttttatcttatgcatttgagcataattttttcggcagcagaatttctcctatacataattagttctactcgtttaaagaataaatctttggggcttcttttgctttctcgcgaataagatgttctcgggggggcaaagtcagattgctagattaatttacttgtggattctgttgtcagtgtactgagttctgcttttagtagctatgtgttattaaacttttatgctgctgatagaatgtataattatgagcgtttaactgcggtctggtttcaaagactggacacctagaagtatactactggatagaatgtataattatgtactatccatatgtaatatgttttggaataattaaaatgatgtagaatttagctgtttatgatgtaatgtacactgaggctagctactacttgttgatgccaagtttaaaactctattcctctatgtttcattttggacagtcgctactatttggttgttgatctaatttcatggaatgtaaacatttgctgtatatttgtccaatatatatgtattaaattctatctgtcaaggcatgaatgattttacttttattgctttggttaaaggtaacatttttttccctttatttcctggtttattgatttggcagagcagtcattcctgtggacaggttataattgaagc

SEQ ID NO: 77970 - DNA, 758 bp, Citrus sinensis
  Intron number 1 from transcript orange1.1g020060m (locus o range1.1g020060m.g) derived from phytozome v7.0 (chr-ID sc affold00034; pos 899046 to 899803)
tctcgctctcagactcctcggttccgtccctcccggtaccttttccactttctcttcatacccttttcgatttttctcttatttttttggtcatccttgcgtttgttcttctgtgtcctttacataaaatgaacttaagactatgattattagagcttagtgcaatgcaagttatttgtttgattagaatttgtaattttctgttgattcttatacattttaacaatttatttgtttgatcagaattttgtaattttctgttgattcttatacattttagctgtaaaaacagtgtccgtagactatgattgagttgctaaggcttcgaatccgcatttctgtagtgtagaattagcagctgcagctggcaagtgtaatgagtgggtgattggtaaaaattagctgccaaaagtgggcgtttaccaaacatgttagctaccatgccttcaaatttgagtagaagcacaatcattacaaacatgcccttagtggaattgtcgtaatttatattattttccagacaattgtacttggtggtctaatttttgttttcgtaggttcaatctatattctttgggtcccaagcaactatttatgtgtggctactttagctgcaaatttcatctttgaggatatcatgtcacatttagtaacaaaaattcatttttgtgaagttttctttttctggtgctcatgtgattgctactgcggatttgtgtacagagcaaaggaagtcacctacacaacgggcgacatat

SEQ ID NO: 77971 - DNA, 904 bp, Citrus sinensis
  Intron number 1 from transcript orange1.1g047331m (locus o range1.1g047331m.g) derived from phytozome v7.0 (chr-ID sc affold00100; pos 112221 to 113124)
tgctttgataatttacaagtacttgtggaaagaaagtagcggattcgagacagctcgtgcaaactggcacttgtgtttatgttgagggcgtactcgcaatccctcctgtgggggcgggaattaagcagaagattgagcttcgggttaagaaggtcatcgatgtgggtttggttgcggcggagtatcccttgtcaagaaaaagcacaatcttgagaatttgagggataacatttatttacgaccaaggacaaacacggtaatctccttttttttaccccttcatttatttatttatttgtttctggtgtgtaaaattatgagatacatacatgtctttttgttcttggacccctggatccatatagagaatttttacctcgatttttctgttctttaaaattgatagactttaatttactgttaggcttttgatgagtttaatttattgctagtctatgattaaatgtgattctatcggattgtaaaatgagaaaacaaaatagagttgttaatttttttagtctccactgttaagcttttgttaattcttttgattgggaattttggagttttctaggaatcatcttggagaaaagttatatgtatatagtgtaccataaattcggcagagatgcttgtcttaacccattagtgtgtaaatgacaatccagttccttgttcttgtttggtagccaatagtggattttcttggcttgtagtgatataaaatccttttaaaaaaatgttttgattttttgagttactgtgaacaatttcagtagctgcagttgcatgaatccggaatgctcttgctcattccactcattaattctttcaattgcatggctttctctacattcaaactccaattatcactaccagtggttgtggtggtgctggtgaa

SEQ ID NO: 77972 - DNA, 741 bp, Citrus sinensis
  Intron number 2 from transcript orange1.1g024709m (locus o range1.1g024709m.g) derived from phytozome v7.0 (chr-ID sc affold00022; pos 498815 to 499555 reverse strand)
gagctgcaaaaataggtaaccattctgtctttgcctccaagctatttaacttggtatgagttctatgttctttaaaatttcttctttggtcaattccaaatagccaacaatcaaacatttaagttcatgtgtaagcatcagcttctgtgacttctcagttatatctcaactgaggaaataagaaggatttcttctgaagtgtagtaatgctttcacctttatgcatagtttacagctttgtaaaatttcactttaagcttggcttgacatctgatttcatttttttccccttaactgttaaatacatgtgattttcatttgattttagttgcctgttgtacctactaattggtgttgcctttagtgttatgacaacaggcagagtttagttttggatacggtagtattatgacatataagcaaaagtagcaatgtgtaaaagacacttctgttgatactggagtcaaacttgattttttactatttgattcagtgaaatgcaacaatgttatgggcaactgtcaaaagactcacattttataattgctgaattggttgcacttctgttctaaattatgttctggttgtccttaacaatattatccgtttttcacattctaccattgatgtttaccttgttgtattaattatattacgtgaatgtttttccttgcttttgtagtaacaagtgtttttgaactttcagccaataaattgaaagcaagtgccctttttgtttac

SEQ ID NO: 77973 - DNA, 321 bp, Citrus sinensis
  Intron number 1 from transcript orange1.1g024709m (locus o range1.1g024709m.g) derived from phytozome v7.0 (chr-ID sc affold00022; pos 499985 to 500305 reverse strand)
tcctcactggtgtgagtaacttgttttatattcaagtgattagtttcttttgcaatgtgccagttgtgagaaatgttttttctctcttcttgtcatcgtgtgttacgtcttttttgtattacatcaacgatctgatataacttttctgtttaaactctatatggctacagatagctgatctatgtgtgattgttttcgtacgtttcattaatctttattcccatagcagctgaagcccgtgaaatttctatgtaattttgatgtgtacctttttctataactgcagtaatattgctgtcatagctaagatagagagtattg

SEQ ID NO: 77974 - DNA, 691 bp, Citrus sinensis
  Intron number 1 from transcript orange1.1g042685m (locus o range1.1g042685m.g) derived from phytozome v7.0 (chr-ID sc affold00002; pos 2623216 to 2623906 reverse strand)
aaaatcgttcacggtgttaaggaacgtaagtgcttttttttttaaattttccttttaatttgttatatatcttagcttactaccgaagtgaagcattgtgtacaaagataataaatttcaataaacatgtttcagttatgagcaataatacacagttatggtaatttccttaattggcctggattgtactgactatgttcaagttttgaaagaaacaagctgtagtgtagtttcattattatttactagcagcgttaagtgttcttaggtagaatactatgtcaagagcatatgttgaattgtaacttcttagtatgatattttgtgtatcagtgagttcttgcttgttagatatatatatgaaataaactcagctatggcagccttaaattttgagaatgaattcaaatagtaagattgttggaagagtgggagtgtgaatcaagcggaagtatggagaacagtttctcttgttgaaaaggataatgggcttgttggattgtaggaagttaatgctttaataattgcattcttgtgttgtataggaaacgacctgtcaactatagtacttttaatttttgaggactagttaactatagtacttttaatttttgccatctatcatgtaaaagatgttacggacatttcagtgtatgacataattttgtgaattctaacagcttgcttgaag

SEQ ID NO: 77975 - DNA, 741 bp, Citrus sinensis
  Intron number 1 from transcript orange1.1g017721m (locus o range1.1g017694m.g) derived from phytozome v7.0 (chr-ID sc affold00022; pos 670452 to 671192 reverse strand)
atttctctagctttgtcaggcagcttaacacttacgtaagtaatgctatcctcaatccctgttagtctattaattattatcaaatgaccctggaaatggcttcttcggctttactctcaatcagaatttctgaatgaaaccaaaagaatggactttgttttgttttatttttatttatttatttatttattcctaaatcatcttccaatcattcttgttgggtttgtaatcttttgaaatgcgcaagcatgtgcaagcgtgttggactgtctagaagccatccaagtggattcatttttatttaataaattatatagactgatggttcttagagcttctggaaactcacatgaaatctttttatttccaatcagtagaaagttcgctaacgcctttccatttttttatttttttttctcacttttgttaactaaatttactggagaatcagtgctcggaatttttacaattattgtcccttttttctgactgtggggccttgcttcatttcgtttgctgggcacggaatttttttccccctaattttctgccgtcatcaagtgcatgaatgtttaattaagaattactctgcgagacgatgtttaatcaaagaattaactctttatgaaatgaatggatacggaagatttacacgttcataaagtttctctgttctggcagtggatgcttagttaaaattttgcttttgttgcagggctttagaaagatcgatccagacag

SEQ ID NO: 77976 - DNA, 979 bp, Citrus sinensis
  Intron number 5 from transcript orange1.1g023301m (locus o range1.1g023301m.g) derived from phytozome v7.0 (chr-ID sc affold00073; pos 435796 to 436774)
agactgaattggggagtttgaccgagagaattaaggtatgagttttttgttgccagttttcttacatttgtgaagaagggaaaaataacataatactagatggcagtgaagactgcttacttttttgaaatcttccagagtttctttgtggaagctgacaaatccaaacaatatacctgttaaaatgtttgcttgttttttatgtgtgaatgatcatgttcaagttgaacccgtacaacccaattgcttgtgtattctggttgtgggtgcacgaattttttcaagttgattgtgcctttaactatgtgagaaatctaaaagaaacaaatgtggctcagtcatgtccttgtctcattagttttacctttttgtaaaaattaacatgagatttcagatctcttagctatctagtgtagtttatttttgggtttggataggaataggattcacttatactatcttcccttttccttctttccgccctttttcttctttgcactaattaaaacgaatcaaaacagcaaaattgggtgacctttaaatgtttatatcttcttttctcattgatcctagcaagatcattttccgttgaatgtcaagcattggtaccccaactgtcattgtaaaataaccttaacaaatcaacagtgtgagtgctttgagtaaatataatacagaaaattacctatattgattttcttcttataaattcattggaggatgatgattccaatatttctaccatccccttaaatgtgaaaagaatattttcattcctgaacagaaatcatcttttatatttggctaggataatctaaatattgaagatgatagacttaagtggatttccttgtgaatcaatatgaagctatgagacataatcagattgatgtcctttagatcagtttatatttcttcttttccgcttcttgacatcaaggtttgctttcctgttgggtacacttttggcagcatatta

SEQ ID NO: 77977 - DNA, 578 bp, Citrus sinensis
  Intron number 1 from transcript orange1.1g020092m (locus o range1.1g019109m.g) derived from phytozome v7.0 (chr-ID sc affold00002; pos 3178739 to 3179316 reverse strand)
cctctggatctcgttcattttatctaaaccctgttgttggtctctctagtccttaaatcgctcaattgcttacacctcaagctttcctcaatctactctcacaactaatttcactctcactcgattttgtcaactaactcttctttttatctatcatttcatttcggtctcttcccgctttcatttaggatcccgttttggattctatcaatatttattatgtttattgcgttgatcggtgattgtgaggcttctaattgttgatcggcttactatagcttgggatcttttgttgatttttttttttcctcaggtctggttccttttacttgatgttttagatcgtcatttttttttcctgataatttcatgattatgattttttatttcttttattttatttaaagagaggagattatttgatttttattttatagcttatttatttggcgggtagcgtttaagtggaggttactataaaatctgtttttgtatgcgactatatattgttctagaggagtatgatgaattcactaatctatctgttcaattttggataggtttaaggagtttaggag

SEQ ID NO: 77978 - DNA, 966 bp, Citrus sinensis
  Intron number 2 from transcript orange1.1g019868m (locus o range1.1g014492m.g) derived from phytozome v7.0 (chr-ID sc affold00002; pos 1412322 to 1413287 reverse strand)
aattgaaaccttatcagcctattttgccttttgaggtattttggcacggcccatttgagctttctcaacgttcttgattggtgcaatagagcgcgtggccgtgtttgaaaccattttaaaattagataggtgcaatagaccgtgtgattgtgtttgaaaccattttaatatgaggtatttagaattaaccccttttaatgttttgcttatttttgcagaaacaattcattttactgacaatgctgatacataatggttaagtgggataatttcagtaaaatttgttattttgttattcagaagtgacagtgctatgctgagtggttttgcttgtatagattttctgattggagtgaagttggtttgttacgtctggttttcttgattcaaaataggctgaatgcataagccattttgttaaattcatttcttcacttggttgtctgctatatgtttcatgatggacaactagattagtgcacttctagcctcgtgagtgtgtctcatgtaaattgataattcagttagtaaaaagatgacaaggacttgaggctagatgctttttcctttcttcttgattttgttggctgtttatgatttttttttattggttcttttgctattgcctattgggaaaattttgctaattttatagcttcgggatgcataagttgtttgctaataactgcattataccagttaacagtattagtgttaccttttatttagtagctatgttacttaattacttggttatgatttaaataataactgttatattgctaaggtaggttctaagagtgctcttgcaaatcatatcaatgattttatgcatttcaagccaatgatttggataatattgatgcgcagttcattacttcctcccagatgaattaattttctcttagatgaatggggttcctttttataggttttgtcaatccaacttggaagaaaacctgagga

SEQ ID NO: 77979 - DNA, 563 bp, Citrus sinensis
  Intron number 2 from transcript orange1.1g047483m (locus o range1.1g047483m.g) derived from phytozome v7.0 (chr-ID sc affold06452; pos 2004 to 2566)
cgccctcttgcggactctttattggcgcaggtgacaaatctttgttttgcttttgtgttcttttcttgttgattctatcatgcttctttggattaaaaggagaaaattgtctaatcaaatcacaatggtaaaaaaaccgaagtattgttttgaagtttggtggaaggtagtgttgctgcttgggtattcaaagtcccaaaatcattataccgttgaggttctaccagagaacgaagataagagtatataaactaaaagctataattacatggtcacatgattttaattgcttaggctgcatgactatacttaatgaaatgggccgataatgatcataactgacgaaaagaataaccagcatgaacattttgcaccgctgtatgatgactacaattcctgtgaagtaacaggctccatatgtggataatggattattaatagtgagttggagttagttatatacaacatcttaaatggcataccttacttttaaatcaagtaaataagttcctctgtccctcatgccttggcttaattcattttgattcttgttgcagacctct

SEQ ID NO: 77980 - DNA, 762 bp, Citrus sinensis
  Intron number 1 from transcript orange1.1g039545m (locus o range1.1g039545m.g) derived from phytozome v7.0 (chr-ID sc affold05222; pos 229 to 990)
cgggtgatcgggtcatcttctctgttctgtccaaggtgtgtgtgtgtgtcttcatgtttctgtctaatttgtttttttgctttatgattttttttttttgtgacagtaaaataggagaaattaaattgaagaaagaatatgaaaccaaattacttttctgataaaaccatcgatatcagctctgtcgcatttaattatcttgcataaaatttctctacacttgaatatatataattaataaaaaattaattggttttcaattactttgctgaaaaatgaatagggagcataataatttaaaacttcgctttgaaacttaattatgttatcttatgaggatgttagtatctttttaatgcactgaaagacttaaaaaaacaagaaaaatcttaattatgtttctacggtgaagaatccttcagttttaacatttgaaattcttcttctctgcttttgttattttttacttttaaattttaaagtgtaaatcaaatagattgaccaaaacctcaattcaatgcttgagaaatgaaactaattacaagattaatagtccatatgtatattgattgataaggatcgtagaatgtatattgaacacatacgcacatatggtccatacatatatgttgataattgcatgccatcccccatggattgccttttcttggccggtggtgttgcctttcgaaaattaacaaaattatgcacgtgtgtccttttgcaggccgtcaattcaagaattggtgtggcaacagaaag

SEQ ID NO: 77981 - DNA, 895 bp, Citrus sinensis
  Intron number 3 from transcript orange1.1g031473m (locus o range1.1g031473m.g) derived from phytozome v7.0 (chr-ID sc affold00022; pos 910127 to 911021 reverse strand)
ctcaaaaccgagtcattgtcgaggggaaaaatctggtggggaaagttgtttacgactcttgctttgttgcagttattctgtcatgttataattctgtcttggtttcttgtttccaagagaaggggaaagttgtctgcctgtgtttaagtttaaggaagcagttctcaggatagtacttgtttgaccccaacagaatcctcctatcaattttggttaaatcgttttttgaaccgttggtttttgctttcattattagactctgaatttataagagtttatattggttagaacctatgagtttatgacatcctgacactgacacacataaattatcacaatagtaactgaagatttgtgttaagtgttagcttgacttatagcatgtttgactaactatattccttgttttgatgctttgcttgtctccgtgattctagtattggtctcattatattgaaacattttattctgtgaagaaattgaacttagaccattgtgtgtttgatgcagtggcctgtacattttaaagcaaacttgtgctgattcttagagacctcgttggtttgaagttctaatctgaacattatccgcaaagtgtatgtttaatgactcaaaagcaagaaaactaaagtagaaatcaacacggtggcatcttctattaagtatgaataaagttattgtgattgtctcttaatctttctggagtctcctttgatgatttagagtttccaatgcatgcttgttcattatttgtttatgtccttgcatttaagtgtgtgttttgtcctgcctccaaaaatctaaatgaatagtttttatcttgtctagtaattcatgactccattgatatggatctgtgtgcaggtaaaaaagcatatcaagggaggagaaggtc

SEQ ID NO: 77982 - DNA, 228 bp, Citrus sinensis
  Intron number 1 from transcript orange1.1g028645m (locus o range1.1g028552m.g) derived from phytozome v7.0 (chr-ID sc affold00002; pos 4688936 to 4689163 reverse strand)
ctctattagattctttatcttcgacccttagccaggtaaaataatagaaataaacatgccgttttaattcacaagactgaaactttactatatagatcgaatctcttactagttttttcttatatgggtttttaatgtgatattttgattttttaaacatgttaaaagtttgaagaaattggtaagaaaattgctttcaggggtggctggaattggcaagcgccaggc

SEQ ID NO: 77983 - DNA, 453 bp, Citrus sinensis
  Intron number 2 from transcript orange1.1g000731m (locus o range1.1g000731m.g) derived from phytozome v7.0 (chr-ID sc affold00024; pos 618141 to 618593)
tccactggaggagcttgccgaaggttttgacgtacgtaaggacctaaacctatttccgttcttcacagattctttcgcaaatttttttgttcgcattcgctgcttgccagtgaagataagtaatttctgacacgctcacccgagggtgcacacattctgttgtgtgtgatgcatggcacgaatatagacatttggggcccaattgggtcctaacaagaaaatttctttagctgaaatatctgtttgtctagttcatatccgccgtttgagggattggaggtgtaattaaatgtctgcatatcatgtaccggatggtttagaatctgttgttgatggcgataggatatatgcatttatctatatatctatatatatctctgtgtgtgtttctttttctttttcactttgagtgtgttttgaaattttgtttattgaactttgttttcctttcag

SEQ ID NO: 77984 - DNA, 953 bp, Citrus sinensis
  Intron number 1 from transcript orange1.1g036719m (locus o range1.1g036719m.g) derived from phytozome v7.0 (chr-ID sc affold00058; pos 626172 to 627124)
ctttgctcagagagcttcaggtctttcctctttcctgttttctctttacttcttttctttgggtttcttcttcttctttcttttgaattttttctttttgatataatgatgtgttttttgagacagtttattattattattattattattattttatttttgcggtatgtatgtcaaaaaggcaaaagcattgattgttttacatttatcgtcatatcattatgggtctagcccaagtaagcctacctgtgaaatgaattaggatttcttttaggttgttaaattaaaggctctttcagaagtgatctgtagtattacgtttacccgagttttaaactttttgctcaaacttttttctttgtttctaatttttgtggttatttcttatttgtatagttgggttactataattttcttgaatttttttttataaaattctgttttactccaggcgtacctatgtggctttgttctttgttggtacacgtgttctgttatctgttttaggctttgttggtgatagtccttgctccttaggtggttgaattagcaaactgtttaattttttaaccatcattatgttgatgagttctgttgtttttaggtgggccttacagaagattagtgcataactggtagtttgattttgtgaatggtttctcccaaaatgtttaataaagtttcagttaccatttttcttataatagtcattctccactcgggtgaaaataattccacttcaatttaattagtgatttgtggtttaatggttccggaaaaatgagtgtggtctgttcagattttcatgtagtattctctactttttgtttattaaataaaatgtaattttgctgttatatcatttgattgtaagccattttattgcaaaagagcatttaatataactcatgttttaatgcctttatttatctattgtaatgagagcagcaaat

SEQ ID NO: 77985 - DNA, 568 bp, Citrus sinensis
  Intron number 1 from transcript orange1.1g019210m (locus o range1.1g017687m.g) derived from phytozome v7.0 (chr-ID sc affold00002; pos 4037605 to 4038172)
gaaaggtcccctcagacattttaggtttatgattttcccctcttttttcctgaatgtcaaatctagtataatataagtatacaataatacaaaaacgcctaacgtaacaaagttcaaagtatacaactgaaacccagcataataaattaataaaaacaaactctcataagaaaaaatcaaatccgccactttattgttaagaggaagtgtactgttcaatccaaccatagtgttattgataattttccctctactttctgataacatgcgattgcttaagtttgtggctacacttgctcacactcttcatgtataatacccgctttaattaccccttgacgtgaaaatgttaacccaaacaaaaaaaataataaataaataaataaataaattagttgtttaatctgtggttggaataagtttttctaccaaaagatttaggacataggagacaacaaaacattatgaaaactacaggaaaaaaaagtaataattcattttcctctaatcgagtttatttatttttttaatagcggaagaattgggcgtaaaagagctttcgccagca

SEQ ID NO: 77986 - DNA, 733 bp, Citrus sinensis
  Intron number 1 from transcript orange1.1g034127m (locus o range1.1g030572m.g) derived from phytozome v7.0 (chr-ID sc affold00002; pos 4732567 to 4733299 reverse strand)
tttaccgaagaaccctcgcgtcgagctatcgtctggtaaacatttcgcatttcaatttcaatttgatctcaatagctttcagtttcactatcttctcattttgctgttatcgttatactcgatctgtgtgattcggcgtgggttttttttttaattgtgtattctcagagattgatttgtagtagattaaggggattcgaggaaaccaaaataataataataataataataataaagagaaatgattattgatacagtgctaaccaggcctagcattcggtatttccattttagggtgtgtttgggattgttttgctgatgttgtcaccgcagagtagtcatttgcacttttcatcggcagtattaaaaaaaaaaaatgtatggatgtcggataaaattgatgtgcttgactatctctgaacttattgatgtaatttatggattgctcttcatgtcttgtttatatgccccccccattattgatatcttctattcttggaaattgaatttacgtgttttgttttttaaccttggatgtatttgaaatgctcatgaatgtgaggtcaactcagggtgtatgtatctctgctaaacctgactttggaacatttcttttagtgaattgctactgttcatatgctcgtcgtgcctactttcagatgactgttaatttttccatgattatcgtttttgcaacttttctgttaggctcctttttgaagccattggacct

SEQ ID NO: 77987 - DNA, 748 bp, Citrus sinensis
  Intron number 3 from transcript orange1.1g026351m (locus o range1.1g026351m.g) derived from phytozome v7.0 (chr-ID sc affold00058; pos 310118 to 310865 reverse strand)
aagtgagtaacaccgtttatcttaatagtaaatatcatttttattttttttaccgtccgagttactgctgttcaaatagtatacgtatgcattcgtacgcacactctgcttattgggaaaagttgaatcagcttctgaaacgacaacaccatgtgctggtaagataagaaagcgcggtgctgactgcttaaataagccatttgcccctgttgtttatctgctgctgtttatttatttatttgttataataccacgcaatacggcaaccgctgcttagttagtttgctagctttgcttcttcttatccaacttgggaactagagatttgtctttatgacacaaaactggatgcttatcttggacacttcctcattgaacctcgatttattcaaagcactgatgatagcacttcagatttctataaacggagggataagtcataagaggatatccttcttcaatttaaaaacaacaatattattagtagtcttgctgattaatttgatattagagaagtaaagtctgaatgctttaagcgatagtgttttattggttattctaaaaaaaaagaaaacaagtcatattggcgattgagcttcagcccactcttacaaacttggttctgcctataatttcagtatttcttcgacctagtagtattgagtgcttgggaaacagtaacgaaagatattggctgcgatttgtgaatgcaggtttgaattgggattggagaagccagatccaagaa

SEQ ID NO: 77988 - DNA, 860 bp, Citrus sinensis
  Intron number 2 from transcript orange1.1g023757m (locus o range1.1g019204m.g) derived from phytozome v7.0 (chr-ID sc affold00022; pos 1457955 to 1458814)
gacagtcacgcgtgtcaatcaactcgaggagttgggtatgtgaaggtccaattgttagtttggttttgatgggcttaaatgctcgcctgcctgcttgcagattgttagttttttgtttggtttggatgttgacacaaaagatgttctgtagacatatttacaacataattaggcaatatggatgtatttgtatttgtatttccctatgcgtaatgttaatgacttagacttgatgctatgactgaattttgtgaaaggaacatataagtctggttgtatactcgttctttctatttccacctgtgaatactgatttgttgatattgcgtgatcgaattctgataaagttgttggaatagttatccaccttgaaacatttaaaacttataccctgattggcaactgggttgattgttatgttgaaaaatgagctaggggacattagtgcaaatgtctgttgaagttcatattgcaggcgtagtgcagacaacttaggttacatgtggaacatatgttggttgccgatttagtttgttgctgatggcattgttgatgctgcaatatctttcccaaagaataaggttttctcttctttcacctttcagcacacttattggatggtggaagtaaagttttgccatccattgtttcggtctctggaagagttggctctgaaacaccaattagctgtgaatatagtgggttgagaggcgtgattgttgaggaaacggtggaacttaatttcttttttttcaattacgagcataaattgcattatttatcaacgttcctttttgtatgaatacataaacattcttgtcctttggttcttcagactgaacgacactttctgaaacaca

SEQ ID NO: 77989 - DNA, 755 bp, Citrus sinensis
  Intron number 3 from transcript orange1.1g001223m (locus o range1.1g001209m.g) derived from phytozome v7.0 (chr-ID sc affold00002; pos 3689230 to 3689984)
ctgctgattcggtatgtgctttctggattctaggtgcttctaccatatgtatcatgtggatggttttatgcttctttggttggtcaaattaacatgctgacaatgcactatctttatatagagaacttaaatctatcttataaatgttttaagttattggagactcaaagtctgacctctacgcttctttgtcatataatccaatggtaatctttggtgcttggatataattgagctttttgagatttttctatgttgatggatgtaggatatagactcatgtgaatgtgtttttattggtaatgtttgcatttctgcatgtaatatgttttcccgttttttcttgtaaagatttggtgttaagaacctagtgaatggaattctagggattcatgatgttataacttaccgtgatcttctcttatacctatttttatcgtttggtcagcttgaattgcttggttatgagttctagatttgcaaaagataatatcctaccattgcataggtatcctttagcttggaatcgtgttgttcatgcactttaatgattatgacgtgttggcttttctttttatgtttattctagatgctatccatataggttgtatggataatggatgtatcatgtatgtattcccataaaagtttcatattgcttttgtaattcaaaataataagccatgtaggagttgttgatttctcagtttttatttgtaggctgccgaagaagaacgtctacgacaggaatttga

SEQ ID NO: 77990 - DNA, 784 bp, Citrus sinensis
  Intron number 3 from transcript orange1.1g006495m (locus o range1.1g006204m.g) derived from phytozome v7.0 (chr-ID sc affold00002; pos 1071980 to 1072763 reverse strand)
atcctagtaattctttgaatacaatgttgaaatttctttatttttaggaatgatgagatttattcttgacgtctatagttggtttgtgcataatttattctgagagattctcaatttttttgttgggtgggggttcatttttttcattttcatcttcgttttggcttgaaattttccttgtgctttgaggagttctggtttttttttttttaaaagaatatcatctgaactaataaaaccagattttgctcccgtagtaatctcagcttccgctctttaagtcattggatcaggtaatgctgactatattcattaggtcaatgatttttaggtaccaaagcattacctttatcatattaattacttttatttagtggaggaattggtcaaggtcagcaaggggcctttcctctctttttatcttttgaattggattttgtaatgttcctgttttacattggaagatgcttagagccatcccattgatgggaacagcccgctgcatccagtttgataatctgtttaattttattttccaccgttgactttgtctaccacatatgtcttgttcttaatatgctattctcaatattcattttgttgatgatgtttttagagtatcaccattcccttttgttaatttttagttattcttgaccgttcttaatagaagaggctgagaatataaatttaagagttgcttcttcattccctttgctaatgcttagtccaactggtagggacttcagaaacatttccaagaataagacggcggaaatcagaa

SEQ ID NO: 77991 - DNA, 733 bp, Citrus sinensis
  Intron number 1 from transcript orange1.1g020193m (locus o range1.1g020202m.g) derived from phytozome v7.0 (chr-ID sc affold00161; pos 292484 to 293216)
tagagctgttggaggtatctcttcggtctgtttgatgcatgtcaattagcagttaaagacgattctttaacagaattgcgtgaattgaaaagaattcttttggattctctgcgtttccactcaagaatgatgtgagttcattatgagaagttaccaacttgttgaatttcaggttcccagttgtttttggcatgtcggcattgttaataaattcttgttaatatgtttgtcacgttgttctttttacagcattctgtaggttgttgccttttttccatgaaatatttagttcaatttatttattacaattaacgtagaaatagggatcttgattgttttttcaattatgtggatgaagctttggcctaggaacttctactgtagtctaaaaaatattgttttcttctatattgatgtgattaactgggtgatttctgtcaaaggtgtttgaaagttttctgttgctgaaatcttttggtttatttgttgcacgaagcatattggagaatcaatgcagtactttagtttgaatgaagcatgttggagaatcaatgtagaaacaggaatcctgattcattctttagttatgtggatgaagcttcgatctaggaacttcgtttctagtctaaataatattatcttcttctatatggatgtgattaactgggtgatttttgtcaaaggtgtttggaagttttctgtttctgaaatctttcggttttatttattgcag

SEQ ID NO: 77992 - DNA, 1012 bp, Citrus sinensis
  Intron number 1 from transcript orange1.1g006585m (locus o range1.1g006585m.g) derived from phytozome v7.0 (chr-ID sc affold00002; pos 2965177 to 2966188)
ccatctcgccaaacgacacgcctttcacgccgctggttagtgcttttcaacttttgcttcttctgtaactgaaactattttccattttatttttgttgcttgtctatactgtttcagtttttgctattttgcttgtaattgcggtaatgaaatatgcattgaggtcttgagggtgggggaattaggcttagtttagtgatacgtggttataggtttgtcttcagggagcaagaagctgtcgttttaattcagaaattcaaatttttaggtgtttcttggagcatttcttggaagattcttaggctctggaacctaacgtcgtgtgcacttttgattgaaattcaacaggtaagatgttcacttttaagagtcttttttttttcttttccctttttattttctttcatattttatattttttaacaaggaagatttaaacgttttgaaatctgtttagtgaacagtgagctagttatgtaacttgactatcactaggcttaaacttaagtgtcttcaatcttatgtgttttttgaaatttctttgttttttgaaataagtgaacaaattgttgatattgtttatctatgatattatttagctatattcaatatgtaaggtatgtaatagagttaataaacatgaaatgttcaccgggcatggataagcagttgatcggttttgtctgttttgtggcggtttatgtgagaaacttgctaacgaacttgacagaactgtggagtaacgtcgcttactagtgtaaatagcagaaattaggatggtacctttaggagatatcgttttgttgtcctttttgtcgtgactttggcatgagagatttggacagatcaggctttgaattcgtgaattttgtacgtttatcacatggattttatggacgtatgtctgctttatatagtacatatttaatgctacaataattttcgatgtctaatctgcctttaaagctaattactttttccttctataatgtgtcaggaagtaatccattgc

SEQ ID NO: 77993 - DNA, 837 bp, Citrus sinensis
  Intron number 3 from transcript orange1.1g018249m (locus o range1.1g018249m.g) derived from phytozome v7.0 (chr-ID sc affold00053; pos 406842 to 407678 reverse strand)
tacaaagtaagcaccattttttttttctaatttcattatcctcttcaacatttaacattataagttttgtttttaacgatatcctccatactctatatatactcgtgatctaggactcactgtcttcttgttttaaaataaaaccgaccctgcagcagcagcatggccactctttaatggtgaaaaggatgtttcatttttttctgttttctctgtgtttctgcctttatggtgtatgaagttcaaaaaaaataaataaacaaataaaaggaaatagtacttttctttaacgtgtttttgtgtcagtaacagtggcacccaattcgccgaaagatgaagaaatgtagagaacgcagattacaactcgctagcctcgagcttagcatgcatgaattaaaactaatccataattacctcagatttggtcaccatctaattttttctttttactagtcaattaatactcgttaaaagtgccccttgtaaattaagcaattatcgttcatcattaactgtaaagtatatataaattttgtcccttaaagtttgaattaatttataattatcatatcccattatggcatccatttgaaaaaaatacatttttatcatttaaagaactttacgggtgggatccaggtgggaaaattattgaaattttccttataggcatagtcgcatgaaaacaagcgactctagcgttcataaagaatcttttatatttatatatatatattcatttctgccttttcttacttttggtcacgaaaaggaaagttgactgttgattgattggcggcaggactgtgagctgcattcaatagccacaagattcgg

SEQ ID NO: 77994 - DNA, 347 bp, Citrus sinensis
  Intron number 1 from transcript orange1.1g013839m (locus o range1.1g013839m.g) derived from phytozome v7.0 (chr-ID sc affold00233; pos 85962 to 86308)
ctgacccttctccctacaagatcaatcttggcgtggtaatgtgtttgcttctttctcattcagttggcattatcttgacacaaaagcacagatttctgcttttgtaatgactgggtttctttcttcttttattttattgtatgcatgtttgtgtaattttatcttagtgtcttgaattcaagatgtcaatataagaaatgtaaaagtgacaactatgtatatttctcttgccaaaagtgctgttttggcgctaaaaaaacagaaaatggtaataatttattattacttgcttaatctttttcaagttttgatttttttttttaaatctcggtagggagcttataggg

SEQ ID NO: 77995 - DNA, 978 bp, Citrus sinensis
  Intron number 1 from transcript orange1.1g047760m (locus o range1.1g047760m.g) derived from phytozome v7.0 (chr-ID sc affold00002; pos 1823712 to 1824689 reverse strand)
ctttttctcgccaaagaaattcttcactcccgcaggttagcttcccctcattccatacgcataatttccatttctctttccgtgataacaaagcaactactttagtttttgttgttcgattctttcacttccaggctgatagtaataggtaatgttaatgtagatatgtactttgcccttcgaatcatttctactattaaggcgtgtaaccctagtgacaagataagtttcagctaccattcatttgtggtgtatgacaaggaaataaaagattggcctcaaacaacgtacggactgatattttttcattgttcttggtggtcgtacttgtttcgtaaaatgtgcataattgaatgcaatatgaactccgttggatagtaccgaccagaaacagtacgcgctcttttttggagcttagaactccttgtaggaccaatacacttccgcatgaagtacaagctacttagctgaaaatgaatcatatgaactagttagtagccccggtaaagatgtagttttgcttttgataagcctcttgctctgagctagaatttaggaaacgatagtaaataaaattctttggattagttttttaagtctacttcaacttctgaacttgtgtctgaacctgctagtacataaaattggagcaacttggatcttagaaactatgttccccgtcacatatatataaggtatttgccagagtcaaaagctctccatatttaattatctcatttataactcatcctaacttgcaaaaagtgtgttgtaatcaaactttttaagaattgttctaaagctgacaaggaggtcgttggaaaacacacttactgaaggttgaaattggatctcatgatcttttgatatagaggctagaaagtagagattaataactctttatgaaacaatattgctgaaatttaaaacaatatcatcttcttaagttatttgattgtgtttcctgcttcaaggtat

SEQ ID NO: 77996 - DNA, 969 bp, Citrus sinensis
  Intron number 1 from transcript orange1.1g002962m (locus o range1.1g002197m.g) derived from phytozome v7.0 (chr-ID sc affold00034; pos 509997 to 510965 reverse strand)
cggtaaataatttaaattcatttgagaatttttgaatctattttccatttttgtttaatttttaattttatgattatgcactttaaatattttgctcgatgtaatttgggagttagttttgattttttgttatagattccagaaactgggctgttttgaaatttgggaggcaatgttgttttctgggtggttgtgttctcctttaattttctgcctgataatttgagttttgatgaatttatgtattaaactattggcttattgaaaatgttttccttcaatttatgtcttgcatggtaatttatgattgcagaagcaggttatgtatgagttatttgtggcaaaaggagtctaactcattaatttgtagatttcgataatcagtttattgattttctgtcgaggtttctcaatgcttatgtatttgtctgggtgtgcgtgcactgtgcaagcatgtattgagtctagtggttgatttttctctctcaatgctactttgcgtgcatagtttccctcattgttctgcttatatttatcaacttttaaggcataggaagctgtagttaatttatatcatatatcattgggactttttgataaattccatttatatcttgggctatcagaatgaaagtcgatcatttaccttaatgttttttttcaagaagacagaccactgctggagctttgagcttgtaatctgcagtgttttgattgttgatattcctaaaattgtgtgagaatgtttgtgtgcgattgcttgatgctgcttaattccgctactgtgctgtatgtcatcttgaccttcgtagtcccgatggtttctgtttgtcgtaatccaaatcttgaatttatcatgatatttctattgtagtctgaatgtccaaaacaaaattttggtactgtgctttgaagttcaaccaagaagtctaatctttgcctttgttgaaatgctgcagtcttttgatc

SEQ ID NO: 77997 - DNA, 658 bp, Citrus sinensis
  Intron number 4 from transcript orange1.1g020330m (locus o range1.1g020305m.g) derived from phytozome v7.0 (chr-ID sc affold00002; pos 4224681 to 4225338 reverse strand)
atcatccggattcacatattgaaggttagattttaaactttagtctgtcaattaattacatgtaggtgattggttagcgaccatgaatgtttgacgcctattgaatttctgttatgggctcgccagtggaatgccgcatacttgattttttatgtgcatctggataattgtatgattttttattttttttttcaagcaggtcccacagaacatttatcttaattctggatgtgtggttattgtatcattggagcttatcaaaatcctcaagcattttatggacactgtgacatcatgtagaaacaaaactttccatgctaatttgctagattttgatgtccaatgagcatgaattgatgtcataaattatcatttttgttttcagagtacttgaggagactcaattgtgtctctcagtgccatgaaattaaaatgaagaaatgtcactttcatatactgttcaagggcccttagcataatggtccaaattctaagctgcagaattggttcagaaaaaatttcaagtcaactttaatctagcttacttgaagcaaaaccatcaggattctgacaagcaatgtaacatgctttttgtaaactgtatcattcaatcttctatgcaggccaatcttgttttacagcagttggaagaatagat

SEQ ID NO: 77998 - DNA, 746 bp, Citrus sinensis
  Intron number 3 from transcript orange1.1g013631m (locus o range1.1g013631m.g) derived from phytozome v7.0 (chr-ID sc affold00022; pos 938008 to 938753)
ttcttgctcactattgtagcataattacgagcctggtgagtaattcgtgttaatgtgatctttccccttcttgtcgctgtacctatgggtggattcactactaaatagataaaatttccctttaacttagtggtggaattttctttagttgcatatttgtgcaaactttgattaaacatcagctataatttgaaggactcttatgagttggcatttatccccaactttggaggatgaatgactaccttttttcttcatctattggctgtgaataaatggattctcaggattcctttttttttttttcccttttccaccccatttccctcatagtatcctgcatacacgcacatttattatacaaactgttacatataaactgatgctgcactattacattaccaagtagtccacattatttcttcttttcttttttattgacttttatttttattccactagtttcctaccacgttagttcatataaagtagtttttatagtgaatttttatgtactgtattactcttccatcatttgcttttcataaactctgtggtgttgtggtctcactttttgggtaggtttttccctcatataggtgaatccttcttttattttccactgtttttctctcattcttctcccgaggagtggattttgacataatgtattctaaggttatgctgcttacatcacttccacaagtaaattgctccatcattatatttacaggagttttctccag

SEQ ID NO: 77999 - DNA, 939 bp, Citrus sinensis
  Intron number 2 from transcript orange1.1g046618m (locus o range1.1g046618m.g) derived from phytozome v7.0 (chr-ID sc affold00044; pos 449858 to 450796)
aggctgcttctaatcaagtcgatttccaaaccaaggtaaaaattccctattaggacactaccgttactgatgaatgtcttaaatttaattgaagtagatgacatcggctatcaattgttttaagttagtacgttgcgttttagtagattgtggatcattataaagacataatgttagttttagcaataagcaatgggatacccttaattgcttttacgtctctactagtgattggacatgtattctgttgtttgctgatactttattccgaacgaatggttgcaaccatcatgtcctgttgaaatggaaatgagtagctagaaaataaactgtgcaaggatctgagtagctagaaagcaatgttgtagcttgttttattgatcaaattggagaattgctcatgaccatcttctttggcttagaaaatttagtttgtacatttagctttcttatgcatttagcttgcggcatgaccttaggccagtagatttttctagcatgaaagttgttttgggtcctcagtttttgctcaattttcttcaaaactgaatttaactgattgtggtatgcattgtttggaatttgcccttatcattgaacttggatatgaatacaatactatttatggcctagttttatttatttattttggagcacatgattcataattaatcttgtcagaatggcgttacagaatcatgaatttatgtaggatagagtgaaatagagtgaatttgttaaaatttcaacaggtaccttttgagctttgctttgccggtgctttactttgcttgtagtgttcatttagttgcctgaatgatgtgctacatgctagttccgcctcgttgtttgggcattggtatgacgaatgtgctcattttctgttttttctgttgatgccatatttaaaaggctgctgaagtatatagagaagtgaac

SEQ ID NO: 78000 - DNA, 987 bp, Citrus sinensis
  Intron number 1 from transcript orange1.1g001669m (locus o range1.1g001617m.g) derived from phytozome v7.0 (chr-ID sc affold00002; pos 1886276 to 1887262 reverse strand)
aggattgtgtcgctgtcgttcccgggaagcctcaggtatggatactgcaggaaagtggaaacactacagtagtaagaacgtgaatgttcagcgtgcgtgaattcactgttaaaaatgttatgaagatctggatcttaaggggctgaacagtcttgtgagaattttgagagtcttgcatttttgacttggatgagagaatttagtcatcactagttacttccgctgattggattagtttcataagttccaatcagaggcaatggctgcgcttgttgtttgttatgatgcaattcaggaaattccttgccatggcctttgtttgcttttatggaaaaacgttagaataatcagactggtccatttactctcttctgtaaagcctgtccctaagcttattggtgtaaattacgagtatccagcttttccccatagtggtcctcagctaattaagtttcaggagataaggaaaaaaaattaattaaattgaacagtgccgtaagtcttcttgctatttcttttgtagcctgttcactgcgtctgctacatttcatattggcaatcggtatattattaatctgaattacatatgcatttttgttgtttactataagatcaagctaaagcttctgcaactttctggaatcacccagcttgtccccgtctctattctcatattttgaagtatttctatgtaaatatgattaatatctatggtactttatgtatgaaagggccaaacatgatacaccattttagcacttaagctgtctcataaatattccttccgtttcatattgagtaacagaatttccacttgtgaattaagtttaacaggtttctggagtttcagtagttataagatatgaattgcagtgcttgtaattttgtgaatttttgtgtctatatgtgcttgcgtgtgtgttttctgatgctggtttttactatgctgcaggtacaaattgggacacactcctttacttttgatca

SEQ ID NO: 78001 - DNA, 980 bp, Citrus sinensis
  Intron number 1 from transcript orange1.1g032785m (locus o range1.1g031420m.g) derived from phytozome v7.0 (chr-ID sc affold00002; pos 1893154 to 1894133)
aggagcgaaaagcctggcgcaagaatcatccccacgtatttgataattttttttaaaaaatttttcctttttgtcgttttaaccgctcgctattttcagttctgtgtctctccattttatttgcacaaatgttgtgaggtttgatttcctgttatagggttttgtggccaagcctgaaaccaaagatggttccgtgaatttgatgatctgggagtgtatcattcctggcaagactggggttagtctttcttttactgagagaatgaaagttgtgatttttttttttttgggggggcggatggggggcgcctttgtataaagttttgatctcgaagtttaaacctttgaatgattcaaggtactgtgtattagttaggggttagaattaaaagttgttatatttttcatatattcttcaattatctgtcaatgttgttttttaattgtatgaccttttatacagcattgtctgatctctgccctgcggggattactgtacagttttgtagttcttatcaattttattcccctgtttcttgtcccgcggctcttttcaagctgcccagtaatttggaagatgtagtctcagtttaaatttgctggatgctccaaattccattcttgtctaaatgtctcatcaactaaaagatcgatattgttgattacgtttttgagatgcaaacaatatcagatgattagtttaacagacagagtggagatactggtgccatttgcttgtccactattgaatctcctattttagacaattttatggtgatttacaattttattttttttcccccactgaaaaaaaaaaaaaaaatggcagggcttagctttaagttttaagggatgtgtatagttactttcttgttagtacccatagtgattacaatgagatgttactgcctcatttgaatagtaccatccttcttaatcttgcagactgattgggaaggtggctactttcctcttactct

SEQ ID NO: 78002 - DNA, 457 bp, Citrus sinensis
  Intron number 1 from transcript orange1.1g005364m (locus o range1.1g004949m.g) derived from phytozome v7.0 (chr-ID sc affold00002; pos 1405265 to 1405721 reverse strand)
atcaggataaaggcaagttcgtttaaagttttgagaagaaaatcgtaaatttcgaataatgtcagcactcgttttgtttgtgcattaattaattgtattatagagctcaaatgcagtatgccaagtagttgtattagagtcggttgaaaattttagatttgattaaatgtttgttcaaagccaaaacaagttgcacattgtttgcaactagtgaaacttcaattttacttgatgatttcgggccttgcataagttgaggcttcaatgtaagatttgggcttcttgtacctcagtagcttcttgtgccactgccatgactgagagtctatatgtaactgctgtacttaattttggaagcgtagcaactaaagtctgattttcctttttgaaagctacggattattactaaataactgtttattgtttggtgcagaaataattagtcacagtgctgtgg

SEQ ID NO: 78003 - DNA, 265 bp, Citrus sinensis
  Intron number 1 from transcript orange1.1g020076m (locus o range1.1g020076m.g) derived from phytozome v7.0 (chr-ID sc affold00071; pos 468523 to 468787 reverse strand)
gtttttgaccaatcccaacttgtttctgccatcaggttcgtttcttgtcctgtttcatgaatcgtaatatcagaatctttcatctgtattctttatgtgatgccccgtgtagcacgatgcgtaatgcacaccttttgtcttttaataattagcttgtaagaacgtttgattaattgatacatttccgaaaatacgatgtcattttcttcacattttgattaacgatgcaggtattgtcacgagcattccgtccggtacgttgtta

SEQ ID NO: 78004 - DNA, 912 bp, Citrus sinensis
  Intron number 1 from transcript orange1.1g020097m (locus o range1.1g020097m.g) derived from phytozome v7.0 (chr-ID sc affold00024; pos 511831 to 512742)
tctccggcctttgcctcctcggtgccttagatcgcgtgcgtgtatttaccttcttaccactgttgaattcccacgacaatgtcggaatctttaagaaaataaaagaattaaaaaaaaacttgatttaattttttttaagtcatatatgttcggtagtaattcttaagttagtgttttatttgaatgattgcatttttgttttgatatgctttatttggttgctgataaaatgtaggaaaacttaaagatattcatttggtttaaatgttggatcttttgttgtttgcaaatgctatgattgggaatctttaagaaaaagaaagaaaatgtagctcaattttatagttattaacatcatatttgttcaatagttaatgcttgttaggatagtgattgtgtgaaatgctccctttttctttagtatgctttgattggttgctgagaaaacatgggaaagttttaaaaagaaaattgtaattttgaatgttagatcttttgttgtttgcatgtttttaacatttaatagtatgtcttgttatttcaaaatgatttcctgttaaataattggaagaattataaattttgctggtaattgtagccaataatgaaaaggataccacatttgttgtctgactggcaacccctctagtttgcctaaataacaagtagtttcttaaggaaggtttttgaattataaatatcagccaatgaaggaatgtttatgaaatatatcaaagtatcttcagagtaggtgtctaatgaatttaaagtgtcagagatcagcttgtgtttaggccataccgggggggaaaagtcagcaatgtttttctttatttttattataaccttgttgatttaagattaatcagagttctgatttgatgtacatattgatgtactaggttgacaagg

SEQ ID NO: 78005 - DNA, 442 bp, Citrus sinensis
  Intron number 1 from transcript orange1.1g016274m (locus o range1.1g016305m.g) derived from phytozome v7.0 (chr-ID sc affold00191; pos 123919 to 124360)
tatattgttctaggtaatgcatctcctgtaatctgtacttgccagagcattgatagtgaacttcttcacatttgtgttgataaaatgcgttggcatttgatcttatttgatcttttaaagaacagtttcttattattgagagtggatttgttgtaagatttaatactcttaattagtgaagacttgcaactttaagcaatgtattgatgtggttatattgactgatcttctgcttcagagttgttgaaaatatacaaaaatgacagggttttttatttggttacgttctttgtttgtattaagtgatcaatgattatcattttttaatttgtgtataaaattctggttaccttcatatcattgacagtggtttaactaaatctaattttttgtttattgatttgaagacaggattgggcaggattataggtctaattcattt

SEQ ID NO: 78006 - DNA, 658 bp, Citrus sinensis
  Intron number 1 from transcript orange1.1g011084m (locus o range1.1g006964m.g) derived from phytozome v7.0 (chr-ID sc affold00002; pos 4915994 to 4916651 reverse strand)
ctctttaccagcccgagctccctccttgccttcaggtactgaatgaatccacgcgtacttaacatctccgtcatatttttggtttagctttgttttctttctatttcaagttttagatcgatgacctctgcagaattatttttttaattctcagtgtgttgcttgttgtttttcggttgtaggctagatctgctgtcgattttggctgatttgtttgagtagatcttatatgtttgtctatttccatccaatgcagaacgggattgcacgctctcttcttgttaattttgctggagacttaactgattcttctttttttttttaatcaaattaagtttgtaattttgtgcaaactgaattcaaattcactgtctggcttaaaatcttcatcatcgatacatttttgagtttcttatgcaaaaaatgaaaataaaaaacttgttgactacattcatcctttcttcataacggtactactaattctgatttcatataaaacattttttaaaatgttattctttttcctttttaatccttctgacccgcaatcatttcatttttgggacatcgccttgttggctatttatttgttgcaaatgttttcattcaacgcgaacatgcagggaactactgtcagggtggaatttggtgattcaac

SEQ ID NO: 78007 - DNA, 824 bp, Citrus sinensis
  Intron number 1 from transcript orange1.1g041939m (locus o range1.1g041939m.g) derived from phytozome v7.0 (chr-ID sc affold00071; pos 45893 to 46716)
caagaagagaaaaaactctcagctttctgaaaccggtatgttcttttgcttagatttttctttattaagttctttgttttcttttgattataactctcgaaagtgttgatttttttttcgttttttgaagctgattgaaagctatctgggtttgttttgtttcgactttttgaatataaaaatctgttcttttttgggttttagcttgctagcattcatggtatctacattatccagcttgctattttttcttttttgagaaaaggaaaaaaaaaattcctttggtgcatttggatatggggctgaaaagcttagtatagacctcacaagtcaaagcaagtagctggaatgaaaggaattagaacaatttgattgggcaaaattatagcgaccaatgatgagaatgtcctagttgtgaaattgatttgatatgtatggtcattgaatatgttgaatgttagtgatcacggccagtgtcttatgatgaagaatttgtttatgcaataaattcactaatggttgaataacaccaaaaaatcttgtcacattcactaagggattcactaatcgttgaatagcaccaatgatttatgttaatattagctagatgccattaatttttatttatttatttatttttataaatatcttcatttttcatttttactcatgaaggaatgtactcaaatggaccagagtcatacaagtatgcactatgataatttgcaataagagccatatatgttggtttattgccaaatgacagtgctttttcctttttcttttcttattttctttatttatttatttttggtcgttttcag

SEQ ID NO: 78008 - DNA, 455 bp, Citrus sinensis
  Intron number 1 from transcript orange1.1g048488m (locus o range1.1g048488m.g) derived from phytozome v7.0 (chr-ID sc affold00348; pos 142557 to 143011 reverse strand)
tctgaaactgttacagtcaaaagtttggttaccttgtgagttatttttctatttagtttctctgtatctacttgcactatacttcctgtgacgttcattttgtatccaaaaagggaaaatcagttatgtatgaatattcatgtagccaccaagaattagtataaaaagaaatttttaaacataaaacaaaaaaaatttacgaagtaatatcataaatttgtcggccttctgtcaaaaaagggtaatagataaatataaaggtaacataaaatatcacactctgaaattttaattctcttgtgggtaccttaatttctaattatcaaacactttactatcttttagacagcaagatcaaatggagcctttatgtatagttagttttcttgtcctatgttttgcaaacacatgcgttcttaggtggttcatcccggtgaatattttggtctcactaa

SEQ ID NO: 78009 - DNA, 643 bp, Citrus sinensis
  Intron number 1 from transcript orange1.1g006282m (locus o range1.1g006282m.g) derived from phytozome v7.0 (chr-ID sc affold00002; pos 1930035 to 1930677)
gttacgttaactacgccaaccctgcaggtaatatagattttttcttttggacagatttttatttgatattgtttctactgaatggagttggctgcttgagttgattattattattagtattttaatcctttagtcgctagtagccagtttctaacaattgtaacatttcttggtaattccattttgtgaaacccaataaaatatattgtgcgtttctgttttaggacaataatcatgtggtaagatgtctgaaaatttgcgtagttactttgttgccaagggattcaatgatatcttgtcaggtttagtttgaatacacttattctctcttcttttgcttgtttctatgttggttggatgatggtacctatgtgggattggttgcacacattgtgtataactgaagcaaaattgatctcttgaataaaatattagcatctcctatgcagggagatataattttctcttccggacttttttgttgttgttgttggatatgtaatgaagttaattaattatacattgtattttgtgcccgaagagaaatgctatttgtatatttggataggagaaagatatttttctttcttttttgccattttgtaacttatgtttatgttgtcttcagcggcaagggcactgg

SEQ ID NO: 78010 - DNA, 522 bp, Citrus sinensis
  Intron number 2 from transcript orange1.1g012818m (locus o range1.1g012780m.g) derived from phytozome v7.0 (chr-ID sc affold00002; pos 4893273 to 4893794 reverse strand)
cgcttgtttcgcctctactactcaccgtcgctcaggcaagctattttttcttttcccccttccttttttttttaagaaagaaaaagaatttttcttgtttttggtttttgacgcactgaggtctgaaacaactttttttggtttttttttttgtttgtcgtgcgtctcatttataatatatatcgttcaagtgttagaaaaaatagaaaaacaggaaaaaaaaaaagtaagtttaagctctttgctttatccgaacaaaagcgagggaagtaaaggagtttttttttttttttggttagaaaaagtttaattattttcttcatcctttattaaatcaaacttaaaattagggtttggttttcaattttgaggctcatgtgtaaattactgtggtaggatgagaatttaggaacatttaatgtcgttttgtatgaattatctgcttattttggtagaattcatcgatacaacgtgtattttactctgtgtgtgtgtttagagactagaatcaatataagggaa

SEQ ID NO: 78011 - DNA, 825 bp, Citrus sinensis
  Intron number 2 from transcript orange1.1g048118m (locus o range1.1g048118m.g) derived from phytozome v7.0 (chr-ID sc affold00044; pos 438557 to 439381)
aggccaccaccgccaccaccaccataaaaaagaaggtataattatacttaaccaatgtatttttgttttgtttataccttcatagttgaattgcatttcaacatattgtcttttctttgtggattgtgtatattttgttaaataaattgatacctgggagaatgcaatattggctggtggttaaatgttcgaagagaatatggcatattaatctgagtgttcgtgataagctaatcctcgatgattttctgttgtctgccatatttttttcgacatgggaatgtgaaattgtagtttgtggtgttttgttagatgtttgcataccttcattgttggaaatgtattttgggtttttgatctggtcttttgtgttatttatgttatgttttgaagccaaacttgttaattatgtaataataaatgttcagtaacttaattttgtatagcaatctttgtttgaatttttactttttgagtgtttgtgtaggaaaatcaaacactttaaagttgttctaggaaattattgctgccttacatgtcttacatgccgtctttggaataatttactgtgttatagatcgttggttttattaatattttagtagaaagttgccattttctgtgtattttgtttcttgacttactttcagaagcttttttgtttggaatggttgatctgaaatgttgatatttgatggtagtttttggagataagctcaacattttttatctgcatgaacagttaagtatcattatttgctttctaattgtctgtaatttgattttgcagaacatttactgcacaagcttgaactggagtgttga

SEQ ID NO: 78012 - DNA, 832 bp, Citrus sinensis
  Intron number 1 from transcript orange1.1g033344m (locus o range1.1g033344m.g) derived from phytozome v7.0 (chr-ID sc affold00161; pos 31267 to 32098)
gtttcggttattaatttggattggtttattaattcaagctaattttggttacagtaaccattatttaaaaaaaaaagtaaaacaccaaatgatgaaaaatattcgcgtattaaaacaaaaaattcaaaatattcatatgcctttctaaagttccaaataatgtcttcatttacactcacacaacattatgagttgagaaagatgctgcaatgataaagcgacaggcatttacggagaaagtggtaaaatgaactgtttatttcttttctacaagggagggctctggaattcaaataataaattatattaaagatgtgccatgttctagaagagcatgcagttgtcaaccagagattttgttttaccatataaacatacaagagtcacagacatgcattgtgacttctatatttgaatctatgtcatagataggttcaatttagtaatttacaggtacacttcatgccctagcagtaaacacatcctctaacatcatacagtaccaatgaatctaaacaagaacaagataacaagataacgagaagagctactggaatcattctggtgcttgcaagttccttaaaattacatttattgctttctgttgactcatgaaactgaacacaataaattgccaattctgcacataatgacccaagtctatggctggaaacctaaacaatcatggtttcgaaattaattatgaacacatttcatacagatgacagatgagcataatttaacaaatcgtaaattagacctcgcaacagcagcattaattctatttataactgaagttaccgtgaagagctgacggtgagctgcgacaacc

SEQ ID NO: 78013 - DNA, 456 bp, Citrus sinensis
  Intron number 1 from transcript orange1.1g031250m (locus o range1.1g025518m.g) derived from phytozome v7.0 (chr-ID sc affold00024; pos 224598 to 225053 reverse strand)
atatcgtaagctttcgcagtttcagtatttgtcgctatcatttttcttaaattcataataatttgtaatttgactatcaggttatcccttcattacggcaaatgggaattggccggatgatagttcaaagaatcttaaggtttgttaattttcaatataataaatttctttctttctttctttttgtctgaaaaatgattcttttaaaattattattttggaaattttgaattaacaagcttgtggacattgagcattgatgcccttactctaattgatgctattttgaactctgccttttcatgtgttttctcatggcatatgttttccaggacacacagtaatacaaaatgtttcttcaattctttaagcctattgattactaggagattctattcatacaccttgcttgtccgtttatggtatcttagtaatttacccatttctcctcccaga

SEQ ID NO: 78014 - DNA, 662 bp, Citrus sinensis
  Intron number 1 from transcript orange1.1g021792m (locus o range1.1g021792m.g) derived from phytozome v7.0 (chr-ID sc affold00345; pos 152792 to 153453 reverse strand)
acaaaaaggtttgaatctgaacttccctgtttactttgttttattgtaataagaactctgatgaatgaagtgttgtttgttgatagttacacacaaacgaataattaaagccagcaaaacaaaataatgctattcatacaacagtgttgacaaattttaagcctcatttcttctgcatattgttctgttatgtaattccgaatatggttgtgtggcctgttttactaggttcagtacaaatagtaatttccctcttgagttgcttgtaaattgtttttggctaagttgatactgttaaattcctcaatttgcctcaggaattacgtacatggatcaatgaacaaatttgcttctgcttactttgtatttgaatatctagtactgtagcattggttctctggcctgaaatatttgaagaccttgtgttcatgggctcatgatctaatttcaaagggcatgaagaattccattatatcattatccatattatgtccaagagttatgatgttaaacagattagtgttccttgtgtgtggcatacaaatactagtccatacattcttatttttaaaccttgagccagatacactgacagttagatgacaggttttgattattgttttacaggcaatttgggcaacggtcaagggttcgtaaactcc

SEQ ID NO: 78015 - DNA, 970 bp, Citrus sinensis
  Intron number 1 from transcript orange1.1g020323m (locus o range1.1g020378m.g) derived from phytozome v7.0 (chr-ID sc affold00200; pos 175486 to 176455)
ccatcttaggttcttctttcctttttcttttgtacttttttctttgcattttatgttagatctttagaacgtaatcttttgctaaacgaatccatgatctcaaactcgtactttactattcctatcactatgagctgtctttttgatttgaaattttttctcttctgcctattgtttcttgttggtagttccaatgaacaagcttttactaatcttctgattttccatgcattgaattctatttttatgcagaagttgctatgatgctgaatggataatatgtaataatgtttaacattgttgggagactgtatcgtctacagcatgttctaaatatagagtttgcatgctgaataaaatttcagtcacacgtgctaaatgaagagacttgtttcacttttattatgtgccagctgatgtgtgtgactagattgtccaatgattaaatttagtaagtttcagtgtgaggtacattttgttttgatttcgtttcccccaattaattacttttgacatccattttattcttgtataagtctcattcatcataatagtcttttaacattttgagctgttcacatcagtagttctatagcctcgtttgataaccttctgcgattctagggaacagtttgtccttgttttttgacagctggctcactccttttgtatttatccttaatctcaatacaagttctctttgttccttgtgaaacatgaaaaataattgacggttttgcttttaattagagacaaaagtatgtaattcatgattatgcttgttaaatggaaagaaagcaacaattacatctccccctctccgtttctccctactttttagcttttacatttcctgaaaaaataaacttgctttgtcttcttgagtttgatgatttgcatattcctctgacagtttggcttcttactgctaacaggagttgcatccagaatcccatcttagagttcctgc

SEQ ID NO: 78016 - DNA, 1052 bp, Citrus sinensis
  Intron number 3 from transcript orange1.1g022540m (locus o range1.1g022496m.g) derived from phytozome v7.0 (chr-ID sc affold00120; pos 124706 to 125757 reverse strand)
cttggctgggtgaggaaggggcaattggtatgcttagcatcaagaaactccttttgaaaactgattgttattgatgtgtcttttagtaatttatacttttcattggtgcttatgcttgaagaatcttgatggttttacagttcaagatggtatgaatgctatacaatccatgttatttaattcacaaaatgaaaatggttttgatgcattcatttctgtcaaaattttttatggaattgagttttgtaagtaaaatatcacttattgaagctacaaaaactaactcactcaagtaggtttcttcagtgaccagtcttttgaattgtataacgtgtctggttccatttctgcccagtggtttctgaattctagcaggtatggaaccctatttaattagtttgaatgatatttttaatgagaatagatgtctcgatgacaaagatttaaggatgtattaaaaagattgctgtttatttgtttatttttcaaattagtgtttagctattacaaattgaaaaataaatttatattctttgatctttaatggcatttttgccccttatagccatttttaatttatctttctttttatttgaattttatttgccatctaaggccattaatcctttgatgtgtcacgtaaatctatgatgaaaacaattgggaataggcttgtatcaggtaacctaggaagactaaatcttgctattggagccttgcacaatgatacattctagtatcagattgatgctgtattttagagcaatactttccatcacattctatgatgattttcttttatcttctaggtctatagctttggactacatgaagatttaaataggaaaaatgcatccttgtgatatctgctccctttaattattctcaatttcagctgtaaataagagttacattctatttcaaacatcaagatacatgcatactaaaccctaaaccctaaatgattattcaatttgctaatctggttgacagatctttcgttgtaaaattacctaggttccagaatttgaggaggttgcattcactacccc

SEQ ID NO: 78017 - DNA, 881 bp, Citrus sinensis
  Intron number 3 from transcript orange1.1g008308m (locus o range1.1g008308m.g) derived from phytozome v7.0 (chr-ID sc affold00002; pos 1239528 to 1240408)
gtgggttgaaccagcaacgcttgtcggtatgttttggctctagcataaaatttgttctcttgattctatcagttgtaaggaaattgcagcatgttcttatatgcatgctaccaaaattatgtattagagaatgtagttgcatatggtttgatttgttacaatgtggttctcgccattcactagaatatgatcaagatgcatgggatggtgtattagataatatacttaatattgtcctagatggacattttggggcttatttttggaactttgagatttgacttcatctttttctggttgttccttatggattgtcagaataaggcatccgtcatctagattcatttattacagtaggcatatccttcgaaactagcatttaccaattaattgttgcatgaagaatgggaatgattggattttggatgcgtcttgaaatgactgctaaactatttttgctaagattttcttactgcactcgtccctattgctttcctctttctcttggtaaaattatttgggttttgatgttgaataagttatagctataagacacttcattttgtgttgcatgagcgtggttgtttattactaactttccatatgaaaatatccattaattgatctaaatattaaatttacacttggtgcatattgttacattttaaatatacattgcgaactataggcttggtgtatattgttacgttttaaaaatatattgctagttatgggaatgttgttgcaataatagggccagatacggcctgccaatgatacaaactcaacattctatgccttgataataggggtgtcaaccttcaaattacatctttgatgtgtaacttttctctgttttatttatttgtttatttacagat

SEQ ID NO: 78018 - DNA, 833 bp, Citrus sinensis
  Intron number 1 from transcript orange1.1g048767m (locus o range1.1g048767m.g) derived from phytozome v7.0 (chr-ID sc affold00071; pos 173567 to 174399 reverse strand)
aggttagttttaagtatataagtgaaaatttgtcttttttgagtatgttgactggttctcgttttgttcagtaattttatgtgattggtttctgtagattagatgctttaattagcttaggataaagtttagtgtctgattatttatttatttagtgtttttttttttttgaggcttgtcgatgtgggtttctggtgtagtcgttgggtaagtgattggcttagaaatttattatatgatgggattttgacttggacggtggaattctttgacttattgtttaatcgtgtttcagttttaaagacattctttcattgcccttgttgtaagacaatgtaacagcaatacatttaagcatggtggtgttttgcgggcttaaaaagcagggacaatggttgaagatgtaaacttctcagaaagaatgaagtagagttgtaatgttactaaaacttagtaggcttcttgtgtttttgattcccttcataaagtgaattgataagccattcattttgaattttaatagactttaggttagtgatgtataaggaatgctttgtgaagttaggagtgtgttttgacattttaaaaacttttggtttagtgatgtctataagttgcataaggtcatttctgctgcattcctgtgcttatgggcaagttgcatacttgctaagagttattagtttgtgtatgcatatttttcttttgtaattggggggcaggcattgccgtatctatgtcttgttgttgtgcttagtatttttctgtttcagtttcagtttctcactctcatctgctaaccttttcctcagctttttgaatatcaatacaat

SEQ ID NO: 78019 - DNA, 484 bp, Citrus sinensis
  Intron number 2 from transcript orange1.1g016833m (locus o range1.1g015695m.g) derived from phytozome v7.0 (chr-ID sc affold00263; pos 162106 to 162589 reverse strand)
agattctcggagtctcgaaaaaacgcttcgcaagatgatctgaagaaggcttataggaaagccgccatcaaaaaccatcctgacaagggcggtgatcctgagaaggtttatttttattttttaaaattacgattttgtgttgttatttgttttggtttttaataactcagcatgcttgtttcgatttacagtttaaattgtttgcatatgtggatcaaattgtttagatctatttttcttttaaagtttggatatttactggattgccactcgaggattaattgaaactgtgttgttaagctgaactgctggagctgggaactttgttttattggtcaaaattgaatttttgtttttttgtgccatatttggtaatttaattgatagggtgattactgaacatctgaaattttacttgttattcagtttaaagagttggcacaagcgtatgaggttctgagtgacccagagaagcgtgaaatat

SEQ ID NO: 78020 - DNA, 416 bp, Citrus sinensis
  Intron number 2 from transcript orange1.1g009166m (locus o range1.1g004474m.g) derived from phytozome v7.0 (chr-ID sc affold00002; pos 2065375 to 2065790)
agcttttgcccgccaacaagcaattaaggacactggtaatcaatagttctactcttcagctgttaatagctggaaaatttcctggcaattttttaatgaaattaacctatattccaaattgtagttataaaaccttgaaatgatgccatttaatgccttagtttaagcctacaaaaaaaatcaattctgtattaactgtagaagttttgaagaaacccaacacgcagtggctggcttggaaagcttttatcatcataaaatttaattcctttctttgcctttttgatttttctttcaaccttagtgtctgggatagttttacatttcatacatgttttgactgtgacttctctattctttttcattagcaataaaattgaatagcattagttataatgatccaggtatatctacta

SEQ ID NO: 78021 - DNA, 602 bp, Citrus sinensis
  Intron number 1 from transcript orange1.1g034848m (locus o range1.1g034854m.g) derived from phytozome v7.0 (chr-ID sc affold00002; pos 4163564 to 4164165 reverse strand)
ccagaggtgaagaaatctttgatttatttatttttcctacttcgcaatttgcacctcattttgcccagtcaactctttgcttcatacaatgattcacgttcccaagtttttaagcaatgctctgccattattttttattatgtgggtagattgttaattcatgttagcgcgactttagactgacgccacctcgtggttgttttagttgagtatcttttggcccgggaggaatgtatcaaaaaaaaaaaaaaattaaaagaaattatgatatgtgatcttgttgattcttgtttgtttatttatttatttatttttggggattattatattgggaattatggagttttactactgagtcttcagagattatcacgactttttccctgcatctgtcccaccagtatcttgttcctggtttgaaattggacaaccatggattgtcctctacagttgtctatcatgattgtttattgatctcgcatcatatgtttgaagtatgttctttcaattctcatggagaaattttgatccggttgttcataactttgaaactcatctttgtttgccgcaattctagtttcctgattacattgaatttacag

SEQ ID NO: 78022 - DNA, 707 bp, Citrus sinensis
  Intron number 1 from transcript orange1.1g014462m (locus o range1.1g007766m.g) derived from phytozome v7.0 (chr-ID sc affold00309; pos 170042 to 170748 reverse strand)
caaggatttgggtgacagtattggctttgttcctggtacttttgttgaaattttgcctgtttggtcaattaatcttattggtgtgcttcagaattttgttgggtatggcttggtttggcttattgtcaccaatagattgccttctttgcccctttgggtggtgagtgcttgccttgcctcgtctctagttttaaagcctatttgtctttctttatgttatgttatgaaggttcagaatcatgtatcgagagaagattgagaattctgatagttgagaactttttcttttttaaatcctttcttgtggttgataaacataattaattgataggtagtggcagaagcttattgataaacatattatatgaattgagtcattatgcttgagaggttattcctaatctctaattcagatcaatgagtggagcaattaattattgaagaagaagaagcatatgaattgtccatgccattatatcattgggtaatttctttgatttgttattagctactgagatgtcatttcagtacctaaagcttgtgaatatttggccggatggtcaaatgctcgaatacttgtactgggaggagctttgcagtttttgtcaaccatttcatgcaggatcatgattttttttttaatttaatttaatttactctttttttttttttttggcagctttgcattgctatatttgttggaacaa

SEQ ID NO: 78023 - DNA, 889 bp, Citrus sinensis
  Intron number 1 from transcript orange1.1g031772m (locus o range1.1g029826m.g) derived from phytozome v7.0 (chr-ID sc affold00002; pos 1624157 to 1625045)
gtctcttccaggtatcattattatagttacagtattcccttagcgtcactcaacttgctgttgcaaactcttcgcatgcctttggtatattgctatttaacttttttatgcggatttgccgagcaaactaatgtgcatttttctggtgttgagggtaagatgatttgggatgtgtttgcaactgttgcccttctgctgaactttgaaaacatagcaaattaagtgtattataagcacctgaaattttttacatataataagttaaacttgtctggccggaatcttgatctgtaattggtagcaaaggcagtgaccagaaggtagcagatctagttctggttctactggtgagaaattatggtttttactaaatttaggatgttatttgagtggcattagttagttacttgtgtggtactattgttgaggcctataatgaaagtttctgttgttgacatttagctttttgaaaagcatgactcccctaaaagtgactggtcagatatttgatttttagtttcccagtcagatctccgtatgaatccccccccccccccccttccttcttacttccatataattgttctgaatggctcatgtaagttactgtattgtttttgtgctaaattttattatttttgttaactcctacttcttctctataaataaatttcccttcaacggtagctgcctacttgtttattaagttgaggagagctggttaatatagcaagttgctattaggtgcatcacaatgtgtggcacgcactcttttctcattcatttttgatagatttcacatttaggcagcctgttgttaactataatttgatagttgcttctcctgttttcagagaattcaagaccttccttttctactgcggagatt

SEQ ID NO: 78024 - DNA, 1028 bp, Citrus sinensis
  Intron number 1 from transcript orange1.1g042542m (locus o range1.1g042542m.g) derived from phytozome v7.0 (chr-ID sc affold00351; pos 125065 to 126092 reverse strand)
tcattcttgccgtcaccattgaagataaaaaggtaatattctcaaaacttttacattaactcttgctttttgaagacgtcttgtttgataagttttcattaaaaaataaaaacaaaattatggatcttatgttatctttttggttaactgtaaatccacaaaaaaaaaagaaaaaaggatcttgataccatattatgcccatgaaaagtttaagagactgttacatcctatgcaagctctgtcctgtaatgttatatcattcgagtgataagaaacttctgtatgtcaagtagattaggcagtttttgttttcatctaaatatattagctaatctggttgaatttgtgtataatatatggtttttttggattccattagtttctcttgttctattatgttgttaaaggctccattttaacctgatgaaaatggtttgtcacttaaagtgcttacaagtttattagattcctcaagaaagataaggagtaattgcgtgcttgattttgaaattttattgccagactcttcactgagggtatcacttccatatgccccagtgtcaaattatgctagatatgacattttctcatctgtttatagcaaatattattgttataagttataaattgcattgtgaagagttatatatggcgaaatctagctaaactgttcagcaagcctttgcttcagggtgaacacttttaattgagtcgcattgacgctcattccttattgaaaagcattgtttccattttaattagcatcaattaccaactttttgtcagctttcaaactgaatgataagtttgtcatggtcttgtgtctcagaagattacttcaaacccttcttttctcttataccggcaatgggacacatcttgtttttgtagcccttatctacagtgatagtaaccccataattgctctgcaagggaagcacattttcttgtttacagatacgtgatcatctaacttcattcgccaaaatgcagaagattccacaaaattttgtgggaagatttgggga

SEQ ID NO: 78025 - DNA, 441 bp, Citrus sinensis
  Intron number 1 from transcript orange1.1g033178m (locus o range1.1g030718m.g) derived from phytozome v7.0 (chr-ID sc affold00024; pos 120646 to 121086)
gaacaagttcgtgcacttcagaaatctacagagtgtgttctcttcacatcttagatgtagcaaatgatcaaataattttccatattgctaggtcaactttcatgttattactcagggtaactagcaagttaaaacctagttcagctgttttgtcaaaaataaacatgaatagagcttcattaacaaagtaaataatgaaatggaggttttttatggttataatgtaaccataaacatatggttataatgtaaccataaagtttcaaccattcaatggggcaattgtacacgattatagcttccagatttggccttttttgactacttagccaatctacaaaatcaatccttgcatcttttcttttgggctgattttttgttggttaaactttgcttctactacttcacccaggccagagattttcaagtctaccaattcag

SEQ ID NO: 78026 - DNA, 993 bp, Citrus sinensis
  Intron number 1 from transcript orange1.1g032059m (locus o range1.1g032059m.g) derived from phytozome v7.0 (chr-ID sc affold00128; pos 89934 to 90926 reverse strand)
taggtttgggtttctaaaattcaatttttttaaaaataattaattgctgttacattgatcaattttagagtaaagttttaatttttattatcggaataaatagaaatgtattagaaagtggtaggaggggcaagtttgtagtttgacgagggaactgaaagtcttgtcgagtgaccgtagaaggaaataagaagtggaaatggcaaatcccaaatcccaattcagtggttttaattcaagcgttattcgtacatgtactggaactcttaagtgattgtggtattgatgaacgagggagtatgataacattgcattgtgaatttgatgctgttcagagaacagtacaagccagagttgagcgtaataaatcaaactcttattagatcatagcttctaacagcttcatcttcatggttctactttatagttagtaatggggagagttgttaagatcctttttagaaaatatgaatgcgtgtttatgcctgaatttggcggctgaaattgatgttgagttgcaaaataacacttttagtattaaggccaagtaaattttatcgcaataatgttgggcctggaaactctagttcttttctgcagacaatagagttttatctgctgaatgcctcatgcggagactagagagcaaccgtttcttcttacaaattttaccacgaggtccaagacatgcatattaaaaatagacttcctatttgatcttgttagaaatgccattgtccgttctgtaggatagtaagcatagtacacattaatactttttatacaccaatatgcttaatttaactcgtaattcacattctacaatgctttcgtctgcatcatgcataattttacttggttatgcataattcacattctagtcgacttgttatggtgttgatgattggacgaaaaattctatcaaactcgcgtcacgaattttcatatttctttgcagggcttgctgttagctgcaggaaataatattatatt

SEQ ID NO: 78027 - DNA, 957 bp, Citrus sinensis
  Intron number 1 from transcript orange1.1g024059m (locus o range1.1g021639m.g) derived from phytozome v7.0 (chr-ID sc affold00263; pos 104005 to 104961 reverse strand)
ttcttttctgccattggcattcaggttggtttgggttgttatattctttaatttgacgaattcataaactaattacttttgttccagtggagagattctagaatacctttgttgtattacacttactcaaagtatgtatgacatgtgcatttgttttaaaaactcatcaagtaattgatatttaatacaatagaggtattctagaatctctcttgccagtggatgtgtgtgctactgttgttaagttattgtgtttttctttctcttccaccaaccaagaaaacccttctttggggtttgctttgtacttgagttgctcttattttgcccgcttttattttttgcacttattaaaacaattgggaatagagatttctctttgtttctgtagtgatggtatgacatccagaagtgttggttgatcattggttggtatggagagaggatgttggtggtattcactgagccaagctaattttcagtggtcaataatggtcactgacagccacgtattacttgtatggttgtggacatctaggaagttgtcctgttactataattgctattgcttgatgacatgctggctaaaaaaacaagtttgctgttcttgagattgagactgttaatatgtggaatatcttttgcacctccttcagtatgtgctcagtgtaatatggacaactttgttgattttgttcttctaaaaaacatgttattgttgtaatgttatcgtatttgttaagatgattgctattacagtattgaagaaattgtagatgccccttatgttaaatgtgtatagatcatcatcactctgtcaagggttgccccccaaaaaaaaaaaaaaaaaatactgattacagaaataagggcatagcataaaaatattacaagatcccagatcaggataatttggtcagttttctgacttaatctcttatattttcaggtgggaag

SEQ ID NO: 78028 - DNA, 606 bp, Citrus sinensis
  Intron number 3 from transcript orange1.1g023346m (locus o range1.1g019818m.g) derived from phytozome v7.0 (chr-ID sc affold00024; pos 301432 to 302037)
aaaccctcaagtaagtagaaataaagctacttttatttttattgttgctctaaaataactatatttattatttgaatttatgtgcatttggatactagctaagactgggaaaacggagaactgggaaacatgaaatatgtagttgatattccataatcatttcttatatgatgctaataaattaataaattttcacaccagttgcttgaaaagaaaatatggaaaagtgattattctagttaatgattaactttacaatcagcaattagatggcattacccaacataatttctgttggttttaggatgaggtaatgaatgtgttgggggcaacgagtacctccaataatactcagagctatgcacacatccactcaagtgttggtacatccaattttgttcacaatctgttgcatttgtttcatcctcttctggtagataaagaaggtggcttgtacaaaggcacatcagttttccatatctgctcatgtgatgtgataaaatgaataaatgtctggctattgcagaaagactcacaatattaaatcataatgacatctcttactttgtagttaccttcaacaacgtgcagcaaaggataaatcat

SEQ ID NO: 78029 - DNA, 891 bp, Citrus sinensis
  Intron number 1 from transcript orange1.1g000312m (locus o range1.1g000298m.g) derived from phytozome v7.0 (chr-ID sc affold00002; pos 1543334 to 1544224 reverse strand)
agattgctttgacagtaagtcatgcttttaatacttcccattttttttgtttttgacttttttttttccagataacaaagagctcaaagatggtaattttgttaatgtttcggtgggggtgaaatctttgagattttgttttgtttgacatttggtgggatgctgaattttttttttttgacttttattgattttatccgattttttagatcatttatctgtatataatctgtgttttttttttcctctcttgatcgtttctgtgttctttgaatttttagctcggtacattttgagttggtaaagttagcaaatttttttttaaaaaaatttggataagctactaaactcatttgttggttgtttttttttttttttttcaattttatcttcatttaagtcggtaaaaaatttgaacttttgttgggttctgttcatttgtttatgcatgatttatcattttccttatattttgaatttgtttgtacactaatgaataaacgtgctttgatcttcatttctgagatatgagttgttaagaattgtatattgtatacaaatacaggtgctttgaagacttagtcattgatcctgagtttctgaggcttgtttatccttgtgagtgtgctagtgaacaaatactaaataatcgaagattactttttttccttatatatattcaagcaaatataagcattggaagtgccttttatgtctagatttggttctgaaaataatgggttgttgtaacctgtagtgtattttcatagaagtaaaccattttggattttttgtttataagttaaaatttttatggtttatgcaaattattaagctgaacaagtttggacctctctcagattccaattgctggagttatatttgtatctg

SEQ ID NO: 78030 - DNA, 615 bp, Citrus sinensis
  Intron number 4 from transcript orange1.1g033372m (locus o range1.1g032710m.g) derived from phytozome v7.0 (chr-ID sc affold01495; pos 15455 to 16069 reverse strand)
tcttcacattgatttgaaaaggtatggtaaagctgcaaaagtcagtttgttacttttttttggattttgatctaatttttattcaatggttttgatctaatttttgtttaatggtttgttatttaaattattcttgcatgaatgaaacacaaataaatggaaaaatcttcaacatgttctgctattggtttgctggcaatttatttcaaggatattaaacttatttgtaaattaatattcttttttattggcattttatcacctttctgaatgtatactgaatgctgtgttccagcatccttcaataaatttaaagttgatttcaatgtttccttatgccaaaactctggtttctctttcttctattccctcttgctgtctgcacacagatggtgtttcataaactctagaatattttgaagtcaacctaggttgaggcttatcttgctaattaaactcatacagttgcttatgcatcaatcaacatcataacaaggggtaggagcatcaaactcatgagccaatatcttaatagtagagtgctcttgcaaatttgcctgggagggcgttatttaactagcagtttggttttgtatttgtttatttcttgtgtag

SEQ ID NO: 78031 - DNA, 539 bp, Citrus sinensis
  Intron number 1 from transcript orange1.1g015862m (locus o range1.1g015862m.g) derived from phytozome v7.0 (chr-ID sc affold00564; pos 72638 to 73176)
ggtaatttcaatctttctcataggtacagtttttgccgaccttttatttcattgagttttttattttttatttttttggatttacattttctttttttgtatggattttgtatggcgttaactttattgacgaaagtgatatctgtcaaagtacatttgagcgacgagcattcacatcatgagcactcagattcttaatgttttcactagctatcgagtaaaattgttggtgtttacggaacacttttaactgtcctcctttggtaattaagcagaagcacacccggttataaacttataataccaataactgattatgagtgtatgatcttatttagtttctgtatcttctttgtatttgtttgtttggtctatgatctgactgagagtttcacacaggcagtttaagtgtagtgttgcaattttatggctttttttcttttgagttgagttattggtgatgaggctaattgaattgtgacttgcttgatttgtttatttcagagttgttttggcaccactgactagacagagatcat

SEQ ID NO: 78032 - DNA, 467 bp, Citrus sinensis
  Intron number 2 from transcript orange1.1g000885m (locus o range1.1g000885m.g) derived from phytozome v7.0 (chr-ID sc affold00002; pos 5049873 to 5050339)
ataaatcttcatttcatttacttcgctctgattctgtaagcatgcttcttcaattctctctctcttctctctctttttttccctaattacatcaagtcaattacctctcactatatgcaatgtatttgacttttattttgaaagtttctttttaaattaagactttatcaatcttaaatcgatttacaagctatagttatgtttcctaacaaggtgattttattccaaaaaattaaagttgtattcttgaagttcacttattgcttcatttgtctactaatacaaaaataaaaatatgaactactaaaaattgaaagtttctacaaatatcaagcttaatgattctttttgttagtaacactagagcataaattttggatgattctattgtgcttgctatcttccctcctcacacgtgctgtagataattttatttgatttcgatctatataatcttcaggtcaagc

SEQ ID NO: 78033 - DNA, 490 bp, Citrus sinensis
  Intron number 1 from transcript orange1.1g022160m (locus o range1.1g022160m.g) derived from phytozome v7.0 (chr-ID sc affold00512; pos 58598 to 59087 reverse strand)
cagagactggggtttcttccaggtacttcgcacactactcttcgccttaatggtcctttacctatcagtttaaatttttgggtcaatgtttctctaacacatagtatcatactatcatagccaaagtctcaaacctagtcaaatttcatgtaagagcaggggccgagctagactaaaattttagaggggccaacattttataaaagcaaatttttaagtaagaatatatttaattattgagttaagttactaagtattgaacttgcaggggccaaattataaaaactctattttaaaagataaaattataaataaacacaacatttatgtttatgtaattttcttaagagtcttacggggcattccacctcagcatgtgtgtgaacccgttaagatttataagtcaaatacaattatcgagcccttatcgatcagcttaaattttgggtcaagaaattttcctaacgttaatcaatgcagttgataaatc

SEQ ID NO: 78034 - DNA, 397 bp, Citrus sinensis
  Intron number 1 from transcript orange1.1g045573m (locus o range1.1g045573m.g) derived from phytozome v7.0 (chr-ID sc affold00058; pos 335860 to 336256)
gttttctcgttcaagaagagaatcagccgtctacagtaagttaaattcttcatctctgtttgctttctttaattttttcttagtagcagcgtagctaaacataattaatccttcgtgttagtctcattttgttaaggttgtttttattttctcatttttatatttttaatcaatattttaatattcctattggtttctgtgtaaactgcataatcgatgaaacaaatacttttggttttattcagttaatttgactattctcttacattactgcttaattttttgaaatttcgccgttatcaaacgtgcaaatgcgtgattttcaaccgagttaattcttaattattctcatttttttactgtgaactttttaatcttcagtttgtgaggttcgaag

SEQ ID NO: 78035 - DNA, 965 bp, Citrus sinensis
  Intron number 1 from transcript orange1.1g042473m (locus o range1.1g042473m.g) derived from phytozome v7.0 (chr-ID sc affold00064; pos 235369 to 236333)
cgctgagcttcgccgccctttccgctcccatcacggtaacttagcttctcctttttattatttgaacattttgttttttttttccccttgcagattctgagctgaaggttttgtattttcgttttgtttattttcttggtattttcactagtttgataactatcaagggtggtttgaatttgatggtagtttatgagaaatttgtagtaccgtagtacagtgtggcttttatcagtatgaaacatccactaacaggcttagtattgtttttcatcagaatggattttgctggttggtaattcttagaggcgatgatatggtatttctggtgatgaacattatcttggtttatcattatgcatctctgaaactgcaaagttttgttgacgcttcagcattaactattttctggatgttatattcgtccataatattgagaccgacggccagttttgtgtaaccatcgaaagctattcgtaatttgtcctttggacatatgttggcagagcatatggcaaccacttcatttgcaacttctcctcgaatgatattctgaagggatttcctggatggagaatttataactgttatctttatatcatgaggaagaaatcattgttgcttattgctcaactggaagctgtggatatgccagctaacatttatccgatgctactttgatatgtgatggataacagttcaaatatgggttttctgtttctatatttatatgagagaggttgtttctttgtccccattggcaatgacaaggatgtactgttactattcattattaagttacacgtatgtttctctgtgatggtaagattagatctgtactgtttgcgtgcctctgcttattttgactgaaaagtacactgaatacaactattttgctaaactggaaattctttgaattcccaattgcaggtgggccggactaccgagttggtgacttgagggat

SEQ ID NO: 78036 - DNA, 521 bp, Citrus sinensis
  Intron number 1 from transcript orange1.1g046287m (locus o range1.1g046287m.g) derived from phytozome v7.0 (chr-ID sc affold09978; pos 1373 to 1893)
gcaaaacgctcccgtatcatcgagctctccagaaggtattttccttccttgtttctctcatttcccatccagtttcttctccaatgactctgctagtacaagctcaattgatgagctgagggtggtgatattttgtcatttcgttgaattagaggtggttctctgtaatttttcagttttctgacgaaagtgaaggttcacaaatgtttgatcctgattgtttttttattgcactgttttacagctgtgaggtaatatgcagttgtgttcattggttcattttattaattttcatttttgcaaaacaatttttaggattgtattcgaatactgtttcctaaacacatctattcaaaagttttttaaggaaaacaaagaaagaaagaaaaagtctattgtctggcctgtttgatcttctttggttatttcatgatcacattggagttgaattttgtagtgataaaatttactggtttgaatgtgtaggttgcggcacagaggtcctgattggagtggcctgc

SEQ ID NO: 78037 - DNA, 812 bp, Citrus sinensis
  Intron number 1 from transcript orange1.1g034752m (locus o range1.1g034343m.g) derived from phytozome v7.0 (chr-ID sc affold00002; pos 648024 to 648835 reverse strand)
tccgatccgaccgtgaactccgcggcaaactccatgtatatatttcaattctcccttcttttttttccccccttttggggacaattttatatgtacgacggatgcttatacgaattcttgaacattggcacgtgggtttctggttatttgattatagggttcgtgttatgaattgggtattcaacaacttagggttttagtttagttcttattgaagaagaaaaaaaaaggctttagcataaaaattattacgattttttctttttcgaaacctaaatgtagtgtcgctggctttaatggaggcaaacaaacacacaaggatgtaaaaggttaccgtggacagagattgtttaatgtggttttagtgctaacttaggctccttataagtttaatgacattgtgaaaaagaatgaaaagtgatctattatcttatttattttcttatggaaattaaaggttacttgtgttgtcaggatgttgcttggaaattgtgtttagggttcgtgaagtgatgagtaatgaaagactgtgtttaatggaagttatagtttggaccgatttcttctaagactgattttattgctgagggcacagttgtttgagtttatttcttcgcagatatgttggtgtcaatacgaacataaatagaagaaacttgtttgaaattgtcttgagcatgaatttttggagcaaattatgtactcagtaatgtagccgctgcaattcagtaattacgcgttagttacttatctcttaatggttactagagttctgatcatttctgttggtggcgatctggttttgcaggcat

SEQ ID NO: 78038 - DNA, 750 bp, Citrus sinensis
  Intron number 1 from transcript orange1.1g016284m (locus o range1.1g016305m.g) derived from phytozome v7.0 (chr-ID sc affold00191; pos 121544 to 122293)
cacggcacgcctccgcctctttaatttatatcaaggtacgttgctccggcgagttttcctcattgactatagatgaaggtcatcaacgcgcgtgtttttattcggtccttcaatttttttttgtataaaatttaattttctttatccgttgtccgatcgtcgttttctttatcaagcttctaacttttacgattgatctttccacctctctgtctgacttgtcgtttttcgcttttgattgttgcgttttggctatcaaccgcacacgtgttttaagtttatctatacaagcacaactttcttcgagaaaatacgaaatgttttagaattcttatcatcgtcaccgcgatgatgatgacgacgacgatgatgacgattgtcgttgccatatgttgtatctcaagtggtggagaaatttttgctatgatgtggattgaatataaacttctgatcatttgaaatttgaaattttttatttttattgataatggtggattattgttattgcttgtaattgtctgattgtttttaataatctgagagaataaaaatgaacgattaagatctgtttcattgctggtagtttatcaatgcttgttggatgagggactatagcagatagcctcggtcctggtttttaatcatgattgccttagcatcaactaggtttagacggtttctattatgcaggtttaggggctctgatgatctgttcaatattgctcatgtgtcttgagttagggcacagaa

SEQ ID NO: 78039 - DNA, 633 bp, Citrus sinensis
  Intron number 3 from transcript orange1.1g011171m (locus o range1.1g011171m.g) derived from phytozome v7.0 (chr-ID sc affold00071; pos 104792 to 105424)
tggctggttggaagggttcctttttgttgaacgaggtgactatttatacaaataaactccttccttctgctctgtgtatgtgtaatatgaaaacataaatgatgcatcttctagctatagtaggcaagaactttcaacgatgtcatggcattgggatgattaaatggaattcagctgatggtaatggcattaaaaaattaattttaggtgttgttgtgtgctcagtagaaacaaccattagattgaataatctaatgcagtaaattgttattaacaaggcaatcaaatgatcacataggcaccatctttgtctgtaaactaaaaaagatttcatgattttgtgctgaatttataagtttagcagtgttattttaacaatcttactgaatgcatcttaagcttttatgtttctatggtttataggaatttacgtttctgattactttctgaatttatttaataactcagaatttgaaccttaggtgccttattaggagatccaaaacctgtattacggtttcgttcaatagtgtgtgtttaacatttgatgatctgaaactcaatgtctatctttctttttctgttatttttatgacagaacctgttacctaagtttggaaaaagcgagaatac

SEQ ID NO: 78040 - DNA, 227 bp, Citrus sinensis
  Intron number 1 from transcript orange1.1g008562m (locus o range1.1g008562m.g) derived from phytozome v7.0 (chr-ID sc affold00002; pos 4291831 to 4292057 reverse strand)
ctactgacgccgtaaaggacttattgtccaaagaggttcgtgcttatcttcgtctttatcatctttcaattgttaaagaattttttttataaacctgtcacattagttttgttagtcagtcattttacagcactattaatagtttgattagaaaattgaaaattagttgcttagggtttagtttctttatgattaacctaattttctatattgcaggtgtgcctgag

SEQ ID NO: 78041 - DNA, 731 bp, Citrus sinensis
  Intron number 2 from transcript orange1.1g017813m (locus o range1.1g009750m.g) derived from phytozome v7.0 (chr-ID sc affold00002; pos 4409235 to 4409965 reverse strand)
atactcttgctaaacatttatttcactgtacggtggtttttaatatttgattggcctcttaattttaatgcaattatttttttatttttttttggggtaagttttatctgttaattggaagttgcttaaacaaataaattttcatgtataatttagataatgtttgggattgaggtgccgtggatttcttcagctgctgcagtggttttaaatacttttttctttggggtcaaatgttattggttgatattctgagtggttgggaaacattagctgttgggtgtttgccaagcagtagcaaattaagtagaaacatatctaagttattgctttgcaactagtcaacttttgcatttaggcagaagttgcatcacttgtgatactggataatgctgtcttgacgtttgtcaattttttcgagtttggcattggttgtgaaggcacttcaacattatcgaaaattggcattagcctgtcttgaaatgttccgcataaaatacattaacaaactggtgaatgtttctgcttctgattggcagtagcttacttgttttctttattatttttcatatagatatatcagctttccttattgttatgatcactgtgtgttagtagttttccgttaagtttattgttcttaaatttggaatagcatttcatagccataactattgattcatatctcattgttttccttgacaggggagaatcaaaccattgagtgggct

SEQ ID NO: 78042 - DNA, 842 bp, Citrus sinensis
  Intron number 1 from transcript orange1.1g000836m (locus o range1.1g000681m.g) derived from phytozome v7.0 (chr-ID sc affold00233; pos 20222 to 21063 reverse strand)
gcggcccaaggacagagtaagtgctcatttttaaaccattatcgtgaaaattgttttcttttggttaattttgagtttattgatgcgccattggtcgtttcaattgatttggtacatgaactaaccttagagaaatagtatctttaaaaaaattgatttttttagggttatgtacttgttttagtcaagattttgtgctattggtttgattttttgagttctgtttaggtttctgattaagttctttttgtccaacttgattttaactcttggtgacatataccttgcttggttgcctaagtattgaagtggttcttttacatctgttaattgttacatgcctaatgtgtaagagcagcatctgttgctctgcttattatgataaattttgggaaaagtgtattttataccttaaataggtatgggtggagtgtgcaggcttgaaatttgataaagaaactgttacatgattaaaagagttaccgaagaaccgtgatctccaaaatttatttcaaaaaataatatattacgccaatgtcatacctcccaatgctgcatgagccgacgcgtagctccttgctcagaattgtatgagtcattgtctttctggttgctcaaaataaattgaagagacagggatgctgtgttgagggttgatttctatttagttttaccttttatggtctgttgctcatgttgtgtccattatttaagctactgcttttttttttggggggggggggggggaggaagatgttctgaagggatatgcttgcttgtcttgttgtagatgctatgttttgatgttattcatttgtctatttggtttaaatcttgtgcag

SEQ ID NO: 78043 - DNA, 498 bp, Citrus sinensis
  Intron number 1 from transcript orange1.1g027890m (locus o range1.1g027890m.g) derived from phytozome v7.0 (chr-ID sc affold00002; pos 2118605 to 2119102 reverse strand)
cagtggcagccttaactgcccgaggtaagcgctgaccgatgaatcactctttgaactttcaagtaaccgaaacatggcctgcccgtcttttcttcgtctctttttaactgtttctactctattctagtgtgcatagttttgtttctgttcatatccttcggcgccattcaagttttctgcttccttgaattgaataatgaatgccaatttgattacctcaaatctctatactgtcatcttattttgccatccgcgtaaatgcatactccgcactacaagttcagcgaaccattcaacatctcaaattagcttctacggtcaaattcttttaaaagaatgccgaataaatttaacattaactttcaatatttcaataattctgggatgccatttgagtgaaagattttgactttgaaaaaatgatgttatatgggtatcaaactatttttttctcattaattttatattttggtgatgcagattcttcagaaccattga

SEQ ID NO: 78044 - DNA, 375 bp, Citrus sinensis
  Intron number 1 from transcript orange1.1g001846m (locus o range1.1g001846m.g) derived from phytozome v7.0 (chr-ID sc affold00058; pos 488302 to 488676 reverse strand)
ttcattatttcaagaatccatctgcacttgatcaggtttttgctttttctttctcttttgcaattttgattatttgctctcttttcgttggggtgtttcggatttgtttgactattatgaaaactctggaagaggagtttgaatttggaaatttaccattggttttttgctttactaaaggggaaaaaaataaattcagtttgaaatttgctgctactctttcatacgctgatctagctgaatgatatagttgaagactaattaattcaacactaatttaatttatactttcttgtttcggagtaaattttgggtgatggatatgtttttaccaatgcaggacacatttgcggagtacactaccagaacagcttt

SEQ ID NO: 78045 - DNA, 827 bp, Citrus sinensis
  Intron number 4 from transcript orange1.1g021014m (locus o range1.1g015512m.g) derived from phytozome v7.0 (chr-ID sc affold00071; pos 144499 to 145325)
gtggtgtttgtaactggtggagcctggattattgggtgagtaattttgagtagctgcctcattaccttcaagatctcctaaaatttcctgtcttttctattattttatgaagtcaaatttctttcaggaacccatataggtaacagttttaggctaaaaattcagtcacactcacccttcttctctgctatagaataccaccacctaattgagaaggagagctcgagaagaaagttaaaaaatatgatggctccatatggttttgatactgattttggaagcaatttcttagtctctatatcatagttggcttgagaagccctttgaatcacagagtacttttatctgtgttgtgacattaagaagacatatggagagtccatgtgaatgaggaaacatcaaactttggtgttggatttacttttgcttgcagaaccttgacatcaaagacatgttaagaggtgtaatgtggtcattacgtccttcattttcaacaatagttttggcaattccatgtcttatcaacaatcatctttcccggttgcatttatgatgaccatttaatatatgcacaaaacccattgtctaccttgtttgttacctcactgaaggtgcggacttgttgaactttgttgtgccaactgtttctaacaatactactgtcctcattctctggctgatttgtagtatttttgttttaaattgctgtataattcctttcataatatgacttttctgttggaattattatttagttatttatttatttattttggtttcatgttggtttaggtacaaagcgtggggttctcttctaggaaggcagt

SEQ ID NO: 78046 - DNA, 399 bp, Citrus sinensis
  Intron number 1 from transcript orange1.1g027766m (locus o range1.1g027722m.g) derived from phytozome v7.0 (chr-ID sc affold00022; pos 952013 to 952411 reverse strand)
ccaccacttcactccgaactctctctcagttccaggtattttcccactcagtgtcccgagaaaatgatgattaaactttcatattatctagatttagtagttacgtttttgttttagtttttttcccaatgttttgaatgatttgttgtcttttaatagaaaagtctttttgcttgttttgatttatgcttctgtgccttgtaggaagatctggtaaactaacagtggggatttgaattgaatcgatgttcgtattagatctgttattgagaagagcatcatcaagtagttacagtactttccgtacaattccaggctcaaagttgtgacctttagcgggggatctatactgtgttgttaatattatttcatagaatcggcgggttgtttcacatagtg

SEQ ID NO: 78047 - DNA, 509 bp, Citrus sinensis
  Intron number 2 from transcript orange1.1g035704m (locus o range1.1g035704m.g) derived from phytozome v7.0 (chr-ID sc affold00002; pos 3510042 to 3510550 reverse strand)
tttcagtatttcttgattttaagcgtagaaataaggtatgtaatctttgcatagcttttaactttaatgttatttatttattttaattttatcattatgtcttaacatgtagttccaatgatacctattattttaaagttcaaccataataaaggttccttctggcttgatcaacttcagtggatctgtttatatgtttgacttgtagattaacacttttaatagaaaatatatatgacttgttgtcttgagtgtcttttgttattgttcttttcttacttttcctaaaaccttgtcaggattataactgctacttccatgaaagaaacacatccagttctgtaattttttaatttgtcgcactatcttctctcttttttactggggatttcttctaggcaaatagtgcctaaatggtaatctgcaagctctgtatcttgatcaaacttttatttcttggatgcctttgtgcagattcgttcctttgtggacaagttaattgagaggca

SEQ ID NO: 78048 - DNA, 842 bp, Citrus sinensis
  Intron number 1 from transcript orange1.1g027902m (locus o range1.1g021792m.g) derived from phytozome v7.0 (chr-ID sc affold00345; pos 154000 to 154841 reverse strand)
ggtttttcagaaaatatttaagagagaaaataaaggtaagcccaagattcttgaaatattaacgtttactttttttctttttttcctttttctttcatgagaggtttagtttttggcctctgggttatttcattgtaaagtttccattgttaagttttgttctttttgggagaattttgtttttgttcattttgtcttttgttaaaaaggtaaatctcatccttattgttaagctccactgttgtattaattatagaatttttgctttaaatatttccgtttttgtttttcccggcaagaaacggacgtgtcctccttttggtgtgataagataataagtcatttgttgagtgaaagagaaagaaaatgcatttctcgagactcatgattcatgttgtttgctttgtgagaaaatgaaattgtcgtttttctttagattcctcagctttgtgagtgctaggaggaaaatgaaaagtcaatgaccatatgttaaatgaattaaaaggattaaagggttttagacattcttagcaaatgaaattgggatttttgttatttctattcaatagctgtactaaagattgttcttctttctatcattgaatagatgttgtttactcatgggatctgattttcatatcttttgagtttctgctaaattctagaactttttcttattgcaaagtgttgtagctataaggtgggttaggatgatggcagaagagtgatactaagcaaccaaatggaggaaaatgatgggttctctaattttccataatacccagatgaaagcttgcaatatggatattagtatgacactctagcaaaccttttagttcatc

SEQ ID NO: 78049 - DNA, 770 bp, Citrus sinensis
  Intron number 1 from transcript orange1.1g029650m (locus o range1.1g029650m.g) derived from phytozome v7.0 (chr-ID sc affold00643; pos 44374 to 45143 reverse strand)
tagcaggtttcaattacccctacgctctgtttcttgtcattttcacttgactctatatataggcaagaattgttcatgttccagtgattgttattttcaatttccaatccttgtattttgtgtatgaggtgaagttttaagatgaaagagactgaggtaggagataatagttttgggaaccaaggaaagtgcttgctatagattaggttgttgccgtttgttatcttttctgtcttttatgcatcttaagatttttggataatactcctaatacatcttcagacccaaaaaaactctctcctcacatgattagcttatactgaaggcagtaacttaatctttagttagtaaattgatgagtttgatagtatgtttgaattgagtgattctacccatatgcaattattcttaatggtgtcttttagtgtttacagcacgatgattccgtgatcttgtttaatctggtcatgtgtgatttggattttagtgtatgtgtcttctgtgcaagttgaaatttttattataatgtataattggaatcaatccaattttgcgcagctagctttataattccactattagataccttttaaatcttttccaaaaaggaaaaaaaagaaaaaacaacattgtataaggtcacatttgcttgttgcttaacattgttatgctgcttctgatatctttctcccggaccatcaagaaacaagtagtggaactttatttgttgctctgattattatgattgggaatgttgtggagcagattcc

SEQ ID NO: 78050 - DNA, 492 bp, Citrus sinensis
  Intron number 1 from transcript orange1.1g032255m (locus o range1.1g032255m.g) derived from phytozome v7.0 (chr-ID sc affold00351; pos 30939 to 31430)
cagaatttgcttcggcctcagtctcagcttccaaggtagcagttcttcttgtttcactaaaataatggacagaaatttttagttttaaggtctattatcctattcaattttcgagttttcttttcgatagtttcttttagtttagggttttaaattctcgtgtgctgcaattgttagctctttgcaatcaaaacacataaaccaattattggcagttttaatcgtaaatgaagtgtttagactcaaaatttgacaatttaggtttcgcagggaattgaattaaattaaaaatatatatattattttgtttgttgcgggataatttcttgatttccaaaactacttgttagaatgagatttgttagatcaaatttcggactgtacggacatttttattgatattccattatgtagttctcgtttactctcaattcttgaattattaagcggaaagttcattattgtcgttacctgcagttcaagtgggcggtg

SEQ ID NO: 78051 - DNA, 854 bp, Citrus sinensis
  Intron number 2 from transcript orange1.1g032255m (locus o range1.1g032255m.g) derived from phytozome v7.0 (chr-ID sc affold00351; pos 31855 to 32708)
ctggtcaataggtatgtttcatgggagtggttttgtgctatattgtgtttgaaaatagatgttatgcttactacctcgttgaaggcctttgccctgaagataacaatttaccaagagcacatgaatctgaaaatagcaagatactgtgaatgaaagtatttgttaatatatgttctcttgataaagctaggattaaagtgtagaaaactctcttcgatgagctcaagatgaaatctagttattcataatctatatggcagtgtaatgtctccttgccgtcaaatagaacatcgctttgagattgctgtacataattcgtaagtgctgcatgtctagcaggtttggcactctgttattatgatctagtttgatacgcgggaaagttcagtggtcatggttatagatggtctcttatatgttctctttgctttagttgaggtgctgcatatcatccattgattttgtttatctcaactaaccaagagttttgaagtccatgacccgcaaatattttgcattcaaacttttaacttggttgattttgttttcttcatcctctttttgttactgattctttctccttctccgcttatccagtggattatcagatgaataactgatccataataatttctgttgaatccttcattactttattcctttcaaatttccacattggcgggacatcctgttacgatgatacaacagagactcaacttccaattgaaaacacacacagtgtcacccaccattgtccgtatcctattaggtcaattggttctgtatccattgtggcggaagctgaagattggattttcatttccatttctgtttctgtattcaggattctggag

SEQ ID NO: 78052 - DNA, 702 bp, Citrus sinensis
  Intron number 1 from transcript orange1.1g039702m (locus o range1.1g039702m.g) derived from phytozome v7.0 (chr-ID sc affold00002; pos 4820307 to 4821008 reverse strand)
ccaagctgctctacctggagtcaggagagattatagtaagttttttcttctttccccggttcttttttatgtatatacctatagtgtatgttactatttactagtatgctagcctttggggtttccctgtgtcatgaaaatgccattaacacgcctccttcatgcaggctattatgcagaccatgaaggtgaactgagaacagagttaggatgggagaacatttttgtttcatgacaataattagaatcccatcaatcaaaagtgtatattttagttgactgttccatgcaccggctgcatagtttcaccattcgagctgttattagtctgattgacaccttcatagtgatatattctaaatatatgtcaagctggaagcagctattaagttacaatacatgcaactaacattgactcaaaagtagtttgtcatgacttctaattgtttaacatgcaacaactgaattacattaaaaaaaaaggattttgggttagtgatgcaacttaataggaccccatcctggggctgcccttacagaatgcatcagaatgcaatttgcaataaggcacagtcaatgtctctcttagtgcactcttttatgaacaattacaatgcagtttggtctttctttggattctgacaactgataacaattcttcatacttcatagcaggtcacttcagttgtgagattgaagcgg

SEQ ID NO: 78053 - DNA, 812 bp, Citrus sinensis
  Intron number 4 from transcript orange1.1g026814m (locus o range1.1g026814m.g) derived from phytozome v7.0 (chr-ID sc affold00071; pos 266940 to 267751 reverse strand)
cgccactccaatccttaaacaggtacgtctgatcctttcccccttttaagtccttcgtgacaggactatttaatcacaaaatggaatttgttagtgttatataatataatacaggcaatctctattgtatgtatcttcatgcttacaatgatttacattctatagcaattatatgatggtctggttgttttattttttataagaaattcaaatatgtattaatgaagaagatttaaaacacatggagtaccagctgtccactaagaaaaatctggaagaacttgaattattctagtggaatttcaagattttaatataagaactagaatttgtgaaaaaaatgaagcatgaccatttgatttcttgccatgatttcaacatcacatatattcactcaggattcatgttcattgtgctgactgaggccctatttggtattaaggttggacagttgtaccttaaagttacagtactaaagtgtttgataaagactagttgccgcggtttggaagttaacttgatttaatccaccacttgtataataaaaaatctataatatctttattacttttgttaaaattattatttaaaagtcatatttattacacataattaacttttatttcatagttgtagtttttttttttttccataacagcttaaaagttagagcaccttaatttcaaacatggcttaaagctttcagaggctttgtatcttgacatgtgagatgcatattttcctctcatgcatatcatcataataaatgtaatgtatgagttcacttttcaatagctttgattaggtcagga

SEQ ID NO: 78054 - DNA, 961 bp, Citrus sinensis
  Intron number 1 from transcript orange1.1g021624m (locus o range1.1g021624m.g) derived from phytozome v7.0 (chr-ID sc affold00002; pos 2069108 to 2070068 reverse strand)
gagagtcagctgcaaggtctcgggctcgtaagcaggtaaaattttgtttgatatatttataatctactatttgtttatgcctatggcttcaaatctgattgattcggtgtttgctgctgtacctttttatgctggtagtgctgtctgttaattaaatagagcatttggatagtccatgatgcatgattaaattaaatgaacctgtgaaatgattacttatcggtttgtttgaacaatcccatgagttttgacttacttgatgttctcatggtcatgcgattgctgagatatcgattgtatgcactgggaggagttgctgaaaaaatagttggtgtctgtttaaattcatttttgattaacccgtactgcctaacagcctaactttattaactttaggtttataacagttgagaaacttgtctgtctttaaagatttactttgaggtcaggattaaataattattgaagaatgaaagaaacacaaataaatgacaccaagagcataaaaagtgattgacaagtttcctcttcttgccactccataaattttgctagccattaaccttctgcttttatcatctatggacatgctgcatcctaaacttcatgaaagattatgcggcagaatgataatgtgctagcaacctgacatgatcagagatgaaagattatgagaagtcaaggacatgagaagttttaaggatccaggttgttgcaaggtaatggaacattgtttgaggaacataaaatccggcaatagttgtatcgtgtcgacatcaattaataggatgattaactttttaacattttacctgatttgctcctttggataaagcaaaatagagaggcaacagaaattactctattcaatgatgaaattatttgtattcttatgttgtctcaggatgtgtgatgaatgcttgtcttattttcttttttgtttttgcggtaggcttatact

SEQ ID NO: 78055 - DNA, 279 bp, Citrus sinensis
  Intron number 1 from transcript orange1.1g043957m (locus o range1.1g043957m.g) derived from phytozome v7.0 (chr-ID sc affold00002; pos 976784 to 977062 reverse strand)
acaaaattgataaggtaattaaatttcttttctttttttcccccaaaattttgatcttgattgtatcagttttgtttatgttttaattgattgtaaatgttgatcaaataaatttaattattgaattttatgatttatgaaacagattgaatatcatgctttttgttcaattagctacttatcgggctatcggctgatttgccattaggagaaagtaaccgctggctatctaaactgggttagatttttggttttaggttggccaaggtacctacagca

SEQ ID NO: 78056 - DNA, 699 bp, Citrus sinensis
  Intron number 2 from transcript orange1.1g010014m (locus o range1.1g006585m.g) derived from phytozome v7.0 (chr-ID sc affold00002; pos 2965490 to 2966188)
taacgtcgtgtgcacttttgattgaaattcaacaggtaagatgttcacttttaagagtcttttttttttcttttccctttttattttctttcatattttatattttttaacaaggaagatttaaacgttttgaaatctgtttagtgaacagtgagctagttatgtaacttgactatcactaggcttaaacttaagtgtcttcaatcttatgtgttttttgaaatttctttgttttttgaaataagtgaacaaattgttgatattgtttatctatgatattatttagctatattcaatatgtaaggtatgtaatagagttaataaacatgaaatgttcaccgggcatggataagcagttgatcggttttgtctgttttgtggcggtttatgtgagaaacttgctaacgaacttgacagaactgtggagtaacgtcgcttactagtgtaaatagcagaaattaggatggtacctttaggagatatcgttttgttgtcctttttgtcgtgactttggcatgagagatttggacagatcaggctttgaattcgtgaattttgtacgtttatcacatggattttatggacgtatgtctgctttatatagtacatatttaatgctacaataattttcgatgtctaatctgcctttaaagctaattactttttccttctataatgtgtcaggaagtaatccattgc

SEQ ID NO: 78057 - DNA, 962 bp, Citrus sinensis
  Intron number 3 from transcript orange1.1g033114m (locus o range1.1g033114m.g) derived from phytozome v7.0 (chr-ID sc affold00053; pos 538564 to 539525)
gagagaagtgacataccaaatatagataagaagaagtaagctttacaccatattatttatgacattgcattatctggtttcattgtaaaaaggaagaaaaaaaatacatgatctgttcctacagttttgagcctcttcaatgacctctatttcatggctttgacaatatgagaaagaaattagagtgctgatttaggctacttgaacttgtttgtttatgtactggattaacacttgagctgcattatttgaaacaattcttggtagcaatctcatcaactttacgtagcactctcattcctttcttttctaaggtatattgatctcattcctctgtgataaggggcagccagcagagtatggcaacctcttactcgtgctactttgtttgtaatattaccatagttttcattgttatcttatattgttcttcctgtttcatttagctgatcacatggctctgtcatgtgagtctgcatacatcctatgacagcttcttgcagctattttctttgtgggtcttgctagcttacagtttctgtatattacagcccataaagaaggggcgttaactggccctcatccagttaccccttttggcctggctgtacattacagtaaatgtaaggtagccatgtctttttccatttttttcctttatatttgagatttaaacctaagacctaatcaaaatttagtcattcatttgtttacctgataatcatcatatctattgcttctttttctttgtcccatttctttgaaagatcattgtatttgtagaattggctgtcacttcagtgtttatagttgctatgattgctgacagatggtaatttaaatgtccatatggactataacaactcgctacttgattctatcatatactaataaggtttcctctttacctgaatgtgaaaattacaggtatcttgttccagctgacctgactgtaggacaat

SEQ ID NO: 78058 - DNA, 706 bp, Citrus sinensis
  Intron number 4 from transcript orange1.1g033351m (locus o range1.1g030030m.g) derived from phytozome v7.0 (chr-ID sc affold00002; pos 4702214 to 4702919)
caagactacactctggagaaggtacttttgatactgaattagtttcttcattgtgtaatgttatgctttttgtattggagccacttggaagaaaaacctgtttacaaggttcaacttattacctaaaaattttcactctctggcgcatgcattttggctcattcatatcttttgatatccgtcggtatatttattgtttttgcagatagattcaaccagacaagattggatcagagtagataattgggaaaacctttccattagtatgttattattttttcatatcattaacatggtaatttcattacttgttctagctaacgtgctggtaaaagttttgtttggggcatccatgatgcttgtagttctctgagctttttgtttgattgaattagacttaagttaaaagattctttcatgtctgatgatatgacctcagatttgcgattgaaactcaataattcagcttaaaatgtctttgtgattggacttatgcatccttggttgcgttggcagttcatcaaaatggtgcttagtgttgcaggatatttgattgatttctttgctttctcttgatgacttgcgctacatccagcatctttcttgcaacattcatgacttttgaacttatttgttaggtttcattaagcttcaatcaaatttacaagtacttctttgtttctaggtaaacaagaagctaaagcat

SEQ ID NO: 78059 - DNA, 271 bp, Citrus sinensis
  Intron number 1 from transcript orange1.1g001404m (locus o range1.1g001404m.g) derived from phytozome v7.0 (chr-ID sc affold00002; pos 634696 to 634966)
aagccgaggtcttgcttcatttgttttttagttaatttattcatttctttctcttagtccttagttattcgttttttcgtttttgaatataaacctgaaaaacgagtctaagtataaaaacaataaaattattttcaaattgtgaaccaaatgccgcctttaatatattgatagagctcttaggatgctactttcacttgatgaagaaggacatttgatttattttgatgacattgttatttgtctacagcttgctcgccgcgttcgtgag

SEQ ID NO: 78060 - DNA, 789 bp, Citrus sinensis
  Intron number 1 from transcript orange1.1g022370m (locus o range1.1g018751m.g) derived from phytozome v7.0 (chr-ID sc affold00063; pos 363168 to 363956)
ccgagcctgagtacttcgaagatcaacgcaacgtaaattttgttgtttcttgctgtcgtttgccgctgtttggtttcgttctgtgctgacgttttttttccccggtgacgcattaatttgacgctgtgaaaagtttgttgtttgttttgtattttttggagtaattgttaggtttctgacacaaattttaggaaattaaaggctgttaaaaatattttgagcttttcgaaatggaacagttgcgtgtaggtatcaatgtctgtgaattggattgctgttcttgaagtgcattgttaatgaattagtatctgcaaaagatataaaacaatttcaatcagaaaagttacattggacgaagccattggaactaagtgtcgacttgtgttttatgtctatgaaaggagaagtcagaaaaatagaaatttaggaagcttgttaggtttggaaagtgaatatgtgcattaggtttcaatggctttgtgaattaaatgctaattgtccaagtgctttttttattaaattaggcagcataaaagttaaaaaataataataaaagggaagttaaattagaaaatatgatattattttgttttcttatcttttatgtatccatgtagttaaggtaatttctcagctagggaagtattattactctttaatctagagaagtgtgctcacgcactcgtacgtagtggttttgcattttaccatgttttcttttactgattggaattgtttgttttatgttatgtaggaagatttgtggaaggaggtgttccctgttggaac

SEQ ID NO: 78061 - DNA, 704 bp, Citrus sinensis
  Intron number 2 from transcript orange1.1g031662m (locus o range1.1g031662m.g) derived from phytozome v7.0 (chr-ID sc affold00120; pos 229259 to 229962)
ccctcttgattctaaagattctcaaggccgaacaggtcatctttattgttgcctcttgtttgtatcgctacgaatgtgtctgttgcttcttgggttgtttctattttttcaaagcatgatttcataggtttcgagttagaatatggaattttgttattttgttattacgttgttatgaatgaaaccattcaaaaatagacaaagcagttatgttttccaggtgcattgtattggtgattttgtgggttgtttcggaagaaaagatagcgagggttttgtatgattctataaagaaagatgcaaatttttgtggacaccatacgagttattaacttctcttccgggcttcctttgaggaagttcatggtgctttattctttattcatttaaattgggaagcagtttgaaggggtttaggttgattttttatatttttttatcgtccttgatgcagtttcttaaggctttctgaaacagttcgattcttcttcataggctagatagaatcagtccatataaaatcttcaacatattggggatttaccacattttaatctgcttttgtggaatgcatgtatgattatgttctgccaaatttggggaaaaaaacaaaggtttatgcctcctttttaattttttattgttttttgtggtttcatgtatgttgcacttaattgtattgatgtttgtgtccagcccttcat

SEQ ID NO: 78062 - DNA, 714 bp, Citrus sinensis
  Intron number 2 from transcript orange1.1g002850m (locus o range1.1g002844m.g) derived from phytozome v7.0 (chr-ID sc affold00022; pos 62280 to 62993 reverse strand)
gaaaggtacttactagattactggacttatacaataatggaaaaattgattcatgatttcatttggtcattggaagtagaaatgtaacagcatagtagaattaggatgctcaagatgtagaaatgtctagcattggtgcagacatgtcgcataatatgaagcagctacagattatagatgttttttgtaatttctattttggttgtgttatacattggtatggtttatgtacattacagataaaccatgatgtatgttgatcttgattgactattggaaatggcaatttttgttttagatgtgttatcgtttgcttgggatgcactgtttagagactgaaccattggagcaatcaaaattctcctgtctttattgattcctgctttaactttctaaaaagtatttcaaatattcttttcctgtgtatcatattgaggaaaagttatacacagaggcatgcagcagtgttactaattagatctcagggttctgaatattagttgttgaccgagtgaaaaagttgtcagtgtgatataaaatatttttggggaaattgttttctgttatgttcatattctggttaaggttcacatttgtgtgtattttagtctgcctttcactttgcacatattaatgtcctttttttttttgggttgttgttgttcatacatgcttacagaagagactaatctcaattatttacaccattcgggg

SEQ ID NO: 78063 - DNA, 1039 bp, Citrus sinensis
  Intron number 1 from transcript orange1.1g002850m (locus o range1.1g002844m.g) derived from phytozome v7.0 (chr-ID sc affold00022; pos 63038 to 64076 reverse strand)
caaattatccttgtatctttgtgggagttaatcaggtaaactttgtggcttttgatacttattcctataaatttagctgaattagactgattttttgtgaatcctgtttgggtaactgggttctatttctttggagtgcctttgataacttttgaggtttatgactttattgtgcattagaaattttgattgcattggagattttagaaagccaagccctgaattcaaactggcattacattgtttacaccacactggtctgtcaaacgatttggtttcaatttggttctgagtttgatggtgttagtttaaggacttggttgaagatttgcttcaggctttccctaatatctataaaagtctatggattttaatttgaagtataacttggcaagttattctttaccattttgatgatgcattatcatattactagtataaaagtttctgcagccctttattctggtcaatgggttttctgggagtggagtttttggaacagttggtgtaaacagaaactctagggttaacatgtttgcatgctgattagtgcactatgttgtcgaatagaactgccaagactacaatatatcaaggcattttccagcttcatacatttgctacggtgacaaaaaaatatactaatctaatgctgtcccaagcaattgtgctatgtgcacagtactttgtaattgtatttatactggataatagatatgtagtttatgcagtttaatttttctatattttagagacttttcttatattgtttcatatgaagaaaatttctttaattgacaccgtcatgcatggacaatcataatgtccaatttcagttggttttacgcatcatacagcagccttgagtgacctgttgttttagttcctattttatactctactcttgatcaattctaaagtagttgctttgtggtatatatattatgcagccgcatatttttgtgatgacactgattaaaaacaatatgctggcatattttcaggacggtagaggagaatcccatttgtattgtagcac

SEQ ID NO: 78064 - DNA, 552 bp, Citrus sinensis
  Intron number 1 from transcript orange1.1g002377m (locus o range1.1g002380m.g) derived from phytozome v7.0 (chr-ID sc affold00120; pos 184189 to 184740)
ccaacgcctcaacctctttagatctggttcctcaggtcagtctttcttttttttttctttttttaaaatttttgtcgttgaatatttttgtggagttatacatgtgggttgcttgattgattgatttaattatgctttgttgttattttacctggctgtagcagatcggatatttgctagttaccgtttctgttcttcttcttcttcttattagtattatttgattttgattttttctttcgaaaataattgaatagagttaggttacgctttggtggttgtgatttgaaagtaaaaaaaaaaaaaatccgtttgatgaagcctggtagagtcgtcttagaaagaattgttttggaaaggaggcctattaattaccacttttagggatttttaaaaatgttggtctgatgggaatttatgttatttggcgggtgatagtctttgcttctgagtaaagttttttgggcttgtggtaacatgtgtttattttctgcagatttttgtgcaaatttgaaattggtcgaatctttttgatggatgatgattgtgcag

SEQ ID NO: 78065 - DNA, 946 bp, Citrus sinensis
  Intron number 2 from transcript orange1.1g016864m (locus o range1.1g016864m.g) derived from phytozome v7.0 (chr-ID sc affold00063; pos 194816 to 195761 reverse strand)
acaaagctacagcgcatcatcttggcttgctcaaggtacatgaatttttctgttgaattgcaaagtgtggtgcaatggaaaatttcaatcagatcctcttaggtttttgaatttccactcacccccaatttagtgaagtatccccccttattacttaaaaattccccttttattacttaaaatattgattcttttatcattcatgaaaataataatttgaaaaccttcagataaatccccactcttttcacagcttgtgataagcttgtaaataatttgtaaacgttaaaaaataacgtatgtttaatcatgctcgttgcctgcatagagtgagttgtttgtgaagttttatatctcaaatatttccttttcttatataagcaatgaaaattgctccagtattttaggggaatatattccacttttatgttctgatttggaagaatatagtgtgtggccaatttagaagggatattatcttttactatcaatttagttttagcacctttgtttgcttcactaatgtatcttatgacttatttttagaaccaatccttccctacattaaataattttgaaataggaataagattatacctcataactggatgccagaggaaagtctatttggcatgatcaaagtattgaatttgatgttatagttgacttttgatgatcaccttgttagaggctaatgtgagactggttttctttatattcagttgaagaactgtgaaaacataatttttcaaatgtgatagttaacatgataactattggttatgtattagaaatgatctaacctttctgagtcccagcctcatttgatcatcattcacactcacctcttgctgtttcattagaatttaatattttgacgatgctatatgtgattgcttttgtgtttttaggctaaacttgcaaagctacgaagggaacttcttac

SEQ ID NO: 78066 - DNA, 789 bp, Citrus sinensis
  Intron number 1 from transcript orange1.1g019305m (locus o range1.1g018799m.g) derived from phytozome v7.0 (chr-ID sc affold00071; pos 138397 to 139185)
atcactacaagcgcaagttctaccaacgttacatcgttcgtacactcttcctttttcaactttttccatcttgggttttattaaattatttcagattgttgtgaatttttatctccgtttttactttttggatttctgatgttataatgttttgttcttggatactgttaccattaatctatttttgattgtttgaagtgttgtttttattgtctctgcgaactgtattttgttttattttggacatgggatatgggtttgttcaaatgtttttggattgttcgtgttctatttgggatttgggattgcaagttgtgaaattttttatctggcttttagtgttttgtaattggaaactatcgttttcaaaatttgattttgattgtttcaagtcctagttttgttggaattgggaatgagatttgtcattcctgatttgctgcattgattttgtttgtttgttttttgtttttttttttccagttttgggtcctggtcatctttggtattagtttcttttgggatcagttcagtatatcataggcatttaagaaaataagtgctaatcatatttgggatggggtttttctgtaactcgttttttttggtatagaatttacatcttgggttggaagatgcttattgatgcttattattcacattattagtaaactttatgttggtttaggagcttacctctgttttgggcaatttttctccccaacttgttagttgttcttatagtgggatcttttcaaaaagcaggatcctgatcttgtggtggagtct

SEQ ID NO: 78067 - DNA, 710 bp, Citrus sinensis; identical to SEQ ID NO: 77815
  Intron number 3 from transcript orange1.1g023210m (locus o range1.1g023210m.g) derived from phytozome v7.0 (chr-ID sc affold00073; pos 440280 to 440989)

SEQ ID NO: 78068 - DNA, 291 bp, Citrus sinensis
  Intron number 1 from transcript orange1.1g033317m (locus o range1.1g033114m.g) derived from phytozome v7.0 (chr-ID sc affold00053; pos 537570 to 537860)
tttcctctcgcttcttcgcttcgactcttcacaaggtcttcctctcttcgaatcgatttctcttttttaatttatctttattttgctcttgtttgatttcattgaataacttgtaatctgtttgtgttatcgattagattgatattttagggtttatgtaatgattaagatagttcattgactcttcttaatttatcattttctccgcttagttttaagttctaagttctaagttttgactgctgattgtaaagcaattttagctaattttgtttgatgagttcaggagga

SEQ ID NO: 78069 - DNA, 550 bp, Citrus sinensis
  Intron number 1 from transcript orange1.1g027836m (locus o range1.1g024581m.g) derived from phytozome v7.0 (chr-ID sc affold00024; pos 1301040 to 1301589 reverse strand)
cgctagagaagaaaggtgtcctcgctaagatccgggtacgaatttatccaactaccccttttatcttcgtcatttccccttagttatcgcgaataattgatttagaaaaaagtgaagaaattcgaaattagttcagcttctgttttacgtcggatctggtgcaatgcagtaattttgatttttttatttttatttttgtgcgtgttatagatcttatccgcgtcgtgtggttaattttgttaataggaaattgaagagaaattggggcttttgaagttaaagttagatggatttatggctagttgatgttatcttgaagatcataactctaactagattgatggggttatgcccaaaattttaattttttcgcttcaattttcagataattaaagctcatttgaatttttggggttttcttgctgttcggtgaatattgctaattgtagcaaagtctttccctttaattcaatttttgtgcctttttaactgactcaaatcggtctgtttcctaggctgaactcagggccagtgtctttgaggcaattga

SEQ ID NO: 78070 - DNA, 711 bp, Citrus sinensis
  Intron number 2 from transcript orange1.1g007353m (locus o range1.1g007353m.g) derived from phytozome v7.0 (chr-ID sc affold00263; pos 4571 to 5281)
tctcttcaagttttcaaccaagtcagagagacctggtaaaccaatacccttctttttttttgtttcaagatctctctgcgtttcttcattttactcatgcatctgggtattttcagttttccctttctagttgaattattctattttgctgagctctgatccttcatgtagctctaaattcgtagtattagctgctgtattattattattttgcactgagtgtttagttttgggcaactttagaatttgagggactttgttaatctttgattggtattggtgttgaattagtaagattgatttagtcactgattgttaattggagttgacttttttggggttattgtattttgttgaatacatagtgtctgcgcagcaattatatctgctaagtttataattcttgtcatatttgggtaagtaaatgctacactctattgttattacaaaaaattggtgaaaatttacttatttcttggatctgtgaataaattctcatttattgtattagctgcaattgaagctttgaatttttcaagcttaatagttttcaaaaattttgagtaaaatatgagggtttgatctgttccaagttttgtgaaaagtggtgtagagttagatcgtgatgcagaaaattagcggaattgtttaggaaatattaagggtgggatcaaatggggaatacttgtgtaggaccaactatttccaaga

SEQ ID NO: 78071 - DNA, 411 bp, Citrus sinensis
  Intron number 1 from transcript orange1.1g010365m (locus o range1.1g010365m.g) derived from phytozome v7.0 (chr-ID sc affold00253; pos 19672 to 20082 reverse strand)
agcttgaaagagaccaggttaaggctttaatccaggtatatgtatatttaactatttgattagatgtacttgaactcagttgatcagttaaataaatctactacttaaaaccctagagcaatttaactgttttatattacttactaagtttagtaatttatttggtttctaatgatttattcaaatacttcatatattctttgcatataaccaacaaagaatcatgagatacgtacggtttgtacgtgtatcgtaattctatccgctagtcgtacatacctcaaatgtataaaaactttaatcatgcatacaaccatcaaagttgtttattgttttgaaaatcttaatcacattcgattttgctttgagtttttaggaccttttagctggtggaactgagagctcaacggt

SEQ ID NO: 78072 - DNA, 905 bp, Citrus sinensis
  Intron number 2 from transcript orange1.1g035404m (locus o range1.1g035453m.g) derived from phytozome v7.0 (chr-ID sc affold00002; pos 3608386 to 3609290)
aagctcaagattcttaaggttgtttttcctcttccattgactgtttaagcatttatgattttcatttctgatattgtttggctagatccatccaattaattatgtttctggcttcttttgttagtctatgttgtattttggtgtcactgttattggcattgtttagtttattgggggtagagaacctttttcttctctcgttttagaattcatggaaaggttcttatggactgatttatattatgagcacaagcacattcaatgactgctcccgctttggatgattgtataggactatccaaaaagaataaatagaaagaaaactgggttttcctcgaagagcttgttgaagcttaatagttagtacttctagtgtaatgtgtaaaatgggtacaaaatcacaatattggaaaattattttgtgtaaacattgcagttcatttgattttagaatgcctaatactgtgaccaatgcactgcttcttagatttaagatctgagaatggtaaatgcaatgctagctttcgaggagcgctttcctgtctctctaaaattatttatgaaattgcagctacgcaatcttagcatctctactgtattccatgatcataaacaatttgtatgttaatgtgtcatttagaggagataagaccaatctatggctgatagtagcatgaattatcattcttcttcatatttgataatgttaccagtacgaagaagcatattagcttggtattcagtacaatgagttcttctacagttctccatgcatgcatttttaaggtgttaattcatgtgttatgatgtttggaggctcttccttttaatgattcatgtgtttgaatcacaatgagagactcatctttctgcttatgcaatttgaccttttgtattaatatcag

SEQ ID NO: 78073 - DNA, 457 bp, Citrus sinensis
  Intron number 1 from transcript orange1.1g037554m (locus o range1.1g037554m.g) derived from phytozome v7.0 (chr-ID sc affold00002; pos 179375 to 179831 reverse strand)
tggttgcagcgggtgctgctggttgctttcttgaggtactacttcttcactatttcgcatcaacttaggtgttcagacaaaccctgataattgaaaattgctttgtttgttttgatcttcttactagttttatgtgaaattcctcaatttgagtgcatttctctggtacttgagaatatgttgttcaaacttctaaaatttctacttacaaaatctcatctcacttagaacgtctagttgcaaaccggggatatacaaagcttttgtagcattacagaccaggcgcagttgctccattcatgatcattctgtcattgccatgttcagaattaaatgttgttgctccctcatcatgaatattattaactcagatatcctgaaaaggatatgtatcaaatgatggtgggatattttcctttcaggatcaatcttggccaaagaagtgtggtaagagtac

SEQ ID NO: 78074 - DNA, 839 bp, Citrus sinensis
  Intron number 1 from transcript orange1.1g006925m (locus o range1.1g006925m.g) derived from phytozome v7.0 (chr-ID sc affold00002; pos 667099 to 667937)
agtgttaaaggtccattgtgggaagagatttccaggtgagattaattaattatcaattgaattgattgttgatgataagtataattaattcaattgaattttgagcacttaggtcgagatctatgagctgaattttcttgaaaagtgtttccttttttcttcttttgatatatttttgagcttccttttcacagtttatgcttattcagacagtcacattgatagtaaattaattttcggttatttcattttattttattttaccttcttgtttcatttttattaaatatatagatatataaaataaaataaaaaattgaatgcttattttaagagaattatgcaggatcaaaagaaaagaatcagagtcagaatttagatttttagacacttgtgatatttgttttgtttcgcttctgccggcactggccttttccaacatatttcatagggagtagtaataatctgaaattgtgtttatatgtattatatatataacggcaggttttgtatgtactagttattttcaatatccaggttaacttcagaagaattgtaaaactttctttttatcttatgtctacaaatttaccactactgcaaatttaaaccttgttcctaattcaatgaataatcagtctgaattaatgcatgcttatgttcattttatgtgtcaaatgctcttaattccaatgtattttgattcattgctgaatctgatagaatgggatagtaacagaaatggagtttgatcaatctagttttaaattgaacgttttactgttctgttgcatatattatcagaaagcttggggagcttggttatcatcgaagtgcca

SEQ ID NO: 78075 - DNA, 805 bp, Citrus sinensis
  Intron number 2 from transcript orange1.1g043392m (locus o range1.1g043392m.g) derived from phytozome v7.0 (chr-ID sc affold00002; pos 4359500 to 4360304 reverse strand)
gcagcttttggtaagcagcgtcctatatggtacaagaagtacataacaggctttaatttggtgttgatcatgacttacgtgcaattcttttttgttttttaaaaaaaatacaaattctcataaaaaaaaaaaatacaaatttggtaaacgacagtcaaagctatatatatagagagagagagagagagagtaagcctcataagacggtgtgtgattcgttggagagctgtaatagttaaatagaaaaattaaacccaaaaaaaaagacaaaataattaattaatactttaacaccattccttcaggctatatcatttttctttgttgaagacagatgaatacggcttagtcgtaacttgagactgaaaaaagcacataaagcttaaaagcagtaacgcgagtgaaccctcatcatgatcaaccaaaaccggcaagataggatcacggaaaatctctccaccagctgaaaagacctggattacctttacagttactccatcagtattcaccttaattgataatcaatttcttcggatcccgaagaataagccaaacccaacttcttcatcatttccctatcaacaccataacaaacaagggaagctgcttgcaaagtaccttatatatgtcctaaataatcagcttgaatacaatactggcttacctgcacttccgtttaatgaaacacaaaaggccaattaataattaacgcatgattgcgagatttttaggtgaaaaacgagggaagctgcttgctcttttcccaatcatgtatctatcaggtggcacgtgtgtgatcttggtc

SEQ ID NO: 78076 - DNA, 723 bp, Citrus sinensis
  Intron number 1 from transcript orange1.1g021586m (locus o range1.1g020811m.g) derived from phytozome v7.0 (chr-ID sc affold00002; pos 3731830 to 3732552)
attttatttttggagataacaattgttattgaaaggtactaatcgcctctcttcaagttctcttcgccttttttttttttttggcctcaatttgaatgattattagtattcagttttaaattatttttatacgattgtcaacagataaattatttttatatgattgtcaacagactcatagttcttatttagtggtttcggttttgagagattcttaaggctctaacattaggattttgaagtttagttacaatttttttttttaattatacgtaatattgttatttgtatgatgttgtgagttggctgtcgatttagctcaatcaatacgatcttccttttaattattgcagtaattatttttgcaatatgtatttccgtccttgttaatctaattttcaactgctgtggtgcatttttaatttagacctttctttggtttgagttgaagtgaagatacttgggctttccagaaatatttttaagctttgtgcgattatctctaataactgcttgaatcaatttaattatacgtgattttgctgtgtgttttttgccagttctacggtagcacattaatttggacggtgagaaaatgattggatcgtttcttacaagaggacttgtgtacgtttgccagcaacttaatttctccttgtgacttggtttcatgggattagattatcttcgttgaactaaaatcatctgcaatgtgcttgtagg

SEQ ID NO: 78077 - DNA, 946 bp, Citrus sinensis
  Intron number 5 from transcript orange1.1g021586m (locus o range1.1g020811m.g) derived from phytozome v7.0 (chr-ID sc affold00002; pos 3733244 to 3734189)
cttcacagtcgacacctaggcctcgccctgcccaggtatatgttaaaaagaataaaaaggaagtaaatttcactctcacttaactttatatcctaccatgtaccctgtatagcactgtagctcaaccgtgtttgttaactacttaactggagctgactagacttgccaaattgttttaaacttatgcatagattttgcagaatgcctggatttatttgtgtactcacaaagggaaaggtatatgtgattcttggaaatttctggctgtttggctacaccattagtggcaaaaggccgcatgtgatgatcatggtggtccccttataattatttttcccttgtttatcatgaaaggttctaatcaaaaagtattttagaatggagccgctaacctttttattatagaccaagtaatggacagtgttgatccaactgaagaaacagagtgacaattttcagcttaaatgcaatggttttgttagtaatttaatatcttatagttaggttacgattttggttgagggatgtcataattgctctccgatccttgctgcagtaggctgagtagtctgtttgaacatataaacaagttgtattctctaaatttgttgagatttatgtccttcaagtggttgaatatgatggcattatcaatgattttgataacaatttggaggtagcatcccaataaaggcgtttaacaaaaatcatagtaatattcttgttcatagtagcatcttctttttttttttttcggtgatatgcaactaatgtcagttctcccctgagcttagaattgggtctgtgacaatctttcaatgaacattttattatataatggattcatgcttgtgtttatggttggtttgggaagaaagattgttggatgaaatgagctcaatttgttcatgcttaatttgtattttcacattgcagccacaacaaa

SEQ ID NO: 78078 - DNA, 1039 bp, Citrus sinensis
  Intron number 1 from transcript orange1.1g014833m (locus o range1.1g014833m.g) derived from phytozome v7.0 (chr-ID sc affold00002; pos 4060036 to 4061074)
ttcatcgcagccaaaactcgtacagccgcaatccggtacttgtaatttgcttcttcttctttttcttaatttatttatttttctattaagtaattcgtttactttgatcatgttcagttgtgctggtgcttttaatctttgtacgcatatgagtgaaatacagtcagtgtcctgtatactggaggaatatcctcttggctaaactatgaaatagggtttctttaactggaattcccttaatcttgtttataattgcaatgggcttcattacaaactggttaaagggttcgttcggatcgaggtgatgtgatttcttatcctcaactgctgtggaattgagtcgctagctgtcagtgtgactgaatgggttctttggtaaatattagctccccaagtaactcgcactttagcacttatacttccagagttaagtagaaatgcagcagttccaaatgtacatataacgctcgcccgggggggggggggggaggagttggtgtgtggggaagaaccaaagaacatccttgctgggtgtgtaaaaggatctaaagtgaattttggttttcttttcattatccaattggatctagcactggcagttccttttccgttcccagtagtgtttgtagagaaaacatttgtttcaatgtcagtgaagttggacattttaagctttctacttattttatttacatgaattgagtttcttagctcatgtttctacaacactaatcttaccgattctaaaaggaaagaaaaatctaatatgatttctccatcttagggtgtgtgataatgatttttctttacgtgggagagtgctagcagtctgagtcaagtgcactcactagttggtcacatcaagaatttatttgagatacaatctctttcttgaaaagtgacttcaccaatttatggtcttcaacttttgggatttccaaattttctttgaagtgtaaatgctcctgtatttagctacaagttcttctggacattattttcagattgaaattttgaagcgattgcaacgagaatcatt

SEQ ID NO: 78079 - DNA, 938 bp, Citrus sinensis
  Intron number 2 from transcript orange1.1g002516m (locus o range1.1g002516m.g) derived from phytozome v7.0 (chr-ID sc affold00002; pos 3619403 to 3620340 reverse strand)
ttgtgtattacttccctcaaggacacagtgaacaggtttgatttgtttcttcttctattgcttcttcaaagaatacatagtgatagcatttgctttatgctgtgtggttaatctgttatcttcaacatgttgattatattttcttttctgcttttaacattttaataatcattcgctttctgaatacaattgtgcttctgccatgggtgttctgaatgccagagtataaaactgttaattttggtatctcagatattgagattccctcctcattacctgagatccactttcaaactaccaagctgaggctagatttgccactaaaatctttctcaaatatctcatttaaagatgagtctcttcattcattttctatgcaacctttcagtgataaccaattaaatatattgagtaagaaactagaactaatactagcttaaaggagtcttaggatgctatcagatgttaatcagttattagagtgaaaaccactagcctcttttgcaacgggcagtttcagagttagctgatcttgatttaaatttcaaatattgcatagtgtgtggccaattgagtttcaatgtctagtttctttccagaaagaaacatcctcaaccatattagaactgttgattggtagcacatgccattataacttatcatcttattgtcaattattacatcatcatctataaaactaattaccatgttcatttgattgatcaggttgcagcatctactaaaagatcagcaacctcgcaaattcccaattatcctaatctcccatctcagctattgtgccaagttcataatgttacattacatgtatgtaaattttggctgatcaatgattttctggcatctgttactagttgtacttcatccaaacatatattcacttatgctttacaatatgttataggcagacaaagatacag

SEQ ID NO: 78080 - DNA, 730 bp, Citrus sinensis
  Intron number 2 from transcript orange1.1g042559m (locus o range1.1g042559m.g) derived from phytozome v7.0 (chr-ID sc affold00022; pos 1017205 to 1017934 reverse strand)
atccatcgagctggaaaatcccttcagtaagaaatttttccgtaatcaaacttttcttttgtttcagccagtcctgcctgatctatttttattgtgcttgcggccgcattggatggaattgtagcctctaatcctatgggtaaactatcagttccacatgctttgttgtgaattgactccacggcctggtggtcgaatctatgtgcctattgctttgtgtaatggtctagtttcttgcactagtcacgatgactcaactagtttcctttctaattagaaacctcgtatgcaatgtgcttaagttgctcggttacctgccatatcgccacatctccaatgttttcagaggtcgcttcatttccatctgcagttgctttgtcctcttggggaagagggaaaacaagaaagaaatgtgcataaagatgtgaatcttctggtatctttgtatgcatctgtgtcatttctgattgccagcctttttcgaaggcgaagtatgttagtgccaattctcttattaggagatcctgcaaaatcttatttgttataaataaatttaaagttagcaggggaacgctctttagttgttatcattgagtattctattcataaagaacgatatagttgtgcaggtaactagtagtaggatgttttcttctctgtggtttcctgccctgactttttatatggttgtacaggtctcttaagcttgggatagttccaggtccaacag

SEQ ID NO: 78081 - DNA, 909 bp, Citrus sinensis
  Intron number 1 from transcript orange1.1g024209m (locus o range1.1g024171m.g) derived from phytozome v7.0 (chr-ID sc affold00002; pos 3453484 to 3454392 reverse strand)
cctcctttaaggagagaaacacgtcgcagtttcaggttcttggttttctaatggccttttctttttatatgtttttcagaatattggtgcttaaagaggaaaggaatagccttttttttaataagaattaaagataaacaatcaatgagcatctttgaaaaatgtgtcatttgggatcttctgtttgtagttcatgttctggcttccaaggcaatttttctgtatctgtctttgtccagtggttcccttttctactttttacacttcatactgtaatattccagaactactctgaacttctgctctttggagagggtggagggtgtactcagtcacacaggagagcatgattcctgtggggcacgaatgagtttagttgttgtggctcactgcctttgcatgaggctgggttcttctattgcttgtatgaagacagaccaagtgaagaagaaactgatgaggatttagactgagttaatttagtcagctttgagaaagggatttagactccaaatccctgattggagctttctttttgagttagatgccttgttggactgcaacctttgcttttttgcctctgagcatcaacattctttcttctttagcttgatgccttgatcagatgctgaattcttcttcttcttcttcttcttttaattcgggaaagtgaatccttcttagtattaggatgtaaaagaatggtttagttggttattctctgaagatatatctgtgagagttctgtgagatttattttttttgctaaagtaaacattgtgcctctagataattatccattagttgattgaaattgcaagtcttctagattatttttaattgctgcttctttcattgtttaatatgtctctagccaaggcaatctgtgcaacaactgcaagcggcctg

SEQ ID NO: 78082 - DNA, 430 bp, Citrus sinensis
  Intron number 2 from transcript orange1.1g004831m (locus o range1.1g004831m.g) derived from phytozome v7.0 (chr-ID sc affold01026; pos 29985 to 30414 reverse strand)
caagatcagaggtatggaccacctgttgaaatattattatgattattttgtgatttgttatggggtttatttgctcatgaagtttttgttttatcaattgtctttcagttaatttattcttttttgagtgttttggctaggattctattgttgttagtagataagagaattgtggaaaaataaattaattgcaattttgaatataaaatgtgatctgggttaactgtaaattcattttggaaattctgtagaattaatatattctgggaagtgactgggttatggttccttagcccaagaaagacatggagatttgattcattaattgtgaatataggttaaaaatgttaatctttaaagcttcttcttaatctgctttgcagttttctttttgacttattgtttcttatgaattaggacaaattccggc

SEQ ID NO: 78083 - DNA, 548 bp, Citrus sinensis
  Intron number 2 from transcript orange1.1g027046m (locus o range1.1g020039m.g) derived from phytozome v7.0 (chr-ID sc affold00002; pos 1766044 to 1766591)
tttctctgttttgcagggttggaataaaaggtgagtatatcttctcacttaatgaccgatacttatcttgagttctgatttgtgttcatgagggaggcaggcaggtgatttgttagcgttacaagtgatattgtaggtgtttatttaagatggttccacttccagtttttttgaataatagaacttggaattgtagctgaagttagttccaatacttcacattttttttgctttcatgctttatgactcttattttcattttttaagtaataattattgtgtttattgatacagtttttttattttccttttttgggttaaagttaatatttttctatacaaattttgctgaaattttctatttttttctcctcctgataaataagaaacaaatgacatcgtctcaacactcttttttaaattttatctgcttatacttctgtgatttactaatggcttagtctatgaatcactatctctggaagttgtaattgcttgaattttgttttttcaacagctgggatgaatgggtaggtgtgcaccgtttg

SEQ ID NO: 78084 - DNA, 671 bp, Citrus sinensis
  Intron number 1 from transcript orange1.1g005678m (locus o range1.1g005678m.g) derived from phytozome v7.0 (chr-ID sc affold00402; pos 108970 to 109640)
atgtaagcctcaattataaatttttctctttgtttattaatgttgcttgtattttattaaatgtaactggtaaaacttttcgggggtggtacaagaggtctggggttccgaccctgctttcaaggtcgtgtacttgggagggaagggagttggcttgccatcaagccattgaaaaaggaaaaaaattgaatttattgttcagttattgaagttcatttcgtatcttatgcttttcagatattggttggaattgaagatcggatgatgatgccatttaaatttgattagtcattgagaatttattaccatgttgtttgttgcttgggaacttgcatttaaaaggatttaattcataataagtagcaggagctttttacgataagatgcgttaaactaataattgctaaaaaggataggaaagttcgatgaatgtacggcaatgtaatctgtctacttatgtgtgcattcgtgtctgattgctgcgctgtaagatgctcatttaaataaatgctcgtatgtagttagcaataattggtgtatttattgcccgtttgatctggttgtcccgaaaattaaactgcattattattccaatttatgccttatataccgttttcttcatttgatgtttaccagattggaggggagtttctgatacaagctaacactca

SEQ ID NO: 78085 - DNA, 948 bp, Citrus sinensis
  Intron number 2 from transcript orange1.1g022379m (locus o range1.1g022379m.g) derived from phytozome v7.0 (chr-ID sc affold00002; pos 4918757 to 4919704 reverse strand)
cttgaccaagcaggagtctgctgtgctcttgttgggtatgattcatgaattatctttccctcatattcttggctcttggaatgtggagttatttattattgtggagttgaattcaccattaatacagtatcagtgtggcattgtcttcaatgctcttaattttggtagtttcaaaatttaactggcttgtatatggctgaagctttatcttgttattcaaatgcaatcatgtccacgcgtgtacagatatgctgttcttcatgtaatcaaagatttagcatcctcacgattttctcaactgacaaaatcaacttgttgttcttggtcgcacatcaatctttctttgttctgaagtttggttgaagaactttgtaactgttgctgtacatgtttataaaatctgttggccgaatttttcttgggatgagggttttaacctgtggcaaattttatgcttctgtagtggtaggaaaacaggggagtgaatctaattcttaagttgtctagagcctattgttggattattttcacattggatcttcaggatacatgtagaagttatacttggggttttgacagcagataggctttcaagactgtaatgttttatgacagcagttttggcatttatcatgtttgattaactttaaaggcatgctgcatatgttgagattgttaagtttccttactgatattcgggtaactttttggtcagatggtgtactgtggtaaaacagaaccccttacctggttatgagtttggttatgttttccatttcctaggaatgaactatggatttcattgttaacggttatcatttgatggttttcattacgtggtcgtgtgggcctttcatttagtggcttgatcttttaggtatgctgattagtacaggtctttgttgctttgcagaatccctgctgttgggttccctgctttggttcctg

SEQ ID NO: 78086 - DNA, 919 bp, Citrus sinensis
  Intron number 1 from transcript orange1.1g029370m (locus o range1.1g029370m.g) derived from phytozome v7.0 (chr-ID sc affold00002; pos 3078658 to 3079576 reverse strand)
ccattcattcgccgtcttcctgagtttaagttctggtaatttaagaacttctcttttccccaattattatatgctagtgtgatgaactctattccttctgttccataatttttctttgttatgatgtcaaagtgttatattccagggtctagcaagcaccatcatgtgtttaaacttattttcaaatattgggattcatcacataaaagtcataaatcttgatagttttggttattgcaaatacttttcataggttgcttcattcttggcttttcattgaagttgatcttcttataacttttgaaacacagatgtcatacttgtgcttaactaattatggacactttgttaaaagagactctcctatccaagagggatccaaaataattgcgtgcatgtattctgctctttgatgtgcattcttagacagtggccatggggcaagttaaaatactacattagtttgactacaagggaatgaatgttcacactgaacagagtggcgcattctttaaggtagcctgaagaatggatcattcaagcttgcttggggctccttgggtaatgatatagaacactgagtttcacgagaaattcaactgattctctacagatattcactggtggtttttttctttttcttcaaagtatcattttagcttctccccttctctagcgcagcaactttgaatcctatttgcgtattttactgtaagaagagtaatggattattcagataagttagcactgattttagcagtttgaacaagattttgaatagttgagaagaatcatctaacaagcatgttgtttgtcagaccttattttgtgtttgtttagattgttttcccaacaatctcatacttttttacctaattcagcccaagattaagttaatttttcaattgttgtttcaggt

SEQ ID NO: 78087 - DNA, 810 bp, Citrus sinensis
  Intron number 1 from transcript orange1.1g029754m (locus o range1.1g026301m.g) derived from phytozome v7.0 (chr-ID sc affold00034; pos 662178 to 662987)
aaaaaaaattctcaacttcccgattaaattctctggtgaggcaaattattcacctctactcttctttgctattgtttgtatctaaaatgatgacccttttgtgctttaaccatttcgttttatcttatgcatttgagcataattttttcggcagcagaatttctcctatacataattagttctactcgtttaaagaataaatctttggggcttcttttgctttctcgcgaataagatgttctcgggggggcaaagtcagattgctagattaatttacttgtggattctgttgtcagtgtactgagttctgcttttagtagctatgtgttattaaacttttatgctgctgatagaatgtataattatgagcgtttaactgcggtctggtttcaaagactggacacctagaagtatactactggatagaatgtataattatgtactatccatatgtaatatgttttggaataattaaaatgatgtagaatttagctgtttatgatgtaatgtacactgaggctagctactacttgttgatgccaagtttaaaactctattcctctatgtttcattttggacagtcgctactatttggttgttgatctaatttcatggaatgtaaacatttgctgtatatttgtccaatatatatgtattaaattctatctgtcaaggcatgaatgattttacttttattgctttggttaaaggtaacatttttttccctttatttcctggtttattgatttggcagagcagtcattcctgtggacaggttataattgaagctctgttgtctgcacacttgat

SEQ ID NO: 78088 - DNA, 671 bp, Citrus sinensis
  Intron number 4 from transcript orange1.1g047126m (locus o range1.1g047126m.g) derived from phytozome v7.0 (chr-ID sc affold00002; pos 2062591 to 2063261 reverse strand)
tgggtcttcccctttccttccaaactaacaaggaggtaaccggatatcttactttctttattctgcttgaagcaacatatttgtaagggtttgggtttgaggttttctcatggattgcacttgctctgttgtgattgacgcatctatgtttgtttaattttgtataagcctctctctctctctttccccttctccttcttggaaaaatgattggctgtgtctgtgaaatggtctgctaggtagtgtatgaaatagttgtgaattcggtcatgaacaagggggctgtctatgtagctaatagtagattgttccatttatgattgctgataaatacagttatcatcaaactgagagctattgttttatgtgcgagatcagagcatctttgtagggcttaaagtttgaggttaaggatattagaatgttgacatttgagtgcacttacccttgttttctttcttctctttatagaagagacatagaagttggtgatgtaagagtataactgcataagggatatatctctagatgatggcaatgagagaaaaaagagaaaaaagtaaaaaagtaaaaaaggacttctatttattgagttgaaatattttgtcattgtccaattattccagtctttgaccttttttctctcccattgacaatttttcagaagagga

SEQ ID NO: 78089 - DNA, 833 bp, Citrus sinensis
  Intron number 3 from transcript orange1.1g031581m (locus o range1.1g031166m.g) derived from phytozome v7.0 (chr-ID sc affold00002; pos 3727291 to 3728123 reverse strand)
cttcccctgcagtggctccggtgctcgtaagtaactctttagtccttaaattaaatttacttatttctttagctatatatattttttacaattgagctcgaagggcaagggcatacgtaatttcgtccttacaatttaaacattggttggtgattctaaaactggcttatgggttttatgtcgtgttggaaaatttaggatatatgttgagtgtttcacaccgtgctaaacaaaaattatgtaattgcatattatgctttgacgtcgttgtctcgctgtattggtgtattagcagtccaaaacatttgtttattttatctgatgtttcagaagagactaaatgcatatttatttaaacacttgtttccatccaatttcagaaacgcttctgtaaacttttttccccttttttcttcatcaactctattgtcttggcccacagatgtgtatgttattaaattccgaaccaagcttagattctgggttcggtgtatctcttactttgattttgttttcaacttagaagattgttatccacaatttacacatatgcattgaaaggagtatgaatcagttacattttgaccagtagcatcaaagggagcactgctatgaaatttagaatggtaggatcatctttcttatatagtgccattaaattctgtcttcaagtttccatttcttacctatatagtgtgccaatgaaatttgattagtactagctcaatataacaaatatttttcatggttccttgagatgatcttacgggattccttttatgtggtattttggtatcatgtcaccatctcagccctttatggcatctagaaag

SEQ ID NO: 78090 - DNA, 571 bp, Citrus sinensis
  Intron number 2 from transcript orange1.1g007853m (locus o range1.1g007853m.g) derived from phytozome v7.0 (chr-ID sc affold00002; pos 198466 to 199036)
tgctgttccctttggaggccattttcttgcattaggtatgtgactgaatttgttcaattcttgctcttccatgattggttttattgttctgacgtttatgtttgtattgtttgtctgcaataacacttctttggacataaattggttgccatattgcatataatcttttctattcaaagatgaaattcctcaggttctggcaaaagtttgttcatgtcagaaaggagaatttttttttattggtccatctcaaacataggctttgacatgtcctatttcacggattgatccctgactaatcatggattttgaaaattttcacacaattcgcaagtttgtaaagttcatcattcttcaaaggttaatcttgcacttgcatcattatgggtagatgctttgtagttcatacaattgccagttgtttggcaatacatggatacaaatttctttgatctcataacttgtggttataaacgataaaataattctctttcagtgtatctactgtaaaacctgtgtggccttttgtgtggcagggttcaaattctgtggtacaactttccttccttga

SEQ ID NO: 78091 - DNA, 1003 bp, Citrus sinensis
  Intron number 3 from transcript orange1.1g006988m (locus o range1.1g006162m.g) derived from phytozome v7.0 (chr-ID sc affold00022; pos 557595 to 558597 reverse strand)
caagactgcagagaattttagggcactctgtactggtaattcatttttattttatttttttttataatgacactgtacagtaaatgttgattttatatgaaataattagttctactatatatttcatgctgttgcgcgattcagtaatgtccatctgctgtctaattcccatgtggtgttgacaggttgcaacgagcatgcatattttcatcatctttgttctcaatttggttggttgttagattgttttgtagtaaaatgaagtatatgcacagttgctgctggtctttgcttatatcatgaagctttacttgaaatgagaccagaggctgcactttttatgcatttcactatcatctatgctaagactcacacaactgtagaaaatccctgattccaaagcctgccacatctacaccacacccccccccccaaaaaaaaaaccaaaaaaaaaccaaaaaaaaaaaaatagatctgtaaatttgattacctcaatgccaaagatgtcttcagatgaagctattcatgtgcatggaatctgtttgtgaaacatgcctttttttttcctcacctactgaagacttgtttggtttctcaaagcttgttccctaataattggccaaatacatcttcaatgatgtggataattagtaaaatgatgatttttaaagtggactagaatggaaaacagaaatatttgctatcttttgatgtccttatattgttttggtgtgaagatatcaagtttctcatcaatttgtcatatctcttactctggtgaacaaatcttttttcatatttgtgatattattttttgttgtattgatgtggggaaactatttgcttggattagtaaaatacaattgaattaacttacttctgctagtagttggtgtgttaaagcactgttgattggttgtacaagattgtggtaaacattgatgggtttgtgatttgatccgtcataggagagaagggcattggaaagtcaaccggcaaacct

SEQ ID NO: 78092 - DNA, 282 bp, Citrus sinensis
  Intron number 3 from transcript orange1.1g018990m (locus o range1.1g018990m.g) derived from phytozome v7.0 (chr-ID sc affold00113; pos 441859 to 442140)
ttggattgattcaaattgaagcacagtatatttaggtgagttttgatttctctttaatatttttcttttataacctttcgttttcctgtcatttagagaagacaatagtgccaccacacaaagcattttgtttacgttacacttttttctctctttctttcttgcacttttgaaaatttggtaaccagaaaaacgtcattaatttaaatcattttcgaaattacttgatttaaattaattgcttaattaatttcgatattgggttggtttccttaggtgctt

SEQ ID NO: 78093 - DNA, 1006 bp, Citrus sinensis
  Intron number 1 from transcript orange1.1g030507m (locus o range1.1g030522m.g) derived from phytozome v7.0 (chr-ID sc affold00071; pos 450514 to 451519 reverse strand)
ttgttcgctctaatctgttcggacgattcgttcaggtaataaaacgctgcgtttcagtttctaaatttagatcgtgtagatctggtcctctgtaccccccgttaccgttcaaataattctgttaccagtcaaaattcagatctggcctttaatagctgtataatccaacacaataataaagggaagaatttgttagcgtgttttatctgtctatttgtctcctttaaattcgatgcctgagaagttttcacttgctctaaaatcgaaatcgaaccgtttcgtgttgaatcgattcgttcgattttcgagagttttgtagtttgattagtggatgaagtagttcgaagtttttattttttcaaggtttgttgtttgtgtctagatctgttgaactcatgagttaatctcgtcgttttctgttttgttccctcgaaatatgtgttttcccttctgattttttaatgtttttgcctaatttttctcgagaattaaagagatttatgaattgggtttgatattttagtttcagatgttgatttaacaggatgagaaaatatgaaaattcggccttgtttgaggttctgttgatgatattgtctaactttcttggctaccaaacagaattttgaattagttttcatatttttctgttcgatgttgattatttttgtgaatgaatcagccgatttgctatttgctttgcagagaaaaatattcatttattttttgttatttctttgcttgatttttatttttttattttcatactagacgttgatcatcatagttgaacatgattttgatttttttttctcttttttctttttggcgaaaaaatctcctgatttcctgctgggttcctatgagaattttctgttgtttttcctgaaacaagagagacatgtgatttgagttctatattttattgtaacagaagctgatcttttgatttttttttttcttttgaacaggcgtttttctgtttattaaagcgggtttttgaaga

SEQ ID NO: 78094 - DNA, 476 bp, Citrus sinensis
  Intron number 2 from transcript orange1.1g031119m (locus o range1.1g024710m.g) derived from phytozome v7.0 (chr-ID sc affold00002; pos 4838100 to 4838575)
cgcttgcagcgagtaactttgctgtcttggtagtagtgccaatgattcaatatgagatctctttttttttttttctgtaatcattttcattaagtttcttatgtcgcagaagacctccgtgtttatactgatgaactgaacaagtttgagatttcgataccccaaggtacataaatgataaatccccatcaaaatttgattacttggtgtataactacctatgtaatcatggaattgatgcggtacagattaaagaatggaagtgcctaatcggagactcttgggttcacatgagcctgttgctcaaaatatgaccttaaaatttgtttgtgtgcatgagttatgtcgggagttcatggaagtattttgatgggtttaaactttattggagttgaaatatcaaatttattgagtgatgagatgagaacaagtgctgcttgttgaaacagattggcaactgggcgcgggggaaccaa

SEQ ID NO: 78095 - DNA, 444 bp, Citrus sinensis
  Intron number 1 from transcript orange1.1g040956m (locus o range1.1g040956m.g) derived from phytozome v7.0 (chr-ID sc affold00128; pos 241406 to 241849 reverse strand)
caagacaaaacgcaaataaaaggtactttgcttttctaaaactttagggcttttgtggtataattttgataaatacttctattatctgaagctaatgtttcttttgctaacgaattatttttcttatgatttatcgtcaatagtgcgagtgaattttcgagtgaagaacttgtacacaacatctatctccgctatatgattcttcctcggattttttgttaacagttcttggttatctcgttatgttttgaggttgtgatatgtttccaattgtcacattaagtctacgattctttatgcacgaaatttttttgtgcaatattcctcaaattgcaggttgccatttggttgataataactcgtggatgtttatgtatttgctagttggatttgccttgtgttatttacgatttttattaaattatttgtgtaaaatttgcagga

SEQ ID NO: 78096 - DNA, 311 bp, Citrus sinensis
  Intron number 4 from transcript orange1.1g015317m (locus o range1.1g015317m.g) derived from phytozome v7.0 (chr-ID sc affold00002; pos 2219010 to 2219320 reverse strand)
cgaagcaaaattgagtctggtaccttttctataaacccatctattttccttctttttctttctttgagagatttctatatacatgctcggttgttatggtttcttccaatattaatgcttttgatgaaataacaaaactcgctaggtaggatgaagtttacattttcttgtgtttacccataagatctgaacaaattttgatatgtttgggttgacaaagagttgcttgatatacgttgtgtaatttttaaacttgaaaacaccattttttgtgtggtttaattactttttcttcttctttcttatgaagg

SEQ ID NO: 78097 - DNA, 615 bp, Citrus sinensis
  Intron number 1 from transcript orange1.1g030472m (locus o range1.1g030472m.g) derived from phytozome v7.0 (chr-ID sc affold00022; pos 1008034 to 1008648)
attctgtttgggataccaagccctcctggtgagccttttctttgcattccttttttttttaattaattattctgtttcttttttttttccttctctcttttaaactttaattcacaaatttggtatttccgctttgagttgttgttagtggatgtttggagtaaattatagtatagagtttacttggtgggttttgatggaagttaaaatctgcctttttatagaacagatcaattttacatttttagtttacaaaattatcaatttagtagcaatacttgttttaggtgattcacacttgaaagtgcctataaatacatgtgttggcagcgttatttttggtggcctactctcgttttgtaacatagttcgattgagtagtgcttgctacacagtctacacttaatgaaatgtgagatgcagatagggatagccctcgtataaatcatcctgtcatatgtgaaagtgaaacttgggacacttgacagttaatattttatagtccaactttgtatgcataacacatttattgaatttgatttcccttctcatgtttttatttattttgggttgcggctaggtgtcagccgtggacaatagtgttaactggggcat

SEQ ID NO: 78098 - DNA, 322 bp, Citrus sinensis
  Intron number 1 from transcript orange1.1g045344m (locus o range1.1g045344m.g) derived from phytozome v7.0 (chr-ID sc affold00207; pos 122656 to 122977 reverse strand)
gttccgtgaagctcaagtatgcattttttttttccttatctatttttcaatttcaattaaaataaaatctggataaattaatcaagaaaaaaaaaagagcatttaaataagcaaatattcattaactaaaagttaagtaagattatattaaaaaattcaaactgacgttgacaaccaaacaatactattaaaaaaccaatgcatgtaaatattgattatcttattttttactagcatatgataatattgactaatattttgtgcggtttttgaaaagaaaaattaatggttttgcatgcatgcaggtacgtagccgttggaa

SEQ ID NO: 78099 - DNA, 341 bp, Citrus sinensis
  Intron number 1 from transcript orange1.1g018984m (locus o range1.1g018984m.g) derived from phytozome v7.0 (chr-ID sc affold00071; pos 461129 to 461469)
atatccagcttaatattgatcatattttattgaaggtggttctattctttgcattctttttcatgtttttcgcttattggcattcgtttttttaatttgacttatttatttatttatttttatattgttttgttattggaagttgatgatgttaagtgggatttgtttgtggtaaatgaaaagttggtaaaggaaataatttggtccgttgattgttgctgaatcagttgtgttcaatggtgctgatgaagtgttgtactttagaaggatgatggatatatctttgaatgaagtttatagtttgattattttatttttggctattttgcaggccacttgtg

SEQ ID NO: 78100 - DNA, 415 bp, Citrus sinensis
  Intron number 1 from transcript orange1.1g034858m (locus o range1.1g034858m.g) derived from phytozome v7.0 (chr-ID sc affold03918; pos 6229 to 6643)
tcaaagcaagctcaagcactagatctctaataataatgcattgcattttcattttatttttaggttgactttgaagaccctgtggagaacattggggtaatcaaggattaggctggtgatggaactacttccactgtggtgttgtgtgcaacgttcagttgctggactttgaagaagaaagtgatggccaggtctgctctgtttcaattgaggatggatagctgcctggaagcatgatgattattattgcatgatatttaggtactaagatcatcatttctatcttgtttttttctttgatcggtttatcctcataagcaaattcaattatgctaatattaccattttttcacccaattttcaccgttggttgtaataacaatttcaggtactcaaaagctacagagcaaagcac

SEQ ID NO: 78101 - DNA, 774 bp, Citrus sinensis
  Intron number 2 from transcript orange1.1g046021m (locus o range1.1g046021m.g) derived from phytozome v7.0 (chr-ID sc affold05948; pos 2334 to 3107 reverse strand)
tttgaaattctagctagtatagctggtgaattgttgtaagatgctgatagttctgctcctaatattgctagtaaggatgatcaaaataacaatgttgagtgggaaaaagaggacgagggaaaattattgaagactaagcctcttgaacattaaacttttgagaagaataactttccccatatgcgtgggttgcgagggcaccgtcaaacctacacagtgaaggaattgtcacatgatgacaaaattttaattttgatacctatacaatatcaaaaaaatttgatcagctagagaaaatatgttttgctgataagtttcctactgtgagtagcacaaattcaagtggaagctattctggagacttcccttacttgagaaaatttatcggaggccatgttatcagttgaatagagccaaagttcgaagctgaattgttgattaatcagagtagaaggtcagaaaaaatatattctactacaaagtggcccaatttcaatagtagaaatgcatgtcggagtccttctggcaaagtatgcggagggtcccctcagtctagggcattagttaaaggctgcttgaatacagaggaactgcacatgaaacctcctgctcttgtcagttcagatagtagctcttttgtttaggggccgcaaaacttttgatcatttctctgagtatttgttgatatagaagtagctagaagagatgatgacgaaacatctgttcagtgctcctaactgggaaccatagtgatagcttatagaccatcaccta

SEQ ID NO: 78102 - DNA, 953 bp, Citrus sinensis
  Intron number 3 from transcript orange1.1g034404m (locus o range1.1g034143m.g) derived from phytozome v7.0 (chr-ID sc affold00053; pos 356927 to 357879)
gatctctgcatcattatcaagtacggaactattagtcctcttctagatgtcttccaaatttttagtgatatcagaacaaaggaacacttgtttagtaaactattttttttcccttgttgatttacccataccttctaaatatgtttggaaaactgagaaggttcgtttgaatttagtgctgcatgtgagtttcttttgctttttgtgtccgataccggtgactttcttcctaccattctaaattcttaatgggtgtgtgtatctatctattacattgtattttcttgtttttgtatcgttgtcagtcctttctccaagccaatatgctctgtaattatattaggacacacggaacatgtgtcactgtaacaataactaaaaacttttgagacataataagttggagatgcccaagaggtaggcactatgattacaattctaggagagaatgagactgtattgctgagcacaaatacttttgcttgagtttgtgtacatagaatgatccatttataagtgattagaatactatggtaacttaactgctccttctcccagatggaattgatggtacgtgagtcatgtgtgccgtatttggaggtgggcctatcatctatgcttcattgctatgactagaaagaatgtggaaaactatgctaaataatgatagtgggatgacttacattgttttgtacaacctttaaaaaatcaagtgtataactatttaatgaaacagaagctgaattttgcttatatgcacattgcagttgagattgctatataaaagtagtctctctttctctctctgtatcttttttgtaattttgatgaatgcattttttttttctggtttgtatcaaatttctttgttcacttatatattcttctgatcttgatctttgcattctgttgctatagagtttggcctgtcggttccaaggtgactcagttgg

SEQ ID NO: 78103 - DNA, 991 bp, Citrus sinensis
  Intron number 1 from transcript orange1.1g024953m (locus o range1.1g024953m.g) derived from phytozome v7.0 (chr-ID sc affold00034; pos 815422 to 816412)
caagcgagctcggcgttacaattaggaataaatagtgatttttttttaaattttaatttttaacgtgtcgagtctaattcccaagtgaatttgggcacattgtcattgttatacaaacacaaaaaagggatttttgggtccattttttaagaaactgatgaattctcctgtattaggaggtacttccaagttttgtttgagacaggtattagaggattttaggtgattctgaagataactgaaggatgagtgaacaatggtgtatcacagttatcattttcttttcaatagttatttccatgttatatttattaacgctttggaattgacttggtcagaattgatactcgctgttccttttttaaagtgttattttggattgcctctttctttccttgtgattgatacttgtcaaattgcaatttatgtttgacaaaaatgagcttggtatctagttctgtggtacaatcgaactttgactatggaatctgattggagatgatttttgccgtgtatgtttcatgcgcaattcttacttagtatgcctttgttcactttctgggtgggcatttttggttttggccatgaattgtgaattgtatttctgtgttctcaggagcagagtaaaattgcaggggtggggattgtgtagtagcgctagcacagggccatgatatcattcctttgatgttaatctaccgaagtgctgaggggaggcatttgtttaccatggcttgaagtatcttttatcaatttcaacctgtcggcaacttgtatgatgctaatttaactgaaaatggctattgaaactcttatgctgaacaagtgttgatgtttcattattggaaccatttggaacacaccttaaaatatccccaaacttggtaagcattatttatgtgaattaagctttttttctgattatttgaaacgatttaatataattttatctcgtttattctggatattagttggtctgtagttgttctga

SEQ ID NO: 78104 - DNA, 637 bp, Citrus sinensis
  Intron number 1 from transcript orange1.1g030298m (locus o range1.1g030208m.g) derived from phytozome v7.0 (chr-ID sc affold00302; pos 84093 to 84729 reverse strand)
ctgtttccagtatgtttaaattttaccccccccccccctttttattatcatacatacaatcttgttgcaaaaggattcataccaatgctttgtttcttctttcttgtctattcctgaacgagatgtgtacaggagagcaatgatgaaggagatgcataaaaaataattttgagaaatttgagggttacaaatggaaagttaagtagtttaacataccattaatttcatctttaaaagtcaagaatagacagaggaaaacaactgagagatccgaaatcttgtttgtgtaggctcttgttcatcactaaaatcttgacatgaaacttgattattttgtgttcttgtgggttttagttctttgttctgaatttgattatcttcttgttacaaatgaattgttataacaatgcctctaatggtcattaatcatccccatttgtaaatgttgcgtgtcatttaatacttaagaatagacagagagaagcgccccggccccggggggggaatgtatgggcgaatttgctactaaaatcttgacgtgtgtgcattgaatttataattgtacgttctactagttttaatgaaaaatgggggcatatggcttttatcctttcaggtgtgcagaatcaaattgttt

SEQ ID NO: 78105 - DNA, 927 bp, Citrus sinensis
  Intron number 4 from transcript orange1.1g032727m (locus o range1.1g032727m.g) derived from phytozome v7.0 (chr-ID sc affold00022; pos 989503 to 990429 reverse strand)
caaagaagtttgagccaaagtacaggctaattcgcgtaagttgatttcttttgtttctgtttgtcgtgggtcatgattgtggagggtggtttctactggtcaatgcttttgttcccaaatgactggtgatttctactggtcagtgcttttgttccagaatttcttaaaacgtcgtgcaaaatcttttatgcaattgagagcactaatcaaagctactaatagtaaacattgtatcacttctttattgcacctaagagctggggtgtaggttccttaaatgttgctgctacaatattggtgttacttttccattattagcgtgatgaatgaatctgttgtagcatcacttttaacactcaaatgttgaaagtgagtacaaaccttgtaaatttgcatgtgaatgaattgtatttgaagctagattattatctattgcactcttttaagctacaagttttcagttcagatgatggctgtgtaaaaatttctgaactctgctgactttgatatgatggaataaaaaagtagatttacatggttgggctgttctcaggcttcagtcactgcattgcttttatagctagaaactctgaaagtatgtcttggaaacctcgcaaagatctgttgtttaacccttcttgaagtttaatatgtttatggtttaaaagttgatgctacttccaaggcttggtcatggatgttcttgtgggcctcggatccttgtggttacacatatacacataaactcatattgtctatttataaacactctgtcaagcaaatctgtaaagaaattctatcttcaacgaagagaagttgtcttaatgaaagaagtattctttgaagaagagaattttatttcgcttcatctgatagagatttctttgtctgattcctatttttgtttgtttcgcatctatcggcaga

SEQ ID NO: 78106 - DNA, 419 bp, Citrus sinensis
  Intron number 1 from transcript orange1.1g045242m (locus o range1.1g045242m.g) derived from phytozome v7.0 (chr-ID sc affold00024; pos 678225 to 678643)
attgttgttgctccctttgcccttattttggataggtacttttttcaaaaaattattttatcttgtttttttttcaggctgaagctagcgtttagttttatctttttttatcgcatacgtaaatacgtccacactttagaaaatgctgatagaagccataaccaatctgcattttgttaatcatttttctcattttgtcactttaacaaatgcatttcttctctcctgcaaaagcctgaaatttgtccacagaacaatgctgatattatattgtctgcattttgcacgtgcagtgcaaatgtttacacctgatgattttcatatattacattgacgattttgcatgcaagtagagaaggtgtaagaactaatcatcaaatgaatattaattgttatccaacaggaaagtgagaccaaag

SEQ ID NO: 78107 - DNA, 687 bp, Citrus sinensis
  Intron number 1 from transcript orange1.1g015833m (locus o range1.1g013684m.g) derived from phytozome v7.0 (chr-ID sc affold00002; pos 4141195 to 4141881)
acttccaccaaggaaattggcgaggaggtaacttatactctcctcctatcatggtgaaatgtgttctatttcagggactcaaattttgacgagtgtagatagatttcctttttgttttatgcagatttttctagtaatactcgggtgaacctgaaaatagattagaatattatatttcactaaaagtgaatgatcatagataagtatattataaagtacagttttccactgttcttatcttgttggcaacccaacaaatgaccaaagcctcgttacaaaatattgtactgtttgccttgttctggccgttgttattgtagggagaggggtcccttttgtaaggtgatggggcttatttacaaagatgctagttgtcacaaagctagtaatatacgtgcaaaatatgaagtcttaatcagcacgggttcccactttcagaaaaaaccaagctggcatgacacttgtcgtttcataaatatcaccatagctaacgctgtaggcggtacatcattttcttggctcacaactttaattttgtggaatgtgaataggattttcatcctttaaagaaatatacagtgtttaacaagttacctcagtttaccgtagctaaaatgccccgctgtgaattggttaattacgcttattgcaggtgaaagtctctgatcttgaaggcaaggtcacagc

SEQ ID NO: 78108 - DNA, 629 bp, Citrus sinensis
  Intron number 1 from transcript orange1.1g014123m (locus o range1.1g013225m.g) derived from phytozome v7.0 (chr-ID sc affold00002; pos 909471 to 910099)
tgctcaattagctccaaggctttatcgagggtttggtgatttcagagactcttcttcttcttcatcagctggtgcaataataactcgtaattttttttttaaatcaaattaacatcatttatcttcttcattttttaattaaaaattcaccattaaattcattcttctgactacaaatttattaaagtataatcaacaaacaacaaattttctcaaaaaaatttaaaaattctggattgtctccatgcttgttattcttcgtcatctaattttcttgatgaactattcctcaaaatatctttttttaaaatatcttctttttttttcttggccctttcaaatacgactaaaaattaacatatgctatctaatattgcatgtatttcatttaagtcatcctcctcatattttcatttttctttttcgttaaaaactttgagttatttgtaatatttataggataattatgaatagtgaataattaattctttattacttctttttttttttaattattgttgcttggcttcaaagcaataataatttcatacaacttcatctaaagaattctactgatcatgttaaatgtaacagaagagccaacgagcagtattgcagcgccggcaacg

SEQ ID NO: 78109 - DNA, 442 bp, Citrus sinensis
  Intron number 1 from transcript orange1.1g039936m (locus o range1.1g039936m.g) derived from phytozome v7.0 (chr-ID sc affold00002; pos 2494765 to 2495206)
gccttctcaaccgaaaacttgcaacataaagccaggtaacaattccaaccttgcgttgattttgaagacaatctgtttcttggttgaacaatttcctagatattgagcatttctgttgctttttacccttttctgagtcctccggtcgtttgaagaaactggaaatagaattatagaaattggactcatggactgtgctcgtttctgcataatattctagtatataagcacgtccacaatgaagtactaattgtaatccaaattttcttcttgtaaacaggagtttttaacatcaatatctttattaatcaaaatttcagaattgtgagagatttcttgtttttaccgtcttgaatagattttcttttactgttagaaagtgacagcaaataagatgaattgtatttacatgataaaagttgtctttcattgttctcagaag

SEQ ID NO: 78110 - DNA, 812 bp, Citrus sinensis; identical to SEQ ID NO: 78053
  Intron number 4 from transcript orange1.1g031145m (locus o range1.1g026814m.g) derived from phytozome v7.0 (chr-ID sc affold00071; pos 266940 to 267751 reverse strand)

SEQ ID NO: 78111 - DNA, 485 bp, Citrus sinensis
  Intron number 4 from transcript orange1.1g026276m (locus o range1.1g026276m.g) derived from phytozome v7.0 (chr-ID sc affold00002; pos 2210851 to 2211335 reverse strand)
ttactggcggattttggctggtaagctgcttggtgttattggctcctaatgttttcttctttctattaatgcatctttgtggttttttctctttggttcatgagtaagtggtagcaaaattgtgctcatctttctcatggttcatttctttactaagtgtttcttatcttttgtttgatttaaattttgaatgatccgaaatgacttatggagcacaagtttagtgattttatagctcaaaacatgattgtaactacagtttcaccaaggaggatattgaatttttattaccatggtgtggtctgtaatcggaaagaaaaggtgaatccatttgtaattcaattgtaaatgactggaattgtgtatgttatctgaggtctaatttcattgtaatatatgggttgaaattgaagcaatactcctaatcattttcgaatttataaacaacagggccttccaggctacttctgccggaggaacctccc

SEQ ID NO: 78112 - DNA, 678 bp, Citrus sinensis
  Intron number 1 from transcript orange1.1g039092m (locus o range1.1g039092m.g) derived from phytozome v7.0 (chr-ID sc affold00022; pos 884738 to 885415)
agggtgattaatttgtctatatcctcttcaatttgggtggtttaggtgccaatttgggttctgggattgtaaaattgtagctttcatattttgaaaaaaataaaaaatgggtttttttttacaactaagttactggtgttggattcttctagactgtgggcacttgcattattcaacatctgcatgaccgcttgttttgtaccggaaatgttttggtttttaatggaagagggagtttctgcagccatcatgtgcagctcaagatctgctatttgttttcttcttcaacctcaaatctcgattaattgtttttatcccaaaaaaaaaaaaattgttcatggtgtttgagtatgctgagattgatggatgaagaacagctttaaccactttatggtcttttttttctttttcaggtggtgatgaagattggggaaacaacttcgctgagagagaggcatgcactatcaagaaaagtaaaacaggttcagcatcaggcaccacccacccactattgctttggaccacaacaaatataaatttacaaaaaaaaaaattctaaaatttcttttgctgctgaaagatttaatatttttccccaatatatttttaaaaaaattctctaatctttcacttggatgcacagagagatcaagcaggaggagttctgatcgagttcgg

SEQ ID NO: 78113 - DNA, 689 bp, Citrus sinensis
  Intron number 3 from transcript orange1.1g033391m (locus o range1.1g033391m.g) derived from phytozome v7.0 (chr-ID sc affold00120; pos 37837 to 38525)
gtgaatcaaggaactgattttcgtatatgttactgcaaagctactttgttcttatgatagatagattttcatatgttttagctagcatcagtaatgagttagagatattctgtctatttggttgctgtcggtgagaaagattgatctgggttttaaaattgtcgaaatcttccagtgcagtggtcaaattattctgtcaatctgatttggacactttcagtgaacttttcagtatctctttttggttttggggcatgctttagcagaattttgcttttttttttcttctgaatttcttaagatgcaggatggaaagagaggagtgagaggaaacaagcagaaattagggataattgatgggaaaggattaaaagtttatggggagacaaggagaaagttaattattttcttattaattataaatcaatctctgcctgaaaacgaaataaaccttattattttcttattaatcatataccaatggctacctaacaacaaaatatattctttaattaaggagcttctaaataaatattgcatccagttctgcatcatttggtcgcatcataaaactaagatggagatgacgagaaaaaaaaaattgcatgtactaagatgccttagttttatgtttataatttggtgactgagcaatttgattgtgttcatatgtattttgttttcaacag

SEQ ID NO: 78114 - DNA, 476 bp, Citrus sinensis
  Intron number 2 from transcript orange1.1g019551m (locus o range1.1g019551m.g) derived from phytozome v7.0 (chr-ID sc affold00002; pos 1066485 to 1066960 reverse strand)
aatttcaccaaaaacggcttcaagtaagctaaattcatctgtgtatttcccaaatttgaaaagaaattgatgtaaacgaatcaaatgatgtataaggatgctgcatttgtttgtttattttgtgtcagttttagaagcttatgatctcgtactcatcttaacaaatttatcgaatgcagacacacggattatttaactcaaatctccttgatgtttcgtagcctttgctatcgcattgattagtatatataggaccactctttttttatcatcattttctttctgaagttatgagcattatagtcaaattacttgtcctaatgatccacaatatcatcatttctgggtaatgattctgtgaaagaacaagttagtgggaatcgtttctttggtcagtagacactagaaatgagtagtttttgtttgttaactttttggtttatagagaacactcaaaaaatttcaaacctgaagat

SEQ ID NO: 78115 - DNA, 880 bp, Citrus sinensis
  Intron number 2 from transcript orange1.1g044326m (locus o range1.1g044326m.g) derived from phytozome v7.0 (chr-ID sc affold04112; pos 1069 to 1948 reverse strand)
gatcaggtgtgttcaagggcgtttaagctgttatctttgaatcttccatctgttatctttaggctttgctatttgttattcaggactcctacatattgtgatattgtgaatataataatcataatgtgataaaaatgaaataatgcataagttttgtatgaatgaaaaatgccacataacagggatatagacttggttatttgtttgttccttttaagtgtattcaggcatagatgttgacagccatgcttttggctcatatgtttggtgtgcacgcatgtcagtgattgtcaacttaactacgagtaaatagattagctatttgatgttctagtgattggtagattccaatttgaaatcttaagctctatttgggagtgctgtgctgccagagcgctcccaaaggaagctttagattgctatcatcttcttagatctggctggttttagaatgtctaaactgttttggctggttttacaatgtctaatttgttttggcattaatccagcttgtgaatgaatttacttttttatatgtcaaatatttttctagaaactttgttatttttgaaagtatattccaactctgtccgataactctttcttgattgaagaaaatgggtattttaagttagttctgtcaatttctgatgtccgtctacggccatggctttgttatattttctaacaataattttttgtttcctctgttggtttcataatccgtaatcttcctgccatattcatcagatacaaagtttaaacaatttctgtccgatatatattttcttttcttctttgtttgattttaatcataaatgacttcattttttttccgtgtttttctcttttcgcagagtttcttttcaatttcagcata

SEQ ID NO: 78116 - DNA, 1010 bp, Citrus sinensis
  Intron number 1 from transcript orange1.1g001374m (locus o range1.1g001374m.g) derived from phytozome v7.0 (chr-ID sc affold00002; pos 3656830 to 3657839)
atatcccctttaggaagctacattactcctggtaggtgcgttatcaaccagaatcgtcttcacaaattattgttcaatttactttgtatgtttgtcattttgttttactattttgagttcgtgttgtgttttcattttgctacttcttgaaaacagtctctggctttattttaaaatcaaccaaactctgaatgcttttgtttcttatctttcttttgtttttttgtcggtgtggtttgtatctgttctttaagagcttccgtttcaaggttcccttctgtttgtttctggttttgatttacagtttcagcacttaacattgtgggaatcttttgtttttaatcctgattttggaatttattcccagtgttactctgtcactgtcattttaatctgaattcttcttcttcttcttcttctttcttattttttccttctacaatcctcttcttcttattattatagcttatagtgtttccgattaatttggatctcatttgatttatatttaaaataaatttattaatatttaagaaaaatatttattattttttttaattttttggtagtttcttctctcattcgatgtaaaattgtataatatcttaagcgaccgatatatattcagatcttaagtgttgataccacgcaattgatatacttctattggacgcttgaaacagtaatgttctggacgttttggttttaaaggcttcagattttgatagctgtataacaatgcatgattgaattggggagtcttatttcagttcaataataattttattaacaaatttttttgttggattactgttatcattttaatttcacatgctaggcaagtacttagttattcagttcttcttgcatgtctcatcactttttgttattttcctttttattgtttcgatttaattctttcttagtgaattaagtaatgcactattatgcactctcttttttgtatacttcttttttaattttaagtactgcaaacgatacagtttaag

SEQ ID NO: 78117 - DNA, 374 bp, Citrus sinensis
  Intron number 1 from transcript orange1.1g030119m (locus o range1.1g030119m.g) derived from phytozome v7.0 (chr-ID sc affold00053; pos 673539 to 673912 reverse strand)
ccagattcgtgttgttcctaattttcccaaaccaggttcttttttcttttccctatttcttttgcttcgtttgtttgatttgtgggaaaataaaggacatgcagaaaatgaagtggaaagaaactacaggttgtcaatattaaacttttcttttggaatcttagaattacaaaaagtgtccgctttctcaagttctataccaagtgcttaacttattaaaaaaatcattttttttaatacgaattcacacagtctcataaattcgcctcctccaagcaaagagtttctgtgtgcatatgtgtgtttttagttttagtttttgcataactctttttctatatatttgagttgttaatgaaaaaatggcaggtatc

SEQ ID NO: 78118 - DNA, 618 bp, Citrus sinensis
  Intron number 1 from transcript orange1.1g011957m (locus o range1.1g011952m.g) derived from phytozome v7.0 (chr-ID sc affold00100; pos 418989 to 419606 reverse strand)
tggtaaggtaacgtatgcagttttaataataataataattaaataaataaaattaaaaagaaaaaacaatgttattgttattattactttggggagaattgaatgatctttggtatctttgtctcttgcatcagtttcagtttcccttttttttttcttttttttttaactttttggggttttcctttcagctccagttgcaattcgcactcgtaagtttccaatttttgtcatcttatgtggtcggaattttttcggtatttttgttttcgatgctaatgttaaattgctcttgttttattcttgaattgatgaattttttcattaggatttctgtttggttgccaagaaactaaaactgaaacttaagcttcatcttcactctgttgttattttgattttctgaaattagacaagagatttattttgattttctgaaattagacgagattattgaactgtttgataaataactcgtttagtagctacctatgaaatgcattggtattaaattgtgagattgatatgataattactgataccttcttgtaagcagtggcttcaaacagattaatacaaaaagctggattgatatttgttgctttttgaaggattttg

SEQ ID NO: 78119 - DNA, 878 bp, Citrus sinensis
  Intron number 1 from transcript orange1.1g005475m (locus o range1.1g005475m.g) derived from phytozome v7.0 (chr-ID sc affold00181; pos 140381 to 141258)
gggaaggacctattaggtcaaagaacgagctgcaggtacgtaattgtggttgtgctggtatgctgtgttaaaaatcttgctgatttgtgatgaatgccaaactagtaaggtctggatcatggatattatgtgctttagtttgtggatgctggtgtgtatggtgccaaactagaattaaagattatttttcattcacaattcaatcaagtgaacctttttttaatattttattcatactcaaaaggcagaaatgattatcctagtttttatttccatgctacctttttaatattaaccattggattgtttacaagttttcactgcctaccaaatgtttttgctggcatgcattttgtaacaaggcggctgttgaggtccaatatttattgcagtttggggaggtagagaaaacggagattgtacatgatttcgtaatcattcagttcaaatatcagaagtgaaatgcaatatgcattaactttttgttgcttaagctgaagcatggacaccttgtaattgtgaaagtttaggatatgaatttgtgatttatgactattggaccttattaaagtttaggatatgaatgcatggctcatgaagactgaacaaagtcacaaactttaatttgtttgcaacttttgtatttttgacatactgttaaggaaggttacagtttatgaattctagttcttgctttagaacttctatggatggtctatttgtgcacgaaacatgcttaaacgcttttgtattttgttataaattatgatccaatgaggtgatatattgcaagtcgttggttctgtttactctatgatacttacaagttcatggtttctatgaaatgttgcaggttctacccctggtccctcaagtga

SEQ ID NO: 78120 - DNA, 751 bp, Citrus sinensis
  Intron number 1 from transcript orange1.1g038371m (locus o range1.1g038371m.g) derived from phytozome v7.0 (chr-ID sc affold00034; pos 783635 to 784385 reverse strand)
ttcaagtgggtaaaagcacaattcctgctgtgccggtgagctcctattagtagttgatttcttttggcattaattgttgcttatgaagaaaatttaggatggtgaattggattttaaaaacaggctatgagttgttctttttgctgtatctaatgtccaaaagtttcagtgttggttcatctttttgaatggtgaccaaaagctattgcattaatttcgaaaaatcaccctccaggttggaacttcaaggatgagctttttcattgatttggtcgtaagagagtaaggtattatgatcagctacacaataagtactgtcttaattgaataagagttaaaatggcacagcatgcgtcaatcctttaattggttgaactgacggctgtagtaggcgttgcccgtgattgagataagatatattcctgtttcttgtgtgtttacataatgtggatattatatagtgtattgagtaatgatggcaatgacccaatatatatgatatatttgtacatctatgaatctttgtgttttcttccttactttgattacgtgtactgataacttgtgtattgcttgcacagaatcatattccaagcttgaggattgtgtttcctactgtgttctctgttctaattctatatagaaaaggatacctgtattgacacgattcttttcttttcacattttaagccttatcttgctctggttttgaacaggttcaggtggaaagaattgatattggccatctgga

SEQ ID NO: 78121 - DNA, 398 bp, Citrus sinensis
  Intron number 1 from transcript orange1.1g040529m (locus o range1.1g040529m.g) derived from phytozome v7.0 (chr-ID sc affold00002; pos 4533379 to 4533776 reverse strand)
cactgctccagtttatttacacggggcggacccaggtatccatttttctcaccactcgtctcaactatccgatacatctcgcagcattgtcctgttgcttaatttctttgccttcaaatcatatcttttgtagttttgaaattggcattctggtttgggttcaaggattgtggtttaacctctctggtttcatttctggctcatgtcatatttcatatctattcatcttgcatctatctcctccttgcttttttactcgatatctgtctttcttttcatctctgtttcttttaagcaaattctaagtagtgagaattatttcaagcttttttaatattatttaaactcaaatgtggtttttgtctggtgtagatttcagagccactacttggtccctt

SEQ ID NO: 78122 - DNA, 655 bp, Citrus sinensis
  Intron number 2 from transcript orange1.1g024160m (locus o range1.1g023147m.g) derived from phytozome v7.0 (chr-ID sc affold00348; pos 126830 to 127484)
taactaaggctgttcaagtgagtttaggttttgttttcatttttcgaatgctatagatgtacatataggattaggattgctgttatgagtcaagaataatgtctattagagttttgagattttgaatctatataggtacaactgttcaagttataaagacttacaatgatgcttattcttgctaataaaaaataacaaattatggcgttccccacattttcctagggattatgatttgagaagagttgttgagattttaagggactggtgcattttactgccattttctgactcatggactatagggaatgtcctttcttagttatgtgatttctatgccaacttctgagaccactttacatttttcttttatgaataaagaaaaagtgtgctctcaatctagcacccaataatatgctatctttgggaatgattaaaaaaaaaagaagagagagagagaggaatatgtctaatcacgtggtaattgttactgatgaatgtattggccatgcaagactgcaacaataataaaatcatttgaggttaaccaatatgggaatgagaatctgttgctaagagatgtagaaacttagggagatgatgagtttagatgcttctcaaagcttgttctgactgttattttctgattacagaa

SEQ ID NO: 78123 - DNA, 698 bp, Citrus sinensis
  Intron number 1 from transcript orange1.1g016303m (locus o range1.1g016251m.g) derived from phytozome v7.0 (chr-ID sc affold00022; pos 537496 to 538193)
tgtcctgttcgttaatatttatctctcttttccaggtctgtcccacttctatttttctcaatcacgtttaatttttttgtgattttattacataacggtgttttcaaattcaaatacacatatgggtcactttagttttagctcttgtatttacaatttctatcttttcttgtaagtatattgatttttttttttttgccccctccctttccttttctgtggcttcaatttattttttccaatattttatcttagcacgcggctgataatatttgacaagaaaactggtgtcaagggattttgtggggcttgatgtagagtgcttttgttttctaaattttgtgtgttttggtttattttgttgttctgctaacggtatgtatcactgaaaattatatatttttcttatttgtcattttttattgttcattctgatctttgtttattcgtttgtatttgtgatttctctgttaatgggtttgtcacttgctgagttttgaagcttgaaatctttcaagtgctttgaggtttcaaaattctatatttcagtgtggatgggttgggtggagtgacttgtgtaaattctacatacactaatcaacaatcataatttatgatgatgtaggtttttgaatctttttctaattagcttttatttattatcggatttttcaggtttaagatttgagtttggaata

SEQ ID NO: 78124 - DNA, 421 bp, Citrus sinensis
  Intron number 1 from transcript orange1.1g028730m (locus o range1.1g028730m.g) derived from phytozome v7.0 (chr-ID sc affold00053; pos 244145 to 244565)
ggtactctcccttcatctgtgtaatattaagagtcttttcgttcaactagaaaacaatggagccattaacataatgatttggagtttcaaatttttccttcgggttttgcttttaatgagcttttcgtgtttatcgcatgatctgcgtggttgtacgctttcgtctgttagatcattttattgcagtaataaatgaacgaagccattaacaagttttactggtgttttctgaaatccattttgcacttaatttttttatttattttacaaagtggatgctttccgactcaaaacattttaggttggaagaataatgttcttgtagtctttgatgcaaaattggtataatgctggggtttgtttttccaaaattttaatgggattaatttaaaacaggggcttacacgttcgtgtcggagct

SEQ ID NO: 78125 - DNA, 861 bp, Citrus sinensis
  Intron number 2 from transcript orange1.1g028730m (locus o range1.1g028730m.g) derived from phytozome v7.0 (chr-ID sc affold00053; pos 244673 to 245533)
acaaggctcgacgcttgggttacaaggccaagcaggtaatgattatctttgtcttacctgtatatagttgctttttttgttttggcttttttttggggggggggggggtgatattatatttgttatttggattatctggaatgtgatctaggtgttcatatgcttacccaaatcacaattgatagtttaacttggtgccccatagctggaataattttgcttaatggaaaagtggatttattacttttgtgttgtttaattacagctaagcccttcgaagatattaaatccgagatgctagtagtcaattttcaatttttcagcactgggctggaagattggactcattgtggtcatgcattcttgcatttattgcttagctgtaaaaagtgaaatgacctgctttattcttgctggttaagcggctccttgacgtgttgatgatgggttgcttcctgagaccagctacattaaatcaacagtcgatcatccgaccaagtggattctttttgtttgaatttcactgttgtctcgatccgatacattattatgacaatattttgttcttgtttcttctcttttcttttgtttcacatgtatatattcactgtttgttttgttggtgctttcttaaattattccttggtttattgatacgtcagtccacttttccttttcatgttttgatcaatgtacatgcgatcttacttccatctttcttggtctctaactgtgtctgttgcgtttgctactgttcaatagtgaatgatttttgaggattctccatttccttattattctcattccctgatgtcttggttaatgtgtctatggtcaacttttttttcctttttcagggtt

SEQ ID NO: 78126 - DNA, 475 bp, Citrus sinensis
  Intron number 1 from transcript orange1.1g021011m (locus o range1.1g018659m.g) derived from phytozome v7.0 (chr-ID sc affold00022; pos 291590 to 292064 reverse strand)
aaaaaaaaggcgtgggaggagaagagtcatctagggtttgaagttttgtagcaccaagtccaacaaaggtctgttatttggtgcttttttattgtcatttttcttcttttggttgtagatttcgatgttgaaatagtttttgcgtttttgaatcctctaactgggtctttttttctttttcttttttttttctcccaattgattttcgtagaatctgatcttctgcgtctagtaatttggaagttcaaacgtatttgggaagtttaaattttttaaactttaattggaaaaccatttatgggtcagaaaatggaaatttgacttaaaaagatttttttctcccgtaaaaaagttgagatctttggagtatcttatggcctgttttggtttggcttttttatttttggggaattagggttttttgggttaatatggaggaggttgaagaagcgaacaaggcagctgttgagagttg

SEQ ID NO: 78127 - DNA, 770 bp, Citrus sinensis
  Intron number 1 from transcript orange1.1g009847m (locus o range1.1g009847m.g) derived from phytozome v7.0 (chr-ID sc affold00226; pos 245106 to 245875)
ccttgcttaagttctctattgataagcgtcccaaggtaagaatttcttttaaaaatctattgataaattgtgatgactttcaatctgtggtaatgttatcagggtaaatttgttttttcggaactcagcaaattgtggtgaacttgacgtgaaatttgtaatgattagttatgtgagttgtaatgtaatagtttaaacttttaacacggaatgcagaactcataacatggttaaaagtcactgttaggatagtatttctggcctggagtgatagcattacccttgatttgaagatatactttgtatcaaattattaaaccaaacatgatcattttgatgatgctgagcgtggtgttactgcattggtctattcaatgtcaccaatgcttatccagaatgttctcaattttgggagtggtatgtggttaagcaagattattttatcctaagatgtataattatgtttactttggtaggggctacatgttggcctattgggtttgttaaacttatgctttggctgccattagctttgattgacttgaggtataaaactttggtgcatgctgatattgtgaccagtacgtgtttaaattgattgcaaatcatattgtagtggttaaatctggactcaaatttgactttagagttatttacataatatttactcaagggggatttggcgatttcatatatgatggtaaatcaatttgagttaatgattatggttctttatgattttttttttctctcttgctgtaggtcagaag

SEQ ID NO: 78128 - DNA, 891 bp, Citrus sinensis
  Intron number 1 from transcript orange1.1g006018m (locus o range1.1g006018m.g) derived from phytozome v7.0 (chr-ID sc affold00983; pos 10751 to 11641 reverse strand)
tagtcccagttttctacctcgttgatccatcagatgtaagaaaccaaacaggaacttttgggattcattttcgaagcttgaagaacgatttaaggagaagatagatatgctgtaaacatggaggattgctatgagggatgcagccaatctatccggctttgattctcatggcattagataactcttttcacataattttctaccatctcgtgtaaataatcacaatggggaaggaattgtacatagtaagattttgaaagcaccaatacacaattgacaataaagtttgggatcacaatagttgagtcataacttgagtccaaccgttatgtgtcattcatctattagatagtaaatatcacattattttgatttaaactatggctcaactattggaatacctaacgttaattaatacttaatatttgatgtaaatagctggaatctcttctaataatatgtctgatgtttcatgagatccaagttatccctaaaagagacggaggaaactcttaacctcttgcttctaggaatggaaaaacttaggggccgatcgagtatggcaatgctcggatctggcgcaaacatgttttttggacacccggctggggcttttttatctggacttaaaagcctggattttatattttgtaatatttatatgtacatttttttattttttattttttgtgaaattgggaatgaaaatatgaaattcaaatatttaaaattttaaatatatgtagtagttgagccaaataaatataattatttaaaataatatatattttataaaatttgggctccgaaccgaaccacgagcttatcaagtaatgcccgggaccagtttggcctcattcccaggccgggtattgcccgagtttaggctgg

SEQ ID NO: 78129 - DNA, 1010 bp, Citrus sinensis
  Intron number 1 from transcript orange1.1g016160m (locus o range1.1g016160m.g) derived from phytozome v7.0 (chr-ID sc affold00024; pos 920081 to 921090)
actgcctgggagttttaggtcattaacaaatttctttttttcgattcctgcttgaatgggcaatattcagtagcgaattttgttttattagtgtcttcttaatatacgttatcttttgaaaaataaattcttaaagtttgttgtttgttattaatgttttctttcttcttagtggagtatttattcgattcttgaagtataatttgtgtgatcggtaagaattggaatataattgactgaaaaaattaaaaattaattttagctttaaaaaccggctgaagcacaaactacaggcagttaaagccgcaaactagagaaggtgtgtgatttgctgtgtttgcttgaattttgaggtccctatggaagacttttgtttgttaagttttcggagtcttaatttctctattgagtggcttgttttgcagcttttggtcttgttaggaggtagaaaattttaagttcactccttgtacttctgtgcgtggattgttttattgtttttggttttgactgcaaatgattgaatttttctttttagatatagaaagaattgtttatgtatggtgcctgaagttaaaacacagcatatctgagcttctagtatgattgtgattatttatttattctttcttctgtatttgtttacaaaactattgaaaccccaaaattagttagtaataacctggaaataccgagattaattcattgagtgatacagaattctttctcctttaattacaattactgatcagttacagtaactagatttcttttgctgtttctggttactttgaagttttaatattagtgttggatactgatgtgaaagctgaccgatgagaacagaattttggaacttatacggtgtactatctttctgttgttccttgttataagtcatgcatggttaagtgaaatatgggttaaccctgtctcagttattttagaaataattgttatgtttcttggattcaggtccagaagataacgtggctgaatactatcaacag

SEQ ID NO: 78130 - DNA, 873 bp, Citrus sinensis
  Intron number 5 from transcript orange1.1g029958m (locus o range1.1g029860m.g) derived from phytozome v7.0 (chr-ID sc affold00002; pos 4111855 to 4112727 reverse strand)
gattaatcaaacagccaggattgcttaattcatcggtgaggattactgaattgttaatgtcctgaatgctaattgttggattgcataatatggaaatcgcgcacatgggcattgtttcgattattgtatgtgatattatcatgtttttgactttacaacctcttgcttgttatcttcatattggtcattatcttttcattatttgtttaaccatcattttgttttctttctcttttttgtacaatgtggactaaaatcccaaactgaacactcaccacgacgggagaatcaaaagttatcagttgactttcgtgataaatctttaggtttcagttcataagccatcattaaaatgttggtcacacagagtaaccttgaccctgccttttcttattcacatgcttgtacgggttgcttgttgcttctatgatgccgtcaagcataacagaataagcatgtgaatttcatgaggtgaagaaaacagtcttctgtttggcttcatgactagttctgttattgagctaaaacgagtcttgattggaaattttggagtttggaagagtaaagtttttccatatggtgatgccacaaatccttttgccactgatggaagatagctagaactaatatttaattgatgtgtatgttgtcagctggacatgtcattattgagtttgttatttttgaagtgtttaattagctatttgaatagcttcaactccctgctggactttgttcttggaatcaactagctctttatagactaattatgtaaacaagtaaaattccacttatttatcacaccttaagtactgtaatgcgaatctgttgactaaattgcaggcagatagagaaggatacattgcgatcatc

SEQ ID NO: 78131 - DNA, 1044 bp, Citrus sinensis
  Intron number 2 from transcript orange1.1g005403m (locus o range1.1g004435m.g) derived from phytozome v7.0 (chr-ID sc affold00128; pos 133358 to 134401)
aagataatcgaaggtgtattaactgtaacagtctggtatgtatttaattttctttcgtggtttttgctttatattgaatttaattaagtgctggcatcataaatttgttgtttgtataattgtctcagatagcacaattatggaaatagacagtttgcgaattgttagtgaagtataattggtgtcggatttaaattgtgtagatttgataggttgttgatggtataatctaaattaattagtactatgaaatattgctaaataaattgcgaacaaaactatgagggaacatgattaagtggggttattcacagatagaattaggtacttggataggggaaaaataatcctgtggattcaggcaattcaaatacttcttaatttgagttttccttggaatcaaatcaaaagtatagtgaggcactatagagattccactagtaatgtgcgagactttgatgaattagctaccttcctcgaaccttttgcaggatacgtgcttcttttttaaattaaagatgtaaataaaatacatcttcaattactcacctatatcttgaattcctcacatctgattgcatgtttctggcagtttttttctgaaggtttcgtgtcttgcaacataatggtttttagatcttaatgtgtccattaagtatatgaactctagaaattccatgtgtgaggttaggacaatgatgaaataacagtgtctgggttaaagctctatgaataaccaatgcaatcttggaatgctaattcctgaaaattgcttctgaagctacacttctaatgatttccttccctgaggaacttttacaaattatccacgaatgtctgtgacatttttgcaattggttggttaaattttctggagtaatgtctgagctggcattgcaaatatgaaatgattcatgccatatttcattaatgataccatagagtttgtagtgcatatgccaccataccttctgcctatagaagcaaaacatattatctgttgtattactgctaacatactttctgccaagcagggaacacaat

SEQ ID NO: 78132 - DNA, 833 bp, Citrus sinensis; identical to SEQ ID NO: 78089
  Intron number 3 from transcript orange1.1g031166m (locus o range1.1g031166m.g) derived from phytozome v7.0 (chr-ID sc affold00002; pos 3727291 to 3728123 reverse strand)

SEQ ID NO: 78133 - DNA, 499 bp, Citrus sinensis
  Intron number 1 from transcript orange1.1g003983m (locus o range1.1g000918m.g) derived from phytozome v7.0 (chr-ID sc affold00002; pos 2285566 to 2286064)
ggtttattttttcctgtcaaccaaagtccaagaaggtcagttcgttgctttgttaaaatttcagaatcattatactatatttttattcaaattgtatccttggctaatagaaatttattttatagtttatacatctatgttatttgcattttaaagttaaccagcgctagaaaaatagcatactgtgattaatgtgcttgtctttgattgggattgtattcatttttaattttggtgttaatactcaaatacagtcctatgaaaatcaatattgagtgcgtgaaagtgctttgtatatgagacatctgagtgcttgtttcagctagagcgaaaacatcacttaattattgtgtcattcattttgctctgcattgtttattattgacatcgtgcgcttggttagtgaatgtttaaagtctgatcttgttgattcttctgagttgtgttttaccattgatatatagcttttctgtgggagcagcattcaagacgtagttca

SEQ ID NO: 78134 - DNA, 473 bp, Citrus sinensis
  Intron number 2 from transcript orange1.1g002923m (locus o range1.1g002923m.g) derived from phytozome v7.0 (chr-ID sc affold00002; pos 1449995 to 1450467 reverse strand)
cgattacaacaggtgagaattaatggctttgtcagtgaaattgaagaatgcccatctggtgtttatttattgatttgtctttgatgttttgcttcttttttaactgttttgatcccgtttcattgttttagtatgagaatagcatgtcaattcattggtagtagaagaaataaaataaacatgttaggtgaattatggatgtaagcacatgcttagttgaggtgtttgttaaaatgtattggtttaatttttctcttttctttctgttggagttgttaaagggtgagaatgaaaatgccgaagtgaatgatttgctggcagtggaaaaactgaaatagttaaagttctggagatactcttgattcttttttcttcttttcctgtggacttttaggatgaggattctttgttgtatttttttttttttttggggagaaggattctttgttgattgaaaccgaacaaattgaaca

SEQ ID NO: 78135 - DNA, 942 bp, Citrus sinensis
  Intron number 3 from transcript orange1.1g026996m (locus o range1.1g021362m.g) derived from phytozome v7.0 (chr-ID sc affold00022; pos 370589 to 371530)
agccaacggagagaaattcctgttgtagaggccaggtatcgtcaaacatcattaccattgaatttggataatggcaatatctgttgttgccatattggcctctgttcaatattgaagtttataatgataatctacgaattttgaagatacttagttaccttagtgattagaaaatttcttattgaacttttggcttgtagatttgaaatcatttgttcaagttgggattcctaagtatttatgatttccctcagcttggagctttatgtatgccaccgaggcaggaagtactatttgcaaagcaatatgccgtatacctagctatgaattttagagtttttcttgtttatcaaaattgtgaaaaatacacacggggacttttattttggttaattttacgtttctcttttcagttttggttcttgtaaatcatctcaacatgtttataccaatgtcatgtgcttttgcttgtgacactatgtgcagcttgtccatctgttgatatgaattttcatattttcttaatttatctatctgtttagtttataatgaaatgtttactgacatttaaaggtgtatggatgaagtttatgatgctttggctcaacgtcttcttcctacatcagcattagcctcaaatgtcaatgtgaagtgagttctattgtcttcaatgaagcaaaatttagattttgatatcttatataaccggtggttgccttatgatgaagatacttttatattcaaattctcaacaaaaatagttcaatgtgaacatttaataactattttcagtatttatattcaatcatcgtttaatgatgttgggattctgggaagagtgttatcttttgttcttagtattcagttacttcatcaaatgaaattgtctatctgattaactatgcaggcatattgtgggtttggctggccctccgggtgctg

SEQ ID NO: 78136 - DNA, 438 bp, Citrus sinensis
  Intron number 1 from transcript orange1.1g019242m (locus o range1.1g019212m.g) derived from phytozome v7.0 (chr-ID sc affold00053; pos 96107 to 96544 reverse strand)
gttagagcaaaaaaaggtggtagtgtggaaccgaggcaattctctctctcaaatctcaagaaatataccaagtcacaaatttagggttaggatttctgggttaggagttcataatttccataattgatcattctgtattttttgattttatttacgatcataccacaccattcttcgccttgttttcgccgtccgatcaacccaatttctccgcaatatggtcctgatttcttccggtggccagaattcagttatcaggctatcaatccctcttctcaattccttttcctgtacagattcaacgctccgtttgttattttgtgaaaattagctttttaaaaaattacatctcgatttgttgttaatcacccaattgtgtatgtttttttatttgttttaatagggttttctcggtggcgatttctgtaattaatttag

SEQ ID NO: 78137 - DNA, 354 bp, Citrus sinensis
  Intron number 1 from transcript orange1.1g033901m (locus o range1.1g033901m.g) derived from phytozome v7.0 (chr-ID sc affold00002; pos 4314864 to 4315217 reverse strand)
gaggaaagttgatttcgagcagacccaacatttgggtgagtttttagctttttgtgtatttgatatttacgagttgttatttgtctttggattaataatagaagaaatgaagaatttttctttttccctttgataataaaagcttattgacttggttgattctgatatggactaaattgatacaaaatttggcgctttgagtatttcgagattctagtttcaattaatcatttcatctttagagtttggaatttgtttatggttttattatgcgtgtaatatacatgattatcatgtctgttgtctactttggggctaggacttttttcagaaaggaaagtggctgtgaattgt

SEQ ID NO: 78138 - DNA, 679 bp, Citrus sinensis
  Intron number 2 from transcript orange1.1g035226m (locus o range1.1g035226m.g) derived from phytozome v7.0 (chr-ID sc affold00875; pos 24677 to 25355 reverse strand)
agaagatcttgacaagttcttgcagcggattcacggtaaatcctgtctcttcgtttcatattttacaaattgttgcatgtttatataagtttttaaatttctctttatttatttggataaatttaatatgaaatttcagttaaatgttactgattttttatcaattgaaagtgttgtacagagctcgtttctttgattggttccttcggttacttgtttacaccgccaagttgagccagcttatatgcctttagatcgcaaattagtgtactacatgatttggtctttgatccaagttttgattgtcttttattgtcattgttcattgagttgtgatttcctagagcctggcttttcaaactacattagtgaaattattttagtatttaaacaaattaacaaatcataataatctaagacctaatctttcctgacatattcatccattgcttagcttagcgtctatgagtcatcagaacaccgggggctttttagggagatctctgcgcccctgacagtcattattcttgtcatagcagacatgtaaccttatcctgttgcctgcttttttcacttttggtttttgttttttgattgagcagcaatgcacgttgtttttgtgtttatttactattttttttctttatataattcttggttttatgtttcatccagaaaa

SEQ ID NO: 78139 - DNA, 528 bp, Citrus sinensis
  Intron number 1 from transcript orange1.1g002319m (locus o range1.1g002317m.g) derived from phytozome v7.0 (chr-ID sc affold00002; pos 4571551 to 4572078)
acacccatttgagcgtcttcaagaatctgaaactagtgagttattctgctgcctttgatttttgttttgcttagtttgcttattatgaatgaagatgttatgtaaatttcatggcttttttcctttgttggtaagtgtgtagttaagtgtatccctgtgtgctctgagcatattgaacgaatctgtagaaagtgggttgttgacttattgtattgttttgtttttttcctttttatgtctgaaatttatggctgctttgattgatatgatggtccataaattgggttttattctctaattaatttgccgatgaatgatgattctttgactgatattggatgtgatggcaaaaaagacagagggcttaatcttcgtacaatatgcataaaaaaaatcattttttgttatttgcctgttcaatattctggactttcttgttcttatctcaactttttcttctaaatgattcttaccaacaatgtctcaacaacaggaagaaattatattttgaagattggatttggtttt

SEQ ID NO: 78140 - DNA, 596 bp, Citrus sinensis
  Intron number 1 from transcript orange1.1g042797m (locus o range1.1g042797m.g) derived from phytozome v7.0 (chr-ID sc affold00024; pos 1010487 to 1011082)
gtagcaaagaggagagaaaatgttggcggcagagagtgaaagatattacaaaatgttggagaagaaaaaacggatgcgaggagagagaaaatgtacataaataataagatctaaaaagactaacaccatttaatctaactattaataagattttaatccaaatgtctaaactaatgtaaaattatactactgttgattcacctcctatttatatgtttattaaaagtgttagtctatttcaactaaaatttattacttaaaaattttaagacaattatccattgactacatgttttttcatttttaaaaaaatacatatatatattttttttataaaattccacttgagatttacaaagtgtatcattgctctgctcccatgcatcattaccttgttaaaatattgttgacatcagagagttaaaattgtcctttgaaccgaacgcacaaaaaggacaacatattccattgacaaaaatgaccaccaactactggtgtgttgctgttacccctaatacccaaatcaaaccgaaaaaaaagagataaaaacacaaaacatatacccaaatcaagatttcagaaaaccaaatcaagtc

SEQ ID NO: 78141 - DNA, 685 bp, Citrus sinensis
  Intron number 1 from transcript orange1.1g016264m (locus o range1.1g016060m.g) derived from phytozome v7.0 (chr-ID sc affold00044; pos 96435 to 97119)
aagtatttgccgcaaggggaaaggaccagagtatgtcaatttgaaaattttctttttccttctttcggttatgggaatcaaaacgaggatataattagaagaatattcgaaattctgattggggttttgcattgcttctccttcttgaatttctaacgtaacggacatgtgtgattggatggaaatgaccaaaatgcccttgagttctgtttggtatgataaatgatgaattgtggatggaatttggtgggaaatttttgtaattgtacttaattggatgataaacatatctaatgataaagctactctttttaccgtctcagaattgtgcattttacaaaattctattaagctgttatgaacatatcatgacttcaacaaccattttagctgagtttctaagggtattttcaggactaacatgctgaagcctcactttgaaagcacgacaacttagagtttgctaagtgcccctcttttcttggtagctgatatttactgccctcgtggacacttgacagctagtgatttcagccattctttttggaaatattcatgcccattttaatttaactgtcatctgtatttaaatgatttcactgaagaagacactttataatttgatttgaaatttcctgtgttaggttcagagacatagggattaccggcagaagataataactaa

SEQ ID NO: 78142 - DNA, 750 bp, Citrus sinensis
  Intron number 1 from transcript orange1.1g017965m (locus o range1.1g017965m.g) derived from phytozome v7.0 (chr-ID sc affold00024; pos 1335543 to 1336292)
agcccagacccgacccgactaaagtcgccgtcaaggtcccattcttttttttaaaaaaaaaattgataatttagctcaatttgataatttgtagttttgataaaattattgtaatgtagagaaaaaaattaaatatttgttatgtgatatcagtttctatgaactgagtttgtgtagtttagattatagttgtagttttactcaaatgtttactaggaaattgttagaggttttgttaattggtagcatttggtttgttctttgctgttgaggcaagaataattgtaaatttattaacaaaatatttaaagggtatgcttaggattaaggagttgggttcttgaatccacagttgctgtggaatgaaattattagttgcctggcaaaagtggttgtttaccaaatgatttacttgtgctttcagaattaagcagaagcacacaatggttacaaatgtatcctatttgagaattgagattgatataataaagcattccaagagagttacgttgtgaatgggtggctgcaatattgcggcaatcattagcttaggcagtaggcggaggcattcctgcagaactaaggtggactatagttctacctctggaatcgggttgtagagatcgactcatgaatattaatgttaaaataactaaaacttttaatttagtaatcgcacatcatgtaatcacattgtgccttgcttcataaacagaaaaagaaagaggaagagaaagcaagagagaagga

SEQ ID NO: 78143 - DNA, 574 bp, Citrus sinensis
  Intron number 2 from transcript orange1.1g029273m (locus o range1.1g026322m.g) derived from phytozome v7.0 (chr-ID sc affold09216; pos 425 to 998)
aatgtaagatgctggataaatatcggaggatgttgatgtaggattggacaaatgactattccttttcttttaacttttgttttcattctttttagttggaaacagacaaacttttatagataaataaagggagaaagatttccaaagtaaactagagttccacatactaaaatttcattgaaggaacagattattaccaaagggcttctcatacctgatccctggatttaggtttagttgagctgacagaggtcatgtattgattttgtttgattgggcttttttcacattttagtaaattttgggacttgtatgctgtttgaggtatagatatgcgtttgttctatatggttagtaggtagcttttattggactgtctttgtttcccttgtgaacctctggttcacttccatatcatcttctctttcattttgataaaattcttatgtttctggtacagagcataacttccacaatttacataattctgtatttgtgaataaaattaaattttttccttacccatcatatctttatgtatcagcttactatgctcaggttgctggccttgatt

SEQ ID NO: 78144 - DNA, 473 bp, Citrus sinensis
  Intron number 1 from transcript orange1.1g000157m (locus o range1.1g000157m.g) derived from phytozome v7.0 (chr-ID sc affold00351; pos 24607 to 25079 reverse strand)
tctgcttttctgaaggtaccaatgtcaatagataaatttcatattataaaatatttcatttattgttaatagaattagataattcttgttgcatttaatcaatttaatacttggataagtagagaaatagtagtgcgttgtgcgggaataccttattgaagaaaacattagtttgggttaaattccgtgtgacaatgtttgcttgattgttatatgtaaatatatgtagatagttcttagtgcatattaacttttgaacttttttaagagaaggggaagcaagagaaactgtatgggaaaagcgaaagcatatactgtatttgaaaattaaaaaaaaaataaaataaaagtttgttattggttattgagtaggagaagtttttattttgatttcataaaagaaaaaaaattagtaaggttaattggttatatatgcagataaggaagcgggattggactgaacagggacctct

SEQ ID NO: 78145 - DNA, 711 bp, Citrus sinensis
  Intron number 3 from transcript orange1.1g000201m (locus o range1.1g000049m.g) derived from phytozome v7.0 (chr-ID sc affold00161; pos 131057 to 131767 reverse strand)
atcctgtatttgcacacagtcaattaccttctctggtttgtgtttgacaacaaatcttgtatatgtgtacatgttcatccgtttctgatttctaggctcatttgatattctcttttgcacacatacttcttgctgttagctaatttcaagatgagaaatcttttttcttttcctatttcataatgcaccataaacattcaaaaggaatgttgtcttgtgttcgtggtgttattaaaatgctactgtaatgatctttctattcaggattaaaaactttgccttagttctgaagctaataaggattaaaaacttgccttagttctgaagctaatatgcctcgtcatattttttgcaacatgctaaaataaattattttacattacttttcttggattatgatggaatagcaaacctttgccagtccagtcttttcttggtaaaaaaaattatttataaattagtttctgcttgaagtattgttggtttcctgcctatagttggttgtggtccgaactgcccttgtttgtttcaatgtggattagtcaaataattttagagtgaaatctttgttctcatctctagtttctctacttgtaaagttctctcttcttctaattattgttattttctcatttttggtgttcataaatctttttttattcttgaattattccaggttaaatttgttgatcctttacttcagtcacctat

SEQ ID NO: 78146 - DNA, 724 bp, Citrus sinensis
  Intron number 1 from transcript orange1.1g011087m (locus o range1.1g011087m.g) derived from phytozome v7.0 (chr-ID sc affold00071; pos 85132 to 85855)
tatcaaaattgattttttttccccatctttttaaggtaagaattgatttctgataccattttttgttttgggaaagtttatttgtttgcatgcacttgttaatgggttgagattaacttgatttgctccattttcttagcttgggactaaactgttttcagttaatgatgttgctgttgtttgattccttagcttttggttgtttgtttgatcaatttagctgataatgagaggatcccatttggaatttgatatgaatatgacgaaaaatgttttcttttgtgtgctgttgttttctagcttgatgcaagtggattgcctatttcgtttcactttgctgaatatttatttaaagcttgtaatctgctggactgctgcttgctttggtgctttactgattccattggatttctttgttgcatatgatttctttgtcgaaccattgttttaatgaaataaaatcatatggccagatattctgagcttttgttatgattggggtctgcattttatgcatatattgtcttggtgtccatgtctctaacttggacttagttgactactaagactagttattgaaaaaattaggatgccccaaattttaatcgtattttgtagaatgtatgaaaaaacaattgacatggtctctggctgaaatttgtctttgctgtgatattcttatttatttttccattctcgttctgtaggggttaaatagtctatc

SEQ ID NO: 78147 - DNA, 471 bp, Citrus sinensis
  Intron number 2 from transcript orange1.1g037727m (locus o range1.1g037727m.g) derived from phytozome v7.0 (chr-ID sc affold00564; pos 42825 to 43295 reverse strand)
tctgaagcctctgtagtttctgaaaccggtcgagggtaatatacttactggcaatgtttatatatttgtttcttgaaagtaagaaaatgttaaaacaaaattacatgcaccaaaaaaggagttttcgatgttttgtcttcctggtaatattcaggtaattttacctaggggtggtattatgagttggtggattgaattcgtgtcgaatgctaaacttaggttaaattatgatagatttgagttcagtccatttattaaatgaatcccgaacccccagatacaggacatttggtatcttgtcttcacgagtagaatttaagtaattttgcctagctcaaaacaacatttttttgttagaacatagtaattggaaaccttcataactgaaactgactttttaccttcaaattacatttcatgagtgttttttgtttctttgttataaataagatataagcatacacccggtat

SEQ ID NO: 78148 - DNA, 761 bp, Citrus sinensis
  Intron number 2 from transcript orange1.1g017622m (locus o range1.1g017622m.g) derived from phytozome v7.0 (chr-ID sc affold00812; pos 1347 to 2107 reverse strand)
cggtatagttaattatttactttgatcacttctaatctttacggactatatttattaatggtacttttttatagatagagggacgctaccttctaaaaataaagttgttttagaattctcagaaacattttttacaggctatataatgataaattattacaataataatcttaaaatttgaattttatttttgtagccacatctttaatcggtgaattttacctaggaaaaaaacctgtgaccgaaagcaaattatgtgctattttttttttaattatagaactaaatcaatatttcctctcacttcataatcatgtggggcttgtttaataacgcatctagacttatttatgcgtcgctagtcagctgctagacaatatcttcataacagctaaatgattttgatttcgatcgtgttcccattcttgccacgttttcttgataattaattgagctgtcacataaaatacttgtccattatgaaaatataccaaagttaacatcaaatcctgaatttagataactcaaaagacatagtgggtggtctatgacataagagggaatgcgtctaaatcaattaattttcatccatttaattcatctgaatctgctaaaacatttatagggtcggctgtcctttgaatttatcactccacatgatatgaacacacgtacttttgaattttacaaatcaatttattttctagctattttattatcattaacgagttcaattaatttttcttgattacagactgtta

SEQ ID NO: 78149 - DNA, 857 bp, Citrus sinensis
  Intron number 1 from transcript orange1.1g021089m (locus o range1.1g010984m.g) derived from phytozome v7.0 (chr-ID sc affold00064; pos 492272 to 493128)
gtgtcgggttaacccctgaacccggctttcatcaggtaaaaataccttgttcaattgtgatgttggaaaaataggaagtactatataaagatctgaagttattatctgagcttaacagacttgtgaaattgcttgtgatcttgttggcccttgtctctgagaataggtaaatggttgcatcaatggacatttgttgaaataatacgcaatactgaatcttttagatgtagtgtaaaatgaatctatagtttgccatgttcttgattgtattgtcacctggttgtagatactgaacttaggaggaaatgaagacttctgtgctatgtgctatgaagagatttgagatggtttctcttgtctgtttctttttgttttttctatctgaatggcacaattagtttgttgggtaaatctgattattgaccgaggaagttttgctcatgtgaacatttaccttagggtggttaccatagtgaaagagttgactttttaatgtctgatgttgattggttgacttattcgtgttagtactgttgtttttcctcagataagattttggcttttgtcagtcatgtggtttaggagtcaaacttctgagtttattttattttgccagcttgacatgcgaggggatatgtttggaatgctttctgcacatccattatcacctttgctgtctcttcatcatttggatgctatcgacccaatcttccctaatatgaacagaacacaagctctgcaacatcttttcaaagctgtgaatgttgatccagccagaattttacagcaaacggtttgttatgaccagtcaagtcaactgacagtttctgttgcctggggctttgcagttcaggtgt

SEQ ID NO: 78150 - DNA, 565 bp, Citrus sinensis
  Intron number 3 from transcript orange1.1g024650m (locus o range1.1g024650m.g) derived from phytozome v7.0 (chr-ID sc affold00044; pos 261052 to 261616 reverse strand)
ctgctgtaagctttctgatgtgtttttcacttattcatattgcaagatgtggtctatgataaacctgagggtgttgccatatgaatcttttaaccgttaaatgatgttgtggtacttttagctcaaaaagcacgggatgaaattgcttgaaattaatagttttagattaggctcagaacctgtgtaaaatctgatgatagttttgatatggtaacaagaatacgtgcttttctgattttagttattttgagctgttttgaaaagggtgattgtgtgtgcataggcatgtgaaagtgcacctgcaagttttgtggttaactcgtccttctcatgatgttcatgcagatttgcgttgacatagttatattaggtttatcagttgtgatttaatttccctatgtgctaaagcagaagttggttattttattttattttttctgttgcaaaacttctaccatttcgattgctctagccatctattaatttagaaacaaagcacttttcatcttttgttcagcttcagaactaatcttcactctcgatcatcaggcaaagaggatcgaga

SEQ ID NO: 78151 - DNA, 608 bp, Citrus sinensis
  Intron number 2 from transcript orange1.1g032266m (locus o range1.1g032255m.g) derived from phytozome v7.0 (chr-ID sc affold00351; pos 31855 to 32462)
ctggtcaataggtatgtttcatgggagtggttttgtgctatattgtgtttgaaaatagatgttatgcttactacctcgttgaaggcctttgccctgaagataacaatttaccaagagcacatgaatctgaaaatagcaagatactgtgaatgaaagtatttgttaatatatgttctcttgataaagctaggattaaagtgtagaaaactctcttcgatgagctcaagatgaaatctagttattcataatctatatggcagtgtaatgtctccttgccgtcaaatagaacatcgctttgagattgctgtacataattcgtaagtgctgcatgtctagcaggtttggcactctgttattatgatctagtttgatacgcgggaaagttcagtggtcatggttatagatggtctcttatatgttctctttgctttagttgaggtgctgcatatcatccattgattttgtttatctcaactaaccaagagttttgaagtccatgacccgcaaatattttgcattcaaacttttaacttggttgattttgttttcttcatcctctttttgttactgattctttctccttctccgcttatccagtggattatcag

SEQ ID NO: 78152 - DNA, 912 bp, Citrus sinensis
  Intron number 2 from transcript orange1.1g036173m (locus o range1.1g036173m.g) derived from phytozome v7.0 (chr-ID sc affold00073; pos 232759 to 233670)
gtttccccaacattatccagtttcaagacttttaggtactcgttattttgctaattttttcttcatgttacaaatttacaaatattcgagaataaacgtaggtaggcttcagacttcgagccacagctgctgcaaaataaaatgtgaaaaatttggatgaaaataaacagttttgatgaaaatagtaaagatattgagtttttcatcacggtcgccaagtggtgaattcacgccctcgttgttcgagctcctgaggctccattccttggcagatttttagaattttagtgatttttttagtcaaatgactgtgggaatcactttaacttctaagctatctgcaagtttaccaaacacttttagacccgcggcttgccaaactgctaagtcaaacggattcttagttgtcacctaattatcgtattgatgccactagctttgcaaaagatgtgaaaattaacaatatctggtcttaaacaaagctttgaagctcagattcaagtttgacttgaatttggtggactattgggtccacttagctgcttttcattttcattgataatctcacacaagctttcactctctatgttgtgttatgtgtgtatccttctgatggtctatatgcaaaagtcacggtaagtcaggacattgcttgcagagagaaattggatggcgtatgaggtgaggggaaatgtgtaatgaagttgttttaccaaattattgaagttctttccaatttcaagtgagagacggtcctgagtgttttatggctcctcttactattaagctagaatggaaatcacgttggagaaattatagagacaatagtattgctttttttttttttctccaatttttgacatatctaaatatgtagggtgtgttgaagtagtcggctgcgttcgctgcgaa

SEQ ID NO: 78153 - DNA, 876 bp, Citrus sinensis
  Intron number 2 from transcript orange1.1g031704m (locus o range1.1g028292m.g) derived from phytozome v7.0 (chr-ID sc affold00002; pos 160555 to 161430 reverse strand)
aagcttgccatttgggacacgggtgagtatcttttttattttccttccattttgtgactgctacattcacttgcactactaatgtgctgtgtaacttatatatcaagaggaaatatgctgttgaatgtatttgttctttttgcagttttttgttgagaaggcattgaaggtttattgtttatatctagaggtttataatacatcccaatttatcgccaaaggctgttggctttcttaagctagtgacctgttttaccgagaagttatgcaaccagacaaagtttatgtaattgtattataggggtgagattatggtattttatcctgtttgaatctgttgtcaaaaaattaagaatgcatgtgattagaagaaggttatagaccattatgattgaaactagattgattgataaacaattcaaaggtaaacattgaacatgggagattcagttgagagggtaagaattgggaattttagccggcaaggtcacatctcattatacaaaaaaattgggaacaaaattgctcacaccgaaggaggagttagagagacttcctgtttgggccataggatgaaatggtctccaatgagagtgcctctcccattttcctgtagggtatctctaattctgttgcagggtacttatttttatctcctcttatgatgattcatgaggaaagctattctcgcctgttttgctatggtttttgcttatatacacgacctcaattaaagagttataattgacaattttaatagccttttcattcctgctaaaatgatactttcttttatatatgtaacttgacgaatgtactaatctattctgccttaatgcagctgggcaggaaagatttagaacactaactagttcc

SEQ ID NO: 78154 - DNA, 564 bp, Citrus sinensis
  Intron number 3 from transcript orange1.1g026687m (locus o range1.1g026687m.g) derived from phytozome v7.0 (chr-ID sc affold00063; pos 626615 to 627178 reverse strand)
tcctaggtgttgataatttgcagatcggagactttgtatgttctttccatctcacctttatacttttacttcggttcctcgtgaaatgttgcttaactgaagattaaaaagtagaaaacaagcatatatgaaaagagcatagagaattgtttgagttgaatttcaattgttagtcaagaaaatcatggtttgttatgcatttgaactgatgtgtttttcttcttgttgaaatctgaatataaaatgactgcccttcgccatatgcttgatatgtgaagtgtttttcttttcgtagtaaaaaatttcacgataaatattctgcctttaaattgagaaatgcttgattttatggttagattgcttcgaatatatgttatttgaacagattagtttagtccaggcaaaaggacctcgtgcaacagactcatgagagtaaattctagaagtttttccgaatgctttttcaaactaactaaagattaaagaaaagctttcatatgtttattgtttttctagtttgacatttctgttttgtaggttttggaggagccatccaattctcaa

SEQ ID NO: 78155 - DNA, 524 bp, Citrus sinensis
  Intron number 3 from transcript orange1.1g027360m (locus o range1.1g027360m.g) derived from phytozome v7.0 (chr-ID sc affold00113; pos 332212 to 332735)
agctgtgatacgaggcgtattggcgctccctattggttagttgtgattttaattaatggagttgtatgaatatcttatttaatttaaatataaaaaaaattattattattattattattattatttaagaatccaagagaaaattgtaatcttttaaggtttctataatttctacggaaattgtttctggctatgactttgttagggaacagaaatatatgcttcattttaaattatcttcggtgatgtttattattattgtattatttctggatttgattatttgaatatgctttttaagcggttgtttagtatgcatgtatcatttcttcatttgaagataaatagggtggtgaaagacgttttccacttcttgttatgctttcagcttcaaatttcaatgaattaacctgttgttgaggtctttatgaggattcattttccctttattttagtccttttcttttaaccctgcatatgttaagatatcttgtgtatcttctactttataggggcacttgtaa

SEQ ID NO: 78156 - DNA, 916 bp, Citrus sinensis
  Intron number 2 from transcript orange1.1g040426m (locus o range1.1g040426m.g) derived from phytozome v7.0 (chr-ID sc affold00002; pos 3961776 to 3962691 reverse strand)
ctgacagagaaataagttacgcggttactgccgaagtatgccttcaactaaattactgatacttactttcacttgactggttttgtctttttaaaatggtttcttaatgtattgtaggaactataaaagattatgaccttgtataccacagttctgctaaaattaaagtagtctttcatttaatgagagatagtagttttacaaactttctgtggctctggcattcaattgttggtttggttgtgatcgttcttttaaattggatgttcatgtgcaaatggattgaaatagtttagaagtcaggtttgtggatgaattacaatgttaagagaattataacatgggaaaatagtaaggctactggaaaagcaattgtttcaaatggaatgggactatgcgctaccttaggttctttgggatgcatctagtttttatctaattcatattgctttgagcaaaattatgtttgtggtggcaacacttaatttagcccatgtgcatgtgctttctatttttctcttaaaaatcagaatttatgttggttaggctccatgattgtaaaaatatcagtctgctatacttactataagacatgttatctgtcgattatttgggctggtgatattggagttggccgtcagtccattagggaaattccattccatctgtgggttttcttctgcttggatcaatttatggtatctgctttatatgtaatgtagtagtttcctaaacggtaaccttaattaaactgattttgttgcatgtttgatgtcagtgttggcaatgtatgtggaaattagtttattatcttctccctcatcttttgtgccattcccactatgatccaatttctgatgtgtgcccttgttgtattgtaggaaataaaaagagagttaggcatatctttatttga

SEQ ID NO: 78157 - DNA, 342 bp, Citrus sinensis
  Intron number 1 from transcript orange1.1g035898m (locus o range1.1g035898m.g) derived from phytozome v7.0 (chr-ID sc affold00263; pos 111416 to 111757 reverse strand)
tctcttagcccctcactgctttttgcagcttgcgggtactttaatttggtttcatttcgttattttaatttgaatgcattctattaatagatcaaaatcaccctgcaatatgattttgttttcttttttgtttttatacacactcatttttgcccataactgtttgcaaagtaattatgcatggaatatatatatatatactgaaaattttttatgtttagtttttcttcacaggtaactgagtgtgtgtgattgtgttctgtgttctgtgcatttaataaaaatggtgaaatatatatatttgttgttgcagagagccgattgcccagctttaattgctga

SEQ ID NO: 78158 - DNA, 878 bp, Citrus sinensis
  Intron number 1 from transcript orange1.1g008339m (locus o range1.1g008339m.g) derived from phytozome v7.0 (chr-ID sc affold00002; pos 622000 to 622877 reverse strand)
gacatacttgctcagtggagcaatcagggcataaggtatgtgtaattgttaatatgtttgttgggtattgttggtttttgcttatggagcatcatgaatgcaggaagttcgttttaaattgtagatataagtggcaatggaattcttgtgattgtgcttagttttggaaacgtggtagttcaaagtgattgccattttcacttggcagctgatatttccagttaccattcacctaccttcatctacttgatggcacgtggttctattccagatcagctctggattatctgcagtttataggtgttttgcgagagaatttgttgttgattatgcaaacttgaggcagaatttgcaaatttgcttgacccagtttttatcatttttttcccttgtgtgctggtgagctaaatttagaggttattgttgtttctgatgctaaatgtgtcatgttagtaaggtcagaatcataattctgttgcagagtggcacttaagattggttggtgtattttgattgccttgatgaactgtataattgacagtgtgctgaagcaagttgtgttttcgtagcatattgctttcttttccatttgtatcaggtataaattgtttttggttcatacgttcatttattaatcataagttattaatccattcttgggataacttaacattgtctttatgtttgtagtctggttttattgtttgcttgtgtgtattgatgtttctctttgaaattttattttctttagatgggtataagatgttatttttgatgtatttgaaaataatttttatgacagatttcatttacatgcactttttagctgatattatgtaaaactttcctataggtttagctccgattcagaaacatcc

SEQ ID NO: 78159 - DNA, 453 bp, Citrus sinensis
  Intron number 1 from transcript orange1.1g021982m (locus o range1.1g021982m.g) derived from phytozome v7.0 (chr-ID sc affold00002; pos 4902860 to 4903312 reverse strand)
ttgttaggtatacttcatttcaccgttttcttgaatctgtttctttagggtttttgaattttgtgctaacatttcgttctagggttcttgatgttgttgttccggtccactcttagtatgtgatatttgggtttcaatttcaggcttgattctaggtttttgatctgtcaccccttttcctttgaatgcactttcttatattcttaagcttgatcgcaccctacctaatatctcatgctctgttaagtcctagaaggtcaattttttttttcttttatgtggatctcagtttgttatgcccttacagtggatctcaatattagttctttggaattttcttctgtttcttgttaacagttagcaaaggaaaattaaagattaatgcatgtcttctctgttttcacatgctaatctttatttgcataattcagcggttaatttattttcaggttg

SEQ ID NO: 78160 - DNA, 700 bp, Citrus sinensis
  Intron number 3 from transcript orange1.1g014758m (locus o range1.1g014578m.g) derived from phytozome v7.0 (chr-ID sc affold00002; pos 3057100 to 3057799 reverse strand)
tggcacatacagactttatcttggtctcagcccaggtaaaatattgatatgtttttatttttttatctctttttccttttcttctctgggttttactaatggatttgaaacaaattggtctcagacccaggtacttgttgcttttttttttaattaaattttttcccttttctttgttggaatcaacttgtatattttaaaactaacaatttggttagataaatcgctaaatgtacttttctttttctaattttgaggatcagtttatttagagtccactgaggagaatgcttcatccagtcatacaattagtttttatcttcaaattgcttatcaaatctgtggcgtgatttgtggttgatactctgaatattattgaaacattagttgatcaatgtagcagtacgtttgatataacatgtttgaaactcatataagaacttagctgtggtctgtggggttatcatcttatttgcaactctccagggatccaattgttgaaatctcacatgtttatttcattctatataattttctctgttgttgatattacacttgattattattattattattatttatgttccactcctgatgatttctttaatatcagatgatcaagagggataacaatcatttgtttcagttgctgatatactctgctgataattttaattaaacaacagctctttcaggtgat

SEQ ID NO: 78161 - DNA, 697 bp, Citrus sinensis
  Intron number 1 from transcript orange1.1g014758m (locus o range1.1g014578m.g) derived from phytozome v7.0 (chr-ID sc affold00002; pos 3058309 to 3059005 reverse strand)
cgaaggagacgacgacctgaaacgcctttttggtgaggactcgctcggcatttttctattttctcttatagcgatttgttaagagttaaaaaagttttgtttcgttcaagttatcgagaaatttgtccaaactgtctctcgtctctcttcccgattcgctatttatttagagaattcgagatcttctatgaatttgtctctcatttggtacatgaatctgtcatctctctcgtttacgtgttagatctggagtttataaatttatttcctatttttttcaattcttaattattttttttatctaattaattgtctatttatttgtttatacgcttcaaattttcatttttgtgatgacgctggttttgttatagttatatatatataacggagatatcgttaaaatcatcttgtaggccaaaacgtttggaaacttatagaaatttgtgctttacaagtgaaactctgagctatatatatgattgagccttcattttttagtcatgaatctcaatcaaaatataatctttacaaggcagcaagccatgatctgtgacataaactgaagaatagaaacatagaagcttatacgtcatgtaaacttaagcaattagatgtaaaaagatagtaaatctgtatgaaattgtaattattatttgcaattgtttctgtagtgaaaattgctagttgattgaag

SEQ ID NO: 78162 - DNA, 509 bp, Citrus sinensis
  Intron number 1 from transcript orange1.1g043160m (locus o range1.1g043160m.g) derived from phytozome v7.0 (chr-ID sc affold00024; pos 683578 to 684086)
attctccaatagtaaggatgctctgcacataaaacctatcaaattaagcctaccacattcacaattaattgatttcttctatagctagcttttgtgtttacgtcggcaacaaatgagattcatgattgttagaaatactcaattttaaaatcgaaagcatttaattcgatcttgttttagccttctaggatcgacgtgtcgacacgactgctttgctttaagccgaataaaccgcgggtggttatgattcttgtaaaatgttctttttgtaatttaaggaaacacagtggccaatttacctactacatattgcctagaacataaaacaaaacaagcgtattatcaataccttcttaatccatgcattataaatgaacataataaataagctaactttatgtacataaaaaattatacttctttgtgcgtgcatttgtggaattatcagagagaaggagaagaaaaaattatgtctgaaaagtacagcagtactcaatttctgagtcatc

SEQ ID NO: 78163 - DNA, 648 bp, Citrus sinensis
  Intron number 1 from transcript orange1.1g022327m (locus o range1.1g022327m.g) derived from phytozome v7.0 (chr-ID sc affold00161; pos 56136 to 56783 reverse strand)
agtcttggattttgaaggtatggttaccgaattatttaattaattctaagtttatttggaattaataacatcttcattttttaataaaaattttctgtttaaattagtttttatttatttattatatttaagatttgggtattgtagctgcttccggttgcttagacttattaggtagcctaaaaattgaattgcaatgaagaagaactaacgttcaaattatttttgtggcatggtacaaaaaaattgtattagtttacttagaaattcttcgggatattgtattaaagggcgtctctgttgctgtatctgtaactaacatcagtcccatttcccgttattggtaacattgttcaattgtgtgtatactttgtgtatctgtgtattcgagcaatgtatgctttgaatcttttgaaatgggtaatgacaatattgttagtggtgatggaaatattaattttccccatttgttaaataacgaagtggcttgattaattaataaaatatacatcgtctttgtttgcttagtcactgttatttctttactatatataattcaacttaaaactggaccatacgtaatgttcttaccttacaaatgtcgtgatgttatgctactgactgcagatttttaaagcctttggttgg

SEQ ID NO: 78164 - DNA, 504 bp, Citrus sinensis
  Intron number 2 from transcript orange1.1g037446m (locus o range1.1g037446m.g) derived from phytozome v7.0 (chr-ID sc affold00002; pos 1264091 to 1264594 reverse strand)
ctgaggcagctaaaacttggatttacccaggttagttaggttaaatttttactgttccctaatcagatgcctgcattttgtatgccctaattacttttgtttgaaatgtgggatcatataattgttttataaatgcggcttaatgcgtttgggttttcatgaacaatttgaaactgtaatttattttttcgaatggatgttgaaaagcaaatcactagttttcaaatatatcctttgtcgaggatacgtgttatacaagtgattatttaagatggtaatatgactttatttattttatttatatttaatttctctactgttaaataggtaacaaagcatatcaattagcatcttctttgcttttcagcaaattatgtccttgatatcattcaaagatctatcttgtggcccattatacaaaaggattgtctctgagtttgtttttatgacttatctttccttttcttattttattttattttttatttcctttttcattagtta

SEQ ID NO: 78165 - DNA, 995 bp, Citrus sinensis
  Intron number 1 from transcript orange1.1g046702m (locus o range1.1g046702m.g) derived from phytozome v7.0 (chr-ID sc affold00073; pos 264010 to 265004)
tgctgcttcgggcctcaagatttgctacattatctgtaagtgattgtttccttttttatgagaagtttaagcaactgatttggatttgtaaatttttgaaataatggttctagatgagtaggccattaagaacttatatgtttttgggtatatataatctgagaggctcttacggtcgggctttagcaattatgagcaccattcaagttttaactgataagatattctagatttgcaatttgcagttgattaaaatatgatttcttttcccagtgcgttcttcagagaagttgaataaatttagttgatttaaacttcagacacacttaggactttgatggcaagttgaacgagccctatgatttgaaattataaatgagagattgaaatacaaagatcaactaggattagtttcatagtcccctgagttatgaatctcatcctagctgctgacctagtttgtggatcacttgcaacttgcatgttgttgtcatatggggcatctattttggacttgtaaatatggaactaccggggatcacatgcttcctgcattatgttttctccatccctgttaattttactttggagtttatgcatattgtatgttcaattttattcctattttgcacttgtactgagatgtttgagatttcccgttcttgtaaatgctagaagaatgttaaatctgctaatgataaattttcaatttatatatatgaagctacagagcaattcaaagaagcactgtttaaccaatgttctctctcagattttgattatgaaatgatcatatacctgacagtaacacgtttgtttatgttcagggaatgattattgagatataaattcttgctaagcctcatggtccatatgcatggttgcttgtgaacccttttcatttttatcttaccttttgggggcttgatggagcactaaatgtttattcattctctgcagttgggggctggtttgcttcactttgtgttgcaggt

SEQ ID NO: 78166 - DNA, 1005 bp, Citrus sinensis
  Intron number 2 from transcript orange1.1g036736m (locus o range1.1g036736m.g) derived from phytozome v7.0 (chr-ID sc affold00022; pos 736134 to 737138 reverse strand)
gggacacacttctaagtgaccctgacggcccccaggtagggctgatattttttctcttaatattttcctgtttaatcttgttgatattatggaaggatgccatgttcttggaactgcgaaatgtaataattgatcttttattagagtaattgcctttgggagctttgttgaaaaaaccatgaacttagtttgtggaaccatcagcacactttcctttcctgttaaagttgctattgggtattcaaatctgtcagccatttaactctaattatttcttttttcccttctcttatgggtaaacaactggagcatcatggattgcacatgctaggtgatgagtggagcactataagggtttcctcattttgaaactagagaataatgtgtagtcttacgaaactctgacatattgtaggagactctgcttcgagtatgttgtgcaatgatgatttgaggcgtttgctagcaggggatttcacctctaatctcaagctactccaaaattatccaccaacaaacataagccatctgctctatgttgcaaacaagttgcgtaccttaggctaattttttaatcatctcccttttttttttaatgtttctttatccttttgccttctcccctctacatctgtttgttattctccatttaatgtttgtatattactggatgtaaatgttggtggatagtaatggctaacatgcagggatatatgtgtttttcagttttttgcccacctcacttatgttagttgttttttttttcccatggaattgacatttctttgatttctgcttgggtaagtgcaatacgtctgttttgtcaaggttaatcatcttgctggcaatcgattaatgggttctgttttctgctttgttaatttactgtttatgcactagataatatgcttttatgctgttaagtgatcatccgcttggacaatgtaatacctttggagtttcttttcagtgcagtgataagctgggcctcagtcttgatctggg

SEQ ID NO: 78167 - DNA, 797 bp, Citrus sinensis
  Intron number 3 from transcript orange1.1g014651m (locus o range1.1g014566m.g) derived from phytozome v7.0 (chr-ID sc affold00022; pos 1438579 to 1439375)
aacatttgcaagggctgtgctcattgacgtgcaaggtttgttgtttattagtgggcactagtatttcaaagataatcacccctctcactgatttctttaatcatcatttgttgaggagaagtttgataaccccatgaattaattaattaatcttgttggagtctttcatatttttctgcagaaaatcttatttgtaggctgcaagatttaatcaagggtaggtttaagattatattttcactttggtgctaattgtgtatagaagaacatatgcaagtcaaaagttattttatctctaagatgtctccatgtgctctttatacctcaaatggcatcaaaagtaattattgattttgtaatacccttagcattataaagcccaaatgctgggttaccaaactgctacatgtgtgtgtgttgataataggaaagttaaaaagagtattatgtttgttaaatgcgcaagcagaaattataaaaaataatagaatataaaaataaactctagcagaatcagattaagcagtctgggttgaatgaggaacggctttaaagatttggagaggacagagcaagtgtgattgcttattactacctaaaaatgagccgtatttgttagaatgacatggcatatcatgcccttttttcccattttctttgaaaggaggcgtatcatgctgaaaatcctttttaaccctctcccttctgcatgctctataagttggatagtgcgcgacttatttactgttttgttgtgtgcagacactcaaccagactcagcacgcttcagccttgga

SEQ ID NO: 78168 - DNA, 582 bp, Citrus sinensis
  Intron number 1 from transcript orange1.1g007766m (locus o range1.1g007766m.g) derived from phytozome v7.0 (chr-ID sc affold00309; pos 170042 to 170623 reverse strand)
tcaccaatagattgccttctttgcccctttgggtggtgagtgcttgccttgcctcgtctctagttttaaagcctatttgtctttctttatgttatgttatgaaggttcagaatcatgtatcgagagaagattgagaattctgatagttgagaactttttcttttttaaatcctttcttgtggttgataaacataattaattgataggtagtggcagaagcttattgataaacatattatatgaattgagtcattatgcttgagaggttattcctaatctctaattcagatcaatgagtggagcaattaattattgaagaagaagaagcatatgaattgtccatgccattatatcattgggtaatttctttgatttgttattagctactgagatgtcatttcagtacctaaagcttgtgaatatttggccggatggtcaaatgctcgaatacttgtactgggaggagctttgcagtttttgtcaaccatttcatgcaggatcatgattttttttttaatttaatttaatttactctttttttttttttttggcagctttgcattgctatatttgttggaacaa

SEQ ID NO: 78169 - DNA, 442 bp, Citrus sinensis
  Intron number 1 from transcript orange1.1g021051m (locus o range1.1g021051m.g) derived from phytozome v7.0 (chr-ID sc affold00022; pos 138546 to 138987 reverse strand)
caaaggtcccggcccccgggacgccctgattcgtggtacataattttgattctgaatgttgtattatgctgatttagactagaaaggaacatgcttttatatgctaaagtcagcatgtttctatgtttattacactcgtttatgcttgattgctctgcaaacgttgcgcattgtgttgtttttcacatattggaattggttttatggagataaggctcagtttctttagctttttcagccctctcaacgtgtttcttcttattagtcacctgcagcctacatgttttaatgattatgtaaagaaaacccagcttttatttattttcgattactgggttaatttatgtagttcgttttagttcttttgtttgcattaaaatttggtattcatttctttccccctcctttttagccacaaaggattcttcaaatttgttggcac

SEQ ID NO: 78170 - DNA, 731 bp, Citrus sinensis
  Intron number 2 from transcript orange1.1g038409m (locus o range1.1g038409m.g) derived from phytozome v7.0 (chr-ID sc affold00053; pos 709098 to 709828)
ccgctgacccgagaaggttccggggtcattgggaggtgttgatgcagttgaaggagttttcaagagagtttgggattgaagcaaactcatagctgtaattattgcattccttaacccttcagagatcaatcgtgtatcagcttacttctacttatctctgtatttctaaactgtagaggctgttggtgaaatattaaagattttggctatcaaattgcatctgcggtctgcccaagtcggttagtgaaggattaagacagagtgataccggatggcccatgtttgactccttcatatgcagttaagtacctgaagttacactcattgacaatttaattctgaagtgtttagaagtttaagcaaaagtctttgcagggagattttttggcaaatcaaagcattgtgcaaactgcgcttaattttcctcctggactctttagtcttgtgcagcaagttacctatatttagcctccatctctttcaggggagtgaccctttttctttcttcgtttgtgataaatagatttccatgttagggtatttttcttaaatcttttttttggacaaagatgatacagtaattaattctgccctactttagtttcacttatcttattgcttgactaagttgtcttcaacgccttacatgttgtaatttttattggaattgttttattggtgtggatatatccacagacagctggagtagcaaaagtatacattgcatctaa

SEQ ID NO: 78171 - DNA, 548 bp, Citrus sinensis
  Intron number 5 from transcript orange1.1g017601m (locus o range1.1g017601m.g) derived from phytozome v7.0 (chr-ID sc affold00002; pos 718903 to 719450)
ccttattgtctctaagctggataccagtggtaaaggtacctgttgtcttaatctttgttatggcaggcattgcctaatccaaatgtttacaatgcatatgcaatgttctttacatgtgtatgttggcaattatctaatcgttgcatgtctcagaggaaaaagatatgaagttggattttttgtcttactcgacaatctggtggctgccaggcacaatgttgttgtaatgtttggttaaattttattttattttaattttagacaatgttttaaattctgtccacgttctgccttgctaaatttacagagttcaattgtttgtgtgcatttgtcccattgtcgtataaatctttccattgttctctgaatgaaattttgtcaagcataattttaccaattttgagggacatataatgcttttcttcattgaattacaaggctatagctgaatgtatttccattatttgtttttctggtggtttctgcttcatttttacctctatggctctgtaaaactgcttatcaatgtatgccactgaaattttcag

SEQ ID NO: 78172 - DNA, 655 bp, Citrus sinensis
  Intron number 1 from transcript orange1.1g011512m (locus o range1.1g011291m.g) derived from phytozome v7.0 (chr-ID sc affold00024; pos 219383 to 220037)
ctgctgcttcttcctctccagcccccggtgcccactaccccggtttattttcttgtccctttattaatttttttttttatattatccatgtaattattgcttatcctctgtacacacaacacttgcgtaattgaggaccttgctttgtttaaataattgttaaagattttttatttggcggtgttcacatgctttgttatcatgcatttaataattctcatgtatttagttgatggagccctttaataaattgaagataaagctaaaagatcaagaaaaattctaaatccaagaccagtttttttctttttctttttcttttttggtatggtcttttaaagtgttcgagttgcggttatattaacattcctgcttcaaacaatagatttatgacaaaaactttgcctggcaaaatggatagcagtaattggtataatggtacttgtctaagatcaacttactgttaattcttttttcctcttttgtagtatttgctttctgttgggtgctttggacatcaagggaaaggaatttttttttttgtaaaaattgtgcgctagtgagtttttagacttattgtgttcttccttgcccttttccaatggctacttacaatactgcattgtttgatttgagttttcagagcaactgttgg

SEQ ID NO: 78173 - DNA, 675 bp, Citrus sinensis
  Intron number 1 from transcript orange1.1g038457m (locus o range1.1g038457m.g) derived from phytozome v7.0 (chr-ID sc affold00064; pos 71001 to 71675)
aacgacttgctcacggtaatttcaattcaattcaattctgttcctttgaccatcttccttttttgggtatttgcgatttttagctatagattcttgtgtaataattttggattatgggatttcatttatgttgtactttttatttctgtgtgacggtgaatttggtgatttgaattctgggttttgggacctgaaatgggtgttgcttagtaaaatttgttgctttatttatttatttttttcgtggttatttgttaaagtttgaagttctgggagggtgtttgttggtcaatttagagaattttgttgattgaattggatcaaagtttgtgaaggagtaaagttttgtgattttctattgacctttttggtttttctaaagttttatcaggattattgcagtctcttttgtagaagagtaatagaataacaagtttttgaattgaattttgttaaaactctagaggcttatttggttaaatcagaaaaaaaatcacttgaatatgtctatgaattagattggattagagtgttttttgtctgaagtttatctgcaactctgtattttttttttggttgtgttatcctattttattttaagagactgtgttgactttccactgcatattgatttttgtatttcttttgctttgttctaggattcgtttgtcagtg

SEQ ID NO: 78174 - DNA, 448 bp, Citrus sinensis
  Intron number 2 from transcript orange1.1g038457m (locus o range1.1g038457m.g) derived from phytozome v7.0 (chr-ID sc affold00064; pos 71756 to 72203)
gaaggtttcaataagcaggtaatttgtttagtcgatttactattgttcttagataatccacataattgtatttccccatttgattgtgataggtattggttaaatttagtatttatagagctttatcccattatttatgtgggttctttgtctttttagaattatgacttaattgggttaactaaaggaaataaggcatttccggatttgtttcatgacctctttattgagataggtcatattcttcaaaactcacttagggaactggacgttgaaattacgcccctatcaagccttacaagccttgagttgcagtatttcttttcaccagctcatttattatacttttgataacttgccctttctgtttggtctctatttcctctaattttgttttcttcttcgtaagttagatacaagagatcgaaaagcaggttgacaagctctc

SEQ ID NO: 78175 - DNA, 680 bp, Citrus sinensis
  Intron number 1 from transcript orange1.1g023211m (locus o range1.1g010984m.g) derived from phytozome v7.0 (chr-ID sc affold00064; pos 492214 to 492893)
aggtatgcccatttgtacggcagtgatgcgagggtcttctcttgcttggttgagttgggtgtcgggttaacccctgaacccggctttcatcaggtaaaaataccttgttcaattgtgatgttggaaaaataggaagtactatataaagatctgaagttattatctgagcttaacagacttgtgaaattgcttgtgatcttgttggcccttgtctctgagaataggtaaatggttgcatcaatggacatttgttgaaataatacgcaatactgaatcttttagatgtagtgtaaaatgaatctatagtttgccatgttcttgattgtattgtcacctggttgtagatactgaacttaggaggaaatgaagacttctgtgctatgtgctatgaagagatttgagatggtttctcttgtctgtttctttttgttttttctatctgaatggcacaattagtttgttgggtaaatctgattattgaccgaggaagttttgctcatgtgaacatttaccttagggtggttaccatagtgaaagagttgactttttaatgtctgatgttgattggttgacttattcgtgttagtactgttgtttttcctcagataagattttggcttttgtcagtcatgtggtttaggagtcaaacttctgagtttattttattttgccagcttgac

SEQ ID NO: 78176 - DNA, 775 bp, Citrus sinensis
  Intron number 3 from transcript orange1.1g011586m (locus o range1.1g006204m.g) derived from phytozome v7.0 (chr-ID sc affold00002; pos 1071989 to 1072763 reverse strand)
atcctagtaattctttgaatacaatgttgaaatttctttatttttaggaatgatgagatttattcttgacgtctatagttggtttgtgcataatttattctgagagattctcaatttttttgttgggtgggggttcatttttttcattttcatcttcgttttggcttgaaattttccttgtgctttgaggagttctggtttttttttttttaaaagaatatcatctgaactaataaaaccagattttgctcccgtagtaatctcagcttccgctctttaagtcattggatcaggtaatgctgactatattcattaggtcaatgatttttaggtaccaaagcattacctttatcatattaattacttttatttagtggaggaattggtcaaggtcagcaaggggcctttcctctctttttatcttttgaattggattttgtaatgttcctgttttacattggaagatgcttagagccatcccattgatgggaacagcccgctgcatccagtttgataatctgtttaattttattttccaccgttgactttgtctaccacatatgtcttgttcttaatatgctattctcaatattcattttgttgatgatgtttttagagtatcaccattcccttttgttaatttttagttattcttgaccgttcttaatagaagaggctgagaatataaatttaagagttgcttcttcattccctttgctaatgcttagtccaactggtagggacttcagaaacatttccaagaataagacggcgg

SEQ ID NO: 78177 - DNA, 617 bp, Citrus sinensis
  Intron number 2 from transcript orange1.1g019651m (locus o range1.1g019204m.g) derived from phytozome v7.0 (chr-ID sc affold00022; pos 1457955 to 1458571)
gacagtcacgcgtgtcaatcaactcgaggagttgggtatgtgaaggtccaattgttagtttggttttgatgggcttaaatgctcgcctgcctgcttgcagattgttagttttttgtttggtttggatgttgacacaaaagatgttctgtagacatatttacaacataattaggcaatatggatgtatttgtatttgtatttccctatgcgtaatgttaatgacttagacttgatgctatgactgaattttgtgaaaggaacatataagtctggttgtatactcgttctttctatttccacctgtgaatactgatttgttgatattgcgtgatcgaattctgataaagttgttggaatagttatccaccttgaaacatttaaaacttataccctgattggcaactgggttgattgttatgttgaaaaatgagctaggggacattagtgcaaatgtctgttgaagttcatattgcaggcgtagtgcagacaacttaggttacatgtggaacatatgttggttgccgatttagtttgttgctgatggcattgttgatgctgcaatatctttcccaaagaataaggttttctcttctttcacctttcagcacacttattgg

SEQ ID NO: 78178 - DNA, 646 bp, Citrus sinensis
  Intron number 1 from transcript orange1.1g011248m (locus o range1.1g011248m.g) derived from phytozome v7.0 (chr-ID sc affold00034; pos 522671 to 523316)
actttgggactcccacgcaccctccatacgccttggtaagtgtttttttttttctttctctgtttgatttttttcaagttaaattttgatttttttctgattctgggtagccaaatttgcttttgattttttgtagcatgcaactagatcacttatttctaaatcgacaaaattgtgtctttaacatgttaaggatgtttgatttctgtctttcattttggtttcattttggaaggtaatgcactttcaaaatgcttagtttacatttttttttcatctgaatatagctcgttcgcagacactaaaaaaaaggaattattttcagagtgcaaaaagtgtaggttgattgtgctgttactatgtgcctttggtggctactgtggctagaagatttttcatttggatttttctgcatgcaacagaagaattatttctaaatgatattcatgtataagctaaatgagggtcattctttatcaacatttgacaaaagatataatttaatacgataagtaacgtttggtttcaataacttctacactgaatgtattgctttaaaatttggaataaaaccagaaaacataaaatgaaactcaaattatggttgttaaatttctaatttgcccatatttggtgggtttggtag

SEQ ID NO: 78179 - DNA, 984 bp, Citrus sinensis
  Intron number 3 from transcript orange1.1g016826m (locus o range1.1g014813m.g) derived from phytozome v7.0 (chr-ID sc affold00064; pos 373340 to 374323 reverse strand)
gaaggtattgaagttgatcaacttgttggcacataatttagactaagcttaatctcaccttaaaattctacacattgagtttctgccattacaaatatgctatgtttattaaatttttccatgacttttctattgcgttaacaaaaaatgctacgagattgctacagaagtagcctttttgtgttgtacttctatccaaacttattataggcctgcgtttcaacctttttataaaccattttagaatgtagcgttgtgtttgaactttcctttatagttgaggtcaatatccaatcttaaagagtactttgtgtcttatattcatctgatgattattctaacatcttatgaaaagaaattcttcgaatgggatgtggcaatgaattctttctttctatagtttgaattttggcatgtgatcttgtttcctaatattatatatctgtaggaattgctgctctcttttctccattctaaaaactttttatatctaaccaataattaatatagaaaattgtggctccgtaaataacatttgtttttcagtagactcatcagaagtctcttttattttttaaagaatactaagatgatttatatcaaattccagaccattctggcatggactaatttagaactatattgcaaagtcatgtaatatcgagctccttattgataaacaagcaacattacagttgtttttctgaactcgtttttcataaattgcaagtcccccgtcccagatgatttccctttatagtacaatttcatgttccttttctatgtcataacttccttttatttgttatgacctgagttaatcacttaattgtattttaaggggtcataatttaatatttctttctttttatgcctacctattgttgattcaattacttataccatcccagaggaactctttttatgatgtatatcagtccagagtaattggtcataccccttttggcatttgcagtgtgccac

SEQ ID NO: 78180 - DNA, 517 bp, Citrus sinensis
  Intron number 1 from transcript orange1.1g027713m (locus o range1.1g027713m.g) derived from phytozome v7.0 (chr-ID sc affold00024; pos 1320773 to 1321289)
agagtgggcaatagtgaatgacttgagtgatcgtaagtttgccttttgatttaaggctcttttgttttatttatatttttcatttgaatatgttgttgtagtaatacattatgcttacatgggctcttttgggttgttttggaaatctagagaagatatgcaagttgtataattgccaattgtgtagaatttaaagcagtttggaaatgcattgcaagttagttgttaatgattccttggttttggttgatctggtttttgatctcaaatgcatagagttaaccggttcttgtctcaggctcattaacaaatttcagctaaagttgattaggtatttcttaattgtcttgtttgagttgtttgtttgttatttttggaaccttggaagtttgttttcatagtttattttgaaattgttaaagttgcatgttgcgaccttagtgttgttgggtttttcaagcttttttgtaaggctgctgcaagtataactggaaaccccttttgttaatctaggttg

SEQ ID NO: 78181 - DNA, 931 bp, Citrus sinensis
  Intron number 1 from transcript orange1.1g018698m (locus o range1.1g014891m.g) derived from phytozome v7.0 (chr-ID sc affold00024; pos 1199065 to 1199995 reverse strand)
ctctcgtttcaagactccaagggctcaaacgcaaggtcagtttcctaattagattcaaaaacaatataattcgataattgaattgtttaagcaattatatcagttaattgaaggtgatttggttacattgattagtgaattagcaaatgactagaaatttaagattgaaaaatcataattttatagtataataaaatctactcgaaatcctttcactaaatagattattatttattgattttgaactatctttatccaattatcaactgatcaaatcgacctaaattgatgaataaggcatacaagttcatacttgctcagtgattgaaatgtatttggatcctctcagctggaagagggaagtcgaacagagcatttgcaggcacagaaatgccgggctcgactcaatcacttagaatctgcggatgctgaaaatttagcagaatggaataacacacgagtgaaacggattcttgtagactacatgttgcggatgtcgtattatgaaactgctgagaagttggctgaaagtagtaatatacaggttatattacatgcttgtcccttttgcaagctgcttgtgtgcagatatctttcttttcttttttttttgactggatttgtgatattttgaacttatttttactcgaaactgaaaattcccatcatattataattaacaccaatcagaggttttggggtttgatctattttccagcataggtaggatagttctcttgtttgtctcatctgtaaatgagttttggtattttctatttgcatggatcagaaatctgatcaaaggtattgcagtatgacttaattgattatgtttgtatatggtatcataggttatatcttgtgtgctggcatctaaattgatcttcgcatgccaggatcttgttgatattgaggtattccaagaagcaaa

SEQ ID NO: 78182 - DNA, 945 bp, Citrus sinensis
  Intron number 1 from transcript orange1.1g001448m (locus o range1.1g001368m.g) derived from phytozome v7.0 (chr-ID sc affold00071; pos 318092 to 319036)
ctgatctaatctccgccatcgacgaagagccgaaggtcaccggatctatccatactctttgttttcaaattccactttaaacttgaattgcacgtgtttgatttagttcattagtttagcgactagttagtttcttatttctttcacgttatattttattctgcgtttctgttgaacgctgcgttttgtgtccgaactctaggagttgaacgttgcttagttgtcctttttcttagctgcattcatttgtgtattcagggtttgtgcttacttttgcggaagatatggtctgttgcctgagtttattcggttgctgatgtgcttggttattatatgaattttaatttagttttttgtgttaattctgatccttaaattgtgaattgaaaattggttatgcaggtaaattatctggtttttagtgtgaatttgcagcaaatacagttcagtttaaaatatatttatattttgtaatggttgatgaaaaatttaattttactgccaaagctacatctagaatccctgatagtgtaataaattaaacgagacaaagtttctgtaatcttgagtttgggcctaataacaggcaaacagatgttaattcgattggatgctagtgccaatagtggaaaatttgttcttacttattattaggccaaacctcagggtaggtgttggttatttgtcccctaaactatatcttgaaatgctgatagagtaacaaaattgtagtttcgtgagttatagaatgcaaacatttcttggaaatgacagtttttatatgttttctgaatgaatttgtttgttttaaaggctttcatgctctttccataggttgtgtgtaaacatttgtcatggaatttatgctcttttgttgaggcaagattttgacatctgacgcagcaattattgatttcaggaatcaattttgttgtggcaaagaaa

SEQ ID NO: 78183 - DNA, 908 bp, Citrus sinensis
  Intron number 1 from transcript orange1.1g032353m (locus o range1.1g032353m.g) derived from phytozome v7.0 (chr-ID sc affold00071; pos 549055 to 549962 reverse strand)
aaggtgtcacccaagaccagctctccaaatttcaagtaccatcttttgcccccaactcttctatatgtttacacatgcatgtgtgtatttgcgtggttcggttttgtttatttgcatcatttctctttaaaatttgaatctttattgcagattataatgacccagattgggaattttgttaatgtgtgttaaggctttggaacagtagatttgtaggcagatgatcatatggttacaaatttagaagctttatgagaattgtgttattacttattagaaaaccagtatctgttggcgcttgtccattttcaatcttctgattgattctgaattactgagtcctttcacatgttgattatgctcgttgaatatttgctttctcagtcgtgtaacttttctgagttagagaatcttgatgaggtataggaattcaagctcaaagcttttagagtttagctaatgaaacttaaaaagattaggataggaccaaatggggttaagaaactcacatatttaccctaaagatcatgtttctgttcaaagatttctgccaacaggggtttgcccttgaaccaggtcgaaagaggttggcaggccttctctcatgacattggaatatgaaggagggagcagtaccgaggatgctctatgtctagcataaaacagaacatattaatgataattctaaattggccactgtgatctagaatgggaggttgtcactggtttggactttgtcactggtttggacttttgtaataatgaaaatttcttcttaaagtaatttcttatatggagctttatttgctaactgcaatcttccttgttttctctaacattttttattttcttaatctcatttgaatatgctaggagctgcataggaggcgcttacaaataaaatccaa

SEQ ID NO: 78184 - DNA, 525 bp, Citrus sinensis
  Intron number 3 from transcript orange1.1g027699m (locus o range1.1g027699m.g) derived from phytozome v7.0 (chr-ID sc affold00024; pos 194165 to 194689)
tactgtctcttcacacaccttggtatgcttataattacctgttctcttaaatatttcttcatttttaattatttatgactgtgttttcagtgtatgtttgtgactggtttcactaagttttgaaagtaagcacaacaactgaagtgtctaataaacacccaattttatttggtagctaatgtttacgaactgcatattcttttatgtttgacagctagtaattctaattcacagaggctctggattaaaacttaaaaagcacaactcctcaaacccagaccaaacatgattttagttcggttcccttgcatctatagattactctttactcttctttaatttcagaacctgcttttgtacttaacaaacatcttttgcaaagtctgtgaacctccaacttccaatatggttttagaccatgagtcttttaatccacagcttgctttattttctgtttaccgagggtttctgacttcttttttgatttgcttaccaccagccataccaaaggtcacataagttatt

SEQ ID NO: 78185 - DNA, 652 bp, Citrus sinensis
  Intron number 1 from transcript orange1.1g009189m (locus o range1.1g009189m.g) derived from phytozome v7.0 (chr-ID sc affold00002; pos 2632552 to 2633203 reverse strand)
ccgaaattccgcctaattcttgtccttccagtaaggtacggtgtcgtacttatttaaacaactacaaacaaaaggaaaaaaagaaccttcagtttcatggaaatcgaaattttttagtttactaagctaaagaaacataactatcgttcaaagattttattgattggtaaacaattaattttttaatgagagaataaacctttttactaagcaatatagttgaaaatacaagcaataattaattgaaacgatggaatttaactatgtttttttgtcaagcattttatatggcgatcagattgataatttcaaagctcttttctgcggtgaaattttatttccctggcgcttgtgttttatttagaagaatgattgctgtaaagtttacaagctcttattattgcaattagtgttgtataagaattttattatgacatattttaaggtattcctcagaattgattgattaattggtgcaatttggattggaagaaacagggaatgatcttgttgggggttttgattattggtaattaaattatttttttctttggcactgcaaatttatctgcatttttcttgttgttgatccgttttgtaaccttcctcttctgcaggtaattacaaaagaatcgctcttggcagcacaggt

SEQ ID NO: 78186 - DNA, 837 bp, Citrus sinensis
  Intron number 1 from transcript orange1.1g019602m (locus o range1.1g012534m.g) derived from phytozome v7.0 (chr-ID sc affold00128; pos 32725 to 33561 reverse strand)
attgaggtcttctagagtccttctaaccataaatcatcaagccattaacacatttttgctttgttaaaaatatagtcaagttcaaaataactatttttcctatcattgttgcttcgattccaatatctcatcttttccaaataacactgttacctgcagtcaatctcccttgaaccacttacagttgcaatcagtcattatcagctcttaatgtcgtatccctaggtgtattcctaaaataagacgtggaaattcttttaagagaaatttatttgatgatacctgacataattatattcgaattttgaatggcagaatttttatttatttttttatcatttatgtataacataagactgatgtaacatgcttttagactctcggatgaatattgggtttttgtaggaggatcaaaatatggttttatgttttttgttgatttaaagttttacattgaattaatgtattttttcttcttaaatgagataataagactatttgaaatttgacatgcatatgcataaatgttatattcggatcattgacttgtttcaggcaatttgtgtctaccagtttaatagatttatatttttgatgcatgcatttcattcttaatacgtggattcaatctcattgtttatcaagtttcattttatactgtgtgtggttttgcataaattgactttttaggcttgtgtttgcttgctattctgtctccttaattagtttgttatgttatgttaacctcttttttttaatatgttccattaaattaacttaatacgcctcattgtggtgcattttctctcaggtgttcactgcagagtattctctaat

SEQ ID NO: 78187 - DNA, 544 bp, Citrus sinensis
  Intron number 1 from transcript orange1.1g037162m (locus o range1.1g037162m.g) derived from phytozome v7.0 (chr-ID sc affold01189; pos 2812 to 3355)
ccaagggaagaattacaaacggagttagtaagtttcagttttgttttttaaaaagtaaattttaattaaaacgttgtttgttcacgtggattaatttatgatttgtctagtttcatgtgatcttttatggtttcgtttaataatgttttgttgggaattaattttccttttagttaattaagtcaaaactttgtagagcatatatgttaaactgtttgatgtatttggctactggtgttttcataagtatgatttttttctttgatatgttaaatttatttaaattttgttatttaatttataattcattctcaatataggatgaaagatcaactcataatcatgatgttttaaatggattagcggttttggacaatactgatacatttacgactgacatggtatgtattaatcaagttcttcttttgtttctagtcatatgcagtatacaatatttagtcaggtaagttgtattttcttttgttgcaggctttttcaagtagataagctctaattaaatggacaagagatgttggaaagagaa

SEQ ID NO: 78188 - DNA, 830 bp, Citrus sinensis
  Intron number 1 from transcript orange1.1g030599m (locus o range1.1g029650m.g) derived from phytozome v7.0 (chr-ID sc affold00643; pos 44314 to 45143 reverse strand)
tagcaggtttcaattacccctacgctctgtttcttgtcattttcacttgactctatatataggcaagaattgttcatgttccagtgattgttattttcaatttccaatccttgtattttgtgtatgaggtgaagttttaagatgaaagagactgaggtaggagataatagttttgggaaccaaggaaagtgcttgctatagattaggttgttgccgtttgttatcttttctgtcttttatgcatcttaagatttttggataatactcctaatacatcttcagacccaaaaaaactctctcctcacatgattagcttatactgaaggcagtaacttaatctttagttagtaaattgatgagtttgatagtatgtttgaattgagtgattctacccatatgcaattattcttaatggtgtcttttagtgtttacagcacgatgattccgtgatcttgtttaatctggtcatgtgtgatttggattttagtgtatgtgtcttctgtgcaagttgaaatttttattataatgtataattggaatcaatccaattttgcgcagctagctttataattccactattagataccttttaaatcttttccaaaaaggaaaaaaaagaaaaaacaacattgtataaggtcacatttgcttgttgcttaacattgttatgctgcttctgatatctttctcccggaccatcaagaaacaagtagtggaactttatttgttgctctgattattatgattgggaatgttgtggagcagattccatgagctatcagaatttgatgaaaccaaacgaagttgtcgcaggcgtttggctggacata

SEQ ID NO: 78189 - DNA, 885 bp, Citrus sinensis
  Intron number 1 from transcript orange1.1g021822m (locus o range1.1g021822m.g) derived from phytozome v7.0 (chr-ID sc affold00592; pos 53753 to 54637 reverse strand)
atctcaattttgggatcacaacgccttttcaaacagtaagtaaatatatatatataattattttcaggtaaaggtgtcctcatttttttttttaatgtggacttgctcttaagccacaagatttatttagcttatcttttaatgaattatgaagccgtgcgattaaataatattaaaaaataattttcttaaattgtactgcttaaaagtatatccgcatgaaaaaaaatgagggtgtccgcactttatctctaactatattaaagttaagaataagttaaaagaaaaaaatcaatatactacataataaaatatattgcattaaagtctgtgtattttagttaaaagaaaaaaatcaatatactacataataaaatatattgcattaaagtctgtgtattttatcttttagcttattccttattttaatatgatatgtgtgtgtatttgaattctcctttactttccagcactaactgtataattaaaattgaataatatatctttatttatctaaaaactatcaattttcacaatatcacaaaactcaacttagtactgaaaaacaaagtttactatgtttacattacattattcttatctataataattgctaatcatgtattcaggtgaattttgattagaagctcagatcttggggaaatcattctagaaaaaatttgtgaactccttgtacagggatgaaactaatcagtaaatggatgagcggacaatgcccccattaattagtccttttaattccattgtaacgctactaattattgcttaatttgacttttatcataggaaaattaaaaccagaatgaatgaaggagttttgaaataattgaatattggtgcagggttccgaagggtccacttgac

SEQ ID NO: 78190 - DNA, 918 bp, Citrus sinensis
  Intron number 2 from transcript orange1.1g024193m (locus o range1.1g024193m.g) derived from phytozome v7.0 (chr-ID sc affold00024; pos 14377 to 15294)
gaacttgactggttgccttcaattctcaccaactggtaagttaaatgttttggtggattgtcttctttgtgctcatcaagtgtttctcatgggatgctttttgttttaaatgagcgtttttttggggcaatggattccttaattggaataatataatgtcgagtgtatgctttcattatttcatttttgtgatggaagcacttattaattggacaaaatttgatgtatgaatgagtttgtgtgtgtgtgcgagagctagttgtattgatcatgtattcatgtacctatgggactgcctgatgtaaaaatatgcggtatggttcttcatacaaggaacatgggcttctccaatatgagtgggcatcgcagtgtgacttttgcagttttgtatgagaatattgttgggcatcgcagtgtgacttttgcagttttgtatgagaatattgttctagtataacttgggacaattaggattcaggactttggataaacactgcatgtgtataaaccaaagatcaaagtagtatatatgttgggacctatgacagcttaggtatccattggtatgacttcaaggttctcacaatgaaataagatgataaatgagaacctgctttccattgctgtgttctatggcattatgctctggaaaataggtgtttgttctctttgattttaagtattataattgtatataagtcaacttgggttttctaaagctatgcctgagccactactgatgttcctcaactcttgttttctacttgcttgctaacaatgaagcaaatatgtaatgatatattagttttcatctaaattctgaggtagcatttcaatttgattcttagctttctagaggaaagtacttaactatcttttcctgtgtagatcccggagaagcatttctatttgtcaaga

SEQ ID NO: 78191 - DNA, 933 bp, Citrus sinensis
  Intron number 2 from transcript orange1.1g035056m (locus o range1.1g034822m.g) derived from phytozome v7.0 (chr-ID sc affold00893; pos 198 to 1130 reverse strand)
ttgcatcaatagacgtgagtaacgtgttgggaactgtaagtcttggtcttctgatgcttctacattttctttttcttgtagaaaaactaaaacctatacttctagtttaacaattaaatttcatattagatgctgttatttatttagttagaaaatttttgggtggttgtccttttcataaataagactggatttgattaagaaaattgcatcaatgatagttaaatattaatcttttcaaagagtttgtgattcaaggattatagatactagaaaagtttaaacaattctccaattgtccttcgattttccaaggttggcagcaagagaaattttattactaaaaggtctaagcagaatttactcacttgcaatagtgtcttgatagttagtattgaaaacattctctactgtagttttaggaaatagaggcatttctgttgattcctttgggttagatcagaaatttccagttggtcaaaagttaaattcgctttgaggttcacctacacatcctgcatgtttctggactgctaaaggtttttggctgataataatcactaattttgagaatggagcacacaatgagatatttctgtattttagaaaataaaatcagaaatatctgatctcttgcaggaatagggtatttcacttgtcgctggaaccctgaactcctacttcacgttaacgtataaatattatagccattcaaaaggaaattgcatgtcttaaaaaatttgactgttttcttctctctctctctctctttcttcagctgggaaagaatggaagaagcatcccagccctatatttgactgttttcaattctgtgatcacaatatttctctgctatgtgacaattgcaatgatgccttctttgatttgtattatatttcctttccaggtatcctattctagctgtcaattttt

SEQ ID NO: 78192 - DNA, 971 bp, Citrus sinensis
  Intron number 1 from transcript orange1.1g015126m (locus o range1.1g014069m.g) derived from phytozome v7.0 (chr-ID sc affold00024; pos 198999 to 199969)
gttgttggtcgtttttgttcgtcagcatttgcaaggtacttgttcctgattctgattgttcaaatcctgaatgttgtacatattattattgtaatttccattttcaatagctaatgtgttttgacttttgaatttgggatgggaaagcaatcggatttgggttagtcagtggatgaaggttttgttagtgaatggaaacttattaagttgcctttacaacatatttccatgtgcttcgtgttcttgtttaggctgttagtttgggttgtatgatggagaaaattttgaaaaactcactcaaggttcggcgagattaagggtcagattggtattgttgtggcttttaaaatgatcgctggtggttgtgctgaaaaaataatcgaatttgttttcaaaagtattgtgggtattaaaagcaatttatatgcatttggtaattttcaatgtcgaaatgcgtctatttggtctcaaaatgttacataatagcaagattgtggtctaatctaagatgttgcggatgttaatttactgtagaccttgattggacaacttgaaagtgaccggttggtccaagaagctgcaattagagagaatgcattcaagttaggttcctcacagggaaatgtgtttcctttctgtatccttctgtttgtactgataaagtatttgtctattatgtcaagaagaaaaggaaagagagaaattaagaaccgtgaagatatgatcctatgatttaccctaatgctagagcagctatattaattcttcatcacatgaaacaacctacaacctgttagggaagtttgattggtattttggaaactttaagtaagcttttattgcattatctctgatcatgtatagcttctgtgtctagttctttaattattcaactctttgaagaaacttttcttagtaacaatttctttgttgcaggtttctttgttactgtttggattacagctgtaatt

SEQ ID NO: 78193 - DNA, 831 bp, Citrus sinensis
  Intron number 2 from transcript orange1.1g040121m (locus o range1.1g040121m.g) derived from phytozome v7.0 (chr-ID sc affold00120; pos 354016 to 354846)
caaaaaggaccaacgatcgcgttggccaagaggttttaaattaagagaataggtatttgcttttctctaattacaagtgattaattgagtgaacttcctaaaatacttgcattacgcatcaataatagcttgagctaatagatgctttacatggttatctgcttgattatttaaattcaatgtaatagtagtttcagagccaaatttcattcgctaaatatatttagcaatgctccttagtatccagaaatcaagaatcatagccatatttaatgagatatatctcaacacaaagtttgcgtaaaatccacatgatgaccaatgaaaataagcaaaatgaaaataaaggtctaatgcagccatttctctccattcattgcctatggcattgcaaacgtaatagtttgggaattcaatctgtttgaccatcatgaaaatttaatggctagaagtttgtgaagagatcttcttccccccttcaattttattagtgcaatttcatgagctttttatgtgatgctaaatccttcaggcatacgtttttggtttagaagctgtaagctctagaaaaattatgaatggatagaatccagacctcaagatcccaacaggttactatttaattccttaaatattgttatttgctttttggagctagttattgagcgttatctccagagcaggcaggttgttaagtaaagtctttatttattcatttatttttttcccaatagccatattaaacttttccttcttctgttttggcagaatgctgatccctctctatctctcgcaggtggagaatcatactcggaaagctcaacttcaaga

SEQ ID NO: 78194 - DNA, 502 bp, Citrus sinensis
  Intron number 1 from transcript orange1.1g014357m (locus o range1.1g014357m.g) derived from phytozome v7.0 (chr-ID sc affold00002; pos 2793878 to 2794379 reverse strand)
tccaggtttcaaaaatcttgctttgattcatcattgtacctgaatctcaaaatactccgttttcttaggtttttagtttgaattgctaatttgttagtatttctgtttatttgttctcaattgactcaatggcattaactgtgatgctcagttagattaaaatttttaatatttcgtcaacttgagaacgttgacttattttgattgactttttgaaagtgtattgaatgcataatttgtgatgggcaatgaatttcgtttatcgtttatgccctgattaatgtaagtattgtgtttgtatttactcttggtacaatgacgttctgggatgttgtagcataaaatgctttgtttttatattcttcgctggtgactactcccttggtgttgttggtatgacaatttgcaattggtattcattattgaagaattgtctttctgtcttacttctactgcttgtttgttaggctggctcttcgtgtgagtcaccagaacgggttaa

SEQ ID NO: 78195 - DNA, 1053 bp, Citrus sinensis
  Intron number 1 from transcript orange1.1g038515m (locus o range1.1g038515m.g) derived from phytozome v7.0 (chr-ID sc affold00044; pos 638805 to 639857 reverse strand)
gtggctgtaacaagtgcttgaattctctctatcaggtaatttctttgattagggtttgtttctgttcttcttcttcacatgacattaattcattggctctctttggtgaattgggaaagttttctgttcaatatcacttgctccccacgcgctatggcgagtgggattcattctccttataatgatttatacgcaactgctatgttacagtaactcaaaagtagttaaattacttaatattagaaaattatagcatctaaataaatgggaggtcccgggtaactatttttgggtttacggtaaattacttatgatataacttagcaagaccttgatttataatagtctttaagattatataacgttttataagttgtttgtgtaccttgacacgtggcacaatcgagtgattaattagagaacgccatgtgtcagtgtcgaccacagtcatggtccataaggtaatcacggtcgcccactgaattatattatttactccagtcgttaccaatgtggcctgtgttattacttagatgaggactaacatagtcatgcctcttattctcttcatttttgcgtttctttcactacctatttcgtttttgttgattttttttatgctcattataatgagtttggatggttatggttcgtttaatgtagtaggaggagggcttgctaacattcttccattttgaaaataatggctggcttgattagtactattcttttttctaataagaaatcaaactaattaattcttatttttaagagttcaatagtagataacattgtttgtcacaatattccaaaattattaacaacaaatttaattgattgcaagtggttgggaatactgccagccgttggaaggcttaaaagtgtgggtttccattgatatagattggatcttgaaccagctggtccattttaaaattgggttaccaaacaagtacttctagtccaatcaaatatcaactcttaacttacttataaaattgacaataattttatgcagcttaacaagaagacttttaatacaagcaaagcaga

SEQ ID NO: 78196 - DNA, 424 bp, Citrus sinensis
  Intron number 1 from transcript orange1.1g042036m (locus o range1.1g042036m.g) derived from phytozome v7.0 (chr-ID sc affold00631; pos 92179 to 92602)
actcgagccacaaaagtacccatcgactaaacacggtatataaaatcgacgatttcaattttcttggttctcaaaatttccttagcttgagtattccatatcaaaagacaaagcattttgttttccatgcttttttttttatgacacatcaactaactatgatgcatttattgttgatggttgtcaaaattagaagtatgtttcttgtggcaaaaaatgtccttttgctctgcatgaagggagtcatagttcttttcacaatgctgcaatggtaaagtagagcaatttaaaggatccatctagacatattaataaaagaataaatgcacaatcttcacaacaagttttagagaatagattgcggctaaaaacctcaatagtactaccaagtggttagcaaaacaaacttgtgcttttagaggtc

SEQ ID NO: 78197 - DNA, 890 bp, Citrus sinensis
  Intron number 1 from transcript orange1.1g033972m (locus o range1.1g033937m.g) derived from phytozome v7.0 (chr-ID sc affold00058; pos 326628 to 327517 reverse strand)
gctgagtgtttgtctcgtcgtccgccgcagttaggtacttttctttatctttacctgtttttttttccccccccaaatatttctttgcagttactgttgttgctattgaaataaataaatctcgtggtggaattgtttttgaaatgtctctgatgatgtttaactatattaactttcgttctactgagaaaacaattatgcggaatccatatggcgacctgaactgaggagactgtttatgtgctttgcttctttttcatttatcagtcttatttttatcgctccgtttcataaatgagactcgtgttattttgtgctttatttttcgtactttttaggctattttttgggcgatatattttgagttttatataaaattttaatgttcccgaaccagtgttgtgtttaatttaagctgtctctgatgatgattgaaaaaaaatactttcgttcttccgagatgatacatgcggaaacattttggagacctgaactgaagaggcttacatatacatgtgtgtattcccaatctggtccggtattttaaaatgtgggaaagtccggaaaagctctaaaccatggtttaaaacttaaagctcataaacgtttctctgactttctcgcactttaaaatttcgaattagaatatttctaatatatatatatatatatataagtttttgaacggaagacactcaagtgatggaacttgttctctgttgcagcattgccgcggatcccgtcattcgaaaagtagaacaaatttttttttttttctttagatttttgagctcaaaaagttgtttttaaggtttatagctattctggccttcattttgttatctccatcatgtacagtggattgggcattggagatcttatctcttgtg

SEQ ID NO: 78198 - DNA, 571 bp, Citrus sinensis
  Intron number 1 from transcript orange1.1g002419m (locus o range1.1g001713m.g) derived from phytozome v7.0 (chr-ID sc affold00024; pos 664763 to 665333)
cctctgtcttctctcttacacttcacgtcattcaggtacgtcatgtcatcccctctctcacttactgtgcttgctacttgtttcgtatggcttcggtttttttttttttcgtgatgaataagattttttttattatgattaaaataaattaattttagttcttattgttctatgaactatctgacattgattaaaactattaattttatttaatttgtaattaattttagttttctcctaactgaaatctcgcctctctcagtctattttgtttgtcagatgcaaaaatgaacactaaaaatttctacttcgaatgttcaagcattgtggatcaaagagtcattcttttgattcggatgatcttatgattacttgctaatgctggtttgtttacattatttgtgaatcagatatgacaagaatcattataaatttaacttgctatgtgcttgatgctaattattatctaatatgatatttgcagtaaagttatctgtttttgatattgttaattaagggtttttattgtttggtgaattggatttattttacagagtgaggattgatagtt

SEQ ID NO: 78199 - DNA, 869 bp, Citrus sinensis
  Intron number 3 from transcript orange1.1g021600m (locus o range1.1g021600m.g) derived from phytozome v7.0 (chr-ID sc affold00022; pos 1410596 to 1411464 reverse strand)
ctagctttatcagagctgaagaagaggtggaagaggtacagagtccaattcactggaattgccattctctttttctttttttctttttttctttttttcttttacccctcaaattaagtttttaagaagatgagccttttgatcatcaaaggtgcctcccagatccttgtagaccttgttcttgcataccagatccttgtagaccttgttcttgcataccagatccttgtaattaggtatcttttagctagacggtttggactctttcaactgggtagctgtagcggcttccctcaacacacctgcattccaacttattatctaaaatcaaaggctttgtgttaagggtgcaaatatcaaactgaggttcatgttatatgtaaagttgcttcatgattgaacaccctaagtggaacaaataccttgctcagaagtgtgaattagaaattcatgagctatttgacttctggggatatgagaaatgataattctgtcagtatatggaaagcaaagaaatgttcttgaaccttgagaagacaccatatttcacatgcttttgcaccagaatttctggcaactcatcttttctatctgaaaaatgtgcttttttctgcacacagaagttgataggatattttctgaagtgaagttctttggaaatgtcttgtacttatctagtctccactattacttatacataatttcaagtatttctctgagattctctgtttcattttcctttatgtcatgcattcccatggatcttctgggttgttgattttaggtaaaagcacttatgttagataattgatgttaggacttcgttccatgcagagaattgaagaaactgctgaaagaggagaactcac

SEQ ID NO: 78200 - DNA, 477 bp, Citrus sinensis
  Intron number 2 from transcript orange1.1g021600m (locus o range1.1g021600m.g) derived from phytozome v7.0 (chr-ID sc affold00022; pos 1411623 to 1412099 reverse strand)
atgtgagtgtccaaatacgctcatttcatatctcgcttgctttctttatttattttatttctgggtttcttccttcttttaggattattaccgtctgattgttgggtattctactctatatgtttggtgttattaatcaactactatgacatttgagtttggattcagtgcttctgttaatggagttgcttggatttttcacctagtaatacgaagcaactcactttgcgctaacatttggagtttgatttgattccacatggctggtctaattttagaaaactgggaatggcatgtcacattcggctcttacgtgaatgagttcgtttgtcttgtagctgtatttataatgattccctagttccataaaagaaaatttatttgttattatttatttacagtactttcagtattgattgtaattcattaaatcgatgtttcagtatttttcatgattctaaccttgattggccagga

SEQ ID NO: 78201 - DNA, 868 bp, Citrus sinensis
  Intron number 2 from transcript orange1.1g045195m (locus o range1.1g045195m.g) derived from phytozome v7.0 (chr-ID sc affold00002; pos 2206261 to 2207128 reverse strand)
atctgcacttccacgggccactggtagcgggctttgtgaaaacggacaaagactttcaagaaaaaggtgggggtagctcctttctataattttcactgtaactacatatgttgtgattgtacaacctatactttaggagcactctggtgattggttaaagtagaatggccaacttgatgttggatagagggattattcaccagaaaacacatgcacccgtgcggacttatacatccaagtgcaaacactcttgcgcattcattccagtattcatatccttatgtgtttgtacagtcatacacattgccaaattctcatatatagcctatgtcatatgactcttggtcaagtacatatcttcacactcatgtatttgagtcaatataaaagcaatggtaactgcaataccttttagttgcttgcttcaacaactgtatgtgtgccatatgttttgaaccttacacatgaggcattcatgtcgacccaaacttgatgcagatataatcaagttaggattagttcattaggtcaacatataaaccaatcctgattattaaggattatgattttgtgtgtactaatttttggtgatattgtgttagacagacaaatttgaaaatactttctatcattggaaaatatgaggctggtgcttgtgcattttccacatgatctgtttgtgtagatattggtgtctggatatatgtactgggacattgcattgggcaatttattacattttgtttgtcatcaatggaaaataccttctttctgggttatgttttgctaggcacatgggtaatatttacattttcttttgattgccatttcagctcgtacatcaggaacaacagtcaccttggtgata

SEQ ID NO: 78202 - DNA, 729 bp, Citrus sinensis
  Intron number 4 from transcript orange1.1g022436m (locus o range1.1g020305m.g) derived from phytozome v7.0 (chr-ID sc affold00002; pos 4224610 to 4225338 reverse strand)
atcatccggattcacatattgaaggttagattttaaactttagtctgtcaattaattacatgtaggtgattggttagcgaccatgaatgtttgacgcctattgaatttctgttatgggctcgccagtggaatgccgcatacttgattttttatgtgcatctggataattgtatgattttttattttttttttcaagcaggtcccacagaacatttatcttaattctggatgtgtggttattgtatcattggagcttatcaaaatcctcaagcattttatggacactgtgacatcatgtagaaacaaaactttccatgctaatttgctagattttgatgtccaatgagcatgaattgatgtcataaattatcatttttgttttcagagtacttgaggagactcaattgtgtctctcagtgccatgaaattaaaatgaagaaatgtcactttcatatactgttcaagggcccttagcataatggtccaaattctaagctgcagaattggttcagaaaaaatttcaagtcaactttaatctagcttacttgaagcaaaaccatcaggattctgacaagcaatgtaacatgctttttgtaaactgtatcattcaatcttctatgcaggccaatcttgttttacagcagttggaagaatagatgggaaatttgactgtggttatttggtgtctgtgaagttgggttcagagactctcagtggggtactttatca

SEQ ID NO: 78203 - DNA, 633 bp, Citrus sinensis
  Intron number 1 from transcript orange1.1g033664m (locus o range1.1g033664m.g) derived from phytozome v7.0 (chr-ID sc affold00379; pos 15147 to 15779)
ctgtcaaatcttttgagtgagtccttgtttagtacttttaatataagcttcttttatcctggagttcaaaaaaccatttaacgttttaataatcataagatattctttagtgttagacaataaggaaatagtttttttgcttgtaagaagagattatatctttcgagatagcagcaaaagaggtctcggagttgaatcctgctcacgtcagagtttaagagagatgttatttatattcatgaaaaatgaatccgatccattataagatgcttgaattttactaggtttattctttgtaagtaaacataagcaataccctaatatctcattttgcttactacaagctgttacattttttttttcttatattcatgaaaaatgaatctgatcaataatcaaatgcttgaattttactagttttatttcttgtaagtaaacataaccaatatcttaatatcccctttttgcttactagaagatgttacattttttcgagatagtacaagaggtctgagaatcgaatcatgctcgcatcagagttcaagaaagagagatttgtttttttttttaatttcctccaaaaagaaaaatccataaccttcaaaaagaaattttaatatgacaggggccaag

SEQ ID NO: 78204 - DNA, 1064 bp, Citrus sinensis
  Intron number 4 from transcript orange1.1g032895m (locus o range1.1g032683m.g) derived from phytozome v7.0 (chr-ID sc affold00128; pos 100462 to 101525 reverse strand)
taattccttttgaagtgctggagagtgtttctaaagtcaaaaatgctgagctttggagtgcttcttgctactgatcatgaagaataacttgctctcacttgcacgttacatcccactcatcccaaagaatttgcaattttatcattatcaagcaattattatgatacaccgtacatgtcatgttcccatcttttgttctcttgtgcagagaaaaattaaaatatctgcattatataacaggaattaagccttttgtttgattaattagctctgtggctctgtgctttattcaaaggcgtagaagttcagaaattgtttaaatgtgaccgacaaccctgtataagaagttacttcaacaaatgaattgtgtaaatatcacgagtattaaaaattaaaaaaataataataaagtggtgtgtgtctattatgtatatagattgtgtgtttgggttagagaatatgtcttattttttaataagaatttcttcgaatacttttctctttagtatgattcttatttaagtaataagtaatttctcctttgggacttgacttattcaaagaggaatattactagtataagaaaatgaatatttctcctacgagaaataatcactatatatatggatgttgggtttacttatttgtataatatagcaattagttctctgcaaggatatatggatgttgggttcacttatttgtataatatagcaattagttctctgcaagtagataatttttaatgtgagagaaacggtaggtctattgagagattggatgtcattaagattttaggtgtgaggaaaaatactaaagtgattatactaatttttcacatagtaaattttctctcgtcatcctcgacagtcgtaattttttttcaatataagagttttttatgtaaattcttatattatgttgttgattttattcttcatttattttttattttttattttgtttgatacttttacttgcaagatcttggctggtatatatataatgaaagtgtcgttcaatattcaggctcatctattttacaaaagatagctctctatata

SEQ ID NO: 78205 - DNA, 757 bp, Citrus sinensis
  Intron number 1 from transcript orange1.1g035462m (locus o range1.1g035462m.g) derived from phytozome v7.0 (chr-ID sc affold03718; pos 7172 to 7928 reverse strand)
ttgaagaaaagatatatacttctgccacaagtcaggtaattccagtttgaggctttttttgtttgacttgtatgtaaatactcttttcttatatatgtgcttcaatgcagggctgttcctatgtgtttcttttccttttaaagattcctgatatttatttgtgtaaatctatgtgtgaaccgtgcacatggaagcacagacatgtatatgtggtgcaaagtagccatgtacttgggaaattgggaaagaaaagtctccaaagagggagagtggaaaaaagaggagggaaatggggtaaataagtatcaaatgatattggctcttgatggtcattaatttgtggtgacgataaagcggatgatgccgttgttgaaattttttttattttttttaaaaaagggagagaagaatgaagttggaagaggaaaaagttgcaaatcttctaacctgtgaaactgaagaaagaaaaaaaaaagaaaggaactgaaatatatatatatatattcatttttgtcgttgccatcatatagtggctattgttggaaagaagattttcacctaatagcctccagcatttttattatctgttcaaaccatattttattattttaatttatttatattcattgcacgacaattaggtcatgttttctgttttatattctttgatcattttggcaacatggagtactatgattaatcattttgtactggtctcaaatttcagtcggattatctgcggaaaatatctctgaag

SEQ ID NO: 78206 - DNA, 602 bp, Citrus sinensis
  Intron number 1 from transcript orange1.1g004572m (locus o range1.1g004582m.g) derived from phytozome v7.0 (chr-ID sc affold00002; pos 3041939 to 3042540)
cgttgttacttagttgtttctgccctttttgttgagtaagtgatgatgccatcttgtcgcaacatagtttctgttctgtactgggttctttgtgtttgctgctgggcgttcaggagctgggcgagttttgattgatcctggaagttttataatggctttttaactttgtagaataaagggtctgagcatgtctaacagaagttttcatttgaacttggtctccattttctattggggttacttctgccaatatttttaaattcattagcaattgggtttgtgacagtctgacagaggatattacaaatttttaaagttacataactgtgtgtgagtggttttattagttaaaattgtaaaagtaggtatcttccgaatacttttaacaacatactcttggagtcgtgctgttatctctgactaagattcatattttgatctggattcgatctatgacaatcctaaaacgaccgagttgctgctaatgatgattgaacaaagcaaacttgagtttgttgaacttttctgatggaagtagtcttctttctaggctctcaaattgattacgtacatgtgcagattaaggacaccttttgtattgg

SEQ ID NO: 78207 - DNA, 860 bp, Citrus sinensis
  Intron number 3 from transcript orange1.1g013658m (locus o range1.1g013658m.g) derived from phytozome v7.0 (chr-ID sc affold00161; pos 101630 to 102489 reverse strand)
aagtaggctatctttttcccttccttaatttcacttcttcttttcaatatttttgtgcatgtgcatacatcatcacatcatatgatatcatactaaattgatacatcattgtcaccatgtcttattcttaattttcattttgctaacaagggataaacatgtgaaattgtagaatctttatgatggaaatgtagtgagaaaaatccaattattgaaatttttgaaagtgatatagtaataattccttaatttcacttcttcttttcaatatttttgtgcatgtccatacatcatcacatcatatgatatcatactaaattgatacatcattgtcaccatgtcttattcttaattttcattttgctaacaagggataaacatgtgaaattgtagaatctttatgatggaaatgtagtgagaaaaatccaattattgaaatttttgaaagtgatatagtaataatttttttaggtatcaatcttcttttgtattgttaaaaaaacaaaaagatgtgaaagttatgtaaccctttttttggaaaatgacttcagctagaaaaattgtgtgtaatagatttgattttcctataacataaaaaagtcaattcaagccactgattgttcttgcgctcaattcaaaggaccccacagattaattgttagaggatcgtattcaattacggtgtcgacgcaaatgttaaaaagccaaaatcagaccatttaatttgcagatcatcataaagtccacaaacgaaataaaatgttattgggaattgtgcgtgatttattcagctttgatcatcaatgggaactcatttttctcaataaaagtctaatttgaagtgcgtgatcaataatagc

SEQ ID NO: 78208 - DNA, 647 bp, Citrus sinensis
  Intron number 1 from transcript orange1.1g030718m (locus o range1.1g030718m.g) derived from phytozome v7.0 (chr-ID sc affold00024; pos 119438 to 120084)
aagtggtgtctcttagaggttctaatctaattgaggtattcattaatctagaagtttacatttttatttagttttgaaattttaattttgttttattcattgatctgtaatagtgtatgtgggttgttaatattaagttcactttagcttgtggtttaatttattaatgtatgcattttaccataatgctagccattttatgcttcttaattgcttaatatcgttaattttattcaaacattagctcttagcatttgagtcattaattttaggcagcctttcaaatagctggtgttcaatttttgtagggatcatctcagttcagtccattttgttcaaagattaattttgctaatagttcgatgtgttattaattgagaggatatcttcaatattcaattaattcatcaaattttgacctccccaactctctctggaatatagaaatgctcttagttgtcatatatggatagggcagtaatgctacaaataaaatggatgactagattaatggcaatttttttcctcacacttgttgtgaattttctttaccctccataacaatgaggttgtttctgtgtttgctgaatacgcttttaaggttccattgtatttcttctatatttggctctgtctttaggtattgg

SEQ ID NO: 78209 - DNA, 546 bp, Citrus sinensis
  Intron number 1 from transcript orange1.1g016251m (locus o range1.1g016251m.g) derived from phytozome v7.0 (chr-ID sc affold00022; pos 537648 to 538193)
acaatttctatcttttcttgtaagtatattgatttttttttttttgccccctccctttccttttctgtggcttcaatttattttttccaatattttatcttagcacgcggctgataatatttgacaagaaaactggtgtcaagggattttgtggggcttgatgtagagtgcttttgttttctaaattttgtgtgttttggtttattttgttgttctgctaacggtatgtatcactgaaaattatatatttttcttatttgtcattttttattgttcattctgatctttgtttattcgtttgtatttgtgatttctctgttaatgggtttgtcacttgctgagttttgaagcttgaaatctttcaagtgctttgaggtttcaaaattctatatttcagtgtggatgggttgggtggagtgacttgtgtaaattctacatacactaatcaacaatcataatttatgatgatgtaggtttttgaatctttttctaattagcttttatttattatcggatttttcaggtttaagatttgagtttggaata

SEQ ID NO: 78210 - DNA, 232 bp, Citrus sinensis
  Intron number 2 from transcript orange1.1g014426m (locus o range1.1g014426m.g) derived from phytozome v7.0 (chr-ID sc affold00002; pos 3118006 to 3118237)
ctgtggtgaagcaatactacaagaatcatatcaaggtgatcacttttaacccctcgcactcatcagtcctgttcttgccgtttgttgttttatttttcttcatacgacattgatctggtccgagatcaaaattttctattaaacttttgagtttgtttcttttttttttccaaaaaaataataatctggcgtaacagactgttcttacgagaataaacactgtgaccggagt

SEQ ID NO: 78211 - DNA, 834 bp, Citrus sinensis
  Intron number 1 from transcript orange1.1g002341m (locus o range1.1g002341m.g) derived from phytozome v7.0 (chr-ID sc affold00022; pos 677863 to 678696)
tctctgcgctctcgaccttcacattccctttcctggttacactatctctctgtagatttatatttacttacttattgagacatatatttatgtctgtgttatgaaatgaaattaggggttgagattagggtttaattgtaaagcaaaatatgtatgtacacacacacacacacacagagtttgattaaaatgataaattctgtatatgtttaatgcttaatggtgaaatttttagtaaattaacattaatttggacaaaactgaagaatatttgtcagtgacttaatatttactgtcaaaggatgtggaattgctccgagtaaaaataagaaagttatcttgttgagactagcgtcttctttgctttgaatgttaaaaagtagctctatgttgaggtagtgatcttattgaggtgattttgagaaaagaatccttgttgtcttgaggataataagttctttgacgggtattttattttttccttcgacctgaagttatggtttgtttggtcaaagtaaattatataagtttacatgtggtagcaagccatttggccatttggcctttaatatttgaacttgaggtgtttttttttttcacaataaaagaaaatctaattgcacttattttcaattccaaattaaaaatgctgcactttcaattgcacaaggtaatgggtagaaacacatttgagaatttgagcagttgtaatgatggttttgttgaatatagaagtctcaattattgttgatcttgtagtagtggttgctaaaaagtataccatttagtattggtgcaggtaggagagggcgtcaggaggttacagtaggaatt

SEQ ID NO: 78212 - DNA, 787 bp, Citrus sinensis
  Intron number 2 from transcript orange1.1g031229m (locus o range1.1g031229m.g) derived from phytozome v7.0 (chr-ID sc affold00002; pos 1452547 to 1453333 reverse strand)
tatttgttccttcttgcttgtaagtgttttttctttgttttattgcttatgcaattcttaatgattgatccccagtagttcagattctcaaatgtttgtcccactaattaaatttgaagatttgaagatcaagatgccttgcattgtgtttgtttgatatatgaactttctaattagtttcatttgaacttacaaagcattttagtttcttttttgacgtaattgtagctttgcctgctaggtgtttgaacttctgggaatatcaatttactaggctttcccactagttgaattcttttttttttaataaaaaaaatagcatttgaactctagaatctcttgttatgtcgtttcaacgtaatggacatcgcatggatttgatttttgtttctgttagtgtggtttttagggtatgtatcatttgcaattgttctaaattgatacaactagctatgaaatgtaaagccttcttgcacttatataacttgttgttttgctattttatgtccatctgaagctttatgagtatttggtttccaaatcatttgcaagtattggttgccaattgcacattctctgtgtgtaatgggtgatcgtattctgagcacctctgtgcaaataatacatgtttttttatacttctcgtttaattctacaaagaagcatttaaatatgagtattcatgttgaaatttttggatttttggatgctttatgataatctgatgctatttaggcaatgttttcttgtagtggctggtgtgtattttgctgagaatctcaatcgg

SEQ ID NO: 78213 - DNA, 729 bp, Citrus sinensis
  Intron number 1 from transcript orange1.1g006884m (locus o range1.1g006886m.g) derived from phytozome v7.0 (chr-ID sc affold00024; pos 180461 to 181189 reverse strand)
tggccttatttcctgcaataacatcttcactccaggtagtttctatagttgtgttatagttcacacgcatgcttctccgtcatcatcattctaaaatttcaactttctgtagttgtttgccgcacttttttccacgtccagtgtaaactcattgttgcttcctaaagaaatgagcagtggaagttatttttgtcaattctaagcgtagatcctgcaatcaaggcatctaaagctttgatgtgtgattgtatattagtgatatcctttcattagtattaaaagagagagcaaggttgcttttagcgtggcacatcctcccttttacagaacaaaggaaaattagcttttgctttttcttctttatgatgacaaataattttctcttggtttctttatagaattaacattttgcttttgttagtggagtacctttaatacttgtttctcaaatttttgaatttttacttggaattttttttttaatttaaactcagcttttctttttctgatataaaaggttcaatcaagtatcattactattttatttcgtcaaagaaaattcaatcccacgtaccgtacttttaacataaaacaattatgctgaaaggtaggaaaatgcatgagctgatattgctttagaatgattcctgcttatgtgatgcatgttcagctaattttgtcttgtggcctttcttgattgatccaggagagcatactgaagaaatatcc

SEQ ID NO: 78214 - DNA, 658 bp, Citrus sinensis
  Intron number 2 from transcript orange1.1g028107m (locus o range1.1g025465m.g) derived from phytozome v7.0 (chr-ID sc affold00002; pos 362695 to 363352 reverse strand)
ggacattggtggacacggacaaagctttttgaaatgtaagttgtctaattttttgagctgtgtttttcatcattaatatgtggcatatttacctaaaactaagctatgttatggttttttatttttggttctgttttttagtagccttcttaagattttgatattgaacatgctttattctactttattttcatcactgaactttacttttttgttctctatggaacccttaatgtctatatttattaacctcttctacattttactccactttggatattgacaaatgcattaacaaattcatgagatatagacacttaaatggtattatgaatattgagctatattagaaagttctggagaatggagaaatatcctcaactttggctagctgaactgtgtgcatatctataagtactcatgcatatattaggcatcacagaatattttgcagtcttttggtgtctccctttctgtgctcatgtctgcatatggaaagaatttgtctcattcaatagtgctttaataatcttcccatgaggttgtaactgcaaattttcagatttaccatttgctatttaggttatgcttccagattgctactaacatgattttcaggacaggggttgctattttcaggtaggtggatctctgaagc

SEQ ID NO: 78215 - DNA, 661 bp, Citrus sinensis
  Intron number 1 from transcript orange1.1g024745m (locus o range1.1g024745m.g) derived from phytozome v7.0 (chr-ID sc affold00181; pos 32205 to 32865)
ggaggagtagctaactaattccagaatgatcctgtcaactttcctggtcatgtgctctccacatccatttccttggcgttgagcgagaagtcttgttaagttataatgtttacacctcaaccatgagatttttctttggtattcctaaatattatcgttctgctgaatgcccttttgttaagcataggtgttgaaggtaaaataaatatacaaccaataaacagggatctatagaatggcaacactgaaaacaagcttatgctaaaaatgctgaaaaaagaaattaatgccagatctatgagaggttaaccagatttaactcacatgagcgtttaagattggtctgtaactttttgtaggtagcctgcttaagcatagtggtaatcaaaactattgaaaaatccactgaactgattgtgattcttatcttttcccctcaattgtttaggtcatcttcttctatgaactctttatggatgggtgttcttgcaaagctacatacgtttctgtcttgacacttttgaatgtttcttgtgtatctagggcttgcatttgatatattgattgtacatgggtgcttttatattttctttctttcctgatttacatttacattaactttccagagtgttccccctgcaaactcaaggctggcacctct

SEQ ID NO: 78216 - DNA, 565 bp, Citrus sinensis
  Intron number 1 from transcript orange1.1g011378m (locus o range1.1g004758m.g) derived from phytozome v7.0 (chr-ID sc affold00120; pos 289614 to 290178 reverse strand)
tttggttgagaaaatcttattgaatttaaagcagggtaatgtgaattctttgcgcagctatcagtttcgcttgaactcagtgattatcgttgaggttttgtatcgtttgcgtgataatttacaagtgggtcagagatttattgattttattgcattaaattttccaaatgttaagcattcatcaatgtccttaagtgctatgattcactttttggttcgtggtaggaggatatcagatgcacaagctttgattcttagaatggttagaaaaagtggcgtttcgcgattagaaattgttgattcctttgtctctacatatagtccttgcgggtccaatagtttgatttttgatttagtaattagaacttatgtgcaggctagaaagttgagagaaggatccgaggtgtttcgtttgctgagaaataaagggatttgtttttctatcaatgcttgtaacagtcttcttggaggtttggtgaagattggttgggttgatttggcacgggaagtttatgcagaggttgttagaagtgggattgaattgaatgtttatacattaaatatt

SEQ ID NO: 78217 - DNA, 733 bp, Citrus sinensis
  Intron number 1 from transcript orange1.1g024336m (locus o range1.1g019433m.g) derived from phytozome v7.0 (chr-ID sc affold00095; pos 196142 to 196874)
ttgttgctgtcaaatacatagaaagaggcaagaaggtaatcttcttcttctattcgggttattgtatatatctcatattagcaatcctgcaagtgatatagccagagatcctagtggttgcttgatactgataacgaagtttgtttttctacaattatttccagaaatgggctatttggatttttttttttttaattgctgtttcgattcaagcattttggcttatgaatttcttgctagtggcataaatgtctgttagggatgaggagtatgtagggaatgccaatttgttcagtaacgctgtatatattatagtataaaatattcaaaatagtgtttggagaatcttggagaagttgtggtgaaagtttttaacattggttttgctcaattgtccgtgtattcaaacaagtactcaaattctgtccaatggctcattaaagaaacctcatcatgtcactgctggatttttttacctgcattggtttgtctgacactaggaaggggataattctgcagttttgcgagagtacaagagctatttgtttctggtgctataatatcagcatttgaactttttgagagattccaaatgttgtttaacaaatgagactacatctcattttagatgcacattattgtatttacattgtttgacacagagtatattgtctagtacatagtttttgaattggagctacttcctatgaattctgtttctggtttcagattg

SEQ ID NO: 78218 - DNA, 524 bp, Citrus sinensis
  Intron number 1 from transcript orange1.1g028385m (locus o range1.1g025475m.g) derived from phytozome v7.0 (chr-ID sc affold00003; pos 3935489 to 3936012)
gcgcgatacgtgcaggagggcggctccttcgattggtaccagcgttactctgctctccgtccttttgttcgcaaatatatccccacttcttctcgcgtcctcatggtcggctgtggcaatgcccgtaatttctcctccactccgtacctctttttctgtttcttctactttgtctttgttgttcccttttttaatttatttcttttaatttctctgtttgtttggtcgcggctgttattttttttctttaaaaaataatatatttgaattgctttccactactgtcctgtttgattgctaagaaaacgcgggaaaatggggaggaatttgagtttgcttgtgattgcgaattctcttctgagagtctagggtttgaattaattagaccgttggattcttgcaaatctggaatagcacatatgagatgttatctaattattggatagtttaaatctttaatattttctcgatactgttttatgaatcgtgcttgcaatggaaagttcttgaatttctttgtagtg

SEQ ID NO: 78219 - DNA, 756 bp, Citrus sinensis
  Intron number 3 from transcript orange1.1g005656m (locus o range1.1g002564m.g) derived from phytozome v7.0 (chr-ID sc affold00050; pos 717326 to 718081)
gagaggtgctgtaactgccttggcattcagctcaggtaagagttcagatatttgtgtttatattcaataccattattattgctactgtatctattgaagctaaattgttatgtagctagttgttctctagcaccatccatgtttatttttcttgggaaactgataaagaaaaaatgttgaagaaattttcagtatcttgggttctctattgcagctaaaaaatggtgtcccatttcacagctattgctattacttcttttgtccttttatattaaattaagcctccagattcctataaatgtggcctgcagtgtctgttctataattttaagaattgaaacatttatattgtggtagaaaaggatgcctttctatcagtaacttgcaaaatactcctttcatacgctaggaagataaaacaaatccatgcatttgattgattatccctaattcaggaaacacttctgtgcagattcttcaaggtctccagaacatttaaatctcatcataggataataccctcatgatcgtgtgagaattatcctagacttagaaatcttttcattatgttttacattacatgattgtcctttattgatattgtggatgcatgcataatttgaattctttgttgtaattataaataatatgtcatagttgcctgatcaccgattatgtgtgtcctagttttctactggtcttgatgtttacttgtgaaataatcaagtatttttgcttaatggtgcacatgtttag

SEQ ID NO: 78220 - DNA, 444 bp, Citrus sinensis
  Intron number 4 from transcript orange1.1g005656m (locus o range1.1g002564m.g) derived from phytozome v7.0 (chr-ID sc affold00050; pos 718231 to 718674)
agtgcatcagcagacaactcaattaaagtaagattattgattatccttattctctaactttctgatgaacttcatggagaagagttcataattattacaagtcatagtcaattcgggtaaaatttaggtggcccccatagactttttgtacatattgtcttattgtttattcctccttataaaatgttggtttcttatggaaaaaaaataaacaaataaatttgttgattgtggtgccaagtcctgaaaattgatgaaaccctaagtctgcctctttaaatttcaaacagttgtccatgtgaatgttaaagaagttattctattggatagtgggtatgctaaaagaatttgtatctgtagcaaaagtagtttatcttgcaattgttggtttgcatatctatcacattgaattcaaataagtatgtgacattatatttcttgtag

SEQ ID NO: 78221 - DNA, 599 bp, Citrus sinensis
  Intron number 1 from transcript orange1.1g021178m (locus o range1.1g020987m.g) derived from phytozome v7.0 (chr-ID sc affold00005; pos 1661514 to 1662112)
atcaaaaggcaagaacaataaattcaattactcgaagcaatttatttttcttgtttaattcttttgttatctatgctttcattatttttttaaaattttttacttaaacaattatcttaattttcatgatcgtgtgcctttatctatagtgattcttcatcagcaatgttagtaaatataatccatctgtttaattaacttttctcggtatcgttcatgccccgatcatagctgacatatatttatatatagcacaaaatcgaagtatctatattcacatatataaattgatgcgtatgctagatgatatgtttattaatttgatatattaatctgtttgatcagccttcatttatttgatctttttcattctaataagtacgtacatatgtgtacttaggcatttagcttttgatttacgtattttatttttattttttgaaaatatatatattccttcatctcgaaccgattcttgtaagccgattcttgtttttatttccttgtaattaatatacgtgatctcttaaatataaataattaacttgatctcagattgatcagcgcatagctggcggtggatcaagcgatcttcaatc

SEQ ID NO: 78222 - DNA, 1041 bp, Citrus sinensis
  Intron number 2 from transcript orange1.1g024099m (locus o range1.1g024099m.g) derived from phytozome v7.0 (chr-ID sc affold00005; pos 1398869 to 1399909 reverse strand)
agaagcaaaaaatcggcgaatttgagatattggaggtataaaaaacaagcatatcgattttcatctcgtcgatttaactcgggaccggttctctttcatttcagttttgaatcggtttccacttgcttcttattacgaagcttatacttaagttcgactccgattctcgttttttcagctgtttggctctggcgagaattcatcattagcgtctacaagaaatttcagttccatgaaaatcttgacttgttattgatgaaatattttttcgttttgatttttgttcttttgaccatctctcagtctcgtcttattcgagctttaaaatttttgtcagtctcgtcttattttgagttttagctgtggttgcttctcagatttttctcaaattacctacgtttggttactgagaaagaaagcagagagaaaaataacatctcagaacttctttccattctcgaattgatctctagaaccaacgaattggttctgattgttgcaattcacgatccttctttattttctttttcgaacattttctcggcagccgagcaaaagcatggagcttgagaaattttttctccgctttctatgcgtattcttcgtcagatcctctggagtgagtacgtctgtgatctatttttgaattaaaattctcattttcactgctgatgactattacagcatcactcggtagagaattctgcattttttcattttgaaaaatccttggctgtcggatcttcctcttccagtcttcggtcttcctcagtattcaatatttttgttgcattttaatatatgtgattcttatggtaagcctacttttcttctcaaaatttgggaaaattcttagccgttactctaaaattttaattttaatcattcgttttaaatggcgtggaagttgccggaaagccgaagccgtatccaaattgttcattttgtttttcttttttagtataattctgcaagttaaccgtaatttaggatgagtaattgtaattaacttatctgaatgggacaggtttgcgaaaggag

SEQ ID NO: 78223 - DNA, 267 bp, Citrus sinensis
  Intron number 1 from transcript orange1.1g024099m (locus o range1.1g024099m.g) derived from phytozome v7.0 (chr-ID sc affold00005; pos 1400018 to 1400284 reverse strand)
tctgaatccaatagagagatagaggagatttagaggtgtgtattaccaacacacttttgtttttcattattaagaagatcaatttaaaaaaattggccggtataattgttgtttggttcatgctttagtttacagacaaattcaaaatgacaaaagacgacatggttcagttggcttagtgttaattccgtataattcatcctctgatataatcattttatttgttttgcagatacatttcttaagagaatagagaaatttctgtaa

SEQ ID NO: 78224 - DNA, 595 bp, Citrus sinensis
  Intron number 1 from transcript orange1.1g020914m (locus o range1.1g020914m.g) derived from phytozome v7.0 (chr-ID sc affold00011; pos 163140 to 163734)
atcaaacaagacccttctaatccaactcttttcaggtactctctattaatcgaaatgcaatctttgtttggtatttgaacaattcacttgagtgattcaaatgggttctttaatttacttgtagttggactttgaattcttctcaaatttctgtttatgtggctcttttgttcacgtctcatttacttaaatgcttcttcttgtttgaaaattgatgggattgcattctatgctaattgataaataagatatttatgattaggattaaagagtttttctttctttcagattgatcactggttgaatttatactaatcataagatatttatgattaggattcaagagtttttctttctttcggattgaccaaaggttgaaattatactcaatgccttcttttactccgtttataggcatagagtaaacttctgttttgtgctttcatttatttgcttccccattagttccatttgttatatatgtatgcctggaaatcagtttattgttttgataatgcattaacgcatgttctccgtttctatgttttattattggccagcaaccgtgctgcagcatttctacatctagtcaagc

SEQ ID NO: 78225 - DNA, 547 bp, Citrus sinensis
  Intron number 1 from transcript orange1.1g039733m (locus o range1.1g039733m.g) derived from phytozome v7.0 (chr-ID sc affold00014; pos 986176 to 986722 reverse strand)
aaggttatctgtgtttcaatctatggaaatcaattagtaccatttaataacagagaatcaatctcaagaatatatttaatatggtatagatttttttgttagaatttgatttcatagcttcattcttttcaacttccaatcccaagtagaggagtgtggcttaactgctgtttaccgtgccaactagggaggggcaacgctttctcatattttaccttctaatcatatcacttaaagaatggatacacatgtgatggatgtcttcttccatagatgatcttgtttggtagggatatataattattgaataatatgaaattacaatcattccttttccagatacttcacttaattatactcctcagaatctaagtctgtagtaaatagatagcgaaatcaaagttgtagacttgtatcctcatctgaagtgcgaccttaggtcaacatggattgagctgcatcagacaacttttccttacctctgtttatttgtgaaaacttatactttgatctggtcttgcagttactgctgttgcaaacagccttc

SEQ ID NO: 78226 - DNA, 790 bp, Citrus sinensis
  Intron number 1 from transcript orange1.1g014027m (locus o range1.1g009463m.g) derived from phytozome v7.0 (chr-ID sc affold00003; pos 1003461 to 1004250)
gattttttgcaatcgtgggactttcttacatgtaatatttgtcttctgattgttgtgtttcgatctgtagatgatcattaatgtacagataaacgataaaaagttgttgaacatgtgatcatgtcctgtttctgcttggattctttttgcttttttcggtttgatgtgatcaagtttacttgtgtattgcatcgtttgatgtgttttatgatatgggtttgtctcaaaattggattcttctctaatgagtttgtattgaacaagggtgcagattgttttctccccagttttaaatttgttgattttgcttgtttggttcattttgatcgggtcaatttgactttttttcatttttgctgtgtgttataatgagtttacgtgaacaggggtgtctcttttgatgtgggaattcttttctttctttgtttcttttacaagtagaatatcctttaacagaagtctagtattcttctcttcaaagtttccttattttggtgtcccttcaattttaaattcctctttttgattcatattttgataatatctaccagttctgtaactccttctaaggtttctggtttccttatttgtctcttttttttcgctcctcttctttctctatgatctgaatttgattcttttcactttggccatggcaactgattgatctgataaaaaaatcttttatttgcttcatattttatgtgcacatcctttcatgacataacgtttttcatctgtgtttctatctgtaggtttgagacttgaagtctgctgatccttccgaaat

SEQ ID NO: 78227 - DNA, 561 bp, Citrus sinensis
  Intron number 1 from transcript orange1.1g025913m (locus o range1.1g015268m.g) derived from phytozome v7.0 (chr-ID sc affold00014; pos 1511045 to 1511605)
ctgatttgggcataaaagccctctcttttgatcaggtttgatttcattttccttttgatattttctaagtatgtgggtcattttgattatgaggtatgtaatctatttgttcgttcttaatacgaagaaagttgaagcacccaaacacccagtttgaggattggtcaatcgaataacaatcttcatattcttttatgtttttagtttttttatttttgggtgggatttgggattggtttcaataatatagtgtgtcttatgtgtattgtggatcatcacacttgagaaattgagtgttagctggactggttccgacccttttttgttttcttgcttatgtgtcctaaagggtgaaaataatataaattccatgacactcacatgagtattgtttgacattgattgagtgatatcagttctgtgaagcaggtaaattgtttcttaattgagtttaagtggctatttctgtttatggcaggttattaacttgatttgttgttgagataagggtttttccactttgcaggttttgggatcatttttcttttttcactcgctgag

SEQ ID NO: 78228 - DNA, 436 bp, Citrus sinensis
  Intron number 4 from transcript orange1.1g005423m (locus o range1.1g004932m.g) derived from phytozome v7.0 (chr-ID sc affold00061; pos 203615 to 204050)
ccctacgggtcatatgtgagttccatgtgacacgacttgctgttgagtttttttgtttttattttatttaaatgcaaatggctgcctgtgctattctttagatatctcttccaactattacctaatattttttttctcttactgtttgcatgtgaaacctttgtatctgcttttgcttgagcatatttacatccttttcctaacaaaatattgttcaccttcactgtggattttttttcttccttaatgtttatgtgcttttgttttaagttcatttgtgtcattttgggtgccaggttattttaagctggacagaatgttaaggttcccaacagtgatgttttatagatattgcagtctgtcgggtcctgacatattataatttccccccaaaattgcagggattcgttgagagggaaaccactctaattggatc

SEQ ID NO: 78229 - DNA, 627 bp, Citrus sinensis
  Intron number 1 from transcript orange1.1g005810m (locus o range1.1g005810m.g) derived from phytozome v7.0 (chr-ID sc affold00005; pos 598517 to 599143)
ctcaatcacgaccctgggtacgtcgtcgttttagcttcttctagtcgtgttgcatcgcaaatttacataataatagtattattatttatttttgtacatttgctgcttttgatggatttggtgaatttaattgcacaatttgtattttctttttgataattggacaagtctgcagcgcgctattgtgaattattactattgtttagcagaaaatgaaagtcgaaaattaggaaataagtgcaatagagaatcctttgttcactgtttgataattttttattcaatttaaaatctgtgagacttttggcgtttgtaagtttgattgataagtaatcagttgaatattatgaatttgaggaattatcaggagattgaatggtagtgaactaataaggattatgggctcgattgtaactcattgtgcttattgaaagttttgcggatggattgttgatattgaagttttgatgattataagtttttgcttcattgtgaatatttgggtattggaagtccgtacttacacttccttaatatgttttgcttttgcggatgaatactgatctattttttgaaacctaaacttggtgtccgtgtttttattatggtttatcaggcaagcaaagg

SEQ ID NO: 78230 - DNA, 237 bp, Citrus sinensis
  Intron number 1 from transcript orange1.1g042086m (locus o range1.1g042086m.g) derived from phytozome v7.0 (chr-ID sc affold00180; pos 92892 to 93128 reverse strand)
gccggtaaaggtgggttttgtatattaatattttcaccagttttctcacatgcatactaaactcccgagttcttgtaatctgtctatatatatatatcatgtcctagtttgggatgtgcataacaaaataacataaacacatcaaaacaatgggatcttcagctctgaatacgctgaccctatttcttttgttaagtttttcacataacgttgtttctgattctactaaagaagcgt

SEQ ID NO: 78231 - DNA, 810 bp, Citrus sinensis
  Intron number 4 from transcript orange1.1g006785m (locus o range1.1g006750m.g) derived from phytozome v7.0 (chr-ID sc affold00014; pos 1870379 to 1871188 reverse strand)
attgaactgctctagatcctgtgattgcagtcctggtatgctgctgattttatggtataatcatccagaatttttaaattgctattagcattttttttgttgtgataaaatgattcaatagtgcatgatctcgttacctgttaatagtttacttcacctacatatatgttcactttagtggcaggaaaatatttaggagatggaacgaaaaataagttccagggaagtctatgtagctatgtgctaacctggattaacgcagaatattcacgattctaaaaacccttatctagagtatacaaggccatttttctcatatttgacggttaaacaatatgggtttcttgatatctctgtcagtataatgactataaaagtaaataaaacctcatccattttttagtcaatttccaactagaaagtaggattgaataatttagagtccttgacatactatttttaaaatattcattttggaatcactagttgtcagatttttttattcttcaggaaagaccacttgacactctaatgtattccacttacacactctcaccccaacccgttgtttctttcttttattattattagtatttttaaagaataaaagaaccctgtacgtaaagtcacgatgtttgatgctgtacattcatctttttatttgagagtaaattttgttgaatgacttaggaatacctcatgccaaggctttatgtgtctgcaaacatttatgtacatcatgtttgaatgatatgaaagactgactgcattagtcatctatgtagcagttggaggatcaagtgaaggtaa

SEQ ID NO: 78232 - DNA, 691 bp, Citrus sinensis
  Intron number 2 from transcript orange1.1g006785m (locus o range1.1g006750m.g) derived from phytozome v7.0 (chr-ID sc affold00014; pos 1871688 to 1872378 reverse strand)
aaggttattattctcctttcttattatctctcaatatgttttggaaattttttttatcataatgctcttttaaatgattctcccaataagtttgagtttttgactgctttaaactatgttattcactttgtaattatttctgggaattactcatgattgttgttcacatggcttaccagatagaattatatatctgcaaaatttacctgatgggaattatgtatttttgttataaggagtgatagaatcaggaggaactaaaatatttagtctaatgcttcatttacagttgcaaattcaatgaggattgagtgtctatatttctctcatcaatacttgtttggctctcattttgttgtcttatcacaggtttggaattacttggagaactactgcttatattcttttgtcaatatctaatctccaaagcttgtaaatgatatgatccaccatattatttatgaaatctagtaaatcaattgatcttctcaaagatcaaagtgctgatgtcgcatgataagagtgagacggggggatctgtcggattttaaataaatgttgttttgttattgtaggattaattctggaatttaaacattcgattaactgatgttattgtaggattaattctggaatttaaacattcaattaactggccttttctttctctccagtgtctgcatttgcataa

SEQ ID NO: 78233 - DNA, 652 bp, Citrus sinensis
  Intron number 1 from transcript orange1.1g026193m (locus o range1.1g024200m.g) derived from phytozome v7.0 (chr-ID sc affold00034; pos 847750 to 848401)
ttagcttgaagaaaatacgatacaattcccttcttgtaagtctccgctttcttcaccctgtttcttttgtatctcttttattcaaattccccttttcgttgctttttgccttttttaagcctttgtttttttgttaaaggtctctctcttttaccatctgggtttcttccattaatctttttccctttctgggtattttctctttcttgttttcgttttgtttttttatattaatttttctttgttattaattgggttgtttccatttcctgctaactgttcagatactttggtttcgtatgcagttcctgtgaaagtctcttttttcttttctttctcaattttttacgcttgttttgtagcttttatttcattttaagagaactttacttaattcttccctttatttggcgcagcttttaattttattctgtaaaagtttatgtattttgtagagcaaattccttgcaagtttcaaaagtttctattaattgatttgcattgaggagtcaagtttctgaatttctccattcttggctctagagtgatggagggttttctcctgagtatgaattgtaatttgtgttgaatgtacatataatgatatttattttcaggagtcaaagtaaaagcaaagagcttgatcaaggag

SEQ ID NO: 78234 - DNA, 964 bp, Citrus sinensis
  Intron number 3 from transcript orange1.1g026193m (locus o range1.1g024200m.g) derived from phytozome v7.0 (chr-ID sc affold00034; pos 848701 to 849664)
ttcctgttgtggcagcttgaaggttagtttctattttaactcgtaatcataaatgcttttgttcaggtatcttcttagattcttaagttgttctttaaagttttattctatcctaaaattcttccctataaagtctgtccatggaagaatttcatgctatagaacagtttattgccacatggtggactaaattacaggcttttggtatcattggagcatgtgagaaatgtctgttgttaattaactccaatgctagctacaacatctatgatcctctaattcgaaatacagagtagtcattttttaatttgatggtgatatggaagttactttctgcatgttgggaaagtagggctttttgttaacatatcataatatgcaattatccagtcacattgcatacctaacctcacaaccaccatgtacatgccaccaattcaactgcattttcaccatcgttttccctcaagataattggagccttcatgtttgtttttgaataatacatttaattcaccaatagctgtctaattgtaaggccatgaagcatgcacttgataaagagggcactgcctgaatgcaagtatctagacagaaagatcttaagctttaattattgtattcaattttttttgtctaattcgaatttttgtacctgaagcatctaatcttggacataagtttctcaagtcagttttaaaggcctataaataattgatcatatcacttttgtagtcataacagtatccctttaggttaatttgaattcatttaatttggtgcctgacaacatacattgatactgtctcgtttgcaataattaaaaaaaaaaaaagatatcacaattttccactggattttaaaatgaagaaaacaaccataatttgcataaactctgctacttatgcaaatggtaatagcaagaaatttgctgtgttcatatctgatgcttgatttttgcagt

SEQ ID NO: 78235 - DNA, 589 bp, Citrus sinensis
  Intron number 3 from transcript orange1.1g018479m (locus o range1.1g009474m.g) derived from phytozome v7.0 (chr-ID sc affold00074; pos 326732 to 327320)
actggcatccatttactgaagaagctattgaacaggtatcttgtcagcattatgtaattttcaaaagcattttctttttcttttttaatttgatttttaagagactttctctcttggatcctgttttcctgtgattttgctacatatataccaaatccttcgaagtttgttttctctgtcacataaagaatggtagttagtcatttatttaacactaatacatctttcccttacgtcaggtgacacaaatattcttgggaaatactaataataaaatctgaagacatttttgttttgtgcattagaattttttaggtatttctggttggatccacgagtgacaagaaaggagctgtccttttctatttcaataaattatgtcagcttttgattgattatcctgcattacttgttcttttaccagaatcgttaatagcttaatagcttataaccttgttttgtgttattcaaaaactttttgtctatctatcagttgatgccaaaaccttgtgtgagattaacttaataagttgtattttgataccaaaacttggtgttgattctttattcatcctgtagattaagagag

SEQ ID NO: 78236 - DNA, 514 bp, Citrus sinensis
  Intron number 1 from transcript orange1.1g015573m (locus o range1.1g015573m.g) derived from phytozome v7.0 (chr-ID sc affold00003; pos 448712 to 449225 reverse strand)
gctaatcacatcttctgtcagaaagcagaaatctggtatactttcatcttcgccgtgcatatttgttctatgtttctggaaagttcctgttcctgttcctgcatttaattatttaatttttttaaactggaaaagtgccatatttttttttttttaaatatgaaactcaaaagtatattaattgagaaaaatcaacatagagagtggaccagtagtcctttaagcaaaggagataagcttttagtgctatgcaaaagtatacccaaccaccctatacaatgctatatcccctctcaatttagatgaataaaaagtgccatagtgttgtaacttagtacctgtatgtttagattttctggtatgcacacttatatatcctatccattctatcctttatcatggtttacttagacctttgcagcttatttccagtagatggtttcattttactgggtgagtgaatttaactgtttcatctcacaacaaattccagttagcgttctttcaaacaaaa

SEQ ID NO: 78237 - DNA, 729 bp, Citrus sinensis
  Intron number 2 from transcript orange1.1g011867m (locus o range1.1g011867m.g) derived from phytozome v7.0 (chr-ID sc affold00135; pos 178758 to 179486)
gaatacgctgtcgtatcgaattcagtgtagtctcggttactactgttcttaactatttagcaaatcaagcctttttaatacctgaattgtgaccaaatttatgcatttgggtacaagctttcgagtcgaaaactaattgtaggatttcagatctttaagattgcattttgtttccgtgaacttttaggacggttaatatgtgattaaaaaaaaaaactcatattgtggacttaatgtaatatatataatagatgctttgttagctttgcttgtttaatttttatttctttttctataagaaaacctgaagaaaagaaataaaaaactgaagaaaaattctgctgtctatgatacctttgcttgatgctaggttccagcatatgcatacttggtctttgataataatagaaatttgaaatctcagtctactgttggactattgttagactttgaaaagggatagagatttaagattcaattgtttggtataccagggatttttttttttgttttttggctgtacatgtttagagtttcctccttatcatgctgaaccatcaatagcagttacttccctatgtaaaaacgtatttaagaatgcataagtaactttttttttttaaatttgtgtcttgtgaatattcaaaaaaatttcaactcatgtgctttattcgtgtgatttggatccaaacagggactgtgttaggcattttattttaaactgtattt

SEQ ID NO: 78238 - DNA, 990 bp, Citrus sinensis
  Intron number 4 from transcript orange1.1g011867m (locus o range1.1g011867m.g) derived from phytozome v7.0 (chr-ID sc affold00135; pos 179926 to 180915)
catctgctgaagatcctgtacttgttagaaaagtaaggactgtattgttatacacctgtatgttgcactcgcccctactacaaaattttgataattattgcctttcattctcacttccatccctctatttaatgctctttttcaatcaaacaatatctgtagctgattaaatcgtaaacaggcaagtataggatttaaccgatgcatgatgaaagcatagtagagttattattactgatttaaacaaaccagctcaaacatttatgtttccttctagaaaaagttctaaacttgcaatgaaatattgtttgggtgaaaagtaaagttgcctaaacatacaaatttaatataccttgaagattcccgactatgagaaatttccggtttgaatgtgttttgtcctcgaatcctgtaataaagattttatggactgtcaaagatgtgacagttgcggaactttaagtggaggacaccagattgaattacatctacattctcttctgatcaagtaatattctcctttctttttttggttgtgctagtggaaggatcataaaatgtgaataaatgatctttgtttcttagcaaaaaatgtgaataagtgatcacatttttccttgcttaattcttttcaactaatgttgataattggctccattgattccattgctgacctaccaaagtaaaatttacatggatgatcatgaccagtagtgtcaaccttaagcccgatggatgatgactctctcaattctgatgagcagtgagatttaggttttcagtgaaatttttggcatcatattcttctacaataattcttcttttttattttaattttctctttttctttgagttgaaatcctatccataaattagtttgttcatagatccattttattgatctagttagttgaagcatttgcaactatagtccttcagctatttaattctgtttaaacgatttattctgtaggattctccacctcctgc

SEQ ID NO: 78239 - DNA, 813 bp, Citrus sinensis
  Intron number 1 from transcript orange1.1g021227m (locus o range1.1g014949m.g) derived from phytozome v7.0 (chr-ID sc affold00074; pos 411435 to 412247)
tactgattttggcttgtctgttttctacaagcccggttagagtctgtgtcttgctctggttcttggaaattgactttctatttatttatctttaagtttctggtaatgcattcttatttgggttttagttttcttgagattttgggagatgggttttctttatttgtttttccaatcaaagaactcagcatttataccacaatgtgtgtaatcatcatattgtagaaattgatgacttctgcattctctgttagctgcaggactcaagacgcttacaacatttgtttctttaatcctttaaattttttcagatctttattatgtcaatgatgttctaataaaatactctgggcgagtttggttggctttttcttcgaggttagaaagattaaagtatgatctagcttcaaaaggaggttgaggaagtaccacatcatccttaacagaatgccctttttttcatgatcgctgtctgtgttacttggtcatgatgatgtgactttggatggaggtatttgtttgatataggaaagaagcaagatagtaagtaagactagatgttctggttctgagtaagtttatttattacgaattcctgggttgtcaacatgctgtcctgcagttcacaagatgtatgaagatcactaaatttagctttgtaggcatcgatgctaactttattttttatttggttcttcatgatgttgggctttcatatacctatgatatgccttctcatgttttataattctataattttgactgccatttctttttgaaataaacttctggtttccttttatgtcattgtag

SEQ ID NO: 78240 - DNA, 903 bp, Citrus sinensis
  Intron number 1 from transcript orange1.1g004082m (locus o range1.1g001872m.g) derived from phytozome v7.0 (chr-ID sc affold00014; pos 1124465 to 1125367 reverse strand)
aggtttgcctcagttatctttattaccttttagataacgataaggtttctgcttaattgaaatttgaatatgttggctggcgatgttgtgtagtcatctaataattatgatatgataatggatgtgtcgtattatgaaaaaagtgtgctctggcatttgatgaaaaagtagttcttaacttggatgtcctatttgacttgtttccaattttttttttttccatattttgccttgctgcagtcagggcaatagtcctatttgtctgttatttttctggctaagcggctaagctctatgatttattccctgaacacgttacagcctaattgctgatcacctttttctttttggtctgtctatagcatcattgctatacaaaaggtttctttgcttcttttcatttagattttacgtagtcaactgtaatatattttatttgtgtctttactgagaatgtgcttggtattaccagtctgcttaacaaatgtttggtgccagttgtatggtcaaacacaaactgaccattctcttaggttaaatcgttttttatttgacctttgatctctaaaatctttcattcgcaaaatcctgggtctgttggctggtgtcatctttatttatcctgcacttttattaagccttaataagaaaactatagttatttgcaatgttatatggcatattattaataatttgtcttgtttttctttatattctaatgtatccagaccaatacctataggggaaaaatatatgtactatgaatgatagatgtcttatatttgatcctttgttactgttgattccttacagaaattttctccaaattatatttttcatttcaatttcataaataccttttcaacttcgttgtagatttgtgtttggtgttggcatcacata

SEQ ID NO: 78241 - DNA, 683 bp, Citrus sinensis
  Intron number 1 from transcript orange1.1g000763m (locus o range1.1g000179m.g) derived from phytozome v7.0 (chr-ID sc affold00101; pos 42873 to 43555 reverse strand)
cttcttgaggttcttttattttttttttgcaatcagtaagtttactttcatttgcatttcaatttgccaatattcaattttcaagtttagttgaatttctgctccgtttggttgctgagaaatttttttggggggaaatggaaagagaaggaaagtttaggatcttatttttattatttgttttaggtttgcttgattttgattgcctaggattttagatagaacctcattcagagtttgcttaatctcattgtcattatagtaagctcgctcttaacttcgcttctaagttttttttttttttttttttgggattcgcagtcagtaagatattgtcatttttgtttttgttattgttattgtctttttactttccaattttatttccagttgagtcggcttcgtttagttgttgacaatgttttggaatggaaattagaagaaaatgagatttaggaatcatgttttttagctttcgcttgaatttgattgtcgagggttttagcaggcgagcaatatttcttctcatattgttttggtgataaattattattttattactgttgatcgtgagttgaacttctctattttagtcggcagctaattcgcttagtaaatctcttttactgaaaataatgatttattttttgttaaaatttgttgaattttgtgttgtatagaaa

SEQ ID NO: 78242 - DNA, 658 bp, Citrus sinensis
  Intron number 5 from transcript orange1.1g023676m (locus o range1.1g016689m.g) derived from phytozome v7.0 (chr-ID sc affold00005; pos 730691 to 731348 reverse strand)
aacttctgcggaaaagagataaccctgattacaaggtaaattcatatctactgccccctaacaaacttcaatagctgtctagtctgtagatgtttctttatcataagaataaatgtacatatgttgatcccactgcattgttctcttcatgaatcatgaccaatgcttattgctgacataaagggatgttgcaaaacatgaatcttatataacatctttcatttccacaattatttgttactgatgctctatgtatttggatttgtttgattttgatggactcagtattagtatgtttcttagttcctgatttaggatgcagtcctttgtttctttattcagactaattccttggctgctttaggtataatttttgtgtaatttgatgtcatctctgagttagtaaatgatttttaaatacataaagctaattatttgaaaccaaggaatttagttctgtgacaaaatgatatagctgttttaataattacctcattttccaataaccttgctcccagtctcagcattcttgacgtgagaaattcgtatcagaaaaagagcattactgcttttcatctcttcatttctaggtgctgtgcacaagttggtgatctgtttgattttttctgtgctttcttttcagtatacaatagctgtg

SEQ ID NO: 78243 - DNA, 725 bp, Citrus sinensis
  Intron number 1 from transcript orange1.1g023676m (locus o range1.1g016689m.g) derived from phytozome v7.0 (chr-ID sc affold00005; pos 732405 to 733129 reverse strand)
ttctcggagactcgctctctttcagctcggtgctggtaagcaccccgcacttcttttatcttattttccatgcttataaccctttagtgaaaatgcccatgtttcccattttggttatttttatggcttgtcatattgtttcttgtagttttggattttatcttttggggtttttgtctttgcatttgaaaatgtatgtagtaggaacgggttctcatttaatgactaattatcgtttcaaaattgcatttttattaatcagtagcaaccagtgcaaggtatgtgcagaattgtttgagaacaagtagttcatagaattacaagaaattaaattagttaatgtttagtactctctagtatggcaaatttgtggtcttggtttttgtggcaatgtaatatgaatgcaagctcttatagaaactgatttggcagtgttgataagcgatatgtgtcacattttgaaaagagtcaaagaaaattaatagtgtaggacatgttgcaataatacgacattgtcacatgagtttttgtataggttgtataggagtttttattccttgtattattgtttaggtgatcagaaaatcaaacctgctgactgccactgatttctgctttacatattcgttaattgaaggtgtcaaattggattttttcttctctgctaatgaactttatgtggttgtgtagctatcccacagtcacatttttttggtgcaaaagca

SEQ ID NO: 78244 - DNA, 391 bp, Citrus sinensis
  Intron number 1 from transcript orange1.1g029171m (locus o range1.1g029171m.g) derived from phytozome v7.0 (chr-ID sc affold00061; pos 516219 to 516609 reverse strand)
ttctggctcaaaagaaagccaagaaaactcgcaaggtgataacttgttcatttttctgaaatgggttctcacattttccaattttcatagtttaaatccttgctttctgtttggttcctgagaaaattttatgaaaagaatgaacaagaaaactcaaattcaggtttttatctttcttgttcagttattcttatagcatttccatattttttgttgttttttatgttgtgagtggatcaaattgaaatgggttggttgcatttagcttaatatttgttaattatcattatagttccttatacttttgtttagttcttgagcaaattcagaacaacaaaagatgacttcctttttaataaatttttttcatgttagataatattgaaagagg

SEQ ID NO: 78245 - DNA, 791 bp, Citrus sinensis
  Intron number 2 from transcript orange1.1g032130m (locus o range1.1g029629m.g) derived from phytozome v7.0 (chr-ID sc affold00003; pos 2776669 to 2777459 reverse strand)
gtaaatctctctcttgtcttttgggtttagttgtatgtgatataattgattggagttgttctcttggtagtgtttatcagaatgttgaaattgcttttgacatgcattcttaatttctcttgaaaaattgaagaaaaaaaagattatttttattagaatttgaatcctgagactattatttgttcttgttatgagtagcattgggaaatcttagattggaaacatttgaataactaataatttgctgatattgtaccactttctttaacatttactatgatgttgttgccgcctgctggttgatagataattgtaaccgtataatacatactgcataatggcttcttacttagactggatgatccagatgttacctgttgatctggatggcctactggtggaccaaaaaaatggataactaaagtcatggttcataacttacagcagcccccctggaattcaaaagaaagcattaaaacaaatttggttattcttattgttttactttggcattgacttgtaccttattctgatattgatgagccagattatcattatcttcattacttttttggttgtgataactgatattcacaccctgaagagaacttctcttgagctgttaattccctgctctagatttatatattatgattgatactttgataaatgtgttgtagaaacagttgaagttccttggcttcattgctttactcaccctcctacacatttgcttccagaatatcttgttaaatttactcttacgaatgctatcaatgggcaggaagtcc

SEQ ID NO: 78246 - DNA, 962 bp, Citrus sinensis
  Intron number 3 from transcript orange1.1g008500m (locus o range1.1g008500m.g) derived from phytozome v7.0 (chr-ID sc affold00094; pos 108225 to 109186 reverse strand)
gacctggtatttcctactgaggggttatgatagtaatacatcaaaataaaacatgcttggattaagtgataccaaaatagttaggctttaattatagaaactgagttacttgctaaccattatcttccagatgttcaaaccttgatggttcttaaggaagtacagagtatttggtaccactttaaacccagaatattacagctgtagtgtatcaaaacctcctgtagagggtatttgaatttcaagttcatgtattgaagcaagaagctgattcctatgcattaatatgctatatggcattactgttggcatgataaatgctaatgtatccatgcataagtatgctgatttagagacatttgcttgcttcaccagcttggatataggtgacaatattatttaaagttcatggagactagcaaattgaggaaatgacgttacacttacttattgataacatcagttgtcctatatctgctttagtttgatttcttaattacttgtaaatatattttacatgttttcatttcttatgtacatatctgaattatatttgagttcagtatctgctgtagttactgctataattttggccatgatactatgattgcttgtttcccaaattatgatatttaggcagttttttctcagcagtaactttttgcttctactttattattgaaacttgtgactttcattttttaactagaaaaagaaaacaaattatggagttttgtggtgcacttgtatctcttcttctgagtgtctgtagtttgggtagcttattttgttttatatctttagctaactatttcaaggttagagttattttttagttctttgtggaaataaaatggggttacgctaacaatcaagtttctccactgtgtttacctagatactaatgatttgatgacattcaaacagctacaagattgtcctgaaaaagaaaattttagcat

SEQ ID NO: 78247 - DNA, 608 bp, Citrus sinensis
  Intron number 1 from transcript orange1.1g019730m (locus o range1.1g018298m.g) derived from phytozome v7.0 (chr-ID sc affold00083; pos 144550 to 145157 reverse strand)
cagcacctctcgctcggcttactattctgttccaggtttttttgttttttgtttttagatttggatttgctgctttttcatttatttttatttttatttttgtatgtgtgtgttaagtcagagttttttttttgggtagtttaatttgatttatttctgtaatttttaattcctattactttgttagtagtactttttgaatagaatgtcagaaatttgcatgcacttatttttttcgtataaatgtaggaacttgaaaaaaattataaaaaataaatttacatcagtcatgaaatgtatttgattgtatagtatgtttccgtcttgccatgagtaccctttcctttgaagatgaatttgttttaaacttttaatctgtcaaaatattgcagatgttttacatcaagcagaagagttagcattccataagccaatctaattcgtaatcctgtgctatacaatctggatgagatatttatcatgaagtgtccatatgctgattattacttagttttattattatggattatttgcagagcgttttatttttcattaaacttgtagttttcttgactgcgggtgttactttgttttattaggtgcaaggt

SEQ ID NO: 78248 - DNA, 934 bp, Citrus sinensis
  Intron number 1 from transcript orange1.1g047634m (locus o range1.1g047634m.g) derived from phytozome v7.0 (chr-ID sc affold06056; pos 1823 to 2756 reverse strand)
gtgaacaaggtagcatttttcaatgcgtgctatgaagtttaagatgcaattctcttgaggatgtttatgttgtgactgtttggaatttcggcaaatgggatttttagctgaagctggggctgttcaaatttttttggtgtcgaaccatgtaagatgtttttatttttggttcaaacttcagtgattgacatacatctactgattccttttagatttaatgttttacatagagatctttgcggtgacagctgcgtatcccgcatcttctttctgtgtgtctacactctcgtgacaaagaacttcaggaattaggctccatttgtactgcttttatgagtagagcttttactatgaaaattgtaattgtttagttgtcaatgatagtttttattacaattataaaattattttagtagacaaatattttaaagtagtgttatcaaaggaatgaaaaaaatattgttaaataagtaaaacatattttagatattttaacattttaaaaatacttttcgatatctactcccaaaagttcaaaatttgagcttttactggtaaaggcaaaaaaaactcatttaatctacaaaaagctctactcagaaaataactaaacaataacaaaaattttcaaaagagtttgtgcgattaaacaagcacttatgactatttgacaaattatatcaaacagttacttggattagaaattttttaattttatatttcattgttgtagaaaaaacaagcatccatttgccatggctaaaagactttcttcaatgcagaaacctctactaagtctttccttttaggtgctcatatggtagagcggtcattttgcatgcaagaggcattgggatccaataaaaaattataatttattatgatttctaacatctgtattaatacaattttgatgtgttttagttgatacctg

SEQ ID NO: 78249 - DNA, 708 bp, Citrus sinensis
  Intron number 2 from transcript orange1.1g030145m (locus o range1.1g025524m.g) derived from phytozome v7.0 (chr-ID sc affold00252; pos 126798 to 127505 reverse strand)
tcacaggtgtgaatagtatttttgctgggcaaatatcttagtttgcttggagagtcaagatttctgtaccatgttatgctttttatctatatcattagcctggttagcaatagatagtataacagcacagaatgataattatattgcatcctgaggaaaaactatggatagagatatattatttaaagtaaaaataaaaaggttaaaaatgcacttggatgattctttatcaatttccatttgtaggtttaaatatgattgcagttgaaccctgttttgtttctcattggctgcatatctttagtagaatggtttgatcatgaagttgcctatccaaacttttaaattctgtgatgggaataagcatgtcaaataatgaccaaatgaccaaatgtattgagagtaagcgagcaaacccatgggtcaggagcataagcaagttgctaaactttgctcttgactatctttctctgcattattttgaagataattctgttcagtcaagttattaagaaccaagtagcacaaatttgatattgattgtatcatcttctgtaacttgactattgaattttatatcattggattgcttcaagagcttacgtgctttcgggaaattactttgagctgtttgggggtccttgatttttgtaatttgactatattattattattattattatttttaatcttcaggtgcagttgaag

SEQ ID NO: 78250 - DNA, 661 bp, Citrus sinensis
  Intron number 1 from transcript orange1.1g002471m (locus o range1.1g002471m.g) derived from phytozome v7.0 (chr-ID sc affold00005; pos 118431 to 119091)
tctcaaaccaactgggaagctgataaaatgtaagtgctattcatttctctttttattttattttattttctatttgggtttcaatattttgtgcattttttagcttacaaaatactgttagctgtggtttttttgcttgatttgggttctgggcatgtgggttgttgtaggttttgcttctgcttataagtcctgtattcaagttatgttctttgaagctgttttataacatgtacttgtaagacatgttagggttcagaacttgttctgttcttttttttggcttgaatttctgttttctttctgagttgtagcatttagttttcttacatgtccagtgatttcagggaataaagcggaaaagctttctctttgttcgtttctctgtagcatctgttgtatcaaaatcttctattttcattaccgtgctgtttttttggtttctaactgtcttcattgctggcttgctgcttttcagctatagcatttgattttcttgtatttatgtgatgagtcttatctatatgcactgtctgtagtgtttttcttcttttttggcactcttactggtttctgctagctcttatttcatgtaaagatttttttctttcccttcacaatgatgccaaatgttggtgtattttgaaatacatcaggttag

SEQ ID NO: 78251 - DNA, 462 bp, Citrus sinensis
  Intron number 1 from transcript orange1.1g012845m (locus o range1.1g005056m.g) derived from phytozome v7.0 (chr-ID sc affold00003; pos 733187 to 733648)
cggtctcgttctctctatacttctcacaaaattaggtatattttaaaattctttggtttccattttcattaaatcatgtttcagtggttggttgctgagaaaaatatgtggaaatgaaggaaagcaataaaacattttgtcagcaaaatgtttgacttgtggtctctgagaatgttattgaacactcttcattttccgttttcccttcttctggggtgactttgtgatccattttgctatttttctgtttcttctaagttttttctctcaccagtggttaggatttactaattgaaataatgttttcaatctgttttcatttaaatttggtttgtccaagagagaaattgatagttacagacttaaaagatcatgttcttaccatggaaagagggaaaactggaggttttgttcaaatctttttattttttttggtgattaatgacattttgtagggataaa

SEQ ID NO: 78252 - DNA, 662 bp, Citrus sinensis
  Intron number 1 from transcript orange1.1g031824m (locus o range1.1g031839m.g) derived from phytozome v7.0 (chr-ID sc affold00003; pos 2741760 to 2742421)
ctgcaatcaacgctacttgccgcgtcagctcgtaggtttgattttttttctttaaaaaaaatctattttaaaaaaattattgtatcatagccttttctttcaaatctatgctgtatctttgatttacttggtttttttttcttcagttctttctttctggctaatattaggtatttttttcgatttaaatgtctcaattttgcaatatcaatgaatctttaattgaatgaatggaagatgagctgtaatattttggtattgtatctgtttaatttttccgtctgaatattattatcatggattttttactttcatatactgaatcggtattgtatctgtgacctatgtcatgtgatatgaattggggtttgtattgaaagcgcgttcagattgcaatttctgatatgaattttagttggaactgcttaaaggaagtttcctgagatttgtctttaatctaggctcaatttaagctctgtggtaataattaccggagaatctctacttgttgatttttgcaaaatgtaaactttaagttgttgtatcctttttgctgattacacttgaggaactatcactggttcattattcgtattataattgatgacactgagtattgttgattttgggttggtcttttactgaatttgtaggcagtgaga

SEQ ID NO: 78253 - DNA, 940 bp, Citrus sinensis
  Intron number 1 from transcript orange1.1g001172m (locus o range1.1g001172m.g) derived from phytozome v7.0 (chr-ID sc affold00700; pos 39281 to 40220)
ttgggaacagaacagcctctggtcttcggtttcaggttcgatctgtacgacgtcgttgccaactttcgattcccttaattttaatctatccctattccttccttgttttgttttagggtttgatgttaattggggttttggggatttatttctacgatctttagtttttcgccgatgatcgttttggtctttatgggtttttttcttttatgcaattgggtttacctagataattttctttgtttgagtttttgtttgtgctacgtgtttctttgtctttttaatctgaacgattgttgttgagctgggtgtttgattttataatctcatgatgttaaaaataattttctgattgattatgaggagatggggttttggtatttggattacaaatgttgaattaaatttgattgttagaaaacatattgggtgtggaagttgaagataatggtattttaaaaaaaatttgtgtgttttgtcataatttggttttggaggaattgaatatacaataataagagcattcaggtaaaactgccatattataattaattcattggaggcttttattcagataggtcctaattgatgaagaattcattgtgctaactgtaatttcctttcctgtcaccacttttttcaacggcctaacggattattgccattttgattctattctttagcttttgagacttttttgtcgtatttcatgttttggttttatacattgttaattaatgttcttttgtcgtattcggggttttggttttatacattgttaattaatgttcttttgtcgtattcggggttttggttttatacattgttaatatatgttaggttttttgttatgtgacgtgaggtttaattgctaactttgattctttttgtttggtgcgtcatagcaagtggaattgaacgagtgtggggtagggagttc

SEQ ID NO: 78254 - DNA, 847 bp, Citrus sinensis
  Intron number 3 from transcript orange1.1g030679m (locus o range1.1g029369m.g) derived from phytozome v7.0 (chr-ID sc affold00005; pos 166437 to 167283)
gcggcggtggaagctgtgggacttgcattgtggaggtactgtattacctttattttattattattattattttttaaattaatgtctaattacattacattcaccgctttgacttgtaaggtactatttgacattaatctttaatctttacctttaaggtaaggatccatgaaatttgagcttgtctaatattattaacatcctctctcacgtgcaagactaattttagacttgtcatgcgtctttaaaattcaacgatctattttactagtgcaaatttaattcgtgtttagacattaagatagttcagttgacttaactcttataatgaaagtaagcgatcatagattcgagtccgagggaatacatgtagaaatgaggtgcaatgttattaaaagaaagaattctagcacaagatcttttaagtcaaatctaacctaatatcttgctaagttaccatttgacctaaaaacttgaacttgaaggttgtgtcccaaacaatagtatttaagcttgtctaacattgatgtgttcctcattttggcagattattgatggaaaagatcttttgaatgaaagaacaaatactgaactccgttatttgaaaaaggcaagctcattttctacttaacccgaaatgctgaatgtgcattatatttataacattcgttagtgaagaaaaaaagagacatgaaatccacttgtcattatacctgatgtaattttaattttttttggtgctgtatttgtgaatctgatatcaaattttttttgtttttagtatttgactgttgttttttattatggttttattgtgcatgcagaaacctgaatcttggaggcttgc

SEQ ID NO: 78255 - DNA, 468 bp, Citrus sinensis
  Intron number 1 from transcript orange1.1g008483m (locus o range1.1g007895m.g) derived from phytozome v7.0 (chr-ID sc affold00023; pos 1351199 to 1351666 reverse strand)
tccttcacattctttcatcgtttccaaatcatctggtaatagatccctcttcttttctttatcttacttcattcatatctatgtatgtttatgtgttctgtgattttgcttaaaagttttgttctttgtttgagtggtagctaactccatttcttctgacaatagttttttttttaattattatttttattaaattaggttaacgtatatcctagattaatctaattcttatcttaaagcattaatcttggtgattcttaacttggggattctggtatttttgttcttgtcccttaaagacggtgaaaggtatcacctttcttttggggaaaacaaaggctttatgattgttctgatatggtaatgctttgattctttgatttattgttttgcatattccttgtgtctgaattgggtttcctgattttgatattatgttagtgtaattgatgaaatatctactagtgg

SEQ ID NO: 78256 - DNA, 680 bp, Citrus sinensis
  Intron number 1 from transcript orange1.1g002553m (locus o range1.1g002445m.g) derived from phytozome v7.0 (chr-ID sc affold00049; pos 150367 to 151046 reverse strand)
tcttcgctccatctacatcgtccaaccatcacaaggttttgtttgatttaagttcgttttagttctttgaatttgtagcatattacacgtggagctccaatttagctcttcttattcattctaagctagtttaagtctcttagcacccaaatagagcaatttttttttgttaattctgtttggttccttagaaaatgttgcttaaactttgaattctggatacggctgttagttacactaacgctcattctattttttttttttctctctcttcgttgtatggaatttgcagaacacgtgaaatttgatgatgcagcgataatgcatctcatgaacttcagaaatatcttggttaatatttctttaactatgttccaaatttggagcatgaaccctgcaaacatagagttgctaaaagactaatcatcgtggcataattttgcggcttttctttaataattcagtaaatttttggtcttttagcaattctctgtcatgtagatttgagaaaaaatgcctacatcagcatgcgagtactctctttctagctgaaaagattgaaacaaacttctttgcatgttggaattttactgcataaactttgaacactgcttgagggtgaatattcccttgtttattgttaaaagacatgacagtgtcagttatcttattataggttg

SEQ ID NO: 78257 - DNA, 410 bp, Citrus sinensis
  Intron number 1 from transcript orange1.1g018835m (locus o range1.1g018835m.g) derived from phytozome v7.0 (chr-ID sc affold00190; pos 270031 to 270440 reverse strand)
cgaattgtacaaatttgatccttgggagttaccaggtacctcagattttaatcgtgcaatgtttgtatttgtctaattgccatgaaaaacatgaattagctttagtgatcaaagacagttcaaagttaatgtgaacaaggaattgtttttagctttgtaaagcacttttttgtttgttttatttatttgattcctgttagattctttcttcacatggggccttaactttttgtactaaaagccaattttacgggatttaagttttcatgtacaataatgagaaaaaaagcagtgagtagctgttttctatttggtcattctgtttaccttaatcttattgatttgagaattcaacaaaatgaatttccaactgtaaatttgcagagaaatcattccttccaaagcgagat

SEQ ID NO: 78258 - DNA, 602 bp, Citrus sinensis
  Intron number 3 from transcript orange1.1g020768m (locus o range1.1g017426m.g) derived from phytozome v7.0 (chr-ID sc affold00062; pos 475095 to 475696 reverse strand)
gttccctggctaatcaggttgattgaaaatttacattttgagctaaggtctagaggactataagatgagaaatatggtagactgactttaacacagtttatgcccttataaatttcagtaatgatatacttactacgttttttttttttttgaattctactacggttagtataccatcactacagtacaaaaaaatttcattacaagataaaagaaaattccactgtaagaaatttttttttctttctcttactgattttgtgctaacttttatacatacattattattctataaattttactgtttgattttttttagtgtattagattattactacaatatgatctatgcccttgtgaattccgttgcataaatagtggtgtcactttacctgttcttctaaaaacatactggttactgtcagttgtgtagttcccatttgatcttctgtccctcttgtcatatatttttttatctggcaatgattgttgattccttttatttgaaataaaattggctgctatcaaaattgatcggctacttgacacaatgactaagatgcattttcttgtgtataataggtggtgcatcctgcagacct

SEQ ID NO: 78259 - DNA, 816 bp, Citrus sinensis
  Intron number 1 from transcript orange1.1g017506m (locus o range1.1g006475m.g) derived from phytozome v7.0 (chr-ID sc affold00101; pos 198354 to 199169)
ctggtgatcccaggactgattctatccctcgtgaggttagcttattttatttgattgaaaaaaaaaatagttttttttgtaatttattttatattgtaatttttttagactgaaatttcacttataattgattataatttttccattgagattatcgacagaataataaaatgaaacacttcctaactacgatagtaacatttttataggtgacatcaatttattgaattatttattattttgtcctatcttccaaataaatgaatgacaccttattgagataatcaaaataattttttgtgcaaactgatgtggcataatatgatcaaaggaatgaaataaaatggtgcagtagtcactatgaaatttgttaattagaacttttttttaatataaaaattagttttaatacctctatttggcacattgaattcttttcatgcaaactattgtggcattatagcatgttgctacttgttgcactttatttattcattttatatggtttttgtgcttcctcattaggttgcatgaaaaaagtttgtttatttagtaattatttcttttatagattttttatttattttttatgggtgttgaattgaatttaaactatatcagtagctaatcgggatagttggtttacctcattcatgtcgtttgcatgatcgtatttgagatttgtacattaatgaaagataagtggtagaggtttgtatgctaattcaaagatcgtctatgtgcatgttatttttttgcagcctgatttgcatcttgattcagtgtcttcttttttaaataatatgtaggtattgc

SEQ ID NO: 78260 - DNA, 956 bp, Citrus sinensis
  Intron number 1 from transcript orange1.1g045399m (locus o range1.1g045399m.g) derived from phytozome v7.0 (chr-ID sc affold00048; pos 13118 to 14073 reverse strand)
gcggcgcccctccttcagcggtagtagtttttctccatctcctgatttggatctggattttgttttctgtgtttatgaatgatgttttcctgtggatttgtttttgtttctattggtttggtttgttttcgaagaaagttggatctttgattgattgttgtgctgttatatattcgctaagctgatataattattgggttggttttgttttcttattcaattctgcgtgtcttgttataatgagattacgtgggaaatatggtctctagttcaaattttattccagtttacttgtattattagcattatgtatttatttgatcctttagttttaattctatgtttttctcttttctggtagttgattatcatataatagtcctaattcttggcggggcactaaacactttgtgtatctgctgtaaatatggacggaaaagaatatgtaggctttaggtgggcattctgtgagtttgaggttgcccacaaaggacctatgcacattgtttgtttgaagattggtaattttattggaggtgtgtgaatgatgagaggaaaatatttctcaacctctatagggtgaatcttctgaattcataactttttttttccttgttcgtggaattatattctggtctgctgacccatgaccactttgagtcctttgtccaaatatattgaaccctgtagctttggcttatattagttgagtatagtttctagttctttaaacagaatgaaaacagtcatacttatgaattttaggtagtttatattagctgtaatttacaaccataaattttaggtagcttgtatagctgtttgctacttggtgtttgttgttaggtcttttctctatcccttgtgttttcttgcccgttgaaggttcttgactcattcattaattgcttgttgttgtagactggagactcacggtttgagggtcgcgagcgggt

SEQ ID NO: 78261 - DNA, 528 bp, Citrus sinensis
  Intron number 1 from transcript orange1.1g023015m (locus o range1.1g017385m.g) derived from phytozome v7.0 (chr-ID sc affold00017; pos 1296530 to 1297057)
cgacgtccttaatagtgactacgccgtcgttttcggtattatttataattttcccttttgctttgtccttgtggctttgctttgatttaaaacttttatcattagcattaagcaagcattctattttttttttcttttttgattgataagcaaatttaattcaagcgaagaacctcataaaacaagctgtttacataaatttaaatttaattctttaggtgcttattggaatgggagtgccttcgtagaaagaaactaatgtattttcagctgatacctctttctccccgaaagtttctttgaaagtgatcttgactactgttttatcaacagagctgaaacgtaaagcattcttttagaaactttttccactagacttggaaaaattatgagtaatgctattttcctgccattgaatttttcttagttatggccattgcgagttacatatttggaaatgaattttggtgatgtttacatataaagttttgtttggacttgctaggtgttccccttccatttattgga

SEQ ID NO: 78262 - DNA, 977 bp, Citrus sinensis
  Intron number 1 from transcript orange1.1g013598m (locus o range1.1g013598m.g) derived from phytozome v7.0 (chr-ID sc affold00003; pos 2184906 to 2185882)
agccaaagaagaaaggttagtttttgttcaattaaattttcttttcttgagttatgggaatgttttactgtgaagttgctttcttttgtgtttattgaaacatttttggttttgattcgcttgttcaatgttatgtattaataagcaatagtgaagaacttagcatgtcatcgaaaaaagagagcaaaatgcaggagtaatccttgtctaatttatattttatacaaaacttggttcgattaagtacaaactaaaacttggaatctatttcctttgaagggttgagcatcagactttatatttatcctgttaaaggagtactagttgactgtcaattgcaatatcagtgttttctcctcttgggattggttttaccgataatggctatgctaatgaatatatttctttggcctggtttgtgggcaagttttggaaaatgaaatcaaattacttcgccaatttaacagagtgattttttcacaccagagaagatgtattcaactctttcaatatcagggcaaaaatattaatgaatagcagggacattacagaattttgggagattattatttttgcttctgcatcaatgatacaagctgaggcagttaaccagccccattttgcgagtatctcaattctcaattgaattatcataaaacttttgctaaaccagatccttattggttgctctaatgctacttcgctgtgttcccaattggtgaagatattatatcaacatcttctttccctttgtaccattcacatgtggcttgtaaatagatagtgtagacatctttggaggacttctgttctcacaatgtggggagaattgatttcatcttcagttcaccaaattaatttaatgaatattatttcttctttaatgatgcaaatcgcactatgttctttttgcttctccatacctactttagtctgacttttcagtactatacttgagttttgcagaacctgaagat

SEQ ID NO: 78263 - DNA, 138 bp, Citrus sinensis
  Intron number 1 from transcript orange1.1g021287m (locus o range1.1g021287m.g) derived from phytozome v7.0 (chr-ID sc affold00023; pos 1205700 to 1205837)
agctaaaggtaatgcacgttcccactcttcttttatttttttatttttttaatcaatttttccattttgcagtagctcagtttcttcaattagtaactttttgattattttgttatcaattttgcagtaattaaaaag

SEQ ID NO: 78264 - DNA, 996 bp, Citrus sinensis
  Intron number 2 from transcript orange1.1g021287m (locus o range1.1g021287m.g) derived from phytozome v7.0 (chr-ID sc affold00023; pos 1205901 to 1206896)
ggtttcgtttattttgtatcaatcaccattacccatgtctcaaaattctgattaatgcatgcttttgattctcggtgttgccttttgttctgtttaatcaatacttggtgaaataaaaacaattatgcagtgctttagggtgtttgtttttgtatttttgctattgaattagtgctgttgtagttttcgtttttagttctttcggcatttgagattagattcgcacatccgtcaatgatgttttgttttcatgctgcattttttaaatttcaactttgagttttactgtgaggaagaaagaatgaaaattgacatcaatgctagtttgcttgtggcaaacatgtgctaaatatatgtttttagcattttacattgatatactcatcaatgcttctttagcgagtagcattctctggttgtacatataggtggtaatttttatctgacaattccatttgaaatcaaacgtgtttaatgtgctgtcattggggaaaatatatatggcagcttgtttaatgagctacgcgaatgattttagtatggaccttaatgaacttattatatccagcttctttactagaatctgcatggtgaattgtgtcatgcagggggaatgaatttaatataatcctttgataatgacttctaattgacatacaacgtcactgcaagatgttattttgcaactcttgtaaagtagatttccattcaaattatgaaactattgtacacccacttcaattactagtttgagccgttctaggagaacttgccttaatttatgtgaaattattgttgagtaatgagggtgctacagttatgtgtcatgtaactttcacaggctgttttgtagttgtctcactatatacggttcttttgcaggcaaccagactcgatcatagtttagcatatgtgcttaatattatgaatgctctaacttacatgtttagtggtatcctcactctaattttctggttgttgtgttcaggttgagag

SEQ ID NO: 78265 - DNA, 826 bp, Citrus sinensis
  Intron number 3 from transcript orange1.1g021287m (locus o range1.1g021287m.g) derived from phytozome v7.0 (chr-ID sc affold00023; pos 1206972 to 1207797)
gccgttgttgacatttatatatttgtttgtggttgacttgctatatattaaaagttaccttggtgttcatggtccttgagtccaagcacgtgactgtacttaatttaatttacttaagtttttgttgcgtgaatagtgtttgatactcctttttcccttatgatttgtaaataattacacacttgtggcctatgaataatgaaaaatgggactgtgttaaaaactgttcagggtttatgtgatggtaaaagggaacataatcaaaccagtttattgccatttggtacagttcatatgctactaggtgtatctcaattagaacttagtttgtcagtttgggttttatgatcaagatggataaaaaaaatgtttgcttcccttcattcttttctattaatatcaaaatgcagttagcataagttggaattaattagctggtggccacttgtttagatcctccgtagctggttttggattttacacttggctgactaaggttactccattaccatttgagctattggaagtggaagatgcattatacttagattttcctggatgtcacattccttttgaaaatattgtgtgttacgaagactgaggaaatacttagcgatacatgtttgtaaaatgtgattttcttctaaaagcatataatgttgggattctcctggaatgcaatttttaagattgcttctggtctttcaattgttatcttgactagtttagttgtatatgtacgtggtgtctgttgatttggcttctctatcgtaactgatggattctttgaatttacttatacattttatttcttttctttctccag

SEQ ID NO: 78266 - DNA, 885 bp, Citrus sinensis
  Intron number 1 from transcript orange1.1g046676m (locus o range1.1g046676m.g) derived from phytozome v7.0 (chr-ID sc affold00056; pos 221741 to 222625)
atttctcgagttttgtcaggcagcttaatacttatgtgggtattatttgcagtaaggcagcctttattattggccgctgtcttttctttgtaaatcttgtgttttctctttcttgtttcttgttgtatattattgttttcatttttttttgtttttgtttgtactgttaactgatgtttattctgtaattggatttgatgtacttacagacagaggctgatgttgtaatatatcaggacttgtaatgcaacttgttggatactgaaatggggtgtaaatattgatatcaattgttgtaaacaaattttgtaagggaaaatttatttaattacataactactcatttgaatgcttttgaatttattatctgtcttgcggtttgtacaggttactttcattgatttgtcatttatatactgtagttatgtatctagtatgaaatagacaagaaataacgatggtttctactttattagctcatgtttagttgaggttttaaacttctttctaccttttccctcaaagcagtgagtaatcgagtgggcagttcagacttgtgcagatagaagttgagtttctggtttaacatttttgttatctggcatgttatgacatctctttacttacccaatgatgaaaatggttttgtgatatacagatcatctttgtggtgcggttctgcttcttatttgcttgataattgatatacagattatcatgtgaatcactccattaattttttatctgacgaacttagatatcatgtgaatcaatacattaatgttttttgtttttgtgaagctttatttcttctggttcattcttgaatctctttgggtactgtattcaggggttccgcaagattgatactgataggtgggaatt

SEQ ID NO: 78267 - DNA, 635 bp, Citrus sinensis
  Intron number 1 from transcript orange1.1g035701m (locus o range1.1g035701m.g) derived from phytozome v7.0 (chr-ID sc affold00023; pos 1099975 to 1100609 reverse strand)
aagttaaggtaagttatgtctttttggtttctaaattatgtgattcgacttggaatctatttagttttcccttaatcatttaaacttttccttgccattgacttttacaacaattcagattgaccttattttgttcacaaagagcatgatttttggtttgtatatccttatatggaccatgttaattttcttaatcttttgatatcctgtaaatttagtctttaggaatccactcatggtctagattttcattcacccacctttgtgtttattttcgattgcgaaaacgcgggggtgggggggggggggggttcggatgatttattcttttccctttctcacatttgacctttgaaggctgtccttgttggttgtattctcgagaagattaccaagtatgtttttcaatgaaattatgtttctcagtgtgaacatttatggaatcttttgtgcaataaagattctgcaccagcaatgtagtttggctttttgtggttttctgaatggcacagtcataatgtagatttgttggaacaggcctttttgtattccatatttctaatcttgctagttcttgtattcaaactgtcgtagataaggcttctgtggttatgcttttgtaggctgaggaaaag

SEQ ID NO: 78268 - DNA, 533 bp, Citrus sinensis
  Intron number 1 from transcript orange1.1g000705m (locus o range1.1g000705m.g) derived from phytozome v7.0 (chr-ID sc affold00490; pos 64714 to 65246)
cacccctctgaactcgtagaattcgtcaaaggtcaatcactcacctctctccccatttcatttttactcgtgaagttccctagtccttggtttgtttctgagattaaaatttttttggctgttttatttgcaagatcaaattttgattctttcttcgctcgcataattagaatacacacacacacacttatatgttgtttctgtaaaagcactcaaagttttcctctagaatagcccctactactaagtgcttctgagaaagatacttcaatcggttgttccctttgaaagcacttctgtggtcttctactctcaaaagtttctttgtttgcttcaaccaaatcctacaaatagattcgaaagtgtggtattttgaaaccagtttgggtaccagccaagcgcatattaattatgagaactaaattgtaggcagttgaacgtaatttgtttggagttagtagcatatctcaaaattttgtggtttattttttctggcaggtgtatcctttgatctatctgataaagaactattc

SEQ ID NO: 78269 - DNA, 751 bp, Citrus sinensis
  Intron number 1 from transcript orange1.1g003207m (locus o range1.1g003207m.g) derived from phytozome v7.0 (chr-ID sc affold00003; pos 1973512 to 1974262)
tggagatagctggtgcatttggtgaccactctaaggtcattcactttttcaattatcagttctttgtttaatgatttaatttcactgaaggcttcttgtttgttagagttgacattttctgccaaaaaaaaattattttttcattattcttgattttgtgtcttataagtgttgttatttaattctgatggattttctgaaaccggagccaattttcatctgggattttggaaccgaacttttagttctttaaagaagaacacgagttattagaatgtaaggttgaattggactccaacaatactggacagaaagtgcaccgatttgaccagcatcaccctgctttctgtttttttggaagttgactattttccttaagatgtttatatttgtgcatatttgaggtttgagagttcccaaaacatgtgagagtggttggtacttggtagtgcgaataagagtgctcaatccagcttggtatggcagaacttcttgagttctcaactttgtgtaaagggcatcaaattttagtaaatgcttgattgttttataactaaaacagcagcagtggctttgttatgaagcaccattagcaatccggatgttaaaaagatggaaagcttctcgtgtattcaatgctcctatgtgcgtgcatctgttgttttgctaagcccaataatgaaagaatttacatgtcagataaatgtacaatctcagctcttactaaactactttactttaatgagtcagg

SEQ ID NO: 78270 - DNA, 591 bp, Citrus sinensis
  Intron number 1 from transcript orange1.1g029825m (locus o range1.1g028897m.g) derived from phytozome v7.0 (chr-ID sc affold00011; pos 322278 to 322868 reverse strand)
gcattgcacaaacccccagattctcctatctcgatgtaagtttttattttaatttatttcactgcatgttctgtttatgttgtttctttaactgtttatgtgtttcttgtttaaatttcaagccaagaacggttctagagtaggctaatttatccattaatgtatgtatcttttatgtatgcaaacttagtttagccaattgggtcgtggtatttcttctgtttataagagaaaatgactagaaaagattccattagctgagaattgtgaaacccaagatgggttctcgagtaatcttgtttatcgtttgatacagttatgaaatgtgaagttttaactgaaatacttaagtttgctatttgttgtaattttgtctattttgttgctgtttcttgtgtaatttgatttcggaagatggtgaattgactgcaaaagcatttgtcatttgtaatgttttgatttgctaatatgttgccgctaaggcttataagttgatgggtgcagttttatcctttttttttggctaacttttcttgttgttttgtttttattgtagcttgcccaggcttcctgtgataaggatcttcagtt

SEQ ID NO: 78271 - DNA, 709 bp, Citrus sinensis
  Intron number 2 from transcript orange1.1g034625m (locus o range1.1g031391m.g) derived from phytozome v7.0 (chr-ID sc affold00328; pos 53288 to 53996)
ttcttggtatgaccatttatgctcttttcatttgcttattttatcaagaaaacaaatgggtctttgtgtttatatgaaatttttattatttattgtcttagctttttggaagcaagaatttcttgtgaagagctgaattgctgataagcaagccacaaagcagatcgctgactacatattagattcataatagttgatgtgcaaaacttatagtgtgctggattatgttcagagctagcaatcttaagttagtgtatagaaatgttattgggtgcatatctctgatactcaaggcagagttatagcttaggcaagatagttgtgtagttcccggaagcagtaatgttccgactaggagatctattttgcctcaaaataaaacagaaaaaatcttcgtattgtgggtgctaattggttcaactagtaaaatcgcctattatggtacgggaggtaaagttgtaaaatttagtttgcggggacagaattttggaatgttataatgagaaattgctatgatcaaagtaaaaaatgctggatttaatggaaattaacttctcaaatttgcaatgtttaatagagtcatgtgaattttttaggtcagttgataagtggactgaaattttgaaatttggtggttctactacttattctcataactttggcttcttttgcagtcaataattgtgtttgtcaggcccatcaaatttgc

SEQ ID NO: 78272 - DNA, 529 bp, Citrus sinensis
  Intron number 3 from transcript orange1.1g034625m (locus o range1.1g031391m.g) derived from phytozome v7.0 (chr-ID sc affold00328; pos 54001 to 54529)
ttattcacctttggcaacttgttggctgttgggaggtatgttcactggtttacttaattgacagatgggctttactgattatatactcttctcaatgttacttctactgagtctgatatcctaagttttggaccacaacaagtttattggtcctggtgatgacggcatcactcatgtttgaggaccatggtttttgtaatatgagaaactgtactcctctttttcattttcgtgcttatgctgaagaaaatcaagtaactggtgactgattctagctcgggatatcatgaaaaaagaataaaaataataaagaaaagagcattgtggtatttaatgatcaattttggactttgattagctattgaaatttgaaggatgattttgtaatgttcaaaaggacaatcatgtctcattttcagaattgattttctcctgcaatgatgttcttcccaacatttctcagattctaattctttttcgatcttttggcagcacagccttcgttatcgggcctgctcagcaaataaat

SEQ ID NO: 78273 - DNA, 913 bp, Citrus sinensis
  Intron number 2 from transcript orange1.1g025722m (locus o range1.1g021856m.g) derived from phytozome v7.0 (chr-ID sc affold00050; pos 282051 to 282963 reverse strand)
taccgacgtaagcaaatctttttctctccagtggaatctcaatctaggtagctttggtgtgttactagtagttttgagtgtttgaagttcatcaagagctcgtaatctcctattctcagatccatgcattgcattgttgatacgaggaagggtgtttgctttcctgtttgacttgtttaaactaatcgtgcataatttttatttctatctaaattaaatttgtcatgaacagtaacgttatgtgcattatgtgccgaaagaaactaaagaaatccaatacgacaagataagaggatttgaaaattgttaacaatttctagattatcaaccatttttcatgtacttctgactatttgaaccttggaaaagaataattgcaatctggctgtgagtgtatgaattcaagagtgttaatttcatccaagccaaaggtatcccaagacaataattgtgaaggcaatgatgttgaattgaatataattagatacagctttttgctttcaagcacatacatattgaatctttaaaacatacgtaacacattacctattgcttatttcttaacgcacaggactctgaactgaatatgttaggaaatgataactgtagttccatataccacttcttcgtagaagtcatttttcaagcttggaaattacatacttttcatgtgaaaatgaatagacttgagtgttatggcactgagttggcacataatttatgcttaaatctgtttgtaagcactacttatgatgactgatgacatcaacaacaacgtgatgatgacaattctattgacacagatttcactcatacactgaatacacaacagattgccgcttgttattttttctaacactacttgtggtcattgacagtactagaccaaccactcaggctgggcctgcaggtt

SEQ ID NO: 78274 - DNA, 793 bp, Citrus sinensis
  Intron number 1 from transcript orange1.1g038013m (locus o range1.1g038013m.g) derived from phytozome v7.0 (chr-ID sc affold00003; pos 3086579 to 3087371)
agcagcaacaacaacaacaacaacgggacgacaaggtatgtacataaactgatgtgtatttgtagcattgaatgacccctttgaattttgcaagtctattttgttagtgggttgtttttagcttctcgtgatatcacgtggtgacagggttttgtgcttggtgattttagttttaccaatcaaacagtctttagttacataattgtctaaaaggaattgattcactgtgttaaagctttaggtcagcctaatcagacataaactctttacacaagtaattgggagaaaaagttaagttaaaaggaaaagaaaggagcctgatattctacactttcttaagtcttaactgtaattaggattcaaaaattcagtaccttctgatgaactccatgtcaatttatttatttattttctctctgataatgacaaaaatatgtatagcgtgtgtataattttcttatcagagaataaataaattaaaatttataatttgcaaaaatatgaatacactttttcaaaaatttattcttccatgattctctgattaaattctctgtctctaaggacatgaaaagaaatcaagtgtaataaggccaatatagtggcttttgtctataacatttcagctataaaatgtttggaatatgtactaaatcaccaataagtttcttaagttccatgattgaagaggacttatattagatgttcacttattactttgatactaatagtttttctaattggaacttttgatgacaatttcaggaacattcagggcaacaaattatagagg

SEQ ID NO: 78275 - DNA, 728 bp, Citrus sinensis
  Intron number 1 from transcript orange1.1g020610m (locus o range1.1g018157m.g) derived from phytozome v7.0 (chr-ID sc affold00049; pos 310521 to 311248)
agtttcattctcttgtttttgaatctcccaataaggtaataaaagaaagtttcacttttcactcgtaattttgaattagggttttgccagggtttaaggctttttttctaaatttgactatttttcattcaatttgtgtgtgtgtgtgttgtttttttttttggttaattgaatacgagttcccatgtgctttccgtttatgttattaaagttggggacttttatcaagtttctctattttagagattagactagtgtttctgataaatcacagaattgcctgaattctatagtttttgggattaattggtctatctgtgtatgaatgagaaggtgcttcgggattgataagcgttgatttttattatgtatgtaatcagggttttactcggtaggataactgtttttcttttacaatttattgggattgatatgaatcagctggatttattttctctcttacatttgacttccccccccccccccccgggaaagcctcctgctgttaagcgtcttaagtatgaatatgagaacttacaaaaactgaatatgagcagactttttttttttccatgcatttgaatattatccatacttgaatgcttctttgatgttttcttttcttcctttgtatggcatatcttcaagtttgacatgcaaaagcttgagttatatgattgttttctgtgccagttgacacaggtgtctctgtttcatcaaacgacact

SEQ ID NO: 78276 - DNA, 539 bp, Citrus sinensis
  Intron number 3 from transcript orange1.1g020852m (locus o range1.1g020852m.g) derived from phytozome v7.0 (chr-ID sc affold00301; pos 201714 to 202252 reverse strand)
gattgagagtgcaggtttataattatttgtgaatatatatacacacacacgtttcacacactctaatcctaccccctgcctgtgcacaagcataaattacagaaatcttccctctcattaatacaaaatagcgcaatcttttcacctcttgattttacagcaagggacaaaccaagcctagatataactttagagtatgtgttaaaaataatctgaccatgaccctagattgcgaaaggtgcaccaatatggttgtaatacacgattaaataaaattaatttgatgtcattagatttttatcttgtggcaatgtaggataacttgtttagttttatatttattctctattatggacggttgcacagtttataatattaattcagactaaactataataattagttataatttgattaagaaagacatagttatgtagatgcagctcatgaagttagtattttcaattgcacggaagttcgttactgaaaattttcactatttttatttttggttatatgtagagtttcggtagtcaaac

SEQ ID NO: 78277 - DNA, 1015 bp, Citrus sinensis
  Intron number 1 from transcript orange1.1g007092m (locus o range1.1g003241m.g) derived from phytozome v7.0 (chr-ID sc affold00062; pos 313805 to 314819 reverse strand)
taacgttttcgcgttttccagcttgcaattttaaggttagtttttctttttcctctttttcctctttttttttaaattttatttttgtttagttttattcaatttagttcctgctttagttttgagcttcttctttttttcttgatcgatctttagaactgctcaaaactcaccgttttgcctttaaagattttagtctttgtaacttttaccgttcgctcagttctgatctccttgtattagagtttaatttaggttaatctgtggattttatcagggcttaacaatttgggacctttttgtgtgtcgtaatcgatttgagcttgatcacagtttgtggttcttgatgtgcgtgattgatgtgaggttaaaattgataaggagtttaattctattagttgcatggtttaattgttaatatgtgttttaagtgttcactaatttggagtcttagctctgtattagtggttcttttggctagctgattaaaatttagggtttttctagctatggttaagaaattgggaatttcctcattaaaggagttcaatgggaataatttggtcttgttgctggttttcaagtcttgatttacttagttaggtgagaagttgtaacagttatttttgctttttaaattttgtctcgttcgggcttgttccatttctaatatttgttgtttgctttgtctatttggacattgtttagatccctacaacaatttgtcgaaagctcaaacagaacataaacattgcactctatttggtcaaagcaagagcttgtagatttgtaataatcttgagttagtcgatgacagtagtgattcaggagatcagatttgagtttctgtttggttggtgaagtggaaatactgagattttctatcgtgatttcttattttatttcattttatttgcattgtctctgtattttatgatattgagggggttgaggtacgtatttattattgaaagcattagtcagggctggctctggagagctatttagactctag

SEQ ID NO: 78278 - DNA, 896 bp, Citrus sinensis
  Intron number 3 from transcript orange1.1g000790m (locus o range1.1g000790m.g) derived from phytozome v7.0 (chr-ID sc affold00003; pos 600766 to 601661 reverse strand)
aatatttagagctcctggggcaaaagcacagtcaggtattatcttttattggtataatcgtattagctggttcctatttgtaaatataagtcacttattacttcaaaatattagttgtttttcgtcacttggtgaacttaaatgccatcatgctaaaagcgggaatgatttatggaacaaaaacgaaatctctaagggaggcagcttggttgcttcctttgtttcataaactaaagtcatgctgttgtctgatttgagctaaaacaaattgaaatgtgaccagattgatcatgttgttggatttgacattatttaattttccttagcaaggttgccttgtaactactgagaaatcagactcccatttctgttgccttagttctgctcttggtgttttttttttttgggcctaggtatgcaagtccctcctcaatgattgttttagggcttagtgacattgtaaaggactgattctactcgagaacagaacccattaacctatgagaaggtggagaggcaggtttgtttaggtcttgggtgccatttgattagcttcaggattttttttttggtgggggcattcttatctatgctatagcctatatgtgctatactccaacttccgttgtggtctgcttacttggattcctttgtcagttctttttttagtttttttttgccacatggctgtccttaaaatggaattcaacttggtctttttgtgtaatctcccatttagttgttttttaaaatttatgggattgtcttcttactatttgtaaacatgcctgtaaaaattattcttttattatgaaagtacaaactttggtgctttttattgatcaaacagaattgtaacagggttaggtgtccgtgctgttgaaaaagggggaggt

SEQ ID NO: 78279 - DNA, 980 bp, Citrus sinensis
  Intron number 3 from transcript orange1.1g003626m (locus o range1.1g003582m.g) derived from phytozome v7.0 (chr-ID sc affold00003; pos 1494934 to 1495913)
gcaggaggtaccttctagttattcttctgttacaggtaaaaattcactagcatattgaacttgcatgtgaagcttgtgctcaagaactgcttctatggacctcatccttttttaactaccccattttttatttctgttgatgcttgtcctcaatgcgacctttgctggagctatatttcggataaagttcaggatcttcagcatttcagacatcaaactttagcatatattgagtcttcttaatttgctttctcaattcagtccatttggtttgggcaaggtcattttctcttttagtaagttgatttggttattggaaagtagttgaaaagcaccatcacattcgtgaaatgaaattgtgactatttttttccttattttttattttttgagagtccctgtgtgataattatatgttacttgctctgtgtgctgtgccggttggccttgaatgacattttatgggttttgtgacacatgaatgccccatctctatccagtgcatagatatgcggaattagaatttgacccattgtttaaaaactctcgaattatggaaattgctcaccattctgtgatgcctgatgcctgattgatgccagctatttctgtgatagtccatgcacaaaggaaactgtgatacctgattgatgtcttattgagggtatataatagtctcattaccgtgtgtgggaggcatggcaatatcaattggttgctgatatattttgcctgtttaattaactacttttagattatccattgctgctgtaagtaaagggtagacgcttgttgcttttgtttgattcccagaaacttcagagatcaaattttgtctgcataacatctgaaaagcaaacaaatagtgtcaatttggattcctatgtgcttaagctttggtttattttatgtcttcgacctgcagttttgactctttataccgatggcaggaacagaagagaccgcatatcaaaaggagc

SEQ ID NO: 78280 - DNA, 476 bp, Citrus sinensis
  Intron number 3 from transcript orange1.1g028286m (locus o range1.1g028251m.g) derived from phytozome v7.0 (chr-ID sc affold00252; pos 51365 to 51840)
gtcgccccatcaagctccagatttgggacaccgtctgttcttctccttctccttctcctttttttttttcaaacatattttccactcaatcaattcaaatggccccgtgccgcccccactttgttttacaaaattttgttaaatttattcaatttctctgattaagcttcatattcttacaagtttgttggttagcctagctaatttggttgttatgctattccttccttcgcagaattaaaattttattttctaagcctaagggagagagagatgctactgttattgtatacatatcatgcctgcctttgtttgtgctgtaacatctttgttagctgtcttgtgttcatcacttgcttgttagtcgaatttcaacttttagctgttatttgtcttttcatgttctttagccaagaatctttcttttggtctctgcttcaggctggccaagaatctttcagatctatcacaagatc

SEQ ID NO: 78281 - DNA, 1038 bp, Citrus sinensis
  Intron number 4 from transcript orange1.1g028286m (locus o range1.1g028251m.g) derived from phytozome v7.0 (chr-ID sc affold00252; pos 51879 to 52916)
atattacaaggtatgaccctgagcctgatcttcaatcaatccctgaagtgcatgaaataattaaaaaagagatcggccattattgaatacttatcatataaatggacgaaaaaattaatttaatttttttgatatgtattgaaagagagagagagagatccttcggagatcatgtcttttataaccaacagtgctggctctccaggactagtagcatggaaactatcattgtatagaagggtaagaatcatgcgacctccacacttcaattcttcagaccgaaatttgagaaatgctgagaaatcactcttaaattgatccaaatatgctctatggacatcgaattcactcattggctctttaggcatctgataaagcattaaatcaagggagctgattattcaagatgattaacaaattcttgaatttgaaattttttaagtgataatttgatttaatagatattagataaaaatattctaatatttttattagaatattaaaaaacagaataaggtcccctcgcccgcatcgtttattgtcaaaataactttgttttccattaacatattatctatagatttttacaatttgtgctcttactgagaatatgcaactatacgtatcaaattatgtagtacaaaatgtgtagtcagcataatttaaaaatctatagttacttgcacattttgaaaatatatcaattttttctagtgagggcatctgatcctcattagttgtttgtgttgcaaaataatttatgttatgattatgtggcatgatgtatctggaagttgttgacagaaataatgtgaagttattaacataaataatgtgcatgatatatgatatgtgaatgattactcttccgtaactggcatttgaggaggtggacagcttttattggatacattccatgccctcacctcatatcacaggctgctttttccatatgataattggtttttcttgaactcaaatccaaagctcttctgacatccaggagagagacatttaatcatctatcaagctggctgg

SEQ ID NO: 78282 - DNA, 950 bp, Citrus sinensis
  Intron number 2 from transcript orange1.1g008781m (locus o range1.1g004992m.g) derived from phytozome v7.0 (chr-ID sc affold00011; pos 899668 to 900617)
gaagcgcttttgctcttggacttcttgctgtaaaggttgttttagcaattattctatttgcttagttaagcttggcttggagtctcattttattgatagtgattattttactcatgcatgttattattattttgaattgttctaattttactctttctggaaatagctataataataagctgctattggtttcattttagaataattagactaaatcccacagtatgcatgctatgatagttgttttgtcgcgattactataataattggtaaggctatatatttttggtgaaactaagaaatgtaaacaattcttggaaggcaagtgaagattagatgttaagcactacaaactattataatgtcgaaagtggtgtgctttatggttgtaagtttatgttaggattgaatggctgtattgaattattttactttagattttaaaggatttataatttaaagaatttacaatgttattgaatgggactaataaaagaaatttagaaacgccacctaaagaaatgaacaggatttcttttgagattcttatgacatgcttaatttttttttctctcccttttttttcaagaaattattttatccaagattcatcaccttgttcttgaaactatgtcctaaatagattttttatcaatgttctagcattaagaagttgtttttgaaatttcaagggaaagtagaaaggtactattttgctggcatttatttttcttgattccaataagtcttagttgtatagcattgtcaattttattgttattgtttctgttgcatgactaataacaattcttgctatacttgcaaataaaatggcattgaagcatttaaaactgtaaaatagatattctattatgtatgagtactgaacctgtgaattttttatggattttgttggtaacagccagagcatcagcaactcatagttgata

SEQ ID NO: 78283 - DNA, 495 bp, Citrus sinensis
  Intron number 1 from transcript orange1.1g017663m (locus o range1.1g017663m.g) derived from phytozome v7.0 (chr-ID sc affold00252; pos 13492 to 13986)
aggtatattgagctactttcctctatgcataaaatgactctatagatggatatggtttttgcttttctgatattagttcatctcatgtatttaatgggcaatgctctcggactgtaattgtttatttattacggcccactcaaaacaagaagatatctaaacttttgtgtctgttgaagggacactgtcccatgtgttttgatcaaggattatttattacattataaggaatctacttttgctatgatctcttattattttattttaaatagccattgatttggctatactcatcttggaaaagtttggtgttagtattgcttaagaaagtctttgaataatggtggggtgagcaagtgattattttatcttgaggtcgattgatttacatttggttcctgtcagtcatcatggatcataaaaagactgtcatcctgtatgtttatttctagataattaatagtcaaaagtaatcattttttctgtgtagtgcag

SEQ ID NO: 78284 - DNA, 660 bp, Citrus sinensis
  Intron number 2 from transcript orange1.1g017663m (locus o range1.1g017663m.g) derived from phytozome v7.0 (chr-ID sc affold00252; pos 14157 to 14816)
tagagaggttaggtttcactttcttggtagtgaattatcttttactgttaccctgttaccatggttaacaatgtcttttttggaattgtaccattatttcgggaagttcctaataatatggtcaatgttttggagagttaattatttgattagttgttttctatatatggaatacttttaagctgttaatcagtgtaagtataatttagttgacaagcagatgtcttggagaagtgttatgccattttatgttgcgataacaactatctcgtttatatatttttgtaagatattaaaaactgcaaatgacttgagtcgaaggaagccatagatattgctcagcttctttggtatgcaagttttacaatctcaactctagttgaaaattggttgagattgatgggagtgtactcatgttgttgccacttatcatggatctttagtagggttatgtaggagagctttatggggattttctcttatcatttattttcttctcatatttgcatgcttttttcctcttttccatgaaatcaagttgtaaattgattttctttatcggctaaggctagaaacagtcaagcttgtcatagtccaaccagcttctttgcagaagaactctagtgttgttttcatttgtaatgcagggttctgtatcta

SEQ ID NO: 78285 - DNA, 817 bp, Citrus sinensis
  Intron number 1 from transcript orange1.1g000960m (locus o range1.1g000940m.g) derived from phytozome v7.0 (chr-ID sc affold00017; pos 1558844 to 1559660)
aaggctccaatttgcctaaacaagtcctcgctcaggtattcgttgttatccatacgccaatccagtccgacgccgtttttgaatttaaatcatcttgtattccctgagctatctattcgctaaacttgttacggattatgagtcagattcagtttttggcataattagggcccgcgctggtcataaattttgttatttacatttcaagttaaatttaggttggtataataataagaatgttgaacttgataggaagatctttggtgaattttgaatttgatgtaaagaatgaggataaaagattttaacttgaccgaaaatttggtatctgatgattttgaagatattaatagttgtagttgcttttatcagtcagaagagtttatgtgtgagtaaagataatggtcgtaagtattttaaggaagtgtgtaggaatttgttgttagtagtttgtcagtgtattgaatcaagtggaaaactatgttgtttctgttgtagcaattgccacagcaactttatgtcgatgcataatcctttgtagttaagttgattggggttgacaatctgcttctagatgtttggtggctaacgtttatcttagagtgcattgatgctgtcacactgtaacagaataggaagcacttgcataagattaaaaaatgcatgtgtgtgtgtgtatagggatttagttacttggagtttcttctaactttggggctgtacttagttttttgcttttgtgaggtgccttatcttggcaacttaattggttgtcactcagttggtggtctacatgcggcttttgttgaatgcaggt

SEQ ID NO: 78286 - DNA, 535 bp, Citrus sinensis
  Intron number 2 from transcript orange1.1g029179m (locus o range1.1g027148m.g) derived from phytozome v7.0 (chr-ID sc affold00003; pos 896851 to 897385)
cactggctagaaatcttgctgcagttatttatcgagtaagttctgttctgcttcaactgatttaatttataattcatttgatttatagtcttgtaattattgattaggaggaataaatgtttcttaatcttttttaatccctttttcgtgaccaaagtttattatcccctttgcccaaatttaactttcaaggaaacttgttatgcgttactcgaacacataaaggcaaatttagctatttataagttgggagtcattgttgctgttttgaggtttgtcatgcagctgtggaggccttctaatggccatttcaatttttaagaaggatttggagagcatcttctgtttccatctgatcaactttaattcttagagcagtattccatctttagtccaattagattgagagcatagagccctcactttgagttgtcttatgctcagtcgacattgctctgtttatctttggtctttcctgatcattttacatctaggtcccattcataacttcctgcttgcttttatttccaatagg

SEQ ID NO: 78287 - DNA, 366 bp, Citrus sinensis
  Intron number 3 from transcript orange1.1g003161m (locus o range1.1g002335m.g) derived from phytozome v7.0 (chr-ID sc affold00003; pos 1915005 to 1915370)
tgttagcaactgagtgctcgttggctttgtttaaggtattgcaaattctttcattacagtttctctctctttatttttttgtttttcctttttgtgctgcaaaatgtgctgctgacaaatttagggaagtttaaattgtcacataaataagcatagctttgtggtaataatccatctatgagcatgagatgctcttattatatgctatctcaaaattttgtaattggtgcgtggatattttgagagagtgctacaataattgcgtggatgagtaaggtaagtgtcttcgtatatccatgattatgaactcgacgctattctctcgatgtttccttcaggttatctgttcagctggtgatagttgcc

SEQ ID NO: 78288 - DNA, 500 bp, Citrus sinensis
  Intron number 1 from transcript orange1.1g019561m (locus o range1.1g009984m.g) derived from phytozome v7.0 (chr-ID sc affold00005; pos 1861111 to 1861610 reverse strand)
gaggttttttgggagctcctggtgtcaaattctaggtgctccactctttttcaatcctcaatttatattgtaatgtttatatgatatgttcatttcaactgatttgcatgttcagtaatccgtttgggtatgtatttatttggtccattgtttcgttaattattcttgataggttcaactgttcatcttgtgtcatttaattattcatggatcaagtggattattgaaatgtctctttaaattatcttacttttgaatataacgtacaaaataattgagccatgagaacgaacgatatttgacttttccaaagttggttttttttttcttgcgtgtttgaaaggttagaaattgtgctgtatttgtacgtaagcgttgtcactgtctggtcctgtatccgtcattaaagaagatgaatgagcatcaaatttgtttttttatataaatttacttatcactttatttatttattgtgatgagcagggtgggttcgatactaa

SEQ ID NO: 78289 - DNA, 833 bp, Citrus sinensis
  Intron number 3 from transcript orange1.1g010965m (locus o range1.1g008408m.g) derived from phytozome v7.0 (chr-ID sc affold00017; pos 1620511 to 1621343)
cgagaaggtgagtgcatgtcatgcctgaacttgtttaccttttcctgcaactctccttatttctttcttgtcatgtgtgagccatgcccactgtgtgcggatacaagctactttcagatgcggatacaagctactttcagattattagtattctcacaacctttaatgcaatgttttactggcaacttgacccacccactgctgaattttctttctaggcttttcttgggaaatagcattcggtttcatgaccatgggttggagctaaaaccaaagataaaaattaattaaattcagcgcacctagttgtttttcatgtctctttaacctaatgataagttttgaaatataacacaatcatgagctcgttgctgaggcatagctaatattagctacctgtgtctcattaacctacaagccttgtgaaacaacatatactagattatttgattgaataaaattgtaactcttttagccatgacatgcaattcgttcgtgtgaacttctaatctcatctactcatatttgacatctagcataaatgcaaacataaatcagtgtagagtgatgaaagactcgggattatgcaatcccagcaactctcttttcctgttctgaatttggcaataatcctcatcataaggcatacgatacatgcaagagctttcctgcagatatgcaggatctacacgctttggcagtttagctcccacagctttgtacttgtaaattgataggttttatatagtaatcataatccaaatgttgaaaaaaatctcatttgattcctgtctacagggtagtgaaccacttataacagtcgaggcactgca

SEQ ID NO: 78290 - DNA, 707 bp, Citrus sinensis
  Intron number 2 from transcript orange1.1g023453m (locus o range1.1g023417m.g) derived from phytozome v7.0 (chr-ID sc affold00017; pos 485021 to 485727)
agtagttgtgagattttccccctccaattcgttgagttaagatcgttagttatgattttaaggttgtgcaattgtgttttatttttttacctcttaagaagatttaattgtttgctcacgagaaattaatgaacatgccagtttgataggtttagaggtttagatataaactcaatttctttctgtaatcttaaacaaatgcaaagaaagttgatgaactaacttttcatgtaatcacaaaagatgtgctgaatgctctcgatttagatattgagtggacattgtagattctgtcattgctattattaccctgacaattctgggcatatgatgtgttagaaaaggtgggggccaggggtaagaaaagaggtggtaaactgcgctgtgtgtgtttgtatttaaagtgatagttgatcatggaatgaagtaatcagcttctaagtttcaaaatttctccagctaatcacaaaggaagaaatttccaggcattgtcaaaaaatagatatgtgaaatagaaaaaggaaaaaaggaaattcttttttcttagaggaactcaaatgctgcagttttatcaaaatgatttatgatgctcccttactaatttattgcggcttatcattgtttaatcatttgttgcagccattgattcttaatctttcatatttgaactctgtgtagcgtgactataactcggatatactttaaag

SEQ ID NO: 78291 - DNA, 901 bp, Citrus sinensis
  Intron number 4 from transcript orange1.1g023453m (locus o range1.1g023417m.g) derived from phytozome v7.0 (chr-ID sc affold00017; pos 486048 to 486948)
gatcaacaggtaatagttacttttattttggcaactgcgaaattggtaaggctgagaatcccattgcaagggcatgattatatcaacctgcaaaagtatgcattttaagtaggcaacttagtccggaagatgagaaattacaagaaccttcttaggtcgcgatctctattttcttatttgtttcctgaggagagaatggaatgtgcaatatcggtggttgtgctttgcctatttctttgtattaatgagtgtattaatgagaggctaacaacttgagtgcattggccgttgagatacatcgtttccttggtttaggttgagggggaaccacttttgaattgcatgatttattatgcatgagtaatgggtagttgaagcagtggccatatactgcttgtaaatcaagatgcagaatcttgcatgataagataatacatacctggcctcctcatgtgagaattaatttgttaagtctgtgagcactcagaaattgtatgacttaaaaattttataatatagttgccttacaaaatgatgtgcataactctttctcaatcccgcttcccatgcctatctgtttatgaatatagttatggactatgggcatacccttgttccttgaagcagtaggtttaaacgtcagattttgtaaccagatggtccccacttattttggagtcccatcagctttattaatacttttgtactttgtttttatgtagtgcttataattaaagcatcttcgatttgtaaaaattttgttggcccataattcttcatatgatctcttgctattgatttttttcttttagtatggtttgtttgaactatcaatttgttagtatcacttgctaaaaccctgtcctaaattctgcaagttcagctatcttccctagaatta

SEQ ID NO: 78292 - DNA, 841 bp, Citrus sinensis
  Intron number 1 from transcript orange1.1g007820m (locus o range1.1g006655m.g) derived from phytozome v7.0 (chr-ID sc affold00074; pos 75711 to 76551)
ttgtccttttcctgttgaagttctcgaattttttggtacgattcttcaggtatttcatgttattcttgattatagtttctgggtatcgttgaagattcgaaattggcttctgggtactgttcaaaagtgtaattttttgttacttattcagttcgaggattggttttcctatgtttttctttttttaaattaaattttgaatcttttgtgtgtttacattcgggtttgatagaaacttggtgtttaagtgaggaggttgatttattttaattctagggagtgtttgtggggacttttaatttggttgctgagagtgaaagagaaaataaatggaaatgaggatagaattagtaactagacctaagattgtttactgcctctgtaactatggaatggtatgggaaactgagagttaatgatgtaattaattgagtagttttaagggttttgtatttccatggcactggccagcttgttttttctattgcatttagtttgttgattggtggaaggataaggagatatattactgaatttgaaaattttctgtactttgtaagtaatgattcctgtataaatgatgttaccaagaaaggttaggaaaagattgaaaaacaaaaggctctataatgttttcaatccagttgtctccttgatcagatattgaagtttccaaatttttattcttttgttcttatataataaaattgaaaattgttggtttcttacatgactagttgagcttttttgttaacttgttgttggatttaaatgaacttatgaagtgtccttgtgatggtggaacgggcacacagaattttgagttgtgggtaagattgtc

SEQ ID NO: 78293 - DNA, 333 bp, Citrus sinensis
  Intron number 4 from transcript orange1.1g024287m (locus o range1.1g024287m.g) derived from phytozome v7.0 (chr-ID sc affold00011; pos 1040292 to 1040624 reverse strand)
cacctgagtctggcattatttttgtcggtgagcaggtacagtgtgtccttttcttgaattgttcaactaactctttgaattttatcataaaacacatgtaaaatctgtttcatcttgcactattcaatggtattttatcaattgatcatcaatatgatattgcttggttttaaataaaattccatctggcatgctgaaaatctattatcttcttgatgctgtttaagtactttttttatatattgactcaactaaagagagctagtggccatcatttggataattatttgattggcgttgtgttgcagtctgagaagtcaaagaaggctggaa

SEQ ID NO: 78294 - DNA, 508 bp, Citrus sinensis
  Intron number 4 from transcript orange1.1g006596m (locus o range1.1g006542m.g) derived from phytozome v7.0 (chr-ID sc affold00048; pos 775963 to 776470)
gacggtaagatattcatgatcatatcatatgcgacagttgttggcttatcaaaattagttttaattatttgtgaatttttcctgttgacattgtgttggaacattaagtcatgttcattttcactttaattatattgaaagaatttatatcagatatgattagtaatactggattaggatgtggttgctattcagtcttaatgtctcgcatctctcacttcagtgcccctgatttggttttctctttgctcatttaaagaaaaagaatttatatcagatatggttagtaatactggattgggatgtggttgttattcagtcttaatgtcccgcttctctcacttcagtgcctctgatttgattttctctttgcttcaataaagcatatatgttgctttcacaactgggtcttttgatacattcttctcatgattgactaaacctgtttgtgagtttattaatctaatacttatttccagggcttctccaaaacgaattgagggtcctg

SEQ ID NO: 78295 - DNA, 645 bp, Citrus sinensis
  Intron number 1 from transcript orange1.1g043242m (locus o range1.1g043242m.g) derived from phytozome v7.0 (chr-ID sc affold02490; pos 2392 to 3036)
caaaagttcagcaaaaaaataaccaatgtacctttcttatttatgttttagcagacaagcaaaaagattgcttatgaactgttgttcgaatagaaaataaggaactcttgtgtcgtgctactttggaatgacatacttgcagtacatatcatttattctaaaaaggtgttttttttccctttttgatgtgtcaaaatatctttatttaattagtattggaattgaagactagtttttccttgcgttatgtccttgaaccttgattaagattttttaaatatgatttggacgcaatcattaactacaagttctgttttgtgcacctgaccctaccagtcacttgtagatcttagaagtaaatacatagcttccattttacggtcgatcatatctgtctagcttgatcggattggctagcagtggggctcagggttgggggtgccacaatacactggcctaagatacttgattgcgtactttacaagtcttcatgtgccaattatgttttgcttatttgaggtgttttagtagcaatgacctatatatattcaccgttccaaataggtttgaatttaaaaaaagatttacatattgtaaggaaatattcaccttaccttctaattaaatcttagcttggatcttacg

SEQ ID NO: 78296 - DNA, 593 bp, Citrus sinensis
  Intron number 1 from transcript orange1.1g021198m (locus o range1.1g009633m.g) derived from phytozome v7.0 (chr-ID sc affold00318; pos 108868 to 109460 reverse strand)
gaaggtttctttttactcatcttcttttctttttattagggtttacatgtatttaaaaagaataaaagacagaactatgatttttggtaataacggtttagttttacattttaaactgaacccttatggtaattttacgttataattaaacccttttagaagcttcagtaaataatgtagaaaaaggaagcatataaagagagacaagtgttattttcttgtttattgaaacaaattttcagtagttattgggttgggctttcaattttagaaggggaatttgaattgaatcagtagttttgtttagtaaggttttatgacagtcagtgggtacctgacgcttttcaaagcaaacgattaaaacaaacttgatgataatacatcttaactttctctttcaatgctataatgaagctttatttgtatgtttattttatctagttgaaggggaaagaaatttgaagctatatgaactgattgtatgccttttattgattgttgagccataaaagaattgtacggcagtaatttagtttccaacaaatgaattggaagtttgacttctttccttattgtttaaatgatctataggg

SEQ ID NO: 78297 - DNA, 382 bp, Citrus sinensis
  Intron number 1 from transcript orange1.1g011494m (locus o range1.1g011494m.g) derived from phytozome v7.0 (chr-ID sc affold00023; pos 1181336 to 1181717 reverse strand)
gtaagtgattttaccccagcgtctggcgcatctctgtaagagatcttatctcttaatttttttcagttcaatgaacttttaattgatcatcgattaattaattggcttagttggactcaaagttttcaacttttctaaactcaagaagagatatcattttgaggactgtattttttccttcttcaattttctatgaacttttgaaaaaagaaaaaaaattgggtattgccgtttctcatggcataactattttcatgaataaaataagatatgagaacatagttttaaagcaattttatttattttttaattaaaaaatgatgattttaatcttatatttgtttttgataacatttgtttttgggtgttttgtaacaggtcc

SEQ ID NO: 78298 - DNA, 836 bp, Citrus sinensis
  Intron number 2 from transcript orange1.1g029914m (locus o range1.1g025691m.g) derived from phytozome v7.0 (chr-ID sc affold00162; pos 30130 to 30965)
aagagtgttaatttcttccattttcaaaactccaggtataggtctgaattaatgtgtcagttcaattaaatgatattctcaatacaattaggataaaggagcgaaagagtgttactacttctaatattattatataaaaattaatgatatctggctatggatttactaacttaccgatattaaattgaagagcgatttagcaatcactcgatagtggtacaaatataagtaaattttgtttactttccctccagtattgtctaacagtagatggtattggtcaattaatttgtttcgttcgatgacattatttggaaggtgttttatgaattccagaaatgtgagaggtttttgacagattttgaacccacttggctcctttccgtatcttaatttaagtaagagaggtccctgcaatttactatagggaaatacaaatccatgttcctaatgacagacgaagcaaatggatagctcatggtggtatttgcttcgtttgttttttttaaatgacggaagcattagccctgtctctataatagattaatagattcattcttgcttctttcatctaccttagcaaacagaagaagaactcgtcgttttgcataaagtatatcttttcttactttcagttgcttcttctgcatcgtttaaaatgatagcaataataataagtaaaattacttattcactatgacccaagcttaattgatactttccatgtgcttacttttatttaaaatgatttttatatattttctttgttaatgagatctctatggatattgccttacgtagttgcttcttcgtaaggccgtcattatattgtaatc

SEQ ID NO: 78299 - DNA, 758 bp, Citrus sinensis
  Intron number 2 from transcript orange1.1g023480m (locus o range1.1g017378m.g) derived from phytozome v7.0 (chr-ID sc affold00237; pos 237943 to 238700 reverse strand)
ttttcttcgaccaattcaattgagtggaaacggaggtatgcctcctgcttttttcttctcctagagctgaatttgatattgttttgagggtatgtttgtaattacatatattgcgcttcttctacttaactttgaaagtacaatgtttataatgtttggtggtttatagtaagcagtagccacttttacttggcaactaatgttctatttcacagcagttgtagattaagagccacggcttatcaatccgaacatatcctgaattattgaaacaagatagaaaatgtgttgttgattaatgattagcttaaattggagggtatagatcaagactcactgtggtgtagcataattacgtgggacttatggactcgttaagtggggaatcaggagtaaaaagttgatctgaattggatttgatataactcaaactggctggaattcttgtgtctttccgactggttctggataatttatcttgttttaaggatattccattttttttagatatatatatgaagttcttatctagctagcaaccgtttgttttgttattttcttgctcttgaatgtcggctggtagccaagtgctaatcatttaaaaaggtatgtgttgtggattaatttttttttctaatccttgtattagtgaatggttagagttagttatttattaattagtattcttctatgtgctggattgggctgttgatggtaaattggggtgtttggatctaataaaacaggagaaatttaat

SEQ ID NO: 78300 - DNA, 846 bp, Citrus sinensis
  Intron number 1 from transcript orange1.1g003568m (locus o range1.1g003568m.g) derived from phytozome v7.0 (chr-ID sc affold00011; pos 2214996 to 2215841)
acaacattgaccctgatactgatctctcttacattgtaagagtttattttgtttttctgtttcattctagttattttttttaattaacataatctggaaatataaaatttgaattttcagaaatcatgctattgtgtaatcaaattaagacttaatggtaatcaagttaaatcatgtcttctttatgcaatgtattggttcaaagctgttaacattctttagtggattagttgagtgaacttagtcatcgtaaaaacatttgttgtctggttgattacgagctttttggtttttgaaaatagagacttctgtttccttgcaattgagactacaatcctgaattgcttgctttaggatggaaaattatttgaagaatggagtttaaaatttttttgttcctgctcaatacgttatctggcattgttcttaatgtgttggaaaaaaggttggggataagggagaacacagcgcagataaatgttcctttctgaaatattgatacagaattattagctttccaatgaacttatatggtctatgggctagagtttgaaagtcaattgacctccgctgcagctagactatcatttactcttcatatgattcaattgtttaattgacatcagaaactggtttgccagaatgagttgatgaatataataactgaaagtatgtgagattccttggggtgcacataccttctacagtagtacttgataggcttgtttattacttcttgttcctcaagctggttgcatcacattttctaattgacttttattcaaatgtttctgattcaataaacaaaatggcacttgtaaatgtttcatttatgttgcttgaagg

SEQ ID NO: 78301 - DNA, 833 bp, Citrus sinensis
  Intron number 1 from transcript orange1.1g001717m (locus o range1.1g001720m.g) derived from phytozome v7.0 (chr-ID sc affold00049; pos 601662 to 602494)
tctaattttcgttgcgtgaaataatttttgatcaggtaaatgttgaaatatttagcgcttcttctatgcttcagcttgtttgatcgatgtgtatggtgatttttgtgattgtttgttattaatttgtcttttttaatgttaaatttgctttgttgaatttaatcgactgtggggtatctataaatttatgtgagattgtgttactaagagaagctggcatctgggtatttcttgtcattactattgtgattgaatttgtgttggtgagaggaactggtgactgggatccgttggtttgtgttgagtgaactgtgtatttgagagaatttaggcaactgggtgccgatgattaggcactgggcaagtaggttttatgttacgttcattcaaataagtttgcattgaggtgctggtttcgaatcagttggtgtagtttagctgctatcgaattcttgaaacattaccctctcattgtttctgaacatataatatcctctgtttctagggttggatattaggacttttgccacaagcttttgctggatgttttctttgtaaagttgtcattatggcacaagtttcattgttaatgtgcagctatgcttatccctttttctgttgactatttaataaatatattgttcaagcttttcatcttttactttcttggttaataactgtgatgcatgagtcgtatgcagtatttagtatctgattagggatcagatttacttgtactccctcattattccattttctttgtgttatgttttaatactattattttagcgtggatgcaattgttgtattgcttattttggcaggtttagatc

SEQ ID NO: 78302 - DNA, 580 bp, Citrus sinensis
  Intron number 2 from transcript orange1.1g020177m (locus o range1.1g020177m.g) derived from phytozome v7.0 (chr-ID sc affold00003; pos 2172615 to 2173194 reverse strand)
gatcggtttctgtactctcgtcggttgccggtaagtgcatgtcgttccaagtttcttagctggaccgcagagcggattaccgggataattaataacgatcgcgggaagtgattaattaattttgactattgaggtacttgtttttgacttttgaaaacaaagaaaatgacacaagtgaattgactaatcaatttatggattacggtgttgtttacgcgagtaattaaacactgtttttttcttttttgtcctttttgaattaactttgtagacaaaaactatttttgttttaaatgaactttaatcgagtatatatagtatttattatgtctttataaacattgtagctaatgctttgataaactttttaccttttatttaacgttaccatttattgcttttattaacttttttatattctttgtcagcacgtgaaattcacgtgggaataacattttcaactacaatgttacaaattagaggcggcttgaaagttgaaacctaacataatttgtaatgattatttttttttattattattgtaattgatttgctaattgaaactcttttcaggataaca

SEQ ID NO: 78303 - DNA, 881 bp, Citrus sinensis
  Intron number 1 from transcript orange1.1g017301m (locus o range1.1g008729m.g) derived from phytozome v7.0 (chr-ID sc affold00168; pos 262843 to 263723)
cagcaagatcagacaaagaaggttactttctccctctctgtttttctctttggtgaattttttttcagttgatagtttagggtttgagtttttgtccgtttgattgctgggaaagtttgagaaagattagatctagtggaaaggaaatttgtgaaaagaaaatgaaatattgggtaccctcttaaaagtaactgaatatttgtttctaatttaggttttcccttttgggaaagtttagccaatgtacatcacttatcatgattttattttgttgtatatttttggtaatttttttttcagtcccattttttcggatagcactcagcatatctaaattccttgaatggtcttgatgaaaaacagtttttctaatatgatttacttagatgtgtgttttgatgcccttttggttatgccggactgcaatttcagggaatgaatttaacttccgtatcatatgtctgattcttcactagggctgtcattaggctggtatcactttctggagcctgaatctttttcctaaatgatttgattatctagaaactggtattattattttctgtgtctaaattgttttcagtctagagaaggttgctgtctcctccctctggtgcatgattggattcttcatgctctaggaatttgaaattgttggtgttagagttgtcgatagttaggctctgtgtttctctttctccttcacctgcttgtctgacttcctattctaatttttaagcatacatgtggaatttgtcaaatttctttggttcttattatttgatgtttctagttatacaagtcttggcatataggtctaatgtttttcttttccttgtttatcattcaggaactgaaagacaaggactttttcactgagt

SEQ ID NO: 78304 - DNA, 654 bp, Citrus sinensis
  Intron number 1 from transcript orange1.1g012907m (locus o range1.1g012907m.g) derived from phytozome v7.0 (chr-ID sc affold00003; pos 181379 to 182032)
gatcgcctccgaggtgcttaatttcactttgtaaatgaaattaattttgatttaaagtttcctatgctaataacatttcacatgcatgctcccattaaagaaaaatatacgttcattttcgttagtttggttattaattcagtagctatttgcttctgaggaagtatcgaaggcgaaatgaaaataaacgcaagtcatacattggggcttatacttcatctttttatttttaccctgtcaacttagcaatcaattacaatattttgttttgtgttttaagttttaaccatttattgtcaatagcatgaaacatctgaatcaaacttttaacctttttctaacaacatatatattcttaagttattaaagtaaggaataagcgaaaagataagaaaaacacacattcaaatactctacaatacaaaatataattcatgttttgcttgtcttttagtttattccttactttaataatttgaaggatcccttattagataatgactctatatgtatatgtatatatatttcctttctgcttgttgatggtcaaaaagattcggtgatgatcatcagtgattcagttccctctagtttaaactctactaaggtagctgttattctttgaacacgatgcagttcttaaaggaatctcag

SEQ ID NO: 78305 - DNA, 991 bp, Citrus sinensis
  Intron number 1 from transcript orange1.1g032234m (locus o range1.1g032234m.g) derived from phytozome v7.0 (chr-ID sc affold01017; pos 25294 to 26284)
aaagtcaagaagaaagctgcaccttcagttggtgactgaaccgtgtaattttttttttttttgacagttcaattgctgtcttattaattattattaaatatctctcctttgattgtcttacatatttccggaatattttagaaaagtaaatactaaatagcttttgttcacaaattatttttgttagagctcataatttaaccaaaaaaaaagaggacaaaagctggacactattgccaatagttatggtccgacaaatttgagaattgatcaagaaagcaaagggtagccggtagtatatgaaattgcgcgttgaaattatggtgttttttttttgagaagttgaaattatggtgtttttggggaattcacaaccttttttacttttttagctgccttttactttttatttccacacttgaatagcgtggaataatttcaaattaaaagtgaaaaaagctgcattttaagtgaaattatcgtccacagtgctaacgaaatcaagtgagatgaaattatcaagaaactcccaggaaggtcccaagcatattttactctgcacatatacgaaagtcactaacatttgctcgagaaaactacgccgaattttcggggaaaatttggctttttctcttcaaacgtaaagttttgaggcagaaaggtaggttaaaaggttagtacgattgttcttcttcttatcatcatttactcattgcctcacattgatattagttggtcctcaattaattttagataaggtgatgaaactaccacgaatttaactccaagtgaagggtctagtaaagaagctatacattccatgcgcatttcatttcattaattaattatcatcacatcccaactcatatcattattgtatcaacttgcaccgtcgtaacaattaacagaaattttcattaaaattattttattgatttttaaataaaaataagaaaaaaattcacaatagtaatatatatatattcagtcc

SEQ ID NO: 78306 - DNA, 652 bp, Citrus sinensis
  Intron number 3 from transcript orange1.1g022502m (locus o range1.1g022406m.g) derived from phytozome v7.0 (chr-ID sc affold00011; pos 1748905 to 1749556)
gaacaagttctgggacctttatacctaaaggaaaggttgtttaattttttttcattgattgatgttgtttatgctttgattatatgtacgcatgatttttcttgcttgttattgttgtttattataatcataattgtttgcatggtaaactgtggctggttttaatactgttacttaaatgtttaagcataatgcacacgagaaacacgggaatatgagcaactgtagaatatttgtcatggcagagagatcttctgcataccaagatattttccttctttgacatttgttgcactcaatgaacttgccttgttagttggaggcctatcatgtctactaacattccttcttaatacattgcaactgaggagattggtgatacatatggggttagtttcatgagttaaacctagtgacatactttttttccattaatacagtgcatgaatgactgaatcttcattgatgttattatagagcaacagaacttgattagtagaatcacattttcaggtgcataaggggtatcttgatgttttgtaagatgacatgggcagcttagaaaatttatgatacaactgctttcctttcatatgattgtcaattgtttctcgatatgcattagtataagcattttcttcccctttttagg

SEQ ID NO: 78307 - DNA, 495 bp, Citrus sinensis
  Intron number 1 from transcript orange1.1g047093m (locus o range1.1g047093m.g) derived from phytozome v7.0 (chr-ID sc affold00539; pos 44544 to 45038)
tcgatctgaatcagacggtgtctgattcagctttggtacctttaaataatcttgcttttgcaaatatatgcgcttagatagaatttttaagttctctgttaataactcaatgttaaagttttttttccataataattcttgactgatacttaccttttcttatcctcgtctcgtccgcctgttcataattatatgatatatttaatttgtaggaatattatgacttttttacctttattaatcattttttaactattgaaattcaacattttttttacaacattgttattttttctttactaatcatgtatactaaatattattgtgtcatttagatattagcttatttatttactctttttttttgtttttaattttagattgaagaaggatgcctcatggaagaaaccaaagttactgaaatggaagctggcgatgggcaaattgcaaatatagatttgaatttgagtctatctcctccaaatgggaagccaa

SEQ ID NO: 78308 - DNA, 894 bp, Citrus sinensis
  Intron number 1 from transcript orange1.1g008833m (locus o range1.1g008203m.g) derived from phytozome v7.0 (chr-ID sc affold00003; pos 1904345 to 1905238 reverse strand)
gaaggaggcttgctggagctgtgccggtttgtttggtaagacttcaaagcttatttgtttatttattcgacttggttttctgtaagggtagtgaggaagtacataaactcaagaaacggatagaaaattttctcctctctctctcgctctctctctctttgaagttctcttataatgtgttatacagtatgtaaagtttcgttgtttgttcttaaatgttttgtggtcaaaatattgatagtttttaatttactgtttaattagttcataattaaacagcataaagtttggtctattagtttacttggtgcctacgaggtgtgagggagcatagggcttgctctttgggagctttaagcagtgcattttaggtttgtacttttatttcactagccatttctgataacaccaatgatgtaatcaatgtaatgtgtatctattatttgataaagagttgtaattgtaattgatgactaggatttagcttgtgctttgggtatgagggaggattgtatttctccaattagacttactgttagttctcattcaggctattctctgagaatactcttcattttgggattgtgagatgttgattgtctcgtaacctttagcatttacagttcatattatacatacatacatatatatgcgtgtatacacacacactcttgtatacttgtttcatggagttttgcccctcaaaacaaattgtatgtaaattaaattattcctctttccagcatccgggttcagtcaggtacttgatatcttggagcactttgctaaatgttagaaaaaggtgtagcagctgaaatcatatttgatatgttattcatgaaaacaataaatgctaagcatgattcattgcacttctgattgggcaggatattg

SEQ ID NO: 78309 - DNA, 690 bp, Citrus sinensis
  Intron number 2 from transcript orange1.1g014033m (locus o range1.1g004985m.g) derived from phytozome v7.0 (chr-ID sc affold00346; pos 88936 to 89625 reverse strand)
cggccttcattcggtcagtattaattcaattatttattcatttatcagctctttgtattgattttactattaattgatgatttatctattattcgaagttagaaatttgagcattttagtcatttagagtcagcttttgtgtgaatgatgatatttttcctaattatcaagctaatatgacattttcttcgtaccgtatgcttgaccaaggttgttgggtttggcattagtccttaatttagaattcggtgaatatagaaaggtcgagggtttctttttggtataaaagaaatttggtaattcaatgaggttaattgaagaaatatatcaaaactccaatggtttgaagttctctgaaaccttatttgaaattgtgaacattgatataaatatgccttacaattaatcaactaagcctctttcgaaatttcatgagattagtcaacagtcacccatgttattcctattttcaaacttcagggaatgtcaatggagttatttcacaactttcatgtatatggcatgtttttatgttttggcaagctgtgcggggtagtttcatggatatacatggtttggttgcttttgtttggggaaggatatgctattgattaattttgtatttatgattttaagacatgtgtttatgttacagcacatcaaaagagatatcggatttagagggggaac

SEQ ID NO: 78310 - DNA, 465 bp, Citrus sinensis
  Intron number 1 from transcript orange1.1g017387m (locus o range1.1g009165m.g) derived from phytozome v7.0 (chr-ID sc affold00061; pos 537577 to 538041 reverse strand)
ccctcatagactcgccccattatcggtaatctattctattgttccttttgatctctgtaattttgtgatcgagctgaaacatagaagataaaattgtaatttgctcattttttatttaattttcgatattatagtggtaatggaagaagtaatatctgttgttgtatcttattttctttttaagaaatgaaatttgaatggaggtttttctaggatctagagtgaaggatatgaaatctaatttacaaattcatatcttgttctgttcttgatcagtttatccaaggaaagcctcacatatagtcatatgaatgaccaattttttgtcgttttcgatatagaatccgaaattgggagctgtttgtttgaccattgatgtttaatcttggtagctaagttgggaattatgtttcttagatcatgtgattgatgggttccttaaaattttataggaagggcggatcg

SEQ ID NO: 78311 - DNA, 1028 bp, Citrus sinensis
  Intron number 1 from transcript orange1.1g043458m (locus o range1.1g043458m.g) derived from phytozome v7.0 (chr-ID sc affold00014; pos 798306 to 799333 reverse strand)
ttataaagatctctgatctgcgctccctccctcaggtactctttaatatttccctttggttgagtccgagttcacttcctcttttacgatcccatcgcgtccccttttcgccaacttataactgttttcccgttcgtaattaatcgcgattttaggatttagggtttaacggctatctactttgatgtgatagtattaggttttggtttgttggcattttaactttcatttctttttttttttttaatttgttacacgttgttgaaatgcatactgaagtgatttatatactatctgtttttttgtttattttttatttttacttttggtaaagtttaattcaagattttgatttatttaattatttttcggtcatcaaataagtgattagttagtggaaagcataattagttcccttagcatattatttaacattacattttctaggttgcattgagcatttgggattagagacagttgtttagaacagcttatgtgtctttgtagcatgcatttcattagaagtaaagtttggtggattttttatttttaattttctaagcttcattattctgttttagggttcattttatgggtccttctcatgcccctctttttttgcattgaagatgtttagggtttttgaccaacctcttattaatattgaatactgtatattgaaatgaggcatgagagataacaggactctttagttcatgtttgcatgcagtcttcttttctttttcacgtacattattcttggattttttcaaaatcttgttatactcaaaaagtaaatggtagaaaatcttgatataagttctaaaatgctcgcacatttcgttttgtttggaaatcactgaaaacttttatacttaaattttgatgtttattgtaattgtttttggtgtctttctgtttgttgcttgctgtgtttgggtctcaattttgctcttttgggtttagtctcttacatactgttgtatttttcaggcttttagttgtaaattcgcagggatcaaatcagc

SEQ ID NO: 78312 - DNA, 704 bp, Citrus sinensis
  Intron number 1 from transcript orange1.1g047337m (locus o range1.1g047337m.g) derived from phytozome v7.0 (chr-ID sc affold00005; pos 2984286 to 2984989 reverse strand)
tctagttacttctatactggtggtgtcaatatcaagttgagtaacagagtttcttgacttttgctttatattggtttctgttctattcattttcgagctcaaaatcgtttcttcggttatttgtttgtttcaaactcaaacttttcgtcctcattctgcgtttgccttaaaatgtgttaaaatttgtgtttctggctttctgtgttaaaaagcattttaagggtttgcaaattttctgtgttaaaattaagcggctcaattttctttcaagggtttgcaaattttgggagtgtttcctttttgtcattcttatttccatttctttttcctttttaagtccttttcttgcatcttttcctcttttgagtcttggtaaattgatactttgattagatccttacgcctttgaatggattgttaaattagtggtccggtccttcaatttatcagatgtgaaaagtttacctaatcatgtgatgaaaaggctatttcaatctgctacctttttggcctcgggcttttatttgtggaatctgcagatatcttggaaaccccatgtttatttagggaccatgtctcattcgtttcttaatagattgttttaaagaaactaatcaagtaaaagcacttgaggtagcaaaaggttggtcgttttccatatacactggctttgtaactcgtcttcacaaatgatttttgcaggt

SEQ ID NO: 78313 - DNA, 378 bp, Citrus sinensis
  Intron number 1 from transcript orange1.1g007343m (locus o range1.1g003201m.g) derived from phytozome v7.0 (chr-ID sc affold00005; pos 466649 to 467026)
gcacaccgatctccgtcaccgtctcaaccgtccgggtaactctatcttctcccataacctcaaataatagccaaataatttttttttcttcaaagaaaaacatccttaatcaagttgaatgctagggcagctctaaatctagttgaatttattttttcaaataattatagataagggaatatcatgctcaattgaagtacattttagtattaatcagtgtttattacttaaattttttgattttgatatcagccatgtcgttctgatgttaatgtgtatctgtaatatgtcgttttggttttggttgtgtctgcatgcgctaattggacccgttgatttacagaaaaggagaagtttcggatttgaaatcacagctcc

SEQ ID NO: 78314 - DNA, 669 bp, Citrus sinensis
  Intron number 1 from transcript orange1.1g002763m (locus o range1.1g002763m.g) derived from phytozome v7.0 (chr-ID sc affold00005; pos 2663380 to 2664048)
atcgtcgttacaggtgcttgcccctctgttttccctgagacttgctttttctctttctgtttcatttttttaatggctggtatgttgacttgagtgtctttaacattatttttgacgtgggatctacaaacaagccacattgattctcgcgaacctttcttttcatattcaactaaactattattattttcccattaaaaaaatagttttttttttctaatgtattttgtttttatttgtgttttattatttttttcccattttattgttcttcatcaaattctgtttgtttcttcacttgcatgctatttgaatcatggattcttgttctaaaagtgccatccgtacggcatgtttttgtggaatttcctggagtcaagacttagcagttcctaattggggggctaagcatcacatggttgcctcctatcctgaagattctttcttttctttttcatgatgaaactgatgcacatagatttttctatcacttgttgcatttccaaattgttaattcttgtgcttcttgatcatttgacagaaagacagggaaaaaaatgttttctgatatcatacaagaagaacaagtaacattgtgctaaaactagttctgaattttatgtaatgcatgcagggtttgggagacttatcttgtgcttctggtcatct

SEQ ID NO: 78315 - DNA, 801 bp, Citrus sinensis
  Intron number 3 from transcript orange1.1g022907m (locus o range1.1g022907m.g) derived from phytozome v7.0 (chr-ID sc affold00083; pos 225967 to 226767)
gttcctcaaaaccagcaaggtgatttccctaccgtctggtataatgagtcggttagatatatgctaattgtaactcactctgtatctgtacctgtttgttgtgtctttgttgttacttatatttgagaacaaattactgaaggcaattaaggcatatagtaaagaatgataatattaagtttttttatgtgattgatgaattttcttctagttctttgatctattgcagagaaaatagtatgcttagctggcttggaatatgtagacggtgaccaaatttatatatttttttcatgctcaaactaagttctagattactagatgtcagtggtactattttatatgttttatgggtaccatttaacttattgttggtcaggtgttattattcatagagatgtaggacagatttttctgtccactgtatgtttgtgcattccctcttgattttgtttgattgtgtcaatatgattggaatagatgaaacaactgttggaatgtacttttgaatggtttggaaaagaaataactgttgcttctttctccgccatcagtttagcatttgaatgtggtattattgacaaggttcaacatacatgtaattttgcaatgtggagaattgcgctgaatatggagtaatattggttttgccaaaatttggagctgtcatgcggttttgtttaactttgaaattgcccagagatgcatgacaaggatgccatcttatgaattatcttttcacagaattttgtcttgtgaattgcagctcggaaagaggtgaaggatcaaggctaaacaatc

SEQ ID NO: 78316 - DNA, 560 bp, Citrus sinensis
  Intron number 2 from transcript orange1.1g020943m (locus o range1.1g014300m.g) derived from phytozome v7.0 (chr-ID sc affold00005; pos 1163047 to 1163606)
ccgactgctccggtcgcttcttcaagctctgttaagtaagtttcgcttcttcaagctctgttaagtaagtttcgcttcttcacaaataaacagataagcacgaataatttctcataattttgttttctacttgtttgtatatcgatatatttaaagattatatacttgaaaagcaataacgattgaatgatatgctagggatggctttcattatttgctatcattagttgtcactcacttttctatttttatcaaatcaatagtttcatgtcacatcagtttgtatacttcgcattactgacaatgcaatggattagtgtgtatcacaatgataatctacattaggattacttagaaatatagtatctttattgatgaattttgagcttgttttggtattaattgctacctaattgaattgtgaaaaaaaacagaatgttcactgacaatttcaacatgttttccttctcattattctcctattttcagatgatttttcatttaagttgaccgatttgtttgcagaaagaggatagtctccggagtgcagccaacaggat

SEQ ID NO: 78317 - DNA, 584 bp, Citrus sinensis
  Intron number 3 from transcript orange1.1g020943m (locus o range1.1g014300m.g) derived from phytozome v7.0 (chr-ID sc affold00005; pos 1163625 to 1164208)
atcttggtgccataaaaaattggatagcgcttcaggtagtctgactatctcttgtgtattctcagatgaggcactataacttaacttgaaaatgactctgttgttgaatagacataatgccataattttttcatgtaaatctgatatccaattattttgcttacgacctttttggaatgctttgatagtggtctcgtattgctgctgatactattctcttccagtattttgcatagcaccttttttctcaaataaatccttggcaccttttgtgcatgaataataggttggcatacttgtttttcatactttatacttttagtagatgttgcatgtcagtttcaaaaaccaaatatgctagctggttgaggaagtgaaattgttgtcaacttcctgaatttatatttttcaatctgtgtaatgatttgggcttctaacaggactggttaagatgatctcatttgaagtaattgtcacctttattagtttacatcttttaccctcttttttttttggcagtttttcatcattttttggttttgtgatttcgtagcccttttgtgatttgatgttgcagaattcat

SEQ ID NO: 78318 - DNA, 449 bp, Citrus sinensis
  Intron number 1 from transcript orange1.1g007895m (locus o range1.1g007895m.g) derived from phytozome v7.0 (chr-ID sc affold00023; pos 1351218 to 1351666 reverse strand)
tccttcacattctttcatcgtttccaaatcatctggtaatagatccctcttcttttctttatcttacttcattcatatctatgtatgtttatgtgttctgtgattttgcttaaaagttttgttctttgtttgagtggtagctaactccatttcttctgacaatagttttttttttaattattatttttattaaattaggttaacgtatatcctagattaatctaattcttatcttaaagcattaatcttggtgattcttaacttggggattctggtatttttgttcttgtcccttaaagacggtgaaaggtatcacctttcttttggggaaaacaaaggctttatgattgttctgatatggtaatgctttgattctttgatttattgttttgcatattccttgtgtctgaattgggtttcctgattttgatattatgttagtgtaattg

SEQ ID NO: 78319 - DNA, 686 bp, Citrus sinensis
  Intron number 1 from transcript orange1.1g004086m (locus o range1.1g003500m.g) derived from phytozome v7.0 (chr-ID sc affold00137; pos 192970 to 193655 reverse strand)
ggtgtcttagagtaagcacactcacccttattcttggtttcttttttctagttctgaattcttggaatgggagtattcgtttggacttataagctgagaagtgtagattcttagaaatgattgttaaatttgtttcctgtttgttgaggagtcttttcagtaacatgtgtgaaatccagtgtcgacctgataaaattgtaacgacaaaaaagcttagaaaatacagagtgatgcaaaagcagaacagtagcacgcaattcttgactcgtcttatccttacaagcatatatacttgatttttttattgaagaatggaaatccatatgatttatctaccgtttatctacgagataatagcttacagttgattggttaatttcatgccactttcttcacccttcgttattggattgagattttgattgtgactctcttaaaagatttctggtaactttgaagtgatgtgaaatgatgtcttgtgttgtaaacttgaattgggaacataatagttttcttcaacttctgatgaacagagatgtatgttcttaatattcgactattttctcttgttttttgaaaagcttatagaaatgaacaataaattaaatgtgtatataattcaattgctaaaattttgcaaatatattaagtctttactctgtttctgtcacagggatctccggttt

SEQ ID NO: 78320 - DNA, 479 bp, Citrus sinensis
  Intron number 1 from transcript orange1.1g032975m (locus o range1.1g032975m.g) derived from phytozome v7.0 (chr-ID sc affold00146; pos 331388 to 331866)
gttggtggtgaccttatttgttgccctcttttcttcaatttgttacatctttcagtattgggtgttagttagcttaattggtaaaccttttggcggtgatacaagagatctggggtttgaatttcgctcacccaagtgggaagagaattggattgctagagggccaataacaagaatatacgatttataaagttgttttgtgaattggcttctcttgatcaataagaatgatcttgcttctctttgttatctctgatatgattacatgttgtggtgggcattgtggttatggcgtatgagttggtttcattagatcgtttaatctacccaaacacgaaaacttatatgttgtgtgctctttctggttgtggcatgttaagagactgtaatttccctttctttgctcattcttttgagatttattagttttcatttgttttgacttcaaggtgtcatatttctttcagaatttggtggag

SEQ ID NO: 78321 - DNA, 815 bp, Citrus sinensis
  Intron number 1 from transcript orange1.1g011737m (locus o range1.1g011737m.g) derived from phytozome v7.0 (chr-ID sc affold00005; pos 1185342 to 1186156)
gaagatctagaagaactggtattgattctgtttattctctcagtactctattaatataatattagtttgctcggaaccctgctcacgcatgcaacactttgctttgttttgatcatgtttcatttgattattcatgtaggaatactaactttgcatgtaagtttagtggttgatataattgaatcaatttgcttctttttgggttctgctaggaaagtatgccgtgcccaatttatttattttcttcccccaagtataattttatatataacttctgagtttaagccgctaatatgggcggggaggaaattgaattaccatagtcgattttttgcaaggagttttattcaaaacattttaacaaaaggttaggagagatcatcagaagtaagctctaaccataaaactcgataaaatgagtgaggggattggattattatgtttgatgtaccaagtgtcttaaacaactgattaggatcaagttctaaacatgaaatttggtccaatcatatggttgaagaggagattgactgattggattaccttgttcagtgttttttactaagtgttttaacaaaatgataggatagctgaaatctttagcggatgcttataatatatttcttttattacttgtagatttacatattattgcattaaagatcattaaatgtgatgggtagatttgttttctgtttttgcctttgttcatttatggagaatgaattcatgtcaaattcttttgattttccaatctacataaccttatgtttgatatagggactgtgtggactgcaagtgcacatataattaca

SEQ ID NO: 78322 - DNA, 217 bp, Citrus sinensis
  Intron number 3 from transcript orange1.1g025665m (locus o range1.1g025665m.g) derived from phytozome v7.0 (chr-ID sc affold00050; pos 373254 to 373470 reverse strand)
caggatcaagaactgctcctgttgaaatccttgaagtaataatttattaattacccatttttcttcttcttcttcttctcctcctcatcctcttttttttttttgttaagtaataaaattcaattattgtttctctctctctctctctcaccctccagtgattgattgactaaaattaatttgattttgggcctgcctgcagcttcgggtaaaaaca

SEQ ID NO: 78323 - DNA, 580 bp, Citrus sinensis
  Intron number 1 from transcript orange1.1g038021m (locus o range1.1g038021m.g) derived from phytozome v7.0 (chr-ID sc affold00237; pos 97211 to 97790 reverse strand)
aggtaacgtcaaatcattacagttttcctaacatctttctgaggcaatcatatccagttattctcttccagtttctggcaccttgaatgcaaaatggatgatttttgttgctagtgtaagtctttctctgtacggagaaacttgttaaccaagtcattttagaaaaaagcaaaatctttttatttgttttgcaatctcaaatgactgaactcttaaattgaaggagtcagatctaagtgttcatgagcatcctgtttgaagaagaaagaaacataaagtccaatttgtctgtgtatactttctgttgattactagtccaagtgagagaggagaaatcactactcatttgagccaagaccattcagttgtcctaaggttattaatgataccagaactccaaaattcagaaatattcattttctgtactttatttgagtctacctctgaaatatttcacacaaaactatgcattatgaatgcatgcttagtctagttatatattacatcgcaattgttagatcctaacaaattctctgttctcacaggttgatagaaggtataaacagtattatcatcagat

SEQ ID NO: 78324 - DNA, 422 bp, Citrus sinensis
  Intron number 2 from transcript orange1.1g021545m (locus o range1.1g019410m.g) derived from phytozome v7.0 (chr-ID sc affold00340; pos 165096 to 165517)
gaacctccctaatttgccccataatactgaggtctggctcaaggtaatttccacttccaatcttagtttatgtttgcagttgtggtgttgtttctgtgccagccagtttagtttagtttgtaatatctcttctgggttcaaacccggatcacccatgtgagggagaagatttaatttcctattgtaaataaataaataaagcattagggtgtttttgcttttaatccagaactgttgtggaatgtaacgattggccgtaaagtataagccagcgggttgggttttttttttttttaataaaatcttttaactacttcacggagtttttgattaatattagagtaattttagtggagtttcggatgacttctggaacctgtggggttttgaaagaatttgctacgtgctgttattgcagcgtg

SEQ ID NO: 78325 - DNA, 598 bp, Citrus sinensis
  Intron number 2 from transcript orange1.1g025218m (locus o range1.1g021153m.g) derived from phytozome v7.0 (chr-ID sc affold00880; pos 14954 to 15551 reverse strand)
caatacattcctccggtgagttaatgtccactatctacttcaaacaaacatgtgcatggcttggtccttttttttaacttttacatttgtaaataatacttgttggtatggttgaagttatgcattttttagcatttgatatcatggattttctttgtttggaatttcaattaattttcttctctgtttgcaacttttaagtcgccctcccctccccctggggggcggttgcactagtaacgtagactaaataataggctcttaacatttggcatttgttactgttttcttgtacgtgaagcaaataaatgcaatgaattaggtttccaaatgttttagcagacgagaacatgaaatgtttcttcgttcactttttgtatataattgaagttttgttaaattagcatttaatccagtaaaccgggtttataaagtacatatacattcatgtagtttagttttcatttctgcttggaaggggtggatatttcattttgcacctttgatcaattgtttctgtttagtttgacataactttgcttatgttttgtatgaaggctgaggaaggtgctgttgccgcactgaagagagcgttgga

SEQ ID NO: 78326 - DNA, 441 bp, Citrus sinensis
  Intron number 7 from transcript orange1.1g026751m (locus o range1.1g023784m.g) derived from phytozome v7.0 (chr-ID sc affold00023; pos 1051813 to 1052253)
ttgtttttagaggtacatgcctgtttttgctttcactttgaagtttgttaattctgaattaatgtgctgtcatttttaattatagtgtgatattacgataacacagcaacttcctagatttgatcatttctggtagtcttccttttgttctgtgttgatctgctcgcctgcatacacaaatgaatattacataaaatcagttatggatagaatcatttataaactgtgttgtttactgtgctattttggttattgtttgtattattgttttctttatatcatcatgatccacatgccctttacatctgtagctacttctagtacattttgtctggtatgattgtggattttttattcaaaattctgtcaaacgactatgtctgactctctgttctgctcactttaggtagaaagtcactcataagaaccccaactaaatta

SEQ ID NO: 78327 - DNA, 998 bp, Citrus sinensis
  Intron number 2 from transcript orange1.1g006294m (locus o range1.1g006294m.g) derived from phytozome v7.0 (chr-ID sc affold00237; pos 16341 to 17338 reverse strand)
ctctcgctctctccggctttcaagacattcatattgttagtatttcacttttattttcattttttaatttttttcgtttgattttgtgtggttgtgatttcatttgctggaatttaattagtggtgaccaatagtttttgaactcatatcgttctttttaatacaagtatgccatgtggaaacagatagatagttgatttctaaagaatggcacttgaatagtggtaagacgtttgattagtttttactgaattgcttttatggtgtttgagtgacatagttgttgcctttttggatattaggtttgttataagccgatgtctgtgtgatacttgttaaagttgctgatagtggtgatgaaggtcggaccaatgaaggggctgatggaaagatggcagtgatgatggggagtgttaatgaaaggtgtagtcggcagtgacagtagttttagtggcggtgttgctgtggttttggttgttttagtggttagtgttactgttaattatgtgggctacggctggtggtggacttactaatcgagtgggaggggtatagcgtctgaggctctagacctagagcagtcgtgaaaggtttgtgttatgttgcaatggtatggtgattggtggtcatgaatggttgtcagaagttatggccctgtaagagtggtaaattgacattaatgtcagcttcaaggtagctctgctgtttatatagtctgaatgaatacttaagggagtaagaggaagtggctgttttgattagttagccttttgttgtggttgccttttttttttcttttctttttttgggtttccctcttcctttgatcagtgatatgcatgatacaattttacccctttttgttgcttaaatttcatttttttttaatttgcttttatcagttcatttgaaattctttagatttttgcatcagatgctgccattagttattggtagtaatagtaattcttagtgcaatcacttatttgcagattgac

SEQ ID NO: 78328 - DNA, 659 bp, Citrus sinensis
  Intron number 3 from transcript orange1.1g025151m (locus o range1.1g024379m.g) derived from phytozome v7.0 (chr-ID sc affold00005; pos 2569495 to 2570153 reverse strand)
gttcaaggtaatatggccttttcatttcttttttgtttagcagtgtctttcaactgcttgtttgtataaatttaagatggccgttttaattctgttagtttcctgacaattatattggaaaacagatctagttttctttttcctattacttaagttatattctttgtagtaactggatggagatagctgtttctggttgagtatggtgatacttgcatcgcccgatggtagaagacacttttctccctttttgtattatattcctttttttctttgactagtcgatgaaacatggttcaagttgacctttcaacatcatgaatgctgttactgttcaaactagtatgagctgaatttcgctggctatctagtttcccattttgatatgtgctgcctgcctatgaatctgaattgcctcttttttcctctattaataacttatgggtttttttttatcaaaatcatatgtaagcaaatacatacacatgcacgcacatcaagaagaagaagaaaatggaaatacaacagacaaccgaatgaatcaattataattaatgcacaaaagcctttaaaattaatgcaatagctattagatcctcatttatgttttgatcttgttggcagctggtcccagctcctcgagactcttcctcttccaa

SEQ ID NO: 78329 - DNA, 397 bp, Citrus sinensis
  Intron number 1 from transcript orange1.1g038385m (locus o range1.1g038385m.g) derived from phytozome v7.0 (chr-ID sc affold00003; pos 1968493 to 1968889 reverse strand)
acaaggtaatgaattgttgtggtaacagaataatattcacggtttcttgaatagattaggctatactcattcatggtttcaagtgtgttcatgggcaatgctaaatggaataagcaaatgtggttgtttgaagataatcgccgagcgcattccattcatcatctatttgtttgattgatttttctgtcgttaaattttatttttgatccgttatctgtttcttccacggattttgtaaatgtccattcatatctttagaaagctctaggtcaagtgtataccattcaatgttcttaccttagtaatgaggttcctacacgaaatctgttgttctgatttgttctttgattcttttttttaagctattatctgttattggatcaatctcattccacat

SEQ ID NO: 78330 - DNA, 1040 bp, Citrus sinensis
  Intron number 2 from transcript orange1.1g024995m (locus o range1.1g022938m.g) derived from phytozome v7.0 (chr-ID sc affold00503; pos 108881 to 109920 reverse strand)
agcccttctcattcttgtaaaggtacttctctttttagtttttaatttttaattttactataatcttttcatgttttatcctttcactcaaagctacctttaggttcacggatggttgtttaaatatcaatttaattgcccgggaaatttaactacgttaaacaagttgttttgagttttgcccatccactattttttaaacaataataaaaaaatcaatttagccaataaattttatgtttaactattcgatggggcttattccgttgcagtttgtgtagaacaataacctacttaatgacgtaattctttcaaatccttccagccagttccttctcatttctctttctttattgctagctcctctgtcttttaatcatgttttggagcaatggaatagctctttttcacagtcaactgttcatttaatgtttatagtttctccaattcttgcttcatattcactttttcttatcaccccaaagcttatgtttgaaatctcttttgtggacaaactggaaggtctgagaattagacattgttacctaaaccttttaattgatccaatgattcatttgcttgttcattcctaaacggggaacattttcaactctgaatatatagaagacaatgaacaactgctgtttttagttgtaatgcattatctagggagaagtatgcaatctcattccaaatggcatatgctatttcagccaagtgattgatacgcctacccctaatgtgccctatttcaattttttttccccttcattgttctgcaataatcctcattagataaaaaaaatttatgcttccgtgaaacagttgatgggacttaagaccaatttgttattatgacaaatcaatttttcactagtcatatgttgttcattcttatgcactgttgaccacataattacagtttgggtaggtgagtagtttcattgtcaacttactcttgtaccatctgatttggttcttgctaacctcttgctttctttttgtgataccatctcgtttagagccacagaaaagtatac

SEQ ID NO: 78331 - DNA, 422 bp, Citrus sinensis
  Intron number 1 from transcript orange1.1g015954m (locus o range1.1g015954m.g) derived from phytozome v7.0 (chr-ID sc affold00011; pos 1548138 to 1548559)
cattcttgcattccgtggacgctagaatcaaattggtaatttctatttttaatcttagttttgttgttgtcttgctttattgttgcttttacttgatgtttttgtttgttaatgttcaaaaatatgcgggcttgttcaagaaatgaatttttcttttctttttttttggtggatacaaattttagttctttttaaattggtttttagttcttttttaaattggttttaagattatgacttttaattagagacatttgtgttgtggacagattgttttactctaaagttccaattgtgcctaattttaaacttggttgattttgtgtaataatcaaattgagaaacttatatatatctgctgatggaaccttttacttttaaaagttctaatttggatatccaattacattgactcttcaggt

SEQ ID NO: 78332 - DNA, 709 bp, Citrus sinensis
  Intron number 2 from transcript orange1.1g015954m (locus o range1.1g015954m.g) derived from phytozome v7.0 (chr-ID sc affold00011; pos 1548653 to 1549361)
gatcctcccaaaacaagtgtgggtaagtgtttttctttcatgttttaactatagaggccgatgtgtttggacaaagctgtggtgtccgtgtataactctctgacgtgtattattctgttgcttaatctattgggttaaactgacatgttacaataaggcagtatctttcaaaagggctgttaaaccattgcatcatgaatcggtgattagttcattgatatgaaaatctggctttgcaagtgtgattgtacaactgcaggttaattcttctgattcttctgattgtacaatgagctctaagaaaattggcttgctttggacaagtggtacaacgttgatggatgtattgataaaattgtataagatgttgagatctgcggtttgctgggttatgttaacgcatcatgaatgtaaagaaaaatacagtttctttagtctgaaatgtcatgtttcttgctgactccatcccctgctgattgattttatttgattttccctatggtattttttttatttttaagttaataccagcatatctatatttgaatggtgatcttggcaatcgtatgtaatgtagatgtaattttctacatgttgctaatccatgcaattttatttttttttaataaatgtttcacattattatgttgtaaaattttgaatgacacttgtaggatcaactgggaagagtctcgctgctttctggagt

SEQ ID NO: 78333 - DNA, 417 bp, Citrus sinensis
  Intron number 1 from transcript orange1.1g014709m (locus o range1.1g011494m.g) derived from phytozome v7.0 (chr-ID sc affold00023; pos 1181336 to 1181752 reverse strand)
ttgggtcccaaaacgacaacgctccctccatctctgtaagtgattttaccccagcgtctggcgcatctctgtaagagatcttatctcttaatttttttcagttcaatgaacttttaattgatcatcgattaattaattggcttagttggactcaaagttttcaacttttctaaactcaagaagagatatcattttgaggactgtattttttccttcttcaattttctatgaacttttgaaaaaagaaaaaaaattgggtattgccgtttctcatggcataactattttcatgaataaaataagatatgagaacatagttttaaagcaattttatttattttttaattaaaaaatgatgattttaatcttatatttgtttttgataacatttgtttttgggtgttttgtaacaggtcc

SEQ ID NO: 78334 - DNA, 567 bp, Citrus sinensis
  Intron number 4 from transcript orange1.1g005074m (locus o range1.1g004665m.g) derived from phytozome v7.0 (chr-ID sc affold00280; pos 96019 to 96585)
caaaggcttagatacagaaaattggtcaatagcaggtgcttcaagtctcctttttctttaataaatcaaactcttggaattacatatttcatgtccattttctccttgcacattatatgctcatctgttttatcagttgaatcttttgacaaatggtagaagttattttggctagctgattatgagcaaatagggaattcagcatatataaattcgaattatttggtcattacagtggaaaaaatttgagaaatgtagaatttgaaaattgtacatactgacacgtgaagacatttacagttgcattggcatctaaaatttgagttaacatctgcattaccacatgcataaatacaagctgtttgtctcttagcataaatacaaattcaagaaatgttgaatttggtatttttgaatacacacaagcaacaaatttacttattctactttaaacagtactctgatttaaggttagtgactcagtgtcaaggaatatgaaggcatgaatgcctgtggaatgaaattaatactggttttgcagcttggctgatctccaaaagccacaga

SEQ ID NO: 78335 - DNA, 730 bp, Citrus sinensis
  Intron number 3 from transcript orange1.1g046216m (locus o range1.1g046216m.g) derived from phytozome v7.0 (chr-ID sc affold00160; pos 7829 to 8558 reverse strand)
tgaaggctttcttgtgaacttaatcttgtttaagtattactgctgggtttttttcttgtgaggttaaatgtttgaattgtgatgttgttttaacatggcatggaaagtcatgatgtcttgcttttgagttgttttttggtccattgtgtgcttgttttgtgtttcgaatctcattaattaaagggtaaatatcattcaactctttgactcttggcctaaaaataaagcagctttaaggtctttttctcagtcttcacacgtggccatggttggactaaagcgaatatacttcagatttctctcaaaactagcctatagtgactctcatatttgctcctaatttccaaagcttacttttgttctttctgctgtattttatttcttagattgattaattggttttttcagcattctattgtttgtcagttaaggaaattgatggattgtaatggggagttaaatgagaaacgggcaaagactgtggagcagctttaatttcagactataactacaggagcttgattgtatttaccctttaattaagtaggccccaaaatgagagagggaagggggtttggggtggggttgttggaggataaattgccattgttgagtaaaaagttaacctattatgaaagtttgtggtaacccacatggatctatcctaacagtcttctgtatttattctcctgcagattgatctggggaaagaatcaacaatacagttcat

SEQ ID NO: 78336 - DNA, 679 bp, Citrus sinensis
  Intron number 1 from transcript orange1.1g017216m (locus o range1.1g017216m.g) derived from phytozome v7.0 (chr-ID sc affold00255; pos 117396 to 118074)
tttcattaaactctcaaagttcaggtgtttttcaggtaacaaagaaaaaggaaaatccccatcttgggcattggctctgcttactctgtttcagtgctctgtttttttaaggctttttatttgctttccacatgttccttttgattttgctgcctgaatttttctgggtatgttttaaattgtctgtttagaggaagtatggccctgcatttgtagagatcctctgttttcttctttgtagtttttgttctttgcctgctttgcttaattcttgtgtggttgttttgtttctaggttgttacttaaagtgatgcaggagtagaacagttgcaaatctgggagatttttatttgttcatagtttcccaaatatttgttacttaactgattgtttcgtatttgtatttgttcatagatttgcatttattctatccatgttagcatttattctatttcatgaataatggtaattctcattgcaaaaattgcctttggccttcttgttggtttttgcgttattccattaattttggccattgcatgaaactttaataccttttggttcttgtgcatgcatcattcttgttggatttgttctttgattgaaacaccaaataatcttgatccacttgtgcttataaactctttgtattttgtctgactaattcgaatcctgcaga

SEQ ID NO: 78337 - DNA, 645 bp, Citrus sinensis
  Intron number 4 from transcript orange1.1g017216m (locus o range1.1g017216m.g) derived from phytozome v7.0 (chr-ID sc affold00255; pos 119012 to 119656)
tgttgaaggtgtgctcaggttagcaattgctggttttgttgctaatctgtccgaagctcacattttctttgttgaggtttctcggtgtcctgcagtaggggatcgtattgattgtagtgtttccctgtctgaaaaattcctctaggtttgttgagttttagagatcaacacaatgttgaactgcatgagttgactcagatttatgtatgatgcaaacgtggtaaaatattctctaaatgtgttaaaaaggcaagtgtcttctagattgctttcttggtggttagagaccggagtgtggaggatggccatgtttcttaaattatctcatgaaccacaacttggaagtcgtgggaaataaataattctttctcaatgagaaaggaaagaggctttaatgtgttgtcttttttgtgtaaaatgttgtagctaggaattgtgattagtacgttacactgtactagcctaacatggagaccataataaagtatatctattttgtgttttaacatgagattcaaattgaaatcagattgtttgactactgtctcattttggagtttctgtttcagctcctgtaattgatgtactattttgaatttaatatctgtagattgacgaagtcagacttccgtgagccagtgaaca

SEQ ID NO: 78338 - DNA, 658 bp, Citrus sinensis
  Intron number 1 from transcript orange1.1g013943m (locus o range1.1g013943m.g) derived from phytozome v7.0 (chr-ID sc affold00005; pos 445364 to 446021)
ccttcacttgtggtcagagatacagtaagaaattttctctctctctctctttttcttcctctttctattaaagaaaaatccattcattaaagtttttttttcttttttttgggaattatttgatttttaatatcggaaaaagttggtttcacaagaaaacacttaagtctcaaaaatcagcaagaaaagggaaaacccatatgagaatatcttttgacaaatccattttaaaaataatacacaaagtaaaaaaaaaaatcaaaggggtgaggtttttcatttatttaattgttttatacacagtttctaagatagagtaattgtcttgtgacttcaagttccaaaggatcctttttacagaagatcaaaatgaattcaaaatgaggggaaaaaaaagttcttgatgatcttcacactttcttgggattcccaggcatgcgcaagcagcattggtcagaaacgtaggatcatatatgcacatacacacattgtcatgatcatgcatctttcctttttattatttttatatttgcttcccttttgtaaattgcccataacaaggcttggcgttggccatggccacaacccataatgtgtgtagcttttaatttttatttggatgactgaacatctacaggtgcacgtactgccacaagaa

SEQ ID NO: 78339 - DNA, 865 bp, Citrus sinensis
  Intron number 1 from transcript orange1.1g027555m (locus o range1.1g025716m.g) derived from phytozome v7.0 (chr-ID sc affold00017; pos 986224 to 987088)
gaaaagaaatccactgtcaagcttcaggactccaggtctctctctctctctctctctcttcaaaagatttcatttgtttttcttttaataaatttaaatacgaattaggttattattagggttttagtgatttctgaatcttagggttttttgataaaattgaccggtcccttccggaattttgacatccgtgctatgaaatttgaattggattgttaagaacttttgtttcctgcaaaatgagtatattcattttgttgatcttaacgctggtgcaaagacttgttgaagtattggattgctattagtttgaagtagtttatggttgctccattgttcgattcatgttatgcgctcttgcttttggaaaaataagcaatactgagatgccctgttgattgcgtccatcaactgttaatgggtacaaatgtagaattatatgagttgatttttgggtgtaattttatgattgatataaatctataaacaagtctatgcttgctttggtattttgtatgacattgtggctaagatatatctgcttcattgtatcttaaatttctggaaattgatactgaattgcgaacataaagcacctttaaattttcattgaggggaggaaaatctttttctctgatggtgatacaaaaccacatcctatgaagatgtctaaccctaacctttccaccaatgctttcttttattgatattggaatatattgttggttagatgttgcttaaactgtacattttgaaatgttattatgtgcatatttgcctgagattgggcttttctttaccataaccgttttgcctcttctataatacagatcagtgaggaagattgtcagcttggataatcata

SEQ ID NO: 78340 - DNA, 908 bp, Citrus sinensis
  Intron number 1 from transcript orange1.1g013042m (locus o range1.1g011447m.g) derived from phytozome v7.0 (chr-ID sc affold00468; pos 46872 to 47779)
gtgatctgggtgtgttttaatttcttgaattaagttcaaaaattgcttctttgtatttggtagctgaagcatttgaacggtgtcgttttggttaaatttttctctaaatggaagtttctgattgttttgtagtagcttttgttgaactgggtatatttgttcttttgaattttttttttctcgcttgtttctggagaatgttggataaggaactgtggttaagagtaataagtgttggatttagcattggtaggggagttatattggacttgtttgtgcttgagagagctcttaaactcgaactttctacttgttcatagtagatcttcttcatttattatcatcatcatcatcatcatcatgtgtgcagatgttgctttttagatgaaatttgaaaccttccttaaatggaaaattcggatctttttgaacgtttctctgttttgtttgtttgatgatttagagaacattagatagacaagaagcaataagttttaagtattgaaattagatgttccttttctcaacttagatggcttagatctcactctttttatctttgtttttttttaaaactttggacggtagaagtctgtaaatgttatctcttgactcctatacgattagaagagaaatatatcctcatgaaatttagcaattctactttgtacaagatgattaatatcaagaatttgtatgtgtgggaaaacatgaaaatacataaaataagtcttcatacgatagtatcttgcactcagccaaagtcttcagtaccgacccttttggtttgctttggatcttcttctttctcttgacttttgtacaaaatggcggcgtgagtctgatattttttcttccttctgattgctatagttatttctactcttacgtgagctgtgaaaatcgca

SEQ ID NO: 78341 - DNA, 775 bp, Citrus sinensis
  Intron number 1 from transcript orange1.1g034409m (locus o range1.1g034409m.g) derived from phytozome v7.0 (chr-ID sc affold00492; pos 88086 to 88860)
ggctgcctcaccaggtcttcatttgtgattcttgattcatcactcttcttcttcttctgccaggttagatgacttggttaaatgtatccttcttttgagtactttacgctaacgggggagctcgtctttgaagtgcttttctctcttacttcccttttgtattcgtatcttatcttgtacttgattgtataaatgaactcaacggaagcttccaatggccaattttaaatatttgttctttaattcttattttttttatttaatttatttaatctttatcttattttggcgagtgtttgagatttatggtttggatttgtaattatggtgagtgttttattggtctggatccgttttgagtatatcctaagcaagtttttggcactttaatagtttaggatattcttttatctatgttctttttgttagccgaaagtagcttttatcactcattttctttttttggttgataccacgtaaaagtaatttggtattttctctaattaaatactgcagattctaatcacattagtgaaagaaaatattaagatggtttattaatctcttctaaaaataatattagcattaacaataacgattattttgcaaatttttgttgcaatgatgttggaatgttcgtagtttatgtagagtatccggactctgctatttggggtctctgtaatgtgtttcttttttcccctaccactctttagtttatctcttctattatgaatgctttagagaaatatttttttgttgcagggtaagagaa

SEQ ID NO: 78342 - DNA, 1047 bp, Citrus sinensis
  Intron number 1 from transcript orange1.1g002871m (locus o range1.1g002871m.g) derived from phytozome v7.0 (chr-ID sc affold00057; pos 393239 to 394285)
tctttaattcatttattttctctctctccaaacaggtactgtcttttctctctcgttctttctttcttccttttacgcttcttcgtaattttcgtatgtgatcagttgttttgtttattaggaattcaagtaactgttattgaaatagtgaaattttgagtttagagtttgtgtttgtgttttgcttgacttgatggctaaatgaggcctctttttttttttttgaagaacgagttgatgttttttgtttttggggtctaattattgatatgattattatccacttttgagttttttaccttttatttttttttgtccttcatgtgtgtgttgactttgtgcggactgttgctaattctgtttgattttttgatgtgtcgcggagttttggatgtattattaggttgttgaagtttgtgatttcgtacctgatcttgagaatttgctttgctcaattgtgtatagagaaatgagtatttaataggctcaagtgaatgttgtttcataattgctaattacttttgattgtaatgttcatggagctgaattttctcacttaacaaattgtaattgtgtttgtacttagttgattactaatgaatttcacaagagcttttactaatgaaaaacagtagaaatgtgggcaactgattaacgaaatagttttccagcgcgatagtaagggaagaaatcatggaagcccaattgtaattgtcctgtgcttgaggtatttggttgactgacattttgtggtagataattgagctcttggaccatgtttgcagtcactttgatcatttctgaagaatttagtgaatgcacttaaattaagtaaattcctatagattaattaaatagttatatcgtctttcttttctttgcttaatgtactgttttcgatttaatcttcaattcttatagatttatatctgtgcatctctttatgaatggctatttgatgatgttaaggcagctccataacaataaacaaattgaaaatttgttaatagcttagctcccaggtacttttgctgctgtgggcaattt

SEQ ID NO: 78343 - DNA, 707 bp, Citrus sinensis
  Intron number 4 from transcript orange1.1g002871m (locus o range1.1g002871m.g) derived from phytozome v7.0 (chr-ID sc affold00057; pos 395106 to 395812)
ttgaggacttggaattgagatcactctttgaggtatgtcatattgtttttatttccttttacaaaacctttatgtccactttggcattagtatctgtgtgattaatgtctttgctgatcatgttacttctgaaatttggttatttttcaaataatagatgtgtacctgacatgtatttgacttgctatggacattttaacatctttcctggaagaaagaatgtatcaaaggcttaatgaaaaggttatctcatgtttttctccatataccagataaaataatattatcaagttatgaaaaggaaatgaataagagatcacatattatttaatgttattgaaaaagagatgttcattttctgtgtttttcttgttatgattgaatgactcttgtttcctgtatgtgagtgaattttgggtaatatgtgtattctgttgaatttacatcctgtttccatgtgcattgaagtcttttaatgatttgcttttaagtgctgaacccttttgttttgttttgttttttgtttttttgttttttctgtaattgctgtttttgggtctggttgaagaactgtattattgtgattctctggtgttatttctaatttgttctgccatttatcatggtgaaaatgactttgaactcaatttgatagtttctacaatcattgattgtcattgattgaatgcttattttcttgtagcaat

SEQ ID NO: 78344 - DNA, 779 bp, Citrus sinensis
  Intron number 1 from transcript orange1.1g021986m (locus o range1.1g014598m.g) derived from phytozome v7.0 (chr-ID sc affold00138; pos 72962 to 73740 reverse strand)
gattacaccatcgccggaatattccttattttcaggtgaacgagatatctttattttttaaatttaaaaataagattgctttacacaatatttagtgattctaaatgaagaaattttgagttttgtaaagtaactgaggatcgtgtaacttgagtgttattgtttcttcgttctagagattgaaaattttcaagtgcttaatctttattcaaattccgaatccattattgcctgatatattatttctgttgaaacgtattcgattgtgatgacaatagtattctttttggagtaattttgacagcttcaaatgcacttttggattttgtgtcagttctctagtgtttgggtgaactacacataaatgctttctcactttctgacatttaatgaaaacttcaagcattttttcagagaaataattgagaagtgctactctaaacggtatctgtttttggagtaaaagaacacttcattggtgatcttttagtatatataaataaataaatgtatattattgtaagttctgtacataatgttaaagattggaaactagttgtttgtaggtcatgcttcgtcttacatgttatgattttctgatattcctttgcattcttagcgaccaaacagagcaatattcctttatgggagaatcttaacttctagcctgtaccagctagattgttttcaaacatctaaaaagtgtataggggatgtgaacggtaatttttaagctttttgcagggcgaaaaggtgaactagctctttgctaaagagcc

SEQ ID NO: 78345 - DNA, 931 bp, Citrus sinensis
  Intron number 1 from transcript orange1.1g010206m (locus o range1.1g010206m.g) derived from phytozome v7.0 (chr-ID sc affold00005; pos 1505971 to 1506901 reverse strand)
cggagaacggactgctggagaggaagtgcaggaaggtacaatcttcatttttgctttatctgattctgcatatggttctacttttattttattttttattttttattacaaaattatggatatgtcttgagagatctatgatatgcaatttggatttgatagttagaaccggcgttattgtgataatttatatgcgtctacattattgaagagcaattgagttagttgtaatattgatgttgcatgcatgagttacttttgttgttgctttgctttttattgcgaatatacctcatcatagctcagcttggagcttaaatattgtgcttggtgctgttagctcatgaattacatggtcaatgaacttgtgaaagcattggtactatggcatgccatatgggaatgcgtcatagtttcatcaaggcaaaggtgttgggcctgtcggacatctgatcaatgggttgatttcctgagtctccagtttatataagcagagcaaaatatttggtttgttgtgcttgctccatgctggctctgattctgaaagttaatatcattgaacaacaaactgagtcacattgttgattctgggcttgagttgactaatcgagttcttaacactaaaacttttatctctggtttggctctctgttaatcgttaatgtaggcagtctgttatactagttattaactattgaaaaatgtgaggtaccccttgaatagttgtcatcatgggagggacttgacttgaagacataaaacattctacattatatttcttatatgatgaaagttttcttttcattgtaagtgcgatttgtgcatggcagaagtgttttgtatatgctttttctcccatgctgcctttgatttatttctggaccttatgtttgcagttgatatcatatccgctattgaatttgataaatct

SEQ ID NO: 78346 - DNA, 408 bp, Citrus sinensis
  Intron number 1 from transcript orange1.1g002977m (locus o range1.1g002979m.g) derived from phytozome v7.0 (chr-ID sc affold00003; pos 1999255 to 1999662)
gctgccgtctccgatcgatcactgcagtgttaatcgtaaggttactgccggctgatttttttttgaccgttgaagcttgtgtcttgtcttgggatctttaataaacttactgtttgatttgtctctgttttgctgttctctgtttggttgccaagaaatgatgacaaaaagaatgagaaagtcaagttctgatctcgtcttttagattataatttcttcattgttttccgaaaaaaaaaataaaaaaaagaacgtgagtttaagatataggagtcgttagttccgggtttttctcggcaaccaaacagaagatttagcgttttggttgagtttatttgtttatatctttgatttctagtgatggtttaattgttaagtgtgtgattttgactcccaagtgcaggaaat

SEQ ID NO: 78347 - DNA, 789 bp, Citrus sinensis
  Intron number 1 from transcript orange1.1g003311m (locus o range1.1g001197m.g) derived from phytozome v7.0 (chr-ID sc affold00011; pos 967068 to 967856 reverse strand)
agtataactcggccattcactcaattgaggagaaggtaaagacaaagccttcttgtttgcagcatgttattctgtactctatcttcttctgtcaaagcgtatagttgagacttgagatatgtcatctaattatttttgtatagtttatctctttgggctactgggtttaaggttaatgtgtttgttggtaaattaaagaccacggtagtgggatggcattgaagcattgcttgcaatatgaatgtgatgaaattaggagttcttgagcttctcgctctgcatcagaatgccttatgtgatcttggtgtaaattttaggagaactacagcaccacatagtgatcatggcaatggaaggcattgctctcttttctggaatacaccatttttcaataatttcctctataattttgctcttagcttgtacagcattttgtatctccttgctttctgtgtcaccttacttgtaagatcatcttatgtgttgttatggctgtagatatatatatttttccatttgacaagcatgcatttttcttgtgtgatcttcatggtctatctggcaaagatgtaccaaagtcttctatataatagatatacaattaagcacaacatgctgagtattaatgatatcattgttctgttttttatgttgcaaaaaacaatggttgtgtcccatgaagtttcttttgagcttttcttcggccattgtactggaatggcagaatctaactagatcttttattttaccacaggtaacggagcagccaaccttgcttcaaggtggaga

SEQ ID NO: 78348 - DNA, 761 bp, Citrus sinensis
  Intron number 3 from transcript orange1.1g023224m (locus o range1.1g022993m.g) derived from phytozome v7.0 (chr-ID sc affold00003; pos 2688864 to 2689624)
tctttggtatgtatgcataatgtggtttggaaccaactcttcacatgctgtacagctgggtatccatcttagctgtctttagttgtttcctgaaactttgcaatatggttcagattcttgtgttcttttgtattctctacagtttccttcatggagttcatttacaattttcttgagcagtttattcttcttctcaaatattatgttgttttgcttggtccacgttcaaataattggaatgttgcagacttacaggtttggataaaattggtttagtatgctagaaatttaaaattttactaggtttacaggtagacttaaaaacatgaatatttcatagttcttgtgtttctcataatatggtgccttgggttccaggacttcaaatatgttagaaactaaaaaatgcttgtaggatagtagaccctttgttcttctttggacttgtgttctgagataatgatggataggtggatgcttagacacggtacaacttcctataagtttctataaagcacaatgttgctacaagcataaaatgtaataggataagaatttcacttattttccttgatatgtcgaaggttgaggtcatactttgagttgctactacacttgatttgatcttctctctgacagctttcattacaccttggaggaaattttattctgccttatttcatcagagtttgcaggagatattaacaacctcatgtttgggtttagttattagggcaagtgtaccaaagctggacctggat

SEQ ID NO: 78349 - DNA, 613 bp, Citrus sinensis
  Intron number 1 from transcript orange1.1g035149m (locus o range1.1g034905m.g) derived from phytozome v7.0 (chr-ID sc affold00048; pos 359960 to 360572)
gccgccgacgaggtaaatttcatttatctctttccatctattttaacgatttctgtttgggcgcctagaaaatagaaactgtacggaaagaaatttcttattggattcataatttttttagcctttatcttctgtttgattatttgaatcactctcatcgtgattgatacaaaattgtggataatatataaatttaaacgtaaattgcctttattttgtgatttgttttatatctcttgatcatttgtgctgtgcttgttcaatgggaaattgaaagtttaggtttttcgcgcaaaatttttgacctttttatggaatgattaatctcttaggaatcgtggtgagggaaaatgaagagcttctgaatgatgttatttttataagcaaagctatagatttgtaatatgaccaacgatatggtatgattgttaataagaggtgtataatttgtcatcagatggtgatggatgaatgtcagcacttctgtatctagtggcaaacttgctttacgttagcccaatgttgcataagtttctcattattttatgttatggttactggtactccttttgtcttagattgaactcaaaactgctcctgctgatttccggtt

SEQ ID NO: 78350 - DNA, 606 bp, Citrus sinensis
  Intron number 5 from transcript orange1.1g004776m (locus o range1.1g003071m.g) derived from phytozome v7.0 (chr-ID sc affold00005; pos 957509 to 958114)
aaggttagcggcttagcgctctcctttctttttcactgtccaaatcttacactaggcgccattattctttgttgtcattttcttggaaatttaataaagcacataaacctttgccagacttctaagcaacatccgaatcacatcatatcaatatgtctgcactttcttatctgatgataccttttgctgatattaatttccttttcattccttgatcaagcgtttcttcttgtcttggtgtggccaagtctaatttggatgattccatgtcttcatattttatcgatatatattaccaaattgatggagtttgtttgtcttcagaccaaaggaaaaaaaaaaaaatcctcatattcacatgaaatttcactttttaatcaagaacaataagatgcaaaacaacatgatcttgtcccaaggtgtatgattcatacaatacttaataatcttataatgttaatattcctaagggattcagatgttaattaatcaaagcttttaattggtttgactaccagtggtttcagactcaagattaacagatgtaatctgtctctttttacctgtacagcctggtccggattccattggaatcgttgctatttc

SEQ ID NO: 78351 - DNA, 228 bp, Citrus sinensis
  Intron number 1 from transcript orange1.1g017628m (locus o range1.1g017018m.g) derived from phytozome v7.0 (chr-ID sc affold00014; pos 1802982 to 1803209 reverse strand)
ggcacatcacatcgcaggtttaaaatacttctatgctaataatagtttttgcttgtatattcttttcgtctcctcaaatttgcattcaaaaacctctgttttattgtggtgagtttgccaacattttcttatttatttatttttttcccttccattccagtggtttccttaaaaaaacaaatgatggtggcaggcttattatcacaacatttataggagttctcattg

SEQ ID NO: 78352 - DNA, 923 bp, Citrus sinensis
  Intron number 2 from transcript orange1.1g006248m (locus o range1.1g003061m.g) derived from phytozome v7.0 (chr-ID sc affold00929; pos 35247 to 36169)
ataggttccaaggtttagaagaaggtacatagtagttggtactttatttgcttccattagtgttatgtaacttgtactaatatgtctttttgatgcttaagtctcaagagaattcatttattattggaaattgcctatgtgattctactctaaaaaactattagattgaattgcttttacattaaataataacttattttgttgcaatccatttgtacataatagtttaaaattcttcatgataatataactgtctcacaacttatatgctagcattttatatatgttgataatctgaacttcgtatgtgatattagttacttattgacaaaggatctaatagatcctatcattgtattgtttataacgttttcagattgaaagcatatagttcatggattaatattttgaaaattttgttcattttgatttttttaaaaaaaaaatagacaacagaaattatgttataattgtaaagatttatttaatattgatgattttatcacaacttgtcatttatttaaatcagtaaaaactctgtttgcattttgattcatctttctgtctcagtttgggtctcagccttaaaatcgaaatttgtgatgcaaatctctatctttatccatattaagtgagaaggaatatcaggtcaatggttattctggatctgttttggtggggctgtcttaaattctctaaaatgagctgaaactttttgtttgttttctacaacttttaatacttgtttctggggatgctttcaagtaatttggtccaccgttatacgtccttttcttttattcaacattcatcttacagttttgtttgaaggaaaatatatatgtgtatgtatttattacttggaaactcggtttgcgattcttgcagaaaataaagttactgaagctgttagagcattggtc

SEQ ID NO: 78353 - DNA, 1025 bp, Citrus sinensis
  Intron number 1 from transcript orange1.1g004273m (locus o range1.1g004279m.g) derived from phytozome v7.0 (chr-ID sc affold00532; pos 71098 to 72122 reverse strand)
ggccgctcttcgccgcctcagtcaccaagcagcaggttagtattatgtttgatttatgaattcttaatcaatttaaggtttgatttgacttttttattatgcttctattttgaagttgatttctgaatcttaaatttttaatgctccaccactatagctacttgcttctttttgattttgttcataatgtgttttgttctattggttatgttctctaagagtggtgcaagctatgctttgtgttgtatttgtttatttgaacttatagacactttgaacagttaaatttttgtctcaaagcacaacataattgctcctgcaggaatctattctcctcagaccccataatgggtcgcttacacttgacttgagcttcacactgtaactactaccagtaaagtgttaagttcagttggttaattagaaagaaactaaactaagtatattttgagattgttgaaacttgaaatgagtcagccacagtctcacatttctttgttttattgttgctgttgcgacgattataagactagaacaaaccaaccaatcagtcaaccgagagttagatggaggcttgctttgctttgctttttaaagggggcacgtttaacctgaagctgacatcatgtatatttgctcttctgatgccacaaacaagattacaagagaagaaaaaaaaaattgaaaaggattgattttaaaattaattaatttaatagagatctaaaggataaggaaagacaaaagtaaagcaaaaaggacttgactgactgagatactcagagaaatacactctttcctttcctgtctatcagaaattccccatacatgctttttggtccttttcttttcttgtttttctctcttttttattttttattttttatatttttaaggttcaattgcatgaaagaaaaatacgaaacaaaaaagaaatttaaattggaacctagccgctgctacaggaagcttgccttgccgctgctgcaggaagctcacttgccgctgcacggacgcacggcgct

SEQ ID NO: 78354 - DNA, 671 bp, Citrus sinensis
  Intron number 1 from transcript orange1.1g001798m (locus o range1.1g001795m.g) derived from phytozome v7.0 (chr-ID sc affold00048; pos 89828 to 90498)
gctattgaacaggaggtgagtgtaaaagcttcggttttgttgcttttagtttgtgttggtgaatagaggtttgcggcatacttgcttgccaaatttactttggaatacatgtgctttagttagaaaaccaaaagagcaatatgcgtatactaaatttgaggtgatgaggaaatagcggatctgcggttttgcaacactatactaaagtaggattattttttataatttcagtatgtatttcaattttgtatgtggcttggtccctctattgtttgtttttaggccattcttcattggtgacttatgtggcccaactcaactagccatctctctatgctagttaattaccgttacatgaattttctgtctgtccaaagcaaaatgtagcctccatgtgattaacacaagctgtttctaattggaaacatgtagagttgtagaatggtcttaactagataaggattatttatgtttctgacgtgaattccttcttctgtagtcagcttgctgatggatgcgatctctcaattcttattatttgggcacctgaaatttaatttgctgcaaaagttatatcaggagacagattttgttttgtcaggtctattcacatgtatttaatttatatcatcccagattaggattcatagtttcttggagaaaactaagaa

SEQ ID NO: 78355 - DNA, 791 bp, Citrus sinensis
  Intron number 2 from transcript orange1.1g018370m (locus o range1.1g016334m.g) derived from phytozome v7.0 (chr-ID sc affold00050; pos 168303 to 169093)
tgccttttgagaagttgtgggataagttttttcatgtaagttcttttttttttaaatcttttcgtccttagtcttggtctaatgatatttatgtgcttctttttttaatcccattgttcatatacatgaatcataccctgttttccaaaatttagcactacaagttaggtttagaacagagcaaataaataagtagatttagttggacagaggagccaaagctgttgtagagtgctatttctagcataagtattgaaggttagattggattggggttctctctcttcttagaatggacattacaatggtggttggtgagtgtgtccacaagtgatatttgatggatgccatgtgggctataactttaagatattatgtatgtcgtttgcctgtttgcctatatggattatgccaagtcgatttgttgagagagtcttgggtgctccggagacaggaaattgctttttgctcggtgaattcgtttgattaatttaatctggtgttccttttatttttcattaggtggcaacgagttgtgatacttttgatatggaatttcagtaatgatgaaatactcaaatatgcatttgacagctgtaggagccatctcagtactacgtagcattttgatttttgttgtttacaatatagatttttgatacggaatgtccattgatatagcattttgtttttctcttaggccagtgatatcagtgctataaagcctgttttttttgttgtttgacttaactcatacttccatgtaaccttttcccatttcttgcagggtc

SEQ ID NO: 78356 - DNA, 261 bp, Citrus sinensis
  Intron number 1 from transcript orange1.1g022563m (locus o range1.1g022563m.g) derived from phytozome v7.0 (chr-ID sc affold00003; pos 2432944 to 2433204)
gatcctattcaaagatctcaagaaggtagcaatttcactattatttcttctttaattgcacctcagatgtttgtttatttgcctgattgaaaattccatatggatgaaaatgcccatgtccatggatggttctgtatgattggctaagtggataagactagaaataatgtaaaactatacgaattggaaatttattttgatttttttttttgacgtttcgttacagatactgcagttcaggatattgttttagaatcttca

SEQ ID NO: 78357 - DNA, 765 bp, Citrus sinensis
  Intron number 1 from transcript orange1.1g021420m (locus o range1.1g021420m.g) derived from phytozome v7.0 (chr-ID sc affold00003; pos 194030 to 194794)
ggacgggaacagcgattttgccagcagtgcagcaggtaagaatagcaataagcttgtaaggatagaaataactggagtgcttctggaatcatttttgccttcctgttgtttaatcattctctataatgctactcaatttaatttttaccaaggtatattcttcagtgtacttagattataagatttgcataagacggatgcatctattttctaaactatgtttagtacagattctactagcttgattggaaccaaagcaccattagattcagataatatttctactacatacccttgaatttccctccgggtaaattattatttgctgtttggcatttcttatgtcaatgatcctgaaattcagaaagcaaatgatttctttagtcacctccagattgtttgaagaaactactttgttaccggagttaaccaagaagtagaggatggcatctgtttgttattttgaaggttaaattatgtgtaagcagctgaatatatttgcagaaaatgtccttaatagccaagtctagatgagacaggatctttattgctatttgattctcaaaggcatttatggtagccatcaactatctgtaattctatcagattctccatgcagtggactatgcctcataaaactgagctgcataaaagatgtattatcagatttgctcctcaaaaaattcactttttgtttatctatgggttcgtaaagctaaatttctattgaataatttatcagatttcactcattggaggagtttg

SEQ ID NO: 78358 - DNA, 675 bp, Citrus sinensis
  Intron number 3 from transcript orange1.1g013695m (locus o range1.1g013701m.g) derived from phytozome v7.0 (chr-ID sc affold00742; pos 44446 to 45120 reverse strand)
ggcaccctttgtcaaggtcagtgtctgacatgcacacttaattgttgcttcagatctttttcatcttcaataaattttcaacccacaatcctttactttgcgccttaaattatttgttggttaaaatgtaaatattattttttactgtcatctatgtgactatagttaccttatatatgcataagaaactacttcaaaaaattcagaacagggtttgacagtcattttcctcctgaaataggattatttaatcatttgcaaaattcaccatagtactagtgttggtgtcaatcatataatgttccactactagtagagccacttgtgtaattcaagttcattaggtttttctattatattactgttaagtttttataagcgaacattgttaattcaaaagttactagtattcgagtttgattttattttcattattgctaattttttaattttgtatttcaatgtgacatttcctttatacactttttactgttaaagttatctcacatgttcataacaagaaaagaagctatttaaaaaagctcttacttggtctgtttctttttctttatatagcttgaacaatagaacatgtgatgatgacatagattccgtggttttgtaattttaatgattacaggagctggctgtcattgtggtgagaggaagagacaa

SEQ ID NO: 78359 - DNA, 727 bp, Citrus sinensis
  Intron number 2 from transcript orange1.1g013695m (locus o range1.1g013701m.g) derived from phytozome v7.0 (chr-ID sc affold00742; pos 45134 to 45860 reverse strand)
aaagagtgaagaggagctgtcttccgccataactggtaaatgctcatttaaagataactgtctgaatttgatatagatggtttcgttacaattcagtaggcatgtaatattctgcttatctttacttgcactttttacctcatcttgatagctgttgtacccaggtattggtatccaaatggtatgctggtacaaatatactgtaattttcttataataaaatttcttttttcgttgttttaatatcatctgccctacttagaaaaacactaccatatgctgaaggttgtgtagcaaggcagtgttaggtagcaattgttttgtctaaagatagtataccttcaattaattttctagtttgtctttgcttgtcctgagtttctgaagtctgtctaaagatgcattgctgttgcttttagtctagtcagtccaatcctgtccaagttttcatttcttctgcatgttagcaatcttttatatctatttgtcttattgttgctgtattacataagtttttgtttggtttgatttacaaaatgttggtaacttgtttgtcttgcgtatggtgttacttggtttctagctttgtggttttggttttgcataaaatttggcatctggtggtataggtgtataatttgaaatagtggatggttctttttctcagtgattttaaacgctcatttttcctatttttcagctcttggaggatttgatcgtggtttat

SEQ ID NO: 78360 - DNA, 962 bp, Citrus sinensis
  Intron number 1 from transcript orange1.1g022542m (locus o range1.1g022551m.g) derived from phytozome v7.0 (chr-ID sc affold00095; pos 291325 to 292286)
gcaagtccaagcctaggagccccgtcatcaccgtacttgcccaacgttttttttctaccgtttcacattcatgttatgttttatattgataatgtgcttaaataatacttttgagttatgagcaaaatgcttaatgtaaagtctgttatatagtaggatgaaataatgcttcgttaatcctttatttttgcttgtttttctgaagtttaaaaaaattaataaatgaatcacaaccttacttaatttggaagaactgagaatattttcaagtcacactattcagtggcacagactaagacagcttaattactgatgtgaactaataataactcgtgcataatgcttttccggtgcacaaactatatccttgagtgatgtgtcttccaaaatggactctactttgtcgaaccaacaagaagcaatgactgaacaagtgcctttttgaatgattcactgtgtcaattgtattccttcctttcatggaaatttttactcttttttttttcccaagtttaatgcgtcgttccttgaggttacattgtcgaaaacaaggttgccttctttctgaaagaaacaatctataggctgtggaccactacaccaaatgatacacatcctccctcttccccttaagggaattaaagaaagaggaaagtaactctgagctagttgaccataccatcaacagcaagtaggattgtaagatggggacaaaaactgagtggtgagatacttcttgtgttgattgtttgaacttgattattatgcgaaataagagtatgcaagtttaagacttcatgtcttgtaatagattatcttcatcgtgtttcttagcaggttatatctgattgatttttgagcattaattttctttgcgttattcatgcaaacaagtagtccacttattcatttagcttgccatgctcctctgagcaggtcattccttttactagtggaactgc

SEQ ID NO: 78361 - DNA, 357 bp, Citrus sinensis
  Intron number 1 from transcript orange1.1g005203m (locus o range1.1g005203m.g) derived from phytozome v7.0 (chr-ID sc affold00003; pos 1485879 to 1486235)
tttttgctgctttttctgccttaattatcgcagcggtgcgtatagtttcttcttttgtttcttaattttcaatatcaaataagttctatgcaaatgtagattacgagaggagaagcatagaagtttgaaaatggatatagcattgtcaaaagtcgaaacaatttccgttccaaactagatgtttggagagtgaatattacttacggttgcttcactttagaacttattctctggctactggttttgtggaactttagataagatggtggcaatgcattaaagttctattgcatttactaactgctttgatttcttgatacagctttcagagatattcataccccattttctgacagc

SEQ ID NO: 78362 - DNA, 431 bp, Citrus sinensis
  Intron number 4 from transcript orange1.1g030320m (locus o range1.1g027057m.g) derived from phytozome v7.0 (chr-ID sc affold06040; pos 1426 to 1856)
ccaaaagtttcctgagaataaaggtttttcctattggcaatttgtgttcaattaatcaatcttcagttttaagattttttgtttcattctggcatacttttctctttaaaccttattttatgcacattctcttggaaatagcatatgaggcctgatacatatggatgtgcatactatcctcaaatgttttcttttttattctgtatttcttttcgtctataagaaaatcatcaaaatgtgttatcaacctgatgacatgttaatgtttgtacaattacataaacatccaaatttcttgtcgcatctattacttctaccattctccaccaaaagtgaacacatagttggttttgattcttgagcctcaattatgctcaggctaatatgattttgcaggttgtgaacctcaggagcaattcagttaatctcaa

SEQ ID NO: 78363 - DNA, 682 bp, Citrus sinensis
  Intron number 1 from transcript orange1.1g029682m (locus o range1.1g028980m.g) derived from phytozome v7.0 (chr-ID sc affold00005; pos 2042258 to 2042939)
acatcccctgcaacttttgcaacatagttctcgcggtatctcccatctcttctcatctcagacctcatcccattgattcttgctttaatgggctctctctctctctctctccaagtattatgtataaacctcgcaggaaaaaagatcctgataaaagagctaagtgtttgattgtgtgatcagtttctcgtgctttgctgggatttcttgattttgttacagtcaagtctccatcgtttagactttcttttttttttacccttcttctttttcagcagtcaaagaaaagtcatacctgaaggtccagaactgctaacgactagagagagggggattatatattatccgagagtaattaattaatatataatttaattaatcataataatatgtatacaaacgtccaaattaaacaagctttggatgataagatgatgaagacaactcattcatcaccttttgatttttctcctgcgttccatccatacctttcaaagctcaaactaagtttcatgcacccatgtgtttctttttttaattattttctctttcttattaattaaagaaattggattttgattttatcagatcaggcgagtctctgaaattaactagtttgtaaatgatgatctgatgtgtgtgtgcaggtgagtgttccttgcagtagcttgcttgacatcgt

SEQ ID NO: 78364 - DNA, 1048 bp, Citrus sinensis
  Intron number 2 from transcript orange1.1g029682m (locus o range1.1g028980m.g) derived from phytozome v7.0 (chr-ID sc affold00005; pos 2043020 to 2044067)
ttcatcatcatcaggtgaaattcattcatatataataacaataatagggcattgattaatttattactgtgaatggcctcggaaatctagggtttctgcttcagcttctgctcctgcttctgggtattactctttttgaggaaatcgaagctttcaaggcacagatcgagtatttcaaagctctctctctctattcagaaacctaaacctagcagccgccataaccgatacctgtttctttcttttttggtttttgtagagctgtattttgcggccacagttgtattttgtgtcagggctatagctggtggcctgcgtcatagcttaacgaaccccatcaatactggctcgctcactcacatagcactcataatctcttactaccttatatcggggaaaaaaataataaaaaatctcttactagctagggttttctttttactttactattcaaccaaaaactatatatatatgtatgtatgtaaatgaaaatgcagtcttgatttgatttgatttgattgacatgagcatctcgatctaggtttaatgatttctttcaagagcctttgtcctctattttggaagcaaaactaaaattgacagaactggggctttagattgacatcttcaagcctctgccccgagttcagttcagttatttgtttgatacaaatctataacggattcagtcacttcaaagcccccacggccccccctccttttttttttttatttcataaaacatcatttcaactctttccgcatttctctctctccttttattattgttgcaacaaagattacaataccccaacaatatttctttctactttcttttcacaactagtgatttagtttttcgatgaacaacttgaggcaccctaaggagctagcttagtgcatttcagttgttatgattttcagtttagtaattacttacaattaccaataagtgatagatcgcatctgctggttcttaattcttttaaaactaattcaaataatatttacaggctccaagttacgcgtcacccgagtgcagaattga

SEQ ID NO: 78365 - DNA, 850 bp, Citrus sinensis
  Intron number 2 from transcript orange1.1g006207m (locus o range1.1g006207m.g) derived from phytozome v7.0 (chr-ID sc affold00005; pos 2373442 to 2374291 reverse strand)
aggagctctctgtcattatagaccttatcaacactgtaagctactcaattgttgcttcggattgttgattgataattgggtgcattgtgaattactatctgagtaccgttgcaactgtcttgcttctgtttagtagacattcccttttatttggtaactactttctagaaaccactaaacaacctatacctggcagccagtggtttcaattgatattagctgtggatcaaaagccttagctcctcaatcgcaatataccctcttcctctttagcgaattttatggtttctttttaaaacgttactgtattgctgaaagtgtgggttggtttggtgtgtttggattttagatcagattgtgaatgagacagtgaaagtgaaagtgcttggtttctgtgaaatgagctaaatatagccaagttaaacttcgtttatggattttactgcccggtagtaactaaaacagtgagaatttttcttgatcgagtctgatataactatttgctccatattttcttcttgtgcattgggatggggttgggggaggagggctagtcaaaagatcttaactcttaaggctcaaaattgagatatcagttctctgtcttgtagttatatccaaatgtataattgaaaatggacggaaattttttatccatcaaaccttgcaagtcaataatttagaatttttttttctaatttcctttgctctaggtttggcttttacttgttgtaaccgattcagatcattgtttcaagtactcattgggaagtggaaagtgccatttaaaagataaacagtgaatgttaacatcagaaatcaatttgatgtgcataggtggaagctaacg

SEQ ID NO: 78366 - DNA, 334 bp, Citrus sinensis
  Intron number 1 from transcript orange1.1g039391m (locus o range1.1g039391m.g) derived from phytozome v7.0 (chr-ID sc affold00005; pos 496497 to 496830 reverse strand)
gtaccaatttgtgactgcagctttctgtcatgctacctggcgagaattttaaggtattgataattttgatgacgaaaacatcaccgatgtcacagatgaatattgtactctagtataattttttcttctcttcgttgaatttctcacttttgtggactctcttcaggaaccatctttccagtaaccttttcttcttttacaccttcggtatgcgtttcattttgtcttagattatgaaatttgattattgaaaaggatccatttgaaatgaattgaattaatccatctttcttaaacagggaagcttgttgaggaggaggaaggaaactgtgga

SEQ ID NO: 78367 - DNA, 385 bp, Citrus sinensis
  Intron number 2 from transcript orange1.1g047303m (locus o range1.1g047303m.g) derived from phytozome v7.0 (chr-ID sc affold00227; pos 148109 to 148493 reverse strand)
acgggtaacatattttgtccttttgattgtgtagaaaagggagattttttctcccctgtttatttctgttaaagatacaaaaatatatgacaaaagaatacaactaattctaggaaacaaatcaaacaatctgcctccatcaaaacaattgcaaccagtcctcgagaattatggctcaattattacatataagaaattagatgtccaaagattgtgcactggatatatcatgtgaatatgagatttggtttcgtcaaacttttccattggaaggaaatcagcaagattcttcaacagattgttttgcagttaactaattctcattttttcccccttttttgcaatatcaggttagtagtagcaccagtgttagaggaggaaagtc

SEQ ID NO: 78368 - DNA, 527 bp, Citrus sinensis
  Intron number 1 from transcript orange1.1g031135m (locus o range1.1g031135m.g) derived from phytozome v7.0 (chr-ID sc affold00066; pos 614888 to 615414)
attctttgtccccacacaaaaaccctagctccaaggtaacatcgcttaaacccttttatctctccttttgatttctcggtttcctttatttttctaatttatttttttctctctgttagaaaatgtgagtttttgtttttttattttttgttttagggttttgttttgtttatttggggattcagcgatgtttaagatccatgttgtaaattctcatctgctttttgcttgattgaactggttttatgttttccctttagttggttgattattagggtttgtgtttaggttaaagttttgattctgtccatttaatttgtttaatttatttgggtattatttatttgtatctcttcgggagtagtccattttaggaatctgtcgaattgtaaaaattattttaattatgtggagtctgtgtttgattgtttacagctgatttcttggaatttgtttttggactagttcagtacaagctagctctgaagtgattgctttttctgattattttcattactgttatgcag

SEQ ID NO: 78369 - DNA, 533 bp, Citrus sinensis
  Intron number 2 from transcript orange1.1g031135m (locus o range1.1g031135m.g) derived from phytozome v7.0 (chr-ID sc affold00066; pos 615448 to 615980)
gcagttcgcaccggtggtaagggtagtgtgagaaggtgtgtggaatttagtctaatatccaaatattatctcggaaatagcataaaattgctataaaagtttttgcttgtttgtgtcatgacttaattatttatattgttggctgttttctctgagacttagagtttttcttgtgtatatctcttctttacaactttttgtcatctgggactggtagtaaactaaaacaagagagtaagagtgagaggaatagatacttgagcttattttagatactagcccattctgtgttctgtattttaatttgttgctgtctatgtgaatggtgtaagagatgtagatacttcagctttgtgcattatttcctttgttaattgaagtttattttgtaggttggcatttcaataaaattttcctttccattatgaactatatttgaattttaggttgtgtctatcatatggtaaattcttttttgacacttgctttaaatcacagaaagaagaaggctgttcataagacaacaaccaccg

SEQ ID NO: 78370 - DNA, 659 bp, Citrus sinensis
  Intron number 2 from transcript orange1.1g015362m (locus o range1.1g015362m.g) derived from phytozome v7.0 (chr-ID sc affold00050; pos 390872 to 391530 reverse strand)
tgaagccgaaaagcctgattttattgctttcactggtactattatcatgctatataatgcatatgaattatgagtgtatgctcagacgttgaccttttgtatattttttttcttttacatgattttttttcctgctgtttgtgttcgtgggaaatgctggcgtggaaggctttcttgagaaaaattgtaaattttggtcccaatgaatctttgaataagctgacacctctaaatgctaacaagtttaggaaattattgctgtttggattgagtttaagacctgattgcatggcactcacaaaataatttctatgttgagtggctgttttgtgcctaatcttccatggcagttgagaaagttactagcagcacgcttgctctgctgggtcttaataagtcaatggatctacgaatatcatgagggtgtgtgtgatgagtcacttaaataagatttgatttctcctttttatcggtcttgcttaatgtaattagattattattattattcttcgtactttctttaatcataatacttgctgactgcattcagagtaaagctataatgtagtgtgaaagaatattgatacactgtctatacgttgtctctatttttcatttcaattaatcaggggataatatatttgggtcaagtacgacgg

SEQ ID NO: 78371 - DNA, 555 bp, Citrus sinensis
  Intron number 1 from transcript orange1.1g031214m (locus o range1.1g031107m.g) derived from phytozome v7.0 (chr-ID sc affold00153; pos 199224 to 199778 reverse strand)
tctgttcgcatctcgccacttcagcgctgattcaggtcccctctctctttctccgtcacatcaaaccctatatttttttttttacccttagatctccacctttgtaatcattcatgtgatgtattttgtagtgtttttagttgatatttaaatacataattatttttaatattgatttaggcgttgttgcggataatgctgtaccaaattgaactggattgtttattacatctgtaaattttgatagaacaagagaagtgttgaaatgtctgaaaataggaatgtatatgggggaagaaaaaaatagatatagggatgcaaaactggtgtactaaactagtgtactaactgatgtgtcaattctttattgatttgatgatttccatatatgaccactatgttaatcacattaaattttttatttttatccaaccaatagtgtattgacacaagagtttgtgtctctatctctacttaagaaatgaagacgtatggttgatgtgggtaagtttgttttgtttgtagcaggcacttctgtgaagaaaagagtcgagg

SEQ ID NO: 78372 - DNA, 572 bp, Citrus sinensis
  Intron number 1 from transcript orange1.1g015734m (locus o range1.1g007617m.g) derived from phytozome v7.0 (chr-ID sc affold00074; pos 194248 to 194819)
ttgcaggtaatttcattttctctttggcttctggatccaacttgtcaaaattttgtatatattcacatcagtttttatgtagttatatattaattaacatgcaccaataacctaacaatctgcttccagttagcatatgtaacatgctctgcttctgatgaagattagacaatggtccctgacaaccttacatagagtcaaaatttattctttttcttctatgacttggcctatttctttattcaagagtcaaaattttatatactttcatcagctcgtgagctttatcaattctgagtttcagagaatgtcttataaaaacaaataataatttctcaaagcagtttttggtgccatgtttcttttacatctggcttggagtcgtgattacacttcatctttctttctttctttcttgcatgattgcttcaatcactgagacactgtgataagtttagttctgtgtttccattttggtggattattaagcaggtgcactgatttttgggatagcatatcctggatagttatctgaaagtaatactataatttttctctgatttcaggggaag

SEQ ID NO: 78373 - DNA, 810 bp, Citrus sinensis; identical to SEQ ID NO: 78231
  Intron number 4 from transcript orange1.1g006748m (locus o range1.1g006750m.g) derived from phytozome v7.0 (chr-ID sc affold00014; pos 1870379 to 1871188 reverse strand)

SEQ ID NO: 78374 - DNA, 964 bp, Citrus sinensis
  Intron number 1 from transcript orange1.1g031618m (locus o range1.1g031618m.g) derived from phytozome v7.0 (chr-ID sc affold05138; pos 3662 to 4625 reverse strand)
aagctgtatgatacttctcttgaaattagatttctcatgattagttggttgttgatgtgatgtcaatgcctgaaattgggacctttctgttcagttctaactccactatttcttttaaaaagttagattctctgacatttgaaatttaaattgtttgttgtcatctaactaacttagaaagagttgattaataaatgaacatattgtataagtatgtccaagggtggactggtttttctccttttggttctaggggtatgatttctttatacttgtatctgtagctttaatcttgtgagctgaatgagctaatgttcactatgtgactctgttttgattaaaggttgtttatatatttttctgttagcaaatggcactttgagagatgtctgtttgcaaatgaagctgtgaatttggttacttgaccttctgttttgaaaccatatttctccaatttgattcccaggaaactgcataggacctaatagattcagttttatgttaaagttggtgaatgttaatagaactaaggtttcatagattaggtatggtacctgtatgcttttatttttctatttgtattggttagatttgaaaactattgttggagtcctacctatctgcttaacttttagtggagtgataagataatagggaaaaggagctggtttgatcaagttgtcttgtatttggattttctgatgtgttacctggattattagaaaattgtatttgtgcttcttgttatagcatgattgttgttatgtttgatttacatgccttgcatacaaggtacatcttagactctgtagtctcgggcgcttttctctctgcttaaacttttaggttgtgtgataaattaacaatgttagtacctaagggcttgcttttgccccatagtactacaaaagctgttgaagacgctgatttttgtactttgatcttgcagctcaagagggaactg

SEQ ID NO: 78375 - DNA, 754 bp, Citrus sinensis
  Intron number 1 from transcript orange1.1g026852m (locus o range1.1g020747m.g) derived from phytozome v7.0 (chr-ID sc affold00003; pos 4025550 to 4026303)
gggttacactgtcaaagccactgttcgtgacccaagtcagtatctctttatcacagcagttttcttttcttttttctgttttttaactctctttatctatccatggagtcggagatttgtcacgtggtgcatctgacccaacaagattttttcttctgttcatgatttttgaggatctaataaaatttggcgttcttaatatttgatggtgaagatttatttgctgttatttttctctttaagcctttaaggcatcatttttaagaatggaagagttttcaaattactcttcaggatattctatcatctaattaatgaatattaccacatttaaagattaagatgctacttaaaaatgtagcatttgtccttcctaaattttatttttagcagtggactgttaggcttcttataaatttgaagcagagcaactaaataattggtagacacccacttgatggctaatatttaccgaccacccaaccacttataattgacaacagtgaagagaatatcatttctattagttagtttcttccttgtgtttgtatatttatttatgttctccctcagaattaaggccgttgataattttgaattataaatgactgtaattaattctcctggcactcaaaatattttccactttcagaaatagattcaatatactggtaaacctcattggacgtacgagttctgatattatatgtacaccatagatagccccaagacagaacacttgcgggaacttgat

SEQ ID NO: 78376 - DNA, 555 bp, Citrus sinensis
  Intron number 2 from transcript orange1.1g031912m (locus o range1.1g029680m.g) derived from phytozome v7.0 (chr-ID sc affold00011; pos 1164486 to 1165040)
attttgtatataaagttattggaggtatgataatttgatctgctgtatccttttacatgaaagttttcttgaagttataaaattttcataagtaaatcatgagatatttggtgtttctgatactgctcttgacaacaaaagatgttatttcgcttgctttactcccttgcctttgcatccatgagatcattgtcttaaatgaagtaattcttcaaatcatgtagtattttatgttttatatgcactttgcatagcttttgtttcgcatattcatacattccaatgctacatttgcaaagcagtcccattctacttaactttgtttgcattttggtattttcattctgtttgtatctctttcccacttcacgaagttttagtgtgttgaactcatgctgtattagcacatattatatttgtgattaactttgtttcttgccagattgattcttatttcactatgaagctgtttttaatgactagaatccttgttaattctccgttgttctctgtgaaatagttgcggacaaagaagatacaaatttatcacagtat

SEQ ID NO: 78377 - DNA, 559 bp, Citrus sinensis
  Intron number 3 from transcript orange1.1g033653m (locus o range1.1g033653m.g) derived from phytozome v7.0 (chr-ID sc affold00510; pos 23856 to 24414)
tggcacatataaatagttgtttgctgtacctttaggtaaagtcttgggtatcgattattggggttaggttgctggataattcattattgaatggttcatgtgcttggaatgatatttacctatttactgaagaagataaggtttaagactttgtccacataccattggtttgaaatttgtatgatacatatggtaagggtgtttttgctatattaaagatgttctcctataaaaacttatactagggtgttggcataattatggttaatttgtatgagatttaatctttattagtatattagttttgattattataagtttatgccgatattgtgcatcaattatggtgctaattggaatattgaaagaaacctcttgccttgtcttctaataaagtggaatgggactaagataacaagattcattaagtagatgcacaagcaaagaggcattggtgcagaaaaggtccgtgaaaaggaatagtattgtttagaataataatggttgaaatgatgtatgatgattgtttattataaatttttggtgtaggttacactat

SEQ ID NO: 78378 - DNA, 950 bp, Citrus sinensis
  Intron number 2 from transcript orange1.1g008620m (locus o range1.1g008620m.g) derived from phytozome v7.0 (chr-ID sc affold00162; pos 72462 to 73411)
gctatagaatttccgctggtatgtatttttctcacttattcctcttgttaaatatcttgcaaaacccgtccaagtctttggagcaagagaaataacagttgcagctcttgtacatgtgttatgtcagtgtcacttgcctttcctttaatttcgtaaagtaacagaagttatgtatggaaatcaattcataacgaataaaaattcttggaaaagtcatagaacatgattactgtctcttagttagagatacgtccaaactatcgtctcatttgagctgccgcggggtgaagcttactacttctgactagcttttctacttctataatttacgaaaagagctgtcttttttctaaaaaataaaagagtaatgatacagccacaaactcttatacaaacttattttgtacaaactgacgtggcattaatttattggttgaatgaaaatataaattaataaaaacaaatcatgtgggccaagtgatatttaattcaaccaatcttatcatgtcatatcagtttgtacaaaataagtttgtacaagagtttgtggctatatcattactcaaaataaaaatacatttctattacgagagaaaacttgtggtgcaactgtagtaccgtgccatagttgcatccagccgttggatgccagtagaccccaccaattcaagtgcatccaacggttagatgcaactgtggcacggtaccacaattgtaccgtagcctgatccctattaccatggatacaggcagtttttgtccaactattaaaatcaagcatttgcttatcttgatttggacataatcagaaacctatagagataactagaagaaaaacacggaaagccaattcaaaaaactcgtattagttgtcattgctataagatagtaaacatggaattctaaaacagaaatcatttgatgcactaatctttcaaatggggttgcag

SEQ ID NO: 78379 - DNA, 880 bp, Citrus sinensis
  Intron number 3 from transcript orange1.1g028884m (locus o range1.1g028884m.g) derived from phytozome v7.0 (chr-ID sc affold00259; pos 60447 to 61326 reverse strand)
gctttgttcgtggccagtttgacccgacatccaaggtaagaatatgtcatcgctctgtactttgctagaagtgttgttaaaattgtgccttctttgcctgatagcaagtgcaaagcaattgtcaggtgcttgaaacatgctcttcgctaaaatgcaaagcagaaaaatgcaggccttttttctcgttcagatttataaaaatgtcaaatcaattttatctcttggattagcatcaaaataaaatgtatcccctcatcgagaggtctgtctaccattcttttttgttgtgcctcaatgtatgcatatgcacactcatgcaaatagtgtggtctatgtagtatttagatctacaacttttgtgccatggcttagcactatgaccaattgagctaattggcgagtttcattgtatatatttatgctatctttttacacttgagtatagttattattttttactgaaaatacaagcattttgcacttttaggactagggatataacctctctttagaaactattgtatataaactgacatgatgctattatatgattgccacctagctcacattgtttattgtcgttaatgtcattaatttttgtgttttcatcaaaccaataaagtttgtatccctaatactattgtaactctttatcagtccgtatttcattttatgctttgtgttcaagttcttggagaacttcatgcttaaactaccctgaccttgtaataacatgggcaagaatatcttatatattgtcaatgggaatatctatctactctcttaaaggtacttgaagttatttcattaggaattcactcatttgttggtttttatattttcaggtaactgttggagcctccttcttgtcacagacgat

SEQ ID NO: 78380 - DNA, 538 bp, Citrus sinensis
  Intron number 1 from transcript orange1.1g029975m (locus o range1.1g029981m.g) derived from phytozome v7.0 (chr-ID sc affold00014; pos 550204 to 550741 reverse strand)
aagacatcaaggtaaataattatttctatatgcttttgcttaattatttaatcgtcgcacagaattagccaaattaaatatacatgagatttgtgcagttttttttttttggatttatgtaaactattttatgtgatttttatgttattcttctgctgatctctccaagtgtttgcctcttgcaaattgttccatgcgttttttacttgatctgtttatatataagactatcaaatagaaaaactttatgattagattggaactttgtgatatggttgagtttttgtttggttaatgatgcatgcttctttccaataactgtatttgagttgtgttttatattttttgtttttaatttgttgtcaatttggttgataatagattctatgtttcaagtgttaattctatagttttctctttcgtttggatgaagagggatagtgaaattcccagcttttgtatcttgttgattatatttctaatgtgatattgtttttatgcaggaactgttttctgaagttggtgacttgaagcggta

SEQ ID NO: 78381 - DNA, 439 bp, Citrus sinensis
  Intron number 3 from transcript orange1.1g016346m (locus o range1.1g016322m.g) derived from phytozome v7.0 (chr-ID sc affold00112; pos 194376 to 194814)
gagttcggattgtctcccagactgaaactgaagctgtaagatatttctattgtgataactatattgaaatgaatggtattgttcctttctttgaatatctgttctttgatattttaggattttagattttttatgcttgaattaaagtggaactagtagaaaaaagaaggagaaatatgaaaaataaaaaagaaacttgaactcactttcttgtcgaattcatttataattagatagtatttatgtatggtttttgtgacattgtcttaatgtagtgaacacttgtatttgtttatataattctgtgattggaatcgcaattttgcatctctggtttctggatctgtgactatttctgactaatttcttgcctcatctgtttatgtgtatgtctgtttgctcagccaccgctgattaagccatctgacaaccagttgaa

SEQ ID NO: 78382 - DNA, 448 bp, Citrus sinensis
  Intron number 1 from transcript orange1.1g016007m (locus o range1.1g016007m.g) derived from phytozome v7.0 (chr-ID sc affold00003; pos 1279942 to 1280389)
ttactgcgacggccgcctcattgttgatttcataggtatacataaatattcttgtttaatttgatgggatttttaaggaaaaaaaaaggattaatagttaatgttacacaaaaatttcttaacaaggtagtgaggtgtccgatgagtagaagaaacaatgtgttgtctttttcacgtggaatgtttgataatatccaccgacgctatcaaaatcaaaatcaaagcttcgtccacttttagatttggtcccacgctgaaacttctaatgtagagcacgcatgcagcttgtcccttttttttttcttttacttttatcttcaattatttcaagcgtgacaaagatatttttaatcatgtaacattttattatttatttatttacttatttattgtgaaaaaataaaaaatttcagctgaggcctttgggttaccgtacgtgagtgcatat

SEQ ID NO: 78383 - DNA, 413 bp, Citrus sinensis
  Intron number 1 from transcript orange1.1g010753m (locus o range1.1g010753m.g) derived from phytozome v7.0 (chr-ID sc affold00126; pos 15355 to 15767 reverse strand)
cccagctcaaggtaccattttcttctttcattatctattttcgttcttgtattaagttgttgatttgattacatgttttttatgggcgtttgtgatttatgttgcaaataattgtgtttctttttttttttgtgggggggagcatgtgttatatgtttattgagggtgacaccaatgtgtatatctaagtaaatttgatgatggggaaatttttatttatttatttgttaaatgatgcagttgaccttaccagatatgattatgttggcatgaatgttaattagaagttctttaggcattgctgatattatttccataattatgttgtagttttaaatgttgccttgtattgagtcggctttattgacaagggtttttgaattatttttttttttggtcaggctgatcaagag

SEQ ID NO: 78384 - DNA, 903 bp, Citrus sinensis
  Intron number 1 from transcript orange1.1g018491m (locus o range1.1g017340m.g) derived from phytozome v7.0 (chr-ID sc affold00003; pos 4344426 to 4345328 reverse strand)
agcgcttgcaggagcgccccaatttgcattatcaggtacctttttttttccatttttgtcatttattttcaggtaaagttgctgattaaaaaaaaaaaaactcttttttgtatttctaaaaaaaaaaaaaacaagtattgaatttgcaataccagtagcacgtgacaactttagttttaatttttttttaagattttgttcgttgcggagaatttgagggagaataagagagaaaagatgagaatttgaataaaatgtgaggaaatatgagagaaatttataattttcaaacgtaaaatgtttggttggtgagaaagtacgggaaagtgggataaatgtttgtgcaaattttggcttttagttcactaaatttgcttttaccaggtgagaatttaggtatttaatgttttttctttttttgactaatctttgtttggtgatatataaaatgtcggggaaggaaggaaaatttaagaatttgaaaaaaaagtggacaaaagggtaaaatatctaaaattttaaaaataaattgagtaagcgagaatttatgaattattagttttttttttgggggcattagtttggttactcaagtaatctcacatgtgtttggtattacttatgataaaatagctagttcctttcagtttcctactgctgttgggcttcgatgagtttttagaccggaagtgaagtcaagcctatcttctatatgacattgttgtctaaacatttccttcaaggggatggagattcaacaagatgaaattaaatgaggataattttctgcgttcttagtgtaagcttgtgttggcatatttcatatcattaatgctaagaatggtttcatttgtgaatgggactacaggttggggtgacaccagaaggagtagaaattccaag

SEQ ID NO: 78385 - DNA, 940 bp, Citrus sinensis
  Intron number 1 from transcript orange1.1g014233m (locus o range1.1g014180m.g) derived from phytozome v7.0 (chr-ID sc affold00005; pos 154221 to 155160 reverse strand)
tgggcccatctcttcttcatctgatcttgcttctggttagtctttttttttttttaaagtctttgaggtttgatcacaaatgggtgtcttctcttttttttttttggtctaataatgtgaaaaatgtttgctttatatgtttttgcttttgtactttgatgagtggctttgcaatttttttccccttctggtgttatagatcgtctagctggaaatttttttttgttctttctctagtttagtgggaaagcttgtacttttttgtggtttagggatgcatgctgtgtttttgtgtgcgttattaaatgggtggccttgattttcttttagtcatgtaacaatccctctctctttctcatggtcgtgggggtgggtgtctttgttatggattagttttagtgaggtcagtgatggatttgttagcttttgtctgtgaattctagctctctcttttattttgcgtcattaaaattttcttcaagttggtttgtagagtttgcaaaaagctttgaacttttgtttgattttgctaatgttttctctgctgttgcctttttgcctttggatgatgtggctttacaatgttgtgttttgtgttttcttttacttaatttttgttacctcttggggaatgagcatgttgaaactgttgacaatgttgagcaatttattcattttcttcagagaatttttcttcatagtttgagatatttaattaagcatctctttgttttcgtgtcattcgttgtcttctctcttgtattggctacctcagtggcggacttttttaatgttgaagctttcttgtggtaattgtatttctaaaatttgagtccttatgttttgtggactgggactagggtatgaaaatctaagtttaataccttctctcatcaatttagtagaaaagcaggtcggaaatcatcttgagggggttcca

SEQ ID NO: 78386 - DNA, 513 bp, Citrus sinensis
  Intron number 1 from transcript orange1.1g020095m (locus o range1.1g012734m.g) derived from phytozome v7.0 (chr-ID sc affold00061; pos 373713 to 374225)
cctctcatcactaaccctgtcgttaacaagaaacggtatcgctttttatttttttcgtttactttttatttttccttttaaaaaagcatgcataatttcgtgtttcttccatttattattctgttttttattttattatggaaaaaaatatattccgggtagttagggttttagcgtcttgttgtgtcattgatgctaaagtggtccttttgattgttagggttttgtgataatcgtctcatacttttcgttacggctacggtcgatggttctgtttcatgtattaaattgaaattttgaggtttacagaggaccccatcagttgactacggctctttttcagtttttggtattgagttttaggacttgagcgaatagaatttttgacactcagtggagtgtattgcctgtgaatcaagtttatcacattgtttgataattagttgcgttgtcaatttgcactgctaatgcatgtcctttcgatgttggccaggaaaaaagctattggattgg

SEQ ID NO: 78387 - DNA, 604 bp, Citrus sinensis
  Intron number 1 from transcript orange1.1g029973m (locus o range1.1g026785m.g) derived from phytozome v7.0 (chr-ID sc affold00003; pos 4360353 to 4360956)
gtcaacaagcgcaagcctaaacccaccaagcttaggtattggttttcatcttttcatttattgctatatttctcgtctgtgctttcgcttctattcgttttgagtttagtaatggagtcgaaaatttgatcctttttaatgaatttatatctcttgtgcttgtaagttatttagatttcagtactttttttatctttttcatgtatatgttattcatttgtggtggttaagcatgaatcagcggataattgatttattgttatattgtggtttgatcaagtccgtttgtgttcaatctttttatcggcagcttactagatgaaatgctgaagatgttgactgcttctgagaaagcattttgtgaatccttttgcatttggcttattggttgttgtatttgtttatgtttatttagcattcattgttttcttaggtcctacttagggtttgtcaaatcagcttcactgactactgtttatatgtccccaactatgctatgtatcatttgatttctagggcatgttttcttagggctctatttaatttgtttccacggattatgttgtcagagcaagcatcaccccagggacagtgctgattatac

SEQ ID NO: 78388 - DNA, 702 bp, Citrus sinensis
  Intron number 1 from transcript orange1.1g003279m (locus o range1.1g003177m.g) derived from phytozome v7.0 (chr-ID sc affold00005; pos 2832716 to 2833417)
tcgcaaaacaactgggaagctgataaaatgtaagtgttttcaaacaactgaaagattttgttttattttgctgttttttgtcattaaacttttctgggttttttgtttaggtttgttatcttttagtgggtttaatattttcttgttctatggtttgggtaggtttcttttttcttttctttctttttttgtatttttgtgtgggtttgtgctttgtattcatttcttaacattcgactctgtttttcttgtttgctattgataaagtttcgaacttgtagcaaatggatgcttgttttgggccctggtgttgtttattagttttgtagatactggtttgtgtaaaaaattgggtttttaagctcagtttttggctttgatttgttatggatgttattacttatgtttttttttcggatgtctttgctttgtatcccgttgtggtttatattctttgcttatttcatctttgattttgttgtgcttgttgtttttttttgacaatgatggaattgccatatgatgatgctagggcattttgtttgttcttttttggggtgacattgaattgtatcttgtttcactgcctcttcgatgatgctctcacaaagtctttttcgcttttgctccatttagtatttgcttatcctcaaattaactggtgatttttttttaatttcatttctttggtcattaggttgg

SEQ ID NO: 78389 - DNA, 906 bp, Citrus sinensis
  Intron number 1 from transcript orange1.1g020525m (locus o range1.1g012761m.g) derived from phytozome v7.0 (chr-ID sc affold00003; pos 3514063 to 3514968)
cctttgggatccttggaagatcaccttcgtaagtttgtgtcgcatctaccccccccaaccctaaaaaagataaaaaataaaaatcagaagtccttttactagcctgtttgagatgttcaagggaatattatgcctgtgaagctgagaaggtgaacaaaaaaaaaaaaaattgcttcatacttgtcctttctatgttgggctaattcttgtcctttgtgggtttatagaatgcttagttttcagagctattcttaattctaattttagctattttgagatccttcttttattgttccaaatctgaagataaatttttagttcccttattttagtaatcaaagctttattttttcatctcattacttatgcttttaggtgctttggagatgaattgtattaacctgtttgctgcagatgttctctacatgctgtagtatagagaaaagtagaatttggttttgcaaaagttggtaccagtatcggtggttataactagaagcaagttggatactgagatttaataaatcaatttttattttttttggtgggggggtggagggatagccaattaggaagatgttttaatcttgttgatcacttgcgtgctgcctgatgccacgtgctttgaatttttagcattatgcttcaaatgtagatggatgagtgatcataagagttgaaaagcaaaaagataaacttgatagcattttacatgtttttaatgaaactgtgcaaagttattgcgcacaaatgtagcaataaatttagttttatgttcatgaacatattcattctttttggccctttcacccaagcaggttatgtattgaatataagtttattgacaaatttgttgattgttcctgtttagatttaccacctgataaggaagcacttgattggaac

SEQ ID NO: 78390 - DNA, 596 bp, Citrus sinensis
  Intron number 5 from transcript orange1.1g010906m (locus o range1.1g010906m.g) derived from phytozome v7.0 (chr-ID sc affold00023; pos 1382811 to 1383406 reverse strand)
agaatagtgagagtcattcaagagcaaggttagtgagagtcattcaagatcaaagtgtaatctgtttgttattctatgcaagtgccattttgaacaatgcaaattcgataatttgtttcattaagtaaattctttttctcctttctaaaacttttctccattaatatgatttcatatgcattttgtatactactatctttcttgaactttgaagactttttcatgcttatcgctttgattgaaattccattactttttctgagtggacggtagttggtttgtgggttatctttcagtgtaatgcaccatcttgtccaaaacactgatgcttctcacaaatagggtatgtttgaacatggatgtcatattacattgtttccatttctatgtgtaaatagtactgacattgagaactgcattatctcactggttacattagttggtagtcttttcccttttcttttattcttctccctttgttattttctcttttaaggttaaactttgttcaaaaagtattcacgatactaatgaaacttaactgtttctgtttcctaacagcatagagctttctctacgcaagagttattatattt

SEQ ID NO: 78391 - DNA, 770 bp, Citrus sinensis
  Intron number 2 from transcript orange1.1g016644m (locus o range1.1g016644m.g) derived from phytozome v7.0 (chr-ID sc affold00049; pos 339247 to 340016 reverse strand)
tccactccgcattctccttgcactggctgtctcaggtgatcattaaattatttttcttgataactttggcgttacctacgtacattacatgactttttgtcacggttcataattattatatgttacattcaaagttctaagtttgatatacaaaataaataataataataataataataataataatagcagtagtagtagttcgttccctaggctgatttttcgggtgtaaattataattgtattagacaagaaattttttagtattcaaatcaattaagagtcaaaatgaatgatctcaaactctgaatttgtgccagcttttagaaggtcaaaaagttgcagcatttagcaaaattgtcctcaattggcagaattttacaagcagctgtttctcttttcaaaatcactcaaattactttttgcttttgttctacagtaagaaaatgacaaaataataaatagtaataattaaattcaactaataattttagagatacttaattagatagacgccgttgtgcctgtaatgtacgtgacagattacatatcacttaattatcaattgatatttaatagctcgattaataatcaagtgacatgtgacccgtcacgtataataaccggcgcaccacatcattgttctatgtttagaagcattccttggaaagtgccttttaccgtgacaaaatcaatttgaggttgtactacacactaaagaataactttgcatgaaacaggtgcctgagagtgctcttgataagagatca

SEQ ID NO: 78392 - DNA, 940 bp, Citrus sinensis
  Intron number 1 from transcript orange1.1g008395m (locus o range1.1g002644m.g) derived from phytozome v7.0 (chr-ID sc affold00101; pos 418727 to 419666 reverse strand)
cctgctggagcttgttagcgctgagcttgatcctagtaaggaatttaaattatataaatcagatcattactgttttcttttctggtaaattttgaattattttcctcttaactatcttcaaattactctttttttaaaaaaaaaaaaaaccttaatttatctctatttttattccaaacataaaggaaaaataagaatggatggattaatttctttttgtcttcttaaaaaaaaaagagataaattgagatttttaaaactaaagagtgtgatttgaaaatatttaattcaaaatggggtaatctaaaatcaatactatcttttattgttacacaaaaatttttcaattgttagtagtttttattgcccttaacctcttgctccaacaagtgaggacaaaccaactcaaagagaccaaacgaactattattttcataaaataaagaggaaaaagcgatcaagaacctcaggatttgtagaaatatacacatagaccactttagttttaaaaatattacagacatgttttttggtcacaatacttatttttggataattactctctttgactatggttttatttaatcttaaaataattttcaaaaaaggagtctatatgacttcttgactaagactggttcagatagaagactgacaatttcagctaaggaagagaagatcaattacgtggtgcttcatcggctagcaaatagtccacttatacatcttagtaaaccttaagttttttatgacttttcctttgaagtaaacaccgctaagaaaattcggatatcaatattttttttgttgggaaataaattttttgcatattcacttaccattttgtttgttcgttaaaataatgactgcaaatacgtattttgtccaaataaatatatattcagagacgggagcagagaagcccaccatcaaaggtttt

SEQ ID NO: 78393 - DNA, 825 bp, Citrus sinensis
  Intron number 3 from transcript orange1.1g015497m (locus o range1.1g015418m.g) derived from phytozome v7.0 (chr-ID sc affold00252; pos 106632 to 107456 reverse strand)
attacaagtccttagaccaggtatgattacatgttctgagaagcaattttatgtagtttttggttccttctcatgaatattcaaacctttcatagcacattttaactttcttgaggttgccttgagaggaagttttgtataactactacttgagaattgcagcctaattttaatttgttgtgcattgtcttttcccaattcaaagtctttaatattctcttgtgtcattttcctgcatcattggttttgcaaacgtttaatctttagctgtctttgattttctgctattttacctgtcaaaaagaaagaatttcatagttctgttagtaccaactatgttaccaattctgttttggatgcaaaagtctcttatgggaaatgttttatttgtttaaagtttgtaatataattccataatggtggtatgtgatcacttcttggaagtattatatgcagttggttgcacagtcaacaagggtggtcaattctagattttgcttgtattgtatgtttagcttagctaagggatgcctctaactgacctaactggcaaccatattcagtagtttttaactagtgtaggtagtaggaaattcgagcagcaataattgacatcggaaaactttttctataattacctatgcttcattgtttcaatatgtatttcgtcattggacatatagaaaataatgtagttatgacattgtgggggtagagagtttcttgccttcaatgatgtattttccaagatatcgagtcctagcagaataagtaattaccttcttttcaggtgactgaagctcttgctcgtgctggccttgaatc

SEQ ID NO: 78394 - DNA, 492 bp, Citrus sinensis
  Intron number 1 from transcript orange1.1g015497m (locus o range1.1g015418m.g) derived from phytozome v7.0 (chr-ID sc affold00252; pos 108126 to 108617 reverse strand)
actaagctgtacggtacattcagcaatcctcaaaggtaatgctcgaaacagaaactcacttcatcatcatcatcttcttgttcgcatcatccagctcggggtatgttttaacgtttctgatgtagccgttagtttggtgaactgcccttgaattttggatcttgaacagtaacgttttctttcttttttttttttttttttgtctatttttgcgtcatagtgaaaagataataaaattaataaataagtaaatatggcgtgtgttatttgatttggtttatagttgtcatatgtcattgcataacctgccaaagttggagtctctgtgatttcgtattaatacagtgtgtaattttatttataataaataagatgtgatttgaaagatttataatgatacttaacttataagttttttctttcctttttaattttttttttgtttttgcttaagcagttacgtgagcagttcttgcatctggaagaaagctg

SEQ ID NO: 78395 - DNA, 408 bp, Citrus sinensis
  Intron number 2 from transcript orange1.1g031812m (locus o range1.1g031812m.g) derived from phytozome v7.0 (chr-ID sc affold00011; pos 565867 to 566274 reverse strand)
aacaaaaggttcctattaatattttttatatttatttatttttttgcttcttttgtactcttcgggtttagttggttaatagatttgttctgtttagctggtaatggctgagtactttaataaggatgtctctattggaatctcaatcttttgttttgattgcaatttagtagaataagaattggatcttaattatgtatgtagtaacacgctctattgtacttattgctagtttattcatttgttattttgaacctctcaattgcattttagatgagcttttcattgtttctttttcttggattgttgtgttgagcttgtgttttctgtttgtttgactttgctgaattttggtttatgttgtcttctctagagctggtgagctctctgccgctgagcttgaccaac

SEQ ID NO: 78396 - DNA, 274 bp, Citrus sinensis
  Intron number 1 from transcript orange1.1g028545m (locus o range1.1g028569m.g) derived from phytozome v7.0 (chr-ID sc affold00065; pos 528811 to 529084 reverse strand)
catatccgttcaccaagccctcggcggcggctcaggtcccctcctttctcttaaaattctcgcaaacattttttttaaatatatacatcgctatttatccgtacatacaataagcaaacatgattttgattcttaactgatttgattattctaatattcttttctatttttattttttttgcatctgaacactttggagttttttgtttttattttaaattattttgagttaatcataatattaattattcgatgtagttgctgacgtgttgtt

SEQ ID NO: 78397 - DNA, 441 bp, Citrus sinensis
  Intron number 3 from transcript orange1.1g007334m (locus o range1.1g006555m.g) derived from phytozome v7.0 (chr-ID sc affold01120; pos 31443 to 31883 reverse strand)
tgaggtaagtttaatagatgagtttctgcatattttgtgatccatgagtgtttgacttgacttttcaatcaaaggctcatgatgacaaatttttgattgggagcagtcgatttttatgaaatttaaattcatttgaatgagactagaatggtgtaacatgcatattcatcaaatacaacaatttgttcggtgacaatggaaaaatttctgattttacatgttgtttctaatatgattgcaaaattttagtttttacatcaggttgagcttttctctgtatttctgaaagtttgttatgtacggtattgattgaaaagcattcctaaggtgttgtatattattgctatttcttgtctaattttggtgcaaaaatttgaatcctttcttggtgttttcctgtggctagatctggattgcatcctttagatttggaggttggaa

SEQ ID NO: 78398 - DNA, 401 bp, Citrus sinensis
  Intron number 1 from transcript orange1.1g004902m (locus o range1.1g003481m.g) derived from phytozome v7.0 (chr-ID sc affold00014; pos 342135 to 342535 reverse strand)
tagacaattacttgagaatttgtgttgaagcagaggtgatcttgagcttctctttctcaatatctataagttgtttcgataaatattggctgttccaccatgttgattccctgtttttttcttaattaaggcataaaggaaacaagtaataagccctgtagagattagtaccagttaagttcaatattttgttcatttgggttcgatcgcgtcttagtgctttgattcaagtataatgatacagacatcttttggttggatgagatgctcgataataattcttactttatgaaaagaaacttaaatatttgctaggatcactttgttattttgtagggaaatctaaggaagacagttaatttgtaggtgaaagcaaggatcattacaactgaagctgacaa

SEQ ID NO: 78399 - DNA, 1003 bp, Citrus sinensis
  Intron number 4 from transcript orange1.1g021387m (locus o range1.1g021400m.g) derived from phytozome v7.0 (chr-ID sc affold00112; pos 87512 to 88514)
gttggattatctgaacgcccaccttggttttgtaggtatgtacatttttatcgtgcttactttccatgtcttttccatttttataaataaggaatcaataggaaggctggttgtgactgatgatgataatgttaaggaccgtagtaattgcattgagctttgcaatctatttatgttgatgcacagcgaagtcgttcagtatacaagcctctcttttgtcaaaggctgaatgtttttctttagttctgatttaataattgactatcattttcagcttatgtaattaacttaacctgctgcccaaaacttttagaagtttttccactctttttttattcctttttgggttcagtatattttcatttctactttatgttatgaggtaggaaaaagcttttttggtgagaccattttcctgatttgttgaaagaaaatgatattaggaaggaacattgaaggatgcttcttcaatttccaaagggaatggaagaataaaacctattgaaatataattttatgtcttttttactttagaaattacagatgcaaattaatatatactactttaactttcaaagatatggtgatcagactaataataaaagtctctttgtggatactggattgtagaaagtaacacccatctcctttctttttggaattctattaactaggttggaagtatgtgtacttttgtatctcctttcgctgtgccctatttgctttacagatattacttggaaaataaaatggtagacaactaagttgttgctaggttgaatttgatccatttcttctcaaatttcggtattattcatagaacactaacacttaagagagttctttgatttcattaaatttgtgagattgttcatgcatagaacttagcttgcacttactatttgcaagtacttctaatcttatgattgggttcttgaatattactctgtatatatctgtttctgcagtctctgcaacactaaggcaaccagtaggcaaaccc

SEQ ID NO: 78400 - DNA, 586 bp, Citrus sinensis
  Intron number 1 from transcript orange1.1g034974m (locus o range1.1g034974m.g) derived from phytozome v7.0 (chr-ID sc affold00083; pos 474318 to 474903 reverse strand)
gaaattatcatcttctgggttaagttttgttactggtgagcatcttcctatgatcttaatcttgtcgtttgattttgttttcaagtcgtaatttcatgtcggttcaattcttattcatattgcttgtgcagcagattaaagctttacattcaagattctttagtattgcaaccacacccactgacccacttgttgattgcttgcaaattgatgcctgaatccatacgctcattatttactgttttgtgaatctttttagggtcaatttggctttaaatctcacagaccatatcagttcatggtccatttagtttgatagcctcagtaggacatatatgttgctttttgattatcttatgtttttgggaaacgagtagaatttgaaatttttttccccttttttcacaactctttgacgaacttgccatatgtaccgaattcagaagtttgttcttaatgaaacttggagttttgaaaatgttctaatgtcatgcgggcctgacctggcctgaccctcttgtgtgttggattttaagctaacgtgtctatccaaaactgagatatcagcttcctttcatgcagaaga

SEQ ID NO: 78401 - DNA, 983 bp, Citrus sinensis
  Intron number 1 from transcript orange1.1g027119m (locus o range1.1g027072m.g) derived from phytozome v7.0 (chr-ID sc affold00014; pos 1196827 to 1197809)
tcgttcagctttttgccatcttttatcatttttctgtaagtctctcgttcttactcaaatctttcataagttggttattccatttcactaaaattacgtgcatttttgcttcgttcttgttggatatcttaattatttaaacttttttagctttgttgaattcaattcatggtctcaaaatcgcattagacaggacctttgaaccggaaaggatcataataattttcatccttctgaaagtttgatgacagttttattctatttcactaatgcgaatttcttctggactaatttaattatgagtttgagtgaactgaacagctaggtttagtgagacaggtacactgattcatctaatatatttatatatgtcaagaaatatatcttctttctcattacgaatttgtatcccaagtaacttacaatttatacaaggttaggaatactcccctactacaaaaaatcatcactggggagatttggtttccttgttaattgcagtttagtttgtttgcgagtttctagtgtgatagaaacagcagatctattaaggaattggatattattggcatttttgcgtgtgcagaaaatactaaagtaacaatttttcacatactggatttttttttctcatcatcctttgaagccctggtttttcttcagtataggagttttccatgtaaattaattggttttattccctatctatattttttgcttattattgtttgatatttttgaatttttgcttgtgagatcttggataggattaaaaattgccgacaatatacttgtaatctatcatagatggatatatattttgctaggtttattgtttttatacaaaatccttatgtcatttctatctaaaattttttttttctgtacttagtccagaatcacaagaaattttaatgtttaaatgggtgatgatttaatctgatgtttatttgattaggaatcagttcattgatatctgcata

SEQ ID NO: 78402 - DNA, 673 bp, Citrus sinensis
  Intron number 1 from transcript orange1.1g028637m (locus o range1.1g025129m.g) derived from phytozome v7.0 (chr-ID sc affold00094; pos 333569 to 334241)
ctccacccacttcctctgcttcttccactcgtcaggttcattatttttcttttcatctccaccgtccgttttttaaatttaatttaattagattagatattttgcgatctatttgtgtctgattatccgatatttcggatcttgttttgttaattaacaaacataaaatttgtgaacacttgaggaaaatgttttctaaaaattaacacagtgaaaatgtctcgaattgtaaattaaggaagaaatcgtaaacatgttagaagattgttaatgtaaattctatttttgaatttgtaaaataaaaattacaatttggtaaatagtgaatgtaggcaactaaatgataagaaatatagctgaaaaaaacaagataagagccggtattataatttattatccgtattttaatatattatatatcgtttttgttataaaattttgatgaagcgaaaatgtcaaaaaaatgtgacagagtatatcatgtactattcgggatttgtgagtctttgttatattactttgtacggactaatacacatatatgcaatgtgtggtggtctacgagcagaaatattttgaaattttattcgtatttttattgtgagaaacatatgatactagtatccatgtttgatggtagttctgcctctttatattgtttaggcttgctgtt

SEQ ID NO: 78403 - DNA, 1037 bp, Citrus sinensis
  Intron number 2 from transcript orange1.1g030573m (locus o range1.1g030573m.g) derived from phytozome v7.0 (chr-ID sc affold00162; pos 130206 to 131242)
ttggtcaaggcccgagtcctcctgttggttttcaggtatgtcagttactctggtttgtaaaaattgccttatctacattctaacaaaaaataactaaaaatgctgattttgaccacaagtatatcactctctaagagatgcactatttgattgatggcctcgtagatatattgatgctgaaatatagtcgattacaatggctttttattcttataaattcaattaaaggctcttgcctatatcctctccatcttctccaggataataatttatgtagacttctaacagcattcagaagtacagtaattgcattataaatttcttgttttgacactccatcagagtttaatctgtcgattgaggagagcatccacttcttgggacttgctagccagaatgagccttttacctttcagcacctatctagatggctgtttcaatctgaggaaataaaaaattatgcgtgtgcaaacttaattttgacttgtccaacattctatatttggaacaagaccattacaattcttaaaattggatagttgagagcagtttgaagttgctgttaaccaaacatatcaagatatttacacattggcaaatggagaaaggaagagagaacagagagatagatttgccagacagactatgaaactagattgaattagaagttggcatttagtttgtcaagcatataataatttgagctagacctttgcacctaaacttcagtcactgcaaactctgccatctgcaccacgtatgaaaaatgtaaaagagacagagaattcaaacttgccaagctcatatgatggaaatagttaaatgaacccgatattttcagtgatcttctccagtttaatttgttttcattttaatataaaatactagtttggttctttttgtttctactgaaagatgggtgggtctgccatatattgtctgcctaaccaatttattgagatttcctgttgcttcttcatgtattattgactaaagcttacatcaattgtactattactctcaggtggctgctaatt

SEQ ID NO: 78404 - DNA, 732 bp, Citrus sinensis
  Intron number 1 from transcript orange1.1g013253m (locus o range1.1g012629m.g) derived from phytozome v7.0 (chr-ID sc affold00066; pos 498677 to 499408 reverse strand)
ggtacttcatttttcttagatctgaatcattttcttcttttaattgctgtagatctcactcacacactgaactttcgtggatctgatctgactttttagaactttatggactttattgtaatgtaaatacccatttcttagatttgcggtttgaatctgcttggatgatttgggatctgggtcacgtttgtttttctctttgattggttagaagaatgtactcaagtttggttattaattttaccattctgtaggagccaagaggttgctttagtgtctgttataaatacattgtcatgacttgtgtgtgattcacgtctgtgggagagatctcttgatggtatttacacattagatcatcagctttctctttagttagtaaaggatcatgtaaagtcatgtttcttgctaacgagagatgtttactctggaatacgaattgggtcagcactttgccattctaaataatttgactttgatgggtagtcgttccagaagctatcaacaccagtcatgggtcatggtaatatatcactaagctttgtggtttatgccacatttttgcactgggattctcctcctttagctgtgatctctacttatctgttgtagtagttgttttataaaataatctgtttgaattgaattgaaatttcttgatgtatttgttattttttgtctgatagtttgctgtttacttggcaatagctggggattggttgcagggtcctt

SEQ ID NO: 78405 - DNA, 796 bp, Citrus sinensis
  Intron number 1 from transcript orange1.1g048225m (locus o range1.1g048225m.g) derived from phytozome v7.0 (chr-ID sc affold00109; pos 100815 to 101610)
ccaggcttctgtcgacgctccgagaccagaagctggtataattcatttcttgataacccttcattttttcacaaattgtatggtcctctgtagcaatgagattttatctaataacaaaattttctttacttaatcattctgggctttaacaaacttagaattataatgcttgcttcagttttttttttccttctgtgattcttttctcttgatgtacaaggggtgtgcagaagggggttcatgaggtagtcctctggttgtattttgaactttaagggagttagtgaaatcttgcttcattcgtttcaaagtggatgtaggcttacaatgccaaaccacttaattcttttttgtgtgctttacatttccaatttgctcatgcttcttctttattgagttagatcatttgtggtatggattataatctctagtttcgcttaattagggatttgatgattaattgcttcaagattgggtctaggggctaaagatcagctgcatgctggtttgagaatcaacaacaccattagtttctatttctttatattattgtttaatgtggtgaaattatgattatcctatgctaaatctttttacttgcgagcttgaattttagtctgcgagaattgaagtgtgctacaatttctgagatcaatagcatgaaaaaattgatttagtattaatattgttgttgttattattggttgattttcacttgtcttcgaatacatgactctctgactttatttgcttaaatgtagagaattctaaataaaattgtgaggaagatcagtca

SEQ ID NO: 78406 - DNA, 772 bp, Citrus sinensis
  Intron number 4 from transcript orange1.1g013706m (locus o range1.1g011578m.g) derived from phytozome v7.0 (chr-ID sc affold00196; pos 266790 to 267561 reverse strand)
gcattccttggaaatcctggaacaggtactccgttgctgattattttttataagatgataatgttttcttgtatgtatcaatggcaataattacattcatatctgttgctactttatcttctgtaggagactatctcataatttggcattatcgttggtaacaacttggtgttctcattgtcacttttattttaagaaaaaaaaaaaattagtttctcattttcttctttacacttgacttcccttagatttccaacttcatctgatgcatgcatcatattgatggttttttaagcatgtaacattacctcagcttgtctagatacaatttggcagtgaagaaccatggtcaataaatcttcaacttcttgatttggagctgggtacactatattgtttttttgcatttcaccttgataagggccatacttttggttcataggcttacccatccaagtagtactctttgtattgcatggtcaagtttgttccttgatgttcttatggtaatactacgtcaaaatgtatgcacttcatcatgttgatgcaaatatgaagctttgatctccttttcctcaatacacattttagtgatcaaagtttgctttgaagagagggaatctatttatagacacgtattggtttgatttgtatttctaattgtgtatcattgtctcaatctagtttggttaactgacatgatttttttttccccctctttttgataagggttagctgacatgattaatcacacatgataacagggaaaact

SEQ ID NO: 78407 - DNA, 962 bp, Citrus sinensis
  Intron number 3 from transcript orange1.1g042305m (locus o range1.1g042305m.g) derived from phytozome v7.0 (chr-ID sc affold00011; pos 2131985 to 2132946 reverse strand)
gatcaatctgcatctcagaagaaggcaaaaggaaggtatgcctcgaggttatttaaagagttttacggtttgctttatctctatttgtccatgccatatttccttaggctgcagtacatttgttgaagatttttgaatctctaggttataggtcaattatcatcactgagagcaacgcatttggaacccttctagctgatgagagtagacatttctcattgagcagatgaatgaatctgtcttggagagctgtgagatccagaagcttctttctggatttaaatttggttctttaggtgaaaaaaaagaatttgaaaaattggaaaattatgaaccatgctcccatagttatgccttttattttaaagtagtaatattgactagattgctatttagactattatatatttgttgatttgtgttctttatctatatagactattggctgaacttaaatgtatagccatgacttgttttttatttttatttttattttttttgatagattagttgtgacatgttgagtgaatactcttgccttattatttaattccatttcccgttgtctcttattttgcctgcaatgtggccaaaattgtatggtgctgctgcttccattgcatgagactgaattaaggagatcttggggtgggatttttctagtacaaaatttttgcatgtcctcaatgttcaagctactatgtttactattctttataaacaagcacaaccaatatcgttgtttacagagtaattactctagagctaagtccaacatgatttaaggacgtaaaatatgtgaaatgggtcgttaattgaaatttttgtgtgtcttaacctttgtaaaacatgaggttgctttaattcagtcacatctgttttactttgttgtgttatgcatttaaatgtctatctctgtattcaattatgctttttctgtgctattggatataggggacgcc

SEQ ID NO: 78408 - DNA, 383 bp, Citrus sinensis
  Intron number 2 from transcript orange1.1g037393m (locus o range1.1g037393m.g) derived from phytozome v7.0 (chr-ID sc affold00048; pos 706807 to 707189 reverse strand)
tgctgctttgtttgaacttggtctcatctcttgtggtaaataatcaaactttttgtttaattatagtgtcaagatgcatttgaattgtcacacatggaatctgtgtttattttgtagtgtttgcttcggataagtaaattttttttttttttaaattaatttgatcggaggaaacatgtgaggtcttctttaaagaaaaaggaatgaaagaagaggacttgagagtatagcacttgataagtgcttctctgaaaattgattcttgcagaaagctcttgttatgatgtattggtattacccttgaactatgaatttatttgattactgagctggttttacattgtgcagattgctggtgccccaccaacttgtgctgctaatct

SEQ ID NO: 78409 - DNA, 505 bp, Citrus sinensis
  Intron number 3 from transcript orange1.1g040801m (locus o range1.1g040801m.g) derived from phytozome v7.0 (chr-ID sc affold00005; pos 2752888 to 2753392 reverse strand)
aatttgtctcacgtgcttgggatttatttgtgaaggtggttggaattttttaccttcacatgtatttgtaacttatgaagaacttgtcacgatcgttggcctaaattctagagggctgagtacttgaaaaaggcactctaatgcccaagttagtgtttgattaagattaaagaaagaataaaaatggaaaagattagtttctctctcgatatatgaacaatacttttttggaggccaaatacctcattttctcttagagatgagtctctatttatagatgataagtgatgtgaatttaggttttgctttgaaccttcaatctaacgacatgtatcacccatcattcatgtacacgtggagatgaataggatctaaagaattatttcgatcctgtatgtttccttactcgtatggcttttggatgtgatttccttaggctaatggattgcagaattaattccccctcttgccatttttataagctctagaaattttttttccttag

SEQ ID NO: 78410 - DNA, 763 bp, Citrus sinensis
  Intron number 1 from transcript orange1.1g027745m (locus o range1.1g027754m.g) derived from phytozome v7.0 (chr-ID sc affold00208; pos 176597 to 177359)
tcagccgtggggtgctttagcttctgtcaccgccggtaatcttatctcagcctgtttctctctgtttaatgttgtttcttatgcaatttacagaattgaattcactttttcgcatatgggttagatatatattaacagtaaaattaatcctaaatcaggttttatcttgtagtatgtaaatttcatgtaaatttttcagctttacgattgtcatatatttaaagatctaaattttgtttcgagattatatgacttttagattgttttgttgcattttcatttttgttttgttttaaattttttgctttgtgtataggatatcgattaagcaaggtaaggttcattatcgactgattagatacatccgttttaataagatcatctcattttgttaaactttgcttgaacaaatatctaaatagtgtcgaaagaagtttactgggaaaagaatttgttaagccacccaaatacaatttctcaccatgtctggctttgtatgatttaatcagtggacatggattttgatcttgtgttgctttgttgctggcaggtggctaatttaacttcatattaaactttctcaattattagttgaattatttagatttgaagcatcaagttcttaacaaacaccattttaataattgatcaaacaataaatcttcaaggaccaagtattatgaccacggtgataatgtttctgacatgcaggcaacatgttgtgatagacagtgaaatcaacagaagaaaacaaaacgtagga

SEQ ID NO: 78411 - DNA, 516 bp, Citrus sinensis
  Intron number 1 from transcript orange1.1g013006m (locus o range1.1g009834m.g) derived from phytozome v7.0 (chr-ID sc affold00003; pos 3895134 to 3895649)
acacttctacctccaaggtaaaggtaataaataaataaataaataactttttttaaaatctttttcaatgttgtttagtattaattatttgtttttgcgtacttggcttagttatgcttgatctgctaacaagttatagtggcttgcatgctgcagtgaatcagcttttaacaagtttgtggccttaaatcttctgggcagtcaagtttagacttttctttaattcatacctggttttcttttcttatcattcttgaagctgtgtttggtggcctggaaatctatgggcaagaaggaaattaagattctgataactgtctatttatttataactttataagtatgattttctgttgaattgggcctgagaatttgatttgatttgattctgctattttttggagctttcttttcctcttctaattcttttgcaaccaaataaatggtaaagacttaaatctttgctgaagtatttgctctgcttgatcatgacaggggaaaaaaagttatctgggt

SEQ ID NO: 78412 - DNA, 460 bp, Citrus sinensis
  Intron number 1 from transcript orange1.1g018865m (locus o range1.1g018884m.g) derived from phytozome v7.0 (chr-ID sc affold00017; pos 1343252 to 1343711)
tttccgccttgttccttgtcttgcggatcctggtacgtgtttatttttatttttttattgtaagctatgtttggttcccaggaaaagctgaaggaaagttgaaatggtaaaaaaattacttttttaaggtgtaagttactaggtcgttgtgtcttgagcttctaaattagaaaagaaaaaaaattgaatctttctggtgtaattcgtttcgatttttgtttctgttttgattgaagtgcataggattatagctttttctttgcttcctgataaatagtgaaggaaattgaaattggtaacactatctaagtttttaataactaaattcaacttacaagtggataaaaattgatttttaacttgtgtcgtagattatttttatttttgttttcttctaataaccagtttcaaattgttggttatagctcggagatcatcattgggtttaaaagcggcatta

SEQ ID NO: 78413 - DNA, 912 bp, Citrus sinensis
  Intron number 2 from transcript orange1.1g018865m (locus o range1.1g018884m.g) derived from phytozome v7.0 (chr-ID sc affold00017; pos 1343788 to 1344699)
aaccgtatgtattaatttctgaaatagtggtttctttcttcctttagatttattttgaaattcagtttctttgcattgctttgacaagaatgcttgttagttcttttacttctgtgtacttaaatttggaattttattgttaacatagactggatttggatttgtgcttttacatctgactgaactgttggggctttaaggaattagttaaggggattgaggtttaagattgataatcaaactgaggaagtttgaaaaccaaccacaaactcatactgtggatgggcattatttcatttacaaactgactgagatgggatgtattagacacggggaaggccctaaatatgttaaaatgtgaagcttaaatggtgatgaactctctaataagtgctcacttcaatcttgcaatctaagagctgtaaacagagaaaaaatcttagagggctgcaggcagttgtttcaatttaaattcaaagatctatgtgtagcagaaaatattgtccgctgacattaaagcatgccactctattagatgcactgacgaaatgttgttttgtccatctttgttcatgcatattgcatggcgtctacttctttcaacgatgtttgaactttgtttaaaattttaagcatatcattattgaaaggttgactgatatagtcaaatggtttatcgaacgtgtttctagagaggactagctaggccttgtgtcttctgttaggaattcatttaataaatttcaattggcttttagtgagggtgttgatatgtgttccgaaacgtattcaaaccctactagtctttcagatttctttagcatataattttacgataacttcagcattaattaatatttcaactaccattttacaggtatatcacattttatttgcttttgtttgttgcaa

SEQ ID NO: 78414 - DNA, 595 bp, Citrus sinensis
  Intron number 2 from transcript orange1.1g014096m (locus o range1.1g014096m.g) derived from phytozome v7.0 (chr-ID sc affold00049; pos 499128 to 499722)
ttggagtagttgacgcgaaaagcttcatcttgtaggtatttttcttttctgggtttttgaattccagttcaggtttagcgaacttttagatttgggactgtgtctcggctcttgattttggtcaaaggtgaaggaatcatgacttgaagttgatcataaaattttccatactgttggtttttgggtttcatgtgaagggtttttcttttgtaaaattggcttcttcatgttcagagttagtgtttgctttagctttggcaagtgattcactttttgggaggcagcttatatgttggtcttaaaagcttattaacatttccgaatttgccttgaatttggagctctctgcctcaaaggttttaccgacaaaaataggcttttaagctctaagagtttttttcttagtctgtgaatttctgttccaaatatcagatgtgccgtcaatttgcttaagtttcttagctttgaattgattctttggattggtttaaagggatacatgtttctgctttctagttgggaatttcattttgcttgacctgatttttcagttatatcttttgtgcttttctagtttcaaattcttggtgttccc

SEQ ID NO: 78415 - DNA, 883 bp, Citrus sinensis
  Intron number 4 from transcript orange1.1g027112m (locus o range1.1g024615m.g) derived from phytozome v7.0 (chr-ID sc affold00014; pos 1143418 to 1144300)
gtgggcccgatatccccttccaccctggaagagatgtaagttattattattcgctattatttaattaaatttgatttaatattttttctgttgtttcgaggatgaaatcgatttgtgaaattgatcttagtagcttgtttaattgttttgcttgatttatgtaaattaatgttgaaacatttatagctcatttactgataaaattggccttatttactgtttatttatttatttattttagtgagtgttactctgttttctggtctttggctttcattgttctgtgtaaaactttatttggtcgttgggtgaaaattgaaattaaaggaagcagtataggaatgtgcatgcgatacttttctagttttttttagcgactgcacttggcttggaagatgttgatgaatttgtggaactttttagaaataagaaagttgtttcataacataaaacttgtggcttttgaaattgtgttgcacaatcaaattgctacgattgtctatgcggactaccacaagttttgtgtgactctgtggatggccctccgtggttaagtggctgggtaatggatactgaagttattgcactgttgcttttttcactgtactttggttatcaaataaaatatcagccacccttttgatgtgacattacacacgtccaagtttacaacactgtttattataacattgtatattgaaattataacacttagctagtttttttccccttttagttgtgatttgctctatttatctataaaatacttatctgtatggtgtttttgattacaaatcttgtattgttgtgattttttgctactgacaatggccgtctcctattctcaggacaaggctgagccacctcaagaaggccggcttcc

SEQ ID NO: 78416 - DNA, 536 bp, Citrus sinensis
  Intron number 2 from transcript orange1.1g010595m (locus o range1.1g010336m.g) derived from phytozome v7.0 (chr-ID sc affold00023; pos 602763 to 603298 reverse strand)
acacggacataaggaaaccccaaaaaagaaattaggtaattatttttgtcagaattgtcgtatgtttcaacatttttgaagtcgaatgagagtgccacgccttgttttttttgttttctatatcagttgagtaatcttgagaggtggtaaattttcttcaagtttcttagattggttgtggtgctacctcttgcttgatgagaagctttactttcgtaacattagtttaacaaaactgaaattccaattagttcttcactgctattttgatattttctgtcacaaatcatttcttaaagcatgcatttctttgtgatttatcaggttacattttaatttttggtgtaattttgacatgttggttaagtctcatgtaaaatctgtagcattctctttcacgaagttctggatggctatcaaattgataatgatctaaaagaacagtgggatcagattaagtttttgaactattatggcttcattgacctcttgctgaaagtaggtgcaattgtttccgtttcctttagattatcaca

SEQ ID NO: 78417 - DNA, 567 bp, Citrus sinensis
  Intron number 1 from transcript orange1.1g010595m (locus o range1.1g010336m.g) derived from phytozome v7.0 (chr-ID sc affold00023; pos 603416 to 603982 reverse strand)
caaccaagcaataatcttgcttaaagctcatctgggtatctcttttttctttctcttgatttttttttttttggctaattcatatgtctttgtatggatttgggtttcttttcttgcgagggattcttagtgcttatggtttgttagtgttagttgaaatggccatgctgttggtttctaatatctctaattatttttgcaattaatcaactagttatgaatttgtaacttcttacatacctctaggattcttgcttcaagggaattttgactctttctgtttctttcttaagtttggtggagaagaatgagtttgaagcccaaaagaaaaataaaaagatggtaaaagatttaatcaatagaacaatgtgcgggaggggcaagaagtcaagggatcgattgcccccgcatacctgaaaattcttttgtagggtggagcggagttagggtgtgtgcaaaagaatttgccaagtaatattagaggggggtaattgtctatttgcttgattaatgtttcttgattttggtacaggctgtgttaatcctcctttgaattagcagtggttt

SEQ ID NO: 78418 - DNA, 729 bp, Citrus sinensis
  Intron number 1 from transcript orange1.1g016424m (locus o range1.1g016424m.g) derived from phytozome v7.0 (chr-ID sc affold00023; pos 127405 to 128133)
gaatctctgctcatctttaccctccaaatctccaggtatttacatgtattattgttcttcaatagtgtgttttatttatgaatcttttatcatatgatatggtgactcattctttgcatatggtttagttgttttcttggtcatggctgttgtttttgtgcacatatgtaccaagagtagtttgtttgggattgtggcatcgtggcttaaatatgatagttgcttgctgtactcgaagctcaagccatcaaaagaaaaaattaatgagtgatttcataaatacctctggatgttagttttagcatattgggatgttgtagtatttttaatagagaataaaatcacttgctgtcaaatataaatgagtgggtaacggcaacaaatattagctgccaaataaaaactattgctaatcaccttttaactgctgtgtttttcaatgtcaaagtagaagtaacgctctacccataagattattaataattcataggaagagtaattaactccaattttttttatagccaaaattgctttgtctggggtcagttcatatataacactataacaggaattgaataaattgagaatggagtctactgttaatatttgtattgtgtataaattttggtggacgttagagatcaaattaattactactgaagttgttggatgtgctctgtggattgtgtgctggtagatggaggagaattcttgcttgaggcaagctaa

SEQ ID NO: 78419 - DNA, 868 bp, Citrus sinensis
  Intron number 1 from transcript orange1.1g001884m (locus o range1.1g001884m.g) derived from phytozome v7.0 (chr-ID sc affold00011; pos 1888440 to 1889307 reverse strand)
ctccctctatttctccgattcagacacaacgcagagtaagttttactctaatattttttttttggggaataatttaattctgtgtttatttggctgttaatctcaaaaatttgaatagcaaattgataaaagtttcatttatggatttctgcgcagcattgctgttaatgggtttacgaagcttgtatttctattgatgtattgtgctttttaagtttagaaagcagaagtggatttttcaggccggcttttgcttgcaacgtgtaaatgtgtgtattaatgggtatgtgagttttgatcttttttaagactcgtacgtggatttttgaatttttttttttttaaatgggactttactttgttcttgatttaaacttttgtactttaattttagggtttgcaactgtcacatcaagtgtttttaacttttattagaagaggatttactttaagcgtgttaatattgtgttcttgcatggtgtttttgcaatgaccttccagttaaatggctcagtttccaaccgttgatctgtgtcgtgcaatttactggcatatgtattatttacgttcgtgtattttctggtagatatatgtttaattgggggtttttgacttctaattagggtctatgaatttttttctgaattcttttaattaaaggattgcttgttttttctagtttctggctatgagatttcgaagacatgtgctcaaatacactttgtacgaaatttaattctacatttgaaactctcaagctctttatctatctattttcttttttcttacagcgggaggcaatgtgatgtatggggctgtgcacataattgaagcaatttgagttggattttggatttttgggccagca

SEQ ID NO: 78420 - DNA, 702 bp, Citrus sinensis
  Intron number 3 from transcript orange1.1g031372m (locus o range1.1g029391m.g) derived from phytozome v7.0 (chr-ID sc affold00106; pos 415974 to 416675)
ggaactggtataacaatctctattgctaaccgaattttattttagtttttagttttttcttaatttacgaattttctgaattgctggatgggaagcaataaactcaaatagtcttctgtaaatacttgtaaaaatttaggttacaattcgaagtttcttggatacaacctcacaggaaatagcaaaagcaattgttagattttaaactagattttaagatttttttccaaaaagtgtttccggaaacacccaaaaaaatgtttttagattttggtatgctttgttttcagaaacaaagagttttatccaaattgctaattaatttggccccgatggtttgatcaaaatttgggtgtcctcctaactcataagctgtggacttttacaaaggctaaggtgatagttctcagaatagtatacatgttaagagtaaaatttctaaattgttgttgtgtttactcttcatagtgctatcaagtggtcggcaattcagttactaaattgaattttgtggaaaacattgatttagttttagtagtagtttaatgagaattgatgctaggaggtccacatgatcttgatgatacctcggatttgaggaactatatgcattgcgatttcaatgatttgcattctgttattgctgaatgatattgtcatttctgagcaagtgttttctgtgctcttttaagtagcgttatc

SEQ ID NO: 78421 - DNA, 630 bp, Citrus sinensis
  Intron number 1 from transcript orange1.1g000150m (locus o range1.1g000127m.g) derived from phytozome v7.0 (chr-ID sc affold00003; pos 1932359 to 1932988 reverse strand)
tgtgaagaagaaagtaacgaacttgttagctctgggtatgatgttctaattttggtcaattttaacctttggatttcatattaaattgtttagttgtaattttgaatttctttggcttccttttcgcgcgtttgtttttttattttatttccatttaatatgagaaaatttaggactatttggtaatccagctcggctagttcttgttagttataacgtgaactcaaaattttgattagttttgatagcaagtaaagctgtgatatgttcaaggagtaatttagtagctgatttcgataattacattgcttaaaaaggccaactttcccgtagagcaggctagttgctaaatttttaccttaaaacatatcaaaagaaagcaatgctatactagttcaacttacatgctggcattataagatagctagtgttgggtagtggattctttgtttcattattcttgattctcttggattgaacataaatcaaatgcaagttttgtttttcttcaaagtttttattgtttattttgatggcatttgctttaattatactgcttgtaacaatgtgaatttgttgacacttgatgcttatatggcttgtttttaaattttgtagagtgcattctcc

SEQ ID NO: 78422 - DNA, 823 bp, Citrus sinensis
  Intron number 2 from transcript orange1.1g008976m (locus o range1.1g008999m.g) derived from phytozome v7.0 (chr-ID sc affold00162; pos 17268 to 18090 reverse strand)
gcaccgcttatttcattaccatagtcgccttgcaggtaacacatttatttatttattatgttaaaccctcgtaaaacctctggtgtttaattgactaaactgagctaactgggtatagttcatgttatatttaagtttctgttaaaattagagaaattatgttcctttatgaaaaatgttgaagcctgttcgttttcccttttactttgctggtaaaataacaaatattctctgatcttcattgtaaatttaatttatctggacattaaagaaattcgtggtaatttgatggtttcttttgactaccaaaaacatgtgttgaaaaaaaacttgttccatcgtcattctctgtttggttgtctggaaactcaatcgaaatcaaattcaatagggtttatttgttttgctttttcatctcttgagatcaaattcattccaaatactagttttgcatgctagtgtcacacacacatgtattgaaatcatattcatagtattccttatgtgatagtcctttttggtgtaattggttcctgcctattatgtgtgtaatatttgtaagtaattgggcgagcacgttctaacagtgaaagatagccaacaaaaactcatcatctgatacaacccaaaatcttaattttatacatgggcactggctctctccttccaatctcaagcgcttacatgcaacttcagtcagcagagtcaataatggatttatattgcttatttattcggtattcttgatgttggatattttctcttctttaatacgcttcatagttgattcttaatggcaatttttaacgactctatagctcaa

SEQ ID NO: 78423 - DNA, 477 bp, Citrus sinensis
  Intron number 1 from transcript orange1.1g043568m (locus o range1.1g043568m.g) derived from phytozome v7.0 (chr-ID sc affold00014; pos 242945 to 243421)
ttgctattaagcagcttaatcgtcaaggtttccaggcatgaacccttttcagctctttgaaaaatttgaacattgtatttttattttttgtttttagtcatgtggggctgtttaatttgaacgaaaaatgaaaatagaattttattatttctgtccaatttcggttaattggtatttgccagttctttaaatgttggatcttgcttttttatgtttctacggttcattttagttttttcgaagaaagcattttagcctttcaagcgttaggaatgggacataattatttctctcaatcacaggttaaacttgtgtagttttatgggaaaaaatttgataaaatatcgatccctatttatgttgaatgtataagtttctggaaaataagtatcaagactgaagtgtaattttggtggtttcgaggttttgcttatggggttcttctgttttgcattctagcatgcaggggcataagga

SEQ ID NO: 78424 - DNA, 441 bp, Citrus sinensis
  Intron number 2 from transcript orange1.1g015469m (locus o range1.1g009668m.g) derived from phytozome v7.0 (chr-ID sc affold00109; pos 273898 to 274338 reverse strand)
aacacccgtgaagagacatgtaccgacaatattcttttctttacttatcttagttattttgctgaaactcaccaaagaaaaatgatgctaaaataattggatttgacttagatcgacatgctttattgtatacttattgatgattttaatttgacgatttcctttatatttggatgataacatggtcattacctgactgtatgtaaaacttccaactatatcatgtgcacacttctagctgttatcaatgaggacatcaaaatatttcctgaagcaacaacatattatggtattagattggtagaaggatctgcaaacaaatgatttgggcaacaaatagactgcttgctgattaataatattacaattattttaaggtttcttctgtgtcttttatgtgtaccacctttctaagccctagagttgtatctacttgcagac

SEQ ID NO: 78425 - DNA, 767 bp, Citrus sinensis
  Intron number 3 from transcript orange1.1g010786m (locus o range1.1g008569m.g) derived from phytozome v7.0 (chr-ID sc affold00005; pos 1331291 to 1332057)
tgaaggttttgaaggttccggagattgaacagaaggtaagacattcattttgttatatatactttgacgatttgctgatgtttaatgtggatttttttttttaactatgagatttaatgaattttattgtatttgatttgttggaaattcaagatttatactgtaataaaaaattaaagataggttgcaatttggtaggatatgatttatgctgactgactttgctactatgattcacatattttcactttgatcaattgatttcactgaaacaatgttaatattggaatttccttgctgatctttagtttttgactccagctttcatcttttagtttaggattgtaagttggtgcaattagaaatggtttgtggtgaaactcttaaaggcggtttacctaaatgatatttagtttgtgtttatgtctgtaatagcaagcgatttcaagttttgcactttacattcattgtttctattctacactcacctattaatatctaaactcatgttcctgttgcttcgtatggttatgtaatttttaattttttttttcataatcagatgggccgatttgaaattttggggtgatgatatgcatgtgttaatttgtgctaatcatatcatcggtttctaggttcagattgggcttcaagttgaaagctttaagctttggagcatatgcatcactcctaccattatgagattactttttctttgcattttttttttcaaatatgaattttgtcattactaatgcaggtattgg

SEQ ID NO: 78426 - DNA, 488 bp, Citrus sinensis
  Intron number 2 from transcript orange1.1g023050m (locus o range1.1g023009m.g) derived from phytozome v7.0 (chr-ID sc affold00017; pos 1220672 to 1221159 reverse strand)
gggagcctcgagcttttgtttatcataatttcttggtgagttcttttttctttttttttggttattttgattttctacaattgagcttagaaatgctaataattttgaccctttgatgtgattctccctcttcattctcattcagtcatggcgattttcagaatgaaatccattaagccttgcctcttattttgacttttgataaacttggcggttgtttgtgatttcagctggcattattgattgattacgcttcttgaaagtaaatctgatctactattgattgttatgaattatattgaagtatctgtcacaagaacagcagtacaattggctacttggcttgggtgttttgtttgtatgcatgtgtggataacaagcttgggatcttgggcccaatttcatttgatttgatttgctcacatactgaatttgatcaccttttctgcgcagagcaaggaggagtgcgagtacctaatcaatcttgc

SEQ ID NO: 78427 - DNA, 822 bp, Citrus sinensis
  Intron number 1 from transcript orange1.1g016913m (locus o range1.1g009933m.g) derived from phytozome v7.0 (chr-ID sc affold00011; pos 2119524 to 2120345)
tcaatagagttagttcaggttgaagtgtcttttcattttcagctgtttcttaatacacactgtttctggttttgatgttttggattggactgattgctgactctgttgaattttgtgttttttggttttgttttgagtggcttggtgatgggctcctctctgcgcatgctattgctttgatctgatgcatctgatgttgttttgctgtctattttttttcttttttaatatttgaattttggtggtttgctgaattgggagtttcaagctttgagtgtgttaattatttgttgaatttggtctatgaaacttccttcatagcttttatggtttgtttcatatgttaatgggtggtgcctagaagttatgttggagatctggctcctagtttggggagctcaagttgaattgtttcctaataattttactatctatttttttcatatttaatgcaaataaatgctactatgtgcatttaaatttaaattttgcatggtcgaacacgaatgttgcataaaatatatatataaatattttgggagactagctcagattacttccttgatacgaagtctgtgaagtagtccctcgtgctgcatgattttcaggtttaatagagtgatttttgttgtttggttctttagtgcttgccgagtgaagtacaatgtagaaacacggacacttttgtgtaacatctcttatgagttttatgcatttacgctattgaattatacatcacagttgtatttattgataccaaaagtttttatattttgaccttcttctgtcactccttacatatagataaatctaaatctcgga

SEQ ID NO: 78428 - DNA, 186 bp, Citrus sinensis
  Intron number 1 from transcript orange1.1g032490m (locus o range1.1g028657m.g) derived from phytozome v7.0 (chr-ID sc affold00017; pos 1301872 to 1302057)
caagattcttcgtatcataggaaaattctttcccggtaataaataatgataatgtctctgtattcttctccttcttcctcattaaactttttttatttttttcatttgatgtttgttgattttgtgtttggtgttatttattaattattagcgcggcttctgagcgttgaagtgctgaagaggtat

SEQ ID NO: 78429 - DNA, 860 bp, Citrus sinensis
  Intron number 1 from transcript orange1.1g024540m (locus o range1.1g014795m.g) derived from phytozome v7.0 (chr-ID sc affold00005; pos 2904375 to 2905234 reverse strand)
attttcttcgctattttgttactcgtaaaattaaggtacggagctgaacagctggttccatcttctggtctgatctatctgttttgattggctttgtttgttttccgggaaacgaggtcgctttccactttgttgtttgtgtctttgcttctagaagcttttagagatctggaaacgtccgttgcgttatcataacaacataatgcagctctaatttctttcttaatttttatttttttgtttgttgtaattgtgttggcgatggacttctttaagaggatcgttagtgttggcgatttctcagttagatctgttttgattagtaatttttttttctgagttttaattgtttgttatagatttattggtaattgttgatttcatcgttttatatcgcatcattttacgtgaggttaattaatgtctctagaaaggttgctcattctttgttactgtgttttcgtgataaggaaattttaactactttgctgcaattttgttttttctagctgaattgaggaatggaatttttttttaaattttattattatggaatgaaatcgtttttaaaataatttgtaaatgaagatttgcaaaattgggaatttccatcattatttctttatagtgaaattttcgtctgtgcaatgttaaacagaaaaaaaattcatgaaggaaattagtacttagttttgctgtgaatgtgtcatggtcttctcttaatgtttctaatgtttgatgtatgattatttatcaatacatattatctatgtaacatgtttgcatgccttgtgttctaataatttttctctatgtggtacacaggattactagggccctgatctgtggtttactctacg

SEQ ID NO: 78430 - DNA, 823 bp, Citrus sinensis
  Intron number 1 from transcript orange1.1g000584m (locus o range1.1g000582m.g) derived from phytozome v7.0 (chr-ID sc affold00049; pos 423377 to 424199 reverse strand)
tcacctgtcaggtaacaatctgtaattattttctttaaaaatttccttttgaatggtttcttgctgtttttgtggtttttgcggtttttgcgttgtgatggaatccttaatttgttgtttggtcagtcagaaaatcaatgaaaagggaagaaaataagattgaataatttcttcaggtctcttcttgttagccaactgacacgtcagtctcacttaaaaacagcataaaaaaatagagagagatgttgttcttctatttactgcttttacaaaattgaagtaggtaaaactcgattgctgagaaagtgaataaggtcaataatttttttctttttgaaagaatagtaaacccaaatcatcgaacactataaggagaaacccaaatttctgcattggtggtttctgattttgctaagcaggtaattgtgtaattatcttttttatttttgatgatttcatttaattgtttgattttattgtgtaattatgccattttcttacttcttccggtttttcgtttgtgaatctgtacttggttactgagaacatgaatgaaaagattgaagaaattaaaaagaaaagtgggaaaatgatgccttttttttgctattttaaattttcaggttttctatttgtcaatcaaatggtgtgtttagtgttaaccaaactttgaaggtttttttaatattgatatacttttttttcttatttattattattgtatttaattatttgctgcctttactgtagagtcttatcattgttcttattttttgttgtgaatttgttgttttaggtgtgaataagaagtaaggggtttatt

SEQ ID NO: 78431 - DNA, 579 bp, Citrus sinensis
  Intron number 2 from transcript orange1.1g016737m (locus o range1.1g016737m.g) derived from phytozome v7.0 (chr-ID sc affold00003; pos 4279787 to 4280365)
aagagctagatataaagccaatcccgagtaaacgggtgggttcggttatgttgatgagattctagttcttttcttttcttttagtgaagttgtgatatgtaatacaaagttgatgtttgtggattacaaacaaattgagttaacttcatctatcaatgcatttcttcatgagaaatcatgtgaaatgtcatctcattgttacatttgctgaggatattaagcaaaatgttgaaagtttttctgtgaaaaagccttttaattttggaattttcatgtaatttcgagttcttcttggagacttttaggcatttttgtggttttgccattgaagtagtacttgaaagaagagaaaatcgactgaatacttgttgcttgccggtcaatccttaatgaagttcttatccatgtgcgcaaaataatcaaatcaaatcaaactgctataaagaaattagcttgtagtttcatacatggcttcagtttctacctggaaaagctccattctgttatttactttgttatttctggttgcttcgtcatttttcagtgtctatcactacttctctggttggaggaacgcta

SEQ ID NO: 78432 - DNA, 868 bp, Citrus sinensis
  Intron number 1 from transcript orange1.1g047601m (locus o range1.1g047601m.g) derived from phytozome v7.0 (chr-ID sc affold00017; pos 1319541 to 1320408 reverse strand)
agatagactacctacaagcaactgcaggaccactagtacctgtgttctaaagtttctaatgaggtgctaaatgcaatcatgcctgtaaataactataaacatggctgcaagttcttcatctatgctaaaaatgaatactaatgtcattagttcaattataatcacaactatcattaattagctaataagacaatgtattgtggttgtggattcgacttctctttcaaattaaacgttacattagttagcgagttactaaaagagtgtccatagctatttttccaacactttcctttttgttttgtttatttatttattttttattttttaccagaatgcagccttgtttaatcagtaaggtatatttagttttatgaaaatgatcgagcaaatatagtttttttttcaatttttaaatttgggaaagtaatttagaaaaatggtgtagaatgttttttcaccaattctcttctcctaatgttttttctgtcttagtctttcttaaattaatgaatggttaatatttagttttgaattttgatgttaacaattaagttggcgagaaatatatacttaattagacgcttaattaacctgctaactacctaagaatttgtcctttttcttccgtatttataatttattggacgatcaaggtcataaattgacacatcatgaccattctagtttggctagaataattttaaatcattaaatatttccttgaacaatcaacatcacaactcacaagactctaaaatcatcgttaatctcttccttgaatatccgtgtaaaacaatgattgtttaataaatcaaacgtatatctattcttcttcttcttctagtgtttagaggtagtggtagcc

SEQ ID NO: 78433 - DNA, 527 bp, Citrus sinensis
  Intron number 1 from transcript orange1.1g015049m (locus o range1.1g008489m.g) derived from phytozome v7.0 (chr-ID sc affold00011; pos 332147 to 332673 reverse strand)
aaattcaggcatgattatagcttatataaaagtttttacatcattttctttttctttctcattaggcatatctgctcttgttaaagttggcattattctgttaggctgatcaagttgtttttgaaagttgttaaatatgttggagatcaggtatcttgtagtataatctgattcttccaacataaaatattttttctttccttttgagttgataataacaagtttgtagtcaggcagcatagaacctgtataagacgagtttagaaaccaagcttgactcgaagcagagttctgaagcaataggtttacattgctgatagaaaatttggaccaaattttagtcttatacgtatttattgtaaatatttggatttgattgccgttatggttaccaaattcaattttgttttagagaagtacaatttttcagttaatcctcatgtcattagtttatcaggcttattgtgcacttctctttatcattatatttcatatctttcatgtcttctctctctcctcctgtccag

SEQ ID NO: 78434 - DNA, 869 bp, Citrus sinensis
  Intron number 3 from transcript orange1.1g020579m (locus o range1.1g015823m.g) derived from phytozome v7.0 (chr-ID sc affold00023; pos 723634 to 724502 reverse strand)
gcgtgtaaagggcctcatacaggtaagtctgtctctgtgcagaaaatggtcatgtgcaatagtttttctgaaagcttggatatttataatttgtgctataacttctcagtttctatatgttgcaatattctccagttcatgatatttctgtattctggcctttgataatcaaaaacatcaagtaaaattagaggactcgagttttctatgctgtttgcttgcttatcttcgacttctgtttgatttgcaatgatttgcagttcccttttcctggcatattatccagggtcccaatggtagccaagtgaagggatgaaaaagaatattacttgaaaaaaaaagtgtattttatcgggtaaagaaaaggagaaatatactgggtagaaagagcataaagttaaatgaaggtaatggagaataatttcctataaaatgatagttccaaagggctataagaattggttcatttggatttatggggtcataagtatgatcaggtatggttaagataaaaggtttccacctctagcccaaacagattccctcatattagatgtaagtggatcaatattttcatggtcagagatgaagtcgacagttactttatagtgtcattgatgcaaagttactttatagtgtcattgatggaaacttttataaatactgaattaaaatgttcagtaacttttgcaatatctaaacaattgactagctacaatatcatgatgttcatcataatcatggatttatttctcaaacttaatttagtatccttgttgcatgcttttcttttgatgcagtatttcacttttggtcttttggctgatggtaacaatctgtgacctttcaggtttccagatcaattggtg

SEQ ID NO: 78435 - DNA, 784 bp, Citrus sinensis
  Intron number 4 from transcript orange1.1g029595m (locus o range1.1g027698m.g) derived from phytozome v7.0 (chr-ID sc affold00014; pos 671228 to 672011)
ttttcttcctagtaactgcttgtgaaattgttcaggttattgacaatatcacctgatacttagatttaaatcgagttgcatttaactttcattaaattccaacaggtacaggatcatccatcacttttcataacttttcttgcttggtgtctaattgaggtgagttctgttatcttatgtgcctagtgcctacttaaaaattcagtaattgtttgcaaattgtatgggctgtttgctaaaagtaagaaactttgacttgtaattaacgttgtctgattcctggatgagcttatttattgacatcattatgaagagaatggcataatacatcagttcacattgcatttaaaaacaattaaattgatataacttaatgtttctgatcagattgtcagtattaaagcttttttattgggaaaaattgtacccttttaatgttacctgagattaggtgtaaatcttcttacacattttctttcaggcattcatttagtcagattttctttccagcactcatttagtttctttgattgtaactttcttactttcagccgtttcttcatgtgtatgtgtatgtgttttttctgtaagtgctttggatgcactctctttccattgaacacaatagaagttttttgtatctgttctgtggtctttcctttttacgtaacattttagtagttagtagatattttttgttttaatatcgagtttggcttcatgatcttaatggattgagattcaatgactatcttcttgatgcaggtaattaggtatccgtttt

SEQ ID NO: 78436 - DNA, 787 bp, Citrus sinensis
  Intron number 2 from transcript orange1.1g034136m (locus o range1.1g030286m.g) derived from phytozome v7.0 (chr-ID sc affold00003; pos 1709719 to 1710505)
aacaagtcatctgggttagctttgttctgcaacttcatttagttttaaaaattgctaatattttggaatttatatgtaatataggagaggaaattctcacacattttttttcttttgaatggttaattagtttactaagagcagccatgtttaggcctgtgaattgtgacaccaactctacaacacggctgttgaagcctaattcaaaaggaaataagaatccatgagacttctcaggatgcctcactatcgctcagttttgaggctgaccagaaaatttcgtgcaaattgaacatagaaaagcccggcgaacttttaaaaattatattagtagatgctttgtgcatagtctaaatataagggtagtcgtatctcttaaatttctagttgtttttagtcaatcattgcttcacttcttttttttaccccctccttctttgcatttgctttgttattactgcttgctccttttcattctctatttttcactatagtcgaccttcaactgttgctgttgtctgtctactttatgtttttggtatattggctgcttgtatcctctgggacttggctttaaagcatttcactcttattgggaggcgctgggccccacaggctagctccccaatgtgaggtgcgcaacaacgtgctctagatcaattgcattgaattcatatatgtaataaaattgccgatcacaaaaatgtcagtccacgaattcaccttttcatttttggattaaatagtgtgtctaagaagacttaaattttgttgctttttcagattc

SEQ ID NO: 78437 - DNA, 660 bp, Citrus sinensis
  Intron number 2 from transcript orange1.1g005970m (locus o range1.1g003550m.g) derived from phytozome v7.0 (chr-ID sc affold00049; pos 444533 to 445192)
gcagacactaaccggtaccgtttttgtttgttgagcgactacaatgagtttattttctgtttggttgttgaggaggaaaaaaaatgtggtgataagatgagaaaatgcagctctagctcagtataagctctgagattagcgaaattaaaaatataattttttttggaggtttagaagctgaaacaataagtaaaatcaattaaataaatatagtgaagtaaagatttaagtgtttctttcgatttttttttaggattttataatgaaaatctgaagaaaatatgagaattcgactgtaaaaatgaagaacgctttgtatttggaatagagtcagttcagtgaagcactttcttcttattattttctttgttaattttgttattattattttgaaaatctaaacagagactgtctaaatcaaaagatatttgtctatctggaaaaaagaaaaaagaaaaatagtatgccatttttgtattaaatggaactggaaaagttagtccggacataataatgtgtttagcatgagcaaattctcattaactttatcaaatgctttttgtttgtatctttattttctttggtatactgttggataatcttacggctctgattatgcttgcaggagatccaccatttgtagtagcacgtgggggattt

SEQ ID NO: 78438 - DNA, 774 bp, Citrus sinensis
  Intron number 2 from transcript orange1.1g016044m (locus o range1.1g016044m.g) derived from phytozome v7.0 (chr-ID sc affold00066; pos 548108 to 548881 reverse strand)
ctcagaaactcggtgggtacacaacagatgctttgttatttcaatttatccatttgattatatgtaatgaaatttagtttggcaacactgataaaaagcaagctatctttccatgttgatgatgactaaaaaattttatgattggatgggacttgcaagtttatttgcttaaacaacattgatactgtacaagaatatgatttttttggatactgtggatattatttgtagtttgatctctatgatactgtcaatgtgacatgcaaacaacgcattttaagaaatcattactgtattacatagttagttgaatattcacgtggttttgtttgtaatctttaggattattaaatttagggaatgaaaaattacattaagtttctgctagtctaactattatatttatcaaatatctgtggttaaagtgaatatgaatttatgtctttggttataaggtgaaataggactcggtacacaaagatggaaaagatttcttatcaaagtggttcgttttaagtggtttacttcctgattcttaattcattgtttgtttcatcatctgggtcgtatgattaatgattttgtacttatttaatttcttataaattattgagcaattgttgactacacgtacgcaaagaagtgagttttgaagctgcctttgcaatgtttgtattccttttgcaaagtttggtgcttaattgtgggtttttattgatattttattgcacttttgcagtggctgctgtatttagcttggcctataaactccag

SEQ ID NO: 78439 - DNA, 442 bp, Citrus sinensis
  Intron number 1 from transcript orange1.1g019505m (locus o range1.1g019505m.g) derived from phytozome v7.0 (chr-ID sc affold00050; pos 641869 to 642310)
atcatttgacatctgtgtacgtaactccttgcattttgctttttaataaacggctctgatctcatcatccacttagatctccatatttttcttcttctgcactccccgaaatttgtttgattcatcgcctctgatctttgttctcctgcagaactgatttttttttgcgtaagcattttcttttcttatttgttattttcgtttttttgtctatactttttttaaaaaaattttatgaattctatggaaattttttaaatttatttgctgatccaaagcataactgattgttattttacgcggatgaattctaatatctaatatattatccgtcgtgatgcgaacggcgttgtattgttaattctgattattaatttttttgaactttcagatcatttgtttttcactggtaacgtctttatttcagcggcgattaacgcag

SEQ ID NO: 78440 - DNA, 506 bp, Citrus sinensis
  Intron number 1 from transcript orange1.1g021858m (locus o range1.1g021868m.g) derived from phytozome v7.0 (chr-ID sc affold00083; pos 511765 to 512270)
tcgccagcagcgcttttgccgcttgctttgccgaggtttgttgtgatctcagattcttttgatgtttttgtaatatatcgcataaatgggtcaaaaatgttgtggggtaccttttatttgcttgcaaattcttttcatttgatcgaatggttatcattatattttgggctaattttggattttgatttaatttatgggtttcttgatatttgaattctgtattaacgcatcaaagataagattttgaatgtgatgaatgattttttgtagcccgaaatttttagagattaaacaagtttgacatgttgtgtaagattatatattgtatagagctgggagaagatgctatgctggttgattaactatgctatgtgtcatattccctagctaaattgtcatttcaattgttgtattttgagcatataggctttgaagtacttatacataccaatttacttggttatgatgtagatttgtactattcctttggacactgctaaagttag

SEQ ID NO: 78441 - DNA, 815 bp, Citrus sinensis
  Intron number 5 from transcript orange1.1g032940m (locus o range1.1g030475m.g) derived from phytozome v7.0 (chr-ID sc affold00196; pos 158087 to 158901)
gatatattcttcagaaactgcaaagtgaaagaaatgtaagaaattgcttctatattgtgtttatggtgcatataaggattgccttttcaattacattcgacatagttctttaaaaaactattttttggtgcagaaaattgaaaagttaactaccatgttgcactctcttgatagtaatctatctagcagacatgtttactatgctgaagacaggtttatgttatcaaagcttccatttttttctgaaggcaataatattctggacttgttggcaatcttatatatggagaatatgtagattcttaataaagataagagtgcttgaatgattgttacttttataacttctgaattattatgtggttatctcctccgtttttaatttgaatactgagttagaatacctcagtcgtgtaatgtgatgctaactataacattattagtacactaattgtttttttcaatgccattaatatattagctcttagtttaataaaatttcaagtagcattattagcattgtactgttgggctcttttgtgtcagaaagtattattacgatgcgagtgctgaaaatctggagtattttccaatgttttgagttgtctggtgcaattagttctcctcccttcatatttatctttgcttttttctttttcccattttagcttgaatttgctacaacatgttaagcaatctgcagatccttgcaatatttgatttgaagttacggtgcatatttggattacttttgttctgtacttattgtatttcgtgcagggaagagacaaaagaaataaaatatatatctggac

SEQ ID NO: 78442 - DNA, 765 bp, Citrus sinensis
  Intron number 1 from transcript orange1.1g000052m (locus o range1.1g000052m.g) derived from phytozome v7.0 (chr-ID sc affold00005; pos 2945843 to 2946607 reverse strand)
ggttccttatgtaagtgcttctaatattatctaatttagttgttcatcgttggattttgttcaatttttgtgttatatgattcagtgttgtgtactgtttgtttactgagtggtttatgggctagtgagtagtgtctgatttgatggacatgaggtactggaaagagggtgaatttgttgattcttaattgacaaatgtattttgtttaaggaaatgtttggaaagcaattactttgttttattgattgatacgttatggcattttgaaataaaatgtggttgctcctatgttgttgcttttgtaatttgtaacttgcaatatccacttagaagcttaatgttgatgaatcatccatcaacttatacttaagatctactgttttcacttcgcagcagaccccagcacgatacccttagtgcattttttttttttttaaagaatgctgctcttgagcaaaactgtatctttgatcttattgtacattgccttttttgggctatttctagaatatggtggaaatgtgcaaaattgagttatagtttttattcaattgaacactgttttaaatttcttttctttaatataatcatttcccttcccttgcagaaaggattgagctctatctaaagcaggatagccatagttttcatatcatcttaatgtatttactattgtactatataagtggatacctcgatttccttgtggaactactaaattttgcactgactctgtttactgctgcagaaattgaaagttactt

SEQ ID NO: 78443 - DNA, 777 bp, Citrus sinensis
  Intron number 1 from transcript orange1.1g013352m (locus o range1.1g013352m.g) derived from phytozome v7.0 (chr-ID sc affold00230; pos 123524 to 124300)
gcctcaaggtcttaaattcttattcgcatgttactcaattattatccattttcaatttctgggtttttttttttaatttttttcgatgatttgttgtgattttctttcacgggtttgttttgaacttgattttggtatctgtgtttgtttctgatctgatggatctgtttgttctgattcgatctgattcattgtttgatgttcgttgattgaagattttattttataagctgtctagatcagttggttttgttaattatgcaaatctgtgtacttagtttgaattaaagagtggtgattggtggaagaattgagtgggattttggtctcttttaagaatctaaatggagttgttatatttaataagttattttttattgttgattaattaattgattttcattatgtaagtaattgaatttaaaatagttgattaatttcggcaaatgaattttattgcacttatttgtgcacgacaatgtgattaatgatcattcacttacctgataagcttacacttttcttctctgagtgaaaatgaaaacttaaacattttgaaagacattcctttctcatggaagcttaataaattccatttctttttggagcctgtctctatttgtgcacgtgtaagagctgtatattgtttactagtgtattgcacaattctctattacatttattatttgtaaaaagctgtgcacttaatccacaattttatgctttttcatttgttttgatttttttgtttacatgtcttgtgcgtaggtcctgcac

SEQ ID NO: 78444 - DNA, 925 bp, Citrus sinensis
  Intron number 1 from transcript orange1.1g014921m (locus o range1.1g012860m.g) derived from phytozome v7.0 (chr-ID sc affold00005; pos 2591135 to 2592059)
aaaccggacgagcgtttctcttcaatcgatacaaggtcagtcaatttttcttctctcttttttttttttttgttcctttttttttctgtttcgtaattcagttaatttcttttttttttttataacttttaggatctgattttgcgtttaatttttattatctttgtttggattattaatgtttactgcgcaaagtttaaattttgcttgtttactccttgttttgtgttttctttgataattcagtttctgtttggttgctgagaaaaaaaaaaaaaacggaaggatactgaaagaaagaaacatcagcattttttattttttatttttttaaatataaaagagtttgaacttagtaaaaacacttatttgaagctcggtttattttaagctttgtttatttaagatttctttgatttctttgatcagtttgattctttttctttttcctgcattttctcagcaaccaatcagaggctgtaagtgtgtgtatgtagtgccgtttccattttctgatcattgaatctgctttgactgatcgcttcagtattgtttttgttctttgattttcctattaaggtctccattgttgagttctgcatttaaatttttgtaagtctctgtttctttggcaaaaaagagatattgaagaccttcacattactaaatgcagccgtattgttgcatggtggatttgaatttgatcttataaatctcagtcatacatgattaagatcaatgtcttctaatcgattaatttcttctgaggatttcatttgtctacaaaacttaacattttgatcatgttatatgaatcttgttcattgtttgttatgctatcttctggcgtgcttcttgtttcttatttcagtcactttgttttgctgcagatttggaaacattgggatttcaggtgataatacag

SEQ ID NO: 78445 - DNA, 974 bp, Citrus sinensis
  Intron number 3 from transcript orange1.1g032251m (locus o range1.1g028349m.g) derived from phytozome v7.0 (chr-ID sc affold00050; pos 597847 to 598820)
aagctcacaaggtaattggcttgattcagtttcatggttgtgattaaatgagttctaatttatggtatttaaggttggagtttcactttcccatctttggagaaattagagaaagtaaattaaaggaagaaagaagtagaaaaggagaattttgaattgacgggagtggtaaatcattatgctttattcatcaatgctggtctaaggactggttacacaggcttataggcttagatacagacaagatattgctacccttagttaagtctaacccaatacaaccatagaaaccttacatacattttaaaagcacactgttaacaaattttcaatcgtgcatatatatgtatccttattacactgaaatgattccaattttgttattaaaccaatagtgattttaatcgaagaaagagatcacaatatgaatataactaaagcataattatggagaaaataactttaaaaagaaaagataaacaatatataattgacctgaagtcctacactaatgcctaacataagtacctaggacctaggtctctaatggaatctccattaattttccactatggaaaattatatctgctacagcaagtgctgttggtaatggtctagcaagtctagagccagatgacgaagcttctcttcaggaagccatgtattatgacttaatgagtctaaatgagctttcctatggattagaaatttgccgtggggagaagtaaccaattgatcatccaaatggccttacaactgtatggataggaacttgtacatggcatcatgcaattaacacagtttctaggactgcaaattttcacgtcaactatgtttaaaacttgttgtccatattggagagactattctatttcgtaattctttattttaaagtccgttatgaacttgcttaaaagaatttcctcatgatattccattgttttgttacattgaaaactttctttctgtgcaga

SEQ ID NO: 78446 - DNA, 845 bp, Citrus sinensis
  Intron number 1 from transcript orange1.1g045520m (locus o range1.1g045520m.g) derived from phytozome v7.0 (chr-ID sc affold00003; pos 1231779 to 1232623 reverse strand)
gaggtactttgcatttgaaagaattatgaaatgtaatgtaccattaagatcaatatctatgttttgcttacattcgcaccccaaatagaggagagagtgagagagaactcacaaatttgattgtataacaattcaccaatctgcctcttcaaaaatggtacttgttatatggcctgcattggtaatatgttttcctttttttatattcaactcttcagctgcatcagaagcaattaaattccaaagtcattctccaatcagctgataaagatggtcaaattctttctgatgaacatcaacaaccagatcctgtttcacaagggaaagataataaaagattatctgatggatatcaacaaccaggtcctaatggtgatgctgatgatgacgttgttcctgttgtaattaggcctggacatattcgctttgaacctctcggtaaaggtctgatgctctcactgtctctttctttctgtatgtgtgtgctttgggatgggatggagactcttactgattctggcatttgagtttagttgctgatgtcagaggttcatgttctagaatagaacttttagctgactttttatctttgtccagtggatgatattcaaactgtccagcaaaatcaaactccattggtatgtttttgttaatttgtttcaaatatctgtttactttgttattgttgttgatgctctgcaattggaaaaaaattatgttttcttgatttacattggcttctttttatttgttatagtttgtctgagactccttcaaatttggtccaaaaatttattatgctaaacttgtattttgatacgttctttaggaaacttatcagtgga

SEQ ID NO: 78447 - DNA, 999 bp, Citrus sinensis
  Intron number 1 from transcript orange1.1g032277m (locus o range1.1g029518m.g) derived from phytozome v7.0 (chr-ID sc affold00005; pos 207437 to 208435 reverse strand)
tcgatcatcatcagcctttcgcatattcagatttggtaaactattttataattttgttttatttccactattgcgatcatacttatcgcgttataatcgtttgatgtaatagtattgtcgtgattgattgtttgtgtctgaaataagtttcgatttaatagtttctttcttcttcttttttttttaatttgatcaagtgtgtttttttaattgaattattcgtagattcatatcgattttttaatttgataatttatctttttaatgttttgattatgttgatatgttggaattaaccgctaatacatgaaaacgagtgaagtaaagttgaaacaaccataaaaacatgcttgaaaatagtcctgaaattaggttaatctggttatattcaatgttagggttgcttttgggggcaattcgctgcgaaagcacttgatgtggcagtaagtgcttctccagaaagcacatcgcggttgtgtttgatcctgagttgcctttgtctatttcatccaaacattgtcaattagactagaaaagtacttgtcgatgcacctgaagatagtctcattgtcattatgttattagagaagcatatgatatagattagagtatgaatttgatttgagctttactagttccttgctatgactaggcttgttccagatcatgccacagatatgaaaacatccttttcctctttctggagaaaagcatgatgagtggcagaagttttttgtggttatttgtttttagtcatgacttgacatatttgactaattgattcagagaatctttgtgttgtggctgcttgcctcggttctatttctgagtgggatatatattctaacaattaacaggctgcaaggttttttatttatgaaatgaggttcatgtatttagttggtggcaagtggcaggttatatgcttggaatttgtgccacgtgcataagtatttttaaattgaaactgattctttgtccttgtttctgagtgaagca

SEQ ID NO: 78448 - DNA, 1010 bp, Citrus sinensis
  Intron number 3 from transcript orange1.1g019857m (locus o range1.1g019857m.g) derived from phytozome v7.0 (chr-ID sc affold00074; pos 275914 to 276923 reverse strand)
acgctctcatcatccacatcggggaccagatcgaggtactttccacttaatgtttcctacttatcttcatttatttttatctatcgatcttaacggaacggaatggctcaactacaaataaactcattgtttttattcatgtatgaattttaattaaaaccgaaaaaataagattaatatttgggatctattattttatttcaatgaaaatataatgaacacgaagagtgaagctcatgattttgcatgattctagataatattaccattctcctaagtctgacttttgaagtgatttagaaaataacattttaataggtaaattctagtgaatgaaggggcgaagcgagaggtaaataaggtgttattttttgaaattttagggatcaagtgccaagaacattagtgtaaatatttgactagccaatgcaacgttactaaacagtagtcggagacataaaagtggtgaaccctcgtggtgcgcactcgtaattagtaaaatcaatccatttcgaagatgcgtcacttttagtatgtggcccgtaagtcattatcaatttagaaatcgttttcaacaatttttgtttttttttttttgttttttcatgtgattacattttccgaagctagccttccctacgtgtcgtcgattgatcgaatcaatcacgtcatggtttgtttgtccaaccacggaggagaagtcattttaagttggcatattttagctaagaataagtattttattaggcatctcaatatttaaattttaatttaagtatgagtcgatattgatatttatctatcaagtaaaaaataagtaatttttataaatcataaaatctatcattgaatattgaatatacaagtgacatatggttattaagattttaggttgaaactcaaatattaggaccccgtattattaatccattttttttgtttttttttggcaatcgggtccgctacggacatgattgatccattggtgtttgatgtgcagattctgagca

SEQ ID NO: 78449 - DNA, 489 bp, Citrus sinensis
  Intron number 1 from transcript orange1.1g007731m (locus o range1.1g007600m.g) derived from phytozome v7.0 (chr-ID sc affold00005; pos 1238656 to 1239144)
atcccgaagtattggtacattttttatttattttacttcaaggagaaaaaaaagccacgtattcattgttatgtttgttcttataaatttgaatttcaatgaattaagctcatgttgctgtattttctgcttaattaaagccctacgtaaacactcaccattactattagcagctgctatgtaagtaattttactggttatgaaattgaatgccatcgatacttggatggaaatgttgggtgtaccacttttagagagtggagagtgcgtttatgcatattataccatgtgtcgatgagtcaaattgttacctattttaattgtaaatattttctgtgaagattggaaattaaatttcgatttgtctataaccagcggccaataccattgttcaggcatattctttgttgattcattttgtcaattgtacttgtgtcttatttgcaaaatattttttttcttttgtacatgctgcagaatattgcagaa

SEQ ID NO: 78450 - DNA, 770 bp, Citrus sinensis
  Intron number 3 from transcript orange1.1g038446m (locus o range1.1g038446m.g) derived from phytozome v7.0 (chr-ID sc affold00050; pos 32208 to 32977 reverse strand)
aggaaaacattgaaaaggttagacaacagaccttatagaactgtgctacaaacttgtgattccatgaaattgtctgacaccatatggtttcgaaacagtaggttctctgttgattgtttccggtatgttggttctttgttgaatattttcagtttgacagctatcacagtaaaagactgaaaagatttcacaggaagataagtggattcagaagattctaatgattaatatccctcaatctcacgacttgatagtctagtttttcttgaaaatagtagagccatttatagtttcatagagacacaatttattaagaggcgtttgagttgattgcatcctgtagcctgaattcgacaagttaaactaaccgtctttgtacttggtgtttgagttgattgcatcctgtagcctgaatgacgagaatgttaacatttacaaataccaaaaaggtcataatttttgcccaaacaactagcaaagtgcatagtttaaaaaaaaaaaaaaaaaaaaaaaattgtatgatttaactgtcttcatagtgtttattgcaacaattacgatctcgtttccaaaataatcttcttattttgtcccttgagaactagtatatcagcattaattttaggagttggcgtcacttcttcccctaatcaagagtttaagaaaggtcatgaagtttttgatggaagagagatacgaacactttgcaatggctgaaaatttttaacttttcaggttcttgctgaaattaggccataccttgctggcac

SEQ ID NO: 78451 - DNA, 1008 bp, Citrus sinensis
  Intron number 1 from transcript orange1.1g012706m (locus o range1.1g004313m.g) derived from phytozome v7.0 (chr-ID sc affold00074; pos 98293 to 99300)
ccagtgtgtgagtgccccatttacttttcttacttagctttctccttgcttttaactgtttctgccttgattatttctgctagtggaagcttggtgatgatcttttatgttgtttgttattgtgatttttgtgctactgtagtcttgatagtcacttagcttgatggttgagcttgagcttgtggtttttgacccaaaaataaagaccaggcaatgaatgaaaatgagcctgctagttctctttttgggattttcatcttattaatgtaattggttgtctgtgtcgctggagtttgatgttctgggtttgagaccaggcaagaatgggatgcagtgggatacttgtatttgaagattcagaaaagggaaggtagcataataattggtttcatttgaagttgtttgcttgcaaagttttctaataacgagtttgtcatttgaagttgtatgaggggactggaggttgttactttagtttatatgagcccttcaaagtttatgtcatatacgcattgaacaatttgttgatatggctgagttcagggaaccatacagagcattggctttttaatgatagaaattagaacattgtgttttaggtgtaagcttgaggtttgctgcatgtaagagatgcatgcttaatatgtgtgtgtcttggatcagttctaagagacaataatagaattttataggattacacaaccaatgcttttggatgtctcaaaatatttcttttaatatgagaagtagacaagactagctatctgtaggcaggaaccaaactcttatctatgttttatgttcttgataatattctgatattgcctttaagtattttgaatgtggttgaagagtaattaagttattgctcttacaatgttggcttctttaaatttctgggtgttaagttttcaattgatgtgtgcatgttgtctaaattttttgactaaatctatttgttttgatggcttagggattggtataatcttgaaaagtctaagagggtaa

SEQ ID NO: 78452 - DNA, 748 bp, Citrus sinensis
  Intron number 3 from transcript orange1.1g016351m (locus o range1.1g016314m.g) derived from phytozome v7.0 (chr-ID sc affold00005; pos 2579999 to 2580746)
gctcgtgaccgctggttgaagccaactggagttatgtaagtaatttgagatgccaaagggtgaagaaacactttatatatgcggtgcaactgatcatcttgtggattgtctcttatttgacatttcaacgtaaaaacacctagtacaaagtgattggacttttgttctctaactgttatccttgccttgattctgactagtgaaagacagcttatatgttaaattctgagagtaggttatatagggatataaatttgtacctgttggctgatgaatgatgtttgattttcctacggtaaatgttgattgtcaacggctagaattgactaccgacactagtaggggtgaatgctatgttaagattctggagcgatttcccatcatagaaaaataatttctcatgatgagggggaacaagtgcaattatgattcagattgagtgcaattaactgtaggaaggagtatagtgggaatttatcatttctcggcaagttagtggaattaccacaactagggagcgaataacgacaatgccaatcacatggtagaagggcagattagtgaaggtgttcaaattgacaattggatgttctactgagcttatcattctcttgtccttagtttcctttatattgcagacttaatgtttcttctgtcttttggtttgaaaagtttattgcttttataatcagcgactcatttgtgaatggttgaccaaacaagcatttttctctcaggtatcctagtc

SEQ ID NO: 78453 - DNA, 592 bp, Citrus sinensis
  Intron number 2 from transcript orange1.1g036070m (locus o range1.1g036070m.g) derived from phytozome v7.0 (chr-ID sc affold00133; pos 66399 to 66990)
atcacgtcaaacaaattaagaccaaagtcgttgcggtatggttattaattgcttttcactgcctttttagataccaattaccaataataataattgacgatctaattttaattaagttcattgttatcgtataaatatatgatttagttttgtggacacgctataccctacatatctcatcctttgaagagaaataatcgaacccaggttttatagaaaatttgtctttaaaagcaaatacgtaagttgtatatacaaggctcctattttactggtcatttgaatttgagttctgaaagaagcagggtttaaaaattgatttgaattttgtccacctctttaacttttaaaaaataaactaaaaagaaattgtacaaagaaagaaaaaattgttaccaatatccattgattaattgttatcactagcagaaaatgtaacttgtgttactcagagatgatgcaacatagtcatgtcaaggagaaattcttatatatatggtggtaacagtacatgtcttcttgccactattcagtagcattcactgcacatgcacgatgtatttacattaattttttttattgcagactatta

SEQ ID NO: 78454 - DNA, 559 bp, Citrus sinensis
  Intron number 1 from transcript orange1.1g014880m (locus o range1.1g011925m.g) derived from phytozome v7.0 (chr-ID sc affold00356; pos 37705 to 38263 reverse strand)
ttattgttcttgacagatatcggactttcccccaggtagctatttatgagaatgcatttgtaatgttaacctttcaatttgagctccacatatgtctgttgttttattgtttgatcaaatatacgatcgtttatttattattttgtatttgagaaaagaatgtgtgtgggtctgctaatggaaaattaaacagcttgagagtgtaatcaatgggaagaaaatacgataagtgtgatatctgactgatttgggcatctctctccactggaaaataaataatgtctcggtggactacttaaagcatgtggctggcccttttacttgatgttattttttattttttgtgttagatagtagaacacaaaaaacagttgtcttacattttgatcccttcatttccttttgattgtattatattgttggttgaactttgcaaaaatatttttctggtagtgcatagaatattagaatttgcatatagacgtaggtttctttcccttttttaacattttgaattttctgacttaccttactgtttaataggggtgctgctgctgtt

SEQ ID NO: 78455 - DNA, 779 bp, Citrus sinensis
  Intron number 2 from transcript orange1.1g008171m (locus o range1.1g008171m.g) derived from phytozome v7.0 (chr-ID sc affold00023; pos 815223 to 816001 reverse strand)
gaaatagacccgcaattgaagtccgtcttgtgcaggcatgtgttgatttgttaagttcatgcatgagcattagcgaaaatttcaatatttttctatcaatagcttgcactgtatacacactcaagatgtctctcttctcttttgagacttgaccatttgaaaattctagaaagcattcaacatcaaattaaatgtttgcttgggaaaaagaatactttaaaagagtgaaagggattatgtgtaacaccccaaaacatttcttttcttgattttgtatgtgtaaaaacaaaaactaattgagccaatgatggttatttattgcattggaatgttatttttcttgattgagtttcgaaattcgatttgattgggccccatttgttgctaccattgttttctggaatgtgatttatttaagaattaatgcatctcattcaaataagtatttggatgttaaaccctcaacatttccgtttgggtggttgaagttatttgtcagtacttcatgtctccagtttaacatagtgatgtctttactaatgttatgtaatgaaattattgtgtccagttacttgttcttgccctatcaaggtcatgtttcatattttaaacttagatgctggcttgatttcgatgaatcctcttgcatttttcgattttatctcatgtaggtgtttaacattctgattttttttattttcatctttctttttaagtaggaatggaaattgcttgtttgtgcaggttcatcctgtatctgatcggaattcagctgtttc

SEQ ID NO: 78456 - DNA, 845 bp, Citrus sinensis
  Intron number 2 from transcript orange1.1g028106m (locus o range1.1g028106m.g) derived from phytozome v7.0 (chr-ID sc affold00196; pos 121940 to 122784)
accaaactattgtccggcaagattgttaccctgaggtgagaaaagtgcatttctcttatgtagctgaacaggattttgatttaaatagaaatttgctgtgcaacaaaattccattttaagtgccgtagataatgctgttcttgattataatgttgggagaatgtctggttgtatacctaggagtgttacatgctaatcatccccaagttacacatgtaactatgaatgctttgcttgttttagttttatctggtgtggatcaatcatttgttgtctgggcatccactatctgttaaactgactaacatagtgatttagaacacattgtccaatgaatcagatgaagaaatgggagaaatcgaggcatgaaaaaggagagacaattcagaagaacgtgggaaggagtataataaactacattccaataatcattgatagcatcaagactactcaaaaatgagaaagaaatctctatttatagtggccaaaccctagatagactgggaaattgatctgtgcttaagaaaagaaatatacttgtagaaagtaatataacactcactcaaataagaaaattattataggtaggctaaatattaccaaaacatttaactgatcttgacttaaataagcaagaatctattaatcttcctaagatcctaaatagagatttcttggtctgtatcacttgaacagttgacctaaattaatttgtgctgtgctttggttaagttagttcaatttacattgttgtctcttgttgatcttgcctgcataacaagtaactgccccgaagcatcaattttataaagctgactcatgacctgaaatttgattttgcagtg

SEQ ID NO: 78457 - DNA, 708 bp, Citrus sinensis
  Intron number 1 from transcript orange1.1g031152m (locus o range1.1g027477m.g) derived from phytozome v7.0 (chr-ID sc affold00023; pos 405310 to 406017)
tctttctcattgccgctttcagtagtcgcagaaaggtttgatttttctttcacccatttgatgaaatgcgtgaatgagttagtgtgcggatctaagttttgtatttttgatgtgaaatttgatatggggttttgaatttaggaaatggggttgctgggtttctaggaaattttggctcttgtattggaaatgtcaatgcggggtttcttttgagtcaaattagtgtttgagcttagggatcatgttagaaagtgtacttttttccttgctttgggcaattaagcctattgcttgatcttctaattataattgcttattggcaaacaactctgcactgcctattacttgatgaaatttcatccgtttgctagttatttgggattaatattagctacgtgtgagatcaggggttttctcacattgtttgcttgtttcagttggaaagagcttttaagttcttgcatctttttatcttgcaaagtgctttgactggtgttgatgctccagagaatgaggttgatctggaaatacaatcataatcattctagaagatggatgattatttaatatactgcatattggttgagtttttgtttttttttttggtattaatattgtcattctcaactatttattctttttgttatatctatcaagcactgatctgttgctctacgatgatgctctaggaagaagagaaggaggaag

SEQ ID NO: 78458 - DNA, 690 bp, Citrus sinensis
  Intron number 3 from transcript orange1.1g031152m (locus o range1.1g027477m.g) derived from phytozome v7.0 (chr-ID sc affold00023; pos 406332 to 407021)
gccaagttgtaccaaaaactgttggtatgtagtcaatcttctgtttgaatacttagatatcatgatgttggaagcttaaatttactaaataattgccttgtgtgcaatttgctcttggttaagagaaagccaccctctatttgaaattcaaagaatttggttgtttttcagattctcaagttaattatcttaatattttagctcatattttgatgaaattgaagctttcaaatatataagcttgcaaactgacatgatgtacttgctttctaaaatgtatctgatagttcagtgcagtgtgcagtaaaagtatttaattgtcaagtgcagtgtgtgagtcttgagaaagcctgttcattcaaaaccactgaaggttgaggccttatttagaaatccctgctactgtgtatgattcatgctgtaaggatatgtgttggctatttggccttttaccaagtagatatgtactaccatgcaaaatcatcacatcccattattgtggtgctctatatgactgctctgtgtatgattcatgttggaatcatgaatatgcaaaaattgaatatttaagttacatgtatatttgatgtttatttactgacaagggtataaagtctctttgcttatgtgcatgctctgtcaattcctaaggttgaccttttaattttttgcagaaaatttcagggcttt

SEQ ID NO: 78459 - DNA, 436 bp, Citrus sinensis
  Intron number 1 from transcript orange1.1g009239m (locus o range1.1g009239m.g) derived from phytozome v7.0 (chr-ID sc affold00005; pos 2424942 to 2425377 reverse strand)
caagaaggtgaagtttcgtcatcgtaatcatcgattatgagctaactaactaatcttcttgttaatttccattaatcgtcttctggttttgttttgttttccaaacgcaagaaatggaaaatgatcttacttttggcttccatcactgttctacaacctgccactcttgaaattaaccctacattttgacgatctttcttactctagcctttgattttaatattttgcttgatctagcgttaatttatgaatgtgataataatactgcgataattacattgttctattgttgtttccattccaactgaacagtgctctctttgcttactctataaagctaaattctacgatttcttttgatacgttgagtaattgagtttgttgttctgtgtttcttgcgcttcttttcaggggcttgattgtgaatatcgtcaca

SEQ ID NO: 78460 - DNA, 578 bp, Citrus sinensis
  Intron number 1 from transcript orange1.1g004966m (locus o range1.1g004975m.g) derived from phytozome v7.0 (chr-ID sc affold00023; pos 1218209 to 1218786)
ccaaagtcaagttcttttgcaagaatcttcataaagtgagtcactttcttttctgttctgttttatgtcatatttagttttgatatttctgagtttgaaaccactgagtgaagtttagcttagcgtttttggcttaaaattgcttgtttatttcaatttatgaatcctgacatcattccagaattaggagttttggtgcttttgagaggggtttgtctcatattttcttattttggttaataaatattgtgggtataatacaaggttttctgtggataagtctgtagcttgctgatgatttattgcttttggaactccttaaagtcaagcaaaaatgttaggttctttcagtttatcgtcaaaaagcttttttctctgatgttacaagaattttagttctttgtgattgtaatccaactatgctttatgttttgtatatcagttcaatgaaactgtggtaggtattctgcctgctgaaatgcatttctgattgcagttcacaaaaacacatttttgttgacgatgtttctgcgacccggacagattggttttttggatactggcaaaagcaatccttc

SEQ ID NO: 78461 - DNA, 724 bp, Citrus sinensis
  Intron number 2 from transcript orange1.1g004966m (locus o range1.1g004975m.g) derived from phytozome v7.0 (chr-ID sc affold00023; pos 1219806 to 1220529)
tttgcaaagctctggaggtcttatcttctttctatttcctattctttctatttcctcttctttcatgttttcatggttcaaaaagtctaattttaacctgtcttgctataactatgattttggtggaagagtgcttgagtgaaagcattacgatcgaccaaaatgtaaaggcttttttttaagaaatacatcctaatcctttttaacatacgagacactgataatatttcttcctttttttgttttaaataagttttaaaaaaaattcttaatctattttaatatatgaggacattgattctaatctatctctaaatgctctctgtcttttaacatcttttcctcatcccatagtgcttgatgtatttgacatgcagactgcttgatgcaatgacatcatactctacctttttctcttcctcggtttcctattgtttatatttcctaagaatccttgtatattttctgtttttctccgttttgaatattttgtttgggttttgttttcattttgattgtaacaacgttgacttttttgtttctttcttcttttaaaatctcccctacaaaaggacctttggaaatgccaatggttatggtttcgcttattctattgctctttgatgcttatgaatctcagaaagtacttcttccatcatattctggtctaaattagtatttatttgcaggctgttgatctcaggagttcaggaaatttcagcac

SEQ ID NO: 78462 - DNA, 897 bp, Citrus sinensis
  Intron number 2 from transcript orange1.1g027735m (locus o range1.1g027751m.g) derived from phytozome v7.0 (chr-ID sc affold00106; pos 392060 to 392956 reverse strand)
aagtatgaagacgtataatgtttgatttaatttcttctttatttattagtttccttttgttgttaattctgtttctggtttaattatttcttccacttgttggattgtatttgatttggctgtgaaatggaataaggggaatttgatggcgtaaaagattataaaaaaggaaaaaaaattgaaatttctattttctgattgtgtggtgctatggaacttttcaaatagttactttacattattatctaaaggtattgttatattatgaacaaaggaaataaatttgaaatttgtattttctgatggtgtggtgttatgaaaattttcaaatagttactttacattattatctaaagatattgttatattatgaacaggtttctgaagcaaaagcaattgggttaaagaatgaaattttgatggataattgtttttttgttactaaatacataatattaggtttgttctgatttttggaatttcattgaaaaatatgtctttgtttgtttaatgacttttctaccttggattgagggaaggtaatgagtttgatatacaattccttgtttcttgttgcatgtattggtgtaatttcttgtttcattgttatgtttggtataagtgtttgtttatctccaaagaactgatatcttgatgatatttaagacccttttgaattattggaggctagtgatgattcttggtctggattatctttttttaaaattagccccggaattcatacatcttatgtgcttttatatattgtcacttgttcaattatgtattcactgagatgtacaagattgtgcttgttgttgctgttgttgtgtctctgtcttttgtcaattttcttaatcctagttctatatttgatgtgttgtgtagactcttgaa

SEQ ID NO: 78463 - DNA, 1008 bp, Citrus sinensis
  Intron number 5 from transcript orange1.1g025215m (locus o range1.1g015117m.g) derived from phytozome v7.0 (chr-ID sc affold00393; pos 90092 to 91099 reverse strand)
ttgcaacaggggcttacttatacacactgatatttgtaagtatttaaagatttatgtcctgggttcattgtgctagtttatctctgtttgcaaatatattcctcaaaaagtgtcaacaactttgaaatgattgggtgctccaagacagtcactattagtttcagatctataattcgcttctatatgataaatttcctaatttctttgtggttgagtgcattcattcaatattgaacataaaatatccttgatgtaatgagcagaagtttgctgcatgcactagtgagtcccgtgagtcaaattggactcaacttagctatttgaagtaatctgtggggagaatggtcagctgtactgccatggcttcaatgtatgcctatgaacagcatcagtcaaaattatgtgctgtatgttcccgattaagcagcaatgaatttcatgctatgtgcaactagaacttgtaattaaaagtgctaatgcttaaggaataacttcttaaaaaaattaattatatttaagatagaaaaattccatggttttggccaagatcatctggataggtacagtgctgtctctaggttttggatgggaccaaacactttctgtactgattgcaactattagaatgtctaccaactatagtttaatagcagtaatagtcactgtctctgacatagctcttcaaggagggaagtagcatgtatttatgtggctggggcaggaaaattatgttattaaaatgaaatcaatgtttttttcatttcctcctgaggctgttgatttttttcttcagctgtgttgtttccgtctatttacacatatgtagacatttatcttttattcaattgtatacaaagtgcttaagattattaagcatagaaaaggttgtagagttatttgatgttgacttatctgtgatgctagatattctagacggcatgatatgatgaaaatttacctttagaatattaatgcaggttactgttccatctttggcatcggttttca

SEQ ID NO: 78464 - DNA, 452 bp, Citrus sinensis
  Intron number 3 from transcript orange1.1g025215m (locus o range1.1g015117m.g) derived from phytozome v7.0 (chr-ID sc affold00393; pos 91342 to 91793 reverse strand)
ctgagcaacctgaaggtatttactaacaattgctctgaatcaataatgatatatctttggggcttgatttatgcattttgaaaacatttactgctggtgatatacttacaactccaaaagtcagtgtccttcattgtttctcaatatatccatggaggacatggtttatcgaagtttgaactttatgttgatcttcctggatcaattagatgtttgagtctggacttcttcggtgtgttagttgatgtaacttccactgataggtttgtgataagtagtgaaagctgtgattttcttagagctgctcctgtctcttcctcatggaaggacaaaataatctatacagaagttttttgttgtttcttttccttataagcaagctttgataccatttgatttgctcacaaatatatgcaggtttttgtaatagccctcctgttaaagataataat

SEQ ID NO: 78465 - DNA, 776 bp, Citrus sinensis
  Intron number 2 from transcript orange1.1g013480m (locus o range1.1g013480m.g) derived from phytozome v7.0 (chr-ID sc affold00049; pos 332652 to 333427)
aaccagctcgagaaggtcaatttttcgtatttctgattaatttcatatgctgtttgtgtaatcaaatttatttattttcttattcgaagtttatttgtgataagatggagttgatcatctagtttttgaattttgagagaagtgagtatggatcattgatgtgtttagtcaaccaggtatgtttgttttttgagaaaacgagggagagaaaacgggtgtggaaatttttattcattaaatgtaatgaaaagtcacttctgattgtgtgaagccgatgcaatgttgggttgagttgtagtaatgctgcactagtactgaggctctggatcattattgagttacccggtgccgaatctgtatgtgcaaaaacaattgttgggatccgctttgcagcttaagctatttttgagtgtttctgctgcctgtaatgccctcacattgtttagaagattttagtttacagtgacgatttttttttggatagatatgaactgtttgcttggttgttatctaatgtttttaagaaatcgaatggtttatgtagttttgagctgtggagcttccttttggttatttcatttcattgacttttctgaaaatgctcaccttgtgactgttattcagttacatgtaaattcgaggctgtaaacttataatatatttattctcttccagatttatggttcctttcgtcactatgtatttttcctaattggtgagaatgataccggtcctttgcaggataagaagtcattgaagttggggcctgaagacag

SEQ ID NO: 78466 - DNA, 396 bp, Citrus sinensis
  Intron number 1 from transcript orange1.1g011317m (locus o range1.1g006538m.g) derived from phytozome v7.0 (chr-ID sc affold00023; pos 828949 to 829344 reverse strand)
agatcctctcttttctgaccagtttccatcttcttgtaagttgtttgtttatgccgtttcagctgttggttatcaaagttttatctttttttcttgcttaatttgattgttgggttttttttttttcttctaatgaataaagcatgtgtgagaaaaccccagaggttcatatgaatgttggtgaaaatttgtggggggcagaatgaaagaaaatcaaagctaaagagtctcaaattatttgcatgttatatttgttttggaatgaaattaattcaagagaagttatgtgggttctggtttctttttagttgatttcgtttatgaagtggaattgatctttgttggtggatttacgttgaaggatattgcactgtcgacggaaattatcaagccttt

SEQ ID NO: 78467 - DNA, 155 bp, Citrus sinensis
  Intron number 1 from transcript orange1.1g038128m (locus o range1.1g038128m.g) derived from phytozome v7.0 (chr-ID sc affold00065; pos 434511 to 434665)
ttcaagggcagcctcttgaggtcactggtatgatatattactgaaaaaaaaaaaagggatcaatgtttcttctcttttataataattgtgatgcataaataaatttacccatttgattatttttaaatgtatacttgtttatatgtagtcatcgc

SEQ ID NO: 78468 - DNA, 444 bp, Citrus sinensis
  Intron number 3 from transcript orange1.1g038128m (locus o range1.1g038128m.g) derived from phytozome v7.0 (chr-ID sc affold00065; pos 435155 to 435598)
accatcaccggagacgatttcatcggcagtggaaagtgattaattatcctttacttcacttctgtttttatgttatcatctctatagaaattcatagatttatagtatagtgcgtgagtaaattaaacataactcgtagatttatgtctaataaattcgaaacttatactacatttataaataatgtttataagagagacattaagttcccgaaatggggacttttcttcttcatgataattgataaggctaggtatgttttagcgcccgaacaactttgatggtctgttcattctttttatttttatttttggttatttgttaaaatttagtttgacagcccttttgattttttttttaaatttattatttttaaaacgttaatgtccacattttattttgctttgtgtagggttcaattgactaaggctattacacaaggtt

SEQ ID NO: 78469 - DNA, 670 bp, Citrus sinensis
  Intron number 3 from transcript orange1.1g033366m (locus o range1.1g031489m.g) derived from phytozome v7.0 (chr-ID sc affold00065; pos 483001 to 483670)
ttgcttccttgactgctaaaaaggccattacaaaggtgatgatgttactttcaaactattttctttgtttttcttcaaccatctattgaattgctgctgtgtttttgaactccctgaaccccgaaaatgcacgtttctttgagcaacttccgcatgctgcaacattagtacatgaagagatgaggggaaagtggtgtacttttcatggaaaattttgaccaacggtgtcatgtcaagtaaaatttcattaagggaaagcttgaaccgagttgatatttttatttcctttactgaatttgttaacgacatagcacactttgagaggactaataactcgtgtttgcacttcataaagcaaaagatttcaaggcagaccagtatcctagccgatagctttggcactgatacgcagttgaattctctgttgttatggaatgtttaaaatatacggccttttcttgacgtagatgcatgattatatcttcattttgtatcaacttttattttaacagctatacctctcaacttttaatgatataatgtgtgaatgcttacctttagctataaaatcgctttacctttaaagttatacatcatgtgtagtatgagctaataaaactaatttgtttaaacagaagaagaagcttagaggccgacaaaagaaattgaa

SEQ ID NO: 78470 - DNA, 840 bp, Citrus sinensis
  Intron number 1 from transcript orange1.1g001774m (locus o range1.1g001774m.g) derived from phytozome v7.0 (chr-ID sc affold00199; pos 113653 to 114492 reverse strand)
cgcttcaggtgagttcatatcccccctgatattaccttgttttctttctcttccctgttatgtgattctgtgagtcaatacaaattattgttggcctggccattcttattttgcatttgaactttgttcttttctattggatggagggggattatcgtatgacgggaaaaatatatagtgttcttttgaaagagtcactttgatgccctggtttgaacaggtcccaatacactgcaactaaataaaatttcttttatcagtctgtattggtggggttattatgagtaccgagtttttacaaggaaacatctaaaagcccttagtcgagtgtttgtatgtatgtatatatttatatttaacacaaacataaggtagtctaatttgttatgaaaaatattcaattgtcggctggagtcattgcattgatgtcttattatagttttaggtagcatatgttttttctaggttctcatgagaaaacaagggaaaaaaaaagttcatttgcatcaatttttacggtaattactgcctcggtagatgttatggaattaaacaagtgcttccggatttgacttaaatggttgggttataaattcggaaaaactatgtgcatgatagctcattgtacaaagcttatgaggcaactccccagttcatgatgattgtttgcaggctgttaatttaaggactttataattaaatctacattatgtattatctagttattccttgtgcatggatgatggcaaattttagaatggaattggatgttaatatgagagatgttcaatttcattgtttgcaggctgttaatttaaggactactgctcctcctcgtct

SEQ ID NO: 78471 - DNA, 849 bp, Citrus sinensis
  Intron number 1 from transcript orange1.1g014306m (locus o range1.1g014308m.g) derived from phytozome v7.0 (chr-ID sc affold00386; pos 153703 to 154551 reverse strand)
cacaattcaatctctcgattctaacgtaagttacagtaagattccttgatacccgtttgaatacttgcccttaatttttatgaaatgattataaagtcagaaactttatatcttttgcaatacccagttttttttatccgcttatttgttgaattctagtgtgctttcggtgttgtttcagctaattattaactgttcttttttctttttttgttttgtttcccagtttgtttgagtactttattgatttatctgttgtgattatggtcaaatttgtatatatccttctttgtagattatatgagcttgatgtttactcaatttctgtatctttttgagtgtgaagattttttagtgaagaattgagcttctaatttgaaacttttattaatcattggcttgtgatttgttgattttgatataaccatcataatttgttgtgttgggacactggattgtggattgggattgattcaatgcaactatgtctaatttatgtcgtattatttttgttagaatttgtccatttaaactttattaaagtaacttctttgaacatagttattttcaccattttggtcattctatatttgttcatggcctcttcattctcgctttttcttttctcacaggtgctatagtcgcattcacagtgacctttaaattcagttacatgttcttaagaatatccagttgacaattgtatttgcatcaaagtgtaagttcctaggaaacttgagttgctgctgatggttgcgacttttaattaatgacaataatgatattgagcatgttccctaattcatttatccagggatcagggatcaggtacaaagcagccgagttgtt

SEQ ID NO: 78472 - DNA, 724 bp, Citrus sinensis
  Intron number 2 from transcript orange1.1g033879m (locus o range1.1g031701m.g) derived from phytozome v7.0 (chr-ID sc affold00280; pos 149191 to 149914)
cggtcctagtcagcctgtttgttgtaggtgattgggtacgtaacttgtttctgatttcttttgtttccaaatgtaaagacttttcacataaatcagattcttgcatattaccgcatatttgcaaaattctgctgttatcatttttcaaatatctgcttatcatcgtattgtctttatatctagttgtatttgtgttgttcctgattgcggacagtaatctccctagtataacctcctcatgcttgggatgatgaagtcctaatatctaaactgggaggaggaagagagagcacaggaaattgttacaacaaagaaaaaaaagcaaagataaaaagaaaaactgtggaatctgtttaaaaacactgttggtttagtaataacttaatctgagaattgtacatggactcatctgtgtccgtcttttttttttcataaaaaattttgaaatatgatatatcaaggctgaaatgacattgaattattctaaacacgtagattgtctctcctttggcatctcctttggcaaaacgggtgtgagattggtcttttgttgaataatagtaatgcctactatgtcatgtagttcttgactaaaacctcaacggaaactatctacacgatttgagagaactgatgcaacataaccatgtatattctgctatttttctgctttgtagatttgacattagacaataattggtgtaacaaatttatagttcaaaac

SEQ ID NO: 78473 - DNA, 798 bp, Citrus sinensis
  Intron number 1 from transcript orange1.1g038741m (locus o range1.1g038741m.g) derived from phytozome v7.0 (chr-ID sc affold00005; pos 1189093 to 1189890)
gaagatctaaaagaactggtaatataataatattcacaaccctttcatttctctcattatcatcttccttcagtacttaaactcatgcatatacgaatgcaacagtacatgttattgttgttggatcttgcttgcttgcattattttaagctcttgatagagctttaatggctgatatctatttgatatactggaccagtcattcattttggtagacattaacggagaatctcttgaacctgaacaacttgaaagtattccttcttttgtctttttctttttttcttttttgaactccgctcacaatttaaaaaaatcggatttcataaacatgtatgcagatgaattttcttgaacagaaaggaaaaggttttataaacagattgattaaatagttgattatcactgaagatattgatcaagtagttgataatcagtgaacaaaaggccaagctttcggttgcatgcatggtaaaagaaactatctatgtaagacgtgttatgattcattggccacgtagcctctctgcatatttgacatatttgaatgcttcaatgtactgtacccagatgcacgtactttgattaactttcaaattattattgaacactaattcctgaaggacaacgattataatgaaatttgaaatggctttctgttatatgctaatgtagacatatttgagattaattaattatatggtgggatggacaaattcatgtgaaactaattaattaattttaattttcaatctatttgaagggactgtgtggactgcaagtgcacatatagtcaca

SEQ ID NO: 78474 - DNA, 572 bp, Citrus sinensis
  Intron number 3 from transcript orange1.1g024016m (locus o range1.1g023866m.g) derived from phytozome v7.0 (chr-ID sc affold00218; pos 19987 to 20558)
ctgttgctgcaggagtgaaattgaaagaccttcaggtttgcagcgttggagtcgttgggtggtaaagtgtatatgtgtttagtcctagagaaaatggtgcaattatgtaataattatggttatggttttcacttttcacgattgattaatatctaaattgctttgagctttgaagatagcttgctcattttggggatatgattgtttgctagtgcgttagtatttttggattaaaatgaaatttcatactagctactcctctgtaagatgccagacgtagtaatattgtaccattggtggagaactgtattggagaaattggagggagaaaatagataaagaaagaggaggaaattgaattgaaagatcagacagtctaactttgtgaatgtaatatttcctcttttaatactataattgggttgctatagtctcaatttttttttcccctaccactttataattgcaccttctttctactcattttatgcatccgattgcttcttttaattttttagtttatgcttcagttttgggtagctgaaaaaaaaaatgttatattttgttcagga

SEQ ID NO: 78475 - DNA, 1015 bp, Citrus sinensis
  Intron number 1 from transcript orange1.1g009783m (locus o range1.1g009783m.g) derived from phytozome v7.0 (chr-ID sc affold00066; pos 296315 to 297329)
tgatataggctttgatagggtaagcattgaattattcatcgcaaactttctgttttatttctaattataatcataatttctttttctttttttaatagttgttcattgttattctaaactgggtatcagtattttaaaataattgggcatcagtattctaaattgggtatctagtccataggtgtcagtattctacctagagtggaatctgcatgcccagtgtgaatggtaaattgcaagcagcaaagcagagaggaagggttggaaatctaagatggttagtggcttgtgactacattttgtctttaagaggtcaatctctaagcatttaaggtttctctatagttttgaacatctttgacagtcttttgatagttagaggaggttataaatgcttaaacatgatccaatccggttcatcaagtatccacagaggtgcttttgttttaactgatgtggactaaccttcatttttgctactgttgattttgttttaatcattttacttcatgatataaaatagttaagaatttatagtcatataattggagtaagtgttcacattcttgatagcaatttggatggtaattatgataaataaatggacaataattgtaagttatcctagatacaacttgatggtaatagaagacctcactaagttggatataagcgaaatgactttcctatttttgaaatatgaaatatcattagttattaatattgattcttagaggattacttatttcactgaattttaaatacaaaattgctaaaatatttcaagcaatgatgaacaacagctaagcctttttatgtatctgattagaagacttcattaagctggacataagtgaaatgctttttctgtttttgaaatacgaaatatcattagttattaatactgattcttaaagtattacttgtttcatcgaatttaaaatacaacttgctaaactatttcaagcaatgtcacataggtggagccctatttggacatcaccagtatatataa

SEQ ID NO: 78476 - DNA, 654 bp, Citrus sinensis
  Intron number 1 from transcript orange1.1g027287m (locus o range1.1g027287m.g) derived from phytozome v7.0 (chr-ID sc affold00014; pos 1823403 to 1824056 reverse strand)
ctgccattgagcttggcaaagaacttgtaatgaattcttctctgatttttctgctctgttttactttatttcctctgttttaagtgtctttagagatagtcttcactggttttggtttctttttctgctttcttcatgaaagtttctattttcgcgcttctgctactcttcaatggttctgttttgggttttattttcagagttcaattaagaagtttttcttttcttttttaaaaatttctctgctttctgttttgtttttatttgttctatttctcctgtttcttttcatgttctcatattgtttgaggctatcaactagggttcttcttgatagggatttcagttccaagttctgtttatgactttctactcagttcgtatttgttttttagatctaagccaaatgaacttaatggatacttttagcttatctccttgcagaattgctttttatatattagtatttgtttcttcaacaccaataacttgtttggttttcatatgcttagttcccactagctgcatttgacatactagtccacgtcacatatgggtaccaatagttcatgtttttaatcatatttatcagttaaatatcattttctaacttttcccccacttcaaaggttgcaagaaatattgatcttgttt

SEQ ID NO: 78477 - DNA, 928 bp, Citrus sinensis
  Intron number 2 from transcript orange1.1g021969m (locus o range1.1g017881m.g) derived from phytozome v7.0 (chr-ID sc affold00431; pos 89380 to 90307)
gctctcagcttcctgatttcaaggctgcctttcaagtgagttgtttattatttttattttttttctgatatcttggctttatggggtttatttgaacgatgtttggctgctgagggatataaaaaaaatgagtctattgggttgtatgtttggctgtggaagagaatccatgttgaaagtgcttgagatcatggtcttgtgttgcatttgctatgaaaatgagtttttttttcccattggattttcaaatgattctttttattacagtgtctgtgtgctgtttggttgaaaggaagtttgactatttcaggagcaaaaactcctatttatgatggaaactcgtagctacaaaaatccatctcacatttgttgttgtgaaaatttgttagttcgtttataaaaatcccatttggagctgtgtttattattcttatattgaaagttgaattgggtttacttaagtggatatatttctaaatttctcaagaaaaacacatttctcattttttgccttcttattttgcatcactagtttttcttgattgacttttgtaatgatcattttcttttgctttgatttgtggatcatttatctgtcatgtcctgttttgttctttgacattaccttcgcattttgtttagttggtaggaaaagtaaagtcaggccgtttcttcttttagctattgagaagagattggagtttttctttcttctagattgttatgtatcaagttctttggttgtggaaaatgaaaagtgcaatgcaagtaagccatatatggttggtagccttgtttaagtcttgacaatacttgcatttaattagcagaaagccttagtgtttgttgttcgtgcttcagtaatatatttagtcattgtcaatgagtgagagtgtgagacatgttttgttgttggtaacagaaaaac

SEQ ID NO: 78478 - DNA, 737 bp, Citrus sinensis
  Intron number 3 from transcript orange1.1g021969m (locus o range1.1g017881m.g) derived from phytozome v7.0 (chr-ID sc affold00431; pos 90387 to 91123)
actaaagctgttcttgctcctcttgagaccatcaggtttggttttgtcttttatttttctgcattttccatcaaatttcttaattttatttcaaatcttataatgtttattaatcatatcaccttacttgctagattgaatatattagcaaacatgtacctgttaatatgtggttgatctcatttacttagtattaatagttaataaaaaaacctcaatactaatagtgaataaaaaaacttattgaggttaaaaagattaagcttaatgtttgcacaattgtattttcatatttcaaaaaatggaaaagaaaaaagatatgtttgtgcaattgtacttgactttactaaaactttcacttgctttcttcaaaaaaggagactgatgtgttgtattaggcagagttcaaaataattgccagttgattaactggattgcattctggttggaatagcaattttctttatgaattatttaaataaaggtttatctgacggcaaaccaacttgcttaataaataattggctgtcattaaacagagcagcataatgctttgaaattaaaaggttcctgggactttggctttcccactgaaagttctgagatttgattcttcgttaacagattcatacagttgaatttcttattgagggtgcctaatatgtgacaccgacccacattgtgagcagctgcagcgtaattgctgattcacagcttttgaaatatgcaggacgaga

SEQ ID NO: 78479 - DNA, 446 bp, Citrus sinensis
  Intron number 1 from transcript orange1.1g004975m (locus o range1.1g004975m.g) derived from phytozome v7.0 (chr-ID sc affold00023; pos 1218209 to 1218654)
ccaaagtcaagttcttttgcaagaatcttcataaagtgagtcactttcttttctgttctgttttatgtcatatttagttttgatatttctgagtttgaaaccactgagtgaagtttagcttagcgtttttggcttaaaattgcttgtttatttcaatttatgaatcctgacatcattccagaattaggagttttggtgcttttgagaggggtttgtctcatattttcttattttggttaataaatattgtgggtataatacaaggttttctgtggataagtctgtagcttgctgatgatttattgcttttggaactccttaaagtcaagcaaaaatgttaggttctttcagtttatcgtcaaaaagcttttttctctgatgttacaagaattttagttctttgtgattgtaatccaactatgctttatgttttgtatatcagttca

SEQ ID NO: 78480 - DNA, 723 bp, Citrus sinensis
  Intron number 1 from transcript orange1.1g043873m (locus o range1.1g043873m.g) derived from phytozome v7.0 (chr-ID sc affold00061; pos 43168 to 43890)
actatatagaattccattgaaatccccattccaaggcaattcttttcactttttttctttcttatttaactggttattctttagatggcttttggttgtgcgcttttttttttttcctcccagttagattgataggatactcttctaaatagctttacgcatttgtttatttagtttcttccaattttgttctgtcttgtagaaatatgatcagaaaaggtagcctcaggatgaacaaagaaatgggtttgaaaaaataaataaataaaatatgttcttgttttgaaaaggattgaatgagtaaagggagaaacagattatataaaactgaagcattggagattttagacaaatgctataagattgtccttgtttctcgataagtaatatggatagtgagttcaagttcagaggatcagcaaaatggattcaatctgtctgtatatgtttgatgttagcagatctcaatatcaaattaagcaactttttaatttctgctataaacccatgagtttagaggttatcctgcttatctttgaatgagatacttcaggacatttttcaaagatcatgcagcttggattttggaaaacattgcaaatttgatggctgttaagttgtatttattgcttaataaaatttggctaaaacactgtgtaatcacatttggatgctaatcgtctaccagtgagatcgatctcaacacctagagaaactgtagct

SEQ ID NO: 78481 - DNA, 511 bp, Citrus sinensis
  Intron number 1 from transcript orange1.1g046924m (locus o range1.1g046924m.g) derived from phytozome v7.0 (chr-ID sc affold00327; pos 6354 to 6864)
tggcctcatcaacatcactggaaacccgaaatcaggtttgacgataatgcgctgtcgtttcattgttacttacctgttgttactgttattgtttaggcaagttggccaatagtgagaacttctcttcatggacaagagtttgcatgaaactattttttttttttttgttttacgatattgtcacatatatggcactgaaatgtcttacagaaagtaaagtaggagaaacataattcactgtaatagaacgaaagaaagaaattggaggagtgtttcgttttgtttgtaatgttcaagtatttgtgtcctttccttaaaatttgtattattagaagttatgatttgtttgaactttgtgttattcaatcaaatagtagtttttattgacggtaatgaactgatttctcagtgcgtggaacagtgcagatatgtatggattgtttctgtttactacttggtttggcatctccttggacttatgaatttatttttcatttcaatatagagggag

SEQ ID NO: 78482 - DNA, 415 bp, Citrus sinensis
  Intron number 1 from transcript orange1.1g026690m (locus o range1.1g026690m.g) derived from phytozome v7.0 (chr-ID sc affold00017; pos 1204974 to 1205388 reverse strand)
cttctctgcgatcttcactttcttcttcgcattaggttcgtcttttctttcttttttagttcaaacattatgtgattgctcttcaaattctcattaattgttgttgattttctttatggtatgtttcattatttgattatgtcgtttgatgtgggtttttgctttatttgggatttggttaaataaatctggatatagctttgattgtatatggttagattttgatttggtttagccaaaaggaaatgagataaatagggaaaattgatgcttgcgatttttgtggaatttcaattatgtgaatcaattagcatacaaagaaagtatattctgtgcataatcttcccccatgtccagcatacggatcttatatggcatttgtgtactgtatgcagtgggcacgttgttgggagcc

SEQ ID NO: 78483 - DNA, 556 bp, Citrus sinensis
  Intron number 1 from transcript orange1.1g023378m (locus o range1.1g018034m.g) derived from phytozome v7.0 (chr-ID sc affold00327; pos 21868 to 22423 reverse strand)
gatcaggtattcgttcatctttttttttttcaagaaaaaaattaaatggggtgtgtagaattagctgagtttgtgctctggttgattaatttcgaggcaatttaattttttatcatcaaatgtttgttgggttctgtaggcggcggttggttcatatgctatagttcaaatgtttatggggtttagtttccagtcatgcttgtcgttaaaagagaaagtttatggggttcaagatttcctcttgtcattgcaaccaattgaagaaaattattatgaagaaaatatcatgctttggcttttcgagtaattcagttggagcttattttgcagatacttagctaactgattagtatttagaatgtactgcttaagatttagaggagtactgattgaatgtcaaaattcttctagtatgtgagcttgaagtttaagattttcttcatttttgtttctgtgtttttgctggtcttaaatgaattttagcttcttttgatcgtgtctgatgcatgttgtaatcacagggttatatagtcctgaacagaccttgggcatttgt

SEQ ID NO: 78484 - DNA, 283 bp, Citrus sinensis
  Intron number 1 from transcript orange1.1g048582m (locus o range1.1g048582m.g) derived from phytozome v7.0 (chr-ID sc affold00056; pos 7035 to 7317 reverse strand)
ctgtacaacctgcagtacaagttcaagatcaatcagtaagttttttttttttcaaagatttttttcttccaaattttcatttatcaaaacggcatatatacggatattaattaagagcataaacaaattttgactccagtaataaataaataacacaagtcaaaacaatgtggtcgacacgtgcattgaaaaattaaatttaaattttacgaaactagctctagtatcttttcttctttttaattctggttgttggtgattaacttgaatacagaatagtaca

SEQ ID NO: 78485 - DNA, 514 bp, Citrus sinensis
  Intron number 3 from transcript orange1.1g010800m (locus o range1.1g010800m.g) derived from phytozome v7.0 (chr-ID sc affold00023; pos 696616 to 697129)
ctggtcttgtcaatcttctttggctttcttttcaggtattagggagatttgaagtttattttgcaatttattttgtgctattttaaactttttcatctgttcatttgctgctggcaattaaatcattagtaacttatcctgtgtggaataaagagacggaaactgaatcatgaatcttatgtctgtgttaaaatattcagtgctgaagtctgtgttaaaagttaggtagcttgactccaaaaaggaccattacttgatttaagcctcttttgatgagaggttattttgtacattatgttgtcgttctggaataatttttagggttaggtagttttggagtagatcaagaattgcttttacttcctgaaatttgtgatgctctcgttcttgagtggactgatgttattaagtaactttatttggtgaaaactctctgttgattcagtgtttaagtgatgttatggtttcttcttgatatgcagcaatctgcaacaaacagggcaaggtatttatt

SEQ ID NO: 78486 - DNA, 588 bp, Citrus sinensis
  Intron number 1 from transcript orange1.1g016977m (locus o range1.1g015228m.g) derived from phytozome v7.0 (chr-ID sc affold00003; pos 3138248 to 3138835 reverse strand)
gtgctctgttcactcgtgattgtaagctctctctatttgactgtaatcattcgttattttttcatactaattaggattttgagcaaatttctgttaagtaatttcacctcgctagggttttggatttttgttggttctggaacttgaatagttctgcacttagtgccctgccctgaaggtggctgcactcattctgagtcatatagtgttaaaattttaattttttgcttaagaattatgaaaattttgctgctctcatgctggcgattatatttgagctgacttatcataggctttgcgtttgctttatggttttttattattactgaatatttgcttgattttcttcttccttgtgtggaattaaatttatggtttttctttaattattagcatcaactcttctgtatgtcgtcaattctgtggtcttttgcatggtggggttcatggtgtttcttttttgatcatttattggagattttgaagtatagttgattgtttgtagttgtcttgaatgttgcgtcttattgtattaattttattttgttaacaggttgattgattttcaaacacattctttcctcagaa

SEQ ID NO: 78487 - DNA, 502 bp, Citrus sinensis
  Intron number 1 from transcript orange1.1g012547m (locus o range1.1g012349m.g) derived from phytozome v7.0 (chr-ID sc affold00003; pos 3860891 to 3861392)
atcaatcgagcaagtaagaaaagtttgcttttaattgaatcttatatttgtataagatagattagaaattcccccatggacaccttttttttttttaactttgatggcttcttaggttgatgcctatgagaaattaagtaaagattctcaatggcatgtgattagtgagatgacttaagatgagttaatgttatataaagagactgcatctcaaaatcctgacatgtcaacttgctgattgaaacatagaatcattagtaaattgaccctcaaaatagcaaagaacagacattatgtctgtctttgcacttccaattccacttagttgtaaactttgtttatcctcttcttgtattcactcacccaacaccccccacccctccactcccggggcttcattccccttttcattatttgtgtgatatcgttgaagtggcattaacattttacttatctttactttgcagctggggttcccattgagaacattctatatcttggg

SEQ ID NO: 78488 - DNA, 144 bp, Citrus sinensis
  Intron number 3 from transcript orange1.1g008289m (locus o range1.1g008289m.g) derived from phytozome v7.0 (chr-ID sc affold00023; pos 1307956 to 1308099 reverse strand)
aggtaattgttttttggatcttcaatattcatcttcttatgatgtttccacattttgaatttgatgaatattgctttgcttttccttctcttaatggtgggatttattggttttcaacataattctccttaggaacttgagaaa

SEQ ID NO: 78489 - DNA, 827 bp, Citrus sinensis
  Intron number 1 from transcript orange1.1g010384m (locus o range1.1g006655m.g) derived from phytozome v7.0 (chr-ID sc affold00074; pos 75725 to 76551)
ttgaagttctcgaattttttggtacgattcttcaggtatttcatgttattcttgattatagtttctgggtatcgttgaagattcgaaattggcttctgggtactgttcaaaagtgtaattttttgttacttattcagttcgaggattggttttcctatgtttttctttttttaaattaaattttgaatcttttgtgtgtttacattcgggtttgatagaaacttggtgtttaagtgaggaggttgatttattttaattctagggagtgtttgtggggacttttaatttggttgctgagagtgaaagagaaaataaatggaaatgaggatagaattagtaactagacctaagattgtttactgcctctgtaactatggaatggtatgggaaactgagagttaatgatgtaattaattgagtagttttaagggttttgtatttccatggcactggccagcttgttttttctattgcatttagtttgttgattggtggaaggataaggagatatattactgaatttgaaaattttctgtactttgtaagtaatgattcctgtataaatgatgttaccaagaaaggttaggaaaagattgaaaaacaaaaggctctataatgttttcaatccagttgtctccttgatcagatattgaagtttccaaatttttattcttttgttcttatataataaaattgaaaattgttggtttcttacatgactagttgagcttttttgttaacttgttgttggatttaaatgaacttatgaagtgtccttgtgatggtggaacgggcacacagaattttgagttgtgggtaagattgtc

SEQ ID NO: 78490 - DNA, 1019 bp, Citrus sinensis
  Intron number 1 from transcript orange1.1g007102m (locus o range1.1g003241m.g) derived from phytozome v7.0 (chr-ID sc affold00062; pos 313801 to 314819 reverse strand)
taacgttttcgcgttttccagcttgcaattttaaggttagtttttctttttcctctttttcctctttttttttaaattttatttttgtttagttttattcaatttagttcctgctttagttttgagcttcttctttttttcttgatcgatctttagaactgctcaaaactcaccgttttgcctttaaagattttagtctttgtaacttttaccgttcgctcagttctgatctccttgtattagagtttaatttaggttaatctgtggattttatcagggcttaacaatttgggacctttttgtgtgtcgtaatcgatttgagcttgatcacagtttgtggttcttgatgtgcgtgattgatgtgaggttaaaattgataaggagtttaattctattagttgcatggtttaattgttaatatgtgttttaagtgttcactaatttggagtcttagctctgtattagtggttcttttggctagctgattaaaatttagggtttttctagctatggttaagaaattgggaatttcctcattaaaggagttcaatgggaataatttggtcttgttgctggttttcaagtcttgatttacttagttaggtgagaagttgtaacagttatttttgctttttaaattttgtctcgttcgggcttgttccatttctaatatttgttgtttgctttgtctatttggacattgtttagatccctacaacaatttgtcgaaagctcaaacagaacataaacattgcactctatttggtcaaagcaagagcttgtagatttgtaataatcttgagttagtcgatgacagtagtgattcaggagatcagatttgagtttctgtttggttggtgaagtggaaatactgagattttctatcgtgatttcttattttatttcattttatttgcattgtctctgtattttatgatattgagggggttgaggtacgtatttattattgaaagcattagtcagggctggctctggagagctatttagactctagccat

SEQ ID NO: 78491 - DNA, 732 bp, Citrus sinensis
  Intron number 1 from transcript orange1.1g019457m (locus o range1.1g011874m.g) derived from phytozome v7.0 (chr-ID sc affold00005; pos 1472108 to 1472839)
ctccctgtttcgaatcttcataaattcaatcaaacgtaagttttttttttttttaatttaatcaatttatttaagttcgccgtttatctaatctgtagtgtttgttttccggggtcgttttgagcactattaatgcggcttgcgttttaaggatcctatgatatttccaccatgtatttgattttttttttgtcctaatttattatgtttcgtagacgtggtaattctcatttgatttgttgcatttgctttcatatcacgagctctgttattcttatattaaattgcatttttttattaatttctattttcgaattattctagattgattgattttcttattaactaatcaatattatagtgtttgaatgctgtgcattagtcattattttgcattacgcgttatgttacctttacatatgataattgtcattgcttaaaaaatttgtgtcaaaataagttacaaagctactacatcagtgtttcttcagatagaaacttttctaagatccatgcttcatctgaacgtatggacatgtagacgtggctatgagtttttcagcattttaggcttgtcaattttatcttgtcctgtgatttttcaataggcaatagaatgcagctgtgatcagtggatattacgaagatgaagtttatatccatactcaatgctgaagttgggttgtctcattgacagattaggttctcacatcgtatcggtgtcctgccagt

SEQ ID NO: 78492 - DNA, 592 bp, Citrus sinensis
  Intron number 1 from transcript orange1.1g012802m (locus o range1.1g009035m.g) derived from phytozome v7.0 (chr-ID sc affold00003; pos 1951952 to 1952543 reverse strand)
attcacttcttcttcacctactctgttttcaagaggtagctatacagtgtcgtttttcattgccgatgctatctgggttttttttttttttggttctttgtgagtcttttattattgatcaaagtgtttgtgctctgtctggttactgggaaaacgacaacttaaaaagagttttaaatctcacgtttgatgatgatgatgatgatgataatatgatattattagcctttctgatggattctatttataaaataaagtcgtaatttttacaacgttacttggcaatgccattttcttgtataatttatatataataataggaagcatgtcttttcttttcatttttttcatttttactctcaaatgtttgggggaatttcaattacaaatttttgaggtaaacatgtaatatatacgcttttgaaatattaatttatgggtctgttcttcccggtccacagctttagatgatttgcctttaaaaaaaaaaaatcattttgaagttgtacctatgattgttcttttacgttaacttgttctgtcactgtttttttcagggagggattctagtttgtgcagagctgctgctgct

SEQ ID NO: 78493 - DNA, 813 bp, Citrus sinensis
  Intron number 1 from transcript orange1.1g018906m (locus o range1.1g018906m.g) derived from phytozome v7.0 (chr-ID sc affold00145; pos 190519 to 191331 reverse strand)
caaggttcgatctttattaatttaatcaattaatcaattgcctcaatattttttaactatttgagctttttttttttttttttttttaaagactcgatatggctgtggtaccgctttcagtttcaaccgtcaacgtatgttttattatgtgtttggtgaaagcgttaatggcagtaatcttttgtaagtgaagaagcttataatggttcttcttttgggggtcttttcaaaataccgtaacggctttcattttttggctggattctgctttgattaatttgcttaacttctttgccattttttccaatataaaaattgtgaaactccaacttacggggcacaattaacaaagcatttattacacacgcatcgattaccattaacacacccatatggctaggaaccaatatgcatgcaatcttcatgtctaacccactagtcattagcaaaagctgtcttttatgtacctcatgtaaaaaacatgagtaaataccctattgctgcatcttctcttcagttattcaacaagtaattttcttgtgatcatttccataaggagctaattaattttttattattaaaaaaaaataaatgtcacctctttaggaaaagataaggataagttatagttcactctctctgctaattttgtaattcgaaatttgagttacggtcacgtaccattttgtaaatacaagtatgtacgattattaggctgctagaatctcgattaactgcgcctacctggggtaatttggtaatttacaaatcatgaattttttttttggggtcaattaattgcaggaaggatac

SEQ ID NO: 78494 - DNA, 895 bp, Citrus sinensis
  Intron number 1 from transcript orange1.1g021195m (locus o range1.1g021152m.g) derived from phytozome v7.0 (chr-ID sc affold00045; pos 202188 to 203082 reverse strand)
cgcctggttcatcaagctttttcccgattgccgaggtccgatcccaatactttattcgcttttctttactctttgtttgtggttaatatagctagggtttactttttcgagatcaaattttatagccgaagctattggttacatgcagttcgttttttggaatttgacgtggttttttggtttctttattttatcgatttggttttgaatttgaatttgaatttaactccctaatcactcgagtacagttcaattctggattagatatgatctttcttttctaagatcgttgctggaattaatgtttagaagttgattggtagctctagttgaatattatatggtttatagtatgtgaatatgcttaatatatactgggcgtgaatacaaaatgctcacccactggttttgtttcctaaacttttcttattcagtcgggttacagcaaaaaacttttgaaactaatgggttgcaacttggaataggaaatgatatatggtggacttttgatgatgattagctgcggactaacaaatgaatgacaacagttatgtcatttaccatattcagctaattcatttcaattttcagttgtttttgaaaatcaaggtaaatagtttgacagaaattgtcataaaaggcattggcggatttcattcataatatttggttgaaaatcattgtttgtgcattctggaatcattgtttgtgcattctagttgccgtgcattggttcattttttataacctttcttgtcatgaaattatgtagttttgatttctgtttctttgttccctcaaagcagacagcaggctttatgaaatattgctagtgttcatggggtaaataatgctatcggttttgcaggtccaaccattttgttttttcaagaaa

SEQ ID NO: 78495 - DNA, 472 bp, Citrus sinensis
  Intron number 1 from transcript orange1.1g026393m (locus o range1.1g026393m.g) derived from phytozome v7.0 (chr-ID sc affold00062; pos 156473 to 156944 reverse strand)
tctctcagagcaggtatatttttgtgggtttttttttttttggcgtttccttttgtgggtcaacgctgattttggtgtttgcttttgcaagttaagtaaagtttagcttttgagatttttcagaagtaaaaaaatttatttttcttttgatgggagatcaagattaatttgcctcatctgttatcaacccaagaatttgattataattttattaatcttatagatatgtttcgaactgcttaattttgaccgtatagtggctaaagttaacgaattcgcacttttgcagtacttgtggattaaaagtccagtaccatgccttgtatcttgttccacacaattcgacacaagcgagttgcttttctcgtactgcatcatgtagctcaaataggtctttcaatgaagaagcccgtctggcttcaaacatttaaagtgtgatattcaatctaatgatctatcaactttttgcagg

SEQ ID NO: 78496 - DNA, 367 bp, Citrus sinensis
  Intron number 4 from transcript orange1.1g028818m (locus o range1.1g019884m.g) derived from phytozome v7.0 (chr-ID sc affold00011; pos 1741147 to 1741513)
aggggctactcgaattgccaagccaaccccaagtatacgttttattattgcttgtatttacattgtattgagaatggcttttgatgatatgcgaaaacgtaaaacgattagtttttgtgtctttgagattgtgtacctgctaagtaaaatggatgaagcttgcaaaccagtaatggatttcagtgtccagtgctggttagttaaaataggctgtagttgaacattgggtggatgttttaagaacatgtgacactttgcagcaaattggttggttaggtgatgtggtactatttgacatgaaaaatagtaattatttggtaaaaatttatgtaaatcctcattcttttcccttcttttttagaagacg

SEQ ID NO: 78497 - DNA, 718 bp, Citrus sinensis
  Intron number 1 from transcript orange1.1g013031m (locus o range1.1g009251m.g) derived from phytozome v7.0 (chr-ID sc affold00180; pos 246380 to 247097 reverse strand)
aatctattcagaaagttttgaatcaggtattctcctcttcggaaatttaatgtttagcaacgatattggtaattatcggtttgtgtcagctattaatcaatgtgttcgagtatgtagagtttgaattaagtgctcggtcactagccgttgtatttttttaagtggatttaagttatcttagtcagaattaatcttttgttatctttgggatcaaggtgttgtgcttttaatccacgcctgctctgaagtgtaatcattagctgctaagtataggttttttgggtagttggtaagtattagctgcaaagtaaaagtgcatgtttgcaaatgctttaactgctatgctatcagttacttatgtacccgtaataagaatttactgtagctttggactgtaagtactatcacaatgaaggtcaaacctgcatggtaattaacagcagttgacttcagtcctggtatggggccttaagatgcaaacaatcttcagtttcttttcttttttactcttttgtggcacattggcatattattacatcatagaggacccaataatttttgtcgattctgcaagtagtggttctcctttgatatttctttcgtactttcattttattttcctgaccgtcacttcctgtggataatgttttgcttattgttttttacaataaatcaacttgtaggtggagtattatttcagtgatttaaacttggccac

SEQ ID NO: 78498 - DNA, 718 bp, Citrus sinensis
  Intron number 3 from transcript orange1.1g004710m (locus o range1.1g004007m.g) derived from phytozome v7.0 (chr-ID sc affold00003; pos 1987140 to 1987857)
gcttgagctttccacggccaaggagcatcacaagtgtaagatccttgtcttttccctggttgttttgattacttgtagttcgctgagacaagtgaaacgaatagacaaatcaatgtttgagagcataaggcttgctgcaacatagtcttctgaggtgtttttccccgctgtattatttctaacagaatctggtttagttggaacttctggcagagagttatttttgtttcctagtgctgcctaatttacagacttttatgtttttagctgctatcaaagttttccaaacttactgacttcattttgtagcttcctcaaccacccacagaaaagagtacatatatatatttgaaagattacaggtgttcttgagagttactatctagtttgcagttttatgagtttagtgggtgggtgtcagttttatcacctccgtactggtttctcaaattttttgcaatccttaaaaagcctatgataaaactttattattcattttcgccatgttctttcccttcatcaattccctaaaattgcatatttcatccactgaagggtttatttgaggagtatatgacattctacagagccaaaaccagttattgcaaatgataagctaaatttgtttctataactgctgcggtcattgtgtattaaagtatgcttaagatgggaaggataatgtataaaatttctgaaaagttcaataattttgcag

SEQ ID NO: 78499 - DNA, 577 bp, Citrus sinensis
  Intron number 1 from transcript orange1.1g005558m (locus o range1.1g005558m.g) derived from phytozome v7.0 (chr-ID sc affold00356; pos 156702 to 157278 reverse strand)
ctaattttgtttctttatccattctatttcaccaggtacattttctgggtcactatttttattgtttattgtttctttttctgtgaataaatttcggtttataaagtttgtagatcgtgggtatttgagttttgatatgggattcattcagatccattctttatgtcttgtataattgattcttatcttctttaagttctttatcgttagatctaatgttgaatttccacccattgaatttctttccacccaattgaattttattgaatcttgcagctcatttggtcttctacttttagtgctagatttgtgtagatgatatcatcattgcagtgaaagctatccaattcatttgaaattaatgggacatttaatgttcaggttgaacttaacgcatagttcaagtttttatttattttgtatgcacttttgatgtggaaaatgaatttttcttatgcttcttgttaatataatacttttatcaaagaaaaaaagttggaatttttatgacgcatttgggcttctatgtggcttctgttacgtatgcagtgaatttttggtccaaacggttacaatt

SEQ ID NO: 78500 - DNA, 614 bp, Citrus sinensis
  Intron number 2 from transcript orange1.1g031727m (locus o range1.1g030286m.g) derived from phytozome v7.0 (chr-ID sc affold00003; pos 1709719 to 1710332)
aacaagtcatctgggttagctttgttctgcaacttcatttagttttaaaaattgctaatattttggaatttatatgtaatataggagaggaaattctcacacattttttttcttttgaatggttaattagtttactaagagcagccatgtttaggcctgtgaattgtgacaccaactctacaacacggctgttgaagcctaattcaaaaggaaataagaatccatgagacttctcaggatgcctcactatcgctcagttttgaggctgaccagaaaatttcgtgcaaattgaacatagaaaagcccggcgaacttttaaaaattatattagtagatgctttgtgcatagtctaaatataagggtagtcgtatctcttaaatttctagttgtttttagtcaatcattgcttcacttcttttttttaccccctccttctttgcatttgctttgttattactgcttgctccttttcattctctatttttcactatagtcgaccttcaactgttgctgttgtctgtctactttatgtttttggtatattggctgcttgtatcctctgggacttggctttaaagcatttcactcttattgggaggcgctgggccccaca

SEQ ID NO: 78501 - DNA, 826 bp, Citrus sinensis
  Intron number 1 from transcript orange1.1g027604m (locus o range1.1g027315m.g) derived from phytozome v7.0 (chr-ID sc affold00003; pos 582024 to 582849 reverse strand)
ggacaagcggatagcttccgagacttgagtatgattccgtcattcttttttacttctcataagtcatacatacgttgttggccatgattgtaagtattttgtatgcttagatcttatatgttgggcttatgcttctttgtccttcttgattttgagtcaacaacttttgtttcccctagcatatttgtgtatttctattatgatgactttatgtattgagtgtcttggtgggaatcagtatgcgcctgagcttgcttggttatgatctatggcagcaaaagtagccagctttctgagaggcacatactcattgataatattgtcacttgtatctcgggagtttatttaagaagtatcactatagaaatgagttttagattttagaatatctgctgctgaatattgcaagtacttgatagttctccgattgttgaaatgttttgttactgaatttatatgtttttttctttctttgataatctcataaaggtaaaattcttatggcagttgaattagcaagcattatagatgtataaatcaaatgcgcaatacatgatagagaataatggattttgtgtcgttggtaatttttgtcagaaaatatttgcaaaatgtagtccataacttcaatagtttgtcttctcttcagcaatatgtttgggtcacagaataatttccatcttcttttattgtagaaatatttggcaacttaattttctatactttaataaattgttttaccgagggtttatgcttgctactgatctggaatatgcatattttctttacaggtaacacagaggaagcctttcttgattcccatccc

SEQ ID NO: 78502 - DNA, 133 bp, Citrus sinensis
  Intron number 2 from transcript orange1.1g025355m (locus o range1.1g022083m.g) derived from phytozome v7.0 (chr-ID sc affold00003; pos 954285 to 954417)
agtatgtttgaattaatgtattttattttttcttcatattgtgtagtcttgcttctcggttaatttgtttgttcaaaattttgatacattttgtttaggagcaaagtttattggccttcataacgctggaaaa

SEQ ID NO: 78503 - DNA, 376 bp, Citrus sinensis
  Intron number 4 from transcript orange1.1g025355m (locus o range1.1g022083m.g) derived from phytozome v7.0 (chr-ID sc affold00003; pos 954934 to 955309)
actgccatttcttgacggctctacggaagtaacatgtataagtttcatgttcgtcttctttggctaattgatggtccgaaagtttatttttattaaccttgattaaaaggacatattccacatttttatgcacggaaataaatatttaaagagtgaatttctgtgtaccaaaaaataaaaaataaaataaaatttcattttgttcttttcatattctgtatccatgaagttttagaaatttcttttggctgtggaatcatcttttgaatgttttttattcacgtatttgtcagctcttctgttattgactggatttagctgttccattgctctgaatagtctttattttccctgtgtgtacagttgattttgagct

SEQ ID NO: 78504 - DNA, 819 bp, Citrus sinensis
  Intron number 1 from transcript orange1.1g024105m (locus o range1.1g024105m.g) derived from phytozome v7.0 (chr-ID sc affold00137; pos 162899 to 163717 reverse strand)
gtgggtcgaccaagactcttggaaactttgtcaaggtttcgatctcactaaactctttaattggttatttaattgggtttaatttatctaattttctttgcaatatttgttcttttttttaaactttgtttttatattggttagatgctctattgtatccaacgatctatataggtgactgttgaattgtattatattcttcgttattgaaatctaactgttgtgttatttcttgttgtgggcattgggaattaaaagttattgattattttggtactgttcgtgagatgcttttctttggggttcagatgattagtcgatgcccaattggtttctcatgaggaatgtaattgcggtataatatgagtgattatccctctttattgttgtttggattttgtccaatgattgattatcttacttgaatttctcagtgtaaatttgtgagtgtatgcacaaaattttctgtgtgtaaactatgtgtcctgattgacttgaatgttctaaaaattgtctgaattttgattttatctttatgcattagaactttttgttgttcacagatgttcttggaaactattaaagcagtttgtggagttatcttgttttagcttgatgttgttatgcttcctttagagtgcttttttgttgtgaaacagtgtgaagtgatctttcaatttcttcttaagtttcataatgagtggttgcaattcaactttcagttaacaactttcatgaactgaatattattttggttagcatatgatggtcctttttctttgaatccacaggcaacctttgagtgtttgttgaagacat

SEQ ID NO: 78505 - DNA, 1002 bp, Citrus sinensis
  Intron number 2 from transcript orange1.1g011918m (locus o range1.1g008264m.g) derived from phytozome v7.0 (chr-ID sc affold00005; pos 676104 to 677105 reverse strand)
gatcggcttcggttgcttcacttgccttttggttggtaatccgtagtccgatatctatcactttccctacttacttgcacgttagcattactatccgtatttggtggcctcatcttgccttgtgttgtgtgtatgtgcaagtggaccttcctttttcaatctctttctttgagtttcttttgttgctttctttctcttcccattggtccaaggcctacgtttttttcccatcaattaatacagaagttgtcatagttagatatttatgctcctgtgcgccataatatttatgcttatatcaattattaattatcgcacttattggatttttgcatcaggtagctatcaactaagaggattaaaagaatagtagctatcaaaattttattataatccttttttattgacaggtgcaattacaccaaaaaataaaaaagaaaattaattgaaaatggtatcaaaaccacttctaactgaaagtgtgcaagtagtcacacctagcgaggacccctagctcaaaatcgtgccatctacttaagaggattgaccttcttagactcccaagactcacttaattggattagattactgatgtacgttagattaacatttagataaaggaataagtgatttttttttatataacttatctaataatcataagtacttatttaattttataaattcttatcaaaatttaaaaattaaataaattattttgcctctattaataaaatttgagtttttattggttgaaagtttttcttaaatgttataatgtttagaatatcttttactcatttaataattttatttcattattttcataacataattttaaaaaatttatctattaaaataattttataatatttaataaaagttttcattaacaactaaataattaatttttttttttggttataagttctatttataaaaactctatttgaaaaactatactaaagaaagcctaaatgtctaattaacacttaacagggg

SEQ ID NO: 78506 - DNA, 1002 bp, Citrus sinensis
  Intron number 2 from transcript orange1.1g031982m (locus o range1.1g031982m.g) derived from phytozome v7.0 (chr-ID sc affold00014; pos 492142 to 493143)
agtgttacaattattggaccacctgatactctttagtatgtgttttttttttcatagttaatttggtttaattcttgtgattctatttttattgtctttgttttaaagcttttgggatttgggttttgtttaaattttaatgattctatttgctgagattagatcaacccatcggattatgtttttggtttattttattaatttacctgggttttgggtacttgggatatttgttgatgtgctgccgggattgtattgggttttatctattgttatcacctgaattctgaatttagccggattttggtatacctttaaaaagttgttggtatcggtgctttctagaatagtgtggtttctaatagtttgtttagtattttgaaattgggttatttaattgcttttaggaaactgttgcttgctgatgatctgctgtagtagttgctgggttttagatatggttgatactagagatcactgcttggcttggctgtgatattagattgggtattttggtttaattttgataacttgaaagcagtaacaaatttttgttaaatgtattattctctactgctaaagtgaattctttttcaaattggttcacctctgcctccttgttttactggttgtaaaagtcaccatatttatcggttttgtgcagaggctatggaggcatgcatgtgtttctctcttgtgatttcaggatgctgtccaacatcatattcttgaatgcatttaatgtttggtttgaatggtcttgttgggttgcagctatataacgtatttgagatgttggtttgtaccatatttttgtgttctttgaattgagcagtgtgtatgattttgtttctctgcatgtggtgatgtatgtggtttacgtatttgtaatcacattatctaggtgaataagctgtttttcttggctttccttaattgcttaaagggatgaattgtcatgtgttttaaatcttttttattacagtgaggggggatttttca

SEQ ID NO: 78507 - DNA, 579 bp, Citrus sinensis
  Intron number 5 from transcript orange1.1g021258m (locus o range1.1g018496m.g) derived from phytozome v7.0 (chr-ID sc affold00014; pos 706716 to 707294)
atacctgttgtgagttgagtatgcatgtttatttgggatagtcaattaatgcagccacttcaaaatttttgcatggaaattttgttcttgtgtttcaactgtttttagtagtcttatattgtatttttcaaccttcattgtttaatatcctatttgtaaaattattgctgttcttcctcaggcaaaactgcggctcctcattggtactgagctacatgctcacgttcgggcatgcctgctatttgctttttctaatagccatctattttttatttaccctcgttaaagaattgtctgagaaatgtctttctatatttgaagttaacaagatgaaggcttttctaaatcactctttttgaggtctttataatccatttttttattaaagttggttccaaactttcctatacatggattatttcattttacaaatgtagtattgctctctattgatagatgctctctttgatttcgatccttgttctaaaataagttaagtttattactttctttttctgttatcagatgaatgctaacataattcttgttttgtttaaacagatttggggcactctcatc

SEQ ID NO: 78508 - DNA, 606 bp, Citrus sinensis
  Intron number 1 from transcript orange1.1g041174m (locus o range1.1g041174m.g) derived from phytozome v7.0 (chr-ID sc affold00049; pos 27302 to 27907)
gataacggtggcgcctttaactttgagttaattcggtaagtttatgtaattcttgaatgggtttattgttttaatattaattgtagatgattataggttaaatcttattcaacgttagtttcttaacactaggattgaattggaaatgaaaattgacaaaatgttcttgaaaatgtggtactactagtgtttgttgaaatgcctcaaagaatatattttgttgtttaggcttaattttgctattattttacttgaatgaatatccaagaatgttggcaactggtattatggcttgaatgtagggaatggtatagtgctttgtgtgtttatgtgcaaaaggtgtttgtcacgccaaacattggtgcgacaggcacttatcgcacaaaacatagcttatgtgttttatgccacaggcatctgtcgcacataaacacagtaagtgttattttttaatgttattaaccaattttgttgtgtttttgttacaaatagaacggaagatgatgacacttttggtttgtttaagatatggctcatggatgactttagagttaatggaatatggaaaaagatagcaaaatttggatcaactcagggtataggcca

SEQ ID NO: 78509 - DNA, 587 bp, Citrus sinensis
  Intron number 3 from transcript orange1.1g023646m (locus o range1.1g020703m.g) derived from phytozome v7.0 (chr-ID sc affold00050; pos 706979 to 707565)
ttgttgaagatgtatccaaatgatcatgttatgtatttttctcttcaacttactagattatgttcacgcttgtcttcttggattcatttatgctactgtttccagtttcttgttagttcccttgaaagctcaattcataatcatagtaatttcaatagtgtgacagtccaccatttgttttgagtctgcacttttcgggacttgttttcgatcaatggactgaatgaataaacatgggtttgttgtgaaggacatttcaaggtgtgctagaaagcgaatacagcatctagttttgtattctatgtacatatatctgtggttgctgcaggttcacttgttgaggattatacgtgcatgaaaactgacacagtgtgatgtttactatttgccctttgttgtcctgactacataatctagattcagtggccattaaaactcggtctgcctgcttgaaatccacctcctatactattgttctgttgttattggttgctcgctaatgtccccattactagtgattcttgttcctggaacatcttttgctattccttaatgcaagaaatcacaggatcagattgtttttcctc

SEQ ID NO: 78510 - DNA, 950 bp, Citrus sinensis
  Intron number 2 from transcript orange1.1g017909m (locus o range1.1g017909m.g) derived from phytozome v7.0 (chr-ID sc affold00017; pos 181920 to 182869)
atcattgcaagtattttgtctttcaggtattatatcacatctttagtagcattttataagaggggttttttaatgggattaaactgtgtgaatctgctaaataacttcattctttttactgttttatttccaatgcagatttatagaatatttcttgacataaatttttagtgagaataggaaatgtattagcttgcttatgattggactttgcttagctgaggatttataagtttatgtagaaaacttgtttgcttaacgttagatgggtattcaagaaactgaaacaatcaacttggaactatgttgttgattgttatatttgtaattttggaattttgatactccttcaaatggtaatcttgcatcaaaatctagtattggttggttcttcttgacgtaatttactttcagtcctttagttgaaatttgtttgcttttgataacttcaatgaagggaaaaattgataatctattagtcctgccaaaaatgtgctgtaacggtgtatatcctgcagttctcgaccaagtgatgcttataccttgaacattcttctgattcagccttttgttcaatcacagagggggttatcatgtcaaggtccttttgtgatgttgtttgaaatatgtccctctgtcccctcttgtgctctctgtgattggagtttaatctacactacaggtagttaaaagctgtgctgcctgctagtaccttatggttacaagaaccctcatgcctctcttgtgttagcactaatgactgtccgactatgctaaatggagtttgatttagtggcatagaaactgtgtttttttttcttttttctttttttacaaaactgtagatgactctcaagcgttttattgtgtttggtatttggtctgatagtgataaattttaattctatgttttagttgctgcgagggctgaagtatcttcactcagcaaa

SEQ ID NO: 78511 - DNA, 861 bp, Citrus sinensis
  Intron number 1 from transcript orange1.1g045863m (locus o range1.1g045863m.g) derived from phytozome v7.0 (chr-ID sc affold00065; pos 489602 to 490462)
ctcaacaacaacccaacaatcaaaagcagttccaggttctcttttacattctttgtcatgaaaagttcaagtctttatgagtagccagttgcgctttccttcatgttttgcaaattttgtagttattgattggcgatttgattaagcatgtataaaggcagctcaacttttttgaatgtttgtgttcttgttctcctggttttggtaaatcatttttttcttactcaatattcaatttttaagacagcccgtttatctattttgctaatatatgaattcggattagtatattgtgtaggcgtgggtgaataagaaatagctcctattgtctgttaacgttttcattttttgagattacccatttctttgtttagctatttcatgaatttgggtgaaggacattggttaagcatgtgtaattctggattaaaaaaatttattaagtggtgttaaaagttttgattaaattcatgggagtagtttggaagtttattaatttttgaggttttgcatcttaatttgaaatattttgcagtcagttcacagatgcaatcttggcccattaagctgaaaatttaagttgttttttgcttaaatgccagcttcagattggccgtcagttgctgcagggcaatgttgaaaagctattcaattgttatagcagtgtctatttgtttatggagttctgagttgaagtatgtaacaagtcctacttggttttaaattgttaaggagtgaattggatgtcactatgaaaaatgttattatcatttatgctgcatcttgtgtcttcctgccagttgtgttgcttcacattgaccctttaggttgtaatcaggaactggaatcatcatctggaac

SEQ ID NO: 78512 - DNA, 534 bp, Citrus sinensis
  Intron number 2 from transcript orange1.1g039325m (locus o range1.1g039325m.g) derived from phytozome v7.0 (chr-ID sc affold00218; pos 248151 to 248684 reverse strand)
gaaatttgtttcttgacagtggactgcacaattagtgaatatggaggaaatgaaacgaaagtagatatagtccactgcctgtgaaattggtatatgtgattgatttgcaattggattttatattacttgcagcttgagttaaaatatgcagctgcaacaaattctttcgtgcctcatcaataggcagctgaaacctattgtatgaggtacattcctgattttcttattgtccccaagttcatggaaatcggaataaaatttgttcaacaaaaatgtacgattcttgaaatttgaagtagaagattattatatcaaatattttgataatcttttgcattagaaatattgaacctggggatcttccggaaatgaaatatttctcttgccgcaggactacgaaatctttataggctatatctgcaaggcttacaagggcaatatcgtggctaaggttgcggcaacctattccttattaccaaccactatgtggtcaaacaagagcctgtctttccagctatctataataaggagata

SEQ ID NO: 78513 - DNA, 492 bp, Citrus sinensis
  Intron number 1 from transcript orange1.1g005566m (locus o range1.1g004889m.g) derived from phytozome v7.0 (chr-ID sc affold00011; pos 124733 to 125224 reverse strand)
gtctcaccgagtccaccaagcttgcgaggctttcggtcagtcacttagctttttttttttttacttttttaatgcattgagtttatttcatttgcttatttgatgaatttagtgcttgatcgaagaattttctaggccattgagcagcggcgtctttgtgtggttttattgattattgttgtgtttgatgaactgaaatgctcattctttgaatttttcgttattttttaattgatcttggtaactaaagtacttagaataattcaacgttaataagaaaatagagaacagaaagaaatgagaagaaattaaggtttgatacctacaacgttaaaaaattgcaaaaataacaataaaaaattggttttctttatagattactaatgtgcattccttcttgtatgttttctttatacattattgatagatttggtctctttgtattactgttgcgcagcacaaaacaactgttatactaggcatcttgcgaag

SEQ ID NO: 78514 - DNA, 438 bp, Citrus sinensis
  Intron number 1 from transcript orange1.1g003518m (locus o range1.1g003518m.g) derived from phytozome v7.0 (chr-ID sc affold00003; pos 4271691 to 4272128 reverse strand)
tccctcacctgattcttccccctgcgagatcaccagtaatccctagactctctctctctctttttgggttccttcttctaatttaaatttccagttagagcaaataaattgcatattgttaaacgcaattcatatcaaattaataattagcgaaatttcgttcgtggtggattgaatcttgattttcttgaaagcacccacttttttcaaaattagatgctttttatataaaattaatatttaacattaagtttctttattgtttagagtgcttttagcgtttagttttttgattgaaaggtgcttttgatcactagaggatgtctatacaaaattgatagttaaaatgaatggtctttgttaaatggtatatataacaagtgaatgaacaactttgctgcagttacttttgcccaaaaatacgaggtgcggcaggta

SEQ ID NO: 78515 - DNA, 567 bp, Citrus sinensis
  Intron number 4 from transcript orange1.1g011976m (locus o range1.1g011976m.g) derived from phytozome v7.0 (chr-ID sc affold00338; pos 171658 to 172224)
gtttagtcttcatattccaggtatgggggttgtggtgaggagctttttttttaaaaaaaaagtcaaaacctggcatgtcatactaataggtttttcatgaaaaaggagaacacccttggtgtctgctagttgatgttacagttttctgcaataatgaacgtagttgatcatatgtaactataagacgtagttttatgtgacttctacggggttcctaggtatcactagctactctcggtgtttcgaaagcatgttttaacttttgttttcaagtattttgcaaagcttaaccaaaaaactgtttaaaacctattgatcacaacttgatcaatcagtggtgactaaatagttaaggcaggttattccttgtgcaatggctaccttttgagctattattgtaaataatagttctccaggatctcttctcatttatttcctacatatgcgatgcactagagccacattaactctatgatttaagttttgaagaaaacgtgagtgtttttttcattttggttgaactaatttgcaggaaacaacggcaagcgtactgactgctgcacttgc

SEQ ID NO: 78516 - DNA, 866 bp, Citrus sinensis
  Intron number 4 from transcript orange1.1g023801m (locus o range1.1g020501m.g) derived from phytozome v7.0 (chr-ID sc affold00011; pos 535876 to 536741 reverse strand)
aactgaaagtcctgttctatctggaggaaaacctggtgagttatttttaataactagactccttggatgatcttttctctttgcatattccagtttctgcactctgcatcgttttatgaaatcagtaactgggatgcacaagtattggtcacgcagtttggcattgaacgatcatatgaataaaggagaggaacccttgtagtaggtgtagtagtaaaagctagcaacacagttcaaactttacagagaaagactcttttttaaaatttcgaaactgaattctgcagcatgtctgttgtcctagctatgcttatggaccaagaccttttctatggtgctctggccaacttatattggaaaagatcatatcatattgtttgtgcttattgaagcatattatcagttctttctgtgtgcatgtgttcattaagaaccataaaaacgcaaccgtttcttatttcttctgaaacaaatagtttggttttttctgttaatatttcaaaaacatttttaaaaaagtttttgttgttgtaatgtgattgtctttgatataatctccttgtacatgcatcatagtttcttaacatataacattaagtccgatgccacagtgtgtaatgatcttggatcctccgattattttgttggtaacttagtttatttagagtccatgcttgtttatttgggctggtagatgtatattttactcaacacatgaaacctgatatacccctttgccatatgtacgtctatgcagacttgtgtgatacagtaatttcttcagtattggatgtgactaacctcaagcatattctctgtcttaatgtgaaggccctcataagatccaaggaataggtgctggtttt

SEQ ID NO: 78517 - DNA, 648 bp, Citrus sinensis
  Intron number 1 from transcript orange1.1g010812m (locus o range1.1g008741m.g) derived from phytozome v7.0 (chr-ID sc affold00003; pos 3824544 to 3825191 reverse strand)
agtgattctaaggtgagttctttgttcgactgtagtgatttatttttggcttttttgaatttaattgatgggtgttgggatttttgtaaattggatgtgtgtaatgtgtactaggttgcttgttaatgagtttgttaaagggtgcacttttgggattgaatatttgattaactcattgcttttacgggacttagtggatgaagaatttggcttttatttgcttgtatttgcttgtattgtgcaaattagttcttctgtgaatgggaatttttaaacttacccctacaatcagacaattgttggtctgagctgtgagtaacttttttctttttatattcctgatttacttttctggaagctttatatatgaggaatactagtaattgcatgcatcagggatactagttggtttatgcatggaagatcattgacattattgtatcaggaagaatagttgatttacacgtggaagatctttgacattattaattgtctactgcttcttattggttttgtcctggtcatcatagataagttgtgatcaattattattattattattgttttttttgtgtggttattcaccatcttcatttttcttttgcaatggcagttatttgtttttgggtcatttaccgaagaggaaac

SEQ ID NO: 78518 - DNA, 782 bp, Citrus sinensis
  Intron number 4 from transcript orange1.1g018848m (locus o range1.1g014177m.g) derived from phytozome v7.0 (chr-ID sc affold00208; pos 195357 to 196138 reverse strand)
aaccactggaggaatctatccaggagtgagcagtgcttttatgaacatggacattcttgtcctgctatccgcacttctagcactgtaaattatacgattaagtgaagaatatggatagagtactaattctttaattgaaacatgtgcagactaccaattcttgctttagagctaaaacttaattgttggtaaactcatagacctgggtccaaagttcttatatatgggtgcacatattggtttgacagatagttttagtgactttatatcattaacttgagtattgcaactaagataaagctcaaagctttctttgacaaagtcttcaaaatcttgagctacttgcactacataatgattctttcagatctccaagggcatatcttgcctgaatagccattttgcttctgctgaaataagtatcaatattaaacactttagatgacacttaattaggtagggctcttaaacttgagatggtttctattttcatgcttacattccaactaagctgaattatctgatgcccagtccctgctctttggatctgtttatttaattttggatgttgggatttttgctcaagatgatgcaaagcctcctctacttagatttaggcaagctaagtgagagctctgcttgtgacactcgtacaatctatgagattacagcaatttttaaaattggactatgctatgtcttttttgaggagtgaaaaattgtatctgctattatgctgcttttggatccttatactaactgatatctgttacatgacagtg

SEQ ID NO: 78519 - DNA, 677 bp, Citrus sinensis
  Intron number 1 from transcript orange1.1g018848m (locus o range1.1g014177m.g) derived from phytozome v7.0 (chr-ID sc affold00208; pos 196863 to 197539 reverse strand)
cccgaccttcagattgtagttggctctcgaaacaggttaaataattaatacccttttctttcttctgtttggtcaccgaaaaaaagcaagaaataaaggagggaaaattttcaagctttgttcttttcttgtttttttttttttacgtttactatgtttctttggttattttaaaatttaaaattcatggtgatggctactggtaaactgcaatgcttttacatggttctgaaagcacatttctaaacagtcactcaactacaagtgattatcatgtcccacagttgtagattagggctccaattggtagtgatgttgtgcggtcgtggcttgttaagacatctactcttaaatgagagctctagttatgaaataaaagttcatagtgtctggtaaatgctacctttaaataatcatttcgacaaaaatagtaaagctaatataggtcgggcaattgtgggtaaaatcgtcataattttcaaactgtaattgtgagtgtttaccaaatactttaaagttgtgattagatggtaataaaaaagagaacctaaacagtccataataatattgccaatgatgcaaaatttgtaattctgtctctttttggttttcctaaacattcgaaaggctgtttttgttgattgatatgctttgactgtgatatgttaatatttaga

SEQ ID NO: 78520 - DNA, 875 bp, Citrus sinensis
  Intron number 1 from transcript orange1.1g000046m (locus o range1.1g000046m.g) derived from phytozome v7.0 (chr-ID sc affold00289; pos 187065 to 187939)
gtcactgaagccagggtactgtgtctatatttagcaaacgtttgtttttgttatacacacacacacaaatatatatgtatgtacataaacacacacacacacacacacatatatatatatatagacacacactcacatatttataattatgaaaagaaaatctgaaatttcattctctgtgaagagctagaaaacacatgatgggtagttgtcattggagaaggtccttacttttgaattattgttgagataattgaggaacgagtttaaaacaaaagtttggaaattgtgaaattgtcatttgtatgtggacatttttgataaattgtgaattgtgtgaagcagagttccgtgcctttcaactctagcacttgcaggcagagatggcctaaagttcaagacatgacaaaattgtttctggaaaattctttgggaatcgaaaatgagaatttgaattggttctttcaacatcctggaaagtgtttaataacatattgtgaaaagacaggaaacagcttaatgtattttgagtttgaagctaatttttggagaatgaatttttagtttgcagaaatcctgtttctgaaatacagtagcaaaaatttatttttatttttttttgtattttattttttctttatttgtgattgtaaaacggaaaatgagttctgaaacagtggcaaacactcccataaaagtttcattatcttcgttcgattttattattcttcattttttcagcatttatgtgtctatctctgtcttcttttttatcagcactatgttgaacattaagcttttttaggttttatcttttttgtttcctcggattacatattaatgtcaatcgcatggatatttgtttcttcagataa

SEQ ID NO: 78521 - DNA, 755 bp, Citrus sinensis
  Intron number 1 from transcript orange1.1g006628m (locus o range1.1g006628m.g) derived from phytozome v7.0 (chr-ID sc affold00153; pos 262689 to 263443 reverse strand)
tccggcaagtctcctccgccgccgccttcaatttggtaaatctcttattctcttttctcccattatatgttaacacaaaacgaatgcactatatttttatttgcatgtgcgtgacgttttatatatgtatctaactgcatgttatgttgtgtaacttctgattttaatggcgtgttacaagttataatgaaagtgttttctcttggaaaatggaacatggggtttctttttctggaataaaagaagatttttttctcggaaaaagttttgattgtttcccaagaaaatttcatgaaactaatgagattcctgattctttaatatagtgtttattattctttccctctttctgtttgtttctaaggaaagaagataattagtgctgtgttattttttttttttcacttcttgcgaactttgttttctcagcaactaaacgggaaaatttaggtttgagtaaggttgtgtttggttaatcagaaaattaaataaatgcgaggatagtttttctgaacaaaataattaatttcattgctggtatctgtaaccgataatttcatttgaacaactagccttgacacattttcttttctctattttgatttatcaatgtgtctaatatggttgctctgttccatatcattccctgtttcatcatctccattgggtatattatgtttccctatctccaagttatccagattgttgaagtattcaattgtatcatctaaatacttcactttcttttatcagaa

SEQ ID NO: 78522 - DNA, 359 bp, Citrus sinensis
  Intron number 1 from transcript orange1.1g038005m (locus o range1.1g038005m.g) derived from phytozome v7.0 (chr-ID sc affold00034; pos 785011 to 785369 reverse strand)
ggaggattcatcaaataaatactgcactctacgatgtaagttaaaacttttctctttcgttttgtgggagaagaaaaatgggagaaaaggatcgataatggtctgtttggtactgaaaagtgcttttcgaaacaactaaacaaacagagtttcagatatatcaatgagtttacgaatttcgactatgtttattgttgtgaacgagtttgttttgtattattttggcattgctgcagatcagttaattaacattttgacttttctttttggtaaattgtttttgcaaccaaataacaagtaaaagttcaactatgattaaattaggacttctttttctatcagtttttcaaatttattag

SEQ ID NO: 78523 - DNA, 688 bp, Citrus sinensis
  Intron number 1 from transcript orange1.1g008211m (locus o range1.1g008211m.g) derived from phytozome v7.0 (chr-ID sc affold00003; pos 2753352 to 2754039)
ctcatttaaggtacatttatatattttatttattcgataaagtttgtatgttaatttatatttctcattgaataaggcgtcttcagatctttgcatctgcatgttcattagttttttcgctgattgagtaatgagcagttgttaatgtttctaaagtttcttcattttcagataaattcttagatccaacctaactttgttcactgttagcttcctccatttcattgtttcagtttgtatttgcttctcttgattaaagttattttcttttttggggttcttgtggactagatctctgatatttttttccttattttaaatgctcctttagttgtttttagttgttgttgtcgtatgattccttttctgggtattgggtagatttggactgtggttgttgtttgtttccttttgactttgaaattgttgaatgtgtacgttcaatgtacttcaagctagggttcctttttcagctgtagttgctgtctatgttgaggtttttggtccaaatttttgtcttttctttttccttaacatgctgcccgcagaaacttttaacatttactggtctttagctcgtgcaaaaatgctaccagccactgttaattcttttttttttttgggaggttttaattatgcattttattttactttttgtagatttctgtattcacattgattatcaaat

SEQ ID NO: 78524 - DNA, 751 bp, Citrus sinensis
  Intron number 1 from transcript orange1.1g007076m (locus o range1.1g006707m.g) derived from phytozome v7.0 (chr-ID sc affold00048; pos 761676 to 762426 reverse strand)
cggcgtcgacgtcggcactggcagtgcccgcgcaggtcaatgaaatgatcgctcgattatagttttaaatttcctgaaaccataaaacacagtttcttttaaatttcctgaaaccataaaacacagtttctagtaagaaacaagaattagacaacaaaatgtataaacttctttgaatatttattattttattttatttttccaccaatgaaatcattggttgattacaaattagttgacccttgtcttatcgaagaaactgaaatttctttataaacttgtgttaacattaagaatttcgtataagactgctagcaccaagtgtgccagttacacacatgcacacatacatacgcagacactttaacttcaccgtaattctgatttgagcggacttaggatatgtttgggattgaggtggtatgttttttgactcacagctgttgttagtgcctgttgttaggcggaatcactagatgttaaatatagatgggatgagtggtaagtgttagctgctgtgtaaaagtaggtgttcactgaacacttatagctgccatggttttaaagttaggtagcagcatagtagtcttgagcatagttttagtttcaagactagaagaattcctatcagtcgttttatgtacataattgtccatgtcctattaggaaagatcaatatgaatattactcttctgagattttgtaatagtttattgattgttcttgctgcttgatgatacaggtttgtttg

SEQ ID NO: 78525 - DNA, 749 bp, Citrus sinensis
  Intron number 3 from transcript orange1.1g028075m (locus o range1.1g028075m.g) derived from phytozome v7.0 (chr-ID sc affold00017; pos 584289 to 585037)
tttagtaagaagatcatctacttcttcggcttcaggtgggttttaatagttcaaatatcaggtgtgtttgctttcatgagttgtaaattcgggtttcaaagtgaagtgttccttttgtttattgccttgtaagtttttcactcttagtttatgtttaaaaaattcagaaattaaggtctgtgaagagaggactgctctcagttcttaaatggtacaaaagtcccaaagctttggaaaagtcagaatttagaaatatataaatacaatgtaaacattgataactgctttagcgggctcattatttgctagctagattgaagtagcatcaggctttcaccattatggttgtggaacctttaatgagctgttaaactcttgagtcataattggttgcttaatgcgaatatagtttctgggttgattttcctcacaaaactactctgcagtgcgaggaaattggtatggttccctatggttgagtctagtgtctgacaagcaagggcaaaagtcttcattagtactcttgttaatcttttcttttaagtataatagtattcatggtaaagtgaaatgtgatgttggttttgtttttgtcaagtgtttatggccccagaagcattaagctgaataattttgttctcttgagttatcttactgtaataatttggttggatttaatttatttccatcttgattttttgttcaataatataggtactgtgaatccaaaggtgctgctggagcttttc

SEQ ID NO: 78526 - DNA, 902 bp, Citrus sinensis
  Intron number 1 from transcript orange1.1g025673m (locus o range1.1g025673m.g) derived from phytozome v7.0 (chr-ID sc affold00011; pos 90809 to 91710 reverse strand)
tactcccttaacaggcaaaatcctcttttgccaaggtgaccattaatacccacatcattaaacaattttttttttcttgcttgcgttgtttcttggtctttcgtttttgggttgttgaatgatgatccgatctggatcacttttatctttttgatacatgttgatgtcccatttttaaggactattctttggtggtctgatgatacataattgaatttcttctatggatcttggtgagattttgtgaatttaaaaagaaaaagaaaaagaaaaggaaagaaaaattggtactttttgttactgttggatggtgcctgaaattaattgtttcggttgaaatgcattaaaagtttgatttgtttttaattatgaggtgatttggtgttacggtggcatatagtccaaatccagagatcctgcttgtttgtttgtctgtttgtagttctatttgctcgtctatttaatttattttcactaatattattaagaaagacaaagatgatggtgtccattagttgtattaatttatgtgatttcaactgttttgtctattatttgtttggatgttccatataacagaaatattcaatcaatcatttcgttggggaagatttcaattttggaagcagcgctctagggtttcattttaattggacaacgaaactgactcctttgttgcttttgagtttcttgttttttagtggccgtgtctaagcatttaatggattttgggtttgattaatctttcaaaaagacatctgtttgctgttttcctttctaccactcaatggggatttgcaaagctttttttctttatatcctagtatctcatttttgccgcacgcaatgatttgtattcatatgtgttttgttgaatcttgtcagattatttgcggttgtgg

SEQ ID NO: 78527 - DNA, 693 bp, Citrus sinensis
  Intron number 1 from transcript orange1.1g035741m (locus o range1.1g035741m.g) derived from phytozome v7.0 (chr-ID sc affold00168; pos 70420 to 71112 reverse strand)
attgagctacaccggcccagtggtcactcggtgaggtaccttgtcattcaggtttttgcattacaactaattaatatgttatctttttttcagaatcacctcatgtcatgtattaacttgtaaattgatcacttaaaataaagctataactgcaataccgtgatgtatgattgatcagtttacttcttgcaaatgttatagctgaagccttgttttctttgctttctgttgccagttatatagatgaagctgaacatgagtcaactcatcttggagtgccagctggaatgtttctgaatacaagcccagctgctcacttaggaattgtgatgaaatcagctcgtgctaatctgaaacatcctggctggcaaaactgttatgcagagcttcctctaccgttgatcaattagctagttagttattaatagacggttgatattcattgtattccagattgttaatttagctcttagagtttgttattccaattgcactggcgtgattacagtttgttgatgaactagaaaattctaggagcttccatccgagcacttaaaaaaactaagctcaaaccattttgtattctgaaatctctgctgagataatgaattgcaattttcatcttctctgttaaaatcttcaaaatctaactgattttacttcatcatcaagcattggacaatcttctgctat

SEQ ID NO: 78528 - DNA, 687 bp, Citrus sinensis
  Intron number 5 from transcript orange1.1g014157m (locus o range1.1g010368m.g) derived from phytozome v7.0 (chr-ID sc affold00011; pos 2208557 to 2209243 reverse strand)
agcaggtatctatattatttatatacagtcagaatggaaataatttttccccctctttgtgtatacctgttctacttgtattcattatcttccattcggtttggtatacatcttctcagttttctatcagtaaacgaaaaatatacagtatctgaaggcctgtcaacgtattctggtctgtttctgtcaaaaaatgtgtttcaccatggagaatttagcatgcatgcagagtaaaaataactaattcgcagttgcatttctgtgtcgttgtttctgtcctggagcaaaactttaaatgataggacttctaaaatgctggcaaacaattatggatattttaaaattttttactttcatgtttacagctttataaatagaagtggatttaccgatcattcttccaattcctataaaataagcttaacttggacatttattattctttagcttgcattgatatctaattagttttgtattcttcaagtttattgatttttagctgcattgtttttgaattagtattgtatttgtattttattgattcttctgcttcagatcttaggatgttaaaaatctaacttaatatgtagtttttgcagttgtgtagaatattcctgcacatacttgttgcaacaaagagctttgatatacatcttttctaagtcaagccgtttgcagggtatctcc

SEQ ID NO: 78529 - DNA, 447 bp, Citrus sinensis
  Intron number 3 from transcript orange1.1g014157m (locus o range1.1g010368m.g) derived from phytozome v7.0 (chr-ID sc affold00011; pos 2209542 to 2209988 reverse strand)
aggcatttcagcgtctggtaagagtcagttataccttaataattaacattctgattgcctggatctctgtgctgatcatcttttcttgtatttggttaagtttttaactaaacttgagggggcgctacaattgtttcatgtatctaacttagttaagtgaccatatggcttttactcaatgctgcatcttctaatttgaatactttttaagttttatcataaaaatcattttgagtattcacacctcaaaatgtgtgctttgcgatttctgttttctttattgtcttaagttgcaattacctaggtagaacctaggacattctatccaattagtgtctgctgcaatattttattttttgaaattaactgatatcgaattggttttactctgatattagttttttaagttgattggcattctggtttatgtacaggttcaaatttctg

SEQ ID NO: 78530 - DNA, 155 bp, Citrus sinensis
  Intron number 1 from transcript orange1.1g003791m (locus o range1.1g002016m.g) derived from phytozome v7.0 (chr-ID sc affold00005; pos 660015 to 660169 reverse strand)
gattggtaagctatcaattcttctccgtttatttattaaatttattcaacgattgcgtataacgatgaaacgttgacgttttgatttgttctttgtttttttcaataataatcaatttaggcatcaacagtacatcggaaaagtgaagcacgctg

SEQ ID NO: 78531 - DNA, 1018 bp, Citrus sinensis
  Intron number 3 from transcript orange1.1g013461m (locus o range1.1g011544m.g) derived from phytozome v7.0 (chr-ID sc affold00074; pos 520890 to 521907 reverse strand)
gttacaagcctcctaagcgaccgctgacaaagaaggtttgtgctgcagttttattatcaactctatatttcatttgttcaattcctgtaaaaatgaagcatttgggtttcttctttcagttaagaatattactaatggtaagggtgataggcacttctgttatgatagcaagcttaatatttattaggtggattcttattctacaagtttgttaaaagaagcaataatagtaacaagttactggcaaatctgtcttgtattcgtttttaagtatatcctttatattggatttatcaagaagggaggttggtgactgtagtcaatttataattttttccatgggcttttctgcaagtgtggtctttggataatgttcttgacgttgtatggttacacacatcaccatctctagctgccaagaccaggtctgttttgctgttttatatggagaatgctgagtattttgacctaggcctgcttaagttgatttcatttctctctgctgctgaatgaaacatataccaatgcaattgcaactctgtctgatttgaaattctaaaagatttagtcagaatttcctgaaaatgttgcgaaaaactgaaaatatgtgatttttgataaatttcttgctaggatataaattaaattcaaacttttctgaaagtataaaatctttgtcctgtgttgttatctgttaagcatcatgacattatcaagaatttctccatctaacgtatgtgattaaatgtatttcttcctttatgaggttcatctgtttatgcatgtatattcaatttgccattatatttattatctctcatttgagctatatttatcaaggctaagttatggacatagtgttgtatggtgtatttttagattttaatttgtactaaatcttttgatttaatatcctataaaaaaaaagtcttttggtaataccacctattttggtgttggttatcttgcatcttacgaacattgcttaaatattttgcatgatgaccgtaggaaatag

SEQ ID NO: 78532 - DNA, 593 bp, Citrus sinensis
  Intron number 1 from transcript orange1.1g013461m (locus o range1.1g011544m.g) derived from phytozome v7.0 (chr-ID sc affold00074; pos 522251 to 522843 reverse strand)
cgcgtatcgccctaggcgtcataagttaacaggtaatgtgatatgtcagtgccatcgcccttgattgatctctcaaatttgacaactctgttcaactagtcaaagcattttacatcttctcaattgagctcgagttccaatctggttcctctctctgtcatcgtttaagcatctccgatttgcaattcttatcaagcaagttcgtctctccctcatatcaaattttacatgcgtttctagctcgatttattgattaatcttcaattttatatttaggtgtattaaaatgacgcttttcgtcatctgaattcggttcaaatgtcgatcaagtttgaaatcagctgcttgaattgattaaatttgattttttttctttatgctggatcgaactagcaagtgttgaaatttgcacgtaattctctcaatttatatatttttctcaatggatccgagtcgacgtgtaccttgttacattgacttaatcttagttatgttactttctgtttaattatgcttttggatgctaattgtggatattaagaagcaagatgcttgcagggagcaggtgtctgcgccgaatattgattgtacat

SEQ ID NO: 78533 - DNA, 381 bp, Citrus sinensis
  Intron number 1 from transcript orange1.1g010374m (locus o range1.1g010379m.g) derived from phytozome v7.0 (chr-ID sc affold00003; pos 3143905 to 3144285)
cgacctgccgtttggccctcctctacgtctaacgtgttagtctctctttctctctcctctgtaacctaaatccattttcaagatctctctcttacaccgttgttaattaatcaaatttcatttcattttcacgtactgtttctaattttgtaaatcttcattttattttattctttttagttttattggttaatgctattgtattattgttcgttaatttctcctcatataattcacatacaaaaagaaaagaaaaagctggcagctcaattttctttttttgtgttgtgtgttgtctgaattatatttgttgacttctttttttttttaatttttttgtaattaggattaatactggagtaatattgcgtgggagcaggt

SEQ ID NO: 78534 - DNA, 206 bp, Citrus sinensis
  Intron number 1 from transcript orange1.1g043506m (locus o range1.1g043506m.g) derived from phytozome v7.0 (chr-ID sc affold00003; pos 2297958 to 2298163)
atcaagcaaaagtgcaacaggaacaattctcataagtattgaaattatccctgtaatgtccgcaattaatgatctttcttcatttctgtttttcctttaattaaattgcttcacaactctgtttctgttatgtaaacatttggatacgtatttgattgtgcccttcttctgcgttttagtttgttttgttttgtttgtgtagaatt

SEQ ID NO: 78535 - DNA, 325 bp, Citrus sinensis
  Intron number 4 from transcript orange1.1g015522m (locus o range1.1g015522m.g) derived from phytozome v7.0 (chr-ID sc affold00003; pos 4244231 to 4244555 reverse strand)
ggacaggtatgcttgttggggtattgtatatctgctgaaatgctaaattttcctgaccttttaaattctttgagatgcagttccaccaacattattttttgattaatttcggttatttttttcttatagatacatttaggctttcagttcaagtatttatttaataattagtagtcatcttatccctggaaattcctgcagtttagaagtttgttcctctctttattaaacacatgattgcacatttgtctagttaaagttcaagtgcaaggtagtataactggctgtcttccttttccagctaatacagctcttgtatatcacc

SEQ ID NO: 78536 - DNA, 766 bp, Citrus sinensis
  Intron number 2 from transcript orange1.1g018866m (locus o range1.1g013539m.g) derived from phytozome v7.0 (chr-ID sc affold00050; pos 479322 to 480087)
tgctgcaagtattttgagacttggtaagatgacaaaaaatataaaattcttttccactttaaaaattcccaaatactgatgcataatctcctgaacctcgttgttttgttatgtatataacacgtctcattgcttatataaagaacttgcagtctgaaatgcagattgtgttttcagctttgggacttttcttagtgtctgttgcaacacattcacagtctttaagtccataattatatatcaattatgaaagtgggattactttaatgagtaattatgaaagtttttagcaaattcataatcaaggttttaatgctattgcagtatgttaatagattatatgaataacctgctttgatagaatattgatggtgatctctcagatggatgattgcctgttctttctccaagacaatgccaaaaatgccatttgcagtttgtatcttttagacctttgttattgttctatcaacattgagatgggcatttgcttatttaatcattaagttaagcttcagttgtgctatcatttatctttactttgtaacatgcagtgataatggcagcacagtcagcagtaaaaaggtgcaaggtaggtttgatttcataaatctgtgagtgtgttttgtatgaatgacgattgtggtgataccccttgctaagccccctaatcgggggaaaaaagaataatggttgaaaaacaaatcataacacacctaatgctaatgcttattttaattctgtgaaatttcagattcacagaagg

SEQ ID NO: 78537 - DNA, 464 bp, Citrus sinensis
  Intron number 2 from transcript orange1.1g024957m (locus o range1.1g024769m.g) derived from phytozome v7.0 (chr-ID sc affold00011; pos 464774 to 465237)
tggctttcttattggatctggtattacgtggttgggtatgttttttgaacttatgttatgatatattggatacctactggcattattattgtgtgttccatttaaacaattttcagttttatttttgatgaaattctggttgtaggctcagtttaatctgctaacttgggtgcaatagtaagctttttttttctgaatctgaagattcgatctttggctaagagttgtgtttatttagcaagtaggattttagtctacaatagttttacattcatcatattgtgcacagataactggtgatactactgctgctgcagttattatttcttctactgctcttgtggtgtgtgtgtgctttcagcattcacacaatctcagttcctttctcaaatgttcttgattacccactcttcatcttccttcttgcaatattttgataattcttaggcttctcttgcagcaac

SEQ ID NO: 78538 - DNA, 710 bp, Citrus sinensis
  Intron number 2 from transcript orange1.1g019009m (locus o range1.1g010380m.g) derived from phytozome v7.0 (chr-ID sc affold00196; pos 276749 to 277458)
tggagttgtacttgccgttggttttcagttgtcaggttagtttacttgcacttgttaaactttcacaatatgtgcattgccataactcactgaaataaaaaagataaaaaaaaaactgagatgtgcacgctagaattcttccgtaaaatttgatactccttctgtggaaaatcacttgtttgcaaattttgatgaaggtggagacagccagatgaatgcactgatatggtatagctggcttggaggaattattattggaactatggtaggagctaatatggttctagaagaacactgtaaagctggtccaagaaatgttgtcattactggaaggttctcctctctccctctctctatcttccttttttctttctttttctttttttttgggggggggggggggtgtgattttcattagatcaagaattaaaagacaccctctctcagataaagcttccacttttctttgggttgggtggacggatagaggcaaatagtcaatgtgaaattcactttgcaatcacttgcaaattgcataattctatttagtgatgcagatgcttaaacaaatacatgacttgatgtttccttatctgagttgtaaaatttgtgtacccaacgtggagaaatcatgttcttatgttttggttgcatttttttgattggttggtgtagtacgaggggactaggaaaagcacttgctcgagaat

SEQ ID NO: 78539 - DNA, 358 bp, Citrus sinensis
  Intron number 2 from transcript orange1.1g021544m (locus o range1.1g012924m.g) derived from phytozome v7.0 (chr-ID sc affold00014; pos 468042 to 468399)
ttaaagttgccacatttcctttaacaaagaaacaggtgagtgtttttgcttccacttcttcgaggaaaatgatatgggtaattaggctgtttcttttattacaagtcatacagtgttttaatttaagaaaattcaactatgctacttgatgaaaataaggttttgccatggaagtgacgttttgcaaatatttgccaccaattgtcatttttttttttggtctaagttgaaattgattgatgtattgtatttgtggattataacgccaatgtgaatgtaatataattggcttccttggtagtgttggtgttgttaggtgatgactttgattaatatgtaggtggaatcaacattagca

SEQ ID NO: 78540 - DNA, 1033 bp, Citrus sinensis
  Intron number 1 from transcript orange1.1g027575m (locus o range1.1g027575m.g) derived from phytozome v7.0 (chr-ID sc affold00109; pos 69366 to 70398)
ttgctcgtttttggattaaatttggagaagacaaggttcgcttcacgactctagctaacatatgtatacgtatgtttattcctttcctacgtatttacttgtcaacagataccaaaatgatcaaaagtccctactgtttgtcgaaattaatcatcctattaggtatgtattaaaaccaatcaatattaatctctttgttgttcaataagtgcagttaactcttaaatttttgtgttgttacccttagaaaattttattaatccatggtgtattttactaaaggacaaagaagttgaaaatgaccataatttttttagcgacaaggaaaattttgatggcttttaaaatatgagggagaaaaagattaatttattaaaagggatataattagtttcttccctactgaaatccatatatatactacttaacccttaatattttcataacagccaagaatcctccagtcaccataattttatagttttttcttatttttaaatacgcttttacttgtatttattattaattaaataaatcatataaacataaataaaaaaaaatgcatctactaaaaataagaaatatagatttcgtagtgaataaaaaaattaataataagttatttttttgtacttttgtgatttttaaatattttctatgtaataaatatatatttcatattctcaaggtaaaatgtcaaataaatgactcatttactcctcttttcctataaatttttttatgtcatataagatattggcaattatgaaaatagtgttgaggtaagtgatatatattgacttcaatagaaagaaaactaacaatctcgtttattaaaataatatagtggagttttgacgttttgttcattttctctttgttattgcaacttagtagttaaactttagtgtcgacttaagcattttaacaaataagatatttacgtgtaatccaagttttttaggttatacatattgttgacatagtgataatacacacacacacataatcgcagggagttgctgtttggaaa

SEQ ID NO: 78541 - DNA, 331 bp, Citrus sinensis
  Intron number 1 from transcript orange1.1g018825m (locus o range1.1g018825m.g) derived from phytozome v7.0 (chr-ID sc affold00003; pos 3115975 to 3116305)
cctctttcaacctgtcgtttgatttgctcatttgggtatgtatgcttttctctttctttctttctttctgtcttccattttttttttccttattaaaggtttaatttttcacccttctactcatgtgggtttttgtttgttttttaggatcttcaaatctgctgaattttaagtttatgaatcattgctttgattacgatattgtgttacgcttggattggaaacttcaattgattattattatgagatacattggttttttttttttttgaatttgtttcgtgattcttaaaagagggaatttcaagacattttgtaaattatctgcagg

SEQ ID NO: 78542 - DNA, 614 bp, Citrus sinensis
  Intron number 4 from transcript orange1.1g020681m (locus o range1.1g018201m.g) derived from phytozome v7.0 (chr-ID sc affold00003; pos 960821 to 961434)
gcacaggccttccaactttattacatttttgtcaggtaaatagccttctttcaaagtcaagaatttaagttgttttgtactgatgaatgaaccatttcttcagttagtgacctcgcctaattaatctagccatttggctgctagatagccccgcatatatgtataccagcttttagacaggcatacatgcacattggagagatcacttgtgcataattctcttgtaaaagctaaaaaagatgaaaaaaaatttaagagttaattttgtctttgacaagatgatgatgagagccggtgggtttaacctttgcacaaattgcatgttgtcagtttgctgacagtgagactttttttgacaatgaatgaagcagcctcaagcacttagagggattcatttcttttcaattaatgcagctttgctgcaggctacatgcacatttcattctcacacatgcaactgaagaaatatcaatttttttaaaacctttttcctaaagtgtttcttaatgacaattcagatttcattacctgcagttttgacactatcttaagtgttcttgctaaatttatttgcttttgatatttcaggaagcatttaccacctatcagatcat

SEQ ID NO: 78543 - DNA, 1003 bp, Citrus sinensis
  Intron number 1 from transcript orange1.1g041048m (locus o range1.1g041048m.g) derived from phytozome v7.0 (chr-ID sc affold00167; pos 191844 to 192846 reverse strand)
taattgtgccctccattctccaagacaagaagctggtaactgttaatttatttcactttcttctattttactttccctttgactttctgtctgtttggtgtgaaaattgaggaagaagttataaaatgagttaacggcttgtccggtttgttggtttggctggtgggaaatttgattgtctcaaatttcttgatgatacttttcttgttatctttaatgatctgggaaaattgagaagattaaaatgtgcgcttgcttttaccagaattgtcggtagtgcctgttcatcatagtcccagaaaagttttttaagaccatgacttggttaattgaaagaacggtggttcctgctattttcattttcagagactgagctatgcttagggtctctttgggattgaggtgctgtggctttgaagtcacagctgcactagtgagacgggggcagtaaccactaaatttcaagtataagtggaattgtgggagagcaagggtaaagattagctctcaagtaaaagtcggtgtttatcaaacatttaaatactgtggtcatcattagaagccattgttctcttaatatgctatacacacttgatgctcttcgttgagtgttaatttttgtcttcttttaatttcatatcaagtatttttgcatttatcatctggggaaaaaaagaaaagaaaataactcttttatttctgttgactatccattgttatgctagccatttaaggatatattttacttttggttacatgctgctcttcatcaaatgttatcttttcattttcaattgccttttcaattatgaagttatgtcgtctttgttaatctcatgctgctgctacttcaatgaagctgactaatgttcatgatgaatcatttgtgcaatgctcaatatatattttgttgtagacatttcattggtggtactgttgcagaatctgataaatttttgcacccgcagaggatcccagacaagtttgttcagaaatttggaga

SEQ ID NO: 78544 - DNA, 595 bp, Citrus sinensis
  Intron number 1 from transcript orange1.1g030494m (locus o range1.1g030494m.g) derived from phytozome v7.0 (chr-ID sc affold00400; pos 113387 to 113981)
tccaccagtgattttcacgaagccaccgctttttggtaaccatattagcttctgggttcttctatcttttacggaaagccattttattttattttttattttttgggtttaaagtaattttagaaaaaggggtttcttttaccagaatcagattaggtgaaaatttctatttaagtgaaaattaaagggttttggaaacaattgggaagtgacagagaaattcaatttgattattagatttagtgcacttttcagtagacggctgaattacgctaacagcaagaaaagatcagcagctgagattgaataaggagattgcctaaattttatagcttcttctctaatatagtttcactattgtggcaaaagcacctcagcattgaagttaagcttatcttacaaatacacttcttatttttttaaatgttctgttgcctaaaatgcttggcctgtaaagttagtttgaatataagccagttatttcttgcattaaaatttatcctctttatttgaagccatagcatgaatatgacaatgttttattcatttctctgtttcagctacctagttcttgctctaggcttgcaaagtttgt

SEQ ID NO: 78545 - DNA, 555 bp, Citrus sinensis
  Intron number 1 from transcript orange1.1g001686m (locus o range1.1g001685m.g) derived from phytozome v7.0 (chr-ID sc affold00259; pos 188922 to 189476 reverse strand)
gatacatttttgcaatctccagcttctctttaaccgtaagccctactacacaacgacgccgtttctgttccctgtctatttctcttcaattccttcgtttactttttttattttaattttttttgttattaccatttcggttatctttttttttttttgccctttatattcagtttctggagattttaagttattgaaacagaagcttgttcgttattgtgtatacggagatttgctaaaaaaggcatatcttttgagtttaattttcttgctttatttattatacttattgattaataaattaataatatttcttttgtttggtcgctgagaaaataaaagagaaaatcaatcacttagttgtgtgttatgcaagtaattgttgtcttattattctcctcgtgattttacgttttgttgaatttttattttatttattgattagggttagcattagggtttgaattttctgctcatcctaggctttaatttaaatgtggtttatttatttatttgtttgtttgtttgtttgtttgataaattgtagtatcattt

SEQ ID NO: 78546 - DNA, 824 bp, Citrus sinensis
  Intron number 3 from transcript orange1.1g019635m (locus o range1.1g010850m.g) derived from phytozome v7.0 (chr-ID sc affold00011; pos 1539892 to 1540715)
gctgctttcggcgtggaagttccaaaggtgagaagtgtttttgttgtgcttctgatttttcagaaaattttgataaattttgttgtgttttgatactaggtatgggtgaactcacctgcccatgcagtggtaagatatgtagtttaaaaattttaagagtctttccttgtttgacagaaagagattgcgcaacttacatgtgaatgtgaacaatttattggaacacagtctggtggaatggaccaggttatacacatttttctctttcctactcaatatcactgaaatatcctgaatgttatcctgcgtgatccttcttcctggagattagttctgtaactgcttgtgttgtattaggggctagtatcatcatggattgctctcaaagagtttctgatctcagtttcttattgaattttctgctctggtagtaccatgtttgtattttcattttttccccatctgtttgggatggtgttgcatcatgtagtttgaacattgtaccatggattgatcaattgatttttatggtctctgttcaaatgcagcgacagtttacacagaattacgtctttgctggtgcatgctgacctacccactctgtgcatgtggatgcccagttcatctcccatttttatacttccccttagaagttagacattatttttagtttaaagatgtttccctcaaccctctgtaatttgatttgatgcataacaattttgattttcatttgtttaattttctgctacatcgagttgctatacctgatgataatgacacatcatttgtaatccttttccccatcataggcaatctctatc

SEQ ID NO: 78547 - DNA, 635 bp, Citrus sinensis
  Intron number 3 from transcript orange1.1g032541m (locus o range1.1g032541m.g) derived from phytozome v7.0 (chr-ID sc affold00112; pos 98942 to 99576 reverse strand)
tttgaggccatctgctcgatattcaatatctaaaggtaatgaaccttctagttgtttctttccaagtcaaaaattagatcaacatcatccttatttgcctgtttcattttccatctgttaattcttgtatttctccatgattttccatttgtatagctccctccactgaattgaaaatcttggaatcaatgcagagtgttgtcatattagagagtcctatatgtgtgaagccacctagactctgttgtattattctagagatgaattgtttttttgctttgaatggaaagacgtcaatatttgtttgttttgtgatattttcccataaaaatctagcttaatatcttctctgcatgtaatgaaaatgcatctgcaccagagagctcctttttcccctttcaattgcattgatcttactgaattctgcttcttttttgtttattttattccctgtctacacttagaatttcattaatttgctccaatggtctattaaagcccttatttttcttgatcttacacatctttatagcatcttgtgcattttattaaatgcttgtttaagtgtactgagagaaacttttgtaatggtgaggaaagcaccagatactgctgatcgtgaaaaagggagatat

SEQ ID NO: 78548 - DNA, 642 bp, Citrus sinensis
  Intron number 1 from transcript orange1.1g032541m (locus o range1.1g032541m.g) derived from phytozome v7.0 (chr-ID sc affold00112; pos 99897 to 100538 reverse strand)
ccagccgccggccagctatttttctttacgcccaggtcaagtttctacatctttatcttttatcttcttttttttttttttgggttccttcattgtgtgatgggaattgtaaatcatgtagctgctgacctttttggtctttgatagcctgatgcttattaattgaattatcttataatgatttgtttctcccgtttatagttgtgttttttgtttttttaacacttatggagtttcttttattaactgaatcgtgttgtagctaattgatttaagcaatatgggttgagatggaaatcaaccataaaaggaaataataaaaagaaaggagaataatctctctttttttgtctcaaaatgaaaatagtttttgaaaaaacaatttgagaaaatgaaacgattccagttaagagggactgtaaatcattattttgcaagagctagttaagattttacactcattagcagttagattcctgactggtcggtcatatattttcctttgttatacctggattctggatcgagtagctgcttagggttgacatataatctgaaaattgaagactgaaatggtcgttaactttgaagcatgatatttttgcaggttggaatttagctgaggtcatcgggacagacaca

SEQ ID NO: 78549 - DNA, 802 bp, Citrus sinensis
  Intron number 1 from transcript orange1.1g012259m (locus o range1.1g007495m.g) derived from phytozome v7.0 (chr-ID sc affold01217; pos 10732 to 11533)
gtcttgtaagttttcattttttgtatacatgtattcttattttattatatgatgattgatgcatgcataatctgtagtgtctttgaaataattaacatgtacacagactaagacagaatcttacaattcagggttaactcttcaaaggtgcctaatacgattgcatttttatgttaatttattaattagtagtttatatgaaattagatactagcatatcaatgatagtttattgcctttattgcctttttaatttagcacacattagtttttaatttcaagtgttgatcaacatcaatacatcgtcctagaaagtcctggattttattgtattttgattctggggaagcaactgtccaactaatttatttattttttctacttattttttcggttgatggtatccttgatttatagtgtcaatggccactgattgggtgacacttgaatggatttggtgttgggaaagttgacgacaattatctaaatgtctttctatgaggtttctttaaatattttcttgatgatcttgattgagattggttgttgcatataagaatcagtgaattaggatcgacgataccatgttatgtgttaatgacttggtgaattactggttaaaacaatatgatttgttgcaattctctgaacaatattgagaatttttacgaacttgcggagatagaacaatatgaacatggtgggcaattctgttgttcgttgcttgaaggaacaatacatgacagctaatcacatttacttaaatgatgagcagtttgaagaggttcttggcaaaggagca

SEQ ID NO: 78550 - DNA, 1003 bp, Citrus sinensis
  Intron number 1 from transcript orange1.1g019382m (locus o range1.1g019038m.g) derived from phytozome v7.0 (chr-ID sc affold00062; pos 413811 to 414813 reverse strand)
tacgcaagcgacggtgacgctgatccgatttacaagtacagattttcaattagtatactttttgcactaataatgtttttcattttctttttccattatttttattatgaagtactagcaccgttgtattgacgagctagggttatgtttgaggtaagctttagatttcaaatttactagaggagaaatttattttctgctacgtggagaatattatttgtggaaagtgcttttgagtaaagtgatttccaaaagcacttttgattggtccaatggatgctgaaagcacttttggaacctgaagactcgtttattgttaagtgattcgctgtcctgttagtagttttgactaagattggcagcacagaatgcatttagtttcgacttaaagtttggcatggtgtttaaaattggaagattaattcggcccttgatgtttgatgattgaagcttgcctatggagttgcggttttgacttttgctgatgctagcttgatcacatctgcctcttgccgttatctgaggatctgtgaaacaaaatgttgattatgctgaagacttaatttgatgttctgattctaaaactgagttgttatcttcagccttaaggccacttttaccttttaaaaaacaaagttaggccagtcaagattgtggttttaaagccttggagtcccccatttcttgggacactttgaacgtgttaccatttatttgattttaagtattttattcttacgtttttatttcccaagcaaatttcacacaaattcatcgtgctacatctgtttatgctattgtgattttttgtacttttaatcttactgttgattgacatagacttttggttctgatgggggattaactaaacctgggaattgtctcatgctaaaaaaattccattagtctatacttcgtgtgcatgttttttgcttgtgggacgttattctttattttacttattgatttgcaggggttgtgtggagcagtgtgagaaaactgg

SEQ ID NO: 78551 - DNA, 869 bp, Citrus sinensis
  Intron number 1 from transcript orange1.1g016464m (locus o range1.1g006877m.g) derived from phytozome v7.0 (chr-ID sc affold00259; pos 55735 to 56603 reverse strand)
acggaagtaagctgtatcaggtaccggctcttggttcagttttctgtttagattcttaaaaattttatatattttgtagttttgggatgaaaataatgtgctgagattaaaacttattaagtagttttattgtgatatttaggtgaaggttgtggatatagggcttaattgtagttttggagattggaaaattatcaaggttgcttaattgctacatttcctggttgagattgtgtgcagttgttgtgtgttttgttgttggatagttggaatgaaagagcataaattaaaatttaaaaccgtatttaacgatctttagccattttataatcatctagtttcctgttgttatgtatgaagtataaaatggtgaagctgaatggagtaccgaactgcaactagtttggaaccatattgaacttaaaattgactataattttgattctgttttgtcccggggataaatgtggttctgatatgactgattcttcttcactgcctttctggagtatgcatgttgcttcagttctatctcattcaaatatgaaagcagtgctgcaaattttcaaaactttagcttatgcttttcaccttcttttatcttaaaatatcatgtgagaaagttatcattgttctacttgttcatttgtgtaaatttgtccatgttaactttcactagtactcttgtcatcagaacttcaaaaacttatatttttatcccttaaatgtaccccactttcattttctgaattcctttgtgcttcaaattctttcattctgttcgcaaagcactctataagttaccgtagctgagcgttgattccaattttatagtgtttgcaaagggataagattgcagcacagtttca

SEQ ID NO: 78552 - DNA, 298 bp, Citrus sinensis
  Intron number 3 from transcript orange1.1g014385m (locus o range1.1g014415m.g) derived from phytozome v7.0 (chr-ID sc affold00160; pos 53893 to 54190 reverse strand)
aggtgagcttaacaatctaattggtgtttagaaacgaagtggatttttgaatgctttaattttatccacctagaaatttgattatttgactttagaaggagttaccatcttaggactcttgtatcccatcattaggagaaaaagagaaaaagagatttgttctaatttctattatattcttctattttccttgatgtaacaacacttcttatctattaacagcttaaaggtagttttgtgattatattttgttttatgttgtctcgtgattgtgcagtcccactttaaggagttgata

SEQ ID NO: 78553 - DNA, 451 bp, Citrus sinensis
  Intron number 1 from transcript orange1.1g014065m (locus o range1.1g009867m.g) derived from phytozome v7.0 (chr-ID sc affold00062; pos 2321 to 2771)
acgtcgttgcactcaccttcccaaacaccgtcgaggtttgagttttttaatttaattttatttatattcataatttcattgtatttgttcaatttaattattcaaagttcttcaaaccgtcaagcgcatgttacgtgtcggtcctatctattacaatatttaaaaataaataaataaataaatacataaagaatttattaaatgtttacgttattcatattagtaattattttatgttgaacctaatttaacaatcgggcgttttctgtcctttcttctggaatcgagttgggtacttatttgttttttgagaagagagttgggtacttatttgatacaaatgtattatgtttgtcctagtctgagaaatcgtaaaattacaaggcacattgttattatttgaagaaaaatgacgtaatttattttcttatgacaattgcagtttgtaatt

SEQ ID NO: 78554 - DNA, 588 bp, Citrus sinensis
  Intron number 3 from transcript orange1.1g018226m (locus o range1.1g010230m.g) derived from phytozome v7.0 (chr-ID sc affold00049; pos 121148 to 121735 reverse strand)
caggtcaggccgctcaagtacctacaagaagagtttgctcctgcttcttactcattttgatgttatcaaaaaaattttttctctagattagtttgtagtcatttaagtttatgttgaactttactgcattgttgcagttatataaaatttcttttgttaattgtgtcattaaactgctgatagtatgcttcttagtcatgatttctttgtaaatgggctatgcatgatatgccctatgatgacggtctatttcttcttaactttgcttcatcttgtatgatggatttacacagaaggaattctgtaacttgatttgcttttctttggaaatttgtgcacagatgcatgatctcatgtaccaattatagatgactgtacctagatcttcccattaaacactttaatgtatgcacaatatagcggaatttgaatgggcatttttatatgtacatgagatcatgaattattgccttatatgagagcagtgcaataatactttgattagaggagttcaatctgtagatgacattatcacagaaagcttattatgtttcgatccttcaacaggtaaatcggctgatatccatt

SEQ ID NO: 78555 - DNA, 931 bp, Citrus sinensis
  Intron number 1 from transcript orange1.1g016583m (locus o range1.1g010129m.g) derived from phytozome v7.0 (chr-ID sc affold00017; pos 1163603 to 1164533 reverse strand)
ggcaacgatacttatcgactcaattctttgggattgtacgtaatctcttcacttgcctcagcctatcctccgatatatatatatatatatatatattttttacttcctctcttacttgaactgtacgaattgtaattttggactgttggtggagaaccgcagaggtgatcaaagctttcaatatattctttgtttgtttgctgacaatcttttttttttttacgattttttctgaaacaggaggaaggtaaacttaaaatcatctaataacagctcatgcttaaacctatctagtattaattttcattgagcaaaattatttaattatcgttgtagtctttatatatatccgatcaatgcggttagtatcaatttgttattaatttggaagttccggtacaatttcttctcgtttgcataaaatttaatgtgaaatgagttttcctaatactttttgacgcgcgtaaagggatcgatcatttgcattttcattgatattgttacaaaattaatttttacaacattgatcagtgttattcatttgctgaatcatattgtttgatgcaattagattactttttcaagctgtggaactgtaattcttatgcatggtactgaggtttcatgtttatgggtttttttttttttttaattactggaaatctttccttttgtggatttattttaatttttatttgattttatattttagaaatattttctagtaattttcctgcttatttcaacagcttatgtatttaggggtagaaatggtattcaaaatgtcaaaactttcaatttctttgtattcttttagtactacgatatcatcaacaaccaaatgggtgcctgctatggttttcaaatgacagcgatatggattaatgttttctttattttttttcttgaaatttcagcttacattatacca

SEQ ID NO: 78556 - DNA, 598 bp, Citrus sinensis
  Intron number 1 from transcript orange1.1g018229m (locus o range1.1g008405m.g) derived from phytozome v7.0 (chr-ID sc affold00106; pos 410809 to 411406)
cacaaacttgccattgctcacgatatatctctcaggtttatttactgatttactctttattctttagtataaataataaaattgtgttcttatttggttatttgatttagaggtggtgggttgtgtccttttttgtttttggcggggtggggggtgttggggggctttagtgaagctgagactttggtcttcaaatcgcttattgtctttagtttttattaagtcgatcaatggaatgattatggttttctgtgctctcacatgtgttattctttaatgtcagagttccattgaaatttagtttagtttaatatgaagaaatagcagggtggattcctttttttgatcgttttgtgccagttatactaccaatcaagttttggccattactggtatcaatcatgtcatagtctgttagctgtgtggattcctttttatgtgctttaattctctgatgttttcttcatttggacagactttattgtcttatacctgtaaatcttgattaataatttgttaggttcagcttttcattgtgtttttctgaagtttcatgcatcctaatttgaataattataggtgcactgtctccccacca

SEQ ID NO: 78557 - DNA, 767 bp, Citrus sinensis
  Intron number 2 from transcript orange1.1g013832m (locus o range1.1g010368m.g) derived from phytozome v7.0 (chr-ID sc affold00011; pos 2210136 to 2210902 reverse strand)
agattatttggagcattcccccaggataccaccaggttagtttagaaacaagtctattagataaaaatttagtggctttaaattttttgatcagcgtgacaaaaaatttagtggctttaaattttgtgatcggtgtgagaatcttaggaatttaattagctagtgtttgagttggttgaacatggacatgtttcacgaggttgtttgagttagttaaacgtggatagttcaataagagtgaaatgtttaaattttaaacttggttcatattctgtcgttttcaaattcttaatttgttatgagggcgagctagtcaagttgttatttgggaaattttagatattgaagcaatgatatctgagaaaacaatggggcatatgagctttcgagtgggtggctgtgaagcttggaaaaatctgaatggggaattggatcacttgatgttgatatagtatacttacagattacggtcaactaattcctttagtaactgcaaaggtactaaacaacatactgatatattaagaagcatgcttgattgtggtaagtcttttttgcatgaagtaatccctttttcttacatagtcaatttgcagttcgtgaagatgtacgtgtttgtttatacccacaaagaaccttcagttaatataggttgtgaacaaaaggttctctttgtctcacatcggcactcataatctttgaattttgttctcataaacttatgttcttttatattgtacattatgtgcagtacaagttttgtgtgg

SEQ ID NO: 78558 - DNA, 451 bp, Citrus sinensis
  Intron number 2 from transcript orange1.1g027973m (locus o range1.1g027973m.g) derived from phytozome v7.0 (chr-ID sc affold00237; pos 134939 to 135389)
tcctctggagctttcaatcctgatcgcgtcgctgtgtacgtagccattttttttgaattttttatcttttaatttgttaattctgtgacgattagtttcgttgtgtttatttcttttttgtgcagctaaaagaaatttatcatttgttagaatattcaattgtgaaagctaggaatacaattggagtttcaagatacaaattgaatagaatttagtagaaaacagccaatattgtattttgaactttttcctgggaatttatctgcaaaatgtttttactttatcatgagaattttgtattcttcttttttcgagaacaaagaggtgtatccgagtttggttacctcaattttaagtgtgcggttttgggttaattttgtgttagttacggtaacttcttcttcttcttcttcttattattatttctctttttgtttggcaggtattgcaa

SEQ ID NO: 78559 - DNA, 670 bp, Citrus sinensis
  Intron number 2 from transcript orange1.1g010955m (locus o range1.1g009513m.g) derived from phytozome v7.0 (chr-ID sc affold00056; pos 316007 to 316676 reverse strand)
cgccggaaccctccccgattcgccacaaaaaagaggtttgttttattttgtcttttctatgtcatatttgtttaataattactgcacaacgagtaaactcgtgagccagctgagctgactgggtttgacatgtttgaattgtcggcaattacggtcatttcccgcaactttgcccggaatgtctgtgttggatgtcaaataggccctgcttttaattgcataatttgcaaaagatccggctctttacagggttataaatgtcatttgattatttgtttgtatgttcatgtaagtgtacttctgatcttgtctctgccatgcaaatcttttgattatgttagtgtctagaaaattattttccgaaagaggacaaatcttcttgttttttcttttgtttcttatcaatgaagtcccgacgtcctttttttagtaaattgctattttcagctgtatttttttgaaaattacaagagaagtcaacaagggccaccgactctgattggaaattcacattcctaattcacaaattatgaagattaaatgcattgtagttattaactcaaatacaataatgtcttgtttgtggttgttatgaaaatttaataaggaattgtgggcaatctcttaatcacgctataataattgtttaataaataggagcaggagaatc

SEQ ID NO: 78560 - DNA, 836 bp, Citrus sinensis
  Intron number 2 from transcript orange1.1g034942m (locus o range1.1g034942m.g) derived from phytozome v7.0 (chr-ID sc affold05099; pos 3101 to 3936 reverse strand)
ccgcctcgtcaagaaactggttttcttgaagggtatgcccgtgccctctctcttgcgtgaaaaactagcttttgaatatttactattttgtttcaatttcctattatcatacaaatattgggttgcattgctcacactatgcgttcttctattgtcggttctttataattatttattacttctccattgatcttttttgtgacagttgctattttgaagtataacgtgaacagtatctttgctattttgaagtagaacgtgaacaatatcttagctatttttgtatactgagttgattaatgattgcgtgattttgattgagttaaagagatctaagactaaggtgctgtaggctttgccatcatttgttaacttcaaatatgtactttgatttgataatttgaggatgctgctctagttctgattaaaagtatatgtgctcagtaattaaggattcttagttaaaatctgcgacctttgacatgggaaatttttgtcaattgaaactcaaacttccattaagactatggtggataaagaaattcctaattatgatttatggcaacttgccgcttgcctgtttcgtttaattatgaaaggttaatagatgcagcaagtgcgagaatcaaccttcttatcgttctgaatgttatttatcgtgaaattaattcttgatatgagtagagtctggacgcaatataagctaaacatgatgagcttaatcaataatcaatatacttacttaacactactttgttgcattatgatttggaaattgaggtatgtttgtttgtgtgagcgcagtttggcggctctttgctgttgttgccttttgg

SEQ ID NO: 78561 - DNA, 367 bp, Citrus sinensis; identical to SEQ ID NO: 78496
  Intron number 4 from transcript orange1.1g024164m (locus o range1.1g019884m.g) derived from phytozome v7.0 (chr-ID sc affold00011; pos 1741147 to 1741513)

SEQ ID NO: 78562 - DNA, 754 bp, Citrus sinensis
  Intron number 1 from transcript orange1.1g043231m (locus o range1.1g043231m.g) derived from phytozome v7.0 (chr-ID sc affold01714; pos 10320 to 11073)
cagtatattctccacaataagcagccttaacaagagtgaccgctacaggcctgtaatttgagtttaaaaaaaagagttaagtgagaattcaattataaatgacagtctaactcacttacttatatcagtccaagcaggaggtcccacaagtttatctaacaaattggcttgcgaaggtgaatgtagatacgtatagggtgaatgaaatattcgcagcaactaggtaggaactacaagtaatcatttcatgagcatttatccgatggaacaaattatcatatctcgaaaagatttctcgtaaatgtcaaaatattgagttattctattgtcaaatatatgttatctacatcgtggtgttgcaccgaatggaaaaatacgactcctacaaggtaccgaaccccaagaaaaataaggattgtcaaccataaaaaatccttgtcatacttacaaatgcacatggttactgttatagcttaaagttttagtatgcatatactataagataatgcaaagtagcactggaattttcaatcccacacaaaatctggctagcagctagcactaatcccactagcggaaaaaaatttaatttgggttacaatgagaagatagtgcatatatttgattccccaccatatgtttgaggcagatgcttcggagaatttattgccatggatgatttgagtgatttgagtttctttttgttgtcattgttgcagggcattttacaggttgttttgtatcattattttgt

SEQ ID NO: 78563 - DNA, 682 bp, Citrus sinensis
  Intron number 2 from transcript orange1.1g026257m (locus o range1.1g026233m.g) derived from phytozome v7.0 (chr-ID sc affold00162; pos 19230 to 19911)
ataaggttagaaagaaggcctttttgttttaaggctgtgtaggtgtctcttcgtgggtgatttaatgaatgcttatatttggcttcgtagatgtctctttgtgggtgattagtgaatgcttatatttgtttgatgaaaggtgtggcagaagttgtagaataaaattatgttttgcattctctgttttttcttttttaatttggtaatggagttttttgttcggcttgataacccatttgcattttgtgcctgatggggttagctgaatagctggttttgagtagactgtgattcttttaacttgggagtaattgctttgaaggctcgattttgtgcaaatgccgcattcttgagctgtaatattcataatcttgagagtaacttaggtgttgtacaggtgtaacctcattcatgatgttagtctttttatctgtaatcatgaaatgcttcttagttgagactttatttttcaaaagaattttggccgcttttgttttctctttaacctttatatatatatatatatatatatataatcagttattcccttatcttatttgcaaagggcttaataaaagatgagaatttgtttttgaaacatatttgggagcataagatatttgcacttgcttggcaaaactatgcgcatctgacatctttatgtacatcatcagggagctcc

SEQ ID NO: 78564 - DNA, 510 bp, Citrus sinensis
  Intron number 1 from transcript orange1.1g013291m (locus o range1.1g013291m.g) derived from phytozome v7.0 (chr-ID sc affold00062; pos 7642 to 8151 reverse strand)
tcgcaaggaagctgagaactgtgactgcttgcaaggtactttttagtggaagtactttttgtataacgtgttttttggtcaaggcttgtttggaattttaaaacttgattttgcttaaaaaaacgaactaaaaatagtggatctacgtgtattgattattttgaagaaaattggagttctgttacctgaattatgtcacagatgcattcagttaaggccttgtttggacggagttttatttcattgttgaatgcttttatttctcccttgaaatgaaaaaccaaacaggaattttagaattaattgttcaattgtcccctattgtgcgattataattatctcgagcaagtttatttttatttttgtattattacaataattttgagcaagtttttgaataaatataaactggttgctacttatgtatgttgtttgttagtttgtagaattctaagcattttgttgctgttttcaggatttcaagtgtgtcactccctgggaggtggtacg

SEQ ID NO: 78565 - DNA, 405 bp, Citrus sinensis
  Intron number 1 from transcript orange1.1g017459m (locus o range1.1g010507m.g) derived from phytozome v7.0 (chr-ID sc affold00048; pos 591720 to 592124)
ggaaaagaacaggtcactaattttttttctaatttcacccaaaaaattgttctttttgaatctttttttttttttttgcttagtttgtattttgcatttgatgatctggggctttatgcatattcatttttttgttagtaaataaatgaagtagaatttagttcaatgcactaaagtagtgaagtttttgacttcgttgttgatttttcttagtgtttctgagtttgtatgatttgaagttgtgatagtaataatttatcttgtttttgttcgatttaactgttactatgttatctcagttaaatttctgttaaatttcttggtccagctatgtttagaaggtctgtctcttcaattgagactattttgtaatgcaggtttttgatttatcagaggtgaaaccac

SEQ ID NO: 78566 - DNA, 1061 bp, Citrus sinensis
  Intron number 1 from transcript orange1.1g005062m (locus o range1.1g004665m.g) derived from phytozome v7.0 (chr-ID sc affold00280; pos 93748 to 94808)
tgtggctatttgatcatcagaaagtactattaaacgtatgtatcttagcaatatgataattcatggttgaggacttgtttcataactaaataatatttatatgtaaatcgaggtttataatacttaaataggtattttaaagattatgggatgatctgaagtatatcttaaactcggagatacgttgaagatctgaagtctattttcacactaattcgttagaaactggtaaactaaagagagagcttgtgctttctttctaaaggtaacgggaaataatcaaaccagttcccgatgccaagaaaacatgacccttcgcaccattttccattgaagcaatcttgagtctttgaccaaacaaaactttaggcgtttcctgtgaaaacccgtgaataatagatttattagaaagattgtttatatgggtgtagagaatacaaaggttgaagtatctaattaatgagagaagttgatggttatttggtattttccagggtgtctaattgagtgaaattttttatttttttcaaatttaacaaattaagtgttttaaagtatttttttaggtataaataatctcaccttcacttgattaatatcttaatcactttgacagtttggaaaaggttgttggagagtaattgacaatagttaataatggtgaaaaaaaaagtataaagaaaggggaaaaaaatcatcataaatggtaataacaatcacacagttttgaatgagctgtcgaggaaagcaattattgatggaagcttattatggtaaacatgcagcggataaatactgatctcttaaaatgatataataattatcatgatttagaaactaaataaacaaatttatcggcaattagttgttggacaagtgtctcaatgttaacggtgtatgctttcagatcacgacccaaaaaaacaaagaattgatttcattttccctttttttttttgacaaaaagaaattgtaaatctgtcgacactgaatatgaccaaaaatgctacatgttctgtcacgtagaaggccgccacgtacccatttgtgtctgcggaagt

SEQ ID NO: 78567 - DNA, 452 bp, Citrus sinensis
  Intron number 1 from transcript orange1.1g023470m (locus o range1.1g023470m.g) derived from phytozome v7.0 (chr-ID sc affold00252; pos 26933 to 27384 reverse strand)
ctgttagtgtgcagtatcttcaacagcctgagaaggtaacaattttggtgtttattttgtcattatcaccctcatccttttaagagcataacattttatttggtcaatagaacagttgagacttgtctatgtgtatgtgtattgttgttgccttttttcacttattagcgtaagcttttggtctaacatttctctaagttgacattataactaaggcctcctgtttgattctccttattcacttgtccactttttgagcttacgtcttgatctctgtggatccactaaactttaaaaaagtcacactacttacattttactcaaagggtctattgaaacttatcttcaatactatcaagtacagggcatgaagattgaagtaaaagtccagcaaaaataattaatatctttttacaggtatttgctgaagtgtttcgagtgctaaagccagg

SEQ ID NO: 78568 - DNA, 691 bp, Citrus sinensis
  Intron number 3 from transcript orange1.1g030723m (locus o range1.1g030723m.g) derived from phytozome v7.0 (chr-ID sc affold06688; pos 1855 to 2545 reverse strand)
aagaaataaccataccagctggaaaaaattttgaggtttgtcatcaaaatctgcttgccagatttgtattttttctttgattgttgtaaatggatattattatgtacttattttagttgctgatccaagttgtcatacaaatgctgtaaatgaaacagcattctatcttttgtaatttgtaaattctggattttcacaccggaaaatagtcaatgttagaattttccctgaatttactggagactaattatggctgtggttgtgtcagggaatatgcaatttgtataaattgtattacattaaaatcatacttgagagatacatcaaaagctatggatatgaaatgtaaattgttgaattacttggataacattctctccccttttattgtgtgcaattgtgtgtgagtgtgaatgtgaatgtatgagacaggcaaagggaagcattttatgatttcagaaaaaataatgttagatgttgtattgggttgagtgcacagtatcattaagtccaaaatttaagatgagttggcctggtgtgtcaaaacatttttgcatttgcgtttacatgtgattttggtagctcttgtcaatcttcagagatccatgtgtatttctaaatctgatctgtgactttctaatttcattgcattttaggtttcattttcagtggattcagtaaactcatacat

SEQ ID NO: 78569 - DNA, 308 bp, Citrus sinensis
  Intron number 1 from transcript orange1.1g047572m (locus o range1.1g047572m.g) derived from phytozome v7.0 (chr-ID sc affold00065; pos 116528 to 116835 reverse strand)
gcttggtttgtttcacaggagaaagcatcattgtaagtttccacttatctttgtttttttttccacttatctttgttttgtttgtttcttttttgatgtacatagatgtagttattatacttgaagtagaaacatcatggaatattcttccaattggtgcgtagatggtatctcaaagtaatgaagttttaagggatgaatatttttgcaccaaatatttgaacaggaaaggaatcaaatgattctttttgcttggtttcccttgatctaatagaataatggttattattttgaatggtggtgttcag

SEQ ID NO: 78570 - DNA, 682 bp, Citrus sinensis
  Intron number 1 from transcript orange1.1g033715m (locus o range1.1g033715m.g) derived from phytozome v7.0 (chr-ID sc affold00208; pos 58316 to 58997 reverse strand)
cttgttttagtggcacaaaaccaggtaagttgcttatgcagcatattcttcagattatcgaaagttcattattcattttttcctttttactttttttactttctaagtaactctcactgaataagaaaaaattattagaaagaaacgaagaatgaataaataaaaaattccggatgatgtaataaactgatcttgttatctcatagaatagaattaaatccggggaaaaacaaaaattcatgattgtacgtatagtatggtagtatggtataatatgtaatttcttttctgtaagggagtttatgcactgaaatttgttctcctaaattttattttctctgtttgaagcttatagctagctgggattcaaatgcagatataaagtaaacaaaaatgaggaaaaaaaataggccataatgcagatagatgcaaaatcgcagcttaccttctaacagtaatcaaaattaagctgaaaaaggactgaaaagctaacttacaaaagcggaccacaaattaattgcacaactcctgttaaattattattatcacaattattaattgttaccgctgcttctctttaatactttttttttgtttgatttttattttcttatttgaaattaatattttcaatttgttttctttaggctgcgggcacaggaattgcagcgtctcagctaca

SEQ ID NO: 78571 - DNA, 443 bp, Citrus sinensis
  Intron number 1 from transcript orange1.1g000997m (locus o range1.1g000562m.g) derived from phytozome v7.0 (chr-ID sc affold00005; pos 2855862 to 2856304 reverse strand)
cgaagcgtaatgaatcgtttcattttttattttttttttgtttattgatagtgcgttgagcttttgaaaaacgagaagctgaatttgtgttttcgacattaagaatttgacttttttttttcttttttgtttttcaatttacacttataaaatcttataacttatttcaacgaacactgtttttaaactacttattttccattttaataaataaaatagttgtggaatcaaagtacttttttatttttttttattttggcaagtcgaatgcatgttaatttttatttttagttgtgcaccagcttcacttcctcgatgagttacatttggaaatttttagctctaaataatcgaattgagactttgtttggtcgatgagaactgactgaagaagaaagaatattacagagttgatttggagcttccaaagattgaggttcgat

SEQ ID NO: 78572 - DNA, 983 bp, Citrus sinensis
  Intron number 2 from transcript orange1.1g028445m (locus o range1.1g028445m.g) derived from phytozome v7.0 (chr-ID sc affold00162; pos 28274 to 29256 reverse strand)
caaacgaggtgtgacactcataactttttgaaaaggtaatgtttctctcccaatttaatacctgattttctgctaattgtgaatcaattgtttcattcgagatattcacccgaaatctgttttctgcatgtgggttatgtcagtgcttgaggcttcatacattgctttgctaagccttacctgataactcagggtgtggcaaggctatttgtttacaatattttggttcaatttcataggagcagtatggatttcaaaattcctatggggagacggccccatcccattcgcacctattattatatctccgaaaatcagttgggttgagattgggatttttcgctccaggctcgggatgacaatcttgaccccttgtcatccctataattagagatggtagaattccctgtgggaggggggaaaaaataggtagcaaggggatctagtaacattttacacatgatggctggtagctatcctttttgtgtaagtcagttatgtcgtttttacacgtagaagttgattgtttaactacagagtgaacagccgaattaccaatatgcaataattgatgcatgagatcatcttgtttagtctgtgatttctttcagaagtgttgaagatataacaaaacaaagcacgcagtggacttctttagttgttctgagtattttacagacacagtaggctgattaatattcctggcacaccattccttaggagttttgcttaacaaataagcaatacttgctgtggattgtgcatttatgtgatgacagtactattgtacctttattatttgaattcttgggtgctttgtcggttgataacttgacctatgctctgaagcttatatttcaaacatgctgtgtcattttgaactagaacatgattaaaatccatatgcctgttacacagcaattattagttagccttttcacattgcaggaagaatcataaatattgtccgcctatttttgtag

SEQ ID NO: 78573 - DNA, 533 bp, Citrus sinensis
  Intron number 2 from transcript orange1.1g033009m (locus o range1.1g033018m.g) derived from phytozome v7.0 (chr-ID sc affold00594; pos 34987 to 35519)
aaccctagaatccgtcgctgccgccatcgttgaaggtttgctgctgccaatattctgactttcatgtaacatcttttgcttgtcagttatgaaattgttgttgagaattttagaacatatgaatttatttataaatttttaatctttatgtgttttaagttaaattgatttgctgtgctgtaattgtacgactaggtgtttgagaagtgtttatgattttttaagctacctgatataataggacttgatattattgttttttttttcctagtgttatgtatgtgatgaaaatagaaaaaaaagaagtcaaaattaaagtgaaatccccaaaaatccaggttgcccagaagaaaaatgattcattgttttgggtttatttggttttccgagtaaatcaaaccgaacccgaagtgtgcagtgtaggctgcaatttggtataaatatcagaagaactggctttcctttgtcgaaaaccctttacctgagacgggcgtgaaagccttgcggtgttgctatttgcagtgcagacggtg

SEQ ID NO: 78574 - DNA, 625 bp, Citrus sinensis
  Intron number 1 from transcript orange1.1g006546m (locus o range1.1g003745m.g) derived from phytozome v7.0 (chr-ID sc affold00050; pos 270497 to 271121)
gatcttcgtagagttacagctgattctagaagaaggtaacctttgcttatatttgttgattttttttttttttggatgcttgcattttgtttgaaacgaactccaaaaaatacccaaaaagtttcaatttttcattttccatgacgattttctaatggcggctataaactccttgattccttcagcttggaacttctatatatatatatataatctagcttggctacataaagtaggttgatgttgatcctttgagaactgtgtttgccttgtttgattgagatcatgcttaagtttcttgatgttttgttgtttctgtgctgtggtaggggagtcctctcctggggctaatagaggccaattggtactgtgaatattttgctaagttggttatatcaagtttgattaacttgttttatgaaaatttttgaagcttagttttgctatgaactatttgaagatttttatttatttatttattttttggtgcttgttattttgtattctatgtcatgtttcgtggtacttgatcaagatgctatgttagtgtaacttctctgtgttatggtctaagattctttttgaggctgttagatataagttgaagttttttgttatgttagat

SEQ ID NO: 78575 - DNA, 786 bp, Citrus sinensis
  Intron number 3 from transcript orange1.1g033323m (locus o range1.1g032809m.g) derived from phytozome v7.0 (chr-ID sc affold00034; pos 538677 to 539462 reverse strand)
cagtaagttctagagttcttgtgatggactataagtttggttgcattattgtggatggggaggttaaaaggacaagtaatagcgtcctgaatagagcttccttttatgaataaatactgaatttaactgcctctactcaatttgggtgagaagattaagaaatgccatgtttattgttagtttacattttacactttgaacaacggtgatattgaaaagccttgtatgtttaagtttttgtgttctaaactgtatgatgcaaataaacatgaaacttgaccagcatcctcttcaactagtgcaactgaggttaaatatgagtatgaattgagaacctccaatttatgctccttgtttgagtggcactattctttgtactgtgtagcttttatcctctttcatgaaaaggaaagctggtaagaatcgcaatttttctgtatggaagcaatgcatttaggctataatgcattaattcataggcctactccttacatgcctattagttgccttcactttccaaccccaaaattatcaatctcaaagtgtttcctgacctaaaggaataagtgcttcatttttgttgcagaagaaactaggattttgttttccagttcatctacgtctctgtcaatgttacaagtcttgtctacttttctgattttgtttattaacagtagctaaaatgaaatgtcggagcttgtacccatttatagcatctgcatagatgtagatttagttgcccctgcttgctaacttattcactttgttttatacttgcagaaatac

SEQ ID NO: 78576 - DNA, 731 bp, Citrus sinensis
  Intron number 1 from transcript orange1.1g015846m (locus o range1.1g015846m.g) derived from phytozome v7.0 (chr-ID sc affold00199; pos 216691 to 217421)
atctgcaactctgattcaattttatcagcagccaggtatttttaaataagcattaggattaatttcgaatcatcttacaatggtaactgtttgacagcagcctactgagaaattagatattgagaactagttatttttcccaaaaggtttgacaaaaatactcttataaaggatttttgctctctgcttttctgttcccatttatatgagatggaagatgtttttttttttaattttgacttttaagcagcggaaacaaaatttttatccattggataagttgttgatttagatttttcataaaaattaattggccgctgtcaaagaagttttcccacaccaaatttttgaatctgtttgtttgaccttgcttggatcagttgttgatttagattttcacaaaattttgctcatcaaataatactatacgttaaagagaaagaaatgaaaggtttagccattgaaataattcaattgaaagaaatttaagtttatcataaaaaaatatcaatttaagtcggaccatgttggtgactgcatgtcttggttaaaatctagctttgtctttgttcttacattttttttttttggttgataagatctttttcctacattattatctttggtattgactaatttttaattgatattattttaattccattttttctttaaataagttttcttttaattctctctcaatttttatgtaatttatttcagacgtatat

SEQ ID NO: 78577 - DNA, 594 bp, Citrus sinensis
  Intron number 1 from transcript orange1.1g021777m (locus o range1.1g019167m.g) derived from phytozome v7.0 (chr-ID sc affold00011; pos 1634197 to 1634790 reverse strand)
tcaagaccgttgttgaagtcaaagccctcgaaaaggtatcattttgattcaatttctctgtttatgcttgaattttcatctgggttagccttgaattgttgttaatgaagaaattttcatttgggttctgtggattgtgtccgtaatatgatgattttctatcaattgcttttgctttactgtggactgctaaattgaatagttatatttgttggcattactgtacattcattgttttagagaatttaatttttaaaaaaaaagaaagaaaagaaaagagagagacagagaaatcaaatacttgaaatggatgattacaatgcgatcactgtgttttgcttgcttggtgagtgcatgatttcagtttgtggaagtgtgaagtctgctttctgcagtagccatgttaccctaaagaaggaagcaaatgctacaatcttgtggagcagagactgacacagtcacttagcttacatgttaattcatacatagacatattcttaaaggagtccataagtgatattggaccggatttctcttttggccagttatttctatggatattgatacctttctttcgtgtatttactgcaggca

SEQ ID NO: 78578 - DNA, 820 bp, Citrus sinensis
  Intron number 1 from transcript orange1.1g025076m (locus o range1.1g025076m.g) derived from phytozome v7.0 (chr-ID sc affold00320; pos 36411 to 37230 reverse strand)
cttcttggagcttccctctccttctggatcggcaggttttataataaaatccctattactcctacaaattaattatttgtttgtttttgtcttacaccccactgaatcgatgcctttaaataagagatccgaaatctaattagtcttaagtctagcatttaggtggattgatccatccaccccatgatgtgtggtgaaatatagttcaattatgcattgcattcactagttgctaatcagctgagatttgactggttatgttaattggatttggagagccactttttctaaggaaccctaggaattgttgggcctatagttacttaaggttttgttggtctgcgccatatagacctgttaaaacattgaataccctaaaatagttgatgatagaacatcacttggatacatgacatgatggaagcttttctaaaataaaataactgtgtttgaattgggttattttcatctggggatgattgtttttgtttctcttcaaaataatattttgaagtcttgaagagaatgaaaattacagagtaattcaagtactcaatgtgttcaaagacatgccagtttgaaccaggaaacaaaagcagattgactgtaacattactgaacttgtctgcttttgatgacgcctacatacttgctctcaggattttccattcgttgttccattccccaaatttccctagttttttgttgttatttttattttttatttatttgtttttctttatgtttattttataattacttttaagaatgattttgactctgtggattcaggttagttttcaagagttcgaattcagca

SEQ ID NO: 78579 - DNA, 493 bp, Citrus sinensis
  Intron number 1 from transcript orange1.1g008752m (locus o range1.1g002776m.g) derived from phytozome v7.0 (chr-ID sc affold00011; pos 776042 to 776534 reverse strand)
cagacccaggtgtgcctttttgtcccattaaaattttattgaattatctaagtgagtactgtaaatgaaggggaagcgagcagacagtcatggcgaatgcatatgtaaagacagatgaattttgaatcaaacaccataaacgcgtcattcttgtactgttcatcaaatggaaaaaaaactcatgtgaatcatgtgattgatgatacttaaagtggaaatctttattaattctctgttcttgttttgcagaataagcataatttaagtaccgtgatcttttatgcatttttcatttttctttcttcctttttgttccctctcattatttctctaatcctggcaagtagatgaagtaacagtacagtctttatagttgttaaaggcagttttcacgttggttcttcaagtcttgtagattcaatgcaatagtaaaaaatatactcaggtttatgccactttggttgaagttttgtatcttttatgtgtttagcta

SEQ ID NO: 78580 - DNA, 868 bp, Citrus sinensis
  Intron number 2 from transcript orange1.1g012264m (locus o range1.1g012264m.g) derived from phytozome v7.0 (chr-ID sc affold00017; pos 1354427 to 1355294 reverse strand)
ttcagtctaaacaagacgccactgctcgtatccgggtacttgttgtttttgttaatggggattgaaagttttgatctttcttgttgatttgacataaattaaaggattacctgaatgtgtattctttgctttttcattgttcggctactacttgttggttttcactgagcattaaagggtacgaaagttattgttaagaataaagcttgtgtgcttagtattggaattgtgcccaattcattctttctaggtgcgttatcacccccttgaaaatacgagcttggagcttttgtgggtcattccctcagctgcatataacatctcctatcagaacttagggtttcattgtattgatattccctttcgtacttttaatcttgattattttgttcggtaaaaagtatacctatgttcctttctctagttgttcaatgctgctagtactttcagctttactaaattcatctgttgaattttgatgtgagatactggcttgggttcatacggggtttcaacttcctcataacttcaattggttattatgaagaccttcaatgaagttccatgccttgttaatcatgcgaatggagctagtagatacgcgattatgtaaacttgcttggtcaggacatgattattgtgcaaacaacatgctttccctttatctgccttgttaaattatgcacagtaacacaactcaaaaactgatatctagcttattttgaggatcatttggccatttcgtgctttcatccaaattgttcttgctttctgttctgcatttggggctttggcatctggaaactatagtgtatactgtatacattactgattttccagtgagtgcttctgattttgtaggttgaac

SEQ ID NO: 78581 - DNA, 239 bp, Citrus sinensis
  Intron number 1 from transcript orange1.1g020288m (locus o range1.1g020288m.g) derived from phytozome v7.0 (chr-ID sc affold00014; pos 401202 to 401440 reverse strand)
cagtctatttagatccccccaactggcatcatcaggtaaaaattttttttccctcttcattttctttgaaccaacaaaagcagattaaagaaaaaaaaaagataaatattcctattcctttgtaatctcttcttgaatataccaaatatttgtttctttataattatacttgtttttgatgtctttggtttatctatttttcagcaaccaaatcatcaacaaggtgctggcagtgaaaa

SEQ ID NO: 78582 - DNA, 534 bp, Citrus sinensis
  Intron number 2 from transcript orange1.1g017944m (locus o range1.1g017944m.g) derived from phytozome v7.0 (chr-ID sc affold00003; pos 4265644 to 4266177 reverse strand)
agatattgttcacggatccactttgctctcccaaggttagccgaaaagagtttagttgttcagcttgtttgtgttcattttcagtcttttaagaaacataatgtacattgttcccatttctttagaattatgcgagtctatgcttcaggaggcaggtccattgttcagcttattttttattcataattgtggtgaaatagccatgagcatgagttgtgtaggtgaaacaatgctaagacctccgaatactggtgtaccacaaccatgatcttatttatttttcttacctatttttgttattgcataaaactcttggtgtgtttgctcagaatgtatagtgtcagttgcattcagcttatgaagactttgctgtgtgttttaacttttgaattgttgtgcaggtcgtcaattccaatggattcatgtatttgtaatagattaatggtgtgagtttgatatggtttttgtatttctctgctatacgttaataaattgttcttttttcaggctgtcagagaacaactagtgcaattg

SEQ ID NO: 78583 - DNA, 1065 bp, Citrus sinensis
  Intron number 1 from transcript orange1.1g026005m (locus o range1.1g026005m.g) derived from phytozome v7.0 (chr-ID sc affold00255; pos 40172 to 41236 reverse strand)
actggggctacagacctttcaaagcctccggccaagtaagttatttttctattttgatatattattttttttcttttctttttaaattatcgttacttggaatgcaaatttgtctttttaattaacgctaacaaattatctaaatactgttatatatctttttctaatatcaagatgaaatatcgttattactagctagagtagatgttatatattattggttaaataaaatgttgaatttaatttattaattatttcaagtgaaagagaaaagtgtgagattagtttttcttttttctttttttttttaacgttcataatgaaaataaggacttaattttcttcatgtgaagataacaaaatactaacattttttttttaaaaaaaacttattagctagtgtgtaaattcaatgaaattgatttttgacatttttaattaatttcctgtaagaaatactattgatggggaatccgaaaaaaataatcgttaaagagttttatgagggtacgttatgttgttgtcacataagcaaacaattctgactaaagggagatttcaaggatttggttttctgtcgggaggaaagaggaaaattacaaaacattaggaatctttacttttctcacccaccaaacaatatttcaattttcaaattaaaatttttaaaaaaaggccacagctaatgattcttatctcattttgttgtacaccgggaaaaaaagaaatctcagttgtacggtcagacaaataagaaaaggccacttgctttttcaaaaaataacatgcctctaatcacaaaatttgataaatattttatatcataatttcggaatcagaattttggttcaacggaagccataaagaagaaataacaatttcgaaaaggttgaaacgtaatataaacaaaaccactgaattttagtgaaaacccaaatttttttaggcctcaatatagtaagttattattatttggggggtcaattaatagttaatgacatgaaaatgatctgattttttttttttgcaggtcacaagttgtgggttggccacccgttagatcat

SEQ ID NO: 78584 - DNA, 899 bp, Citrus sinensis
  Intron number 3 from transcript orange1.1g006077m (locus o range1.1g006077m.g) derived from phytozome v7.0 (chr-ID sc affold00196; pos 260264 to 261162)
cagagactcaggtacgagtggagtggctccactgctattattgcacagtattagattgtttggcctctaatttaatttactcgtggaatgaagatgtcgtgtagaatgcaacagttattgtagttgtggttttatatgtatgcatgcataggtttttatgacatcagtcctaaccaagttaatagtcatctatgtcataattgaaacatgttaccaaatttgcattccatttaaaagtttggtatattttttctatttactctgttgcataattgttatggtactggtgacttttgatgttcctagtttgattttccagattaccagtttaacgactctggtattgatgctagaatttctttcctagtattgttggaaaatccttgggttttagtatcagtgagaagaaattatatgctctgttgaagtgcatgtcagaactctaattttgccaaagattcatcagcaaaatgagcctagagagttgagcacacgaatgcttttcacaatctaatggttcctgttcctagagtttgtgagtcaatacaagtgcacttataatctgtttggaaggatcaatagctaaaatcatgcctgtaaaactccactaagaatatatggtagatggcaagcaacattgaagcgtgtggttgaaacttcatagccgggagggtaatagcacatgatgtgatcttatgattatgtgtttttcctgttgatggttttatccttggaagatgcacaatggagtggagttaaacttgtgagaatttgcttggttctggcttcattttattctttgacgtttttctttgtatttcaaactgaaacactttttaactttgtagattttattgaaaaattgctaatttcatggttgcctttacagtgcttgcccc

SEQ ID NO: 78585 - DNA, 1019 bp, Citrus sinensis
  Intron number 1 from transcript orange1.1g005066m (locus o range1.1g005066m.g) derived from phytozome v7.0 (chr-ID sc affold00005; pos 1806130 to 1807148 reverse strand)
gcttggaggcgcctaatcacagaggtcagttgcatttcttcacacgatttattgattaataattgttttttcatatgctgcgttccttcatattcttgacatatatagaaagttagcttgttttgggtctgcaataaccctagttttaattttagcgaggctttagtttaggttggtcagaaaacccaatttacaatttcagctttggttaatgttgattctgataattttcattatttagtcaaaactatagctgtactcaaaattatagttgtgttaaggtagggaatgaagctaaagctgtgttttgaaccattgattcattgcattttagacaccaggagagagggaatgagagacacatcactggatcttgtttacaagaattttttatgtgtatcttttgaattagtctgttcatgggcaaatattgtcctgtactgaatcttcattgaataaccacattgtgaagctggtatcttgaaagttgtccctgttcctagttttgttgcaaagccagtttttgcagtattgttttttctccttatgttcgttgattattttgggggtgtagaagatttgaaaggagtaaaagaggacagggctaattttttcccctcaatttgcagatcatgaagaaaatttagaaactattgcttaattcttattatttgttttctttgtattatgtgttcatcacatttgaaatgtccctgcctttagttgctgtactggtagtatcactataggttctttagctcttgtttctaaataatgcatgcttatattagtacatgttctcacatgagtataaaggaagaatcttttggcatcaaagtctttgtggttggttttgggtgtaccaacttcttttattatcagtttaaatcgtcgaatctcattcttttgtatggcataggatttatcctttctcaattctccttttactctttattactaaaactctgtgtttttcttcaataggtttcaaggcaccgaacagagttggtgccggtcaa

SEQ ID NO: 78586 - DNA, 940 bp, Citrus sinensis
  Intron number 1 from transcript orange1.1g024008m (locus o range1.1g024021m.g) derived from phytozome v7.0 (chr-ID sc affold00180; pos 235518 to 236457 reverse strand)
catatcgaatcttctggtaaaagttaaaatacccactttcattttcccataaagtttcaaaatttagtcctttttttttatggggttatgaatttggtatcagaagatggattgctatgtgggtatgagtggttttttttttttttaataaatggaatctgttggatatttgactgagcaatagctgactacttacgtgtaaaaagaatgagtacatgtttgtcattgttgggcattatgcttaattttgtaacctggatagcttaaagtgtttggtaaatacccttattttaacttttacagctaatatttatgaactatctgcctgcttatacttgatacttagtgatttaattttagagtagttgtggattaaaaatttctttcccttgatcccaaatggttcgattaacgcactaagcaggaattttctgagatattagttgaaaatgaatatgagccactggcatagaaacctgatgcttctgagttccagtgccaatctaaggaatatgtgtatctattttggtgtgacaatttatttcattcagtcctagtgtatctggaaaaatacctgggattgataatttgacattttcgtggaaggccattaaagccaatttcattttcatcaaacttcgtttagcattttaagttaaacttgacgagttgggttctttgtggtttcattggctaatccctgattgaaattgagctttatacaagtagtcaatagacttgcatatgcatttagtgggaattctcacatttgttgtgtgtttaattaggagtgtggtgaaacatctgttttgttgtgtatgaaatccataaagtcctattgatggaatagttctccaacttgtgttggggtttagggcttctccgcatgtgttttttgttatagaatgttgaaccatcatgtcattaatctttcaggagg

SEQ ID NO: 78587 - DNA, 444 bp, Citrus sinensis
  Intron number 3 from transcript orange1.1g020888m (locus o range1.1g013833m.g) derived from phytozome v7.0 (chr-ID sc affold00003; pos 3269314 to 3269757 reverse strand)
atagattggtgatgtaagctctttgtatttttttgaaatttgagtacagtttgatgatagttctaatgtctcatcacaaaccgtataaattatttgtttctgattaaaataattctgatagttccttttgcgccctaatgggcaatgaatcataactcatataaaagatgaatgtagaacttcaatttgcctagatttgccagatatttattctgagatgcttttccaagatatgatgttctctattggaggaagaagtgacttcaatatatcatatatataactagggttattaagtttggttcaccattcttaagaaaatgattaatctggtggatgttgtagtgtaacctaattccttgctacctttcttttaaaccttttatattaagaatgtaatctcttactatttttcactttcctgattcagtcaggacttcaggc

SEQ ID NO: 78588 - DNA, 763 bp, Citrus sinensis
  Intron number 4 from transcript orange1.1g026328m (locus o range1.1g026361m.g) derived from phytozome v7.0 (chr-ID sc affold00017; pos 491675 to 492437 reverse strand)
ctggagaggatttggtggtatgcttctgttactattatccatctgttttgttttctttttccatgtatttttattgggtaaaatataaccaaaactatgcagatggtgattcactagttattggttgatcttataataacaaactatttagattttgatcatggtttatttattggatcattttgtatttgtaagttctttttgttggttaaaattacttttcttcttggtgccagccagcactggccatttacactggttaaaagttaagtgagatgcaatctttgcatcatgtccatatctttttttttttaaatttttttatccagcttgaaatgagatggaatgagactattcaccttgatgtttagattggccatgtagcaggttaccaatatgtctttatcattattctttaagttatgcatgtatcaaaaatactgttcacattcatgctgtcatatcatgctgcattatttgtagaatgatatgtccttagttgtgatttaggtcttactgtcttagttaatccttattaatcaataaagaaaaagatttagttttcttgagtattttagttcttttgggggttcagttactattagtattactaataaatcatgcttgactttgtaatttagttgttatgccattatactgtaatttccagcatttcttctatcgatgaactaagatgcctttattatcttattctagttagtagctgtcatcatttttttagtggcattttctgtaatgcagg

SEQ ID NO: 78589 - DNA, 446 bp, Citrus sinensis
  Intron number 4 from transcript orange1.1g016545m (locus o range1.1g008621m.g) derived from phytozome v7.0 (chr-ID sc affold00497; pos 12884 to 13329)
aacttggcatagacaggtccattatagcaagtgagttgtgtctgtttttacatgagctaattttgtttatttatttctagttaacattagaactcggcttgtagctgaagaatttgagcttctatattttaggtgattaagctgtattatttaattgtaaaacaatgtgtagaagtcccaaaaatcaaaatggctggatcaattttctttgtaaaaatttgattttagcgatatgtagtgtaattgcataggtatttcttgccaattgtatcaacttatgtcctagggattgtgcctaccaatcacagaagtttgtagacaatgaaattcagaaaatatgctcttgtgatttttgtgtatttttgcttccgggtgtgacttctgtttttgtgtgtggaaaacattttgcagcacacctagaagaactggagcaacttctgaaggga

SEQ ID NO: 78590 - DNA, 773 bp, Citrus sinensis
  Intron number 1 from transcript orange1.1g002356m (locus o range1.1g001847m.g) derived from phytozome v7.0 (chr-ID sc affold00014; pos 960937 to 961709 reverse strand)
ttgaatcatctaccggtctcagcttcaattatcaggtactatatattctttcttcttattatctgcaaaacaattttcttcttgcgttagctatatgggaagtcatgtacataaatggtcgcataacataaaagttgtaaatttagggctagggtcaggcctcccgcctccgccttcacatgtacatgtctacatgaatgaggttaagagagcttttgcgtttagagtgaaggctgaagtttacaactcgttttgatggttcattttttttaaaaaaaaattctcattaaattcttctattgataagttttttgtattcaattttctatcaccatcatcatcacagcagcattagctgttacgggcagctgtctgtatttaatctgctagctacctagaaatttgttagcttcagaactctttttactgttttctccgtgcacagaagacattctcagtcctccgaatttgtgcccatttgagtgaccaaattgcccttaaaaaatatgaggtgctctgagtttctactttctaactagccaccaatcctttacctagtggtgtaaatcacaatggattgacccaaacacccttcacagtgcttgcatatttcattttcattttcgaaaacaatcggtccgccggttctcttgtccagttcatcatcaacactgtgccgcatcatttatatagaaaatttacaaaactgattaatcaggaaaaatgtgaatgcctatttgttttaatttcgtgttaatggctattgcagagaa

SEQ ID NO: 78591 - DNA, 375 bp, Citrus sinensis
  Intron number 1 from transcript orange1.1g000459m (locus o range1.1g000459m.g) derived from phytozome v7.0 (chr-ID sc affold00003; pos 4326682 to 4327056 reverse strand)
gcaagagactgaagaagtacaagcaggtacactttcttttgatttcttttatcttatcttctttctttctttctttctctgagtttttatatattttttcgttgggaatttgtttaattttccggattctttgttggggtttaattcaactgattgattgatgtttttagggttttcgggattaggggattttctgatttttgttataatttgctaaattttgagtgggatagaaatagggtttttgtgatcgtagattgtttataatcgacaagccttgtgtttggagtattttaatgcttttgcattgaatgtatggtcgatgatttttataaacgtcttgtttctgctgatttgaaggttttcacaaacaac

SEQ ID NO: 78592 - DNA, 1036 bp, Citrus sinensis
  Intron number 1 from transcript orange1.1g003854m (locus o range1.1g001369m.g) derived from phytozome v7.0 (chr-ID sc affold00094; pos 297929 to 298964)
aaactgcaagagtaagcactctataatccctcttctgtttttgctttattttgatgtacacccatctggatctttttgttgttttctgatctgggtttgttccaaaaatgtatcttgttggtttttaatttttattttttaattggtgtttgatgagattttaagtgcatttttttctgatttaagtgatgtatgttctactgtgatttggttttcatttttattggatcataactttggctatgttgcatatcagtgttttttaatctaatatggatccattttctaaataaatgtgagacttttgatgtgaatttgagcttaattttgctgatttacgttaactgtgaagctaccagtttcctgttgttggtttctagatttgctatgagtttcagttttgatgttagcttagatgactgagatttggtgtgattttgaaagcaagccatcgattgtgcttctgatgtatttgctgattctcataattttgttatttaagaatctcctaattatttggatattcaaaagaaatttgtatatttttttggaatgattgtaactgttatagaagccacatgtaaattaccatgatctgagttctcaaatgcagtggattatttgagtcttgaaaggaagcataggacgctgttctggggataggaacctgcaataaatagaaagaatttagtagataagttaactaccattttgtttggattatttgtggtaataatgaaattgcttgcttactcgacgaccacttcaataaaatgatgaaaatttgaacttgaaaaggacagttagaataagtagattctcagtttaaatttctatttaaatatcagttgaatattctgctcttctgaggtatgtctttatatcctatgatcacccaattggcaattgcattgtttgtcctctacatttttatttggtttgccgagcagtcacaataacttgcattaagctgatgagctcacttctttgggtgtgtgcagataaaatccgtgaaagaattgagtggacaaacttg

SEQ ID NO: 78593 - DNA, 752 bp, Citrus sinensis
  Intron number 1 from transcript orange1.1g033989m (locus o range1.1g033989m.g) derived from phytozome v7.0 (chr-ID sc affold09466; pos 370 to 1121)
tcaagataacttaattttctggctggtattttttttatttatctttcttctactatatgtatcttttatacatcaatcagggaagaataaatggtgcaattcatctagcattaagttaggcaccaaatgaaagcttaattctttaatctgcggtagaggacacaattctgctagccaatgcatacctttttggtctctcatcattccttttctcttctgcttgtctgctcagaattaaaaaatatgctgcttgcatatatagagcaagttgaatctgatgaacaaggagggacacttgttgccggatatttgattgcataaatttttaaattcttctacctgtgtgttaattcgtcagctgtcatgcttcagtttttatattatggacatttaggccttctttttacctaaatgtcaaattggtttctcttttttggtttttacttttacttgatgtttggaagtctgtgaagcactcatagcttgttacacaacagtagtcaacttccataagaagagattctggttctgtagatattgcttctgtcatacattgttggtttgctgatggacttggaggaaagtagtatttagggattagacctgtgaaagagttgacattgtcctctgcacttattttctgaaaaaagaaaaagggtctgcatctctaaaatgctcagctgtggcttgcttatgcaaacaaagcttggtgtttcttttcagggctgccatattctgagagctgactgtat

SEQ ID NO: 78594 - DNA, 897 bp, Citrus sinensis
  Intron number 3 from transcript orange1.1g028781m (locus o range1.1g028781m.g) derived from phytozome v7.0 (chr-ID sc affold00310; pos 100221 to 101117)
cttctgttagtagcctcctccttttcattcaaaaggtttgcctctttttatcttttaagttgtattgttgttgatgaaagcaccattacccaccatatgctgagcaactaactggacacgtggcacaagtctgtgactacatgtgaatagtattgacgttgtaaattaatcagacagcgccacgtgccagtgtcgctcatcattataagggcactattgctcactagatcattactccgttgctggttaccttcttcatagtcgatatatgggttccggaaactttttgacttgtgctattaatatttaacatgctggccctagcaaatgacaatgccaatcagcttctcttctatttttgcagattgtggccaatttgtatcttattgtgatgcatgtggaaaatagagggattaggtggaacatgtgaaagtgaatgatatttcaggcgtcttctgtacattccatcaactcccacttaagaatcacaaactaaacaagctttaaatggtaagtcaagatgttaataacaagattttctcttagaacatctgggtagaagatagaacttatcataagactctacaaatgtgtaatgaaatatttatagtggagcccatttgctatggtcatcaatagaatctgttcaaatcatttatacctctatcaagcctctgtaaaggtcttcatatttattttagaacatcaattattttaaggtttactgtcggaagataaatttaactgtacttaagaggcatacttgttcttatctttgatatgcaaacgctttcttatcgtgtagtgatacaaaattgtgtgctgtaaaatttaatgagattttcatatctctacaaaataggggctggtggaaagagtcgcagttattttctccaa

SEQ ID NO: 78595 - DNA, 739 bp, Citrus sinensis
  Intron number 2 from transcript orange1.1g028771m (locus o range1.1g028773m.g) derived from phytozome v7.0 (chr-ID sc affold00497; pos 119283 to 120021 reverse strand)
ggtagttattaaaccttatcgtggaagaggcattggtaattttttttttgcttattgcaagtttagcataaatgggcattaatttctttctatatggaaacgttataattatataagtctatatatacactttgcatgtgttaagctgtcttacttgatgaaatttaatttttttttccagatatttattaatacttatgatgttgttacttgctatcttcaatgatattgctttgaaaatttgaaattgagtggaattcgaaatatgtgtttgtaagggcctgttggttaccattttgtaaatataagaatgtttctgctagtatgattccaaaatttttttttttaaatcaaaattttcattattagaataaacatcattgaacccctgatattgtttagtgaactaaatttgaaactggtgcattcaccatgtttatttccaaagtatgatgaaaatgtctccaggcatttcgacttttgaagagttatattatgcttttatctcaaaactgttttcaagatgtagaacctctggactttgtagtttttttggttcggaaaaatttaaaactgttttgtgaaatgatgctagtcacccagattcatctaaggccttaattaaaatttaaggggactagttgatcatctttatgcattccacaagtttatgacaaataaagaattatgttttctttgaatcgcagcgactgagcttgttactagatcgattaaggtg

SEQ ID NO: 78596 - DNA, 714 bp, Citrus sinensis
  Intron number 1 from transcript orange1.1g016293m (locus o range1.1g016293m.g) derived from phytozome v7.0 (chr-ID sc affold00393; pos 98734 to 99447 reverse strand)
tgactctgttgagactttcatttttgactgtggtgagttggtgaccctctttactgcttacttctttttagtttcttgattttcattttgtagtgattctgctgatgtggggtttaacttagaatcctgacaatgattaatggtaattatttttggtataatgaggctttcagggattttgttgtaatgggtgttgagagtttttgagttctgattttgacaaaaatttattggagactgtttttggggtgattggttttctatgatttggttgatttatggaatagacattgacagaatttctgggttctgttgttgttattgaatgaatgaatgggcttgccttctaagatcttctttttgagaaaatagatgaaatccgaaacctcatgcaaatatgaatatcttaagctactttgtaagtcgaagaagatccacttagtgactgacatgtgcggaatgatattatattatgcacgacaaattttttgggaattgttttagttgcttcttgtattgagttagaagcattcaaatgatttagtttggtttcgccttttttttcccttttaaatttgtcttgctttcgaaaattggctggttgcaggtgagttggagcctgagggattgataaggtttcgtttcttacctatgattttaaactcatgaactaataatttgcaggagttatttggaaaggagataaattaatag

SEQ ID NO: 78597 - DNA, 691 bp, Citrus sinensis
  Intron number 2 from transcript orange1.1g002734m (locus o range1.1g000515m.g) derived from phytozome v7.0 (chr-ID sc affold00011; pos 1679715 to 1680405 reverse strand)
tgtctttagggcccccaattcgacagaacagtgatgtaagctaccttttcatatctttactttcagtagcatgtattttttgttccttttgttctagtttacttttttatgtatatatgtcacaacaaaatgaccagaggaaaaaaatgcatctaggtttttgtgtttcattcttcatcattgccatataagaatagtgtgcatcaacctctcttctcttgacaatatgtgaccttaggtaagggcttcagaaaaatagctatcatctcccttgccctttctgttaccctgtaatccagcccattatccattatcaaatgcctttgtaccatgtaataaagaagaaagatgatctctattcaatattttctccttatcagttcccttgatgcaaattgataactatatttgcattttcttgcttccattgcagtctgaagcgtctgatagatgcttgtgtgtgtttgtcattaccctgtaaaagtgaggtgacaatctgtcggagtctacagttggggatggtcaaatcaagatttgctttcccccttcctgctgttgagaaacatgcttaatctagttgccaagcaaatttctagttgattatttattttgaacattgttttattttgtttaagcttcctttttctcttatgcagcaaccaagcacctgtggtgagtttgacattgatca

SEQ ID NO: 78598 - DNA, 1015 bp, Citrus sinensis
  Intron number 1 from transcript orange1.1g022474m (locus o range1.1g021378m.g) derived from phytozome v7.0 (chr-ID sc affold01337; pos 16653 to 17667)
ctagtaattttccggacttctatattcttattttccaaagattattgttgagaatgaatagattttcattatgtttacttgtttgctgagcaagatacccacattttataaataggctttattgtttctcaatgagcaaataaatcttccaaactggcaccatggtttagggtttgcatgcactgaacattttctacggaaacaaaacaaatgatgttgatgccgcactatgtccatgaaaagtttagtactctaccatttagttgaaatacatgtcagctaatgtaccaaagataccctctaatccattggagaaacttctgtcacgcaagtttttcatgtttccttaaatcatagagtgattattcatctattctatgtaattattttactgttatgtgcttgatttcggtttctggattgctaattactttacatgaattatgaaacaaaaatgatgatgatgatgatgatgatgatgatgatgatagaaacaaagtagtcttgcagtcaaaatttgcagcaaaggggtggtggtagggtccaacttgtgggtgtgatatgtcgaatgaaaattactttgaaaataatgatgagttccgatgaaaatctagatagtttagcatatgtttggttgacaacctactcctcttaattgcaaactattcttcccctgtttgcaatatttttgacatcgattgctgcctgaaagtctgaattttatatttaaatagtaagctgattgcctagtatatgagaagatgacatcaaaatctggttctttgggttttttagtgctagcatatatcttcttgtctctatggcaataatctatgctaactaaaatttatgacgtagacctgtgccgattagattcatgactgcaacatgaaagcagttttctatttaaatatgtttttgggatgatttgcatttgtttttgaatggttgatcatctaactttatttgtacaattgtagaggattccactaaagtttgtgggacaatttggaga

SEQ ID NO: 78599 - DNA, 848 bp, Citrus sinensis
  Intron number 1 from transcript orange1.1g021974m (locus o range1.1g021974m.g) derived from phytozome v7.0 (chr-ID sc affold00014; pos 1214680 to 1215527)
cttcaagtggacaacatcaggtaggatttgacaagattttattatttatttgaattcttcattgtattttgttaactttgattaccttttgttcattcccttcttttccttttcatgggttctttttaactgcactagtgattctggatttgggtttaattggaaagttaattttttttatttggttataatagactacttttagttactatttaatgtctatatagaggaaaaagaaaagatttttgagcttttttaattttattttctagggagtttgtttcttttccttcttttgtttttggaagtgggtgttggtgtttatgtggttatgtttatattctaattcatatttgttattagtctttgattattctacctttctcttgtttactttcccttatgggatttgtatactctcctttgaaaaaaaatcttgaaattaatcatgtgattatacataaggttggggagaatattgatgaagacctttcaatttcacttttttttaataactcatttcagttgtcttgttaaattaaatctgagaagataattttctcttcatacaatcggtttttctattatacattagtatatagcattttattggtgattaattttaaagtaaccaatatcatgaggatttcaaattagggtcttccaatattgaattcaatccgattccctattatcaacttggaaaattgagatcaatttatatatatataacattagaagttacaagatctttcttgagtattttgataagtgttttttacaatttgtcgatttaaagtgttttaatttgaaattgtgttgttgtcaacttgtcatcaattcaggaa

SEQ ID NO: 78600 - DNA, 831 bp, Citrus sinensis
  Intron number 1 from transcript orange1.1g033727m (locus o range1.1g032249m.g) derived from phytozome v7.0 (chr-ID sc affold00005; pos 1173613 to 1174443)
aggcgttccctctttgaccaggttacttcaatttcattttcattcaataatctctctctcttgtatcacttcttatactcatgatttcacaaaatgtggttattctttcacttaaaactatttaaaaaaaatcaacttttactactgcctatctctatctgttttcataatactaaatcaaaagaagtcaaaggaaaatttatttcaaattttgaattggaatccttaaaattcaatccatttggattctatcatcaacatatggaatattatctgttaatgaaaaaaataatttattttcctcgaatgttgaggagccaacaaatgttataattacttttagaccgacgctgaacgtaacttaggccctcccttatttctatacccatgcgacttattatactatttgagttgacaaactagacgaagattattaaaaaaaaaaatccagtaaatagtaaaagtagaaaatgctgggagaaaaagtaacaatttccagtattcacgccaccatggttatgagatagatttaagttttaagttttttttttttcccccaaaaactgttgcacccatagatggtcgttatcaagcattgtctactgcgatgatagtgacggagaatccgtttaaaaagatgcactttttttcttttttcccttcccttttttttctattgaatcgtgtcgttttgcactttgtaaggaaaacagtaaacgcttcattttgattcagcaattatatattaattggtagctctgcatggaatggtgaactaaatgataaattgttacagggttatcttgactcagagcagctcattcagctgga

SEQ ID NO: 78601 - DNA, 511 bp, Citrus sinensis
  Intron number 1 from transcript orange1.1g035879m (locus o range1.1g035879m.g) derived from phytozome v7.0 (chr-ID sc affold00168; pos 299252 to 299762 reverse strand)
gggatttttccaggtaaattcctttaccaaagtacatgcttttccattgatcaagaatcaagattagacttccgcttgtgacctactctgcagcaataggtttggggacttatgggaaatatacttatttcttatatttgatcttctggtcttcttacattttaagttgccataagaaaagccgcataaaaattttgaattggggattcgtaatcatcttttagaattgagtgatattaattgtaactgtccccgtgggtttgtacaccatctaacttgcttctgataaagatgtgaagacttataaacaaatttataaaccataatggtgttttaatgcaactgcaatattcttagttaatttaatgaaaagtaacaaatgcttttattagtatctaaatcagccaaataacttgcactgtgtctcaataaaataccttgcccagtacgaacttagaggcactgccgactattgtcatctttgctatttttcttttatgaattgtttcag

SEQ ID NO: 78602 - DNA, 848 bp, Citrus sinensis
  Intron number 2 from transcript orange1.1g008998m (locus o range1.1g008999m.g) derived from phytozome v7.0 (chr-ID sc affold00162; pos 17243 to 18090 reverse strand)
gcaccgcttatttcattaccatagtcgccttgcaggtaacacatttatttatttattatgttaaaccctcgtaaaacctctggtgtttaattgactaaactgagctaactgggtatagttcatgttatatttaagtttctgttaaaattagagaaattatgttcctttatgaaaaatgttgaagcctgttcgttttcccttttactttgctggtaaaataacaaatattctctgatcttcattgtaaatttaatttatctggacattaaagaaattcgtggtaatttgatggtttcttttgactaccaaaaacatgtgttgaaaaaaaacttgttccatcgtcattctctgtttggttgtctggaaactcaatcgaaatcaaattcaatagggtttatttgttttgctttttcatctcttgagatcaaattcattccaaatactagttttgcatgctagtgtcacacacacatgtattgaaatcatattcatagtattccttatgtgatagtcctttttggtgtaattggttcctgcctattatgtgtgtaatatttgtaagtaattgggcgagcacgttctaacagtgaaagatagccaacaaaaactcatcatctgatacaacccaaaatcttaattttatacatgggcactggctctctccttccaatctcaagcgcttacatgcaacttcagtcagcagagtcaataatggatttatattgcttatttattcggtattcttgatgttggatattttctcttctttaatacgcttcatagttgattcttaatggcaatttttaacgactctatagctcaaatgtaggagtgtagcgaggttccag

SEQ ID NO: 78603 - DNA, 523 bp, Citrus sinensis
  Intron number 1 from transcript orange1.1g034379m (locus o range1.1g034379m.g) derived from phytozome v7.0 (chr-ID sc affold00005; pos 310231 to 310753)
agaagttgaatctcaactctcttcactcgtctacggttcgttctcttacactcgctttacattttcccgctgttttcctcagttccaaaattcaaatcacacaggctttgttcactcttcgtacgcgattcatcttaaagtgaatcaaattgtatatgtaatactgttcaaattaactggaaatcagatgtagttacaacaaattcaattctctccgttgattataaatcctgcgataatctgttgaaattttattaggtctacttgcgtcatctggtaattattgtaaaattgtgaccattattttgatccattattttggcctgagttttttttttttaaataattatgaatggaaaattttttgagaacacgaaactggataaagtgtacctaatggtcttctgttggctgcttcttttatctcgttcttgtgcttcaatttttattaagtgccttcagtctgttggttattattctgtttgtgcatgtaagcatgacctatcttttaattcatgcagat

SEQ ID NO: 78604 - DNA, 473 bp, Citrus sinensis
  Intron number 3 from transcript orange1.1g031887m (locus o range1.1g031887m.g) derived from phytozome v7.0 (chr-ID sc affold00003; pos 3320595 to 3321067 reverse strand)
tgcagagacaaggtctttgaacaacaaaagattttgtatccttggattcgtgtttgttgagagatatatttgattttcttttacttaataagaagtagttctccatgaatgacatcggccggatcaatttatttgtaaatggtaattatcattttttgggttttgattgaatcttgataaagagattttttttttcaatcactagcgaaattcttgaagctggctcactgtattggagcttttttattttgactgtatatgaagtaatattttagaatcaaagagatgttcttctaaaatagatgttcaattcaaagcacagaaacatcctgaaagaggcactgaaactgaatcctttacaatcattatgtccttccttattatccaacttggtgattgtttcttttatctggtttacttgacactaaacgctggtagctcagatttgcgaaagaacatagagaatttggaga

SEQ ID NO: 78605 - DNA, 725 bp, Citrus sinensis
  Intron number 4 from transcript orange1.1g031550m (locus o range1.1g031584m.g) derived from phytozome v7.0 (chr-ID sc affold00005; pos 609296 to 610020)
tgcattttaaggtgtgagtccctttttatgataccataacactttgatctgctgtttgacaaaattaaggaagagaaattgctactagtatcaaaaaatttagtgattttgcctctatgatgttttcaaaatcgatttggaactttaatatttttggtttggttactttctcaacttagataaccttaatatgatttatcaaaaatgtaaattcacaatgaagaacagtgttctttgaaccattgcactgtaatgttctgatattgttgttcacttgattaaatttctgtgtcatcaactagagagctgtataatttagttgccaatattcatatgattagttgagactagagagaagatttgagacatttatgagaatattgaacagcaattgagtggggaaatggaaattgaaaagattggaagaaattaaaaagttgcaatatgtgaatgagaaggacgtgcaacattatgaaatgaaactaatcatcatacataaaaatattcgaaatcctttaataattgggggtgaaaacatattgaggggtggtccagggattagaggttagaatgtgctaaatcctcaatttgaagaaacgttcggtcctatgtacagtatgaagttatgaacgattggtaaattaaacaacctacctttactctggaaggtggttactggttaattaagtgttagctttgttatttctcttacagacaggagagat

SEQ ID NO: 78606 - DNA, 760 bp, Citrus sinensis
  Intron number 1 from transcript orange1.1g030158m (locus o range1.1g021153m.g) derived from phytozome v7.0 (chr-ID sc affold00880; pos 15010 to 15769 reverse strand)
gttcttctctgatcgattatgtaagagttctccattatatttccccgtgggtttaaccttggttcgttttcttttaatcttgttagacttgtatgtttattcttttggttctatttttattggctttttaggctcatgttgagcagtggacggatttttctgccatggagattgatgctaatatctccaggtgggtatatccaagacttggatatatgcaatacattcctccggtgagttaatgtccactatctacttcaaacaaacatgtgcatggcttggtccttttttttaacttttacatttgtaaataatacttgttggtatggttgaagttatgcattttttagcatttgatatcatggattttctttgtttggaatttcaattaattttcttctctgtttgcaacttttaagtcgccctcccctccccctggggggcggttgcactagtaacgtagactaaataataggctcttaacatttggcatttgttactgttttcttgtacgtgaagcaaataaatgcaatgaattaggtttccaaatgttttagcagacgagaacatgaaatgtttcttcgttcactttttgtatataattgaagttttgttaaattagcatttaatccagtaaaccgggtttataaagtacatatacattcatgtagtttagttttcatttctgcttggaaggggtggatatttcattttgcacctttgatcaattgtttctgtttagtttgacataactttgctt

SEQ ID NO: 78607 - DNA, 904 bp, Citrus sinensis
  Intron number 3 from transcript orange1.1g016821m (locus o range1.1g013721m.g) derived from phytozome v7.0 (chr-ID sc affold00003; pos 1536949 to 1537852 reverse strand)
aggtaattagtgcgtcagagttttttctttgaaaaataaataaataaataaatttgtactgtaatatcattttcttcccccaggagtcttgcctccatattcaaataaacaaacaactctaaagaaagtggtcaaagaaaatggcacatcaggcttgttgttgttgattgcctactgctttaggtctctttttgaataggaccattatgttaatttttaaatccccaaaagaattaacaaaagagttttcttttttcttttttttaactttttacaggtttaacaaaaatatgtatttgctacttttttatgtttttgttgttttctaatcttttttcctaacgagtttaaggtgaaatttcatcaaaatggactagagattgctgttccagtgaataataaatgctgcaatgtctagttttcatcaataatgagttcctgagatgaaaagaaaaagaattaataaattttatgtgttgctgatactttcctactgagcaaaataagtaattctagcagcttgatcctcttttatttcaatcattaaacacaagcagcttcttggttttagtaattacagtaattcacttatttcagtgcaaaagaatttttttcattaatgagtcccctgcagttctgtataatgactgtttgccatctttctcttctttcttagaaactttcttgttacaatgtgaaattgggggattcagtgctaagttaattttgcactgaacactaaatcaatagtcatgatttattttttatatctttcatttcccttggctaacaaccattccttcactgttcaacaagaaatcacattgatattaaaaacttttctgttaatttaatgttcatcttggacacaatttaaaattttgaaatttggttaatttacagc

SEQ ID NO: 78608 - DNA, 857 bp, Citrus sinensis
  Intron number 1 from transcript orange1.1g001895m (locus o range1.1g001895m.g) derived from phytozome v7.0 (chr-ID sc affold00332; pos 21147 to 22003)
agggacgccttcttctgctggaagcgccggcattcgtatgctcttcttgatcatttcatattttttccggttgcttgttggattttttaagttcctttgcctaggtctttcttggggaggtttgttgttgcttgaaattatgatctaatgcgaggttgagtgacttcaagttttggaatgcaagtaatttgtgacggaatttggatattttctgaaaatttctgctcttgctggtgcctttgttgtctaagttacaaattgtgagaaaactagataaatttaaatgcatatatttcattgagtgagaattcctaatttttactgaaaccagtgcattaaaatgtcagtgtttgagaaccatggtcgtcagtcgcaagttttttaattttttgggaaattgtaatttcattgatgcccataaaattaaagttatattttgattggttgttgttttttgtttatccttgaactgtaatttttgttcctttttgggcatgggatagtgcgattggcattaaaataagggagcttggttgacttttgtgcagcttcataggcatgtttggttgtgatattattttcggtgtgttaaactaagctgtgtagtcatgtagaaattttgttcttcatgtggaacaatgatttatttatttttttcattttccaattaattgtttctttgtgtgataaatggcatgagaggaataatagttttgttgattattgctgcttttctgtctttcattgttttcttgaatggaggatttgttgtgtttctgagtgttagtatttcatgctttaagctctcatgacgattttgtttacttgaataacagggctagcaggtgccactgctg

SEQ ID NO: 78609 - DNA, 482 bp, Citrus sinensis
  Intron number 1 from transcript orange1.1g019215m (locus o range1.1g019215m.g) derived from phytozome v7.0 (chr-ID sc affold00003; pos 113236 to 113717 reverse strand)
caaaggtactattttattttattttttttcaaaaaaaatagaaatattatatttctttacatgcgagttggtctgttttttgggttagatttggggcttaggctgtctgtttgtttgacaggaaaatcttggaaaaggaagttactgtaaaattgattttttatttttggggatttattaaccttttttctcctgttattttaaatggattaattacaaatatttatttctagaaacaaaaaataaataatcattatttttggtcagcaaaaactgaaaaattcaactggaaatggattcatttgtattatttttctttgttttcttagcaatcagaaatgagttttattctctcctattggttatcttgttgataatttacgcacttatggttcttttaatattgccaatgtcattttgattgttgtagcagctagttattatctgtttttttattatttactttttctgattgaagagaa

SEQ ID NO: 78610 - DNA, 912 bp, Citrus sinensis
  Intron number 1 from transcript orange1.1g010516m (locus o range1.1g010447m.g) derived from phytozome v7.0 (chr-ID sc affold00106; pos 139051 to 139962 reverse strand)
acagaaacgcagcctctcgtcttcgagccctcaaggtcggtagtgacttctcgatcctctcaaagccctaatttttattcgtttcttctgttttctgtttctcaatctgcgtgagcttatcactatcatattacaataataaactactcggattgaattggatttgattcttgttgtttcattggtgattgaatctgtggttgcggtgaatctatagctggtagatctgttgatacttcttcgctggcgattttgtggttgctattataatcatcatgttatttgatttgtgcaaaaatgcaataggaactaggaagaataaagaaaaaggcgatgctaataattttgattcaatttattgatattctcgtttgaagttgcatttgatgctgaatttttaatgttgtcgaatgtggacattttataattatttacagcgaggacaactgtttcattttggtttatgggaatttatgctcaagtggttccattcattaagaaaccaaatgatggagccaaaatgcgaggatccagtgatccaattgcagttcatttaaatctttatgggataaagctatgcaaataatatttctgcaagcttgcattagtataggaactttgacatattttgtaaaagtattagaatttagctatttgtttctttgctgcaagttacgaaaataaataaataaatttggagatttaaaaaaaaaataaagaacagctaagaaaaggtttgcaagttagtggaatggttagtacttaatatgaagaagtaaaattttgactaaatagtgttttagcatttgttggtagattttctcattcacttgtgatctggccggtggtgcttgtttattttgtgtcattgcatatgggtaattatctgatttccattatgaaaacagggcc

SEQ ID NO: 78611 - DNA, 723 bp, Citrus sinensis
  Intron number 1 from transcript orange1.1g031292m (locus o range1.1g031292m.g) derived from phytozome v7.0 (chr-ID sc affold00162; pos 244875 to 245597 reverse strand)
cccaaggttaattgaacgtaagttgctttgccagcaaataataaacaaagtgcaccctttttgagttccaaatttaactagctgtgttagatttgtaatatttaaatgctgttcttttcctgttatttaagttgtgtttgagattgagttgttgtagctgctgtggaaaaaaaattatatttataaaataaaagttattaatatctaataaatgtaaattttaaataataatttttataaaattatcaaagttataataaatttttcactatacaagtgaaaaattatatgaacgtagtttttaagttacagcagttagtgtttactaaacattttactgctagtgtttactaaacattttactgctagtgtttactaaacattttactgctgtagcttttaagctacggctgcccaacgtcaatcctaaatacacccttaattagctggataataagttcatgtatattgtatcttagctgtttgaatactaagttgagtaacttgagtttggatttatatatatatatatataaaacaacctaggtcttgttggaacttttaagacggggggttatctaattatataattagttcatttcaattgaatctattttactgaatctaatccatttatatttttgttttaattccaatgttgttaagtacacatattctcccttttcagaattagaccaaggggaatctccataggaagttaga

SEQ ID NO: 78612 - DNA, 760 bp, Citrus sinensis
  Intron number 1 from transcript orange1.1g037366m (locus o range1.1g037366m.g) derived from phytozome v7.0 (chr-ID sc affold00005; pos 1710617 to 1711376 reverse strand)
tgacaacttcgctgcaagattcccaaacatttgttgtgggctttaatacaatgaaacacatcttcagcaataagagatttcgtttactttttaccaacttttgtctggcatttttatctcgtatagccggggtagctttttcggtaagctgttccttcttcattatttttatctttctttttaagttgatggattagaggagcttgagattcatggggcctaaaaacagatttgatgcctggtgattatgcatattttcacattttctattatattacgtttttagctgatggtttagaaggagtttgaagcacactggacaatgcattatgctacagtgatgacccctgaaatcttgcatattcatcttaattgcaagtcctctgccactttattttttctctctctcatctccaaaacattcattgatgctcatagtgcttctgctgattaaccttgcttccattgaaagttctttctgagtaagcaatgctacggggaatagtaaaagagttactttcttgctttaatcaaaacttctcaagcccaatttctggtggcacagcctccacacatccaccgacgaaggccacaagcctagaaccttctttgatccttctgaatcctctatgatgactgaattggatttaaaattctttaattaagagtttaagaagagagtgtacaggaatttaattattctgcaaagttaacttttgaatcctccctaatgactgaagtatcattatatttcaggttt

SEQ ID NO: 78613 - DNA, 554 bp, Citrus sinensis
  Intron number 1 from transcript orange1.1g005248m (locus o range1.1g004634m.g) derived from phytozome v7.0 (chr-ID sc affold00014; pos 1556752 to 1557305)
tcagagttagttctcacttctcagcattataaaaggtaattattaaagctcttttagttgatcgattttgtgggaacgagtgaattttcttttcttttttttgtttgaaagggcgatttgtttgtaattttgcttgaagttcgcgttgaattgcttgataattagtgaaggtactaccacttggacggtaatagagtcagtgagatgtgctgtttgtttgctgagttttttttttttaaattacagagaaaatagtttgaggtcatattttagctgaattttttattttttatttttataaaaaaacgatgattgtttctttgagaaactgcaagttaaaaaattatttctggaatgatttaaaaccaaagaaaaaaaaaattccctttcgtgaaggctttaggatgaattcagaggatcaaatagttgcaggatgcttggatgagttaaattttgtacccgatcttgaaatttgtattactgttatagtatataactgactgtattgaatttttgttgtggggcttggaaggtaggcgtagtattttgcaaag

SEQ ID NO: 78614 - DNA, 516 bp, Citrus sinensis
  Intron number 3 from transcript orange1.1g005248m (locus o range1.1g004634m.g) derived from phytozome v7.0 (chr-ID sc affold00014; pos 1558053 to 1558568)
ttgctggaacagtggaagaggttctttgaatttctttcaacttgagctctttatatatgtgcaattgtgttgaattcttattcacattgttatgcctctaggaccaagtatatgtacttttatcatattttaaccaatggaagagatgattagcatgtgacgcttgaattttaataatctaatcaagaatgagaagaatagtctaggtaagaagtgaactatgagtttctaaatgcagttattgttgcctcaacacagtgcttttaagtgcattatagcagatgcagcaactgaaatgctgctaagtgctaaacaaccgccgctactttttaaactgcatttatagacataaaaatgtattttcttttggttgatacttggttccaaaaaatcttgaatcttcttcatagagatgccaacagctttaaccttcttattgatggaactttgcgcatacggtgctggtattgattgtcaggtagtttatttagttaactgttatgtttttggcaggta

SEQ ID NO: 78615 - DNA, 675 bp, Citrus sinensis
  Intron number 3 from transcript orange1.1g008884m (locus o range1.1g008884m.g) derived from phytozome v7.0 (chr-ID sc affold00003; pos 1241251 to 1241925)
gccttgtgctgagcgtcgtcttggtggtatatcaggtagactcaggctctttaatgaataatgcgtgggtattttcttccctggtttttatagtcatatgtaatgtaggcagttttacggaatggtgtataatttcatcaagtaggataatcacttgaggacaaagtaaacatcatcctttcaagaaatatgccctttaatacagtttgaattcactagtacaaattatactatgtatttgtaaatagtagctgaaacatatttctgggattctttacagttaaacctgattttataatgaaaatattttggctgatcgtgtatattgagaggggtttagctatcagaattaccatccatcatgactcattttattggacttaatggactcattttagcaattttatgaaatattcattcacttatctttaaatgtgttcccaaatattccctgtattttatttgccaccacaaatacaaaatatagttctggaggcaactttgtgtttcatgacattttatgcgggtgtgtcatgcaattcatattatatcaactttttctgaaatatggttatatgtttctatttcatgttctagcttgtcttttgctgttaattttattaaaattttgagttgtaacctctatcaactgccttgcagaacttcctcctgaga

SEQ ID NO: 78616 - DNA, 778 bp, Citrus sinensis
  Intron number 1 from transcript orange1.1g030044m (locus o range1.1g026211m.g) derived from phytozome v7.0 (chr-ID sc affold00005; pos 2021040 to 2021817)
aaagaaaaaggttaggacacgtccatactgtgcttattacttttaggttgtttaaatttttgcataatatggacatgcctacatttcaatgtgttacacttctgcttaaagtttactgttctctttgtgttctgttggaaacttggaattcaaataatttatttgatagttaatagatagaactagagaatacatgaattcatttttctaatgatgagatttttaaaatgtggagttaaggacgtggtttcttaaattattggctactttaaataacttagcaacagaaagttcatggtttgcactcatgatagagaattgaaggggtccaggaataattctcggtagagtttaatttgatcatctttaatttgtcttatagtaaatttggaaggtgattctcctatgatttgtttgatttgatccaatctgggtatgaatatggatatttagtagtcaacattgatagcttatggctttgctatttccatcaaaatattcaattctagtgccgtttcttgtctttggtgtgataaggaaacaaattcttatgtttcggggcctgaaatagctcttaattatactgatgctttgattggtttgtaacgtaaatctggtgctgaagttatgcatggtttgcttttgctcgtcaacatagttagttgaatattaaggagggggttatatttttttcctctcattgtcgcctccctgaccttacatgtcaaagtatcttgatgcaggatatttgcaggatctagtgtacaagctgagcaaa

SEQ ID NO: 78617 - DNA, 322 bp, Citrus sinensis
  Intron number 1 from transcript orange1.1g014999m (locus o range1.1g008489m.g) derived from phytozome v7.0 (chr-ID sc affold00011; pos 333503 to 333824 reverse strand)
ggcttcagctttggggattcctcgcattcttcgaggttaaaaattattcttttttactcattattttggttactaagaaaattgtgacaattcaattttattttggactcatgtattaggatatttaggatttgcgtatttattttatcgaatttgcaatggacatgccacatttaagagatattgaagactgttagaatcagctaagcgagcttgattggttttatgtgttttgtaacaggtccttgtattttatgatctttttaatcttttgagttgtgttttttttttttttttttcaaatgtgaatgtctggcagata

SEQ ID NO: 78618 - DNA, 413 bp, Citrus sinensis
  Intron number 2 from transcript orange1.1g004942m (locus o range1.1g004760m.g) derived from phytozome v7.0 (chr-ID sc affold00892; pos 43890 to 44302 reverse strand)
gattggtgagtgtcattaggtaataattcattgatttccttaatttcatttgaatataattacaatagtcgagaagatgctgaagttctttatgaaattgcacaattcaattgccattagcatctctagaatattatttgtctctcagcaaggcaacacttgaaattattttcttataactaaaagtccgttcttgtgtttgttttcttgaaaacattgaatatcattctatgcgttgccttgctatcgctttttatcatttaacttcaatttttaaattgctacgtggttgagtgaagtatggtcttggatttgtttgaggcttcacactttcatctgtcatatgttattaactttgaatcatattcttgttttcagatcaatatataactcgttttcctgctggtggaagt

SEQ ID NO: 78619 - DNA, 793 bp, Citrus sinensis
  Intron number 1 from transcript orange1.1g004942m (locus o range1.1g004760m.g) derived from phytozome v7.0 (chr-ID sc affold00892; pos 45394 to 46186 reverse strand)
ctgagagctgaaagctgaagagatcagtcacgcaggtgagattagtaaattttatttttactctcttaagcttttaaaaataactttagttttgattacttttagaaaaatgcaactgtcgtttcgttctcttgattgagttgccgcgacaaaaatcagagtgagctacgcttgtttgcttttcttttctttttttaaatatttgtacttttttttatattttatagttttgatatacttattttgtttggttactgagaaaatgtaagtgattaaactggatttgtatatttccggctttgtttgatgatcgtgatttgacttggtatttgtgtttatttgttgtttagttagtgatcggttactatgagtaactgtttggttgataagaaagtgaaggaaaaatgaaagaaacaaagcattctgcttaagtgagcttgtatgttgggtatgtgtttgagatttgtagatgtgatgactaggagacatttttgggtggattttaatctttgtttggttattgagaaacggcaggaagattagtaaatggacaattgttggatagttttttgtgaatattatgaaattctcttatggttgctgagaaaatatagcgaattaacagtaacttgtttttggttattacatatgcttttaccttatttaggctctaaaccataagaaactgagtatacatattttttatttaaaaaatataaagaaattattattgatatttaaatttctgttttcttgattcatgtagcattgaagcctgaagagctgtagaaga

SEQ ID NO: 78620 - DNA, 617 bp, Citrus sinensis
  Intron number 1 from transcript orange1.1g039133m (locus o range1.1g039133m.g) derived from phytozome v7.0 (chr-ID sc affold00050; pos 701688 to 702304 reverse strand)
aggataaaggtgcatgcatgacagagtgggcaatctttgccgtgttctttacccggtgaaaaataaaccagagaaacagagatcctagtgtttagttgaaataattgtaattttacttatttctaagcaattatgttatattgtagaaatctgatcaaatcggcaatgcgttgtgtcacaattttattgcttgacgtcccacagtccgactaatgtaagtgcacatggcccgcacacaataacaagacgatgcccaatcacgacgaccccctatgtaaatgttgctgtacataaaaaagcatgtgatctcgatgctatgtatattctgtttttgttatttcttttgtttgcaaataaaattgtgtgattaaaagtcacttttgtataacaaggacaaactatggtactataacgatcaatttgaagaatattttgataattttatccaaaactattctttttcttttcgatttgaaaaagaaaaaaaaaaatgactgcgatacagaaggccatctccaccctcttgaaaatggagtaaaaatttgaaaggcttgaaatttcaattaaaaattaatgaggatatttctgtcatttaggaaaaacaacaaccggcttcc

SEQ ID NO: 78621 - DNA, 828 bp, Citrus sinensis
  Intron number 5 from transcript orange1.1g021199m (locus o range1.1g021155m.g) derived from phytozome v7.0 (chr-ID sc affold00145; pos 147942 to 148769 reverse strand)
ttgtatctcccggcaaagttgtcacctgattccaggtaactcttatcctgccaagtttcattttcttgtttgttgtaaaatctgtttattgttccattccaactttggggtgagtgtcctgttaatgactatcttaatgttacaaaaaagattttgttgaaatcaaatgtggttttgctctgtattatgtcttagatttagtatattttttcttgtattgtttgtatgtagttgtttgtatatctgtgcgttttgagcagaagcatttgttttgtattaaacttttcacatatttctgctaaggtagttattactttaatgtggatgttgttagtgtttccatcaagaattagcagttcgtgccttcgagaattcaggttttgtgatacatcatcaattgagagggatttagaaacattttccatgtccaatatgtatttattacttgtcctctcctctaggttaacagtctgttcgaatttctcatgacagctcctcttagtcatgtccagtagacttctatggtgaaaatttcatgtgcaacttttccttatccgagaatattaactaatggcaattgtaataaacagataattttattttgcagtttcctgttaattgcctcccatatctattcattttctcctattattttggttattgataacttttacttgagtggataatcccatgcactcatattatgatgaaaaaagacctaaacatccgatatttttcttcatgcatactacattctcattaagaccataactttatgcggtacaatttgcagggagggtgatcttccgctcattgtggctattgatt

SEQ ID NO: 78622 - DNA, 937 bp, Citrus sinensis
  Intron number 4 from transcript orange1.1g030798m (locus o range1.1g027698m.g) derived from phytozome v7.0 (chr-ID sc affold00014; pos 671228 to 672164)
ttttcttcctagtaactgcttgtgaaattgttcaggttattgacaatatcacctgatacttagatttaaatcgagttgcatttaactttcattaaattccaacaggtacaggatcatccatcacttttcataacttttcttgcttggtgtctaattgaggtgagttctgttatcttatgtgcctagtgcctacttaaaaattcagtaattgtttgcaaattgtatgggctgtttgctaaaagtaagaaactttgacttgtaattaacgttgtctgattcctggatgagcttatttattgacatcattatgaagagaatggcataatacatcagttcacattgcatttaaaaacaattaaattgatataacttaatgtttctgatcagattgtcagtattaaagcttttttattgggaaaaattgtacccttttaatgttacctgagattaggtgtaaatcttcttacacattttctttcaggcattcatttagtcagattttctttccagcactcatttagtttctttgattgtaactttcttactttcagccgtttcttcatgtgtatgtgtatgtgttttttctgtaagtgctttggatgcactctctttccattgaacacaatagaagttttttgtatctgttctgtggtctttcctttttacgtaacattttagtagttagtagatattttttgttttaatatcgagtttggcttcatgatcttaatggattgagattcaatgactatcttcttgatgcaggtaattaggtatccgttttatgctctaaacaccattggagcttgtccacattggctaacctacctcaggtattaatttacattttattttccgcatatatcatatgcacacaacaaaagttataattgcataacagtttaatataactctttcgcatatttgtaggtacact

SEQ ID NO: 78623 - DNA, 884 bp, Citrus sinensis
  Intron number 1 from transcript orange1.1g002169m (locus o range1.1g001395m.g) derived from phytozome v7.0 (chr-ID sc affold00138; pos 247748 to 248631)
attatttcctcatctgtgaagagtactttgtcaaggtatgtatttatgaattttgcattgattgcagtaaattggatgagaattcttttgattacttttcactatttattctgggcaaactattttggaatactaataattatctactaatttagaatgtattatattggcatattcaggattagtatattaagtatcataagaaatttttgggtgactgattaataattggtgttatgatgttcgaatattcaggattagtttactaattatcataagaaatatttggatgacttggtattggagttatgattttctgtttggattgtttttcaaatctcaatatagatatcaagtacttagcaattgtaaataaatgtgcttagaatttggtgtcatatagagtttatctcatgaagtttcttcatggttttccagatctttatatttaatgaattcaatgtgtatgttatatacgggctggtacaatgtgcttgtattatgtctaagaattttctgtcaggagtttggtcattgtgcagatcttaaccaagatcttcaaataattcatgaacttaatttagggtaactttatggatttcattcaattttttaaatagttcaacatccttcagtgaggataagaattaacatatggccctcaagatggaaatgagtgactctttatgtgatgtaagtttttgcagtaactagtcaatacttcttgccatcgactaattaaaatacattccacaaaggctatacagtttctcttaaaaggaaaaagttaattacatatggttttatgtattaaacattaaatgttgattactgatgtacctatgttagtcttggtttacgacctacgaagggagtgcttcttc

SEQ ID NO: 78624 - DNA, 581 bp, Citrus sinensis
  Intron number 2 from transcript orange1.1g007363m (locus o range1.1g006769m.g) derived from phytozome v7.0 (chr-ID sc affold00005; pos 315979 to 316559 reverse strand)
atcacaagaaaatcgcattacggtgtgtcacttttgaactaagttactaagatcttctcctttccttaaataaccggtaatttaacaaatattaatatttatatatttttagttgataataattagaaaaagaaaagagaaaataaccaaagattaagttttaaccgtacataagcaacgatatacacgttgccataaatcaattactagaaatacataagatgaggatggaattctttatccatgtcttttacataaccgtttgcttagctttaatgtggcctatttcttcacgttacgcaagcaatagttcaaagttttcaactccccacaaatctaaacatcaaaaacaattatatttttgagtgatagcatctggacacttgatttctttttttctgacattttcttcatatattttttttctcagaaaagaatgtccatttgtaccaaatagatgttcaccaaatgagaaatgatcgagttggcttatgatagtagaattttcactgaagccttaaagggcatgggcattttcagttatttttaaccctctgtttctccctccactttactcagat

SEQ ID NO: 78625 - DNA, 585 bp, Citrus sinensis
  Intron number 1 from transcript orange1.1g007363m (locus o range1.1g006769m.g) derived from phytozome v7.0 (chr-ID sc affold00005; pos 316719 to 317303 reverse strand)
ttattgctccctacgattatagataccggtaagttccgtgctctacttctatctttcattttccattttgtttcatgctcagatgagtacaaaggctaattttccttcaacgattctctatgaagtgttaattctttattgggttcttctgcatatattaaggagaaaatataggtgacactatgtcttacttatactacccgacatttatgtggtaacaaatggcttggatgagctaggattttggttttatgggagacacgatgaagaaatgacaaactcgtgcatggaagcatagcataagatagtgcacttcagggagctaaacttccttaaattcctaatcttatgcatgcaagtacccttgcaaaatttcagagtttgccacatttcacaatcgagtttcaattctttaaatcaaacccatctccaactttaatatatgaataggattcgaagctcaagactcggagcttttaagaagattacgacgtgtttgataaagtttataattatagtttgatataaaattgtattgtgtaatgtgtaggtggtggcagacttttcttgtggttctggtggtat

SEQ ID NO: 78626 - DNA, 887 bp, Citrus sinensis
  Intron number 4 from transcript orange1.1g008167m (locus o range1.1g008167m.g) derived from phytozome v7.0 (chr-ID sc affold00017; pos 1599235 to 1600121)
agctctttccagtggaaattttgaagttggagttcgtatcctctggatttcttactagcaatcatattataaatatggatatgaaagtcactgcaatttaaatttgacatatgcaatctatttctttttagagcatctcaatggtgttatcatggaatttatgattttttgttaggaaactgaaacttttatcgaattagtaccatagaatttatgttgtcagtatctctctgtaattcttctttttcttcttttggtaacccagactcccgcatccacccagaccatgcatccatcccggccaggccctaaactaggggtttagtcgagcactccaaccccatgacccatgagacaacaaagggtggaattttaagctcaccagaagaattgaacttgagaccttgatacagccaagtaccagatcccaggccctcagcgaactgggctgcctctttggggtcatcaatgtatctctttgttgtcgtcctctagtcccaccaaccatctttttttccacaagattgtgattgtagctgaatgcatccatttgatatccctgtccatctggaaaccctccttattgccttttgcagtggcctgtttttattttctcaaacttttagggcctgcaacaacataccatgaaaaagggttttgagtttcaatatttcctttattttattctggtagaccaacatgatttctacctacattatttttatcatccattcaatagcttaatgattcttgtaatttgtaacacgcacaccttgtattaaaaacctgttagctctggcatatatgttttttatcattattcttgttgtaagcgataggcatgaagcttcagtattcttctttaatgtttcaattagatattgctg

SEQ ID NO: 78627 - DNA, 516 bp, Citrus sinensis; identical to SEQ ID NO: 78411
  Intron number 1 from transcript orange1.1g009830m (locus o range1.1g009834m.g) derived from phytozome v7.0 (chr-ID sc affold00003; pos 3895134 to 3895649)

SEQ ID NO: 78628 - DNA, 693 bp, Citrus sinensis
  Intron number 5 from transcript orange1.1g020796m (locus o range1.1g020796m.g) derived from phytozome v7.0 (chr-ID sc affold00048; pos 582870 to 583562 reverse strand)
ttgctgttttataaaataggccaagaggttcaaaagtaaacttccaactccatgcttctgaataatcattgtagtcgagccaaatgtgatctttaatagttttcctgtttggtttttgaaaatattcctcccataagattaccagaccattcatgacttgttactaatgtaaattttttaataaaactatctccagcaatttctctaatgatattggtgattttgctattaaatgttttaggttaacttgcattaaatatccaatattcatattttacaatataatgacaacatgtggatttgcaacgacttcattttgtgagtatacagccttgaaattatgaagaagccaccaactcattgttctttgaaatcaatgatttttctgctggcactcctaggttctcctgcaattacagtaataaactctgtatctgtgatcatttgccctgtgttttggaaatgaattgatttttgtacttgttttttcctgccagtgtttgaagagatggaattctatatgtggaaaacaaatgaagttttggacttctgcttcttttgttctgaaatagaataacatattgttatattatactttccttcatgttcaacaatgtggaaatgtgaaaccttgttatctttactaactcatcttcctggcctatgctcaccattggcccaatcaaaacttag

SEQ ID NO: 78629 - DNA, 850 bp, Citrus sinensis
  Intron number 1 from transcript orange1.1g013842m (locus o range1.1g008330m.g) derived from phytozome v7.0 (chr-ID sc affold00003; pos 1154347 to 1155196 reverse strand)
ccatcgtcgaccttcctctcattaaagccttccaggtaaccccatctaccatacctactgatgatcagctgataaatacattagcaagcgaaaaatcataagtattttactttgatcactttcccctttgtgacacgtctgacatcaaaactttaacaaaataaaaagtagctgatttgtataggctatgacttggaacgactttattttcccataattctaggaaactaaagggtataatggtaaattaatgttatataaggacgtggcaatctcccgtttttcttttctcttgacgtatagagaaggggcccacaaagcatggtagccagtaaaaacgaaacatttctattttctacgggtttggttggtcaacgttgaatttagcctcttaaagttaccaataaaatgtctacacattaaacaaatttatttcggaaagaaagatctcttttatacttggaaactatcgtttgaatagttcatacttgagagacggataaaagtagccaaaagccgtttgtgacgaaagcaatgatgagtatgatgaattgatggtgacaaggataatgttttattctcctttttatttatcaagttagcatcggcttggctgcttccatgctaacgtgtactctgagaatatcaagtatcaacaactccaactatatggattaattgccagacatgtgtatactgtgtgttaacgttgccataacaaaacactttattggcgtaattaatattcggatgtagtaataaccttatcttaataataataataataataataatttgttttaggaattaatctaatttcaggcagtggtggcaagccttgggaacaaca

SEQ ID NO: 78630 - DNA, 1050 bp, Citrus sinensis
  Intron number 3 from transcript orange1.1g028409m (locus o range1.1g028409m.g) derived from phytozome v7.0 (chr-ID sc affold00005; pos 1757642 to 1758691)
ttaaacgtcttcctggtggaaaaataaagaagaaagtaagactagttttttttattagtaaatctcttgttttcagcggatatccttgaagagcttgctcattaccagtatttaaagtttcaaatgaatgtctaactctaaacatgattgtttaaagttttgatggatttatagatgtaaaatgctgtttaagacttgaaatatcattcttgttttcttatttctacaatctcactggtaggggatcagcgttgtatgaatcatcaaatgtcattgtttggtactgctggttagtctctattttatgggattggaataccatgtctcatcttaagccaactattcaagcttacaaagatctagccttaatgttactacccgtgaaagttggattcatttttgaagtttctgacgggaacttcacttattgaatgatttaagaggtggaatctgttttcttttttcacactacgagcttttttcctatcctgccctcatgctacgcaaaggaaactattaagcgaaaaagatgttaatcctgcacgcaggtgcgaatcactaatgttgaatcgagtatagctttgcttttagtatgtttgctacttgcaatgtaaatgacgtttgcctgcagcttagatgcgcaaccaatcactcacaccttcaacttaattgaaagcttctagactcatcagtgggaatcgctttgttgaaagtgtgaatttgtgatcaaacttatacaaaggcccacatatgattgctagatctcattgaggttgtgaagtgagttggaccagagttaggatttttattttatttttaatgacaatatggacgtgagcgtgaagaagttaataagaggccacatgtttggtcacattggagtagtcttgttgccattcttgatacagattatttcctgtagaccttttatctttgtaattggttttcaatgttctgttgcatagctcaaatcttctgatgtgatgacaattcaaaattttttattcactaataggaaagacaagaagttgttattgaaaaagttgtacg

SEQ ID NO: 78631 - DNA, 806 bp, Citrus sinensis
  Intron number 1 from transcript orange1.1g025534m (locus o range1.1g019699m.g) derived from phytozome v7.0 (chr-ID sc affold00011; pos 753188 to 753993)
gagttttgcacttaacaggtatacatgcaaattgaatcagatcaagaatattttccccatatatatgttgcttctttcattaaaaataaaataaaataagggtatatctctgcattaatgcattgctttttgctacaacgtccctgactcttttttgaaaactaataaattctcattacaatatctttttacttttttttggttattctctaaatgagaatgagagcgttgaatcggattgtcttgtgctgtagtggttctctaaaaataatcaaacgaaaatttagttcaggaaatggaagttgatttatattctcatttttacagtttctttttctttcggcttgtttatcattttattattttgtaataaacttatctttaattaatttatgacaagatacatggactaaatctattacaaaatcttgttgctgaagaaaaaagaagcaaaacttttttagcgggtgagacaaaaacgaagtactagggccgtctaggcttctagctgtcctttttttttttttcttgggaattttagattttcggcttgttttaatttataatattgactgaaagatatacttaattgaaaagaagaaaacattcttcaaaagaataatcaatgtgtggagaaatattgagtacttgaccagaaaaagccagacaagatacaggagaaaaatatattttaattagtattttaattacttagttaaacacctttcttatctcatgtatagtactaatcataatgtttttttgtcgcagcatattgcacacaggagagacacgttaccaggaca

SEQ ID NO: 78632 - DNA, 844 bp, Citrus sinensis
  Intron number 2 from transcript orange1.1g024807m (locus o range1.1g024807m.g) derived from phytozome v7.0 (chr-ID sc affold00331; pos 135214 to 136057 reverse strand)
gccagcaacaaattgcaggttttgaaaaggcatatgtaagtgtctacctcggttgatatctataattcctttatttattattattattggttaaaatttaaggcattttgtgttaactttggaaattggatgttagtgtttgtgacatgcatgaatggataaatttgatgagtgaaattaatttagccatttgaggaatttgcatgtcataaatatctgagtgagttttgagctttatatttgcatgtcataatttgctctatagtttactaatttgcatgttaattatccaagtgaaatgcatgccattgcatgcgctaaatgcaatcacgaacctgcaaaagtggtgtaattaggaatttattttgtttttagtttagttttgctcgaagactaacaaaatctagttttgagggtactgatggtgtaatatgttttaatcttttccctctaatcctatatttgttgcatcctttgtttatattttcagttaattaaattacttatcaattgaagcttacggagtacacatgcacaaatggatgaatttaggaagataaacaaaaactaattcaattggggatcacagcttggggcttggggctacatgtgaaaggaaaaagcttcaattggtttcccataaattaattaactgaaaatatgaatacaagtaaccaacaatgtaagattggacgacaaataaataattaaaattcccctatcagtggacatgcaatgtggtttatttcgatttatgttgaagaggaacatagaatttatttgtaactctttgatatttttcttggcagagggagcagaggcaaaggcttgacaaggcaaagaa

SEQ ID NO: 78633 - DNA, 603 bp, Citrus sinensis
  Intron number 1 from transcript orange1.1g009973m (locus o range1.1g009973m.g) derived from phytozome v7.0 (chr-ID sc affold00261; pos 225903 to 226505)
tttatcgtacaagtattagctcctcgctaactcatgtaagtgttcttctatagttttattttagggtttattacatgtgggtccggtaattattgtgtgtagttttaaattgaatatctttttaagtgatttgggtgtttttatgtttgacccattaatgggttcttgctattttgtgattttttaaattattttatagtcataatgtctttgtagttttagggtttatatgcttatgtgctggtttattgtgttactatttcaaaccctaaggtactccagctcaaacatgttaattccaggttagtgcggtgctctgttgttttcctttctgttaattttttttgggattattactttttgaattgtttgtagattctatttttctgcgatgctatgcgtagtttattttcttaagttagtgaaggttaggagaagtgaatattgtccagttggaatcctgagttctgtttgttgggcatatgtattgttgcttccggtgactaagaatatttgatggccggagttcaaatatactaattgttaatgcattttctttttgaaataatttttgaatctatgttttgttacagtggggaaatt

SEQ ID NO: 78634 - DNA, 883 bp, Citrus sinensis
  Intron number 2 from transcript orange1.1g006960m (locus o range1.1g006962m.g) derived from phytozome v7.0 (chr-ID sc affold00014; pos 1227373 to 1228255 reverse strand)
cttttttttccaaaaggaaagcgaatctcaaagtgattgtacacactgcacccttttgttagttttttaagctgcattgcttcttctgcttcttctttctcttgcttgctttagatctctattctctagtttgatgggtatgttacttttggatgtaactcattctcttttttttttttaattctctcatgctgcaactttccgagaacatgttttcttaggaaacaaacacactaattgctggcgttttcaagctttacacagacaaaatagaaaaggtttgagtggtttcctgaaaacttgttgtgttgtgttcttcaaatttaattgaccgtcattatagtgtcacagttttattatccttatttcacggcaactatggaggagcaaacttcacttcctaaattaccacaacgccctttcacgggactgaatttacaacaaatagacactaaaacaatgttttatcccttgtctttagtaggggtatttgtgtcgctttatcattgttgtccttgtacctgtaggtcccctggaccgcaataatggggtcatgagcgtggtagatttgtgatagcattcaattgttagagatgattgcttttaatctcttgttgacaaaaattgatttttgctcacctgacgatctcttttacttgtttattcatttgcattttttattcttgggttggtatgtgtgatgcgaatgatgagtgtgtatcttgtgcctttatcgcttcatgcatattatgataagcggtagttgtcctccatatgcttatttaattttttcatggatgcattggattctcttgtctaaacttgtgatattttctgatctcttacaggcttagtgggacagggagcattgaagtggtgaaac

SEQ ID NO: 78635 - DNA, 1030 bp, Citrus sinensis
  Intron number 1 from transcript orange1.1g004765m (locus o range1.1g003230m.g) derived from phytozome v7.0 (chr-ID sc affold00056; pos 364049 to 365078 reverse strand)
tctctccttcttgttgaagaaggactcattttcacgtacttattctcatatttatttactactgattgaagcttttgctttcatttttcttttctggttgcttaatgagttcattttcactctgtttttttccccctctttgcctgacaacatgaatctggtgatattgagtatgtatgaaacagtgtttgctatgagtgtaatgaactgcgaaagcaggatatgcacagtgcgagtaacggtttggtaatttggtttaccagctgaacttgattatgctgttaagtgtcattagctaatcgtattataactatcaaattgcttttagctgaataagtaaatatgattgcttaattttctgaacgaaagcaagattaatatgtttgtaacttcgtgaaacttgacgtgattcgttctaaaaatagcgagaacaaagagcaaagttcatttcgaagttaatgtagaaattgtatgcttcatcaagaatttgagctcttttttctcaaaattgtggcgacaatgtgaagatacctttatcgattttggaattgattagtagagtaagtttggaggaatttttggttgcttagtgcttgaagtgcaacaggtttaggaaattgagttgttgttggatcagcggtaaattataattggttgttgttatgcagttggtttgaagtgtttcatagacagctgtagaattgtaatccattggatgattttaagacatcaatgtcatcagagattcctatctattgttttcttagattctaatgtaatatggttattgcatttgcctcctcttttgtggttagaagagtaatgtgatggtaagtgatcatgattgtcctttgtgggaggcacaatgctttataattctttttacttttttttttggtgatatgggggcattcctatttctttttgtaatagttgtgtacttatcttagttgtcttgttatatgtgttaagctaatttgatgctcgtttgtagggaagatctttgctggaaagtcttcaaaagagtttg

SEQ ID NO: 78636 - DNA, 286 bp, Citrus sinensis
  Intron number 2 from transcript orange1.1g038437m (locus o range1.1g038437m.g) derived from phytozome v7.0 (chr-ID sc affold00327; pos 11029 to 11314)
atcctccttcgaataagcagcttccattgaggttagtttggaactatcatattcttttagatcttgaacccataatcactgtccatattatttcttcgggatgtaagattcatatgtataacctttttgattccctttgtttttttggatttgtcaagcttatgacctagatttatttgtattttcaatactgtgtcaggctatcctctttaacccttttaacatcaattttcaatataatttttcaaacttggcagaagtgaacacatcagttcatcaattgaaa

SEQ ID NO: 78637 - DNA, 896 bp, Citrus sinensis
  Intron number 2 from transcript orange1.1g023460m (locus o range1.1g021287m.g) derived from phytozome v7.0 (chr-ID sc affold00023; pos 1206902 to 1207797)
gacacattatcggtatcaacaaatctttgaaagtaaatcaaatgcaaacaactatggtgtctttatggccgttgttgacatttatatatttatggtttgtggttgacttgctatatattaaaagttaccttggtgttcatggtccttgagtccaagcacgtgactgtacttaatttaatttacttaagtttttgttgcgtgaatagtgtttgatactcctttttcccttatgatttgtaaataattacacacttgtggcctatgaataatgaaaaatgggactgtgttaaaaactgttcagggtttatgtgatggtaaaagggaacataatcaaaccagtttattgccatttggtacagttcatatgctactaggtgtatctcaattagaacttagtttgtcagtttgggttttatgatcaagatggataaaaaaaatgtttgcttcccttcattcttttctattaatatcaaaatgcagttagcataagttggaattaattagctggtggccacttgtttagatcctccgtagctggttttggattttacacttggctgactaaggttactccattaccatttgagctattggaagtggaagatgcattatacttagattttcctggatgtcacattccttttgaaaatattgtgtgttacgaagactgaggaaatacttagcgatacatgtttgtaaaatgtgattttcttctaaaagcatataatgttgggattctcctggaatgcaatttttaagattgcttctggtctttcaattgttatcttgactagtttagttgtatatgtacgtggtgtctgttgatttggcttctctatcgtaactgatggattctttgaatttacttatacattttatttcttttctttctccag

SEQ ID NO: 78638 - DNA, 388 bp, Citrus sinensis
  Intron number 1 from transcript orange1.1g012571m (locus o range1.1g012595m.g) derived from phytozome v7.0 (chr-ID sc affold00003; pos 31186 to 31573 reverse strand)
tttgttcttcactgattcaacgactctttgaattggtgcgcattcaaaatccctaattttgttttcattttttttttcttttcatctctttttgtgctcttgatctgatttcttttttgagatctgggtttcctttagttgattatagaaatgggaacttttggattctggtcttttgggtagttgaagttgtgtaaagcaaatgatagtttttcgtttttttttttttttgggtaacagtcatgccagccgttactgaatctaaattaattgtgtggtattgattcggtggatctttgacttttctttttgcaggttgatctgattggttggttgattacttgctgttgcagggtggtgtttctgcaattggcattactcagtagtg

SEQ ID NO: 78639 - DNA, 581 bp, Citrus sinensis
  Intron number 2 from transcript orange1.1g041441m (locus o range1.1g041441m.g) derived from phytozome v7.0 (chr-ID sc affold00220; pos 220364 to 220944 reverse strand)
ctgcagctcaaattggccaggctttcagaaacgaggtcttttaatctttcctttatgattacattatatgtgtatattcttttgttttcagttgcacgattttttgtctttgttgaactggttgtattaaacggaattaacagtgtttattaatagattaaagtctcaccttttctttcccccctgctatcaagttgtagcttagactgttaccgcctatttttctttgttattgagattcttttacgaagatatgcatatctctgtgtatgtgggtgtatttggcagtgagaatgtgagatatagtgcgtaagtttagtaaaagaatttttgtctttgttgaagtggttgtattaaatggaattgacagtgtttaatagactaaaattgcatgtttttccctgctatcgagctgtagtttagactgatttctgtttgtttttgagattcttttacaaacacgcgcatgtctttgtgtacgtgggtgtacttggcagtgaatgtgagagagtgtgtaagtttagtaaaatatttttacatgtgcagatatcacctcgccaaggcttttcgagagtccgtga

SEQ ID NO: 78640 - DNA, 641 bp, Citrus sinensis
  Intron number 5 from transcript orange1.1g028191m (locus o range1.1g025056m.g) derived from phytozome v7.0 (chr-ID sc affold00074; pos 91921 to 92561 reverse strand)
aggtagtctttttctttacagtactctgtttatacatttgctaaattgaagtatatatacaagttctaagtgaactactgtcgaagataccaaaacctcactatgcacattgacaatgaaacatcactactgtatggtgtgctactggtccatagtttaagctacttacatatatatatggaacttgcttttccacttatttcatgcatggtaatgattgtgttgataatttaaatctgtttgtggagaatgtgatgttccttttatattggctgctggtatggggtggaactcttatcaaaatcaaagggaaatttctgatcaacagaggggaaaaaggaaaaaaatattatatcttgcacctcctgattccaaatgaatgagagttgatccatctataaggtagaaaaattgtgtgaaatatttagtgatgggtgttgtccattcttcacatttgcttttgtgactttttagttgtctctctattattgcacctttcttattattatttttttcctttctgccaaagttcgtgtttatggaggagactaggctgtttcataccttctgttcttctcctcttcttctacttcttgttgctttttattaatatttttcaccataataggtaattgttccac

SEQ ID NO: 78641 - DNA, 728 bp, Citrus sinensis
  Intron number 1 from transcript orange1.1g028191m (locus o range1.1g025056m.g) derived from phytozome v7.0 (chr-ID sc affold00074; pos 94313 to 95040 reverse strand)
actggtaatgctacttccattgttcaattttaaaattttattgagaatattcaatattgaatctatacgcatatggttacgtctaataaggcacttttgaatttctttttctttttttccttttaatgcaactcaattgcgtgatgcctcaatttattcgtaatcaaagttctcttcttgagttaattttcgggcattccagctctagttcgaatgtatttatttattttaaaacatattgattaccctgagcacttttagtgatgaaactttgatgcttatagcgataattaattagaagtatcagcaagatttaatttttatgattaattttataattcggttctcttaaagctttcatcagcttgtcccagtttttctttttctttttcctgctcgagtctattattattagcgctaatggtgctttggtgctagcatgtagagactaatatttgatttttcatatttgtgtgtatgagagtgtagaaagatctttctttggaaaaaatgaatgaagttaattttcatgtaaaacagtttggagttgtactcaatgttgcaagatattgtctgtaagtggttcaaagtaagaccattatcaattagaagttgatggcatagtcgtattatatgtttagacattgaacatttttgtaagatttcttatctttgtttatatgttctttctgttagtttcctttgtcttaaactatgttttacagacc

SEQ ID NO: 78642 - DNA, 774 bp, Citrus sinensis
  Intron number 1 from transcript orange1.1g032751m (locus o range1.1g032751m.g) derived from phytozome v7.0 (chr-ID sc affold00003; pos 3593746 to 3594519 reverse strand)
gtttactgtggcaattccggcgttacccaagtcaggtattggttacatttccagggtttttgtttttgtctcgtatcttgcgtgaccttgctgattataataagtgagcagtaattgaaatatttttcaatgaattgaattagttgttgccgtcgcgttgaatacagttcttaaatggcgaaaaggagaccatttttgtcattccatagtttgaagctatatgaaaaatattaaaatacataatcaagaagaagcaaaatctgtgaaaaccctgaagcctgattatttttgggtggtaaaatggaagaaagcttaagtctaattaacattaccgttagaatttgtgttaatttggaagtttttcaacttgtttggtcgcccctttcccatgcttatagagctgcacgaactctgaatctgtaattggcttactgatgctctgattaacagaaagcaaaagggagctcaaactcaatgtttttgtttttgttgattaattattgctaacaagctacattccttcaattcaatcatttacatatttttcttgaagttctgtttccttaaacacagatttgagtaattagaaatttagaagaattgccattcatctatgaattctacacttttttctatgcattacacttaatttcttgtttcaaattattagtcagttactcagttattttactctttttttctcccccttattgggtctttatttcaatgcgaaacccagatcaaagccaagttcggcagctgttgttggttgta

SEQ ID NO: 78643 - DNA, 671 bp, Citrus sinensis
  Intron number 2 from transcript orange1.1g031717m (locus o range1.1g031717m.g) derived from phytozome v7.0 (chr-ID sc affold00011; pos 927311 to 927981)
ttgcctggttctatttaacgtactggacctaagtggtgagttcatacaactctaaataggttacttttgtggttaatttgagggaaaaagatagcgagaacaaagttttgaattcttcaatgtgattttgttttatagaagtattttaatatgtttaaagcatcagcatttttatctaactgagaagatatttgtaaattttcctttgtacgaccatgcttcttgaagttcgttttcttttgttgctacattttgctgcaaagcatatgcaggatcgtctgcagtaagttctccaatattttgcatgcaaatttgcagttgtgctgttcaattctatggggatttgttcatatcagtaaattgtgtatttcagtggcattcttgaatgcttttcataaattaggttgaaatagatattataatgagctccatgtgtgctaattttttaatttttttttccttgaatgggcgagcagttatgtgaattgaattattttcatattacatggtggattgtctcatcaaaaactcattaaactcattttggcagctattaccacatttattgatttttggaacagtgaagtatgaacttcatctatttctatgttgttgtgagaatgaagtgacattttctttttgtatggtagggagcatcagggcctgtaaga

SEQ ID NO: 78644 - DNA, 596 bp, Citrus sinensis
  Intron number 1 from transcript orange1.1g045899m (locus o range1.1g045899m.g) derived from phytozome v7.0 (chr-ID sc affold00199; pos 229179 to 229774)
atgttttccgaatactttaaatatccataatttgtctgtgctgattttaattggcataacatatgtgaaaattatgaaatggttataaaaggataaaaataatttgaacaatcacatgcaaagaaaatgacaatagagtacaataagaaattcattggccaacttttacgttctcttctaagtcgacttggagcgttgtcattcctaggcatcaaagctgttttgttcagatcaatcacagatttttcattaacatcagctaaatctcttgtttttatcggtttgtctgtatctctaccacctcctttaaattttatcttagctcggcatctgcctaaatgatttcaaaaatcagttagagagatgccgagctaattataagagaaaagaagctgctgctgctggggttgatgataaatcaatcaaaactagagatttagcccctgcttcgactatcactcaatatttaaagtatttaagtaagagtgtgtgctttgatgcggaaggaaatatcttccaagaaaactctgtgactgacattgacacgccgagtcccctctccgattcagcgagcaagtggcggcgaactgactcag

SEQ ID NO: 78645 - DNA, 483 bp, Citrus sinensis
  Intron number 1 from transcript orange1.1g044002m (locus o range1.1g044002m.g) derived from phytozome v7.0 (chr-ID sc affold00003; pos 2475959 to 2476441)
ggacactatctctgcatttgaaagagtttttgttggtaattcatagatcccatcacctgctgtggttagcttttcttctaataaaaatgtttagctgttacttctgctcttctgtatttatagttaatctcttatgggactctgcagtgatgcactgatgcttgtcggtcattcatatagttattggatggaatgtgagcttgcagaccataatttttgattcctcataatattttgtcatgccacaccagagcattggtttcacttaaatttattgacattaaacatgaattagtaaggaattagggacagtaaagaatcaataattcagatataaacataagtactgtagataagtgatcattttcataataaaaaattccaaaatatgccattgccatactacttttatgaattattgatgtgggatttgctctatttcctatagaaaagatccgtctcctggaaagtaagctgaagaat

SEQ ID NO: 78646 - DNA, 631 bp, Citrus sinensis
  Intron number 1 from transcript orange1.1g023386m (locus o range1.1g023386m.g) derived from phytozome v7.0 (chr-ID sc affold02484; pos 3237 to 3867)
ttcttcacttttgttggtctcgggttcaactgaaggttccaagattctgtgtacgggcttctttggatactaacgtttctgatatgagtgttaatggtaaatttctcttctttttgttttatttgatttgtttgtttaccaagtattgatcttttggcttttctggtttctgtgtattttgatttatgttgcttggtgggatttttatgtgattattgctgggagctctttttgttctgtagtgtttgctagttatgaatttttgaggctattgatggagaatttggcattttacttgaataatttttaattgaatttctggcagaatggttcatggattgtacttatagatcaagataacgtttaaaatctgactttggagtgttattgagtggcttgcgtactctctagtggaaattttcttaaaggaactcaagaacagaccaagtattttgtattcttgaaatttattgggaaatgaaatgcttatgcaattgtgctttgtatttttttcgggagacagttgatgcttagtactttcaaacatgtatgtttttccaatatcgctgtggataattgaatggtatacttggcagatcccaagtgtttgtttccaccagaaccggaacat

SEQ ID NO: 78647 - DNA, 333 bp, Citrus sinensis
  Intron number 2 from transcript orange1.1g023386m (locus o range1.1g023386m.g) derived from phytozome v7.0 (chr-ID sc affold02484; pos 3956 to 4288)
aggttttgctcatttagatttcaatctttcaatgtttcattggcctctcaagtattttcttttcccctaaaatgtctcacttttaccaatcatcctcttgcctaaactgaaaatttgaagtaactcaattttttcgaagtaaatagcagaagcttttatcagcagttcagaaaaatgaatagcagttatcattttctttagagcaggcattatttcaattcacaaagtttatttcattttgaattagtttgtgttttactgattttattgatggtgaaagcaattagaagattttttcttccccctcccccccgatctgccaggtggatatat

SEQ ID NO: 78648 - DNA, 680 bp, Citrus sinensis
  Intron number 1 from transcript orange1.1g008086m (locus o range1.1g008086m.g) derived from phytozome v7.0 (chr-ID sc affold00011; pos 1968206 to 1968885 reverse strand)
attcgggtcctttatcttctgccagacccaaatcggtaattttcttcttcttttctttactttttatttaaattaaaaaaaattaattctagcaatactttgcagagcttgatgtgtgtatatatatatatatatatctgagaaaagtatatcaaatttcattttgtcctatgaatttaattttgtttgattttggtgcttgcttgtgtttttaatagaaaattttcagatgtgtctcctgtatggcgaatatatgttttatgtataagtgggtacagtaacccaaatttattaacctctaattcggtttagcttaatcttgaggtaactccaggttccatgctttataaatcatattattttagctagtattggattgggttacgttgatctttaaccaaaatcgtcagtaaacatgtctaaaagtaaaattaattattatgaataagacataaaacagaaattacaattacagttgtgatgacctcagactctgaactcataaaaaactgattatcgcttgttggaagttatcaaacaataggggaacgaatcaacgaaaggattgcaatatataaaacgagtaatttattcgtcaaattctgttaaacccttaggacactctttcatagattctgtttgatcgattttaacagtagttcttgtgtcgttgcagcttg

SEQ ID NO: 78649 - DNA, 678 bp, Citrus sinensis
  Intron number 2 from transcript orange1.1g019303m (locus o range1.1g019303m.g) derived from phytozome v7.0 (chr-ID sc affold00220; pos 52162 to 52839 reverse strand)
atcgcattgatacacgagttcccattgaagtcacggtttgccccccttttttatatatgtctcagtcttgattcattatgagattttttttttcctttcccctcttccattgcttaattctttcatttttttcacttgcttgtcatttacattttttggcaatgtgctgaaccctgttatttacatcatctgatttattgtttggtaaaagttagttagaacctgaaaaagagaaaaatgaaaagaaaagaaaaacaaatctatttaactaatagcatgcatattaattgtctaatcatcaaagaagatgggacaatatcttatttgatgactgtcaataagaaaatgcattttgtctcgctgcatgcttgacggagagactttttgatcatcatgaataacccctgagcaagtagtggcatagtgcagtgcttgtcacgtcaggagcggtaatccctttttattttagcaggatttctttattggaaacttttttattaaactaacaatctgttatggtaatgaagtgtgattgtctcaaaacactgtctccatttatcgttatggactttttacggatcctatctacttatcaatcttcctattgaatattcactaattcttttttgtatccttttggaagattggagaactcaagaaactagttgaagagggtaa

SEQ ID NO: 78650 - DNA, 445 bp, Citrus sinensis
  Intron number 1 from transcript orange1.1g004138m (locus o range1.1g004138m.g) derived from phytozome v7.0 (chr-ID sc affold00011; pos 1576061 to 1576505 reverse strand)
agaaggtgatttcttaaccaaattgagagaagtcgcagctttgatttgcttgtgtttggcgaattcatattgtttcatttttaaaatttttgttaatggtataattgaattgatttttgtttgtacgctgatcatctttttaacttgctgagaaactttgcagtctgttcttagctgagaaattttgtttagaaggcaaaaggaaccgtattttcagtttcatggtttaaggtcttatttgttggggttgcaaatcatgttatttcgaacaattttgcttgttgatttgaacttggataattttttttactttaaaagtaaatggagtattttgtgtgccaatatgctagctgactgatggctaaattttaaggtgatttttctctgactttttgattatcttttcttaatgatacagttcaaatacagatcttaacactgaagt

SEQ ID NO: 78651 - DNA, 1001 bp, Citrus sinensis
  Intron number 2 from transcript orange1.1g008934m (locus o range1.1g008264m.g) derived from phytozome v7.0 (chr-ID sc affold00005; pos 676104 to 677104 reverse strand)
atcggcttcggttgcttcacttgccttttggttggtaatccgtagtccgatatctatcactttccctacttacttgcacgttagcattactatccgtatttggtggcctcatcttgccttgtgttgtgtgtatgtgcaagtggaccttcctttttcaatctctttctttgagtttcttttgttgctttctttctcttcccattggtccaaggcctacgtttttttcccatcaattaatacagaagttgtcatagttagatatttatgctcctgtgcgccataatatttatgcttatatcaattattaattatcgcacttattggatttttgcatcaggtagctatcaactaagaggattaaaagaatagtagctatcaaaattttattataatccttttttattgacaggtgcaattacaccaaaaaataaaaaagaaaattaattgaaaatggtatcaaaaccacttctaactgaaagtgtgcaagtagtcacacctagcgaggacccctagctcaaaatcgtgccatctacttaagaggattgaccttcttagactcccaagactcacttaattggattagattactgatgtacgttagattaacatttagataaaggaataagtgatttttttttatataacttatctaataatcataagtacttatttaattttataaattcttatcaaaatttaaaaattaaataaattattttgcctctattaataaaatttgagtttttattggttgaaagtttttcttaaatgttataatgtttagaatatcttttactcatttaataattttatttcattattttcataacataattttaaaaaatttatctattaaaataattttataatatttaataaaagttttcattaacaactaaataattaatttttttttttggttataagttctatttataaaaactctatttgaaaaactatactaaagaaagcctaaatgtctaattaacacttaacagggg

SEQ ID NO: 78652 - DNA, 796 bp, Citrus sinensis
  Intron number 1 from transcript orange1.1g013617m (locus o range1.1g013609m.g) derived from phytozome v7.0 (chr-ID sc affold00023; pos 1377980 to 1378775 reverse strand)
gttcttctcctgattccttttctcgttaaggtattaactttttgctcatcttgggttttgtttttcttttttcttaattattatgtatagtgtgtcatctgatctaggtaatttgggaaatttttattttacgagttgcaattgacttcttttgaataattttcccattttttgttttgttagatttctttgcttgcagttgctacgattcatttattatgttagatgtttgataatgtgcaaaatcacaatgtgaatctatataatacgaatgacggcagaggaagaaaatgaatgatcttacatgtactatgtaggttgaggtatggatttcggcagcaacaatagaatacacggctagttgatcttgcagttgcttatggtttcagagtgtcttgtagttgtttatatgtgtcctttaaaatttttggttcagagtatctagtatttgatgtggggagctaacactggtctctttgtttagcgatacctggttgctgtccttacggcggcagattcatttgtaaaatgtttgatcttcataattgtcgcaatctcttttaaagtttagtttcatcattgcaagtttatacgtcttctttcttgttttcagtgttcctttctttttcttttttataactttataggttctgttaataggttttgaagagtaacaaagttggctgtcatcattctttaatggattgctagtggtgtccgtgagctgttatgattgtcatttcaagacactggaatatctgattctcctttggagaagtcaaggcaaactattggc

SEQ ID NO: 78653 - DNA, 534 bp, Citrus sinensis
  Intron number 1 from transcript orange1.1g020349m (locus o range1.1g010574m.g) derived from phytozome v7.0 (chr-ID sc affold00215; pos 135122 to 135655)
gttcttgggctcgtcacgaggtgtctggtgatatccatcactttctaagcctttttagcttcaaaatagcatatgtttgtattttggaaaactgttactctgggatcttatgcacgtaactggcagatgccctgtgtttctaccctaatttaatgcatctaacctgtactctgggagtgaaaatgtaaaagtagatattaatgcaagattttgcttataagcttgagtaagaaatatacataacaatagcagtactcggtgattggtctgtgtattcagtttcctcctagcagtttcaataatatttttatgtctagaaatcaatgtgttaatgaacctttgagtctacgtcagatttgcatcaggataattgtatcgagtttttggctttcttgctgggggactcttctttaaattagagaaaacaaatgttttaaatgaatgtattctttaaagaataatattagtagatgatattgctatcatgcacaagtaaaagtgtctgacttagtcattttttctttttttcaggta

SEQ ID NO: 78654 - DNA, 384 bp, Citrus sinensis
  Intron number 2 from transcript orange1.1g021744m (locus o range1.1g013881m.g) derived from phytozome v7.0 (chr-ID sc affold00062; pos 451637 to 452020)
agactgttagagtttgggattgtgcttctggacaggtttttcttttaaattacttttcttttcttattttgtaagttgaattaattttagttcttatatgagttagcttgcttgttggaatttagtttttgattttctgctcgaactatgaatgtatgtctgaaggaaaaggtggaatagaaagaaagttattggtcgtaaacagttgatacttgatgcattttgtcataatcattaatcaaatgtaaatatagatgccttgtgttttcatttctctacattgtctctttgtatcgcaattgagaagcttattaattagcggctgatggtctttttctttttcttttagtgtgcaggtgtgattaatcttggtggtgaagttgg

SEQ ID NO: 78655 - DNA, 119 bp, Citrus sinensis
  Intron number 1 from transcript orange1.1g024566m (locus o range1.1g024566m.g) derived from phytozome v7.0 (chr-ID sc affold00162; pos 101422 to 101540 reverse strand)
tgcaggcttgtttattttccctcttctccttattattaattaataatttgagaattcaaaattttcatcatcaaaattgactttcttccttttttttttttatccaattacgttttcag

SEQ ID NO: 78656 - DNA, 734 bp, Citrus sinensis
  Intron number 1 from transcript orange1.1g006509m (locus o range1.1g005861m.g) derived from phytozome v7.0 (chr-ID sc affold00168; pos 226183 to 226916 reverse strand)
agtccactacattttctgctactcttattagccaggttctgaaaaagcttccctttctttgtcttgcctttctgtttgtagtttttttttttaatttttatgtaacttaaatcttaatttgtgttttacttgttatttgaaaaaatggagcgccccacccccccccccccccccaactatcatcagtagggacaaatcttttatgtgaaattgtctttttgatggttttgttaggattgttgtggctcaaaatgtaatgcaagtttgtggcttgttcatcatgcgtctggtttgtggttgggatgtggaaaattttctgtttttaaggtattctaatgtagttttcagagggctaaggatttaactttctgttcatgagtaagaaaatatgtctttgatttgtattttttgatcttgtgcggtgtttgtggtgaattcatctttttcattcaagcttatttgacatataagaaaatttgttgttttatcctatcgagtgcattgtaaatcctctacggtactttgattctttgttaggatttgatggagtatgaatcttttgctgttttatcttatgtttatattgtttttcttttgatgagcccttgaaaaatagaactcaacttcgaggttggaaatttttgttgtacttgtgcctgatattagtactcatcttcaaacgcaatgaacaatggattgatttttattacctttgcaggttgatattggtggca

SEQ ID NO: 78657 - DNA, 723 bp, Citrus sinensis
  Intron number 1 from transcript orange1.1g045020m (locus o range1.1g045020m.g) derived from phytozome v7.0 (chr-ID sc affold06509; pos 1406 to 2128 reverse strand)
gacttccatcaaatcacccgttttttgaatctttggtacaaaataaaccaaattgtatgtgagatctgttaattcgggcacaaaagtatgtaaccctagaagaagaaaagaagagtcttgcattaaaattcaacaaaaccaataattgggagcaaaggctctctaaaaaccgacggacggatttcttaagtcaaatgaagaaagaagaaaaagctcaatcaaagaagcacacaccattgaaaatttcgattggacaaattttgcatcaaataaaagatgaaccatggttaaagagaccagcaccaatggccaagaaccaaaactgagatgttgcaaaatattgtgccttccataatgattgtaggaattatacaagagattgcagaactttgaagaaatatattgaagaattgatttccaagggtcagttaaaagaatttgtaaaattcgaaggcaaacagccccaaaactaaaacaatttcttgaagaaagatcaaattgaaaattcaacatcggaaccagaacaaatagttaatactattatggctcccttacttttggaagtgcacatgaccaaagaaagaaatgtatattgcaaagaaagagaaattgaagctcctgaagaattctcaaagaaattgaagctcctgaagaattctcaaagaaatgtgtcaaattggatgtacagtcagaagttagtttcttgccccaagaccttaaact

SEQ ID NO: 78658 - DNA, 546 bp, Citrus sinensis
  Intron number 1 from transcript orange1.1g023000m (locus o range1.1g023000m.g) derived from phytozome v7.0 (chr-ID sc affold00137; pos 66702 to 67247 reverse strand)
atttcttgcctttcacttgtgattgctgccacaaggtatcatttcgtaaaattgaattatgtttgattcttattcgataaattgttgttgtctttgatcaatcaaatgcttgatgggcaattgggtactccttaattttttggtactattatgtgggtacaattcaattatggtgttcttatgtgattgctgaagaataggctgaaaggaaatttggcctgtgattaaaatttttaaaaaattaatgtgtaattttgtgtgttctgtttggtcaatctttgtgttgactaacgatgaactctgcccgtttttggaatttttagttggtgttgaaattaagctggattgttaaaatgaaaacacaagaatttgattttttttttttttggagtttactattgcttattgtcactgcatttttgtgttcttctgatagaataataatatgttgagtgctcttgttggtaggtttctttggtttgtgttaatagtaatgctgaaacttggataggtattttgtttggaccatcgaagctacaatcaaca

SEQ ID NO: 78659 - DNA, 859 bp, Citrus sinensis
  Intron number 1 from transcript orange1.1g024170m (locus o range1.1g024170m.g) derived from phytozome v7.0 (chr-ID sc affold00048; pos 368742 to 369600)
agcagttttattccgagcacttgtcttctgttcaggtactttattactataactctacatatgtttatacataatttattaaaaattttggttgatttgtcccttctttagatatatatttttttattcttaagaaacaattttgggtgcttgttgattagggattttgctgaactttttttcatgcatgtggttctttgggctcggtgttttatctggttttgtaattaaaacttggttttgtcttgagtgttggagatctaatttttacattaattaattaagttattcagttttggatgcagtttgtaaaaattttgatctgggttttcaatatctgttcaaattatggttgtcaaggaagtagactaattagtggcagttccttctgcagttgttgttgggatttttttttccaccatgattttgttgaattattgtctattgaaatcatattatcaattagtttacagatgttgacttatgacctagaaaccaccataacgcttgctaattgggacccaagttcttgaagtgatactaatcaaaagtttgtttttggtttgcaaaattacacctttgctgacggctccctttttgttatagtcttcttgtatgttcaaacatctgttgattgtgggtgatactgtagagggactcagggaccacattaaattattgcgatgaaaaacaaactgttgtgattttactttgctacaaaatataaatcattgtctctttatgccttgaatttgtgtttctgctgctttattctctcaactttgttttcttcaatattttgattgtggcttacctttcgtttactctgatatgcagtctggttgctgcaagccatcta

SEQ ID NO: 78660 - DNA, 859 bp, Citrus sinensis
  Intron number 1 from transcript orange1.1g013980m (locus o range1.1g009463m.g) derived from phytozome v7.0 (chr-ID sc affold00003; pos 1003392 to 1004250)
gttcgcttcttgttggttgacataacagtaattgtgtaattctcttcattttattgacagatgcagatggattttttgcaatcgtgggactttcttacatgtaatatttgtcttctgattgttgtgtttcgatctgtagatgatcattaatgtacagataaacgataaaaagttgttgaacatgtgatcatgtcctgtttctgcttggattctttttgcttttttcggtttgatgtgatcaagtttacttgtgtattgcatcgtttgatgtgttttatgatatgggtttgtctcaaaattggattcttctctaatgagtttgtattgaacaagggtgcagattgttttctccccagttttaaatttgttgattttgcttgtttggttcattttgatcgggtcaatttgactttttttcatttttgctgtgtgttataatgagtttacgtgaacaggggtgtctcttttgatgtgggaattcttttctttctttgtttcttttacaagtagaatatcctttaacagaagtctagtattcttctcttcaaagtttccttattttggtgtcccttcaattttaaattcctctttttgattcatattttgataatatctaccagttctgtaactccttctaaggtttctggtttccttatttgtctcttttttttcgctcctcttctttctctatgatctgaatttgattcttttcactttggccatggcaactgattgatctgataaaaaaatcttttatttgcttcatattttatgtgcacatcctttcatgacataacgtttttcatctgtgtttctatctgtaggtttgagacttgaagtctgctgatccttccgaaat

SEQ ID NO: 78661 - DNA, 662 bp, Citrus sinensis; identical to SEQ ID NO: 78252
  Intron number 1 from transcript orange1.1g034713m (locus o range1.1g031839m.g) derived from phytozome v7.0 (chr-ID sc affold00003; pos 2741760 to 2742421)

SEQ ID NO: 78662 - DNA, 783 bp, Citrus sinensis
  Intron number 2 from transcript orange1.1g013076m (locus o range1.1g013076m.g) derived from phytozome v7.0 (chr-ID sc affold00074; pos 124556 to 125338)
caaaaattcttcaagagcaccgtgaggagttaaaggtttgttgctttattcacacatgtcatcttctactcgggaaactaggttatgggtatagtttataaacatatgttgtatgttatgcaacaacagtaactagataaacaatggtatattggtaattttgtgtagactataatggctaattcagtgaattctgtattttcctattagattgttctaataattatttcaaaagctgatatcaataatagtcaagaaaaggggatgccatttagaaagccaattatcgagccatgctagtgatatttcaagaataaagatgtttgatgcttctcccaatggagtgtatggatattagactattgttagtgggttgagtcaagctaatcttcacgataatgttgaggaaacatgtactcttcctcgtataggtcaagttttgaaagtgccaatctgaaacattgcctgtaaatggagttgagtgcttcaattaaaacttttacacctatagtgtgagtaaatacaagtataaaaaaatctcaagtttatgtttcagcttcctcttctcaaatgataatttctgaacaattattagttttacattttttattggtattagtattaccttcgttatcattttgagtaagaatgagtggcatttaacttattgaagataagttcttcataatactcacacacagagacttgtgtatgcctgagattgatctttttttgcttgtttcactagggtacagttgttctggttttccaaccagccgaaga

SEQ ID NO: 78663 - DNA, 507 bp, Citrus sinensis
  Intron number 1 from transcript orange1.1g025419m (locus o range1.1g025419m.g) derived from phytozome v7.0 (chr-ID sc affold00005; pos 1214860 to 1215366)
atcccgaagtattggtacgtattttatttattttactttaaggagataaaaaaaccacgtattcattgttatgtttgttcttataaatttgaatttcaatagattaagctcatgttgcggtattttctgcttaattttttaaaacacaacaattaaagtcctacgtaaacactcaccattactattagcagctgctatgtaagtaattttactggttatgaaattgaatgccatcggtacttggatggaaatgctgggtgtaccacttttagagagtggagagtgcgtttatgcatattataccatgtgtcgatgagttaaattgttacctattttaatcgcaaatatttgctgtgaagattggaaattaaatgtcgatttgtctataaccagcagccaaaaccattgtttaggcatattctttgttgattcattttgtcaattgtacttgtgtcttatttgcaaaataccttttttcttttgttcatgctgcagaattttgcagaa

SEQ ID NO: 78664 - DNA, 592 bp, Citrus sinensis
  Intron number 1 from transcript orange1.1g012154m (locus o range1.1g012154m.g) derived from phytozome v7.0 (chr-ID sc affold00014; pos 1670112 to 1670703)
gtggtccctccccttccctcgccgccaggattctggtctgttgatgttctctctctctctatccttcttcttcatttctcttcttagctgatcactaaaattgaccaatagaattcagctaaatattgctgacgatcaatcacatcagttggttaacttttgatcgccggtgagtgggttcgctgggaaacgacgaaaatgcccctggatggatttgtgtgtgcttgcggttgcatatttgagtgggattttctcttgacttgggtgacgacgataatgtgattcgtttttatttaatcatttatttcgaatatataataaacaatgggaaaatgggaagtttctggccgagagaagtaagagtaggattgagtgtttactaaaagctaaagcactaatctttgatttgtttgtcgttttatctggaaaccagctgtacttgcgtttctgatgactctctgcttgtttactaactttaacttcatctgctaggggtatttgggtcataagatattcttgagccaccctacgattgcttctgcggtcatctagttttgttgacgtgatgtcaattggtttttgtgtgttcagg

SEQ ID NO: 78665 - DNA, 731 bp, Citrus sinensis
  Intron number 1 from transcript orange1.1g041382m (locus o range1.1g041382m.g) derived from phytozome v7.0 (chr-ID sc affold00074; pos 305100 to 305830 reverse strand)
aaccagctgattcctatcggggacctcaggtatcaataatttattttgacactgcgtgctttagttactaattgcacttttttattatttttttaggcctctttttgtggttttctgagcagggttcatttgtgagtgtttgggataagattttctttctgatgaatgattttgtttgtctattgctcgtaggattgcatagagaaatagcaatttgaatatttgttgaaagttactttagcctaaattatgaacagagtggttcaagcaatttgtttcactatttgcactgaggttttggtggatgtttctttttgtttttgaaattattgtcctagcatctgtgggctgatgagtttgtaggcttttaagattgtggtctattaccttcttcgattcggtaattgagtatttgttatgtgacatgcaaggatttctgggttttaatgtaaatgatgaaagagacttctaaaactcgaagaactgaattgcttcaatagagcttaccaaacacaatgtgaccaaatatactttagggctccctttctgtgctttcattgttagatccacagtgtttgactacactaggttggtaatgagggtaacacggagttagttggatctttatcaatttgcagaattgcacttgcggcttaaacctcatcgtctgaacattatgtttatattaactatgatttaatccaaataggtgactcttgctggactactga

SEQ ID NO: 78666 - DNA, 689 bp, Citrus sinensis
  Intron number 1 from transcript orange1.1g022780m (locus o range1.1g022790m.g) derived from phytozome v7.0 (chr-ID sc affold00023; pos 689112 to 689800 reverse strand)
attctttccactgttggtcgctgttaacacaaaaggtgagcacgaatttccagcaaatcaatttctgattttaagtgaattaatacgtataagcataaatgcataaatgtagtttctgatttgtagtgttttttatttgtggattttaatggttgtgtacttgaattttgcgggttttatgatgatgttgtattttattcatgttaaattggtaattgttgattataattgaattttatttgaatttattagttaaattgttgaatttttaaattattttttaaattatttaacttaatttagtggatccggacagctattaaaacctcattggaattgggatttgttcaggatttctattgggaatattttgcttgttggttcagtagtattctcttttcctttaatttttctcacgggtgtgccacgaactcgccaagcagccaccgtattgcaggttttttgttttcccccaaagtgcttgataaatttgaagtctggattgcttgtttggatattaagttacttgcaagtgggttcttcagttgattgcttatcatcagagttgtgaattgaattataatttcttccttgtgagtttggttcaaatcaactacccaagaaagcttatactaggttcttttttttttttttgggtggcagtgtatcattgaactttattagcagat

SEQ ID NO: 78667 - DNA, 407 bp, Citrus sinensis
  Intron number 2 from transcript orange1.1g030686m (locus o range1.1g027593m.g) derived from phytozome v7.0 (chr-ID sc affold00005; pos 2621892 to 2622298 reverse strand)
cttcaaactcgtcatagtcggcgacggtggcactggtaatcttcctccctttactgtttgttctttttttaaattgaactaggttttatgatactgactgctagggtttttttttttttttttttaattttctgcgttggctcttaactgtgattaactggaaatggaaaataaattatctaattgaaaagactctattgtttggaaaaaaaaataatttaatgttgttgttgttgttatttggttaattagtttgagagaatgtggctatgctatgcattgaatagttactaaaaattcttctttttgaaatgagactgtgtgttaatggtatttgatattttactactgtgttggtgtttgtggtttcagggaagactacctttgtgaagaggcatctgactggg

SEQ ID NO: 78668 - DNA, 492 bp, Citrus sinensis
  Intron number 1 from transcript orange1.1g030233m (locus o range1.1g030233m.g) derived from phytozome v7.0 (chr-ID sc affold00065; pos 485717 to 486208 reverse strand)
gcttggagaaatcgttacaactacaccaacaatcggtatctgccctactaactcttgctttgataattttttttcagcctttacgtctgattctctctccctatatatagctgttgtttctatttttctctgtttattttacatctttgagtctctgactggtctcccacacggcgacttcacatttgtagcataaaatccataaaatcattatgaacaacatataaacttcttatttataacattgttaactataaccatataataatgaccagaataaggaataaaccttagtatatttgagcagaaaaactgtttttgcacaaattttattctattatattttgagatataagatgttgctttctgggttgattcttccttcattaaacggggtgatttctcttcttaatttgctctcgtttcaaaattttccatcttcaaataagttaatgatgatctcttgcttcatttgttaattgccaggtttta

SEQ ID NO: 78669 - DNA, 767 bp, Citrus sinensis
  Intron number 2 from transcript orange1.1g004538m (locus o range1.1g003732m.g) derived from phytozome v7.0 (chr-ID sc affold00011; pos 851168 to 851934 reverse strand)
gttctttgctttgcttattggcattggtgagcttacagtagtatatacttcttctgctttcattttaatttttttttgtctttttagtttgattacaaggaatgaatttggaaatgctacagttggtgtattgttattatatcaagtgattgtattatgtgtgctaggatttatacgatgaatgaatgattcattgtgtgctgtaaggttttggactgtgcttttaaggagatattcaatgatgtcattgtgattttttatattcatttttgttttagatcaatgaaatctattgattacacggtggaagtattggaccgtacatgtaaattaacgaattaatactggaaattactttggtattgttgcattgttccattgttccgtcattttatttgttttgtatctttgctaaataattgatagtttcagctagattcaggaacaagtttgttgtggatttttatttatatctaaggtaattgtaaatgttggaaaaattagatgaaatgaaatgcaaattgccatcttttagttgtagaaaaattaccttagaagattttagagcgtattttcctggcctttacatgaattcctctaaattaactaactctgatgcatattttatgaactttcaatattagagaagctcatcccgttattctgtttctcaatgttggtttttgattttgtgcttattgttttcggtatatttcttttggttgctttcaggtactgggcttgctgctgttttcattaatatatct

SEQ ID NO: 78670 - DNA, 727 bp, Citrus sinensis
  Intron number 5 from transcript orange1.1g031774m (locus o range1.1g026030m.g) derived from phytozome v7.0 (chr-ID sc affold00061; pos 300248 to 300974)
ggaattcagaaccccgtggctttggtatgtaacggactttgaatgagatatatgtgtattttccattttaaaaagttgagttataagacaatttgaagaaaaaaaggccaatgtttcttttgtgctctctatggttggaaggaatgttagaacagtccagaacactcacttcatgtgcttatttattgaaacttgtataaacctaattaatttgatcagttaatcaatttctaaattttattttgtaatggttttatgtttaccatattgagaatgtttttatgtttaccatattaagaatgtacgtttgtttgtcctgaggcaaggcttaggcagagctgatgatatcagctgctgtctatcactacggttatccaattgactgccttgttcttgagaaatttatgcatgacaatatttctagaaacaggacatataccattagcttagttatgggtttaagcaggggtctttttatatattttaggctttttctatcattttacttgtggtagggactagggactggagctaaggaccaatagatggaaaacatgcctagacctatttatttatttgtttctcgagggtgatgagtttttcagccactatttatcatattataattttttgcttcaattgctttttttttttttcaaaattcccaattattttgaagttttaacttgtcatatatggttttcagggcacatcggcatcactgttg

SEQ ID NO: 78671 - DNA, 840 bp, Citrus sinensis
  Intron number 1 from transcript orange1.1g023417m (locus o range1.1g023417m.g) derived from phytozome v7.0 (chr-ID sc affold00017; pos 484855 to 485694)
gaaataccaaaacgaaactaactttcagtattcaggtatatattttccttattttattatttttattgaactgcaattttcactgttattttttattgataattgattgtatcgtgttttcgtagggattgaaaagtctaagcttgttgaaaattgcacattgagtagtagttgtgagattttccccctccaattcgttgagttaagatcgttagttatgattttaaggttgtgcaattgtgttttatttttttacctcttaagaagatttaattgtttgctcacgagaaattaatgaacatgccagtttgataggtttagaggtttagatataaactcaatttctttctgtaatcttaaacaaatgcaaagaaagttgatgaactaacttttcatgtaatcacaaaagatgtgctgaatgctctcgatttagatattgagtggacattgtagattctgtcattgctattattaccctgacaattctgggcatatgatgtgttagaaaaggtgggggccaggggtaagaaaagaggtggtaaactgcgctgtgtgtgtttgtatttaaagtgatagttgatcatggaatgaagtaatcagcttctaagtttcaaaatttctccagctaatcacaaaggaagaaatttccaggcattgtcaaaaaatagatatgtgaaatagaaaaaggaaaaaaggaaattcttttttcttagaggaactcaaatgctgcagttttatcaaaatgatttatgatgctcccttactaatttattgcggcttatcattgtttaatcatttgttgcagccattgattcttaatctttcatatttgaactctgt

SEQ ID NO: 78672 - DNA, 648 bp, Citrus sinensis
  Intron number 1 from transcript orange1.1g021320m (locus o range1.1g021320m.g) derived from phytozome v7.0 (chr-ID sc affold00056; pos 623299 to 623946 reverse strand)
tcatctcgcttatcttctctgctctcatcctccccgtaagttttttccctgaaatttgtccatacagttcttgttattatcatcgactgggtattgagttgcaaagaagcagcgcatgatcagcggtggcacttttgtaattttcacttttcaaacttattatgctgagtttacattagctataaatgtagcttgtcttagtgtgtattcgtgagttcttgggatttcaaatagctagaagcaattttgctgcttttttttggggtgggggggggtggagggtttggaaattcagaacagttcttctagaagataggtgcttaataagaatgagcttctggggctaaaattctttttctcaaaagtgcttgttacagaagtactccaagttgtgactctttgatatatgctttggtttcgcaattccatttctgttttgtggatatcttgcatcagtttggcatcatttttcagtgtgatgcttcaaatatgattattttttctttaaaagggaaagaaataagtctctgttaattgtgctctaatgtgcttgttatctgcagcctttttttttatcccctcttgttgtctgaagctgacagtttcaaaatattttgtaatgatagataagaagctgggagacatcaa

SEQ ID NO: 78673 - DNA, 641 bp, Citrus sinensis
  Intron number 2 from transcript orange1.1g032637m (locus o range1.1g032541m.g) derived from phytozome v7.0 (chr-ID sc affold00112; pos 98936 to 99576 reverse strand)
tttgaggccatctgctcgatattcaatatctaaaggtaatgaaccttctagttgtttctttccaagtcaaaaattagatcaacatcatccttatttgcctgtttcattttccatctgttaattcttgtatttctccatgattttccatttgtatagctccctccactgaattgaaaatcttggaatcaatgcagagtgttgtcatattagagagtcctatatgtgtgaagccacctagactctgttgtattattctagagatgaattgtttttttgctttgaatggaaagacgtcaatatttgtttgttttgtgatattttcccataaaaatctagcttaatatcttctctgcatgtaatgaaaatgcatctgcaccagagagctcctttttcccctttcaattgcattgatcttactgaattctgcttcttttttgtttattttattccctgtctacacttagaatttcattaatttgctccaatggtctattaaagcccttatttttcttgatcttacacatctttatagcatcttgtgcattttattaaatgcttgtttaagtgtactgagagaaacttttgtaatggtgaggaaagcaccagatactgctgatcgtgaaaaagggagatataccctt

SEQ ID NO: 78674 - DNA, 473 bp, Citrus sinensis
  Intron number 1 from transcript orange1.1g006086m (locus o range1.1g006082m.g) derived from phytozome v7.0 (chr-ID sc affold00017; pos 451834 to 452306 reverse strand)
aaaactccggtcttctccgccccgttttcaggtgatttcaatcatttccggtttctgctaattctttctgaaatcaaacggaaaacggaattgaacaatcaactcacccaattcttctattttgtattatgtatgtggttcttcattgactcagctgccggacggttgtgtgtttaccacgtgatcttattttaacaacgcatattgtattgattgattgattattagtcaatgacagaacctataggaaattactgtaagattagagtctggagttatttgtttaggggttgttctgtttagtttaatgaatctatattctaccttgatcttgtttgttgatagcagaaagtgatatccagtaactttttagcctgtgcagatgtcggtttaagaatgtcatttattcaattttgttcgtgaacttgtcatgaacaggtttctggatatcgactctgcagcgtggtctggac

SEQ ID NO: 78675 - DNA, 276 bp, Citrus sinensis
  Intron number 1 from transcript orange1.1g019655m (locus o range1.1g013833m.g) derived from phytozome v7.0 (chr-ID sc affold00003; pos 3270418 to 3270693 reverse strand)
ctgacgtcaacgctcaggatcgctggaaaaatacggtacttttttctttcagaagacgattattcggaattgtgatttaattatccatcacttgactctgattactgctgctgattctttactggagttcttgaatttttgtataatgcttttgattttttttattaaatgaaaaatctttaattgaactgcaactagaaactacacatgatttcaagattgggatagtttcatgtacatttggatttttgttactgttgcgacagccgctagctg

SEQ ID NO: 78676 - DNA, 698 bp, Citrus sinensis
  Intron number 1 from transcript orange1.1g025069m (locus o range1.1g017322m.g) derived from phytozome v7.0 (chr-ID sc affold00034; pos 74092 to 74789)
tttgcaaagagataggtattgcatgttcttctcattttttttttgccctttttcagtttgtataactgttctttgtttctttgtttctgcttatgtcttttgtttttttattcgctttatggccgtgaagatatggtgtaggtttgataatttgaaactttgttggtcttttgtgattttggtttgcatggctggttaaattgagatatgagagttatgtcaattcagcaaggttaatgtttcgtttaggatgaaacaaatttcattactagaggccggttgttgaatttttaagtttttcccttggattggatgaattaagctctattctgtagtttcttcatttacatgaagattactttcaagtgttggtagctgttagcacgattctttctttattctgtagctgggtttaaaaatttttaatttctgtctttgaagtagttagatgttaatatccgaccaaattatatgagaaagatgtaattagaatgtgaaaaatttcttaccgggttagtagtttaaaatactagtaatatttctgattttggagtttcaaggataggggttgtggaagttgaagttgcagtttgttttgtttaatacctgagcatgcagtgaatctgagtaagcagattttggtcatcctgtttgattttgtaggatttagtaaagggtcggcgattcagtggcccttc

SEQ ID NO: 78677 - DNA, 750 bp, Citrus sinensis
  Intron number 2 from transcript orange1.1g017248m (locus o range1.1g011117m.g) derived from phytozome v7.0 (chr-ID sc affold00083; pos 517531 to 518280)
tgtttgcttgtgtaaagttcaaatttaacctagaggtaatcattctccttgtagtaaattcaaatgtagccatgctgatattatttctatacattaagtgtctttttgcttgttcatggggttcatggggttcaacaatagctttatttctggaaatttaacttgctttgattcatgaactagtgtaccagttgagtttaaagcaaattggtttccacatggatccagagcgatacttccacttcaatgaaaaatgagattgagttcccgtgttttgattggcaaacatctaattttttcctgcccatcattatctgcattgcatgtttacaggggagttaatagtaaagttcccttgggaatgatattgttattattgtgtggtgcattcccctgggatttaatcttggttggttgagctttaaaactgaggatatactttaaacagtaatatgattttctcatatatcttatcccagatccattcgtttggtttgtagtatctttattaacagcataagactattttattactggttatgttgttttgaaaagacctaaattctaaggaacaaatgctatgggtgctttaaaatagaaacaaacaaacaaacatgaggactgtcagtttttcttacggtaaaatttgtactatcgtgcattctctctcccatcgatcttcttttgtactggttaaatgattgaggaatgcaattagcagtttcacatgctttgttgattgcagttgtg

SEQ ID NO: 78678 - DNA, 729 bp, Citrus sinensis
  Intron number 1 from transcript orange1.1g045583m (locus o range1.1g045583m.g) derived from phytozome v7.0 (chr-ID sc affold00005; pos 1324479 to 1325207)
tggcggtaactggattgctttgcctcaaaaagctggtatattctaattttcctctctttctctcacacagtacccaatatcaccaccaaaaaaaaaaaaaaaatttcttttcttacaagttataatcaagtttactcaatatccatttcaagtttctttatctttgttagtttagttcaagcaaaattatccatctgatcatgaaatgtaatgtaaccaaaggagagtgttttctttctttttctttttttttaaatttttaaaaaaatttcctctaaatttattattattatcctattatttttcctttaaacaatttgacagattccttcacttcagcccatttcatctattctctgaagggtttgttttcgtctttgcttttcagttttgtatttagtacacacgttagaaacagtacaagaaaaaagtagacttgccagagggatttgtttgtcttcttgttagagataacattttcttctggccttggggaccatcataaaagaacctatacggctatacgattgaaaccctcatgtgaaatcatattattgatcactaatcaataattaatactgtataaatgggtcggctttaagcacatcacatctatacatcttataagcaacaatttctttgtcttatgttacgttattttcaatgctgtaacttatgtatttggttcatttgaatctctttggctgttaaattttcaggcctcaagag

SEQ ID NO: 78679 - DNA, 819 bp, Citrus sinensis
  Intron number 1 from transcript orange1.1g016029m (locus o range1.1g016029m.g) derived from phytozome v7.0 (chr-ID sc affold00108; pos 289065 to 289883 reverse strand)
tgtttttgttcccggtaattttcacatcacatcccctggcttcgctcttactatgacttgtaactaccgtaatgacccctgaatctcatatacaatatgtaatgtgaactgattttgccgtaatataaaacctggagattggctttaaaatggttcttttagtactctgctttacttttctaggatataaccgaattagatcatgttattgatcatttgtatatgacaggttgaattcgaccattgagaaaatagtttatttcgacttctgcacttttagttttgccatttgatagcaatctatagggcaaaaaaggccagtgaaataaagagtgttttcaacaagtgccgcacaaaatgagcatggatttgatactcaagtgtgttgtaaagttccctttgtaagcattttcataaaacagaaacccactcattcaactgcaacgcctatcatttctcaaatgatcttcattttctctacctttttcttttttcttttttcacttctgcctcacatacatctggttttgttctgtttcatatttaggtgtttgtttttaatttaataggcatcattttgcttcaaccaaaattcacttttgaatttttcttaagatgcattaaatacattattcagctatgggattctgaatttcaggatctattatcacatcctaactttgttttatattgtatcctaaagtgttgttacaaattgttgtgatgtttgctctgattactactttagcaagagattgatttgagttttaatttatttttgcagcaataccacccgtcaagaatcctcacacttgtcta

SEQ ID NO: 78680 - DNA, 815 bp, Citrus sinensis
  Intron number 1 from transcript orange1.1g014177m (locus o range1.1g014177m.g) derived from phytozome v7.0 (chr-ID sc affold00208; pos 196725 to 197539 reverse strand)
cccgaccttcagattgtagttggctctcgaaacaggttaaataattaatacccttttctttcttctgtttggtcaccgaaaaaaagcaagaaataaaggagggaaaattttcaagctttgttcttttcttgtttttttttttttacgtttactatgtttctttggttattttaaaatttaaaattcatggtgatggctactggtaaactgcaatgcttttacatggttctgaaagcacatttctaaacagtcactcaactacaagtgattatcatgtcccacagttgtagattagggctccaattggtagtgatgttgtgcggtcgtggcttgttaagacatctactcttaaatgagagctctagttatgaaataaaagttcatagtgtctggtaaatgctacctttaaataatcatttcgacaaaaatagtaaagctaatataggtcgggcaattgtgggtaaaatcgtcataattttcaaactgtaattgtgagtgtttaccaaatactttaaagttgtgattagatggtaataaaaaagagaacctaaacagtccataataatattgccaatgatgcaaaatttgtaattctgtctctttttggttttcctaaacattcgaaaggctgtttttgttgattgatatgctttgactgtgatatgttaatatttagaatgctgtcaacatgctagttcttggatggaactatggggacatggagttgtaaattcaaatagttatggctggaatatttcctaatttacagtgtcgctgagaaaattttgcataccggcagggaaaaaggtgctgca

SEQ ID NO: 78681 - DNA, 320 bp, Citrus sinensis
  Intron number 1 from transcript orange1.1g009004m (locus o range1.1g006538m.g) derived from phytozome v7.0 (chr-ID sc affold00023; pos 829025 to 829344 reverse strand)
agatcctctcttttctgaccagtttccatcttcttgtaagttgtttgtttatgccgtttcagctgttggttatcaaagttttatctttttttcttgcttaatttgattgttgggttttttttttttcttctaatgaataaagcatgtgtgagaaaaccccagaggttcatatgaatgttggtgaaaatttgtggggggcagaatgaaagaaaatcaaagctaaagagtctcaaattatttgcatgttatatttgttttggaatgaaattaattcaagagaagttatgtgggttctggtttctttttagttgatttcgttt

SEQ ID NO: 78682 - DNA, 605 bp, Citrus sinensis
  Intron number 1 from transcript orange1.1g046443m (locus o range1.1g046443m.g) derived from phytozome v7.0 (chr-ID sc affold00003; pos 3281072 to 3281676 reverse strand)
gagttactgctgtcaagcaggaggtataaacacctgttccaccttcctcatatgtcttttattttattttattttattttgggttggtggttctaatggtcgctagaaagtgggggaaaaaaatatggggtcaaataaaaaaatgatagagttgaattgtttttaattggtttgataatggatttggccagtaatttcattctcttcatatgtactttatacttcttggtaatcaaacagcagaaaatgtaagatacagaagatgtaagacattctactgttttttcttgtttccatgggtttgattaggcaactcagtgcatcatggtggaattatgttgtgcttttcaatccaaaatttataagtggtgactgccagacaccattgcttgcaggtgattgactgggtttgctttgagttagtgcgttttattattagagattgcatttttgttcagttgttgttggctgtaactgtaactcaagctctagctagttttttattgtcggaatagagaaacgtatctgttgttctatggttgaacactgacatggtttatggtcgatgaattatgcaatgcagattggtgggctggacactgatt

SEQ ID NO: 78683 - DNA, 600 bp, Citrus sinensis
  Intron number 1 from transcript orange1.1g024833m (locus o range1.1g016022m.g) derived from phytozome v7.0 (chr-ID sc affold00484; pos 21853 to 22452)
caacttattactagactcccctcaatctcccaccggtttgtaaaatttaaccctttattaccattattattattttcttgatttttgggtcatctttcgtttccattaataataatgctttgttgaacttgagttgagtgattactcttgtgggtagtttttaaattgctctctgattacttggttcatgtagaaactattacctttatgtacttgttattaactaattgttggtatgagtaagaatagagctgcagattcatgtacaaactgacatgacgtaatataactgcatctgtgggatgaaaacacctcatggctcacatgatttttttttaatcattttatgtttttatcccaccaaatagaattatgtcatttcagtttgtacaaagtaagtattactttttaaattgttatttctatggctttgttggtagtctatctcgaggttttttcgtgtattattaaagatgtaaccaatgatgctggctgctgggggatgtattcttctttgatgcttgttacttgcatcagaatgagcttttgacgaatgcacaccattgcagattcttgtgagccctgtccaagtaacggcga

SEQ ID NO: 78684 - DNA, 520 bp, Citrus sinensis
  Intron number 1 from transcript orange1.1g021132m (locus o range1.1g012917m.g) derived from phytozome v7.0 (chr-ID sc affold00322; pos 134956 to 135475)
atttgaaaggtgatctggtgcaccgacaggtaactttattatattttatgtttttggaattaaattatacataatttttttcattaatttcttgaaaaacgttggcattttgaaattgatttaattttgggtcgaaaatgataacttagtgagttaaaaatgggagtttaattcaaagttaagtagaagcacaacaattcttagcacaccacgttgtataataaatgtttttgcattttgtatagctttatgagtgaggcaaagcaatcgttagggagtacatggaattaattcttagggacaaggtacattctacgttggaaatgtttcctattaatctggccggattgcagttctttgataattaggtatgagcaaactcagatggtcatgctattcttgtgtgtgtcggtggtcttttctattctgtgcgtattatcattgcaatgatctaggaactaattggttgagatttgtgcttgcagttgatacatcccggacggattctaaagttgcgagt

SEQ ID NO: 78685 - DNA, 617 bp, Citrus sinensis
  Intron number 2 from transcript orange1.1g025039m (locus o range1.1g025039m.g) derived from phytozome v7.0 (chr-ID sc affold00167; pos 45639 to 46255 reverse strand)
acctcgttcaacctcacattaaacccaattcctctgtaatctctctcccatatacgcatttgtatatgcttgttgtttgtttggttaattttttgtggtataatgtttttcaaatgaactttttgtttgggaatcaaaaaggaaaaaaaaaaagcccttgattttaaaggtactttccagcaaatgcagtataagttcttaaagaatgtttgcttgttttattagtaccactccaaagtctgttgtcctttttcaaaagcactgtataagcttaaagaagtatttttcttctccatttctgtcaaacaacaaacaaaagcacatttgggcctttgccagtttggcaccttgcaatggttttgtgaattggtgatggctagctaactagatttctaatgttttcatttaaattggggtttttcatttgaaaacttttgtttgtaatttcaactttgttgggtttcaatctcgctagcgtcgttgtgatctacgtcgaagtatatgacctctgtaagtcctggagtagttggattcagtgttctttttaatgtctgttagcaaggtttgatagaacattagtgatgagaaaattgcatggtaaaggtcttggagctggg

SEQ ID NO: 78686 - DNA, 643 bp, Citrus sinensis
  Intron number 2 from transcript orange1.1g024150m (locus o range1.1g018906m.g) derived from phytozome v7.0 (chr-ID sc affold00145; pos 190519 to 191161 reverse strand)
gcagtaatcttttgtaagtgaagaagcttataatggttcttcttttgggggtcttttcaaaataccgtaacggctttcattttttggctggattctgctttgattaatttgcttaacttctttgccattttttccaatataaaaattgtgaaactccaacttacggggcacaattaacaaagcatttattacacacgcatcgattaccattaacacacccatatggctaggaaccaatatgcatgcaatcttcatgtctaacccactagtcattagcaaaagctgtcttttatgtacctcatgtaaaaaacatgagtaaataccctattgctgcatcttctcttcagttattcaacaagtaattttcttgtgatcatttccataaggagctaattaattttttattattaaaaaaaaataaatgtcacctctttaggaaaagataaggataagttatagttcactctctctgctaattttgtaattcgaaatttgagttacggtcacgtaccattttgtaaatacaagtatgtacgattattaggctgctagaatctcgattaactgcgcctacctggggtaatttggtaatttacaaatcatgaattttttttttggggtcaattaattgcaggaaggatac

SEQ ID NO: 78687 - DNA, 674 bp, Citrus sinensis
  Intron number 1 from transcript orange1.1g025405m (locus o range1.1g025405m.g) derived from phytozome v7.0 (chr-ID sc affold00245; pos 148422 to 149095)
caactctctataacgacaataatactgtcatcggtgtatgccttcttctgttctccttcaatttcagaatcagttttctttttgtaaacttaaaaagaaaaaagaaaatttgaaaatcttttttattttttcaaaaattaaaatagtaataaattctgtttaagagtgtgaaattaatcggtagataatgattactcctctaattcaaagactaaggctgtgttcgggaagcaacatatctgaagtgatagaaaactattggtggttagtctcattgtgttgttctgttttcttgtatcttattgaagtgcattttaaattttaagagttattaggtctatttaaaagtgcttttatgtattaagtgttttctaccaattgaaaagcacttacaaagcatattgaagagtgcttttaatgttgccaatgggcattccaaatgcatcattcgtgtaagtgttactgtatttttgctaaatcaaaaacatatttaaaacttaatattaacgtttacatgttactatttaaaccaaatcaatcatgatatgttgcttcaatgaagcaagaagaaagtgataactaaatagtttctagtgaatctcaaccctaatattggctgttctttcatttggaatttttactttttgttgtaggaaatccgaagggctttgggt

SEQ ID NO: 78688 - DNA, 681 bp, Citrus sinensis
  Intron number 2 from transcript orange1.1g025405m (locus o range1.1g025405m.g) derived from phytozome v7.0 (chr-ID sc affold00245; pos 149115 to 149795)
cagttgatttggaaaaggacaatcagtctcaagtattttcattgatattctgaagggctacgtgtttggttggttgtatatgtacgtgagttcacatgattctggttatcagaagatttggaatgttgaaataacaccaaagtttttggatttttttatttttgtgctcctaagcagaaaattgtagcttccttcacattgctgtataaaatctttattcattttttattaaaagttgtgcttcagtcctctccctgatccacaaaccttggcttgtttgatgaagctacgatttgattccaattgcctatacacatactagttgactagataatgcctgataaagattttgccacttgattgagttctttgctgcttccatatacattcatgtcccatttcttttcaagaggatttttatcttttatttctttacatatcctgcattcatccactctagtttcttatgttcagtcctggctctgttatgaattgcattaattgcagttaatgtagtttccattttcttctgaacaataaccctgttatattattttggatgtattatatgtttcacttggtatactgcaattcagaattatgcaatgtgatctgcagtttctttttgacatgtttaattaattgataattgtacactattgcaggtgaaggagctagaag

SEQ ID NO: 78689 - DNA, 397 bp, Citrus sinensis
  Intron number 2 from transcript orange1.1g010262m (locus o range1.1g008255m.g) derived from phytozome v7.0 (chr-ID sc affold00815; pos 25811 to 26207 reverse strand)
gctggcgaaaagaatatcataaaaggtaaccttttaatttgctgcaagctactgaagaaattgacccatttgagcgttattgactatttgtttgaaagttagtagcttgtatggttaagatgaatttattttgcttctgggttattcaatcaatgtcaaaatgtctgagcaataaatggattttgaatgtacgaatttacttatttatgtgattacacttaatgagaagaaaaacattgtgtttggaagttaggtcctgttggcgtttgcattgagccttgttatctgaatctttctagtggcatgagtatcttgaagggttctgttgtttgactgcaatgcaattatctaatttggttttttcttcccctcctccaccccacattacctaatgcag

SEQ ID NO: 78690 - DNA, 812 bp, Citrus sinensis
  Intron number 1 from transcript orange1.1g010262m (locus o range1.1g008255m.g) derived from phytozome v7.0 (chr-ID sc affold00815; pos 26215 to 27026 reverse strand)
gttccaagcggtcccgatctgttaatttatttccggtttgtaactttttctttgttgtaataattttttgttcttcgttttagttcgtaagtcaaagaaaagtcaaactcgctttctgaagtaaccatcttctgactttcaatttttccatatatttttaatttcttgttgtagatataaatttgaagtgaaaaaaaaaaagaagctttatttttgctggatattatttgtgtactttttttgaatttttttattttcaataaaaaaatctgatttttttttttaaattgagtttcaattctgtcagaaatttgaaaacttttagttaaatactctcaaaggaggtattttttatgaacatggaggtcaatttccagctgtattattaaatttttttatcctttttgtatttttaaaatatattgagcaactaaacgcagctttctcttaaaattaaaaaatcaaaacttttgtatttgtctgtctgtgtattcaaaatattcgattttgctttaacaaaaatctgaattttttattttattttttaatttcttgagaatgttgtagagataattaatattaatatttcaaaaatcattgtgagaaataaaatctggtatcttttttttaaatattgaatcgaatccttttctggcagacacacgtttggcgcgtgttatattgcgctgtgtgtgttttatgttgccgcattttatttagttattttcctttgtgaaccttaagagctaagcattttttccttttttgtttatataggataggagtgtaagtaggtgcttaaagttcaagat

SEQ ID NO: 78691 - DNA, 433 bp, Citrus sinensis
  Intron number 1 from transcript orange1.1g011543m (locus o range1.1g011544m.g) derived from phytozome v7.0 (chr-ID sc affold00074; pos 522251 to 522683 reverse strand)
tcgtttaagcatctccgatttgcaattcttatcaagcaagttcgtctctccctcatatcaaattttacatgcgtttctagctcgatttattgattaatcttcaattttatatttaggtgtattaaaatgacgcttttcgtcatctgaattcggttcaaatgtcgatcaagtttgaaatcagctgcttgaattgattaaatttgattttttttctttatgctggatcgaactagcaagtgttgaaatttgcacgtaattctctcaatttatatatttttctcaatggatccgagtcgacgtgtaccttgttacattgacttaatcttagttatgttactttctgtttaattatgcttttggatgctaattgtggatattaagaagcaagatgcttgcagggagcaggtgtctgcgccgaatattgattgtacat

SEQ ID NO: 78692 - DNA, 607 bp, Citrus sinensis
  Intron number 3 from transcript orange1.1g026093m (locus o range1.1g026136m.g) derived from phytozome v7.0 (chr-ID sc affold00050; pos 477215 to 477821 reverse strand)
ccaagaaaattttgcagcttctccgtttgagacaggtaaccactcaatcctcccttgtgttattgccatttaatttgttattagaaatgtatattagaggtctgcaatttccttttcaaattggataattagtggtatagtttgatagcgttggcaagcttagggcttagctatcagtttcggttatacctgttactattgctgaaatgtttgtatctaagtagtaaatttgggttcattaactataatgttttattggaatgaaagaggttggaatgctttttgaagcttgatgtgctagccatttgtttggtggttaaactcaaatttaagtacttggttgagccataggtgttcttggtatagttcgatgctaggagtgctgttctcctctgattgttctcgtagtgtagatgctgtaaactattgggagattcctcttttgatactgccttatatactactctttcctagttatgatgtgattcaaaaggttttacatttagaatttgctgccattgtgatggagattatttgtaggtttatatgtttcgtcttctgggctgatgtcattcttggttttgctgttcctgaatacagattttta

SEQ ID NO: 78693 - DNA, 594 bp, Citrus sinensis
  Intron number 2 from transcript orange1.1g030315m (locus o range1.1g025826m.g) derived from phytozome v7.0 (chr-ID sc affold00003; pos 1762611 to 1763204)
agagtttattcgttccaagaaccttcaccttgccggtatgtatatggatgtatatatcatattctattatattatgtgtttctccccccttaatattcaagttgataatattagtttaatgcgaatctcaaatctcgaggcatttaactgaatacgttttgcaatagacagtgtaattattggtttactttgtctgaattggagcttgatctgagctcaactggcctttaaagatagtatcatggtacctgctttgcttgagctgaattttgtttaaaaactggactagttgctcgtttagtcgactgcatcatttaaatgtgtgatatcaagatctcaaactcatattgttgtaatgcattttcgttaattatacattagctggcagttaatgccttagccatacaaattggtctttcattagataaaagctaatatataattgtgagaaacaaattccaactagatcattagtactaactttagcagtcaatatgctttggaggcaagcttttagcagacaatatgcttttgaggacatatatgttcttttcatttgcttacaaataaagatgaatccaggtttccggcatc

SEQ ID NO: 78694 - DNA, 746 bp, Citrus sinensis
  Intron number 1 from transcript orange1.1g003434m (locus o range1.1g001964m.g) derived from phytozome v7.0 (chr-ID sc affold00005; pos 902425 to 903170)
acatcagatcatcactaagaacagcttttgctcaggtaagtctttgttttcttctgtagcggacacaggcttctctactgaaaagtgatcaaacatgctacactttagattttgtgaatccagtacttatatagtatgactgtgccctccatctattttttgtgcataaagtactgaattttgattcatataaacaagatgggtctcgtagtgcagcaaggcaatggattctagttaacattctttggaaaatgaggtttttagaaaatgagacaatttttattagttttcattttcatgtccaaaatttgtcaatatgttattttcataggagatccctatgaaaatgatgctttaggtgatgatattggtgtatagacttaattggactgagagaggctcagttttctctctattttttttcctttttaacatgtctacatccacaatattttatgtgtgcaagatgcgtgaatgccaaaacgtttgctgcaggtcaattagggtgggcacagctggcaccaggtcaacaattttaaattaattctactccgagctagttcaatttagaaacatcaatattgcttagatcaaaactcttcctttagttaaagagcattccaagatctggcctaaaagattgcacacttgagaataatcacatggataacatttttatttcttagtattcatattttttgggattgaataatgattttagacatgtttggtttctcttatagaga

SEQ ID NO: 78695 - DNA, 490 bp, Citrus sinensis
  Intron number 4 from transcript orange1.1g015914m (locus o range1.1g010411m.g) derived from phytozome v7.0 (chr-ID sc affold00003; pos 3259694 to 3260183 reverse strand)
ggagaagcagaggaactgaagcggttgaggtttgttgtgcttgaaagctgatgctatctctctctctcattcttttctttttccttatgatatcctatatttaagtgcacttttaatctattcttgttaaaagacacaaataatagtcaggttatatgtcatagccaaaaaccagaaaaaactctgctgtattatacatgacattgtgaattgtggtaactgtggaatcgatgatagtcaacaataatgaaattcaggctaattttgggatgatattgtttctggtttcatctatctaagtcatttaaattgtttaaacttgtgctttgtccaaggaaaaaatttaattccaacccaaaggattttattttattttttttcaacctgtcctatgtatatatcaaaagatcaaagtaatttgtgctttgcgccatgtaattttggagattatatggcttgattttcattgcattgcctcattttttcagat

SEQ ID NO: 78696 - DNA, 1019 bp, Citrus sinensis
  Intron number 1 from transcript orange1.1g015914m (locus o range1.1g010411m.g) derived from phytozome v7.0 (chr-ID sc affold00003; pos 3261033 to 3262051 reverse strand)
cgttgttcaatctccccctcctcttgttccccctagtgagttcgcttcttgtttatttgtttagtgctttttatttctattcatgaaagttttctttttatatctttttcctttcgttttggactcagttaagtggtgatgctagttatgaatttttattaagttgaaattttttgtgcaccattttcggttgtgagcattcatcatattcagttgtttactattactaattgggtgggcaaaaactgacttattagttgataagtgatcatattgagatatggaacagggataattgaaggttaatatatttgggtgggtgtgttttgaattatgagcaattgttatgtgttttaagagtacataatacaggatattttgtttaggcaagtacatttatagcctcaatgtggtggtcgtggcattcggggcagcatagtgatgattatagaatagctgattatggtctttacttcaggccttcttaagttttgagcaattctctccatggattagaagttggttttagtagttgcgaaaactctgaaagagctacaagtattaggtggtttcagtattttctcttccatttcttaggtggttgctagatgcttgatcagtaatgtccgctatgatagtttagtgtcttcaaatttgttataaagcttttgacaaaataacaaagataaaattaatctttataaagtaaatatctctacaaacatgaattttatataaataaaaacatgagagagatctaagttattgtggttgtaattgtaaaatttctcaagttcttgaccttggtttcataggagaaagtcaagaagatagagcactagaatcatgtaattttacttgttctcatggtcatttactgatcatctttaggtgatacatcactagaaactaccctaatgaccgacttgcaaaaatggcttttattatcaaagacacattttcattcccaactctggaattgattataacaccttgttttgcaggaaattatactagta

SEQ ID NO: 78697 - DNA, 591 bp, Citrus sinensis
  Intron number 1 from transcript orange1.1g005431m (locus o range1.1g005420m.g) derived from phytozome v7.0 (chr-ID sc affold00005; pos 1060437 to 1061027)
aaggaagcatagctcctcttcctgagaaggttaatttttcctttttcctttcttttgaaccattttcattttttttttcaaggaaaatgccaaaaaaaggggaaagaaaaagggaattaaaaaattgggtaaatgttcagtgttatttaatcttcaatttttttgtgagctgagagctgaacttaggaaaaggaaagaaaattttgaattttgaattaaaggttccttttgagggtttatttggtttggcattagagggaatgtaggagatgaatattgaagttttatcttttcagttttcctagagctgtctttgaaattgtagctgtagttgtaatttgttttttgactgctagcattatacatctttttacactgtatcacttgtctaaaattgtgttatggattatttatggtatttcttttctctatctatcttcttaattgttgtcgtgaataatgtcttcagttggcaggttactgatttcacctgtaaagatgcgaaatgttgttactgaattctaaatacatttattcctttatttcatgataacaggtccaagttggtggttccccagtgtacagaataga

SEQ ID NO: 78698 - DNA, 677 bp, Citrus sinensis
  Intron number 2 from transcript orange1.1g028412m (locus o range1.1g023589m.g) derived from phytozome v7.0 (chr-ID sc affold00003; pos 1819245 to 1819921)
ccattgcaggactgaccaagcttctcaggtactgtgttttctttacattttctcaatagctaataattcctcccttttttgtcattttcttttcccgcacgccactccatgcctgacgcgtggattatccaccgtatccataggcctgggccccacgttgacgtgtttaggtgtcattagttgacggttctgatctttcctctttcatttcagcgagaaaagcgacctcgaaggaatcgccgctgcgaaaatcaagcagataacggccgatttagaagcggccggttcgagggacattgacccggccgagaggatgaaaaccgggttcattcaatttaggacagagaaatacgagtacgtacattaaaataactacacatacatcaaaaagtttagaacgactactggaaccttcttttgaactctcacttgaattaccgtaactgcccttttcattgacgtccatctacgggggtcaataggtaaaattaatgaaacatctcacaaatagatggagagtctgtgtttaattgggaactgacgtggttaaactatgtaggttatcgccacgtgtactcagctttttcagaaattgttcagccgatggacgtgatcactgatgctttgccttgtttttttcaggaagaatcctgatttgtacggtgcactggccaaag

SEQ ID NO: 78699 - DNA, 1040 bp, Citrus sinensis
  Intron number 1 from transcript orange1.1g038605m (locus o range1.1g038605m.g) derived from phytozome v7.0 (chr-ID sc affold01626; pos 7942 to 8981)
ccgcacatctgataatttcctaaccttccaattaggttatagcaatttaaatataaataataaagcatgctaaagctagcattggtgtatggctgagtggtgtaaaaagtggatctgttttcatgtattatttattctctaaaacatatttgaatacaattctttcaaaataccgaggaaatagcacatgaaatcagaaatattttattgtgatgagaattcatatactcattgtagtagaacatataaaatagactataaatttattattcttcgaaacaaacttgattataattccttcaaaattaagtttgtcattaaatgatttctcaggagccataccaaaagaaatcgggaatttgaccaaactcaaggaattatctcttggcggtaacaggctccaaggtgcgcatgatcacaaagtttaattatgaaaattgttgcataagttatatggatatccttgataaccgcagcaagcaaacaaaatcaaataaaagctaactgagactcgaatatcctaaaccctgaaaaggaatggtaatggtataatatggattttgaaggcatatttcaccggactcaacatttatggttaatttacaactctttgttggaaagtctgagaaattgctttatattaggggtggggaaaataatgctgggccacgaatttcaggcagaatccagattgggcccaattagacttatagctcagctctgtgtagatatctgggcctttacaaataattaatgggccaattaataataataaataaattgagaagggtgtgagtgaaattagatatgaatgaatctgccaatgtatgtacacatttttagcaaaagaaatcgggaatttgaccaaactcaaggaattatctcttgaccgtaacaggctccaaggtgcgcatgatcacggagtttaattatgaaaattgttgcataagttgtagtatgaataatgttccataatacagtttagacacgttgattaatttgcaggcgaaattcctcgagagtttggcaatcttgccgac

SEQ ID NO: 78700 - DNA, 792 bp, Citrus sinensis
  Intron number 3 from transcript orange1.1g023854m (locus o range1.1g023854m.g) derived from phytozome v7.0 (chr-ID sc affold00003; pos 2694446 to 2695237 reverse strand)
ttaaagttgatactaactctaatgtaagtctttgcctgttgtttgtttcataatcgtgccctgtctttaaccgtgagctatgttttaattttgtgttgtctcagctgcatattacattttgtaccaatttatcaaaccagcacttatttgccaaaattggaatgatttagtgtaagaagtgttatctatcaaaatgtgtgtgtgtgcacgtgctagaattaggctcaggttgttgttgttgtctggcggctgtgctgccaaagcaagttgccgaagtgtatggtaaacacttatcgcctggttttgaagcgcgggcaatgaattattatctaattttgtaagttagacatattaactattcaatataactttgaaatgaaatctaccaaactaaaaggtcatgtttaccagtacctatcaactctcactttgcagttagggtttccattccatgagccatcaccaccagaataccaaaagaaggcctaatttggtgagagagaaatgagttgaatgattaggtttggttatattctctatggtgttgaggttctttgatattgagtgatggaaccttgtataagtttaactgaaagcagtgctcccatgtggatggatttatgcttggttctttccctcatttctgaaagatgattttcctccttgcattttgtgcgtatgtaaaatcatatccttgttttccacaagcaatttgtttcattcctaatcatataatatctttttcttttcttcccattgatgatgtgtagctttttacaaccatcactgtcg

SEQ ID NO: 78701 - DNA, 969 bp, Citrus sinensis
  Intron number 1 from transcript orange1.1g022662m (locus o range1.1g019249m.g) derived from phytozome v7.0 (chr-ID sc affold00017; pos 636910 to 637878 reverse strand)
cccatcgaactcatcttccctcttgaaatcagaaggtaccttcgcgcgatcatcatccatccaaatccttcttgttatgtgcttgattgaactcaattttgttctcatttgatgtacgtatgtttactattttctgcttttttttttgggcgaatcgtcagccttaattttgtacatttctttagtctagggtttgtttaatgatcattctacatttcatcacaatttagttaattaaattagggttttggtagttcagatcgttgaattgagctttcaagtgtgtaaacttttatttatcttgtaaattagtagacttttgacattgttgttaacgagaaatcaaaattttgaattttttttttttcgttttcttttgatctcatataagtgatcataatcgcaagcctttggatatctcacgatactgaaaatgtgttctatttatccaaatcccatttattcagctggtattagtgtattttttctgcttacatatccattttttaactcgtaagtgcagcttggttctgatttgtggtttttaatgttcagttatagtgtggctggaatcaaataatggaatatttgaagactagaaattggaagttcttacactttttccagagtttcaatgattataccttttgatatttaggaatctaggtggacagtgcatagaatacatagattgaaatgttggaaaaatgttaaagtatggattgagatacaatcctgattttataatcttatcatgcttatcaacttggtggagtttgcaaatatcagctgcatgtagatttctttgaatatacagtgggttaatttttgtgcaggcgtttctcaaaattgttatgtataatcattttattactgtttgcaaagataattgagtattgattgggaacaaatttgttaatttagtgtttagaccactcatatatatgtttgtatcatgtaggataggga

SEQ ID NO: 78702 - DNA, 928 bp, Citrus sinensis
  Intron number 2 from transcript orange1.1g048389m (locus o range1.1g048389m.g) derived from phytozome v7.0 (chr-ID sc affold00065; pos 165318 to 166245)
ctgaccccggttcttcatttcttgagctttctcaggtttattatttattagtcttgtaggtgctggattgtagtaaaaataatcaattctagagttttaattgggcatgcctaaggcttgaagtttgtgttgataacactgcaaattccaattttggttgccatcttggtggggatctttgcttgggattgttttgattgttaaagtgcaattactgttttgttgggttgctagttttactttaaaaatgcaatactttattaattagaattgtataattggtttaaacttggagacagtcgtaagtctgttgattgaatcaattacagaaattgttaaacgaggcatgcacttctgttatctctgttgtaatctttcttatgcttaattcctgtattgatagaaaaatggattaaagcataccgtataggtgcctggaacttataatgaattatctcaaaccatctgcctggatctatataatttcttttctgaggtgagtgttcagggaatttggactaactaattagcaaagccatttgttttatccaattgaatgcaatttagaatatatatatacatgatgtggatttgaataacagaattatgaatcgtatgaactagctaatatgtatatttctcatggctagtcaagaggctgagagacattgggagcatgtgttaatttgatgcaagggctgatttctgttttgaaacactctggtccaattaagtacagcaggctattaacactattagcagtggtatgaatattaaaacaagcttgcattgtcgactcatgccaagaaacaattcgcattaaatgaagactagttctcactattagttgattcaacaaaatatgttgcttgctatttggtacattgcagtatcttatcatatacaccgtatataaagcttgcaggac

SEQ ID NO: 78703 - DNA, 411 bp, Citrus sinensis
  Intron number 1 from transcript orange1.1g021740m (locus o range1.1g021740m.g) derived from phytozome v7.0 (chr-ID sc affold00023; pos 596365 to 596775 reverse strand)
gagagaggatagtaatcagagctgtttcttcaccggttagtttacgacatctttcaagttttcgcttgatgttttagattctaggtgctgctattttatatctatttggttgcttagaagaaaaaaaaaattcaaattctggggttacgattattgaatttcaattgatatcgattcatttgagctagtgttgtttctaagtgctgtaccgaaaagaagttcaaaattgatatatatgcgtaaaagaatctcctttagttgaagttttagagttaattaaattaacactcaagagaaagaaattcaatttaggttttcgttttgctaattaagtctctcgaatggagggtcttaattattgtagtgtgttgttcaggaaattgaagttttgttagaagaaagaggtgaagt

SEQ ID NO: 78704 - DNA, 974 bp, Citrus sinensis
  Intron number 2 from transcript orange1.1g016658m (locus o range1.1g016658m.g) derived from phytozome v7.0 (chr-ID sc affold00310; pos 172833 to 173806 reverse strand)
gctcctccatctaaaagagcttcttcacccccaaggtaatcttgtaattcaaaattgtgttagttgattttaaactttggttttcaagtttttttattaggtttagggtgttaggtaaggcagtttttgcttagctttctagttgttgttgttgttgttgttgttgttatcttttagaatgtgcttttcagtttacttgtgggaagtatgctttgtaaaaatcacaaaaaaaagtcgaagaatagactaatttaggccttagttttagagtagtcttggaaacttattaaatttgctgtgaggttactgagcaaatcttttgcgagcagctatttttcctctcttgctataaataaaaatgatgctgttttgcttctagatagctacttgtaaatcaaatggtgcttttttctcttttctttctgagagaagaaacctttaagagggtaatcgagtgatgcctaagcctttgtttttttgtgagtttcatattcatagtttaggaataagactgaggagatactagctacttgttaaacgtatcattagttggttaagtttgacatttcactgcatttttaaaattccttaatggtgtgattcactttcctacttgctatgtcatcatctattaactgtgtcattttctattaagttattcattaaatttgaagtaattattagcctaggcaatatattttctcatacaatatgggtgggttactgtttctttgcatagttttcatgattttagatctagattgtgcatatgctagaacttgtgttttattcttaaaaatgttttgctgcccccagattgtccaggggagttattgatactgttcaatattctttggcaatcatgtttttgcttgagttcccatgaaatcaatatcgatccacctaaatgttcgtgcttgaattcttacattttgtctgtactggaactgatttcaggaaagcttccacagaaa

SEQ ID NO: 78705 - DNA, 680 bp, Citrus sinensis
  Intron number 1 from transcript orange1.1g018565m (locus o range1.1g018565m.g) derived from phytozome v7.0 (chr-ID sc affold00023; pos 839363 to 840042 reverse strand)
ctgctatcatcaaggttagtatttgattaattgccggtaatatttcataataattcggaagattaattgattaaaacatgtttattaatgaataattaagattgttactttagggtgatttctgtaactatcgtgtttcaacttaacttcaaaatggagattcccaatgttttctatctttaccctcaattacttttaattatagttttgataatatattgttactcctttgacatcatgaaaactctcggagaaaaactcatcccaaccacaaaattaaataataaacgtggtgttacaaaaatatggagagataacgataaaagtcgaaattaaaatattaggggtggcgattttccatttcaataatatgacaaataaatcatttagtaaaatcaggtatggagacaaaattaaaaataaataagtaatgaagatatttaataaaaacaatctacgcttgacaacaattgtatcattatttttaaaaataaattttcatttaaaatcacactacctcactcccaaacaaacagctttttgactgttattagttaacttaatagaaaatttcgcatcatgatgttgttcttttattttattcataaatttatttttttcttagtaagtgaaagtgagttcagccaactagtaattttataaattgtagtgggttttgc

SEQ ID NO: 78706 - DNA, 881 bp, Citrus sinensis
  Intron number 2 from transcript orange1.1g001969m (locus o range1.1g001969m.g) derived from phytozome v7.0 (chr-ID sc affold00050; pos 657281 to 658161)
acgtcgtgtacttcccacaaggccacagcgagcaggtgccgttccgtttcttcttttctcttttcattacattttgtattgctgcctgataataataataatatcggttgttggttgggtgaaataataataattacggattagattgcaacgatcttgttaaagcgagcactttggttgtttaagtaaattaccattttaccctgagtttagatggtgttgcctcttcaactttctaactactgctgagttgctagtaacgtgttgttgactttttcctgtttcttaaagtcaaccaattgatagtgtaattctactatgcgtacaaagtgtgtgagtgatatactgatgacacttgtattagtgtgtagtttgtattgttgttacttgttatcattaccatgtatttgtacatgtacaaactattaaggacaaatttacataatatgagattattggctgaatgaaaactcaaagtcaaactcaaatcataccaggtcaatttatatacaatagttttgtgtctagcatttattattcattatatatttcttgaatttctttttcatcaaaatgtggaaaatcttactcactgtcatgctctactctcctccaataatagtttaagaattcccaaaagttatgtattgtggatagctttgtttaccgtcgctaaaccaggactaggagggaagaggttaattattacttcttgttccagttaaagctattgctatgctctaagcattaaacactgtcagctaaaagactgatggattgttgtatatggatgctttgtgcctttttgttggtgtcttctttttggactaagttcattctctgacttggattggaatttatggctacaggtggcagcatct

SEQ ID NO: 78707 - DNA, 667 bp, Citrus sinensis
  Intron number 2 from transcript orange1.1g000936m (locus o range1.1g000933m.g) derived from phytozome v7.0 (chr-ID sc affold00237; pos 231374 to 232040 reverse strand)
tttccacaagtctcagcccttgttcgtctctggaggtaaatgagatttttccgtttacaatgttgtctgattgatctgtggattgaatttttggttgcagaagatcagtactgtttcttttagtggcatattattgaattttgcaagatctaataaggatattaaagaaaatgcaaatgctgagtggaccttttgacttaggtgtttgcaaatttggatatgtttagaattcggcatctggattcatctacggatcttattcagaaattggattgtcttgaataaaataacagtgtgtcattggtctgtctttcttgatctaacttgagtgtctaatttaaaactagtttaacatgcatcttggttttcttgtattgtcaaacagtgaaaaagataaatctggtctgttctggagatgaccaagttgcttggcttcttttactaacgattgaagtatggatattgaatacattttttggttcaatcatgcttgtcaaatgattttagatggataaaccaagagtgtaattgagcctttgtgctctatgctattctggctgtgacactaatgcatgcaaaggattgtttgtgcagtactgattctgttattcatctctttagtaaaaagaaaatgctgcatgcaataacttactatcttctgtaggtg

SEQ ID NO: 78708 - DNA, 188 bp, Citrus sinensis
  Intron number 2 from transcript orange1.1g013163m (locus o range1.1g013163m.g) derived from phytozome v7.0 (chr-ID sc affold00003; pos 4371002 to 4371189)
atttagggtttctggcaatttttcgcttaaaagtaacttcgaattattcttttcgactattggatttttatatattctttagcgaaaattttgtttttatgagttggaatgttatgatcgtgtattgaatacattacatgtctggaattgcagctaataatcatagaaactggttgctgctgaggctt

SEQ ID NO: 78709 - DNA, 1037 bp, Citrus sinensis
  Intron number 3 from transcript orange1.1g014539m (locus o range1.1g012870m.g) derived from phytozome v7.0 (chr-ID sc affold00310; pos 195630 to 196666 reverse strand)
tatcacatattcgtgaggtggactccattcttcaggtttgtctgtcctcattcatatttatgtcgttgtatggttgttttcgactttgcatccctaaacaactgtaatttctttgagtctagcacttgttattttacttgatattggtgatcctctaattcaatgggggagttcattaggaatacaaggaagcattgttaaacccccttattttgatcaaaattggtggcattgatttacttgttctaatggcatgtttctaaatatgtattgccgcagcagccctgttcatcttccaatggtcataagagattggtttatcggtcctctttctggttttagaaattttatctctgtccttcatcctagtcttcacttctgcagcaaacttgtggtttgcatatacttgatttatgttgattgaatcgattaaatcgttgcagcctccctcagagcccttttagcgaaaattgatttattttgagactcctatcgttaatgcaaatcattttttaaaatctttagacagatctttctcctctttcaaagggtttttatgcagaataattgagattgagcaaaatttttaactgcgacaatatttagacttgatcttcctttaataatccagaaaggatttctcacctaaaacgacaaaaaatcgagctagtttcaaatgtttgaactttttggagaaaaggcaaattggaagaagaaaagaataaaatagacttcggttaggtttcttcagcatgagaagcattcattgcatagattataaggtgtacaaaaagtgaatcatcactacatggctaatgaattttaattcatgaactatggcttttcttctctatttcttatttgcattcaatcattcgtttcaaattcaatcagataaccaatcacttatgaatatttaatctcttcagagaaaatcatgcctgataaattcttcttaagtttgttaggaaaatttaagctattctttcatagtatatgttattacaggtctgttgttctttctttcaggttgtgcg

SEQ ID NO: 78710 - DNA, 891 bp, Citrus sinensis
  Intron number 3 from transcript orange1.1g021025m (locus o range1.1g021025m.g) derived from phytozome v7.0 (chr-ID sc affold00173; pos 33840 to 34730 reverse strand)
aggttcagtcctgtcttatgctgtttttatttttatttttatttttttcaatttttaaatgctaaggtaaattcgtagtgtattgatcatcttttacttactcaagagtattgtgtttcttatagaagaagtattgttgcttaatgatttccaagaatcataaatataaaaattcatttattatcttttgattccctgcgctagagataagtttgatcattggttgatgatatagtgtcacactaggaaccacatgtcatattgcatttgacaatgttttgttgatacacacaaaaatcatatgtaattattaagttgattgaaaggtactcaaaatggttggtaaaataatatttgaattaatagaatatttcaacctgcattacaaatcttcctttctctccagaattattttaaattgtaacaaaaaggggtgagaataaggaagccactatcaagaaaaaggattacaattatcagaagatcatttgattttgtttatactgaaattaatgggtaacgttgcaatattattctcaaaactggcaagtgattgactgctgaagtttagctgttggatatgactcattttaatttagacgggaagaaaaatacttgtatcactggtaaggcaattcagattttgagattcgaaccatcaaattgagcatcattatatctggtagatatatagaatcaaaatgatagaaaattaacattttctgcttctctttctcccaaatggtttgatgtatttgtcacctagattagtgcaatgaagtccttgtatcggtattatgtttctctatttattattaagttttttagtatttaaggttcatatgtttgtttgcagaggcctaaccaagtacctgctgaaacgagaaagcc

SEQ ID NO: 78711 - DNA, 346 bp, Citrus sinensis
  Intron number 2 from transcript orange1.1g021487m (locus o range1.1g018607m.g) derived from phytozome v7.0 (chr-ID sc affold00011; pos 2137378 to 2137723)
tgtcttttcacattctcttgtgctagaggtaattattaaactcattaattaaagttttcttcaattttcttttttatgttttaactggttaggtctaccatagtggtatcgatattaattaatttattttaattggcttgttaattaattaattaattattgggttgcattgcatttatgtttgagagagggatggatattttgatgtactggggatcttagctgccttattgggcttatttgtagcttgagttgctagggtcaaattcttgcatatcattaaaacaatgttttgttcccgtttgttgcagaacttagggttaaacgccatcatagtccccaggtt

SEQ ID NO: 78712 - DNA, 1001 bp, Citrus sinensis
  Intron number 3 from transcript orange1.1g005211m (locus o range1.1g003582m.g) derived from phytozome v7.0 (chr-ID sc affold00003; pos 1494913 to 1495913)
ttccagtccatctgttcatcagcaggaggtaccttctagttattcttctgttacaggtaaaaattcactagcatattgaacttgcatgtgaagcttgtgctcaagaactgcttctatggacctcatccttttttaactaccccattttttatttctgttgatgcttgtcctcaatgcgacctttgctggagctatatttcggataaagttcaggatcttcagcatttcagacatcaaactttagcatatattgagtcttcttaatttgctttctcaattcagtccatttggtttgggcaaggtcattttctcttttagtaagttgatttggttattggaaagtagttgaaaagcaccatcacattcgtgaaatgaaattgtgactatttttttccttattttttattttttgagagtccctgtgtgataattatatgttacttgctctgtgtgctgtgccggttggccttgaatgacattttatgggttttgtgacacatgaatgccccatctctatccagtgcatagatatgcggaattagaatttgacccattgtttaaaaactctcgaattatggaaattgctcaccattctgtgatgcctgatgcctgattgatgccagctatttctgtgatagtccatgcacaaaggaaactgtgatacctgattgatgtcttattgagggtatataatagtctcattaccgtgtgtgggaggcatggcaatatcaattggttgctgatatattttgcctgtttaattaactacttttagattatccattgctgctgtaagtaaagggtagacgcttgttgcttttgtttgattcccagaaacttcagagatcaaattttgtctgcataacatctgaaaagcaaacaaatagtgtcaatttggattcctatgtgcttaagctttggtttattttatgtcttcgacctgcagttttgactctttataccgatggcaggaacagaagagaccgcatatcaaaaggagc

SEQ ID NO: 78713 - DNA, 846 bp, Citrus sinensis
  Intron number 1 from transcript orange1.1g007623m (locus o range1.1g007617m.g) derived from phytozome v7.0 (chr-ID sc affold00074; pos 190129 to 190974)
gcatctgcacatttaaaaaagatcgagataaaaaggtgatcacaattatttctttaatgcataatgtttttaaagtgaaacacaaagctattacgtacgtttaaacttagtgggattctcattctcattcgcattccaccaccaactcaacaaaacaatgtttcgtataattagttgttgctcatattcacatattctttagccattggtgattggcctttcactctctcaaatgctttgcgggtcccttacactaaccccatcaaaagccattactccatttgacatgatcagactaatcaaaactgctttcttcgacttgagtggtgccattgccaccaccttttcttctttattattgctgctggggttgcatttgcatcattcatggctaaatcaggtatttctgattcatcatttttgtttgtttttgcattacctgcagttgctattatttcaagttgaaaaatcaatcagtcttggcttgcttttctcagtactatttgattaaattcacataaacatgaaggaaaagtggatgctttgtgtaatgaaaaaggtgggatgatatgctttcaatttgaagattgtatatgttgataatgttgaatgctgtactggactaagaatttttatttcaatctactgattagttttatgtctaagtcttttgagtttcaatttcatttaccatgcataaggttacaatctattaaaaatgcctttacgacctcgttttaaatgaatagagatgttaaattcttcatcttgcacatttgtatctgaaattcatttttttttctttaactaggtattacttttcttgttctattttgaattcttcaa

SEQ ID NO: 78714 - DNA, 700 bp, Citrus sinensis
  Intron number 2 from transcript orange1.1g007623m (locus o range1.1g007617m.g) derived from phytozome v7.0 (chr-ID sc affold00074; pos 191131 to 191830)
ttgaaggtagaataaatcaaaatttatgttctaatcttttgcaaaaacggggttctttaagtgtaattaattggaatgtcgttgcatgcatgctgtattttgagaaatataattagttctaatttattagacttgctatggctggctctatttcggagcctctggattttgtttctgtaccttctctgcaaataattattctaactcttgtctggctaggccctagcttcttctttgctgatatctaatgtatttgctctttcttcacatatgccttttgaattattacgtttcctataatttagcattggagcacaggttggtgagcgatcaagagtgattttgttgatgccttaaagaatggattgattatgttattgaattctaatttgtacaggaatagaatctacactaatcagaggaatttggctagtaccaatgcttttgagttcaaactaagtacttttgaaaatcttaaataaatttctgagacaaagtattgtttatttaccaagagataatgaaagcctctgcatagacggtcagattgatatttgtgtgaaagattgtatggattattgtttccttttgggagtgatttgtagccgtcttaaaggttactctgaatgactaacaacttggttttacactttgataatgatcaggtgaagctttgattgaggttttaaaggctctcaat

SEQ ID NO: 78715 - DNA, 697 bp, Citrus sinensis
  Intron number 1 from transcript orange1.1g004957m (locus o range1.1g004975m.g) derived from phytozome v7.0 (chr-ID sc affold00023; pos 1218209 to 1218905)
ccaaagtcaagttcttttgcaagaatcttcataaagtgagtcactttcttttctgttctgttttatgtcatatttagttttgatatttctgagtttgaaaccactgagtgaagtttagcttagcgtttttggcttaaaattgcttgtttatttcaatttatgaatcctgacatcattccagaattaggagttttggtgcttttgagaggggtttgtctcatattttcttattttggttaataaatattgtgggtataatacaaggttttctgtggataagtctgtagcttgctgatgatttattgcttttggaactccttaaagtcaagcaaaaatgttaggttctttcagtttatcgtcaaaaagcttttttctctgatgttacaagaattttagttctttgtgattgtaatccaactatgctttatgttttgtatatcagttcaatgaaactgtggtaggtattctgcctgctgaaatgcatttctgattgcagttcacaaaaacacatttttgttgacgatgtttctgcgacccggacagattggttttttggatactggcaaaagcaatccttcctggaagttcctctttttgtttttcatctttactgtgctattgtgttttggttcatgataccatttgacattgggatttactagtctttgttagatacaaatctgaagaaaattcgata

SEQ ID NO: 78716 - DNA, 1057 bp, Citrus sinensis
  Intron number 1 from transcript orange1.1g039420m (locus o range1.1g039420m.g) derived from phytozome v7.0 (chr-ID sc affold00017; pos 1494765 to 1495821 reverse strand)
ttcgtcgacatccctcctaagctcttaatctcgcggtatatttgttttcacttttgctttttttttttcagattcttttgttttatgatgcgttaccggcagctgtttcaaatttattgttcaatttaataaacctcatcgccaattttatctaaggatatggagtaatatgtaaagaatgaaatgcaaaggctttatttctttctttttgtttagaattgaagtttgttttatttggttattttgtcattaatggatgtgctttgaataatgcatgttgattaaaacccttggaagcagcattaacaaaatgatctgattatgtgttttatgctgcagtattattcctttgttctctgtaaaaattttgacatcagttgttgagtcttagatgcctccgtttggatttagagaagcaagaaaagcagtaatcaaatgggcccccactggaagccttaataaatatgctaaagtatctctttggacacgtttagagacattattataaaattgagcctttctcgtgttgtatcagaggtgccttcatgtgaaataacttatgatcacaaaaaataccaagagaacagatatgcttagaaatgatatgataataaccactacacttgtgagaaatctctttcttagatataatatttttcttcttgtgcaaattacagagagaaactgcttagaagacattgttgtactcccagtaagccattactgtgctttttatgctgggagacaaagcttgagtctgttgctttatcattgtgatgctttggcttcaaagctctgatctatagttatcacattcttactagatttgttcaaactgtcccatggaaaattgaatgattttcatgtttctaaggattttaattgagttcattgttcctttttaggcagattttaatgaatcacttaaacctttccctaaatgaggacatttttaggatcttattcctgttcctccttttaattaagggtctttttttcttttaaaatttccgcaaggacagaaacccaaagctcaagtcaattccaaaactggcca

SEQ ID NO: 78717 - DNA, 807 bp, Citrus sinensis
  Intron number 1 from transcript orange1.1g000106m (locus o range1.1g000068m.g) derived from phytozome v7.0 (chr-ID sc affold00005; pos 340778 to 341584 reverse strand)
gagtcgaggaggctgagtatcggtatgtctatctgctattttacggttctgtatgattttgcttattatggtcttttcaaatagtgaagaagatccgcctactatgatatgcatatgtttgagttttcagtgtgttgtttatgttttgctgtatctgaaagttgagagtaggaagcgagttgcattagggtaataaatgctgtgaatgttttatgtatgtatatcccgaacgctttcccattttcagtttggtttactaacctgcatttgtatggtattttagaggttgcaatttgaaaattgtgaacgatatccattggcatgataatgaaagaatactctcgagtaccggggtttaggagaaagtagttctgtcttttgttctaaggataaacaataacgcagattggttcataaattttgtcgctctgtggtcgtcctatttttttttgggaagatgtcctttctgagctgtttttgcatagtttgattaggaggctttattaacagatctcgttaatattctgggtttacttgccatattgagaaaattatgttattgtgtctatatatttttactccttgaagtttacaaatgatgtggacagtttttgcatccttcattttttttctacacctgctatatcgagaaaattatattctctgctccatatagcttaatccatgtggttaaaaatgatgtggacagttttttcatcctttaatttttcctctatttatttattgctgttccctttgatgtttattatagtacggttttagaggatctccttaaaagggttttct

SEQ ID NO: 78718 - DNA, 1009 bp, Citrus sinensis
  Intron number 3 from transcript orange1.1g009628m (locus o range1.1g009628m.g) derived from phytozome v7.0 (chr-ID sc affold00173; pos 191199 to 192207 reverse strand)
cgctgaagcagttcttcggggagctcaggttcgccgattttcagcttttcatctgctgtctcaggatttttatgtttttcatttttgcttgttttatcacttctttttgttcttacgggttctaccgcgcttcttccactttctgtagggatttttgctagtgtctatgaatattattatttctatatattctttactcttatttcctatcttactttgttagatttcttctgcgaaaactccgtgcttctctaattttgtaattattggctatttccttctgtgagaatcatcaaaaataatctttttttgaaatatttgtgttggctgctagtctgcagacagtttctgtgcattgtctagtgggaaatgaatagattttaacggttgcataagaatgcacacgactcatatatgcctgcatactcattcgcattgccccccaccctgttgtggtgtgtttggtgtttgggttgattttttttttttgttggggttgggggggggggggggaagggggttgtggtgaagagggagggaatgggggggaggataatagataaattacaatcatcagtgcgtcaaaagcatcaattctttacacttatgaaagctgatgaagttgtgcagatggtgaagaattttgttaattcctcaacttctttccctttcgttatttcttttgtcgttttttgatgctaagttgtaatagtcactagtaattggaaccaggatttctgtttaatctggattctttatgcattgcggcttttgtgatgttttatgttttattactgatgtgtgcaagcatgtgttgtttgtgaggttggggatttgttgggtttcatagaagtttcactgcaataagaagttagttttaaaggtctattggttcttctttatgggattacctcttattgttctgtagacaattgaagtaataatgactatatattcatttttctcttttatttcgttaatcttactgtaggtatacgttccgggtgtg

SEQ ID NO: 78719 - DNA, 238 bp, Citrus sinensis
  Intron number 1 from transcript orange1.1g009628m (locus o range1.1g009628m.g) derived from phytozome v7.0 (chr-ID sc affold00173; pos 192545 to 192782 reverse strand)
gctgatcacttctctcgcatttctaaagccctaacgtacgctttctttttgttttctcatttctacttttgagtttagtttttgcttgcgtaagtatgaatgaacatttcttctgaacttattgttaagacctgcattttagttgatatccttgttgattagacattgttattgaattagttttagtttcatgttataattaggcgtccatcgtgttactcttgtattcgtgtgaaca

SEQ ID NO: 78720 - DNA, 602 bp, Citrus sinensis
  Intron number 1 from transcript orange1.1g033539m (locus o range1.1g033516m.g) derived from phytozome v7.0 (chr-ID sc affold00061; pos 138364 to 138965)
gtagtaagtagccaattgtattcttctcatttcaggtgagggtttcaagaacaagaaaagcaaaaataaaataaaataaaataaataatcagctgctatattattaatctttttttttttttttgctttattactactttagtataacgttcgtgttagattctgttggcagattctcctcgagaaagggggaaaaagttcaccttttttttttttgggttcctcttacctgtacttttatctttttcatttttttgaaacatttatccctttttcaggtaagattttgttttttctttcctctccgcaaaaatcccagtttcggttggcgtgttttttttttcttttttaaatttcaaacaaaagcaaagaatttcattattattattattactacgaaaattttgatgagtgattttgatttggtgaattctgtgatgggttgcatttgatttcatctgggatttgctttattttttgcagataagctattggtctgtgaatattaattacatttacttacttttttttttttccattgatgggaatgttgatttcaacgataaggtggcggtgaaaggttgcgtcttggtcattgaaga

SEQ ID NO: 78721 - DNA, 911 bp, Citrus sinensis
  Intron number 1 from transcript orange1.1g033491m (locus o range1.1g033493m.g) derived from phytozome v7.0 (chr-ID sc affold00003; pos 739299 to 740209 reverse strand)
cgccaaattcttcactgcctggtattttttttttcttccctttctcttcctctcaatcaattgggttgtttaatttcgattaaccttggaattcggatctggttatgatctgtttgttggttttggatttgtttgtttacgagatttgtgattagtgccctgcttacatgtgaattaagttgtttgtgattagtgccctgctagcaatttttatgttttaaaggtggtctttattttctcgatttaatttgtttatatgattcttgtaggtagagatcagttaaaacattgtccaaatttatttatttatttatcttggaattatggctttgctgagatcttgaaatgaataagaactaatagttattttgattagtcatgaatcaaactcatgggtttctgctggataagcccgagttcttggggtggacgctgtaattcttttttcacttcagaatacggtcataggcagcttgctgaattgtggggttcctcaagtcttttcttgttactttgaacagtttttatcatgtttggaatcaataatgtagggaatttgttggttatcaattgtcttttgcaagtgagacttttctttgttttgccttttctcattttggtgctgtctaattattgcaaaaagcacctttttcctgggagtcccaaccgtctgtttcttgcgaaatgttatgcaggagagaatccgtgcctaggaaactttacctgataattatgcaaatggggaatttctttggtaaattttgcgttatgatcttagtaacttttagatagctactttcctatgtgtatatgcttacagctatactcatattggtgaatcttgctttttgtaatttaaattatcctgagaagcttaagctttgctagacttgcaggtacaaggaaagacg

SEQ ID NO: 78722 - DNA, 546 bp, Citrus sinensis
  Intron number 1 from transcript orange1.1g025120m (locus o range1.1g025120m.g) derived from phytozome v7.0 (chr-ID sc affold00011; pos 1208215 to 1208760 reverse strand)
tcgtcaccgcctgcttcaccctccctgtcgagaaggtttcgttttttaatctttttttttcttggcggttttatttggttacttttgattgggtttttggtgattttttattatttggtttttgggttttcattcaaattcatttgcttttttgtttccatttgattaatggatcggtgattatttttagtgtttagtgacaacagatcagttgtaggggatttagggttttggatttaggtttcagggatgcattttgacattacatgtaatttctttaattaaaccctctattcatgagaattgtaatgctagattctcccttcaaattgcagattgtgactatgtgttgccattttttaatggtttattgcattagttctatgagtttcttggctgcaataaaagggttctgaactggatcttgaacctgaagcatttcgatgccttgagttttctgcctgctaagtgtattttttgagcagcctccaggcttttttgttgaagaaagtgctgtgtcttgcagatattgaaggactttttaac

SEQ ID NO: 78723 - DNA, 427 bp, Citrus sinensis
  Intron number 1 from transcript orange1.1g022748m (locus o range1.1g022748m.g) derived from phytozome v7.0 (chr-ID sc affold00667; pos 61907 to 62333)
aggaagctcaaaaggttccattcgttgctgataaggtatctgcaaaccaagcccatgttttattttgttttattttactctttattttatgaaatgggtttcttttttctgttcttgaagaattagttataattagcattagggtgataattgtttcttgtgtcagcattcgtaaccttaaaccatcagacttgttacattgaattgaatgtcaaacttgtgaagagtgtatatagttaattttgggatgttaaatgttgtattacaaaagttcaaccgtgtaatgttagagtagaatatatatctgcttgtgtttgatttcggtttgatgatgatgttgttcaagaagttgtgtatgaatctcatgcattcttagcggtgatttatcacaggaaccactgtctgcattagcatctgaatatcaatc

SEQ ID NO: 78724 - DNA, 570 bp, Citrus sinensis
  Intron number 3 from transcript orange1.1g016536m (locus o range1.1g016536m.g) derived from phytozome v7.0 (chr-ID sc affold00005; pos 593684 to 594253)
ggttagtaaattttgcgtcaaaacaagtattgccatttgattttcatttattctattctaattttgaaactttgccttcttccctttagttgtaatttccactcgagtgaaatcatgttattagttatacaatggaccaaaaattatcttttacttttacttgaacttttgagctaactgtatctggagtttttcatgtaactttgttgtaatcatttgtgaatcttgcttcaatcattttttagctagtataacaaccaatgtgttcatgtgttgtttctgcaagtgaaccatatgacataccctcattttagttgcaccagaatgtctctctataatgttcacatgttcttgttcaaaatgttccatcttcacaatgcctaattcaaagttttgatcaagttcatgtaaagaaaagcatgtgttagttttgatcatcgattttctagaaatgatgaacaactgtcattccaattcaatatgtgtattgttgttctttattcttaggctacctataatcatgctactatcttatctctataatgataattccgcttttcagatacctct

SEQ ID NO: 78725 - DNA, 964 bp, Citrus sinensis
  Intron number 2 from transcript orange1.1g029065m (locus o range1.1g027530m.g) derived from phytozome v7.0 (chr-ID sc affold00061; pos 326134 to 327097 reverse strand)
ttgaagttctgggccatcaacttcagttctctcaggtttaatgctttttcttcttctttgaatgttaataaaactcttgaaagctaagtactttttttaataaagtgcttttagattgtaatcaatgctatgaagggatgttgttgcataactttctcagataggaactgagagagtttcgtaatctgcctacttttcatttttttttttccaccaagcctcagcctcgtgatgccgtacttttaaaattttttattggtttatattaatgatcttgcatatctcttaaattcttcgctgacagtggccattttgtcgtcaatgtgttaggatcccaattcaaagcatttaggaactactgtttgggatgcatcagtggtgtttgtcaaatatctggtaataattgtattttctctttttttttataccgtatgttgtttattaatggtgtttgcatggttttcctttcacatcttgacaatcctaactcataaatagggcattgtcaagttgagtgttatgtgggtaattttatttacctaggatgtggtaagtggagttttcccaaggaatgctaaatagtgagagtggaaaggcatgatcacatccaccattccttcttaacatccaccattatttttgtgtgtgtcttgtctagagcattaagctcttggaatttttttcctatactatgatctgtatatttcctttttgttatttttatcccttcttttggttccttcagaacttagactatttttctatggaatctttgagaacttctgtgtttttccctttttctcatttaagagaataaaacttctttcttcttttaagtgttaaataattagtcatgcattccaaaaaaaaaaaaaattacatatctgtttgttccaagtttgtgaggctctctttatttggccattcaggaaaaaaattgccgaaagggaaggttttgcccatc

SEQ ID NO: 78726 - DNA, 665 bp, Citrus sinensis
  Intron number 4 from transcript orange1.1g013529m (locus o range1.1g007605m.g) derived from phytozome v7.0 (chr-ID sc affold00003; pos 4249977 to 4250641 reverse strand)
gggcaggtagattcgtttagtttgttctgctgaaatgcaaacatgttctgagctgaagactaaaggatcattataagtttgtcaaattctttctgatacagttctccaagaattattttgcatattgggtttctgtgtgatccttactgcatggtttctgtttttcatgttctgctactctttgtctaggtgtatagcatctgatttaaattttattttctaatccaagcattatgaagaaagggaaatgaacagtttgaagttgttaaaagtgctgattaatctctgcttattcgactttgggtagagaagtgtcaatgaagcagttagatgcggtgaattcattttgatataattagcaccaggatcatccctgggaaaagctcccctctcttctttcatgtgtgtgccccatccgtttatctgccattaatcatctgtgatattcatctgacatttggaggtcttctattctcttttaattagcaaaataaaatttgaaactaagatcaccatggaaaactaagatcaccctaccttactcatattacattgcttttgttataggcagttcacaggatttttttgtgtttgggcaatgtagatgaaaagtttactatttatctaatactttcttccaggtaataccgctctcatataccacc

SEQ ID NO: 78727 - DNA, 631 bp, Citrus sinensis
  Intron number 3 from transcript orange1.1g046320m (locus o range1.1g046320m.g) derived from phytozome v7.0 (chr-ID sc affold00005; pos 2444914 to 2445544 reverse strand)
tagctgcagatttgctttctcaggtatttgatttctagtctttcttatagtttttagatggaattatttattatttcaccctgattattaagcatgaagtgaccacagttttgccttctatgttgtcgaggcatttagaaaagctttgtgacttttagactttttttatcattgcaagaactattgcattaacggtgccatagttaagcaacaagggaaattatataattttgaaattattattttctcaataatgaacaaagttttcttgaaagaagaaattggtgtggtatacactactgctggtgcaatgttgttgtctttatagagctaggagtcactcttttcatctgaaaggaagaggatatcatgatcttaggaatctacaactcacttcactgaaagatgttgaccagtttttcttttgtatgctgattttgtcacccctctcatactgcttccttgttagaattcaatttctcaaattacaaactctagttgcataacatatgcatgaataagaaatgagtttctcaacttttatattagtttcaatagtttatgtaacttgatgtctcttcttcactttggctgagcgtggacctgacagtcaaggcgtcctagtaattgt

SEQ ID NO: 78728 - DNA, 568 bp, Citrus sinensis
  Intron number 3 from transcript orange1.1g014300m (locus o range1.1g014300m.g) derived from phytozome v7.0 (chr-ID sc affold00005; pos 1163625 to 1164192)
atcttggtgccataaaaaattggatagcgcttcaggtagtctgactatctcttgtgtattctcagatgaggcactataacttaacttgaaaatgactctgttgttgaatagacataatgccataattttttcatgtaaatctgatatccaattattttgcttacgacctttttggaatgctttgatagtggtctcgtattgctgctgatactattctcttccagtattttgcatagcaccttttttctcaaataaatccttggcaccttttgtgcatgaataataggttggcatacttgtttttcatactttatacttttagtagatgttgcatgtcagtttcaaaaaccaaatatgctagctggttgaggaagtgaaattgttgtcaacttcctgaatttatatttttcaatctgtgtaatgatttgggcttctaacaggactggttaagatgatctcatttgaagtaattgtcacctttattagtttacatcttttaccctcttttttttttggcagtttttcatcattttttggttttgtgatttcgtagcccttttgtgatttg

SEQ ID NO: 78729 - DNA, 650 bp, Citrus sinensis
  Intron number 1 from transcript orange1.1g028953m (locus o range1.1g021451m.g) derived from phytozome v7.0 (chr-ID sc affold00011; pos 610267 to 610916)
tctcgcaagcactctttccttcggtccctgacctggtagctctctctggttttttactttcaattgtcaaatattgactgattgcattgtagttgtaaagagatctcacttacaagcttaggccaatttcatttagactgacactagggatacaaacactatctgtacaacctgatgtggcaacattgtgtcattgccacttgtctctacattttcaaggaaatatgaagaaaataaattataaaggacgtttcacaatgatataatacgccacgttggttgtacaggtaagagtttatatctctaatattactctttatttattatgcttccaccctgtgtgtctttgtacatagatggcctgcactatatggtcactgtttataggactctgtttctaatttagcaaatgcattaacaaacacaccttagggattgtaagttgtaattacatggcaataattgctaatgaattcaaatagtttgttacttttttattgaggcaaccttattggaaaactcttctctggatgaaacagcacaaaatacatggtcttgttgtctagaaattatggtgcatgaaggtatttcattttactagttcttaatatgcctaatttttctgtttataggtaatcagtggcataaac

SEQ ID NO: 78730 - DNA, 314 bp, Citrus sinensis
  Intron number 1 from transcript orange1.1g006794m (locus o range1.1g006749m.g) derived from phytozome v7.0 (chr-ID sc affold00005; pos 2135380 to 2135693 reverse strand)
cctgctctcgtcaactaccgtggtacggtcgtttcccttttcttggcttttgttttaggctcttggtttgtcaagatatgatttctttatcatctgcttaggacgtttagatttgattcaactgataaataactttagctggatgaaatgatctgttagctgaataattttgttaagatatatttttgtgggtactttagtggaagattagtttgggaagaaattgatcttaggaattagtaagcaattgaatcaatcattttactgcagatttagctcattctaagtgccttgtttgatgggttttgcaggag

SEQ ID NO: 78731 - DNA, 327 bp, Citrus sinensis
  Intron number 3 from transcript orange1.1g036317m (locus o range1.1g036317m.g) derived from phytozome v7.0 (chr-ID sc affold01426; pos 858 to 1184)
cttggagtgcaaggagcgggaaagaggtttgataagcaaaattccttgattctcgtgccttttgaatgcttagaattcaaagggatgttatttcccctacactgacccagtcatagtattcacagtcttctgggcaaaccaacaatgcttttgattctacatttgagcaagtaccttgagcaccagtttgcgtaatgagttctatatccaaatactatactcttttgacgttggtattgttattatataacattgtttgttgttgtttatttttcttgtcagggttgcaagttggatgagttttcatacagagcctcctgtcataaa

SEQ ID NO: 78732 - DNA, 508 bp, Citrus sinensis
  Intron number 1 from transcript orange1.1g017984m (locus o range1.1g008239m.g) derived from phytozome v7.0 (chr-ID sc affold00003; pos 1586242 to 1586749)
caattcagggcctgatccagttccagggaacggaggtgactttgattttgcctttttcttttttcttttccccccttttttgggctatcattttgacaagtgtatgaccttcctctttgagttcatattcaaaggttatatataaaagaaaccagttcatgatagtgaaattaagttgtccaatactccaattcatatacccaaagaaccaaatcctaatttgttaagatttgtagactttgttttgtttcttgtagcaagatatgtgaaggtcaatttgatattttgtagctctgtgtttcctagaatatatataatctattcacaattgcaggttcattttttttttaaaatcaaatggatgaaaatttatattctctagaagttgtacaaacctacatgtgaaatgttttgtagtttgcttctgtgccggatacactttaatgacataatataatgttaatattttccaggagacaacaaactagctgtcatccttgcaacatct

SEQ ID NO: 78733 - DNA, 1009 bp, Citrus sinensis
  Intron number 1 from transcript orange1.1g003241m (locus o range1.1g003241m.g) derived from phytozome v7.0 (chr-ID sc affold00062; pos 313811 to 314819 reverse strand)
taacgttttcgcgttttccagcttgcaattttaaggttagtttttctttttcctctttttcctctttttttttaaattttatttttgtttagttttattcaatttagttcctgctttagttttgagcttcttctttttttcttgatcgatctttagaactgctcaaaactcaccgttttgcctttaaagattttagtctttgtaacttttaccgttcgctcagttctgatctccttgtattagagtttaatttaggttaatctgtggattttatcagggcttaacaatttgggacctttttgtgtgtcgtaatcgatttgagcttgatcacagtttgtggttcttgatgtgcgtgattgatgtgaggttaaaattgataaggagtttaattctattagttgcatggtttaattgttaatatgtgttttaagtgttcactaatttggagtcttagctctgtattagtggttcttttggctagctgattaaaatttagggtttttctagctatggttaagaaattgggaatttcctcattaaaggagttcaatgggaataatttggtcttgttgctggttttcaagtcttgatttacttagttaggtgagaagttgtaacagttatttttgctttttaaattttgtctcgttcgggcttgttccatttctaatatttgttgtttgctttgtctatttggacattgtttagatccctacaacaatttgtcgaaagctcaaacagaacataaacattgcactctatttggtcaaagcaagagcttgtagatttgtaataatcttgagttagtcgatgacagtagtgattcaggagatcagatttgagtttctgtttggttggtgaagtggaaatactgagattttctatcgtgatttcttattttatttcattttatttgcattgtctctgtattttatgatattgagggggttgaggtacgtatttattattgaaagcattagtcagggctggctctggagagctatttaga

SEQ ID NO: 78734 - DNA, 612 bp, Citrus sinensis
  Intron number 1 from transcript orange1.1g011348m (locus o range1.1g011329m.g) derived from phytozome v7.0 (chr-ID sc affold00023; pos 703984 to 704595 reverse strand)
ctctctctctcacactcacagagatcacaagaaaggtacgcctctttttagatccaatccccataattcttattcatttacttcgatttaattttatctaatttagtttaattgcactcagtataatccagatttaagttcattagatcctgtgatttttttttcctcttcatctttttaatttaaattcttaccactaatgattcgggattttgtcttgtttatgcattaaattcaggaaatagaagggtttttaaagtttgaatttgtatcatattcttttttgttagttacaggttggattccagaatgttagcttaatttagttagtcgctttcaatatgattcaattattgctttagaagagggagtttatttgctttttgagtttctgaattgttgggtcaattgtgtagttttcagattaatctagtttgtggtgctgatcaagcaactttttgatgctgttttttaatctggagtcctagttatcatttttttcacgaattgctttctgttttatttatgaatgttgcttttgtttgacacctttgatgactttgttgtttttccttcccctttttcagaccaaaaaaagaaaaaaaattgaaa

SEQ ID NO: 78735 - DNA, 911 bp, Citrus sinensis
  Intron number 3 from transcript orange1.1g026712m (locus o range1.1g026712m.g) derived from phytozome v7.0 (chr-ID sc affold00065; pos 348146 to 349056)
acgactggaagctggtaattttgattactttctcattcgctgtttgtataccgacataatgtatattttattgtttatagtatctttgcgtttgagatgctgtggcttataattatacagtccacgatgactgtgaaatggaatcactacgaattgagtataatactttggcagaatggttggtaaatgtcaattgccaaataaaaggcagtgttttcacaattaagcagaaacacaacagttgcaaacacacccttggtgtagttcgtagatgagattttgtgattacgatatcaactttcattttgtgtttgctggagattttactttggagtaccgataaattatacagagagaataatggatgtactgctttttgatattatttgaatgtatattgctttattcttaaatgcaaatgtgtattttaacagaggaaaaggatgataatttttgttttcttaccatctcctcaagatcttcacttttgagcaaagcaatgaacacatggttttttacaattttatattatctacgtgggacctttaaaccctcggtctttggttagatgttaaaatcaagtggttgaagacatgccattttcttgtaaggtagaatccttttgtgacaattttttttatttgttaatggaatccaaaaattaactaatactactgctaatccacctctatgttttggttgatatgatgtatctgtggtttcctaaataacgtaggtgattgtagtagttaactcattgattccagttaattttctctgtaggttggtgttgtttcagattatgttttggttgatatgatgtatctgtggtttcctaaataatgttgattgtagtagttaactcattgattccagttaattttcactgtaggttggtgttgtttcagatt

SEQ ID NO: 78736 - DNA, 621 bp, Citrus sinensis
  Intron number 3 from transcript orange1.1g016296m (locus o range1.1g015543m.g) derived from phytozome v7.0 (chr-ID sc affold00023; pos 417308 to 417928)
cgtatgtttttttatttgtattcattcattgtgatcgagtttttgatgagtttattttatgtgagctcataattgggttcttacaactaggttgtgttgtgctgtttatgtatgttcggtaatggtagaaattagaaatcagaaaaatttagggtttagcaggagtttgtctttgggtctaatgtctacaagggttttgaatgctaaacaaagtgacaaacaaatatttgaccttgaactatgtggttaggattttcgtcacaatttgttgggtttgttgattgaaaatttagagttatatgcattctgtctcaaaacaatttatgggtataaactataacctatatgaactgggggtttagcttttaaggcaagtgcttgatgtttccttctgtgcttatcaaagaaggaatgtgaaatttaattctaggtctagcagtttttcacttttttctgaagcattgccgccattagtagatataagcaacttcaatttgcatgcactttccgtttaatggattgagtattatgaccattctctcatcttttcttaggtgtttgatattaaaaattttctcctcatttcttctttatggtgcagaacttgatattgggggtgag

SEQ ID NO: 78737 - DNA, 666 bp, Citrus sinensis
  Intron number 1 from transcript orange1.1g021192m (locus o range1.1g011578m.g) derived from phytozome v7.0 (chr-ID sc affold00196; pos 268474 to 269139 reverse strand)
aaagaaatcccgttgtaagatcttttctttcttttatcttgctcaaaagaaatgatctttgtgctgtaatctgctttgggtagtcttcattttggtcaaatgttcatatgatcaaccttttcatttttccattgcttactcttagcgaagttttgaaattttttctttcgtttttaatatttttacgatgtttgactagtaaaatgaattggatggggcctgcatatacttcatgcagtaggatttacagtatagacaaataaagtgccccaagtgaagggaacttaatgcaaatatgaagctagatctaatgcgaactcaagtgggtttggtaattgaattgttttatcatgatagacccggtgagctgctactggatttcgagttttgtttctaattgatttcattgtgtctgagttttggaggttaggcttctttctatagccaggaagaggtcaatgctaagttctgcatgagttcagttgaatgactttgtcatttgaaaatggttgggacttccatttcagttacttgtctgtgattacgctgatagcatgtattctgattgttctgtctccgtaaatttcttgtcatgtaaaatgtgtgccggcaacttgtgttttctcttcttgtttatgtatcctcttcatttggttgaaaatgcag

SEQ ID NO: 78738 - DNA, 809 bp, Citrus sinensis
  Intron number 1 from transcript orange1.1g017148m (locus o range1.1g013784m.g) derived from phytozome v7.0 (chr-ID sc affold00003; pos 4277479 to 4278287 reverse strand)
ttgattcagttcccgccgcgcgtatcttccttcacgcaagccctagtctctttctctcctctctcttatcttttaatatataaatattttcttatatagtttgtgttcattcgcttcattgaattcacatttactacaaactctctttaaattcgtatatgttaagatgtttatggaacttcttttgtgtatatttttcaattaaggttctttatatatatcatatgttgtatagtgttcttctgttcaattttattttttattttgtattcaaatctctttgcttacatacatgttaatgttagttgttatttggatgtttttatgtgggaaattttgtgtgcttaaagtgggggaccaaggcttcgtttgggattcttgttcaagttcttaatctatagttgctgtgactgtataagttaatggtggttggtagccatttgcggtccaataaaagcagttatgatttcaaacttaagtagaggcacaacagttacaaacatatcctagaacctagatcttttaagtgaacaaattccaagcatcttttttagtgtgccctgatgcctttggttactgcacaagtaaatcaactttactccatggactcttttgcaaggttatacttgcttctgtataatgtagttttatttaatggataggtacctaaaggagaaggctatgtatgattagagggatggtgaagtttgcagggtcttctttgatatcttcatttactccatttgattctgttctcctgaaaaaacatcgcagattttcagtaaatagtttcttcaagaattcaaata

SEQ ID NO: 78739 - DNA, 816 bp, Citrus sinensis
  Intron number 1 from transcript orange1.1g043350m (locus o range1.1g043350m.g) derived from phytozome v7.0 (chr-ID sc affold00180; pos 226322 to 227137 reverse strand)
atttttagctcccaaggtaaactacttaatcttaatgagaacttcgaagagtataacttcaaaatgttacgtttttgagatcacaagttgttgatattggactaggagtatggcgacgaagccatgagtcaggacattcttttgtggatttgatgacttggtttatcggcagtaagtaggagtgagatataggaattaagaaatgtgacttgatgaacatcagaggaaggatgcagaaatatctgatattcatggacaaatgaagccttgttggtttcaatgtgtttgtgttaattccatcacacaatatcttattcttttttttttttacgtgaaggatgctatgattcatagttaattgttagatcaatttgtctattagaagctcagcaaaaatatatattctagtatatggtgaaatttatcattaatttatagcaaaagatcatttctagtagatttggtcatgccaatagcttatctgttgtgtttggtgggtgtctttaaaccaaattctcaatatcaaaagcacattgggatcgttttctattcagcattatctgcttttggcatgtaatgtctgtgtacataggaaactacgcgttgttatatgccccattcctggaaagcttcaaacggttttgataacaacgtggctaagaaatacatgtatcttggttgcatatgaatgttcaagcatgtatgcttgagggtttttctttagctgccacttatttattctcgtccaaatgattcaggattgtatttaatttaattccaactattcgattcacgttgctttgattcaggcgattt

SEQ ID NO: 78740 - DNA, 382 bp, Citrus sinensis
  Intron number 1 from transcript orange1.1g030097m (locus o range1.1g029394m.g) derived from phytozome v7.0 (chr-ID sc affold00062; pos 189444 to 189825)
aaggatccgtttttatctgatatttctcctattttgtaagatacatgcagtttatttcagaatttaatgatccgtggcttgaattagtttgattagtttcatatatgtctcgattcatgagctatagattactgtgcctgattcttgctatatatatattaattatcctagcttcaaatttaggttttaacaagtattttatggataaaatttatttttaattactatttttccttgattttggtaagtttctttatcatgatctcattaaatagtggattcgtcttcttagtgcatttaattattttttttcaaaattcatacaagcttagatttagaggttgaagtttcatatactaattcaggtatcaagagcatcgag

SEQ ID NO: 78741 - DNA, 632 bp, Citrus sinensis
  Intron number 2 from transcript orange1.1g030097m (locus o range1.1g029394m.g) derived from phytozome v7.0 (chr-ID sc affold00062; pos 189861 to 190492)
ttgacattgtatgtatagtcgtttcatattccgttgttaaagctttatgtagtagctataactccaattcgccggaaaatatctgaattttttctttttcttgttgcctctctatttttaccttttactcaagttaccattagtatgtaatttgtcttcattgttcatcacatgctgacattacaccattatgacttttaaatgtgcttgctcagttcattttttctcttgtcttgtataatgttaatcgactgaaactgtttcttttgggtgttagaaagagcattttacccttcaatattgttggttgagaaatcgatggcagctatgcatatttaggatttcagagagtcttattcatcattctcatcttgtagaaagagcatttaacccgtcaatattgttggctgagaaacggattgcagctatgcatatttagtcatcttgtcccctggcctacaagaacagtgatattaatggatatgtagaatttgttagtctattgttttatatctcttctaccagatagcgcaagtactttttacttggcatcaaaattttaacaagtgctttcgtttgttttttccttgatatcaggtcgattgagtgattgcctggcttgctctctgtgt

SEQ ID NO: 78742 - DNA, 530 bp, Citrus sinensis
  Intron number 1 from transcript orange1.1g016638m (locus o range1.1g016638m.g) derived from phytozome v7.0 (chr-ID sc affold00003; pos 4071391 to 4071920 reverse strand)
agctggacttttctccaatctaggagttgacagtatttctctttgtttcatgctcataatcaattatttcttccctcttatttgttattcttttatgtcaatctttgtttgttttttgagaaggctggaatagttttttaaaatatagtttgaatctaatgaattatgttttttcaagtatccatgtgcttagccaagttgcaaatgactaaatattttgaagtcaaagctgaaaaaagaaaacaaaaatgtactgctttactacagtttttaagcaatcaaacatatcattatctcttttgcaaatccttttgctggaaagtttaaatgtttttttcttgcatggcaatttgagttgctcaagcttttatttcgatgtcatctctgctttggaatgcttaccaatttgttagtgtgatgctcaactgaaattaactaaggccaaaaaaaaaatcaaatacgggttaatcccattcctgatcttatattagttgctaacaatctcgtaattattaccaggctttgctgga

SEQ ID NO: 78743 - DNA, 821 bp, Citrus sinensis
  Intron number 1 from transcript orange1.1g013324m (locus o range1.1g011925m.g) derived from phytozome v7.0 (chr-ID sc affold00356; pos 38405 to 39225 reverse strand)
ctgcggctgctgtttgtagttgtttcttctcacacgtatctattctatcctctacttgcttttcttttcattttactattaacaaattagtgtttcagtttctagttctccatcatttatgctctattgcttagtttcttgcttttgtgagtgcttcaaatgttcaattcactgccttgtctcttattcgctaattgaattctactttcattttcttctttggtgccaaattatgtaatttcttttctggaaaactctcaatttattttaatttctggattaggagaatttatagatttggttcgttatattgaattatttggttgacggcttcgatgggaaatctgttcttggttgaaatcccagtcatttaataacaacatatacaaatatttaactccccaccccacccaacaatggaaacttttcagtctttttgtcctaaacagactctgagagtcttttcaccaagctaatacacacacatatatacgcgctaaacattttcctgaagccctaatgctgaagccaattagtcatttactatctgcacactttactaatagaataatagctcctttagcatctttgtgtgcctactcctcttccgtggattgggattagtaacaagggattttttttcatttgctacagcatttcatcgaaattgtgattcatgagtatgggaaaaaccaagttatttcactttgtctagttggcatccaatctttagccgtgctaacttcaatcagtgtcctgcaagttctttttgaattttgataacaaaaagcactgcaggcataccttcaactctttgaaac

SEQ ID NO: 78744 - DNA, 490 bp, Citrus sinensis
  Intron number 2 from transcript orange1.1g001430m (locus o range1.1g001413m.g) derived from phytozome v7.0 (chr-ID sc affold00003; pos 4224286 to 4224775 reverse strand)
gaatcagagggagaaacaggggtactatcaaataacttctgattcatttgtctagctatgttagtttttgaagttaatgatttgtctttcattgtttcattgattagaaaactgagggggaaacaaaaaaagagaaagaaaatgattgtattgaagaaattttatgatgttttgcattctatggtgtgaagaacatcattccatttaagctaaacagtttgcgtgtttattattgtcttttaatggatttcatggtttgtctcaagcaactgagttggcaatagatataagcagtgcctgaactctcaactgttcttgatgtttttgatatgcagacagagttgggtttgctggtttgttctagatttgtcattatgtggtgttagattaatagatattgccttttaaggcctttgaattggatgggctttaataatttttgttttgctgctcaggtgaagtccattaagaacgtgggtgggcaggtttg

SEQ ID NO: 78745 - DNA, 590 bp, Citrus sinensis
  Intron number 1 from transcript orange1.1g020987m (locus o range1.1g020987m.g) derived from phytozome v7.0 (chr-ID sc affold00005; pos 1661514 to 1662103)
atcaaaaggcaagaacaataaattcaattactcgaagcaatttatttttcttgtttaattcttttgttatctatgctttcattatttttttaaaattttttacttaaacaattatcttaattttcatgatcgtgtgcctttatctatagtgattcttcatcagcaatgttagtaaatataatccatctgtttaattaacttttctcggtatcgttcatgccccgatcatagctgacatatatttatatatagcacaaaatcgaagtatctatattcacatatataaattgatgcgtatgctagatgatatgtttattaatttgatatattaatctgtttgatcagccttcatttatttgatctttttcattctaataagtacgtacatatgtgtacttaggcatttagcttttgatttacgtattttatttttattttttgaaaatatatatattccttcatctcgaaccgattcttgtaagccgattcttgtttttatttccttgtaattaatatacgtgatctcttaaatataaataattaacttgatctcagattgatcagcgcatagctggcggtggatcaagcga

SEQ ID NO: 78746 - DNA, 668 bp, Citrus sinensis
  Intron number 3 from transcript orange1.1g028245m (locus o range1.1g028245m.g) derived from phytozome v7.0 (chr-ID sc affold00017; pos 1312581 to 1313248)
gttttggcagcggaacccttcaaggtcacttactggtgagtacttgtttgcatatcataattgtaaattctctctagaaaatgaagttgtttggttactatgaaaattttcatagttgtgagaaatgagattgcagccagagttagaaaaaagatactttaatatataatatactcttcctgtcatctaaacctggtactgtcattttatttggttttttcaatattttgtttcaaaagaaacacaactaaatgctacaagatggctcatcttgtcatagttaagcaaaacatgaagttacttctttttttttttttaatgcaaactcagatcaatatgtcaatgtagttacatacattaaaacaagaaaaaactccatagcttaagaggttagctgagaatccatgtggcagctgatatatttttatttaaaagtctatctcagctgttgaatgttgcctatgcataaaatttgtggttttgtttatattttttgctcacatttagatattttggataatgtttcttcacctaacgaggaaaaaaaatgtttgacttttagcattcactagacaatttaattctttaaaatggagaagcactggccagtactaacatgacaactgcttgaagcaggctggggaagaacgtttttctatagagctgga

SEQ ID NO: 78747 - DNA, 547 bp, Citrus sinensis
  Intron number 1 from transcript orange1.1g021453m (locus o range1.1g013644m.g) derived from phytozome v7.0 (chr-ID sc affold00014; pos 1177551 to 1178097 reverse strand)
gaaaataataacatcgtccgccgacggccaggtgagtgtcacttcagatgctttgacacttcctaattatgtctttcttttttttgttgacatgttagacataatggatttgctgattctctgttgtcattttggcctttggtttatgattagttctaatgttttcttaaccatttttgggttcctcagtgtgatttattgtaatagttaattgtattcaacgtgcttcaattgcttttgactcttgtaaaattctatcactcttcagccatttcttgaaaaaaaaaaaaaagaaaccttcaataaaataaagcttacaacggaaggttgtttacacgaaaacataaaactgagacttatgtaactactttattgataccatctcacttttaaatttttcatacagtgattatgattgatgtaacatctggtgatttagatctaatcccaacctgttttatgatgattatccatagtgtactccatcttttgaccaatgtgagctgttctccttccttttaggtgaggcttggccaaatctttgagg

SEQ ID NO: 78748 - DNA, 958 bp, Citrus sinensis
  Intron number 1 from transcript orange1.1g014131m (locus o range1.1g014096m.g) derived from phytozome v7.0 (chr-ID sc affold00049; pos 498765 to 499722)
tagctgttcttttgacttttggtgactaaaggcaggtgataataatgggataatagagcaatctctgttgttgattgtttttattgtgatgatcactttattttcattattttttgctttgaattttagtgggtatgttttagaattatgtgacaggatctgggttactgtgtttttttttggctttgactgattttaaagtcttccttggattccggcttctgtgtagtaaaagagatggttgctttgctttatttgtatctggtcatttatggggctttatttaactgttttatgggtctttgctcgctcttaagttggagtaattcacactagagctaaaaagttccagtttttggcgttttggagtagttgacgcgaaaagcttcatcttgtaggtatttttcttttctgggtttttgaattccagttcaggtttagcgaacttttagatttgggactgtgtctcggctcttgattttggtcaaaggtgaaggaatcatgacttgaagttgatcataaaattttccatactgttggtttttgggtttcatgtgaagggtttttcttttgtaaaattggcttcttcatgttcagagttagtgtttgctttagctttggcaagtgattcactttttgggaggcagcttatatgttggtcttaaaagcttattaacatttccgaatttgccttgaatttggagctctctgcctcaaaggttttaccgacaaaaataggcttttaagctctaagagtttttttcttagtctgtgaatttctgttccaaatatcagatgtgccgtcaatttgcttaagtttcttagctttgaattgattctttggattggtttaaagggatacatgtttctgctttctagttgggaatttcattttgcttgacctgatttttcagttatatcttttgtgcttttctagtttcaaattcttggtgttccc

SEQ ID NO: 78749 - DNA, 921 bp, Citrus sinensis
  Intron number 1 from transcript orange1.1g007173m (locus o range1.1g007174m.g) derived from phytozome v7.0 (chr-ID sc affold00135; pos 266958 to 267878)
aagtgaaaaaaaatcatctcgtctcaacttagccggtacatttaactttcatttgcgacttctttttttccttcttttccctcaatttttttttttttgattcatgttaaattaaagttatagttttgttctcttgtaaatgatcttcagctcttttgagcatgtgggttcttattcttttggcttttggatcatcactgctgcggtttatgtgttgagctcgtgtcgttttggtttggcttcgcttggcatactgggttcactaaaatttgcagcaggctctgtctttttctctgtcccttttttttttgtcttttctaatttgggattatttagttttaaatttgtcttaatttcatttaagtaaaattaacgaaagctttcattttgattgaaaccccgagcttccggatttgtatggataatttagttccatgtttgtttagcttgtgttcaagataagtgattttattttaagtattcgttattattattattattattaggatgatgatttattttttttttcttttgcttattcggaagggaatctggctgtaagcttctgttaaaagctattacactttttttttttattgggggggggggggttgggtttgccgtttatgtattttagttccaactgtaggcagatctgggctctggtaatgtgggtcattttttttttaaataaatttcgttttgttaaaaactcttgacacattaatttgttgtaattttgttttttgttacatttattattttattacttgccttgtttatctaattaatgggtttatgggaatttgtacttggggttatatgtctttgaatagaagttgatacagattcactgtaccgggtttatctaagctggaactgatttgttttatttatttaatttgcaggacttgacggtta

SEQ ID NO: 78750 - DNA, 477 bp, Citrus sinensis
  Intron number 1 from transcript orange1.1g045260m (locus o range1.1g045260m.g) derived from phytozome v7.0 (chr-ID sc affold00168; pos 295533 to 296009 reverse strand)
gggttttttccaggtaacagacgagacatgttaaaattacagctttgaaatgtcaagatggttgttcttgtttatgatttatttgttcaaattaacaattacaagaccaaaagaactttgtagttgactttttttttttttttgcttcatataatcacacatggaattaagtcagagtttggttaggtatttatgcaaaggaattccttgtaagattttagctactctgtatttggtttggtaccttgaaaaaattatgctttaatccaaatatataaaagaaacgacatagcaaattttggtctgcacgttcgcgctaatttgaagacacgtttgaagtaatgctgagattatcatgctgttgtacggtttgctaattcaaatgtatgaccaaacttaatgatattctaggtaacactactactacattaaacacttggcaattattattttctgcattatttcagttggtcaatc

SEQ ID NO: 78751 - DNA, 744 bp, Citrus sinensis
  Intron number 3 from transcript orange1.1g013224m (locus o range1.1g013224m.g) derived from phytozome v7.0 (chr-ID sc affold00011; pos 1065669 to 1066412 reverse strand)
tagttttcttggtgcgtattttaacttattcattcatgttgtatgtctctctacattcatgcccgattctgtttggtgcctgtatttggctgttctttctgatgagttgctttgcttgtagtctagaacctactaacctccgctgatgttggaattattattattatttttttcctacaaaaatagttcaatttctttcacttatcaatttaggcgatatttggagtcaactttctcttcctcctcttcctcctttaaatttctctatggtttgactcatctaatgagcatactttatgaggcatggcattagacacgaatgccataggagccctgacactgacacttgtggcatgcacatgaagaaatttcgtccttagagtgaccgcagatgaatgcagtttatgcagagcaataccaatatgggtgtggcggatgtggctttatgtcggctgggttttccactaattatatacgttggagtaactgcttaggcaattgcctagagattcacccattcctcatctatgcctgtcagggtttttttgacctttatattttcatatttgaaatttatattcttttgtatgataccacctccaagttatgaatctaataatttaacctcaatatcttatctcatacttccttaaagctgaaaatcgtcattctcaaagtacaccctatattctgcttgagtttatgtagtgtctcacctttttttcatccccataaattcagaat

SEQ ID NO: 78752 - DNA, 983 bp, Citrus sinensis
  Intron number 1 from transcript orange1.1g016252m (locus o range1.1g008127m.g) derived from phytozome v7.0 (chr-ID sc affold00017; pos 812109 to 813091)
atcgtgttgccgttaagaaaattgagaagaataaggtacttttagcttatttttatgaattgggtttctcttatttggttgtttttgggttgactccattagatttttttagcttttatttattgatgggaatttttcgattgaattaaagattggatattttgtgggttttgactggatgctgaagatcctaattcgggtggtttcatttcaggacttgaaggttgcttttgcttttcatagtagattctccacttcgtgcatctgggtttttatttttttttagatatttaatttgcctttccttgaatatcaagccataaactcatgttattctcagttgaccgacgttcttatagttgcttaccttgattaaaaggattgtaatattctgctcattgccaatgatgggtctgttctctttattattgcaatcctgaacatatatggctgcgtcattgaggaactgaaattaacctagtaagaaattaacacttctaaaatggattaacgttgggctttttgttgctttgactttaggttttggtgaataatttccataaattcaattgttctaggccatttgttccatagaaatgataaattgtaaatcagattactatgccatctatttgaggtaggcctgttggggcggattatgtggattgactatataacgtacaatgtcagactccatttctgttaatatgtggctttggtattttttttacccttacatttctcatgtatccgtttgtcaaaactcaaaagatatttcttttccttttgagttaggtaatctttggttcaatgtttgtgattgttacgcacacagatagaaataatcatctatagttagattcggtggtgctgtaattcatttagatgggattagcactgtttggtttatttatttatttattttttacattaaagataatattttggaaacttgtaaaacaaatccttgtctctggtggcag

SEQ ID NO: 78753 - DNA, 780 bp, Citrus sinensis
  Intron number 1 from transcript orange1.1g003048m (locus o range1.1g003023m.g) derived from phytozome v7.0 (chr-ID sc affold00017; pos 63118 to 63897)
aagcttggtacattttatttatttcatttattttattttattatattctatttaaaaatagcctttttttttctttggtttaccgaaatgaagacatttttctttaaaaaaaaaattatttctttagttatttaatttgttttatttgtatgatagattgatagttaatgagcggcctaatgcatgaacttgtagaagtgtttatgtctctgagaatgataatacaagttttatttattttttaaaagtcttgcataaattatatgtggtggtttttatttgtgagtcaggaaacaaaggagtgacatttttagctgagttggctgcttcttgcctgtaacgcagcttgtttttgtacagtattccagatgagtgaattttacctggatcacagaatctgctacaaccacatgcctggtttcttatgttaggaaaattgggccagtttgggaattttttattttttgactgaaatgatcaggttttctccaacagaaagggtagaaatataggatcacttggttttctatcacaaatttatgctttgtctaggcggtgctagtgtatgtgaatatgacctttagttcaaggactttgaagcaattattggcttttttaatttacttggcatctgtatttgttgcgtggatgctgtctttttaattcaagttagaaagaatgcatattaattgattttatacctcttggggcagcagcattgatagtatttgttccacatttgtaggaccccggcagaaactgattctctgtcagaagagt

SEQ ID NO: 78754 - DNA, 269 bp, Citrus sinensis
  Intron number 2 from transcript orange1.1g039355m (locus o range1.1g039355m.g) derived from phytozome v7.0 (chr-ID sc affold00056; pos 130870 to 131138 reverse strand)
tggtaggactgagaggcaaattgttattcgcttgggtgagtttgattgtaattttaagctaaacattttagtagaatttcaataatggccacctatcaagtttgttctaaaatatacaatttgtttttcactttcaggatcaaaatgaatgtaccaattctgggttcaattcactagagaagaaaaacaagcctatttttctcaaggagttgaagaaaatatgggaaaataaagcactccattctctctgttcctgtggggcaatattc

SEQ ID NO: 78755 - DNA, 770 bp, Citrus sinensis
  Intron number 1 from transcript orange1.1g017915m (locus o range1.1g017915m.g) derived from phytozome v7.0 (chr-ID sc affold00095; pos 419283 to 420052 reverse strand)
gttccccaccaagccgccgcctcccgctcaagctggtgagcatattctattatcaactctattcctttcgtttcttctattgatttgattgttatttggatttgtataacttcgattattatacagcccttctgtttgtttgttttgcctgcaagtgtaagaaaattgatgcaagtaaaagttgtttatttttattatcattattatcatcatcgtcatcattatcattattactactactactactattgttattattattattttggtatcattgtatgattcaaagacagaggaatcgacattacattagtcaagataagcgtcacacaactgtcgctctgctgtctttacgctttagtgaaattatgaattttaaatcaaatgcaatgacagcttcaggttgttattcagcaaaacatttgattttttttataagttgaaaggctcactaattaagttcataactttgggattttttctgagttttatcattttttcaatttctgttagtctaattcctgaaattgtagagacatgctttgtccatcattttcaacataagcaatctacaaacttgtttttttggttgttttaatgtgcatgttatgtatttaaattatttgttgattggtggcaaagaacggtatgaaggaaatggagtttttcaatagcatctatgcactattggcttcctatttcaatattttttcctctctaccatatctaattatgtggtggccttcattaaacagtgagggaggctagga

SEQ ID NO: 78756 - DNA, 614 bp, Citrus sinensis
  Intron number 1 from transcript orange1.1g036277m (locus o range1.1g036277m.g) derived from phytozome v7.0 (chr-ID sc affold03710; pos 660 to 1273 reverse strand)
cgcttttcttgcccacgtcggctgcaagacctcttgtaagtatacatctgtgtttccttttttcaatattattaactcctaactattgaagctcgaacctaaagacctgagccttaggaagaccgttccttaccaatggagctaaaccttggcttcgacttttttgtttcttatttatttattgcaaatgcagtattagaacttggacagttgtttgtttgtgaaaaataaagctggccccctgtggttttggcgacggtcgtggagaccctcttgtgttcttgtcactgtagtcgaaggccataattttctgaatagggtctttgagactgtttcggagaagaaggggtcactgtttgtttttatttggttgaaatttgattcaacagcgagttcagttggtgctaaaatgttttgggttgaaacaagagctgtgcagctggaactgaacccactcacatgggtgttgagatgagatttaattgacagtatgctgctattatcttttatgctatgtttatgcttagaatgaaaaagaaaaaaaatggaagtaaaataaaaggcttatattgaaacggctgtaatgtttgtattgtatgcttaattaggtggat

SEQ ID NO: 78757 - DNA, 472 bp, Citrus sinensis
  Intron number 1 from transcript orange1.1g020922m (locus o range1.1g020801m.g) derived from phytozome v7.0 (chr-ID sc affold00094; pos 440592 to 441063)
taactgcaggttcagtttttgttgtaacaggtaagccgcttaatcgtcgacatatattatattagaggcgtcaagttagccgtacaacaatttgcatgttatcatgttggcattaatttttataactacgcttaaatgagaatacactcgtgacatattttacacttggtgtttgtgtactacctatgttgtatagaagattttctcatctgatataagcgggaatttgagtattaaactttgtttcattgaacgagctagtatccttattgattcattaccctactcaaccttataaatacctttttttttgggtggcggcgggggggggttgtcggaaatttcttagttttaaaaatgattaatattgcatgcatcttttgcaactattagatgatttgattattattattttttttttcttcttcaaatagcaggaacagagaggttaagcattagtgcaagcaccaga

SEQ ID NO: 78758 - DNA, 371 bp, Citrus sinensis
  Intron number 1 from transcript orange1.1g005617m (locus o range1.1g003481m.g) derived from phytozome v7.0 (chr-ID sc affold00014; pos 342165 to 342535 reverse strand)
tagacaattacttgagaatttgtgttgaagcagaggtgatcttgagcttctctttctcaatatctataagttgtttcgataaatattggctgttccaccatgttgattccctgtttttttcttaattaaggcataaaggaaacaagtaataagccctgtagagattagtaccagttaagttcaatattttgttcatttgggttcgatcgcgtcttagtgctttgattcaagtataatgatacagacatcttttggttggatgagatgctcgataataattcttactttatgaaaagaaacttaaatatttgctaggatcactttgttattttgtagggaaatctaaggaagacagttaatttgtaggtgaa

SEQ ID NO: 78759 - DNA, 493 bp, Citrus sinensis
  Intron number 1 from transcript orange1.1g019255m (locus o range1.1g016851m.g) derived from phytozome v7.0 (chr-ID sc affold00011; pos 871212 to 871704 reverse strand)
gcgttttcttgatctcgttctccgttaatcatctggtaaatattcgcatgattgaatctcgtttttgctgttcgtttattgattcttgattgttcaaatacctctaattttctgttcaatcagttattacttgatgagtcgtttggtgtttgatttcgttgattgattgttgtgtttagatcattttgtctgaatttgatttcgacttttcttttttttatcttaagttttttggtagttttattttgatgaattaagctgtatcttgaagaaatcattgatttgatcaggataaatatcaattacaggtctcggagtttagctgaataacgatttgatgaagttgttaattattttcaataactagaatcactggaaattaaaaaaaaaaggaaatttgatataaattgaagatgtcttggtactatttttttattaatttttcgttgttttgtttttgacaaattttcttttgtatttttcagcaggtaca

SEQ ID NO: 78760 - DNA, 905 bp, Citrus sinensis
  Intron number 1 from transcript orange1.1g031245m (locus o range1.1g028306m.g) derived from phytozome v7.0 (chr-ID sc affold00003; pos 2193297 to 2194201)
acggcgtttgccatctttgccacggaggtatgtgttgtttttgttcttatgatcgaaatgcttatctgggtgttgttttgttacttgtaaacatggccttaactaatcattctttgttgtcatttggccttttggttcttaattttatttcatttcatttcataagacaagaataactgaccccacttcttgttttgttgcttactttgttgtttggtttctttctttgagttctttgtctttttgggttgggattttgttttaatgtgaagatggacattcaattctattttctgtatctccatgtgtttgcttgcattgtcatttgtctgaggatttacattggaatatcagcaagtggattctcagcctctctaagattccgaggtattattgttatatttccttatattcaaccggtctgtactctcttcagctattttagaaatgtagcagattattgcctggtatagacatttgaatacattctggacattggtattttccaaaatataaatctgccattttttcttttagacaaatgaaatggttatcagtgagcttctttcaaagaatttatgatgggatcaaaattctaatggcaaatagcaaccattgatctggctttcaacagatttcaaatgggtctcgagtgcttgttcttcttggcatttcgtcgggcttcttttccattagaacagtctggaaatcatcacaaacaacattctaaccttgttgaaactgtctttttatttccttattttcttgacatatctgtttgatttcagtcagttatgttggctttcccggtaaccattattttttcattaaagtctactttcttaaaatgcagtgggaaaagttagtttcttatatcctcaccatattaactttacaggggtcaa

SEQ ID NO: 78761 - DNA, 983 bp, Citrus sinensis
  Intron number 1 from transcript orange1.1g047582m (locus o range1.1g047582m.g) derived from phytozome v7.0 (chr-ID sc affold00005; pos 2790116 to 2791098)
aagataagagcttaaggattctgcatttctctcgggtgtggtgaaacgaagaggaagagaaaagcagttgcagttttctgagttgataaaaccagaggggatcgggaaaaagaaaaagaaaaagagaaaagcagatgcgtttttctaagttcataaaaccagaagggaccgagaaaaagaaaaagagaaaagcagctgcgtttttctgagttcataaaaccagaggggactgggaaaaagaaagaaaagttattatttttctacatttttctgtttttacctaggtaaaacgacaacgttttatggagaagtaaaaagaaaaaaaatcaaacggagtccttttggtttaactttcgaggtttgatccgcggtaaatagtagaactcataaatgttcatgcatcgtactattcataaactaaaaataaataaataagtaaaccaaaaaaatgattcgtgggtgtactaagaagtattgcggcacatgctcatgtgcaattcccgaaaccgttgcccgtttgtcgtaaaagccaaagtcaacctcaacacctgcgacacagcttcatgcattggctgtccgtctcggttcagttctgtgtcattgtttctttctcttgtagcaactcaactggaatttagaaaggcaaaggcttacaacaaccttcttcagtttcagaggttagtcttccaggaattatactcttcgatgcttttcaacaacagatggttaagaaaccatcatttaaattccattacaactcgtccggaacatactctagagtacagtcattgtcttttttatgtaataaaaactctttacttgttctaatttttgcatccgggtcgtttagatttttgaattgcagttggcggtcgttgattttcctacaggaaaaatgccctctctgcttcgggctctttggactattgttgtaggcttgtgtttgttctttaacttcggcgcctcatttgaggataattagg

SEQ ID NO: 78762 - DNA, 682 bp, Citrus sinensis
  Intron number 2 from transcript orange1.1g020178m (locus o range1.1g020178m.g) derived from phytozome v7.0 (chr-ID sc affold00003; pos 4228575 to 4229256)
atcgccacaataaattcttaaaagattacggtaaatttgcaaaaattgatgtttaattttggtttaattaactgaaaaaaaaaggacataaagaataatgcaaatagtgagcattttatttgctgattcttggtgtcctaaatcaaaaggatgacgaacaatctcctccatcaagccaggaaggaggctacagtcggcctcacatttaatttttcattattaatggaaaaaattattgtgtataagtgtatgtttgcttcggtttttcttaattttgaaagtgttactgctaaagtatttggtttgatgcgaaagctattgattttgtttctcatctttacctgattaaaagccttaacacttcaatccccaacatttaagtaacagacaagtgatcttgcttttaacatccaaatacttgctgtgaaactgtttggatagtgtgtttgttggattttcaattgttttttgagaaattttggttctcttgtagttacttggattgcttattacaatttgatttgttcaccatcattaattctgattccattttagtctaggagaaatgggaaagaccttttttttttttctcttaaattttatattaactttactttggtgtaaaattttgtggtcaatttttagaagattcctgtttgtctttttattgcagttgcctttt

SEQ ID NO: 78763 - DNA, 669 bp, Citrus sinensis
  Intron number 1 from transcript orange1.1g018959m (locus o range1.1g018948m.g) derived from phytozome v7.0 (chr-ID sc affold00011; pos 1317113 to 1317781 reverse strand)
tacaagaaggctcaagccagtttctggaccggtagtttctctttttctttatctttaactgtctgttaaccgtctcagcccctttttttcttctttctttcttctttcttttattgttctcttgttgatatttgtccttgtctttgcatgtgtttatgtgggtttctttttgtttttatcaaatacgaattgaatcgtgtgtttagcgagtccatgtttattcgtgaatgtagttactttgtgttgtctttccattgttggtgagttttattggggatgtgctttatatgttttttgtttttcgtcaattttgtaaattttatgattagaacttacacttgaataatgctctttgagaattggagtatgtttgtctatgtgctgcaaaatggttctttaattttttttttcccctaatattatggttattttgaaatatttttggaaaattttttatttctctctgttaagatttgacgtaggcatgaattcttatttaattggccaatatgtgtttgtggacctggagtggggatacttttgtcttgtgctcttagtaactgattcgcttataaatgtgtatgtttattcttcacctctttgctttttccctaccataagttctgatctgttgtgggtttacagccgaggaggttgatctttcccagg

SEQ ID NO: 78764 - DNA, 314 bp, Citrus sinensis
  Intron number 1 from transcript orange1.1g042756m (locus o range1.1g042756m.g) derived from phytozome v7.0 (chr-ID sc affold00023; pos 787434 to 787747)
ccacccatcctcgcctctcctctctcgcctttccggtaagtctgtggatgcatttgggaattgcgatgtttttttgtttcctcaaagcaaggtttgcagaagcgatttgataaaaagaaaggcacttttggaaaaagcacttatcaagtgcttctctttgaatgtttattttatttatttcattgcttccgtttaaataatttcaaaccaacataagtgttttaactatttgaaatggtcagaagtgattctcttctttctttattacgggtttgtattataagtgacggtacatatttttgctgcagttgtac

SEQ ID NO: 78765 - DNA, 648 bp, Citrus sinensis
  Intron number 1 from transcript orange1.1g045413m (locus o range1.1g045413m.g) derived from phytozome v7.0 (chr-ID sc affold00280; pos 15681 to 16328 reverse strand)
gcttcaggtgaaactaccaagggaaattcagatgtctcgccagcggtggttactccggacaatccaagatttggtccttagatgatcgtggctaggaaagaaaattatagagtaaataaggaaagagcaaatgcaaaggagcctactcaaaatagttttaggaaacagagtataggttccagattcggtgtcttacgacaggaaagtaagttagacaatgattctggggaaatttcaaacgcggctatcaccatggataatcacgagaagaccattgctcctcctaaaaacaaggaaaagatgatctcatgtgactccaaaggctccatccaaatgatgttgtttggaagcaagggaaaccccgtgacaagaaacaagaatgctgccacgtctgaacacactaccctcaaaccttcacgtgaaatacacaatatacccccacaagtggtcctagctcatcaagtcaacaccctattgagtccatggaaaaaaatatctcacgtaacaagtccaagtcatctataactcattctcctgaaccaactttaatcccaacttctttggatcctaaagatcattctgcagtaatattaaaaaacaattgagaaaataggaccattcagggccccccatccggttcctcccaaa

SEQ ID NO: 78766 - DNA, 609 bp, Citrus sinensis
  Intron number 4 from transcript orange1.1g033007m (locus o range1.1g030933m.g) derived from phytozome v7.0 (chr-ID sc affold00023; pos 1183054 to 1183662)
cagaatttgtggagcttaacaagttccttctaaaggttagcaactgtcactttatccattttgtgatgattttaatctgttaagtgaaaatttgtaattttaactaaaatatatgagcttgattcaataagaagcttagttactgtactgctctgtgatctgcaatctgaatgcagttgtatgttttcgaaaataactgatacattcattttttatccagtcaaatactagtctccaaactgtaaagagttcgtggctctatggttcgacatgaagacaatggcctgtttaattttactattttagtgtaggtctttgattccatacatgttttcgcagttttgaaaaatgtgttctgttgagagtctttgaaaatagttttcaaactcattccaaaaactagcttctttaagattatatcctattatatctaaaaaatcttaagttgtactttagttttgaaagtgtttctagattatgaatgaaatgtacccttaacttatttgttgtttctcttaagtgcaagttataatctgtattattatgtatatccacgagcatagaagaagaaatgataattatttactcaaacttgtttgcaggttcaac

SEQ ID NO: 78767 - DNA, 841 bp, Citrus sinensis
  Intron number 2 from transcript orange1.1g026074m (locus o range1.1g025691m.g) derived from phytozome v7.0 (chr-ID sc affold00162; pos 30130 to 30970)
aagagtgttaatttcttccattttcaaaactccaggtataggtctgaattaatgtgtcagttcaattaaatgatattctcaatacaattaggataaaggagcgaaagagtgttactacttctaatattattatataaaaattaatgatatctggctatggatttactaacttaccgatattaaattgaagagcgatttagcaatcactcgatagtggtacaaatataagtaaattttgtttactttccctccagtattgtctaacagtagatggtattggtcaattaatttgtttcgttcgatgacattatttggaaggtgttttatgaattccagaaatgtgagaggtttttgacagattttgaacccacttggctcctttccgtatcttaatttaagtaagagaggtccctgcaatttactatagggaaatacaaatccatgttcctaatgacagacgaagcaaatggatagctcatggtggtatttgcttcgtttgttttttttaaatgacggaagcattagccctgtctctataatagattaatagattcattcttgcttctttcatctaccttagcaaacagaagaagaactcgtcgttttgcataaagtatatcttttcttactttcagttgcttcttctgcatcgtttaaaatgatagcaataataataagtaaaattacttattcactatgacccaagcttaattgatactttccatgtgcttacttttatttaaaatgatttttatatattttctttgttaatgagatctctatggatattgccttacgtagttgcttcttcgtaaggccgtcattatattgtaatcccctt

SEQ ID NO: 78768 - DNA, 798 bp, Citrus sinensis
  Intron number 1 from transcript orange1.1g015943m (locus o range1.1g013363m.g) derived from phytozome v7.0 (chr-ID sc affold00101; pos 195351 to 196148 reverse strand)
gactttgaggttttcgacagtagtggtaaggtttcacttgaaaatttcgttttttggttgtatttcgtgatatcaagcttgaaatttgtaaactttgaattagttttgatgattttcaaccccatgcttgtattaagtttgtgcttaagtaattatgagtgtggtgttatttaaactgattaacaattgaaattaagtgaaatatagtcatgaattgatcattataaattgttttcagttgtctgtagcccgtgtatcgaaagaaattaatcagttaagtagctgaagatttgatttgaaagagagatggattaccagctttctgatagcagtggtgagttaagcttaagttacaagaattagttcatgaatcacgtgttctttaattgctcgatttggttgcagtatagttaataattttgtaggttgtgtggccaacaatagtgctagttattgtgtgatagagggagaataaaacataaattcttctgcaggaaaaagatctttctttgtagagttattttttttttctattcctgctccgctcatgaatgtggatgcaagagataacaagaactgtgttagttgaatgggatgagttaaatactttagatgtgccactgatgctggacaaagatatcattttttttttcctttgaaattctttgtttctttggaagctacatgttagacagtctctcttttaatggcttctgtacgagaaaattgcaggcacggatgatgaccttcctccttcacatcacaatagatttcagagaggggttcgccccactggga

SEQ ID NO: 78769 - DNA, 488 bp, Citrus sinensis
  Intron number 1 from transcript orange1.1g015523m (locus o range1.1g012037m.g) derived from phytozome v7.0 (chr-ID sc affold00065; pos 162126 to 162613 reverse strand)
tgtcatcttttatttctccaagttttgctctcaacgtatgccctttgaagctctctcctgtattctctctgccttctttttcatcatttgtttccaatgcttctgttgccgctgcttccccacagcctaaaaatagtgcacccaccaggagacgctcttctaaacccaccaaaaacctcactttaacaacacccacaacaccagaagcaactaactccgctgtccctcctaaaaaggttctttctttttttttaacagtcaaatactacgcatgtctccttttctgcttaaaccctgtaccctttttctatgaacgctcattttgatttaaaaataaaattaaaaattagcttaaagtttctatcttggattcatttcttatacattttcttgcaactaaatggaggctaagggattgataactttgctgtctgtgggtttttgtttgtgcaggttttagttccagttgggtttggtaccgaagaaat

SEQ ID NO: 78770 - DNA, 647 bp, Citrus sinensis
  Intron number 3 from transcript orange1.1g032463m (locus o range1.1g032373m.g) derived from phytozome v7.0 (chr-ID sc affold05953; pos 2556 to 3202 reverse strand)
ttttcataacttttcttgcttggtgtctaattgaggtgagttctgttatcttatgtgcctacttaaaaattcagtaattgtttgcaaattgtatgggctgtttgctaaaagtaagagaatttgacttgtaattaatgttgtttgattcctggatgagcttatttagtgacttcattatgaagagaatggcataatacatcagttcacattgcatttcaaaacaattaaattatataccttaatgtttctgatcagattgtcagtgctaaagcttttttatcgggaaaaattgtaccattttaatgttacctgagattaggtgtaaatcttcttacacattttctttctggcattcatttagtcagattttctttccagcactcatttagtttctttgattgtaactttcttactttcagccgtttctttatgtgtgtatgtgtttttctgtaagtgctttggatgcactctctttccattgaacacaatagaagttttttgtacctgttctgtggtctttcctttttatgtaacatttgagtagttagtagatattttttgttttaatatcgcgtttggcttcatgatcttaatggattgagattcaatgactatcttcttgatgcaggtaattaggtatccgtttt

SEQ ID NO: 78771 - DNA, 795 bp, Citrus sinensis
  Intron number 2 from transcript orange1.1g008197m (locus o range1.1g008127m.g) derived from phytozome v7.0 (chr-ID sc affold00017; pos 812297 to 813091)
tcctaattcgggtggtttcatttcaggacttgaaggttgcttttgcttttcatagtagattctccacttcgtgcatctgggtttttatttttttttagatatttaatttgcctttccttgaatatcaagccataaactcatgttattctcagttgaccgacgttcttatagttgcttaccttgattaaaaggattgtaatattctgctcattgccaatgatgggtctgttctctttattattgcaatcctgaacatatatggctgcgtcattgaggaactgaaattaacctagtaagaaattaacacttctaaaatggattaacgttgggctttttgttgctttgactttaggttttggtgaataatttccataaattcaattgttctaggccatttgttccatagaaatgataaattgtaaatcagattactatgccatctatttgaggtaggcctgttggggcggattatgtggattgactatataacgtacaatgtcagactccatttctgttaatatgtggctttggtattttttttacccttacatttctcatgtatccgtttgtcaaaactcaaaagatatttcttttccttttgagttaggtaatctttggttcaatgtttgtgattgttacgcacacagatagaaataatcatctatagttagattcggtggtgctgtaattcatttagatgggattagcactgtttggtttatttatttatttattttttacattaaagataatattttggaaacttgtaaaacaaatccttgtctctggtggcag

SEQ ID NO: 78772 - DNA, 682 bp, Citrus sinensis
  Intron number 1 from transcript orange1.1g022757m (locus o range1.1g016293m.g) derived from phytozome v7.0 (chr-ID sc affold00393; pos 98734 to 99415 reverse strand)
gtgagttggtgaccctctttactgcttacttctttttagtttcttgattttcattttgtagtgattctgctgatgtggggtttaacttagaatcctgacaatgattaatggtaattatttttggtataatgaggctttcagggattttgttgtaatgggtgttgagagtttttgagttctgattttgacaaaaatttattggagactgtttttggggtgattggttttctatgatttggttgatttatggaatagacattgacagaatttctgggttctgttgttgttattgaatgaatgaatgggcttgccttctaagatcttctttttgagaaaatagatgaaatccgaaacctcatgcaaatatgaatatcttaagctactttgtaagtcgaagaagatccacttagtgactgacatgtgcggaatgatattatattatgcacgacaaattttttgggaattgttttagttgcttcttgtattgagttagaagcattcaaatgatttagtttggtttcgccttttttttcccttttaaatttgtcttgctttcgaaaattggctggttgcaggtgagttggagcctgagggattgataaggtttcgtttcttacctatgattttaaactcatgaactaataatttgcaggagttatttggaaaggagataaattaatag

SEQ ID NO: 78773 - DNA, 833 bp, Citrus sinensis
  Intron number 1 from transcript orange1.1g035863m (locus o range1.1g035863m.g) derived from phytozome v7.0 (chr-ID sc affold00065; pos 369070 to 369902)
tcatcgtactctgatttgagtgctcttattgaggagttgcgtttaagtcgccatcaaagcagctaaactcacacaaagccagatgtatcgtaatagcatgtttgtttgtctttgttcttgatcctgtcgtattggggtgattcccaattggctggttggattgagccttgaacagcagctagcatttggtttgttggcgacgtttgcaacaaaaggagaaaatcaggaattggcggaaataattttcaaccatttttatttaatttcaattaaatttatttggcttcccacttaaaattttgagagcggtagaaaaatcaatttgggttttcccctcgttctaccttgtttcaacaataggcgattgatgaccaatcaatccaattacagtttaaaaaatatatataaaataagatttaacttatttgctcatgataaatctttctgttaattaacaagaattttagtgttggagaaactatatatcaattataattaagaattataaaatgcattggtagttaattctatatgagaagaatgatttgttcatattcactaagtaataattgataagaatatttttaaagttaattcaattgacttatttctatggaacagaaaatttgaagataaaaatattcaagtttgtctttaatgaatataatgaggtcgggtctccaggaataccaaggataattctgatgtgataagttttgttttgggcaattatgaatttgtctcattgatatgtgaatgcgaacatggtagttataaattttctctcatatcgtataggaattgctcacgttggtgcaattctggagagtctg

SEQ ID NO: 78774 - DNA, 355 bp, Citrus sinensis
  Intron number 1 from transcript orange1.1g024229m (locus o range1.1g024229m.g) derived from phytozome v7.0 (chr-ID sc affold00066; pos 348880 to 349234)
gataccgcttatcactggccacaggtaactaaagaagccgttacttttacaaaatcaaaatcatgttattttttcttttctgagtgaggattttcaagactttttagtttttttttttttttttgggaattttcatgtttgtttgcttctaataattaagtttacttttcccatatgagttgatgttcagctagttcccacttttaattacttgaatttaattatatagctgtcctttacgatctttcatttctttttatagtacttcactttcttttcttctttttctctttttcaacaatctaatatcaatatcacagaagagccagaaaagttactataatttgctttactg

SEQ ID NO: 78775 - DNA, 1059 bp, Citrus sinensis
  Intron number 1 from transcript orange1.1g024591m (locus o range1.1g024591m.g) derived from phytozome v7.0 (chr-ID sc affold00331; pos 107011 to 108069)
tgctgcttacctgttttcctctaagaagcccaaaggtttgacctttaactcaatttgttacatttttcaaataatatatgtttggatgtgggactttaatatctttgatatgcgattaaaattgtttgtttgtatttagcggttggtgggtattttttatttggagatatgctatgatgttaacttgaatgcaatgcaatgttaagagtagagataaatggaaattgtgcatttttgtgaaaccaaatgctacacaatttgaaatcttggatttgatctcaagtatatgagatccatcctattgctaatcctttttattttctaatctccctctctgtgtgtattgttgaagaagttatatttttagctacatcttcatggttcctttgtgttgggtttttgcacaatgcaaagacaatcattttggtcatggaaataaagctaattagttccgtatgagttacctgcaaagcaatgctttatgcactgtgtgatataggttttctcatgatagctggttttttaaatgtttgtcaaccgaatttgacaattttgactgtaagctcaacaaaagattgcctcaatccgactacacggattctagaaggcactcacagactaaaaagggcttatagagtttagtttgtctctaagaatagataatctttattatgatcactaatttttgtttgacaatgggttagtttatatttgactttgacactgaaatgactttagattaagttaataatcgcaaattggcttacaaagaagctcaaacttgggtaagtgtatgagaactaagctacaatagcaatcccaactctgagctcaattaagccaaaccttattcatgaatgctttgtaatgtttcagttcttcttgaaatattgtatcaatagggtttatttgttgcaaattggaacctgcttctgtgtgaatttcttttctctatggtttatcagaattgttatctgtgctgttacttatataaaccaataatatgtgtctacagtttccttagatcctgagaatttcaaggagtttaagcttgtcaag

SEQ ID NO: 78776 - DNA, 799 bp, Citrus sinensis
  Intron number 1 from transcript orange1.1g040084m (locus o range1.1g040084m.g) derived from phytozome v7.0 (chr-ID sc affold00109; pos 97731 to 98529)
ccgtgcttccgtctaccctccgagaccagaagccggtatacttcatttcttgataaaccttcatttcttcacaaattatatggttctccgtagcaatgagattttatctaataacaaaactttctttatttaatcattcttggctctaacaaactcagaattataatgcttgcttcagttttttttttttttccttttgtgattcttttctcttgatgtacaaggggtttgcagaagggggttcatgaggtagtcttctggttgtatcttgaactttaagggagttagtgaaatcttgcttcattgtttcaaagtggatgtaggcttacaaagctgaaccacttaattcatttttgtgtgctttacatttccaatttgctcatgcttcttctttattgagttagatcatttgtggtctggattacaatctctagtttcgcttaattagggatttgaggattaattgcttcaagattgggtctaggggctaaagattagccgcttgctggttttagaatcaacagttccattagtttctatttctttatattattgtttaatgtggtgaagttatgattatcctgtgctaaatctttttacttgcgagcttgaattttagtctgcgagaatcgaagtgtgctacaatttatgatagcaacagcatgaaaattttgatttagtattattattgttgttgttatttttggttgattttcacttgtctttgaatatatgactctgtgactttatttgcttaaatgtagagaattccaaacaaaattgtgaggaagttcagtca

SEQ ID NO: 78777 - DNA, 977 bp, Citrus sinensis
  Intron number 1 from transcript orange1.1g003036m (locus o range1.1g002823m.g) derived from phytozome v7.0 (chr-ID sc affold00667; pos 73076 to 74052 reverse strand)
ctcaaattctctctattcgccgtttaaatcgcaaggttcgtctatcgctacttcatttcttattttattttattttatttttcttaattaggataattaaataggttattatataatgcatcagatatattgttgattcaggttgtggtaatttgttgtaattgttaaatattttgtatcgtaccaacgttttacgcttgcagtgttgtcgttttaattttatttattattatttccttgggctttattcaatttcatgctgttttgggatttgtgcgtgcttgctatttttctgtttctttattgtttgttttgtccagtaaatttatttaaatttgttggacttagcaatgttatggtccattaaatacgaagaaaaattggatttccggactcttttaatttttgattggtggttgaaaataaaaaaaagttttgaagcatgtcatgctaacattaccttgaattcgaaattgttttcaattagttcgtataggaaaattctacaataaatttgtatgttgatactgaattcgatatcgttgaccttcaactaaggtaacaattatctctcttttgcaatttgtttttagcgcagtaaaataagctgtgttttggaaggaaagaagcatagccttctatttcccttttcaaaatctcgtggtcttttcattatttgctggttatgaactcaacttctgaagttatttgcatttggctagaataaatttttggtgctgcattaaccatgcaattatggacatttgaggcttcttgcctctaagatttattatttttggagaagcttgtaacttatggaggctaagtgccagcatgttgagattcactgatagagtatataaatgcagtgtaaatgtagctcttttgttattgtgttgtgtctttattgaagagtgaaatctgatattatatcacaaacagctagtgggaagtcaactgctttgtctgtgctagag

SEQ ID NO: 78778 - DNA, 1049 bp, Citrus sinensis
  Intron number 1 from transcript orange1.1g003625m (locus o range1.1g003625m.g) derived from phytozome v7.0 (chr-ID sc affold00061; pos 635602 to 636650)
gcacagttcatattcttgattttttggggaatcaggtaagtcgaaggaatttgtctcgtttgctggatcggaattttgattggatttatttattttttgtattttagtgttttgtttaaacttaactgttgaggagaatgcgttgatttgagctgagtgatgtgatgctgttcgcaatgagcttaaattcgacttgtgtgttaaattgaaggtgcttttggtagagcttttgtataaagctgtttcaagtgaaactgatttttgcgtaatcaatagaaagagttgtttgtagaagcacctatggaatgcttttctggaaagcaaatcaagtgccttttttgactcacaatatgatttctgctggaagagcacttaactagtgtttctccaaaaggtttcatcctaaggatgaacatatcatctgtttattcaacaaatttaagatggtcctggtagctctttagaagctcttttaatggcatcaaaactctgtagcacaagctatacagtagacattttactcagaaagggtctgtttctagtgtaattttagaatcactaataattttgtattctcaatgggtgaagctcagtctgtttggtcttccattttctagttcatgtgccagtcatgagccatattggttgttcttactggcattaatgtattgctggaatttttaggcatttgagtggtcctcatggacagaggtgaattttggttgagtcatgaaaggaggggatgaaattacttggaagtgaatgctggttgctgatttatggtcactctcatttttagttttaaacttactgaatcacgagaaatgttgttttagctcctgttactcttgttataagcagatgttaatttcttcccttgtgctccttttttcccaaatgctatttgtttttagctacatcaatgttgatggttggctttggtgactgattgatatgggcagagtcaccttgcttttggtttgattatacggaattaaatctttttctatacaggttaaggagtttcctgctcatactgctgctgtcaa

SEQ ID NO: 78779 - DNA, 392 bp, Citrus sinensis
  Intron number 2 from transcript orange1.1g048429m (locus o range1.1g048429m.g) derived from phytozome v7.0 (chr-ID sc affold00369; pos 149958 to 150349)
cggtaataaaatctttatcatagcttataactcttctttaatctctatgtatttcagaccaaaacatttatatagtatatttgtctctattaaaaatctaacaaattattctttacttttcaattgttatccatgtcagttttacataaaaaaacaaatagaatttaatcttaaagggtaagatccaacgttttaaaaaagttctgaaaattcaaaaagattaattggccaattggctaaacaaatctagagactagctaaatgggagtttgcccttttatacatatcgctacctgaactatatggtttaaatcaattaagaccattatgtgagattgatatcagtcgaattactctgactgggaaagcagatatttttggcggtttcaaag

SEQ ID NO: 78780 - DNA, 954 bp, Citrus sinensis
  Intron number 1 from transcript orange1.1g007660m (locus o range1.1g007660m.g) derived from phytozome v7.0 (chr-ID sc affold00005; pos 1533405 to 1534358 reverse strand)
agacaaaggttggtcacgttttcctgctttattttgctagtttcattcacaattccaccagttccgctgtgtcatcacatgattttgtaaacactgaatttgaatttttttttatatgaaactcaaaaatgttttaaagatgaagaataatcttgaagctgtaaccggtgatatgtttacacttttgttggtagtttccttttaaatcacgatgttttggtatgaagtggaaatcttgtttatgtttcattttgttttctctccaagatatattgtacttctataattgttggtctttcttggctatttgctcttggtattcattcctctgcttcttgattatagtgtatctgtagggagggccttagaaagctcagttaatagttattttagttgattgacactgatgcctgtcttagactattgatgatgttcaaaatagaaggttactgaaaatgggtatttttcatacccttttagtaaaatcatagcattgccttttgaaggagtgatgatattgaaacaactagttgtatgcataatctggcctatctaatttctgcaggtttgatatgtagtttcacttttttctgtaaaaagtttcatcaaactattggtagtttgcttcttcagtcaacacattttggattctgctagatgatgaatatgtccttgtgttcgagaatgaaagaaaggggcaggatgagaaaaacaattcctgtctgcttgggcagaaattagaaaatagaaagtggggagtggggaaggaatctatcaaattcagaattattaggtccattcatggatgtcacaagtatcatttcattcacttccttagccactgtattgatgtatcaattttcagatatcttattgttttttgtcataaaaaattgcgcttataaagtatttcttaagttttccagttcaatatttcttgaaagcagataatca

SEQ ID NO: 78781 - DNA, 923 bp, Citrus sinensis
  Intron number 1 from transcript orange1.1g013577m (locus o range1.1g013577m.g) derived from phytozome v7.0 (chr-ID sc affold00003; pos 1298293 to 1299215)
tgtcacacttgttgcacggttttttcgttttgcaggtatttacatgttcactctctttttatttttctgctttttaagtaattctacaactaaaaatcagttcaaaagctggtagctttattgatcggcatcgctcgtatgctgctaaagttttctgtttttttcttaattggttttttttttccggttcttatgttaactgtgttttttttggggcgaaaaaaatatattattattctcttttaaaaaaaaaaaatcttcagaagtaacttaatacttaggtttatgtttgtggtcgtgtaattctttgtgtctttgaatgtaagcaaaggtcagttgtttgtctaatctgggtatttgggcttttgttgatttaaataaaagttttgatttttagtgaaaaatgggaacatggtaagttgagggtttgaacgggatttttggtatgattgtttattcaatcaaatggaacatttgttatgattcgatgaatttagtttcttgtagaggattatgtgtcggaagcacatgcttgcttggttcatttcgtgttttcaggaatagctgcaaatttattgatttcgtttcaaaatctttgttcttgcatgtgtgtatatatttgacaatggggatgtgagattgtgattatgccacagagttaatacattaccgcataggattaccttgtgaagacattgaaaagggggaagttctcgatttctttcttttatcatcttagattgtggctagtagagtagtaacattgttttgtcaatagtgagcaccattttccggtttcatgttgttgcaatagatgtttctctggatttgtgagttaatgtttcttaatagacctcttttcttgtaacaatgtattgaatacagcaggtcctgttttgcttccacaaggatctgtgtctgtt

SEQ ID NO: 78782 - DNA, 784 bp, Citrus sinensis
  Intron number 1 from transcript orange1.1g046233m (locus o range1.1g046233m.g) derived from phytozome v7.0 (chr-ID sc affold00011; pos 2054112 to 2054895 reverse strand)
gtgaagaaggtcctgaaatgtgagttctttttttatttatttattattgttgtgtgcattgtatagttcttttggttggttttatattttggtgattgaagggttttgttttgctattaggattttagatattggcatattgggtcagttataggggaacacagaattggtggatggaagagtattgtcacaatttctgtcatgtagcaatgttgcaattgtaggactcacttctttcaaagcagaactttgaagatgagattactaagcaatgacatgaatgagagtttgagaatcattattagcgggtgagagatgctaatgttttaagctgaaaatgaatttggataaatcacacttgtgcttttgaaatcggtcgaggtcattccgagggagaattgaaaaatacatattgagctacttctgtgttatatgcatcaaaggaatttgaactgatttttggtccaacaaactggtgagctgcgtgcatggcttcaaataagatcacagacattttatcaatgtgtccttccagaatttgatttttgatagttaacaaatccctgctgacataaattgttgggatgagtttgttagccaaaactgacttcctttgtcccccacttttttttttttaatctttaatagacgacatttctttcccacattggatccatattgccttgtgaagaatgcatgaccatttttttcttttcaatatgaacgttggggataatgataatgttgatcaggtggttggagttggagttgaagctagtagcgg

SEQ ID NO: 78783 - DNA, 976 bp, Citrus sinensis
  Intron number 3 from transcript orange1.1g043389m (locus o range1.1g043389m.g) derived from phytozome v7.0 (chr-ID sc affold00045; pos 59378 to 60353)
aatcccaactccagggtgtatctctccgaattcaggtgtatttgctttctattattaatgctctctcatttttatggaagatatacacgtctgcaatttgtcacttaaaaaagctttagtcctgctgcggttgttttttttgaattgtcattgtgatgtatggaaattatatcatcatgtcctgcttagattatagatggaagtagctgcattccctgtaacagacattaggcagctgttttagacatcttaaggattggttaattgtgttggaaattaaacataagagattggttatttctgtagccattagaccttttctgggttcagaagtttgtaatctgctttttggttagtctggaaatgttactcatacataaattttgagtaattcattcagcacgccagtttgaaaggcatgcaagtgcttcacaaagtcgttcaggtgagttatagagtccatattgtcgctttggtgagttatagagtcagtattcttagatgataaagggattctggcttcttcatgtgcaaatgacatcaccttttctgcattatttccctgcaatgctgtattatggcagtaaattcaaattaatttagattgttttggttatgttttcagcactgctatgagatactgtggtagattaattactttgacagtttaggatatgtttcttttcttgtatttcagactgatggaataccccgaatagtgaaaatactgaaactaagaatttgaaagaggaagaaatatgtatctaacacttaatcttatctgaagtactctggataatcatatgaataaacttgattttgataatgaaactgtgtattgtagttccttttgagcccaagattgcagtcggtttgactttaaaaacctattgactttttatagttgttccatattatattaaaattggattttcccttaatggttgataattagacactgaaatcgacacaagca

SEQ ID NO: 78784 - DNA, 876 bp, Citrus sinensis
  Intron number 2 from transcript orange1.1g002396m (locus o range1.1g001969m.g) derived from phytozome v7.0 (chr-ID sc affold00050; pos 657286 to 658161)
gtgtacttcccacaaggccacagcgagcaggtgccgttccgtttcttcttttctcttttcattacattttgtattgctgcctgataataataataatatcggttgttggttgggtgaaataataataattacggattagattgcaacgatcttgttaaagcgagcactttggttgtttaagtaaattaccattttaccctgagtttagatggtgttgcctcttcaactttctaactactgctgagttgctagtaacgtgttgttgactttttcctgtttcttaaagtcaaccaattgatagtgtaattctactatgcgtacaaagtgtgtgagtgatatactgatgacacttgtattagtgtgtagtttgtattgttgttacttgttatcattaccatgtatttgtacatgtacaaactattaaggacaaatttacataatatgagattattggctgaatgaaaactcaaagtcaaactcaaatcataccaggtcaatttatatacaatagttttgtgtctagcatttattattcattatatatttcttgaatttctttttcatcaaaatgtggaaaatcttactcactgtcatgctctactctcctccaataatagtttaagaattcccaaaagttatgtattgtggatagctttgtttaccgtcgctaaaccaggactaggagggaagaggttaattattacttcttgttccagttaaagctattgctatgctctaagcattaaacactgtcagctaaaagactgatggattgttgtatatggatgctttgtgcctttttgttggtgtcttctttttggactaagttcattctctgacttggattggaatttatggctacaggtggcagcatct

SEQ ID NO: 78785 - DNA, 833 bp, Citrus sinensis
  Intron number 2 from transcript orange1.1g042040m (locus o range1.1g042040m.g) derived from phytozome v7.0 (chr-ID sc affold00014; pos 131230 to 132062)
aatttcacatctcccgatactattaaaagaaagtaagctttcctttttattaatatgtagtatttatttcagtattcggctttgttctgattcttgagtttttttttttttgttccaattgctatttctaattcttcttgttatggtttgaattttgttgctattgtgtatgctaacacaatttatgatttgccccttgcattatttcgagttttgttttatacctgaaattagatgccataatgcttaaactgagatgtgtttaggatcaaaacgtcttatacttgatgcttctaggcatctgatgtggtgttctagagactgttattttagttaactacgattttgattaatggatgcgttggggtaaaagacccttatttttctgattattcatcagtaggtagaggctggttatagtattacaccaatggtcaaatattctaaagagtacattgaatcacaaaagtcaaattgatcttgaagatttcaggatgtggttgaataagaacatatgcatccatgtaaattggatatttaaattggagttatctaggatgtgacatttttattgtgtagggaacataggagcatccttctccaaagctaacaatgcagtttagatattccataatctgcaaaatatagggttctgtttaggatcgaatagcagcaagtacgcatcagagcggcatattttgttaagtcccccaacaaccactgcacacccccccccccccccggggggctctttttccaaatatttgacttttttccctcttcatttagtagttataatgtgtttctctttgtgcacatgcagtgtggtcgta

SEQ ID NO: 78786 - DNA, 787 bp, Citrus sinensis
  Intron number 1 from transcript orange1.1g016242m (locus o range1.1g016242m.g) derived from phytozome v7.0 (chr-ID sc affold00101; pos 165102 to 165888)
cttttcctcacattggcgcttccaatcgttcaaaggtaccattttttcttgcacttgaagttcattgtgagatggggttttgtgtttttggagatttatgtgaaatgtagtagtgggtttgtgctaagtttagagagtgtttgattggtgattaatttgttagatttgaaatcaaagttcaatattattttaggaaaatataaaagatcgaagtaaagttgggtactttttcaatttagtttttatttaaatgttaagctaatgtggctctataattaatggtacgtgtgattttaatttgtcctagtgtaattgtttgtggagaaaaatgaaaatgccggaaaattacagaagctaaatacctggattctgttgtgattgtattggttttgttgaatctgttgcaatttaatctgttatttagttgagaatgattgatttactctactgctctggttaatatgacagatataagttcataaatcataactgatcaatattgtttatgttttatccaatgtggttcggagaagttgatagttttaacttcctcggatgaatctttcatttggtcacgggccgaaaagaaataagaatcttcaacttctcttataggtctttttaattggatgtatctctgcttgcactgaaatctggattataaacaatctatgtctaatctagtgcatcatattgtaatttagcacagaaacactaattgtactggagctgctccttgtataattttacaggtatttattttcctctgcaagagttggtgcattga

SEQ ID NO: 78787 - DNA, 667 bp, Citrus sinensis
  Intron number 4 from transcript orange1.1g036766m (locus o range1.1g036766m.g) derived from phytozome v7.0 (chr-ID sc affold00049; pos 70044 to 70710)
atttcaggttgctctaagggttgtcaaccattaaggttagtttcatttgtgtattatgttgctcatcattttatggatttattctaaaatgtgtttttcacaattactcattttcgaatggtgatatcatgggtaggggaaagcacaattttgttgctttttgtctttgaagtttttcatgctgccctatgctatccaactaggtctagattttgaaatgcttgatccgaaaccttttgaagtatctgtcttaagctgcaacctttggactcagtttggggtggataagacaagcttaaaggagaagaaacttttagaaatttgcttttcttaggcatatcaaaaaaataatcttttcattgtgcttacttagaggttacttgagctgtctatgttttgaattttcaagtacatctattttgagactgatcatgtgattcattgttttgaaattttgagtataacataggtgatctccatgtctaactgcctcctgttctctgtatagtagatgtcaattttcatagtcggtgtattctgatattgagaataagggacttaataggttacaggttaaaaggataagaagagacatgattttgcttcacagtttgctgctgctcaaaatttttcttcattttcctcactactttccttatggacaggg

SEQ ID NO: 78788 - DNA, 654 bp, Citrus sinensis
  Intron number 1 from transcript orange1.1g023965m (locus o range1.1g023965m.g) derived from phytozome v7.0 (chr-ID sc affold00003; pos 1148862 to 1149515)
caaacgatctgtcagccaatttcgttccaatttttgtaagtattattgcgcttgttctttattcatttatcatggcttgtgaattttttatgtttcgtttgttggttgcccgtaaagcaaaggtaaaaaaaaaggaatagaaaagaaatcaaatcaaaattaagttactgttaaaccagtagctgaatcttagttgagtcagttggattttatgtttaaaatctcttgtgaatcctataattgtttggactgatcaatgaaaaatatttggtttggcttccgattttctctttcgattcttattgtttcccggtaaccaaacgaaagtattaattcgctttgttagggttcgtttctgcaaattaggcttttagttttttccatagattgttttagttagaatgtatgtttctatgaatttgaaccggctgattttgttgataaggtttctggtgattcagattagactcatgcttaatcgattgatagacctctgtggaactaattggctagcccttgaattttacatttgattttattaattatttatcattttaatactttgaactgaactgtggttatttgggtgtggtaatgtgggtctttatgaagtcgttttgttgtcttgaattaggctttgtgagatattcagat

SEQ ID NO: 78789 - DNA, 688 bp, Citrus sinensis
  Intron number 1 from transcript orange1.1g014331m (locus o range1.1g014331m.g) derived from phytozome v7.0 (chr-ID sc affold00062; pos 363655 to 364342 reverse strand)
atcacattcacagctatcaatcgccgctttcgaaggtaaactccgaacggctcactaacttttttctttccttccgtttaactgttaaatttcgttcgtattctctagcgtttcggttaccgagaaaacacgagaaaaggaaagaaaagtaggtagatttaaggatttcaattggttgttacggtttgtcttcagtttgttagtactaagcgtcaagatatgctcagatctgagttttatgatttgttttactgtagatctagatcttgattggtgtttatctgaatctttttgtacaattgatctggatcttgctagtcttttacatctttgtttgtgatataattgattttgtatgatgaataaaaaattgctataacatatctttggttttatggcatgtagaatttactgtacatttattcgccttatgcctgaagatgatttcacgcttgttttctttatggaaaataaccgattttaagtatattacaagagcatgtaaaggaaatgggtgaatattttgtataattttgaatggggaaatgatgattttgtctcctattgatgtaaattggtcaatatatcttaagaaacagtgctttgttcttgtggtatttgtttttttttttttttcatttttacttaagaaatgcagtaaaaagtttgtctcattttgttagtagct

SEQ ID NO: 78790 - DNA, 515 bp, Citrus sinensis
  Intron number 2 from transcript orange1.1g047764m (locus o range1.1g047764m.g) derived from phytozome v7.0 (chr-ID sc affold00017; pos 226724 to 227238)
ctattttaaccatttctcgcttggaggtttgcttctttccgcttctgctacttcttctgtaggtgatgtgattccacttccaaggttttaattcatgttactgaacacaaaacatgaataaaaaaatcaataataataattaagcagacagatttttggagatagactgccaaacaaaatttctgtacaataatcaaatctagtttatgtagattcacttctgccaagctcgattctccaaattgtataagttgttgatgtttatccattttaaggctctatgaacaccgtctttcatattctggttggcacccaaattgatattcaagctcttattaatatgtttgttttatttagatggatgcaagttgaatcaaagacttcttttcttggtcattaatcttacttaattatattcttactggatatgtatgatgtatcctagtgctctaactgctcgataaaacgttgtcaatcaccagaatactttttgcctcagggtctgagagggcttt

SEQ ID NO: 78791 - DNA, 996 bp, Citrus sinensis
  Intron number 3 from transcript orange1.1g028160m (locus o range1.1g028160m.g) derived from phytozome v7.0 (chr-ID sc affold00057; pos 115939 to 116934 reverse strand)
aggtaaaaggtccatgtaaaagaatttgcttgttgaagcagttgttagtagtatttatgaagcaaagattctttcatgacttaggctgacttacaactgtatcatggttgtgtgtcttgtctctccatgtgtttgaaattactgaggaaatcgaaaaaaaaaaaaaaacaaaatctggtttgcatcaaaccatgttgatgtcatgatatacttctcaaagactgtgagaaggtgctgctataagacatatgaagcaagtgaacacacagtttacatcaaaatatggtaaattcactctaaacaatttgtagggtacttatggagtcatagtgaatgtttgagttgggtgttccagtcacagcgccagcaagtgggaagttctggatattggaaatacaggataagatagattgtgctgtcttgtttttcgtggttctacttgtatcaaacttttaccatttcactgtgaacctcttgaaggaaccttgaggtgcatgtatgagcattttgacagcgttctttctggttctccattctctacaacaaaattagaatctgaatgtttctcatgtagatatttgccattactttcaaatcatggtctttccagtaatagtagtttgtattctaatataggattatatgtttttgcttaatggatgcctttttgacaataggggctcaaatgtcttaataaatagtaatcctgtctgttgtagtcacgacacatgcatgattactaacgtataattgtctgtccatttgttcaaacattagattctaccggtcaaggagaataataattctgttaagtgtgtagtaatatcctcattgatcaaactctcatttcctataagatttcttgcccattttatgttgctggagtttgccatcccttttaaaaatttcagtacaggagttcttatctagaaagatccatttttctttgtcttttatgtgtatttcaatgagtttgttgggcaggtggtagctgca

SEQ ID NO: 78792 - DNA, 446 bp, Citrus sinensis
  Intron number 3 from transcript orange1.1g024886m (locus o range1.1g024886m.g) derived from phytozome v7.0 (chr-ID sc affold00003; pos 2934928 to 2935373 reverse strand)
aggtcaactgtatttctttcttttggtgttcattccttctttaatttctatttgtttacttttactttttatttgtgctactatgttgatgtttgattttccctaagcgaagttttgattctttacttatgtttatcaatatgctttagaatttgtgtgaggttatctggtttgtgattgtgctttgtggttatgatttgtggagtttttagaataatattaatacaatttacaaaattaaactactttgatctccaagtgcaatatatatatatatatatatttgctgctctgctgctgccactggaatatttattgttttctcatcatgagtaggcttatcttcaccaatttttcccagactatcccttctgttgtgcatcagaagttttgactgaagcgaaagcctatataatgttttcatcttttctcttgttgatagggag

SEQ ID NO: 78793 - DNA, 943 bp, Citrus sinensis
  Intron number 2 from transcript orange1.1g047404m (locus o range1.1g047404m.g) derived from phytozome v7.0 (chr-ID sc affold00138; pos 64430 to 65372)
aaggccgctttaataagctcgggttgtcatatcaggtttttttttttctttcggttttttctttgtttttaaaatgtgaaattgcaattgggtttttgcttttttggtagttatggcttgattcacgatcaaaatttatttttggtttgtttgtatgtgcatgttatgatggtagcaggagtttacttgtgcgagtctgagtgtagttgtaaattcctttttaagttgcattaccggatcaattcagttgttttagattagtattgggtatgttaatagtacttaggttgatttgctttcaagatgaattagatgtgtcttgtgcttttatggctagaaaacttgaatttggactggattctgttgctatttttcttttcaataaaaattaacatgctcgggcttcactatattggatgtattgtgcattgggtagagctggtcggactgtttcctttacatgccttgtgctatttcattgttgtgttgtatgtgagtatggatagcttgcatgagattgtactcttttagtttcattttttcagtacttgtgatgtttgtgggtgcgtttctgttttgccttttctattattcatttactgctatgtttcatttgggattttttttttccattttaattgtcttgaaagatatgcatttaacatgcaagtgcaattgggtatggtaaccttatgttcgtaaaacttaattgattgcactctgttccctttctttctcctttagtatgcaatattctatacttttgttttttcttttcaatttttttggtatatttttttatcacttttgagggttaatagtggagttcttaatggggatataccatgcatgatttagaacgagattgaatgaaatatgattgttgttttgttaattagatatcctctatttaattacaggatattttccagaactttcgatt

SEQ ID NO: 78794 - DNA, 859 bp, Citrus sinensis
  Intron number 4 from transcript orange1.1g019997m (locus o range1.1g014094m.g) derived from phytozome v7.0 (chr-ID sc affold00023; pos 95786 to 96644)
aggagcctacaaacataattggactcattctggtaatttgaaaatcaatttttgtggttcatgttcattgaagattaatagttctggcaattgttctatttgaagttgcatgagttgaattgatgaatatgcttatattctgatgtggcctttttacaatctgaattttaccagacttggtctatccagaactcatctagtttgcttgatatgatgaaatatttggtaacatagagagttagcatcattgtttgaattgttagataggtgggttggacagtagaaaaaaatctccaaatattgggagctaaccattgactcatttgataagagagctaaagaatatcttggtaaggtgttacgaagaaactgcttgccctagaatttcaacttcatcgtggttggttggttaacagtagaaaaacaatctccaaatattgggagctaacaatcgactcatttgataagagagctaaagaatatcttggtaaggtgttacgaagaaactgcttgccctagaatttcaacttcatcagggttggttggttactcttgctcttatatggataaagtagcgggtgaaccaagcataaatagctgtactttttattgcttgtattgcatgtcagaaatttgatctacttaatttgatgtaccaatcatcttcctcgtaattgcatatctttcgatctatgaccatgtgaaaatgtacagctacattgggcatttcattagcaagggccaggttagaatggatgggaggaaagcgcaggccaatttcttttttgcatccttttctctttctgacattcaaattctatcctttaggtgaagaatttgttaacaattcacccagaag

SEQ ID NO: 78795 - DNA, 266 bp, Citrus sinensis
  Intron number 2 from transcript orange1.1g044689m (locus o range1.1g044689m.g) derived from phytozome v7.0 (chr-ID sc affold05690; pos 1953 to 2218 reverse strand)
cggtgcttgctatcaggtagtttataaaacaaaaccttgtttaatgaaaattaatcaattaatattgtcttgaatgcacaaaatcaaatatgcttaagactttttatggttcacgttacacgtacttattaaaatattcttcacgttctttttgactgattctaaatcttccacagtttattattttttatttacgtaacattgagactacttaattaagagtggtgcattatttgttattaggtcaagtgcacaaggcatccagc

SEQ ID NO: 78796 - DNA, 861 bp, Citrus sinensis
  Intron number 1 from transcript orange1.1g009400m (locus o range1.1g007877m.g) derived from phytozome v7.0 (chr-ID sc affold00014; pos 1656358 to 1657218)
aggtgagttggttcgctaatgtatttatttcaacttactggtagtgaattttaagtttcatctggttgtgttttaagacattaacttctaagtgcttgaatactagtacattctggttaatgatttatcaagcaataacgatatttcttaaactgcctacacttggcactcgtaaaattcaccacgtgctagcttgtggtaatgccatgtgatgttgggattttgtgtcccaactttgtcaacatagacttgttgtataaacattgtatgggatttgctatgactgtattgtacattggcataaagcattgttgttgtttagagttcttgtatgaccgtcttgatagaaatttaatgtagaaaactctcctttgcttgacccacatggttgattacacatatatacactttggaaacgtgagctgttactcagttgtgctactagtatacgaatatttttctagttggtttttaatcgcaattgaggataagatatagctgccttattttgactattataaaacggctttttttacgtattatctattgagcttaggaggtaactttcaccaatatgaaaagagttatgatcatgcatacagaaagtaagaagttcacttcatcattaatggatatgatcatgtacttttaaaaataagtttagaggaaagtaacaatatagacaagaagggatgttttaaatgttttaccgtaagtttgaactaaagcctgcctatgatccaaaaatggcaatatgttattggaaactttttttctctctttttcctgaccggcaagttaaatctataaacatacctgcagtgttatctcattttttgatatataataaagtgcaggacg

SEQ ID NO: 78797 - DNA, 631 bp, Citrus sinensis
  Intron number 2 from transcript orange1.1g035172m (locus o range1.1g035172m.g) derived from phytozome v7.0 (chr-ID sc affold00003; pos 1695627 to 1696257 reverse strand)
tatcttgatcttctacaggctgattatcctgaagggtaattctctgttttttttttatattccttaatttatttgaacagttgtagtctgtagaccattgttaatctttcgcgtttcttgcaatctggccttcttgctcttcttttgagaggtttttgggatattttcctcttttctttttttcttttctttttttttcgttctaggccactttgatttaatgcaggttgtgaattgtgtgtttgggaattaggaattgcaagcttgaatgtgctaagattactggtcttatttttattttttaatatttatgcattactattttgttgcctggttcactgatgtgtaaatttggacagccatggatctgtaagcacattgtttatatatgtgtgatttatttaaatttgatcctgtaatctgtactctgtagagctgttggattttaccatgtgatttctagcaaccatgtgttcgtttgaatgtgaatgaatgttagtccttgtatttcatttatggtaggctaccaaacttttactggtataaaagattagattcaactatataagcatttttttttttttggtatagagttttgcttatgactgtttggtatgcagagacgcacttg

SEQ ID NO: 78798 - DNA, 677 bp, Citrus sinensis
  Intron number 2 from transcript orange1.1g027105m (locus o range1.1g027084m.g) derived from phytozome v7.0 (chr-ID sc affold00215; pos 35088 to 35764 reverse strand)
ttactgtaagtctgtaattttgctatcttcttgttatttatacttgctttgtttatgacatactaatgcagcaggattgaagtatatgaattatttgattttttgaatggataactttgagcccacattttgacactaagggtatagattattgacttgtctgattgttaaagcatagagatagatagaatatatttcattctagtacttattccttgatgaaaatctatttatatgaccttgacctattgttctgtcttttagtaacataatgagtattgacaacctttttgaatgtaaaaatagaaaagtgtgtagaccatggtggcgaataagaagatagggaatatagaggcttgtgatgccccaaaaatccagtgatgatcatcctgttgcattttattcctttgggctggaccaaagttacatagctcctttaattcttaatagatgtcatttgattggatgttagctcaagaatgattttttcttgccttggatgacactaaggagaactccttaaatcattaccttagtagtgcttaaatgtttaatgagcaatagattttttgcaatttaggaaatctcttttgttcaaccactctaaggatacactttttttctggctggttggatttgcagatagagcattatcttcaaatagttaaaaccgaggt

SEQ ID NO: 78799 - DNA, 530 bp, Citrus sinensis
  Intron number 1 from transcript orange1.1g030225m (locus o range1.1g029103m.g) derived from phytozome v7.0 (chr-ID sc affold00196; pos 102606 to 103135)
aaccagcaacaagaacatacaagtcaagctggtgggtatgtctttccctttattttcttctttgaaattattttttgataagatttaattttctgcctgcatggatcattgcattagcaacagggttcctacgttttatttagattcttttgctgctttcgttcttgtgttagatgtatcttactccaggggcttcaagatttggctttctgttgtgattatgttatttttattaattaaaattatgaagatataactgctgctttgattaaattaggaacgaacaacagtttagtatttaattgaacaggagagacacagcatataattagtttcaacttttactgtagaactttgcttcagctgcctattattgctgtttcatgaagattattcagtacccaatatagcagctattatattctatttatgtactactgacagagatccttgttaatgaaatttcttgatctttttttattcagttaattgacacattattgagcttttgccaggtacttcttggggac

SEQ ID NO: 78800 - DNA, 595 bp, Citrus sinensis
  Intron number 4 from transcript orange1.1g030225m (locus o range1.1g029103m.g) derived from phytozome v7.0 (chr-ID sc affold00196; pos 104021 to 104615)
agcgaaaaagtgggttcaagaattgcaaagacaaggtaactagagtatgtgaaccgtttgctttctctttgacttaggaccagcagaaggtgtcttagataaactgcagttagaagttgttcagttgaaaattttgtcattagtagttcctctctgacttgtcttttattttactcgctagagtgaagtttgcaatcagtttctagactaagtcattcactcggactattttcatcagcaggccctcaatactttgtttcttacattattgaaacttaattaactttgcacaaatggacatgctgtatattgtcatactgtaagcaggcaacctttcatgatattctcctcacatgtttcatgtctgctgtggcacatgaagattcaaatattgctgtcccacaaagttctacagctacttttaataactttaaacgttttgtatttacttgaatctgtaaatttcacagaatgttctccttcaaaatgatgttacaacttgtatagactgcactactaactattgaaatacaattggctttattctaagtcttatttttcattttatattggttcaggaaatccaaatttgatt

SEQ ID NO: 78801 - DNA, 938 bp, Citrus sinensis
  Intron number 1 from transcript orange1.1g029755m (locus o range1.1g029755m.g) derived from phytozome v7.0 (chr-ID sc affold00057; pos 449872 to 450809 reverse strand)
aattgcttgttgaactttgcacaaagctcaacggggtaagagaagagctttttgagatacttttttctaactaatgcttatgttctgactgaagatttgggaccaatgctgatgaaacttttgctagtaattagatccattgcagctgtaattttaaaatcttgctagatcaatattgatcttcaaatgacatcttttaggactaatcttgaatggcttgaagatacttgttggtaccttattcgatatggatcccacttgatctattttgattggtgctattgagactaaagtataaaagatggtccaacaatttatatgtaattgaaaaaaaaacatgtcttataagttgatattgccgtaaaccctgtatggcaatatgaatggataccgataggcactgggtatctgcagcaaaaagaagataaatggtgcagatgcaacaaaattggttgatatcctgaaacagccacacaaaattgaggaaagatgtgaatttactgtgtttctggaagtccttttcaatatgttggaaatttcgaatttatcccaaaatacatgatctttccctttaaattttaatcttgatcatggtgctcatgtttagtaacttattagagtattgatattcagcatgacaatggaacaaaaaaaatccagcttttaagaagctaaatggtgttaattgatgatttttttttgtgattttttttttcattttaatgttaggcttatagtatatctacagctgttatttccaacataattatctagttctgctctcccatcctaaaacatcaagtatccaactattctttttattccagttgattttttgttgatcttgttcaagggcatgagattctattttatcatactatcagaagttcgttttgatttcaggcaatatctgtaaaagaaactcaactgataggaaa

SEQ ID NO: 78802 - DNA, 518 bp, Citrus sinensis
  Intron number 2 from transcript orange1.1g004267m (locus o range1.1g003620m.g) derived from phytozome v7.0 (chr-ID sc affold00061; pos 193530 to 194047 reverse strand)
tccagattttccgcggcgacaccattctcatcaaagtacgatctcgcctctctctctcatttttcttcatatattttttctttaacttattggatgagttttatttcctattgccataggattattactatcataattatttttatttatttatttggttattgcctcgtgctagtcaagagacctagggttttgacttagctcggtgattatgattcgtcttaagctgttggtgttagttattaattactttattttatttagcattaattgattattttatttgctgactggttagtagacttgagttggattattggaaatcctattcggcaatcttgctcgtgtggctttgttactccctttgagggtttgcttaaagtgcgcataggggttcatgtgctgtgttacgacttgtattgattttggttttatttattacttattgctttgtgtgtttctttttggtgatttggttcatagggaaagaaaaggaaggacactatctgcattgctct

SEQ ID NO: 78803 - DNA, 1027 bp, Citrus sinensis
  Intron number 3 from transcript orange1.1g013161m (locus o range1.1g013154m.g) derived from phytozome v7.0 (chr-ID sc affold00138; pos 189837 to 190863 reverse strand)
ctgcttcagaactcttaaattgaccacaccaagctgtaagtatctgaattcccttttagtgtatcatttgtgcatttagtttatgtgcaaaatgttttatacccatttcatctaatggtaatctttttcttcttgccatgttagtttttataattttaatagtcttatctgttaattcagtgctttcttcttgtgtgatttataatatttctccccatatgttgacagaggaatatttagccctgaatttgtatggaatttatgaattgttgatttatattgtcctgaatgaattcatatagtaatttgttggtttgccagatttttgtgatctgagttgtctttatggttccagtttgttcaggttcatctggtagtttgcatgtcaattaaggagggcccaaattattatgcatcatgttcatttagatgaaaaataagaggtggggaccccattttgtgacatggatgaaggcaaccaattcattgtctgtactttttattttcttcataaatgcatattcaaactttttccttgatatgaaagtaggacatttgttttggggaccatgtttttctggttggcttgatgtatcccatgttgtttacttgctttttggctgtcatgcatgagttattagtcaccatagggaccacattgtctttaatcatgagttacttaacctatattttgctgctgaagggacaattataaacctgaaaatgccatgggtggatattattattgatgatgcaaactttacaacccttttatcaatgcatctggaatttggatagtttacactaatttttacattgataatgtatttgtattgtgtactgctttcaaagggatttctgatggaatttgcttagttctgtgtaattgattgcacaatgaggcttgatgagtgacctttttgcaattgagttttacaaggaaaatggttaattgcttgaattgtgaacttatattttgtgactattttatgcagttggtgacttgaaccacttgatttctgcaacc

SEQ ID NO: 78804 - DNA, 776 bp, Citrus sinensis
  Intron number 1 from transcript orange1.1g013161m (locus o range1.1g013154m.g) derived from phytozome v7.0 (chr-ID sc affold00138; pos 191635 to 192410 reverse strand)
actctcattttttctctctctagcgaaaatcttcagtaagtctcaggtatctgctttctctcttactcttgggatctaaaattttcgatcgcattgtgcataatttttgttaactgttatgtgaattctcttcgatttatagtttttagtaataatttgtttagatgattagatctgtagacttgaagtcaatgaatttttacttcatgtataatttagtacgttttcattggaattatgtttctacgatattgatgttgtgttcgttttatttgttgtgaagatcctggagctttatactgctctactgttttgttttcattccatgtttcaattgccggattctttttttttttattttggtaaaaattactagatctattataattcattctatgtgaaaccatgtgtgacttgaagtttgtttagttgattgaaaatcttgatagtttattgcttgtttgaattatgcaatattcttttgttgttattgaaatactgtgatagaattgagatattttcacattttttatgtgttctggagaatctgcaaatcgatctgtgcttttagtatgtgaagtttaatgcaaattgtgttgcttatgatgtaatattagtagttttaagtgtcatgatgattgtttcgtgatttttaagctttgatatttgatcagattgtgtatatcagtattctttgaattgctataatttatggtatcttatgtacatttcacctctcaattgctaatttacatttatgtgaaatttcaggaaaa

SEQ ID NO: 78805 - DNA, 934 bp, Citrus sinensis
  Intron number 2 from transcript orange1.1g047329m (locus o range1.1g047329m.g) derived from phytozome v7.0 (chr-ID sc affold00162; pos 202518 to 203451 reverse strand)
cacgaaggagctctctgcaccaacagtgatattaggttccatgctatttaatgtctcatttatgacattgtatatattaacttgtcatgataactagtaaattttctgatgttgtgtgtcaaattttagatgctaaggaataaggtagaaaaatataccagaaactgtttaaatattcatctgtaacttctctctctcgcatatgcagacaaacatgcacaagtctagagtcaatgttgctattatttgtatttctggataatgcttaatgcctttttggctgtaagattttttcaaagcattctttgttcctcaagaaatatgctacagaacaagcaatatgttaaaaacctgtggaaactatttcttttcctctaactatcataggcatattgatgataatcttttttaaattgaggtgtaaggaaaagatatctagtgaaaatttacactggtaaaaatgaatttttagtttggttatttttatatttaactcattttaaaggagaccataaacctcttcatgcatttggaactgtttctgtatgtaaattgttctatttaaggtgatattttgggatccctatgttgcttgttgtttatttcttaacatttgtcccttttagttcatttgctttatttgtcaaaaaagtaagaaaaaatgctatatggtcctgctatgaagttttcatttctacattttgcaaatagtggcatcctaattaatttgatatcatccttttattctttttttcagtatagcactttgatttaaacaaattgtatctgaaaaaactttacctgcaactcatttggttttgattgatattgggaatactattttttgtccattagcttatcacatttaatataattcctttctttacccggtcatgcagagagattacgcgagttagcttggagtggtgtacca

SEQ ID NO: 78806 - DNA, 660 bp, Citrus sinensis
  Intron number 5 from transcript orange1.1g027851m (locus o range1.1g027698m.g) derived from phytozome v7.0 (chr-ID sc affold00014; pos 671352 to 672011)
ttttcataacttttcttgcttggtgtctaattgaggtgagttctgttatcttatgtgcctagtgcctacttaaaaattcagtaattgtttgcaaattgtatgggctgtttgctaaaagtaagaaactttgacttgtaattaacgttgtctgattcctggatgagcttatttattgacatcattatgaagagaatggcataatacatcagttcacattgcatttaaaaacaattaaattgatataacttaatgtttctgatcagattgtcagtattaaagcttttttattgggaaaaattgtacccttttaatgttacctgagattaggtgtaaatcttcttacacattttctttcaggcattcatttagtcagattttctttccagcactcatttagtttctttgattgtaactttcttactttcagccgtttcttcatgtgtatgtgtatgtgttttttctgtaagtgctttggatgcactctctttccattgaacacaatagaagttttttgtatctgttctgtggtctttcctttttacgtaacattttagtagttagtagatattttttgttttaatatcgagtttggcttcatgatcttaatggattgagattcaatgactatcttcttgatgcaggtaattaggtatccgtttt

SEQ ID NO: 78807 - DNA, 461 bp, Citrus sinensis
  Intron number 2 from transcript orange1.1g017177m (locus o range1.1g017177m.g) derived from phytozome v7.0 (chr-ID sc affold00017; pos 1490851 to 1491311 reverse strand)
gcaggtatttatttttaattcactctttcaattcttatccaagagtccaatttttggcatccgaaaaagaactgaagccaattaagacaacaaacaaaaggggcgagtgctggtgactggtgttgttggctacctacttagcttcaatcatttcccactatctagaaatgtcggccccacataacataaacctccttttgcgttgattaaagtttaaggctgataattgatgagatgtgttcataagattaattatcttcaaggaatctcaccaaactttcaagaatatgtatgtgctggcttttattgataagattttcaaagttgaataaagagattttgtcagtaaacaagatattttcaataatgtcattaggaccaatgctaatgccaattgttttcatttaaatttgattacttttacagtcagaggtgaactttctaggaagactttctcatcc

SEQ ID NO: 78808 - DNA, 453 bp, Citrus sinensis
  Intron number 1 from transcript orange1.1g042165m (locus o range1.1g042165m.g) derived from phytozome v7.0 (chr-ID sc affold00050; pos 105064 to 105516 reverse strand)
caggccagaacagaaatttagttgatataaaacaggtaaacatctttctgacatttttcaagaaatttggttgatataatacaggtaaacatctctgtgacatttttcaagtaacttacatcacttactttgttcacgatccatttatccttaatgtattcttaatatccatttccgatgttcagatgctaacttttaaactcctcattcttctgttaatagtactgtaggaaaataatcttctgttaatagtactgtagggaaataagctctgcatataccgtcatgtgaatttcagagtggttttttccttttggtgattagaattttagagttactgattaccaaatttacctctagctttttattctttgaattgcatgcctgtgaacgcatagctatgttttcacatttacaggaagactttcctcgttcttcatcaccagtgtataa

SEQ ID NO: 78809 - DNA, 1027 bp, Citrus sinensis
  Intron number 1 from transcript orange1.1g042155m (locus o range1.1g042155m.g) derived from phytozome v7.0 (chr-ID sc affold00048; pos 521619 to 522645)
agggtcaagcatttcaagtcttggctaatcctaatgtatgaatcaacccccaagccttccacatgtataatgccagatatatttggtttgactatggtcaaagatcttgtaggtatgtgattgatgaccagtcagttgagtggctcatgttagtacaatccctgtgtctagacatttttttagttcatttagatataactgcaaaccatctatctgaggagcataccggtattagataagggtgagcacgcatctgttcacttcagtgtttaacaataatttgaaacaaaccataaggatcagtcctgtttggctagaattcaaaatcaaaaagcaaaacgctttggttatagagaagctttcccttttaaactaaaaggacctcttccgaggggcatattgttaggtgaattatccgtttttctgcactttaatgtcactttcttgcgagtacttaaatgattacttagcgacttagttatgagcccccataattttgggggaccgcttaatgtgttgtaattcattgagtgctcttaaaccttccttgaagatattgtctagagagtagagaaccttacataagattttttgtgagtgcttattgttagccctataccttctgagtttgaatattgtatctctatttattaagtggctctcgtgtttccagccgccaaaatcctataagcctgttgacggctcaggggaatgcttaactgagagattatcctctttcttaggaaactatatcctgatcactgcttatgttgcatctgtgcgtatattttgtgatcatatccttcctttactatctgttggagattcaactcgcactttttggttaagatcatttcaccaccttggcacttaatttgcttgcagccaatgggaggaaattgattccctgcttcatgtatttttagcattgtatggaaataaaattgtcttttgtgctaaatcacagtcttattaatatgaatgtgcacccgtcttttcttcttcatacagatatctcctcggacga

SEQ ID NO: 78810 - DNA, 579 bp, Citrus sinensis
  Intron number 1 from transcript orange1.1g030226m (locus o range1.1g030226m.g) derived from phytozome v7.0 (chr-ID sc affold00321; pos 166200 to 166778 reverse strand)
tacaggtatgtttcttccatcagtcttccaagaaaagaatatagattttttccaccaacacgattctttttttcttgacgctttggggatcttgaagatattttcttgtttgctttctgaaagattttactttgataaatttgaagatctttagttcatcagtgtttatattatagatgctggaacgttacagcttatcgaatttgttttgttaatatatgtcaaggtttctgtagaacagttttccagctaatgaattgtatttgaacttttaaaatatgtaacctgtaatttgagaaattgtaacgaaaaagtttggagaactggaacttcacaacacgtaaaatttcaccttttttttttttttttcagcttcaaaatctatataaaaactatggatgtttatttgtgattcagctcttagcttgatgattctgaaatctgcagcccttttttgtttattataatatatcttatttttagcgagacttattaatgagtctggtagcatattttaatggggttttatttatttattgcgcaggggggacacggccttttgtagtttcgagtgcagag

SEQ ID NO: 78811 - DNA, 797 bp, Citrus sinensis
  Intron number 3 from transcript orange1.1g024518m (locus o range1.1g024518m.g) derived from phytozome v7.0 (chr-ID sc affold00497; pos 94971 to 95767 reverse strand)
agggggcttggtggaagagaggtactgttagagttctttagtgcatatttcattttttttttcatttttgtgtaattcaatcactttcatagtcaagtggttcagtaattaagtctgtcaggtttaaactttaaagtacagacaatattaatgactgacttttctgatggttgtgcactcctttactggcaatgcaatacaattttttttccctgtaacccagttttatggcttctgcaatagtaatttcaggtgggtataattttgtgaaattaattcattattttatctataactcattgcaggacttagggcaacaatcagcatgcatgtttatcttccatttataacatttttgccctctcaatgttctatacttattccctcattattttttgagttcactgtcagaataaaatcattagatgatgtcagctaagaatggatagggacccttccagatctgggctctctcaagctttttcttaggccatgtgcttatcattgttcttgtatggccaagatttgttcttttattgttgtttattttctttgtatttgctcggataagatctcttacatcatgtatgaatagaggctaaattggaaatgaatggctgaaaactaataattttgttaatttctatttatgaatgcatatattctttataattgctatgttcattaactgtttcatctactcagttgttatttcatcctcataggtttgttttttcttttatgctacaagggataattattcatttgaattctcatattacagaggcgattgcgtg

SEQ ID NO: 78812 - DNA, 685 bp, Citrus sinensis
  Intron number 1 from transcript orange1.1g027778m (locus o range1.1g027778m.g) derived from phytozome v7.0 (chr-ID sc affold00196; pos 182990 to 183674)
gtggggtcaattgccctagcttcaatactttaacatgggtttcactttcaaacttcaaagaaagaagttaattactagctaggtgaccattagtacatatgtagagatgtacgtacgtataataatatatgggcaacaaataaagcaaatcaatcacaatatttgagagaagcaattcaacaacctcacccgctcctttctttctcctaaagaggctacataccaactccatcgacaaaagtaaaagtaacgtacactctatctatttattttatctagttaataacaacaacaacaaccaatacaacatcatcaaaagctttaacttatctagttaatcttccatatcttcgaatcttcattagcgtaataaagagagaggaagtggggactcttttagcaaacaagaagaaaactcaaggacaagaaaggagcgtgtgaagacaaacaataaacataaagtggaaccgaacgttgccaaagtgatcatcatcagaattcagaaaagagagaaaggagctttgagctttctttccttatgactactctgctagtcatgttaaatagccctttcaaagtggctcaatcttaattgacatcatcacaatatagaagagccaaggcacaaagatatcaccaatgctgctaagaaactccatttctagcaccaaaaggttctttcaaa

SEQ ID NO: 78813 - DNA, 457 bp, Citrus sinensis
  Intron number 1 from transcript orange1.1g043251m (locus o range1.1g043251m.g) derived from phytozome v7.0 (chr-ID sc affold00005; pos 138351 to 138807 reverse strand)
caaagttttggtgagtaatccatgcacatacatgcacgttaacaatttcaataacggaaaagttaaaaagataaattgaagctactcattaatgatgcatatatatgtgtacttattgttttcttttgaagcaaagtttcttttcacgcattaaagttttatacatcgttttgtaactatgggtaataagctcaagcctgtatttacaaaatgcggacgttcgctccttcgaattattatactattttgacttgtcaataatttgctgcgcatgcattcgagggtatatatatatatatatacatatttcttttctttggcgaattgatttcttttggtcgtttctactaatctttttctttaatattattgttgagcttttatctattaccttgagcattttggaaaagcggtttccttatggttaaaatatggctttttgttgatattgacagtg

SEQ ID NO: 78814 - DNA, 709 bp, Citrus sinensis
  Intron number 1 from transcript orange1.1g010519m (locus o range1.1g010519m.g) derived from phytozome v7.0 (chr-ID sc affold00057; pos 540689 to 541397 reverse strand)
ctgtgtttgctcaaggcagaagatcaagcgggttagtttttcttcttttttttttttagatcaataccccacttgagtgaaaatgctttcttcttcttcttcttcttttacctttttctgagcatttacatttctcttttgctggcaattgcttggatcataagtgatgctttctcataaatatattccttttgctctttgttgttttttttgttttttgcttatgttggcaatcaatcgaatgggttgaatttatagagttattatcattatagttgtttttataattatatttcatttaggattagtcaaaagcctccaatagcatttggatttgcttcttgaatcactgtttactaatgaaacaataaaaaaaaaatagtaactgagccacattatatttggtatcagattctcttttcttttctgtttctctttttcgttctatttaataggtgcaatgtaaagccaagaatcttgttcaattcattcagattgaattaatgtatttcccttactcttttcctacatgagatttgagtgttggattaggataaggatgctttaaatgcgttgtgttacttcttgttgtttatacttgtgcttattctgaatcggatttcttcaaagttgaaatttcatcttacaattttgtgacgtgtttactctgtataaggtttcatgacatatttcttatattcaggaggga

SEQ ID NO: 78815 - DNA, 394 bp, Citrus sinensis
  Intron number 1 from transcript orange1.1g041992m (locus o range1.1g041992m.g) derived from phytozome v7.0 (chr-ID sc affold00017; pos 460365 to 460758 reverse strand)
tgatcgcaagtaagtttttagccaagtcttttgagttattattatctttatttttaatatgctcagccctcacttctaatgtccgcaaatgtagatcggaagtttaccatattgttaagaatttgaacaagaagaatatttattctttgctcttctggaactggtatagaaatgggtgattttttttttttaatatgttatttcccttaggtaccgggggggggggggtgtttggaagtgatcacgcttcagtttagctgagttgtagtagccagatttttctttttcccaaaattttgttgcttcacgagctcttttttttttgtagggttttcaatttttgttgtaattttcatgtatttgttttgtttctctttgtggttatatttagggg

SEQ ID NO: 78816 - DNA, 575 bp, Citrus sinensis
  Intron number 3 from transcript orange1.1g025188m (locus o range1.1g025188m.g) derived from phytozome v7.0 (chr-ID sc affold00048; pos 327779 to 328353 reverse strand)
acattgcggaaggtgattaaatctctctcactcccactacattcccttcttccctctttttttaacatggttaggaactgctccactcaaggaaatatctggtttcataatggcattatgagaccctaatcattttcattgaaagtgatgtgagatcgttagagtgcatgccactttagaacttttggtagctcctattactacaactcatggttttctgacttattgtacttagaattttaaataggagaatttgaggccttgtagaaagtacatgttacaccgttaatatcctagaagcttttgatttggttttggttgtagtgcaaatgtttggatttatgatttagaaatacttttgttctaatttaacctgtttactggtttagctatactaacccaatttttgggtgtaatgagtacttgttaaaatccatgatttgcatcggtgatgacgcagactttggttattgtgtgtgttgttctttaatattttttctcaacttgagttttgagttggtttctgacattcttatttgcataaatagctattgttggggacattaccccttcag

SEQ ID NO: 78817 - DNA, 999 bp, Citrus sinensis
  Intron number 1 from transcript orange1.1g020950m (locus o range1.1g020950m.g) derived from phytozome v7.0 (chr-ID sc affold00011; pos 235881 to 236879)
gcttcattgtaatcgctcctcaggtaagctatcctaattaaccctttgtacgggcatatgttatgcaattgtgtcatgtttataacttttgatcatagttacatgcatctatatatgattggtgctaatctaacttacatgatgggggtatagtactaattgcttatagagtgcaaacaggggatgctcattggtttgcatttgagaggaatttctattttagtagcataacaaatatatctgaaccgaactctttgaatgtttgattttcatgcgaatttatttgtgtatttgagagtttagggctattaaaaatttatggatgtactggagttgtataattgtgattaatacgcaagtctaaattaatgttcctttttaactctgatgctgatattagataaggtgattgccagcacagacacatttcgttgcttgtagagagtgaatgaagtagctggaaggctccattttcttgtcaaaatactgttctgtatttttttgtttcttttttcttggaggtccacactgtccttgtcaatttttacataataaaagaagcaactaaagtggaattagtcagctgttcacattcaaatgtcataaaaagaaacggcagtcaattcactcaattcattttgctgctgacttagccaattaattatgagaccgacaaatagagaatgcaaaataaacatggcataacccattttaatttcctctaattactagttttaactaatacatagacttgtagttgttgtaacatagtgtttagctctgtccattaacaaagaaattgagctctgatgacgggttttggaaagaaacaaactgatatcctctaattgaactctctagctagtttttgttttacatttttggatttgaccagattagagaaatgggtagaaagaaagaatttaaaattgaaaagtgacactatttcgtgtttggctcatggaaatatttttcttctttgccttcaatagttataca

SEQ ID NO: 78818 - DNA, 456 bp, Citrus sinensis
  Intron number 1 from transcript orange1.1g007617m (locus o range1.1g007617m.g) derived from phytozome v7.0 (chr-ID sc affold00074; pos 190519 to 190974)
gctaaatcaggtatttctgattcatcatttttgtttgtttttgcattacctgcagttgctattatttcaagttgaaaaatcaatcagtcttggcttgcttttctcagtactatttgattaaattcacataaacatgaaggaaaagtggatgctttgtgtaatgaaaaaggtgggatgatatgctttcaatttgaagattgtatatgttgataatgttgaatgctgtactggactaagaatttttatttcaatctactgattagttttatgtctaagtcttttgagtttcaatttcatttaccatgcataaggttacaatctattaaaaatgcctttacgacctcgttttaaatgaatagagatgttaaattcttcatcttgcacatttgtatctgaaattcatttttttttctttaactaggtattacttttcttgttctattttgaattcttcaa

SEQ ID NO: 78819 - DNA, 477 bp, Citrus sinensis
  Intron number 2 from transcript orange1.1g047016m (locus o range1.1g047016m.g) derived from phytozome v7.0 (chr-ID sc affold08095; pos 766 to 1242)
ggattgctctgctcctttggagaaaataggatcaggtgggtgtggagaaatttacattgccgagctaacgtgtttctagagaattctttcgcaccctattttttgcgttatatatatatatttatgagtcaattgttagagatcaaattcagtcttttattttttagctgaaattcaggcttaattgaagatgattacaggaaattgaatctcaagtaaaataataaaatgaaaattctttatttatagttagttctagcatcagaatgcatgatggtattatttattttttcagttattttggaattttgtcttatttacacatcttggtgaaattgttgtatgttcattttgtttgtcgtgattgcttataagctattgttatgttgataagtatggcttattaataattttattaataattttctttgattattgatagagtttcctcgaaagcacaaggctggttctcaaaaa

SEQ ID NO: 78820 - DNA, 219 bp, Citrus sinensis
  Intron number 1 from transcript orange1.1g030331m (locus o range1.1g027547m.g) derived from phytozome v7.0 (chr-ID sc affold00133; pos 202445 to 202663 reverse strand)
cactcaaatcgcttctcccaaatcagccttccaaggtcttctctctcttggttttgtttttttcttttttgcccggatttttatcacacgtatatttactttgagatttttccttgattaagtgtatatgtgtgtgtattcatattcataattatttatttttctttttctttaatttgatgtgggagcaggaagaattgtcactgcctgatcaagtag

SEQ ID NO: 78821 - DNA, 563 bp, Citrus sinensis
  Intron number 1 from transcript orange1.1g002412m (locus o range1.1g002402m.g) derived from phytozome v7.0 (chr-ID sc affold00259; pos 154708 to 155270)
ctcttgatcgcgctcttcaggtggtattcgttgaatttattttttaatgaataatgttcgacatttgttatgtggaggtgagtgatgtaagcactctaaaatgtttgactttttctcgggtaaagtccacgtcctgctttcagctgaagtcctttttcttttttgcttaagcacttgtcaagtgctttttcagaaagtagtgagttcaattgcttttatggatggtgtttctatagaaagtgctttcgagtttcgagtgtatatatggaaaagtgttttcatatttctgctgttgaaagcaatcttgctcaaagacttttgtatttttacttttatgtttcacagaaccacttttcatgaactcatactctgtgcttataataaaaagcaaagagaaatttctaaaaatagtttgaaccagatgtagctggtgaaggtgtctttctttcttttcttttgcattgtgaattgattgtatgtcaagtttcataatgagtgattttttcatctgcaataattttgttgctgtcatggttaacacttaacatgcttttcaccacagt

SEQ ID NO: 78822 - DNA, 908 bp, Citrus sinensis
  Intron number 2 from transcript orange1.1g033504m (locus o range1.1g030890m.g) derived from phytozome v7.0 (chr-ID sc affold00153; pos 166912 to 167819)
tcgctagttatccatctgcgcgttcctctagaattgtaagaatcttgattgacgctttagctcatttaggattaggtttttctttttcttttttggaaaatgtacgaaatgttatagagaggacttagttcacctaatgaaagaaattgttgttgtctactagttgaaacttccatttgattattttgatgatgctttgtcggagcttttgatacttttgaattgtttgatggtgttggaggtgaaatataaaagtgggactgagtgatatctgaatgaaaatgatgtacttcgaaagggtttttctccttttatgtttccggactacatgtgcgttttattagttgaaatcagtaattatatgtatgtcgctgtcgttgaactgtgactctgggactgccaaaagtgctttcaaataatttttgatgattttgcttctatgttggagtaattcaatagagtagattttgcttaaacgagaaaacatggatttctgttggaaagaatttgattggtgccatttttagttagtgttttctggttcaatgaagaatttgattggtactttctgagaaatgatttttacaaaaaggattctcaatgagcacaaaatcagatttttttttaaaaaaaaaattttttcttgttccaacactgagttaattacattttatttgtgagggttagtgtgttcaaaaactttttattcacttcagtctgggctacaaattgcatgggcgtcaaatgagctaagtgatagacatgtttacaaagtcgtcgtattatcatatccatcactgccaaaatatgaagtattttgcttagtatgtttgttattatcataataggaacaatagctcatgcttttgcgttttattgttagtaggtatccggatccttgtaccaca

SEQ ID NO: 78823 - DNA, 344 bp, Citrus sinensis
  Intron number 1 from transcript orange1.1g000972m (locus o range1.1g000975m.g) derived from phytozome v7.0 (chr-ID sc affold00815; pos 50634 to 50977 reverse strand)
ctttgaacagttctgcgttcaatctgattccccaggtgcacctgctttaatcttttttgaagttattattatttccaattaattgttctatttctgtaactcatgtttctgatttgatttcgcttaaaatgttaaatagccagtagtattcgtaatttcatttaaaaaaaatctatattctgttagtgaaaacttttcattcttcttgggttgttttggatctttgcttagtctacaactaatcaatatacagtgggttgttgtcattgtttcttgttttccattttgccttaatttgttaaactttaaaaaaaaaaaaaaacaaaatcataaagaacagggcg

SEQ ID NO: 78824 - DNA, 749 bp, Citrus sinensis
  Intron number 1 from transcript orange1.1g014873m (locus o range1.1g014873m.g) derived from phytozome v7.0 (chr-ID sc affold00005; pos 2440697 to 2441445 reverse strand)
gctgatttggctattgccggtcatgtaagttcccatggtgtttgttcttatagcaatgctgtgttctttactgttgatttagtgtatatgtttcgtaagagtttggcttgtcgcaattgatgggtgaattttgtctgcgtaagagtttgattgttataactttggtttatcggaaagataatatccttgaaccaagttttctatcagtcaatcaaccagttgaggataagaatatgatttaagtaactatgagcttttgtttaaattatataatggatgctgttatggtgccattattggataaaaggggggcttacgtgttggggatgtttaggttaccatcggatatgttttaagcttgtgaggtagggtatatgaaggaggagcaatagtttaacttgcgaggtgattcaattatgtttaataattgcatgtttttagggcattggcacatatcgagcttttcgttgactcaactagaatgaggttcttgttatctctgttaggctatgttaccaacagaccttgtaatcttctcttccctattacttcacaagttctcattcaagttgtttgaacgctcctataaaaaaaaataagaaagtttatatgattgctgctgtgtgccttcgcctttcagaatacagctaatttgttattccattggatttgcaatttttaatttctgaggatatatttacattgggttgtggcatttaatcaggccagggcattactagagtggcata

SEQ ID NO: 78825 - DNA, 290 bp, Citrus sinensis
  Intron number 2 from transcript orange1.1g019787m (locus o range1.1g019787m.g) derived from phytozome v7.0 (chr-ID sc affold00061; pos 308450 to 308739 reverse strand)
ctgatctgtagcctctttgctagcattggaagcaggtaccatatttgttctaccttttttcccctttttttttcaactgctttgataaaagtaataataactatcaaatctatcaaaaaagagtgctattatagttgatcattcgcatgcatgccaagtttagatccaacatcaacagtcatcctcacagtttctttgaaaaaaaggctctggagtttttaacttcttttcttatttaaggacttttgctaacacatacatataacatgcaatggcacatgtgtttgcag

SEQ ID NO: 78826 - DNA, 127 bp, Citrus sinensis
  Intron number 1 from transcript orange1.1g011309m (locus o range1.1g010335m.g) derived from phytozome v7.0 (chr-ID sc affold00062; pos 243742 to 243868)
aggttccttttgtgttttcttttttattatttttggtaatgggtgtttttttttaattttgtcttcttgtgtttattttgattaatttttgtgggttgtgatcagattgtggcattgttacttgaaa

SEQ ID NO: 78827 - DNA, 731 bp, Citrus sinensis
  Intron number 2 from transcript orange1.1g011309m (locus o range1.1g010335m.g) derived from phytozome v7.0 (chr-ID sc affold00062; pos 243872 to 244602)
gagccgacgttaattccaggaattattgcggccaggtgtttgatttgatatttttttcccctttttttctcagctgggttttgttctttttgctgtttctttattggctggctttgattttggagaatcatgggttgatttgttcaaatcttgtgagatgggtttggttctgttatggagcttaagtttgctatgtccagatagatgatgcactaattttattggaaacctggtacaagatatgaaatggcatttgattttgtagttgaagctgaaataagaaaattagaaaagtatctgatcatgaaggcttgttattttgatattttctgatgtgattttaagtccaaatattttccagggcaactagacacaatcttgaagcaactctgctaaaatctgcttttctgattagcgactagacacaaactgattgacctgctttaaaaccaactctttagtcattttttgtaatctatgcttgtagaccgcattgatgcaagcatgtcgatatgggcactgggaagttgtacaaactcttctgctcttcagatgtaatgtgagttcaattttcagtaatcttaactcttgcaaattattcccattttttgttaaagttgtttttcaggcaattagatgctccttggttaggatgtgcttttggttttaaacttctgtggctattctcttttttaggtcacaagagcagattatctcagtgggaggacagc

SEQ ID NO: 78828 - DNA, 691 bp, Citrus sinensis
  Intron number 1 from transcript orange1.1g044723m (locus o range1.1g044723m.g) derived from phytozome v7.0 (chr-ID sc affold00050; pos 80910 to 81600)
tgcttcgctcctcttcctcttctcactcttagcaggtacatatacattaatcttatttaagataaagttgttgttcgttcaccaggaaaaaatctcatttgacacacacttaatttattttaattagcaaagatttgtttctctaaaaaacaaacaatttgcatatctattatctgcattaattacttattgtagagatttgaactttttgagtaacgatggacatctcaaattttttttatcttaaatctgatcccaaatgatgtatcgttaattgagtggttggtaattctttataagattgattgaattaattgtattatctcactaactaattaatgaatgccacattatttgggataaaaaaatttgagatgtataacactacttttcttcaaaaatattgaaatgttaggtataagacaacaattacatgattatgacatattaacctcataaatgccggtacccaattcgtcactctatataaacatcgactcattacaccatatcgaactcatcaccaacacgaattaattaattagccaaatcaatttcttatcacaatgaagaaagtctccacagcttccaatgcttcccttctcctccatacatattttttaatcttatttatttatattttgttcgttgagctagtaaaatctcatacacattatttttaggagtaacc

SEQ ID NO: 78829 - DNA, 992 bp, Citrus sinensis
  Intron number 1 from transcript orange1.1g012128m (locus o range1.1g012117m.g) derived from phytozome v7.0 (chr-ID sc affold00199; pos 17659 to 18650 reverse strand)
aaggaaattttaaattttttgaggtaaaggataaattttttagggtattttgcttgattgtgttcagttgagtttggcgttttggtcttgatttacttcaggaaatgtttgtttacttgtttggtagccgagagattgtgggcaaatgaagagaaagttgtagctttgagtgttaaactagcgattttggggaaaattttgcttgattaaactcaatttgattatttggcttagttgagttagctattttattcccacttcttgtaggaaaaatgtttctgtactagatgggtagctgagaaatagtgtgaaaatgaggagaaaatattattattacggaaaatttttgctttgttgagatattatgcttcactaaagaagctaaagtaaagatcagtcatttcctttatccaccgcctgaccatgtgacatcaatatctacaagatagttcactaaatccgttaaggtcagcttgagttgccataaaatctgctttttcccttgattggtttttgcaagagtgattagatttgaaactattctgagatcagaggttctattgatttcatctcagtgatctattgtatcttgtggtatattttgtgcgtgtttttgtaattgtaaacatgagttttagtttctcatggtgtgggttggctctgaatattttatgaaatgatccagagaatgatttcttttcacccttgtatagctcccttgttaatatcaacttgatagatcttggggttgtttgtctgcaaagctcagggcataaaattctgtatagtttgataaagctgtgagggcagcagctactttgatatgtcttgtttattttagattctttaacttgaagattttttttgtctcaattgtttgccttattattcattgtttccctatattgtagttatgttttcttttgacattagtcctaatccttgaagatggtacaggtgttgctgtgaacgaatattgcacagataatcaa

SEQ ID NO: 78830 - DNA, 945 bp, Citrus sinensis
  Intron number 1 from transcript orange1.1g020529m (locus o range1.1g012761m.g) derived from phytozome v7.0 (chr-ID sc affold00003; pos 3512984 to 3513928)
gtgtgtacaaggggtggcttgagagcactggtcaggtaaattctcctatgtttggtttactttaactttgaaaattctgatttggatgttacaagcaaaataaacaatcttggaatcatacttatcccgatacagaaaggggatgagtaagaatttctaagttgaacctgttatgatgattgtagcaatttgaggcaaagtccttgggcagtggaatggattccaataattttccagtacctattgtaataatgaattgggggtttagttcccccccccccccccaaaaaaaaaagaactagggtttacggttactgaatcacaaggatacatggtaattaaatcgcaaaaccgttggtggcatttatattattttgaaatttataatcttcatttaacaatcatgtaattcttgagctcatacctgagaatcttttattaatacttagtaggcttactgttgtctgttatagtcgatttcttaggagaacagagctgtattatccatcattctgttaaaaatctgaatttttattcagttctgctattgattttatgacaacctagctaaaatttagtgtatatttgttttgtgttttcaatgaggttgttattgctctacacatttgcattagctccattagttctcttgttttcagttggaagaaatgtaaaaccatatgtagcctaaccatgcattttgttagacaaattacttctttgtttgtctttttgggggaaaaaaaaagtaaccgatcaaattaaacatagcaaatcatactaatttcaactagatattgataattgtgggacaaattgtagtgagaaatttcagtaacatgcctcagttgtttctgtagcttctttttttgtttgaaaagtttttgatttcttgtaactgttcttgccttctgcaggtcgttgctgtcaagcaattggatagaa

SEQ ID NO: 78831 - DNA, 507 bp, Citrus sinensis
  Intron number 2 from transcript orange1.1g007971m (locus o range1.1g007971m.g) derived from phytozome v7.0 (chr-ID sc affold00062; pos 154252 to 154758 reverse strand)
cattgctttgaattgcggcctcatcttcgtttccggtatttttcatttctttgtttatttcttattagaggtctttttgttctcccgcaatttgatattaatattaaaatcataacttacttacagtttcttttcagtgctttgaaatagccttaattgatagattgaattgaattccaaatatatggaaatggtttttgatattaaaatgcctttttttttggggggggggggggggatgagcacatgataagtgcttttctaacaagcacttttcgggcaacaattgatgaaaagctatcttcactattcaagtgctttattgagaagcttaagtgagtttacactatgcattcttacatgtaattttaagcgctttctaaaaatgtgcgtgcttcctacaattgcatttaattcttgatccagttatttagtaggatggcacattgcttgttatatgttgaatcaaaacacactgaaagtctgatacatctttgtttgtgttag

SEQ ID NO: 78832 - DNA, 856 bp, Citrus sinensis
  Intron number 1 from transcript orange1.1g026530m (locus o range1.1g026530m.g) derived from phytozome v7.0 (chr-ID sc affold00426; pos 77184 to 78039)
gcactactatcttctggtaagttctagctctattatttcacataatttgtaataaacataatttctctattacaacatgcaactttagattatagcatctgttatcttcttaagcacgtgatttttcatttatttgttcatttattcttttttgggtgagaaaggggagtaagggacagttttgctattagtagttcgtatggggcagctgtgctgccacaacgcagcttccccactcttatcaaagaaattttctcctcaaatataggggtgggacacagtgcaactgtcctaagtagggacctaggaataggataattcgtcttaattttataacattcgtcttaatattagttataaaataagggtttcatttttgattaaaaaaaaaaaaaagtgctaacagcgcagcctccccaatggggtctaagaataagattatttgtcttaatattagttataaaacaagggtctcattttttgttagaaaatggaaaaaatgtgtcagtgcgagcctttgattcccaatggacaaaaagataacttgatttttttaattttgcctccatggatttccattggagattggagaataatagaggacagatatgaaaaggaattgtatttgctcataatgaatgccaaagatgttggagttaaattagcataatgctcaaatcttgttcttttggatcaaaatcaacatgctcttggtgacaagaagaacactagtatatatataaccttaagcaattgtttgctgtgtttactttattgaagtttctgccgactgatgaaaagattagaagtgggaaaatcaacgtctatgttcttgtttggcaggatttttgctatt

SEQ ID NO: 78833 - DNA, 489 bp, Citrus sinensis
  Intron number 1 from transcript orange1.1g004104m (locus o range1.1g004104m.g) derived from phytozome v7.0 (chr-ID sc affold00003; pos 3239347 to 3239835)
tgcagtgcctttaagaaccagtactaggactctgggtaagtgtaattaaattacatttatttggctgttttgtgcataatttgactattatccatttccgttttcatttgcgaaagtttttagcctgctaccataacatcatagaaattagaaacacaagtagcttaaagttttttacttttttgaatctgcttctacagactcggtagtaaaatcttagtagctttgtgattcaagtaggacggtcatcatttccttgtgtattattgtcacatgcccaagatgcaggaacaggacacatagagggacctggagttgatattagcaaaagaagtctgctagaagaatctcttgactcttccagtggagatcttcttctgatttgcagttacatctctgttacttagagatttattttacccttgaaatttacaaaaccatactaaatgtgcagcaagtgattgtacagatttgacaattggagtggat

SEQ ID NO: 78834 - DNA, 533 bp, Citrus sinensis; identical to SEQ ID NO: 78573
  Intron number 2 from transcript orange1.1g032994m (locus o range1.1g033018m.g) derived from phytozome v7.0 (chr-ID sc affold00594; pos 34987 to 35519)

SEQ ID NO: 78835 - DNA, 931 bp, Citrus sinensis
  Intron number 4 from transcript orange1.1g019672m (locus o range1.1g019349m.g) derived from phytozome v7.0 (chr-ID sc affold00048; pos 255601 to 256531)
acctcaatcttggctgttcgcttaaataagaaaaggtatagcatagattttttttttttttgcatcttgcactaccactgattggtcgtaatctcttccctaaagggtatgcattgacataaatttttaagattctggcttgatgtttaaaggaatgttctgtctggctgtgggccttgaaaatattgggtgaggaaacatttatgcagcttatttaaaacagactagaatcccagtgtgtgccacgcattttatcgatcagcaaagtgaacaaatgcgatttttctattgagcagtaaccttcctttttgaatgactcaggttcctctatgaactaattgttactttgattgagtgaaactgaagtttgaatgatattcttgtcttactgctcttttgagttatttacttttcaatttagtgggacagttgctgtactgcagttgttaattaatttgcaaaccatttccttgcattagtgaacagtgtggttccttgcagagaacttaatccgttggtaggtatagcaatctccatgaacaaattataagtgaaagttggctttcgtttgtgactttaagagcaagtctcgcttgcttgatagatggtggtgtagtcaccttttctctaatcattataaaagaacgaactcaactcatccttccctcttaagtttactacattctctttccaccttgagcttcaatttttaaactgtttatgtattgatgttattgcttgagatgcaaatttaattcataatcttcagcgttgtattatatctttaattttttttttagtggatggagtcagcctagcctctttacatgaatcaatagaaagttaaatccatttttatatcattgacagctattttctctctttactgaatgcagacttgtcattgttttgcgagaaaagacatatatat

SEQ ID NO: 78836 - DNA, 802 bp, Citrus sinensis
  Intron number 2 from transcript orange1.1g017825m (locus o range1.1g017825m.g) derived from phytozome v7.0 (chr-ID sc affold00137; pos 312796 to 313597 reverse strand)
agtgtggcttcacaagcaggtttccatttttgtgcacaagatctattcttaattgtgaatgtcttttgttgtctaagcataggatattcgcatctgtgcatgccaaacaagtgtaaaacttatttatatgcaaatagttttcggctttagtattcatcatgtcagcaatgtatactattatattacacactttatatgatgttaaggtaaaaattgcaagcttgagtttgctagctagtctggttaagtgtgtgaaatatatctaagactacctatccagttgattttggtgagttaaatggactgaattgaagtgtgtgtattgatttgtttggcatgttggatttgattgaaaccttgaaagaagtggctcaagggttgtgatcctagaatggaagtatatttgtggcagtaaaacgtgacatatgcaaaatagcgaggctgctatttgcgatttgtgttcattgtcttaggtcttggcatccaattgctttgctttttgatttccctcctccttttgttgttccagaattattttttttttctctgctttcatcttgactaactatgctgtaaaaggtttttcacctctatttcatctattatgtcaaatttcaaatgaaatataaaatatatcttgtttaaaggtttctacatgtatcgatcaacaatatataatcttttcttttatgagaaacactagcctcacattatgaacataataaaactagccctcacattatgaacgtaataaaactaaagagattctacaacgaaactaaagagattcttctgtggacag

SEQ ID NO: 78837 - DNA, 800 bp, Citrus sinensis
  Intron number 2 from transcript orange1.1g047388m (locus o range1.1g047388m.g) derived from phytozome v7.0 (chr-ID sc affold00011; pos 86057 to 86856)
cgacgaagaagacttgtttgaagcgattgataaatgtgcgtactctctctctctctctctctcagctcgacgattctagtattttgtgcttcctcgtttgttttcttcgaaattcaatttgtttgcaaaacgtttgagtgatttgcgctatttgattgggaatgacaacgtcagcaacagatatcttcgatttaatatttatagttgtttcattttttccgattctcgattcgattatttgttttgcaacaattttgagaaattagttgtgctcgacgtctgagttcttttgaattgctatttggctcttttcttttgtattttagcggaattcaaattatgacaagcaatttttggtgcctctttatttatttattttttttttttttttttggtgttgtattcataacgatgattcgctatgagatcgttcggttgctgtttgttcttcgcatctaattttacgatttacgaatttaatgaatctgttctgttttccagtgtaatctagacctccaactgattttgattttgattgcacttgtctgtttggaatttcagttgaatcaattgtatattatcagtcacttcagtcaaatatgtacgtaaaaaatcgtttgaaaaattattttgtacgaaatggttccctgatttgacatcgatcattaatttttagctaattcaagttaccttattgaaataaaagaccgagaaaaaatgaattcaaggtctgttaatttgtcgattggttagttgacaatgtttatgcgcaatttcttcagtgatttctcaaggaatca

SEQ ID NO: 78838 - DNA, 683 bp, Citrus sinensis
  Intron number 1 from transcript orange1.1g015829m (locus o range1.1g015829m.g) derived from phytozome v7.0 (chr-ID sc affold00005; pos 300736 to 301418 reverse strand)
tcccagagctgatattgagagtatacctcactgaggtgggctttttgaatcttcatttttgttcttgtttaatgttccaaagatttgtttttgggactgtccatgttgcatttttgtgccaacactgtgcttttattgtttttcttttgcgttttgatgtgtttgatttttttttccccctttctgcatgtatgtgatattctgaactgggtattttcttatttgaatcatttctaggtcaattttttttttcattttctttatatgttttctctttgagtatgaagatgaatgtactgtattttacttagcagaggtttaatgctcatcagatttttgtcatagctgccttactttgtaattgatttgacatttctccgccatttcaggcctctttaatgctataaaaaatctaattttaaaatgggttttagggattttggggattacaaaattacaatcacatcatcagagacttttgtttaatctacaatttcttgttggttcatcatgtatgtgtgagtatagattgatcgtgttcgttattcttctgtccaatgcagcttattgattcttgtttgtttctgagcttagtaagtaactgtatatttgaatctgtttgattttttttgttttttttgggttcagacttccgacaaggagcagcttcaggtgtttctaag

SEQ ID NO: 78839 - DNA, 968 bp, Citrus sinensis
  Intron number 1 from transcript orange1.1g034904m (locus o range1.1g034904m.g) derived from phytozome v7.0 (chr-ID sc affold00328; pos 84551 to 85518 reverse strand)
gttcccacagagacaccccaaatcatcagcctcaggtaaatttttctctttgtttcttagttttaatctttattgcttcttttatgaaattgtatataaatttatatgattgcctttgacattttgcttccttgttgcttgcgcttgctgggttccaaatgttctttgtattaagtcatggctttgcctgcttaaattttgctctttgattggaataattggtgggttttccaatttggttgaaaattttgatctttaatagaatttggacttcgtatgttgaaatttagtggaatgatcttcagtttgactcatttttgtgtctgaaagtattttgagctttttgaattgaacgaaatgccttgagttacagatgctggatttagtatacagttggttgttgtgaatctatttagtgttgaggacactgttatcgaaagatagttataatatatgaagtttcaatgaggaaaagaataagattagtggggagggtcccattaatgtgggaatagggcaaagactgctaccatagagaaggaactcgaacatgaacatactttgcatatgtatatcagtatgagacattaataattggttcttgaaacgacatttcttcttagatggcttaattccaattcctcagacagagaggaggattttgaatctatgtttatcctgaagatttgatttcttgaaattgctttgtgtacattgtatcccaaacaaggaaacacgaataagttgagatagctggtttcatccagataacacagattttgacaatcttgaaagttaagagtgaaagttgtgtatctgtcacaattttataaggttgaactctatttatttcttgttttatattctccgttctggataaatcatgtttcatattcataatcatcttaaagaatcttgattgtctatgaataggctctgtttcacaaacccaatctgcatcaaatcaa

SEQ ID NO: 78840 - DNA, 889 bp, Citrus sinensis
  Intron number 2 from transcript orange1.1g027870m (locus o range1.1g027870m.g) derived from phytozome v7.0 (chr-ID sc affold00011; pos 145463 to 146351 reverse strand)
agaagatcagagaagcaagaggttacagttacgtacttcaattttctgagtctcatttttgctttattattttctaatttttccattagaaaatagaagccacagctccttaataccaagcgtagcctaagtctggtaattgtatctaagagtaatcagctgaagtctaaactattgaatttcagtgcaagataaaagaaattgaattcaactgtccaagtagttttgaactggcgtgaccattgtatttaatagtagtaatataggaagaaatatgagatgtaactgtgacaacaattacatctcatatttagacttgagctcagagatttgaaaaaagcttagttttgagatttgaggtgaaatgagagtggaagtaggtaatatttaatacatgtagtccgtattgtaatttcagacttcaaccaagatatttgtccaaatttacaatttttgtttacacttcacaagtaaaggagcctcgaattatgattgagatcgaatgggtgacaaatgagtttggtcaaattcggctttagcaatttgatggatgtttggttgtgtggagccttgtttcagctgtgaagtataatagctaagaattagaagggggaggcaaattttatatgcgatgagtgggctgttgaaatgtactttggtttttgaaggtcaatgactagtagagtttttgtgggtttatttcttttgttcgagggaaaaagatgaattgaaaataaattgaagtcttttctgacttggtggcctatataaggtgcttggtgaatgctttgtactcctgcctaacattatttacagaggttttgtttctgtcagtaactttcactgactgatcgatcatcttgttgcttttgcaggatttgcttgattt

SEQ ID NO: 78841 - DNA, 423 bp, Citrus sinensis
  Intron number 1 from transcript orange1.1g018847m (locus o range1.1g018847m.g) derived from phytozome v7.0 (chr-ID sc affold01263; pos 11451 to 11873)
actgttttgttaatgtaatcaatctccactctttgatttttcttcttcttcaattaatattttaaaacacgagttaaagtcctctcctaatatgaattctgcttactattttttaaaaatcttgtgtaacaagtctattattagtaatatatgattgaaatataaccacgtacacttatatccttaccttctaataatcacaattaagctcaggaaaagcttacgtcatgagggaatcatggtcttcaaaacttatattacaataaggcaatttgtatatatgtatgtttattcaaaaaagaaaatgcacaagtttgcattatttttcttaatcgtaagataagaagaatctacctaattattaaattaacgatacaacagcagttgatcacaacaagtttttgatgttatttcagggctgtg

SEQ ID NO: 78842 - DNA, 634 bp, Citrus sinensis
  Intron number 2 from transcript orange1.1g018847m (locus o range1.1g018847m.g) derived from phytozome v7.0 (chr-ID sc affold01263; pos 12024 to 12657)
ttcttactattgcagctgaagaatctgttgctctggtatgtgtgaatttctattaacaagtcctcatctttctcgactacatattttatgcttaaaagtgattaaattactatggtatcagagtgtaagtttgactttacattcgtgttggaattttcagaccctgagtactttaactaaatgaatccacatgcttagttttgagcggcaacagtccatcgaaattaccatgttgacttcgtgatagcacctggtcaaagtttaccgtatgaaaagggaaggcttttccttcacccccacaccccacccccccaaaaaaaaacaacaaaaaaaaaggtgatgcgattcatcgaggacacgtcagttttacgtgctgggttccagtatatattttgaaaaaaaaaaaaatcttctttatatgatacagtctggttgaaccgttcactcaaaattataacgtcgggaaactgctaattttgggtgcaacaagacccatataaatattagccaaatagagtcggaaagattaattgcatgtgtatttctaattttagttaaatttgtttattatgcatctctcaagtgatgcttttgactaatgatcgtggttttggtaacagtcagggggtcctgc

SEQ ID NO: 78843 - DNA, 611 bp, Citrus sinensis
  Intron number 1 from transcript orange1.1g014754m (locus o range1.1g014754m.g) derived from phytozome v7.0 (chr-ID sc affold00014; pos 536617 to 537227)
aattcttgattttgggctctatattaccaaaggaggtaatttttctttcgatgttattgttgccgctgccgttagttttacattctttgtttatgttttgacttacttaattgagttgtgtttttattgtctcgaaatggtggaaatacattcatctggcttcttggtttgttttagcgtattgttcaacatttaaatatattcaacttttgtagtttatttgattgataaaaatttttattttagcgcaattaaatatctcatcacatgtgaatgtggagctttgaattgtatacttatatggaattttgtagcaattgcaaaatctggtatgaaagagtaagaaatttcataggttccataaattacttgtttgatcattgatcgaattggttggttcaataatgactcaaaaatatattatgaggtttttaattattaattggttgatgttgtcgattttccggattttgtatttgattatcaggaagctctgttaactgaagatagtgggttcttttttattaaattttttgtggacgctggcttgctaataattttttttttgggaatattttggttttggttctagatatttcaactgacgggat

SEQ ID NO: 78844 - DNA, 481 bp, Citrus sinensis
  Intron number 1 from transcript orange1.1g026954m (locus o range1.1g026954m.g) derived from phytozome v7.0 (chr-ID sc affold00003; pos 435304 to 435784 reverse strand)
atctcctcgtttttcttgataagaaggtattatttgtttgtttttttgttttattctcctcagatcaattatttttttttattttctttctttattttcatcattctaagatttagaataattttttcaaaatagttcctgtgaggtttgggttcttctgaacgttggtggagagaatatcggatttttcttagctttgggattctggaatttgttgatttgggatcttttaggcatgatcttataaataagatttgattttgtgtgattatgaatttataatctaatatatgaagtgaagaactcctgttgtggttcctaaaatatccaatttttatttaattttattctttgggttctgatgtattcattacagagctgtctctgtgactatgaattccctgattatttgatttctgcaatgagctttggcaaataacctagatgacaggagtaattaacttaataatactgcaggtgg

SEQ ID NO: 78845 - DNA, 888 bp, Citrus sinensis
  Intron number 1 from transcript orange1.1g032018m (locus o range1.1g032045m.g) derived from phytozome v7.0 (chr-ID sc affold00011; pos 529659 to 530546 reverse strand)
agggttcacgcacttaaattagattcaagaatcaggtatgcctttttaagcttcactcactcttgtttttctcttactcacgaatacgatattgcttggctctctaaatcttgttgtgtttaagatataagaagttaagtgatatgtaatgtcgatgatcccttcactatcatgctgtctccatcgatttctgttgatataatttgtaagtagttattgaatacttgaaattctttctgttgttcattgtaggcccatttttcatttatgctttttctctttttgggcattttttaaacagatgttttgggtaagagatgttttacgttgtgcaaattttaatcgcattagtttgacatatctgacacttgaaaccattgagacagtctaaactatcttgtgtgtatccaagcataaggtaacaacttgattgatggatacgacttggttatagtttaaaagggtttgaagcagtcaaattctgcttggacctttgtttcagcatgggcatcgtaaaattcgagcgttttgcttgtatattggattccttgacaaataagtgtcgtatgtacatatttttgcttaccgtgtcctttcgatacatctaacgtgtttgggcaatgatcctaaatcttggcaccttctgtttctgctttaaagaaattttattttctgatatgaaggaatattgttttgattgctcttgttacttcctagaaagttacatttacatctaatcaatgagttgtttgctgtttgctggaaatggaacctatgtctgccaatgcttccaactttttagccctctgttttttattcatataaggtggagatgtaattttgtaagtggtcactttcttcaaaatcttctttttttcttgcagaatc

SEQ ID NO: 78846 - DNA, 892 bp, Citrus sinensis
  Intron number 1 from transcript orange1.1g040402m (locus o range1.1g040402m.g) derived from phytozome v7.0 (chr-ID sc affold00011; pos 731095 to 731986 reverse strand)
gtcctgccatgttttgacagctaacagcagctgtggcaaattctcaatgatttatctttgatggagagatgaaatatattgagatgttaagatggttttggtccctgcagcttgtaataaaaaagaaactacaccatcacgattgattactgaagctacataagtatcaaaatcggaaatcaaagagttgtaaagaatacatcaatggctagaggttcgattctcaaacttccgcatttaatttttaaaacatgttttgtattattcggaaataagcttacattgtctaccatatatttcaccgtctggggtacgtttgaaagtgaaatagagttctataaatgacgagacgtagaaagtgaaagggttatggactcaaattgatgagacgattgttttgggcacatcgacttgaactctcataatatctgaactcaataaacttttttcttactagatataaatttcgttatgttgtgtataaatatatgacgtgaaaaatgacaatatttattttcgtcggattagttagttcttcaaaatagaaaaaaaaagatggatacacatcgtagagtgaataaatttgcgtcttataattactattgacatttttgatcaccaataaaatatttgtgagtaaattatatttcatttccaacgtaaacaattaagcatatgcttgagaaagaaaattatcacaagctggccatagaccaaaatgcttatttaaaggagcgcgcgagcttagctgctccagcattcctctcagaaagatcacaatggattcaaaattaagattattgcttttcttcttctgcttcgtcgtttctatcttaccaatctcaatttctaagaagcgcccactagactctctatcccctgctgagttcac

SEQ ID NO: 78847 - DNA, 373 bp, Citrus sinensis
  Intron number 1 from transcript orange1.1g015346m (locus o range1.1g013919m.g) derived from phytozome v7.0 (chr-ID sc affold01496; pos 16019 to 16391 reverse strand)
gctgtagctttactcaaacaatttttagtaagctatgtgaatataaacattcttttgccttcatcattaacatccttcattcctagttgtattttttatgttcttaaagttattaaaaaagtttaggagggctgtttaacatttaaaactggccatgctcatagtgattgataaaaatgtgggcaaatttgcacatatttgtctatttatcttatttgttcttctaatttaagcttaccaattatcaaaggaaatgagaaaattgtaactttaggctagaaactggtggaacactatgctgtcttatgttgtacatattctgttgtttttctgggctgattttgatttgtcaaattgctttggccaggaatta

SEQ ID NO: 78848 - DNA, 773 bp, Citrus sinensis
  Intron number 2 from transcript orange1.1g025339m (locus o range1.1g025339m.g) derived from phytozome v7.0 (chr-ID sc affold00289; pos 211029 to 211801 reverse strand)
ccacactgcaacatatgtaagtattcttttgcattgtttcatatgctttgagaaattgatataagtagtttagtgaatctgctccttaattataatgctggtggagtatatttaggaaatgtgttcagaactagttctttttctttcatttatacatttgtgtagtttacttgaataactagctcatgcactctagtgaacaaaaagcaatggttgactttgcacattgtaatttcgttttgaactttttggagatcttattcattcaaactgcccttttaattgggggaggaaaccaagaggctagctagatggaacttgacatttgtagtcctgacattgtataagcaatatgggtgaagtttttagtgttaaccaaagtatgcaatgggcctttgtatgatcttaacctagataccagactctctctcccctctgcccgcttccctctattcttcatttttcgcccacgccaagaccaaaaaaggggcacaaacaaaacggaaactatgatttgggtatgagatctaagcctaaatccgatgtgtaaacatttattgtgaagaagtaaagaacttgaatgtgataagcacagatgtatatttttgtaaatttgaggtttctaggtcaaataggagaatttcttcccacaggttctgggtatgaataagccactagatgatcgtaatgccggaattgaatgtacttcttggaactagtttgtggttgttgtgattggtttatttatgttcttatcaggcaacaacaaggag

SEQ ID NO: 78849 - DNA, 868 bp, Citrus sinensis
  Intron number 1 from transcript orange1.1g013914m (locus o range1.1g012545m.g) derived from phytozome v7.0 (chr-ID sc affold00056; pos 448112 to 448979)
tcaagtacgtgatcctcggtggcggtgtctctgctgtgagttattcatcgattatgtctttttttttgtttaattctgtctttaatatttttttattctgttcctctatatgaatttgagtcttttttaaattaatttttatcatcgaagttaacttgaaataagtgtctgattcaggttttatacagatctatttttgtaattgttatttttgttgttaaatttattatgcgtcaattactagcatgattacagtggttgactacttttggtattggccgcgttttgaatgttgatacggtgaaactcttaagaagatgaaatggcaaaagccgtaaaagtttgaaacgtttactcgttataataatttcatagcaagctagatgaagtaatggataattgctcagctcggttcagttttgtcaagaaatgtcggattcttttccttgtctttcaattttgtttttccccaaaaaaaaagaaaagaaaaagaaaaaaagatttcgtgaaaagtgtgttttgtttatatatcacctcaattgatgaatgcagaatttttttatattaactcttttaattggcatcaaattgattctgtgtctcatgtaagataaaattgattctgtttattgtgtgaaactccttttgtcaaaaacttcaacattataagtaatgattattaatgtaagcatgaatttttcagcagttggagtattttgttttgttttgcataggtctattataaaataatatcaatagcaaggcagcaatctatttatttagaaagatgcttcttatgatttcagtttttagatataattatattcttctccttacccgaagattttctcctttactttatagggat

SEQ ID NO: 78850 - DNA, 993 bp, Citrus sinensis
  Intron number 1 from transcript orange1.1g044966m (locus o range1.1g044966m.g) derived from phytozome v7.0 (chr-ID sc affold00242; pos 179194 to 180186 reverse strand)
attatattttattaaatccatatcatttggtaacactttttatcaagtcattactgagatatttgtaatagatattggtctacataataatgcttcaggataagtacctaatgagttgcttaggggtcacttatttaatttaattttttcaattatctcattggtttactgttattatcgtaaaaaagcactatttatttgataagaatttgttttaacatgatgtggttttgacttcaaaataagtgtttattgggggaaactatttgttgggaatttatgggattggatttttgataaatacttgtttttggctatgaatgacattgatcaacaaacatatatgtctcagatcttatgaaacatctttattgatgggtgttttgattactaatttgttacatgttcttctttgaacaacttggatttttctcaagttttctaagaatctccgcgagagaaaatatggagaagaaaaaactataatattgcatccttgttggatttcaagtttgaaataatgctactttttaactaaatctgatactttatttctgcagcaccaatttatgagatggagaaacattgtaacataggaattgtagcccaaatttcccatgtctcgttgacccaacatagtaaccattttctcagcataagaattcattcctcattttttccttactttttattcaaagcaaagcttcttccttattttcgtacttgtaggaaagttaaccagcttttatatatacccttttagttccatgttttattgcaacaaggaattaatttatgttgcatctgaaagttggagttttactttaatagataactctttataatgatagtattggctagattcatttctgttgcgcatgcagattgagtttgaatttgtaaatgattctgttgcatccaaaatttgagagttttactatagtagttaatgatttataatgatagtgctggtatattcaattggttttccac

SEQ ID NO: 78851 - DNA, 1063 bp, Citrus sinensis
  Intron number 4 from transcript orange1.1g016521m (locus o range1.1g016521m.g) derived from phytozome v7.0 (chr-ID sc affold00050; pos 542870 to 543932 reverse strand)
ttacagaaagagagtttctgtattgaaggtaacttttccattctggcacatccaacatggatgcacataaaaatgatgttttttttttttgtcagttagacttcaagattgtagactgtgaatatgtagatttttttcaatgatttttatcatttttcgattagagagatatttcgtgtatcattgaggttacggaggaaaattcttaacactatgttcatgaatgacatcctgcaatcatagcttgaacttgtggttgacatcaacttgtttgtgtatgtttgagaggctactggagaatataaattgttgaacattttgtatacaatagagttgggtttaagttgatgattttccgcaacctggtgcatgtttcagtcagatttttcttcttattcttattcctgcttcccctctatattgcacaacatctttgtaatgatttgtcttattggaaaatatttggatgtgagttatgaacctttttttccatatgggagagtgtttcttttaaacctcataactgaggtatgagtaacaggttattaaataacataactggagatggaacctgtttttgacttaattaagataagccctacaactttcaggtgcctatttgaaggtttgctcgtgaacctattgaactgaaaaaagaatgagaagaaaaattttatttttgtaagttttatgtaatctaatatctccttctgtgcatcccttgaggttttcctattgtcttataggttgtgatacattaaaaagctgcgaaaagcggttcaatgtttgtattgtttgcatagtaaatatgcctgtagaatcttcctactttcagattccaagaaaagttctaaatgacccgatttttgtcagactgtgacactttacacttaggcttttgtgacaattactttaacttgatgataggttcattagtactgtgatacaccacttatgacagtaacaatagttttcatgaaatgctgttagttttcaaccgcacgaaacttttccatgatatatttcaggtcattacacttacggcggtatctattggtgttgc

SEQ ID NO: 78852 - DNA, 696 bp, Citrus sinensis
  Intron number 2 from transcript orange1.1g023290m (locus o range1.1g011779m.g) derived from phytozome v7.0 (chr-ID sc affold00017; pos 204511 to 205206 reverse strand)
tgggacagaggagtacaggttataagatctctggattataggacctgaatgtatatcatcttgtgtcatgtgttcaacacctgcatttgctggtttttcaccttttaggattttactttgctactatctgtattttcttccattatcaagtggttcatgataatttgttttcgttgaatgcttgggtgcctattctcatttccaatgctaatgcaaaagtgaacagtttgttgtatttggactattgtatttactttgagcaattttcccatgcattctcaatttttcattaatatttttgaaacggtaagaactagaaaatattgtaaaattctgttacctcattgatcagcatgcgtaaatcccccttctaaatgattttccaaaagagaccatcttgctaaggtatagaccatggtcccttagcctgctagtttaagtataatctatgtatctttaaaataagaaaaattattaatgaggatagaaatgaggatcttagatttgagcccatatatgatgggatctgctgacagtctggtgttcatgagagattgaattgatttaaaattctttacctagcttctaattatgacttttttttctttgttaggtaatttctgctaaaggtcaagaaactataaacacagctcttaaagcagatttgattgtcttgaacactgcagttgctggcaa

SEQ ID NO: 78853 - DNA, 592 bp, Citrus sinensis
  Intron number 1 from transcript orange1.1g021165m (locus o range1.1g021153m.g) derived from phytozome v7.0 (chr-ID sc affold00880; pos 14960 to 15551 reverse strand)
caatacattcctccggtgagttaatgtccactatctacttcaaacaaacatgtgcatggcttggtccttttttttaacttttacatttgtaaataatacttgttggtatggttgaagttatgcattttttagcatttgatatcatggattttctttgtttggaatttcaattaattttcttctctgtttgcaacttttaagtcgccctcccctccccctggggggcggttgcactagtaacgtagactaaataataggctcttaacatttggcatttgttactgttttcttgtacgtgaagcaaataaatgcaatgaattaggtttccaaatgttttagcagacgagaacatgaaatgtttcttcgttcactttttgtatataattgaagttttgttaaattagcatttaatccagtaaaccgggtttataaagtacatatacattcatgtagtttagttttcatttctgcttggaaggggtggatatttcattttgcacctttgatcaattgtttctgtttagtttgacataactttgcttatgttttgtatgaaggctgaggaaggtgctgttgccgcactgaagagagc

SEQ ID NO: 78854 - DNA, 692 bp, Citrus sinensis
  Intron number 2 from transcript orange1.1g018310m (locus o range1.1g018310m.g) derived from phytozome v7.0 (chr-ID sc affold00003; pos 339642 to 340333 reverse strand)
aaactcttctgctgccaagcgtgctagaactggtatgcattttcttttttgttttctttattgctgtaagtaattaccgcccctttggatttcttgaacgacttcacaactatgtatatattctgaattttgttggattttcttgtgcatgtctcagtattgacccatttgtacgagtactaggatgtttaggttgcttacatatacactaggagcatgccagtctgcaatggagtagacccaagattaaataatcactagtctaaattttatttgatcaatagtttttgcgatgaaagtatcatgtacaatttgattgcttttgattcccaaaggtgaatactgagagactatttcatcaacaagatgattgtattggttatttgatctttgctaaagtgcaattgcaaacttaataaatcctgcttccaatttggtcttttaatgacttgagtggttccacaaacattctgataaattaaacatatgaagaaggttccactgtctttgattctttctaaaaggaaatgcatgctttgttgtgcatgactactgcgtgccatgtagttatattgtattagacattgaatatattactccacaggaccaagatttgatgtttctgatattttagttatgacatcaagacttgataatcgaattcttggtaactgtaggtagtcggagggaag

SEQ ID NO: 78855 - DNA, 414 bp, Citrus sinensis
  Intron number 2 from transcript orange1.1g021235m (locus o range1.1g019410m.g) derived from phytozome v7.0 (chr-ID sc affold00340; pos 165104 to 165517)
ctaatttgccccataatactgaggtctggctcaaggtaatttccacttccaatcttagtttatgtttgcagttgtggtgttgtttctgtgccagccagtttagtttagtttgtaatatctcttctgggttcaaacccggatcacccatgtgagggagaagatttaatttcctattgtaaataaataaataaagcattagggtgtttttgcttttaatccagaactgttgtggaatgtaacgattggccgtaaagtataagccagcgggttgggttttttttttttttaataaaatcttttaactacttcacggagtttttgattaatattagagtaattttagtggagtttcggatgacttctggaacctgtggggttttgaaagaatttgctacgtgctgttattgcagcgtg

SEQ ID NO: 78856 - DNA, 479 bp, Citrus sinensis
  Intron number 1 from transcript orange1.1g020942m (locus o range1.1g017310m.g) derived from phytozome v7.0 (chr-ID sc affold00017; pos 80903 to 81381)
cttgggaaggtactttgacttttaattgtttgcttattattgcttttttttttttaaaaaaaaaattatttgactgtacttgattgcatgaatatatttattttccaagcttgggcgctgctgcactggacaatcttgtaattttgtttctgttgcatcttatgtatttcttgtactgaaaattgctatcatgtttacattttaattgaatattatgacatatcatgattgcctacaaaaagaacaagataattccacaattatttatcctgggctcccaatgttgacaatggtattcattactttgaagaattagaccaggaagttctgtgcagttttattgacatctttaagatttatgacggaagaatgtgactgcaaagttctgtgcataactttatagttagactatattactgtattgacatgcttgtgttacttcagaattatcttctgagagtgggccacaatcctcacat

SEQ ID NO: 78857 - DNA, 788 bp, Citrus sinensis
  Intron number 1 from transcript orange1.1g001953m (locus o range1.1g001953m.g) derived from phytozome v7.0 (chr-ID sc affold00003; pos 2898838 to 2899625 reverse strand)
gaaaaccaaaattctgtccattccatctttcaaatgtaagtttacttggcatgttttctctgtttggataatccttccactgactagggttaaaaactatggcactgataggaaaaaaatgatcttccagaagtccttaaatggtgcaggaaaatcacccttttgtgagattatatgaatggtccagtgaactgctcctttgttttatatgaataactaatataactgcttcctttatttttttagttgcccactattgttctgacctaggccacccggaacatttttctttaaatggaaacatccttttccttttctctctgtttattttcttccattttcctgtgcgtgtaattgggcgggtgaagagagaaattatcactattttcagaaaaaaactttgaggagagagatgactcaggcaggggatataaaggagtagcaatacaagaggcagtgatagatctctatttgcttttaatagaaggaaataggtactcaatcgtcatatttttcatactttgctttcttttggccaagaattttcctccaaattcaaacataaagatgtccaatgcattacttttgtcattcttacaagaatatggagtttacaaagttgtaaggcaaaataacttgcatttgcattttgtgtggaaaaatatttatgttgcttgggcttcaaactttggtaagcaacctttagcatttgaatatggtggagaataatagtagaaattgaattcttaatactcgtctagctaatcagagtgctattctgcgctagg

SEQ ID NO: 78858 - DNA, 808 bp, Citrus sinensis
  Intron number 2 from transcript orange1.1g019332m (locus o range1.1g019332m.g) derived from phytozome v7.0 (chr-ID sc affold00795; pos 39697 to 40504)
tgcctctttcttactatactggaatccttggtaaactttttgtttgcagcaatttatgtaagccggttatgtttttttgttcatctgaaatgtttttgatatctcaatgtgaagtagaacattgcgtttggagtttttgcatgtcttatggaaacatagaattgtacctgaatttttgggacccttttcttttgaacacttgaatgtactaactctttttttcccccttttttatggatatgttgctaaattggcaaatttattcattacaaaactttgctatgagagtttaatccttgcaaatgttaatactgtaaatagagtgtacctttgttcagtttaataggcgtgtctccttctgcctagtccaaaatttcagcattttcgccatattctgagcaacacactccagctagttagttcttgtcgcgttttctggttctgtgagtaagccaagaattacattttttacctggaaattggcgatgtcttttgctttgatggcttgtgagttgagagtgttaattggagagtcacaaagagcgcaatgcccacttgagcacctagaatacttggaggtctgttgcctcagcaaacaagacctctgttttatggactccaaaaagttatttgttacaaagaacaaaacagagtccatactatatttttctctttgttatagaagtgtgaaacaagattctatatttaatattctaaatgattgagccatttagttatgacattcggctgtactggggtcaatgatcaaagtcggttcaaagtgatataaatttataaattgataggt

SEQ ID NO: 78859 - DNA, 531 bp, Citrus sinensis
  Intron number 1 from transcript orange1.1g024750m (locus o range1.1g019394m.g) derived from phytozome v7.0 (chr-ID sc affold00011; pos 1951788 to 1952318)
gcggatcctctacatttggtaagttttgtcaacgatcaaaatgtttcttcattaatatttctccactagatgtaatgacatatatattagtctacaaaaaaatttctgtatgtgattttcttattttcttttttcctttttgctcaagaatgtgaaatctatcattttctctttcataagtttctaaatgaatgttcgtacttatatctgaggaacactctgttcctcttcacttggagcagtgattaaaatgtacttttgagcgaagaaacggactaacattctccatctgtttgaaaaatgtttgaggcagatgcaactgtgaattagaatgttcttcttgcatttgatgctttcaagtttatatgggaacattcattatatcatgacatcttatgattccttcatcagcttcttgatttatgtgactaatctagattctatgtgtgttcttgtttgcctatttgattttacatttaattgttgtcacttcattagctgattgttgatattatgtgaaggtatcttgca

SEQ ID NO: 78860 - DNA, 584 bp, Citrus sinensis
  Intron number 6 from transcript orange1.1g016886m (locus o range1.1g010850m.g) derived from phytozome v7.0 (chr-ID sc affold00011; pos 1540132 to 1540715)
gaccaggttatacacatttttctctttcctactcaatatcactgaaatatcctgaatgttatcctgcgtgatccttcttcctggagattagttctgtaactgcttgtgttgtattaggggctagtatcatcatggattgctctcaaagagtttctgatctcagtttcttattgaattttctgctctggtagtaccatgtttgtattttcattttttccccatctgtttgggatggtgttgcatcatgtagtttgaacattgtaccatggattgatcaattgatttttatggtctctgttcaaatgcagcgacagtttacacagaattacgtctttgctggtgcatgctgacctacccactctgtgcatgtggatgcccagttcatctcccatttttatacttccccttagaagttagacattatttttagtttaaagatgtttccctcaaccctctgtaatttgatttgatgcataacaattttgattttcatttgtttaattttctgctacatcgagttgctatacctgatgataatgacacatcatttgtaatccttttccccatcataggcaatctctatc

SEQ ID NO: 78861 - DNA, 326 bp, Citrus sinensis
  Intron number 4 from transcript orange1.1g043119m (locus o range1.1g043119m.g) derived from phytozome v7.0 (chr-ID sc affold00049; pos 24013 to 24338 reverse strand)
aacaagcttggcacaggtattaaagggacaataaaatatataataaaacttttgtttcatgtgatttggagttgaaaaaaagctctggagctcgactaattatagcttttgtaaggatgttcaaaactcttgatattctttatttttattagtgagttgatactgtggtgagatggttgaggacactaaatgtatcatttttcctataacattcttaagtcaaaatataggatatgatgcttctcttgttgatgattattttttttccctgccccttctttttctcttctttggattatagattgatataccttcgagtcacaggc

SEQ ID NO: 78862 - DNA, 783 bp, Citrus sinensis
  Intron number 1 from transcript orange1.1g032811m (locus o range1.1g032811m.g) derived from phytozome v7.0 (chr-ID sc affold00106; pos 46120 to 46902 reverse strand)
gcagcgtttgggcccaaagcgctaatttccccaaggtctcgtcccttttctctgctttcatggatcgcattgttagttgcgttaatgtggcatgattgatttatcatttacgcatctgattgggaatttatttcattggttttggtgattgatgaaagcaggatcgacgatgatcgcgtccaatgtgattgcaatcctttttttttttaagatcaatttacaagtcaatttccacttggtttgattgcttggttgggatcaattgtggcttcattgtgtgaacagaaaaaaaaaaaaatttaacttatttttgttttacttacatgattctgaagatctgtatgttcgcacatttgcaaaatctgcggaatccctttcaacagttactgataaatgtaaatcatggctgtatttcagttaccatttgatgattgataataccacgaatagggcttaaatttctgtttgaattgtacttcctggaacgtggaactcaaataatatatgttgcccccgagactgtgatttgagttatatatgttttaatagtattattagttctaataatagtgctcaagtgcaacatgttgtaggctactcctttttattcgtctgtattctgtagtttatagtgtggtctgtacgaaatagaaactgcatggtggtatttgatcttctgcatacgtgctggtcttgttgtttttcggctttaaaggatttaagacgttttctggttctcttgctgggtgtttccagttcaagcctgaagagattgctggtatt

SEQ ID NO: 78863 - DNA, 448 bp, Citrus sinensis
  Intron number 2 from transcript orange1.1g021353m (locus o range1.1g021353m.g) derived from phytozome v7.0 (chr-ID sc affold00252; pos 228844 to 229291 reverse strand)
aggaatttgctatacccatccagaaaatcttcctggtgagggagctttcaatcttatatttgtcttttggttttgctgcaagatgctgtttcttttctattgactactctttctgcacaattatgtaaattattaaattgaaagatatgaagactgcttattcacacatgctcatgaggctctgtcttgctggaatgctggttgcttttggctattcttcactctttattgcctgttttttctagattgaacttacaaattaatttccctgttttatttgggttgattggatttatgtttcttttactcttgctaccgcaaaaaatgtactgaactttttttggctttgacaaaattggactaagaggatgcatgcttatgaaattgcaagttaatcaaactattgttttaatctctatacctgaatttgttgcaggtgcaaagaaag

SEQ ID NO: 78864 - DNA, 292 bp, Citrus sinensis
  Intron number 4 from transcript orange1.1g031712m (locus o range1.1g031731m.g) derived from phytozome v7.0 (chr-ID sc affold00011; pos 1755456 to 1755747)
ttcaccaattgaagggtagcagctcaaggtactattcagaaagcaaaaacacttgcacaatgatgcccttgacatctggagcctagaattgaaattggctcaaatctctcaaagaaagaaaaataagcaataatgatgattgacttagatcagatctgaggcatcagtatgaaaaataaaattgtaatggaaaaattgtttattttctttgatgggatcattttttcaaatttgttgacaagaaaagggtgctttcttttttctaacagcataggtgcagagagaattaaaa

SEQ ID NO: 78865 - DNA, 810 bp, Citrus sinensis
  Intron number 2 from transcript orange1.1g026616m (locus o range1.1g026616m.g) derived from phytozome v7.0 (chr-ID sc affold00011; pos 232152 to 232961 reverse strand)
cttcacgctgggagttgcttgcgccttctctaaaggtacagtgattattgattgattgataacacatctcaattctgctttgatcgtgctagtttattgctttaatatcaacgtatgtgagttcctggaatggatctttttcttgtttatacttatgttgttccaggtgaaaagcttaattggtaactgaagcctaaactagtatctaatgcacattgtgagataaataatgaagtgggtttatattgggaattttattaaagcttaattgttatggacttgcatttacctttactttttcgttaaccaaatggtcgctaatgaatcccgaattcagtagctgaagtatttatgattggtgtctttgtttgagtgatgaagtgtgtggtcgggagtgatgtgtttggtaataccttgcagttgtgttttagcagttcagcaaattttttttcctcagttatactccacaactatgttttttactccacagcagttgcagcttaaaagttatagcacctcactcccaaacacggctgaagagtcttggatcaattgtccataactgcattatgactgtcatactctttgggagaagattaaattgatgtaatttgttttgcatacatattagaatgtaacctttgctcagttgctgtgacttttgtggctctgtgttttcaaaatgtgttcatttgttgtgggtaatagtaatattaataatgcatgaggttgcacatcagcattcacgaacttgtgctatttggattcccaacagggaagatcatattggaagctttcattctgactggg

SEQ ID NO: 78866 - DNA, 731 bp, Citrus sinensis
  Intron number 3 from transcript orange1.1g024494m (locus o range1.1g024143m.g) derived from phytozome v7.0 (chr-ID sc affold00011; pos 1986374 to 1987104)
tcaggtgatcactacacaccattatttctgaaagctgggaaatgtattgaagattaaaaaaaaaaaaaattgaatcttgctatatagtgtatgatcttgttggaatggtaaaaaaagctttgtctttttttattctagataggaatgtaaatgtatatgttcgtaggatggctgcaatccatgctggctcgaacaagtgctttacatttgcctactttttaattgaaaaacaattaggtagtagtgatgttgtgagggatacttgatcctcaaaacatatttacttggtaatttgatgaatttatacttaaaaacaggtctccacctttcctatgatcagtaacgatcccttgtgaattgatctccagctattttgaggcgttaaaaaagcatccttatcttgctcaataatcaatataactttgtttttagttgaaaatgacggaagtttaccgtacctatcttaaacataagaatacctatcatttcatttttactagcttgtttgatattaacgtaattccataatgaatacaatggcttagaaaaaggaatgttaacaaaatagaactacgaagggaaattctgctgagcgtatttactcagctatgtgaatcttcctttattaataagagaggattagttaatcgttttctgtgctcttatcacttattttttctgagctcagtttttggacttttaactaagcaggcttgctgctttgagttgga

SEQ ID NO: 78867 - DNA, 879 bp, Citrus sinensis
  Intron number 2 from transcript orange1.1g013584m (locus o range1.1g008754m.g) derived from phytozome v7.0 (chr-ID sc affold00259; pos 147436 to 148314)
ggttcttacaacacttcttggcctcaaagttacaggtacagggaaaaaaaaaacaaaagattatcttggaagattccttttgtgtcaattggatgtagattttggattctctgatgcaattttctgtttacaatccttggccttcgggttaaaatcagtatatattcttagaacttgtcttagttgaaatgttctggggatttctcattctgatgggacaagtggagattgaaaaaaaggtgtaatgtcccaacttagtctccagtagtgggatgaacggtaaaagtatcaatcaccggtaattgagggctattcaatgttttatttttattttgtttggtgttggagattaaatttggaatactatataaaggaatccaagaagaatgtatggtggctttgcctggttttccatagagggaaaaggagtattgagagtggtggtcatgctacttggaaattgatatttatttgtgattttgcaagccaaagttgtaaaagttgtagcagtagtcaaaaaggctacagttctgtccaccccaattttaatggagagcaaaagatgatgttctatttgtgttctctaatgacttgatgattcaactttctgcaataggccattagtttactagcaaaatttcaatgattagagtatctaccacccagttttgtttcacaaattttgcgtcttttgaagatcttgattaacctgccaaatgataatgcatgatggatgaggattatgagaaactttattgattttgtaacagttttatttgtcttatggtgtactgttttttgaaaccagctcttcatacttaacacatttgatttgatgattcaggcagtctattgatctttatagtagtgtcccatctc

SEQ ID NO: 78868 - DNA, 715 bp, Citrus sinensis
  Intron number 1 from transcript orange1.1g011226m (locus o range1.1g011226m.g) derived from phytozome v7.0 (chr-ID sc affold00003; pos 1530008 to 1530722)
ttcgcgatcgcaagctctattaccctgccctcaaggtttcctacccgccctctctctcttatgagtctgttaaatattcatgatttagattttgattcattttacgggcggaaaatatcaaatttctatcctacggccaatttataatctaatcaatcttgaattttgggttttatcatctagttaaggcaattagtgacactcgtgtattggctatctgatttgtggaatttgggcattgttatgggtttgttttaaggtatgaatagaaagttgaagtagatttgtcgaaaggattctgaaataaatccgtgggttaaaaatgtttgggtacatccaatgaatgtcacctaattcatcagtcactaggataggcagtcagatgagtgtgctgcaggttgtaatattgtctttctgttttaattctagcgtgtagaatgctagttatggtctttgttgcttgaattgtcatgatggcattgtcagactcaaaactaaaagtagctctctcagctcatctggtcattgctgtttgttgtcttgttagcaaaaataaaaccctgcattggtcttctttcatttagtctgggaaaggttggggcagttacaattctttggtcgcatataattcccccctctcaatattctgtttctttcttttctctttgttttgcgggtttcaatctgaattgtttatttgcagttatcagaaaat

SEQ ID NO: 78869 - DNA, 584 bp, Citrus sinensis
  Intron number 1 from transcript orange1.1g008545m (locus o range1.1g008539m.g) derived from phytozome v7.0 (chr-ID sc affold00074; pos 490492 to 491075)
ttagagacggagggagatttagaacagagaaacaggtactagcagtgggcggaactaatgaattttactctctctctttcaatatacgtttctagggtttttcattttactggtttcatttctttcgttttattttcttctatttttgacttgcattcttagaacctctaagatctgaaattattaatgtaattccatgtaaaggagaaatatttgttcgatataaatttcctgtttaagacaatgcgtaaaaacatttgaattaagcgtgtttttgtactagcaactaaatggatacttagaaattgatgcaaaatgttatgggtttcatgggtgttactcgtcagtgtttcgacgggtgacgtggctgccattaagtttttcaattataatttaattcagtgctgtttcttggaaatgaaggtacttttgtcccatttcactttattaggtttccgggatatgaaaatttggagttttgaatttgtatctttttggttttaattctgtgtcatttagttttattgaattggattcttgtgtttgcaggttccatttggctgatttgtcaattacgaaaggag

SEQ ID NO: 78870 - DNA, 536 bp, Citrus sinensis
  Intron number 2 from transcript orange1.1g043830m (locus o range1.1g043830m.g) derived from phytozome v7.0 (chr-ID sc affold00056; pos 92977 to 93512 reverse strand)
gcttcttccatacacaggggtgaagagaaaggtcatttcatgcaagattacttctatatttgatatgtgatatgtgcctcagatttatgcaaagagcttacctccatgacatgtttaagtaatgcagtaattgaatcctaaaagtatgctgtgcatatgtctttgtaggattgtaatttgcaaatatcaattcttttttctgttgagttgttactgcaaactctgttagttatttatgggcattggtttccttttgcaaaatccatctatgatgatctatggctttcttttcatatcttggataattttgcaaaaacacatttgtgtctagctgctttcttacttatggagcaggagtttactttctggagcatcatatttatttttgtcctgttttctttttagcaatatgcatatttaatttacaattatgattttcatcctcgggctggtttttgtctttaaggattaagagatatgttttttacttggtttatttttcctggatgaagcactcacaaagagtttctgcagta

SEQ ID NO: 78871 - DNA, 341 bp, Citrus sinensis
  Intron number 1 from transcript orange1.1g046154m (locus o range1.1g046154m.g) derived from phytozome v7.0 (chr-ID sc affold00094; pos 458789 to 459129 reverse strand)
ggtgccagaattaaagcccaccaaatgaagagaattaaataagtttcagagaatccaagatgaactacatatggaactaataattcaaatcatgcaaaattagtgtataaatgaatgcactacaaaagatcagcacatgaaaccagtgaatgcacagatgacaattgaagtccatctaatagaaataagcataagcagaaaataatttctatcaaaaataaataaacaaaaggagtcactacagatacaaccaactcagagcaagggaaaacaaatatcaaccaagctaaaaacaataattcttaggtctcagacatccgaggaagaattgaagcagcaca

SEQ ID NO: 78872 - DNA, 962 bp, Citrus sinensis
  Intron number 2 from transcript orange1.1g040769m (locus o range1.1g040769m.g) derived from phytozome v7.0 (chr-ID sc affold00056; pos 48699 to 49660 reverse strand)
ctgtctccagggagaaactgaagctccaagaagaggtaatttctgtcaaattcttctttcattcattcattcattcaaaagaccaagcagctttagctgcctttcactctctctttctttctgtctttctccctccatatatatatatgcagttcatgcacatattctgcatcgatttaatcatttctctcaccttttccccatgtttttctttaaagtatagcatacctgtatccctcgtttccaaacccaaatctcttctaatagctaagaaatttttacggttaaactaattggcatccatgaaaaaaataaaataaaataaaataataaaaaaagaaaaattattcgaatgttcacttgttgggacgttttagatcgaaatatatatataaaaaaaaaaaaaccctagatacatatttaatcctgaaatgggacatattcttgcaaaaatagcgaattgagggtgatttcaactttcaattactgatctacttagagccctagataattattttagttgtatcgataaaactcaataataggacacaaaatttattcaatgagtaaaataaacataatgaccctctcctcacaaaatctcatgcatatatacaaactcaaaatacaacgaaaacggtcaagaaagcataagctgatccgataacgagtaaagctccgcgaatcaaatgggatacaaattattattattaattttttcccccctttgaacaaccctagatcttctcacaacaaaagagacagcatttcactacatatgaatgagatatgaggcaggttttttaagggtgcctagaagaatctttcgattattttttttttttaatagaaaaaagaaaaacaaataaatgcatgcattgatcttttggacgcgtcactattttttttaaattttatttgttgaccctttattacacgaaaatgatttgttgtagtaggtt

SEQ ID NO: 78873 - DNA, 677 bp, Citrus sinensis
  Intron number 1 from transcript orange1.1g023598m (locus o range1.1g023598m.g) derived from phytozome v7.0 (chr-ID sc affold00065; pos 521330 to 522006)
acgagtccgaaaaagcaaaacttgcccaggttttgaaaaaaattttctctctctgtctctgtctctgtctctctttttaatgttgattgatttgtctgtttggaaataggaaaattgtgctctttatcatcattgaatgcccaattatgagttttatcactgtttgacttggtgaaatgatttgtccttcattatatttatagacccaaaagccaaatggagggtggaatattgatagattacaagttaatgagttaatttgtagaatgttgttatttcttgtcaaaattttgaaatttatgtaggaaattacagtctctcttctttgcaattgtgaagagcattgtttgtgtaaagggaaaatgaaggaacattcaatgcattgaattataaggttatatgaggttttgcttatgtttatgaacttggtgacttgtgaatatttgaaagtgtttgtgatttgaactttcaattgatttgatataatgtttgtgtaatttggaaatgagggtaagaagatttgggtttgcatgctgtaaattgcttggttatattctatgcaataagttaaaccattttatgttatattctatgcatgcaatgtttaatgtaagcgaagatggtgggttttacatggtataggtttcgaagagattagagaacacagcaaggcattt

SEQ ID NO: 78874 - DNA, 464 bp, Citrus sinensis
  Intron number 1 from transcript orange1.1g010088m (locus o range1.1g010088m.g) derived from phytozome v7.0 (chr-ID sc affold00065; pos 227675 to 228138 reverse strand)
tttttttcaagttcgaaggcttaacattcctccaggtttgcataattttgaaagaaagtgaggaattttaatatctgatgaagtggtatgcatgtgttcttcaaattatctttgtttcccttcttttaattttgggttattgtcagagtcaatttttgatatctggtgcttggaatccctgcataaaaaatcttattccgtcttctaggagatgtctgcctatcagttatgtgaaatcagtacttctcttatcagttatgacatattaaaggacattctacacatataagctggaagaatgtttatcatcacttcttttccttataaaattgtgtttgtcatgcgatggtagattttatttttattagtaaatttgtttctcgatcttttcattcctgtatttaatcatttggttaataagtttatggaaattggaaatgacagtttcagaaccatcatcatct

SEQ ID NO: 78875 - DNA, 916 bp, Citrus sinensis
  Intron number 2 from transcript orange1.1g047710m (locus o range1.1g047710m.g) derived from phytozome v7.0 (chr-ID sc affold00245; pos 62680 to 63595 reverse strand)
aatttgcttatcaatatctctccagaagctccaaggtattctatatatatcacatacacgcacattcatatttcattagacattttagtagtgtttagggttttgctgttaggtttatggccatgtttggttctttgggagataatacaaactacaaacaatgaagtaattcatgttcctctttcccgttaagctatctttgtttttcctctgaaacaactcatgcttatgatcacaagatggatcatggtagttattatcacagtgcaattgagaactgattgataaggccagctctaatgctgtttttgtcatttaagtgggctgaaaactcaaaatggcatttgcttaaatttaatatcataagtattattgagatttattctacaacattttaatgttatttcagtgggcaggcacctcacgtctcttcattcatgtacacatctttacttatcacaacttgtttaaacaatgtacacacatcttacacttaatttggtgttaagatacaacttaaataactcttaaccctgttttatgtcaggctaaaaagttaagcttcttgcatggcatgaacatgcttgccctagctttaccttttcctcagcttttttgaatcaaaatttttttctaaccgtcaatactcgtaatgatcccctttggcttattcctatgttatttagcataacgatagcattatcattccgtaaagattatccagtgctttttcttttctcctgctttccactttgcttgtcttgataagcaaaagctagcctcctttgccttttatcatacattatgacattttgcgttgcaaatagcacttttttttttttcagttgcttgatgcattttatgtacatcacttcacttttgaattttgattattaaccttttcttctttgccagg

SEQ ID NO: 78876 - DNA, 774 bp, Citrus sinensis
  Intron number 3 from transcript orange1.1g009813m (locus o range1.1g008625m.g) derived from phytozome v7.0 (chr-ID sc affold00678; pos 56414 to 57187 reverse strand)
ggtatgtgttccattacatcgtaatttgattgttgagattatgctcgtgtattattacgtttttgttgtttagtaatttaaatttttgataatttgagtggatcaccgcgtgatctcattgcttgtgttgtttttcaataagattatgaagaaatggaattttgggtttctacatctttgcaagttgatcgtgatgttttgaggagatgcccgtgcatttccctctagaattttggagcttgatttcttagtgattgacatatccagggtcatgcaataatgttagattcaatgcatttggttcaatgctaaggctgatataaatttcattgcgataattatgctccttttaagtaatttcattattttcatcaatgctgaagtgatatatttgctaattcctcaaactagaaattttcttaaattgcttattaatgtgtgtatgtactcaagtggattttgagagtgatgatgaacgtttgatgatctgcctattgagagaggagtgagtggtaaaccttgaatgtatgatgattgcagaattagtaaaaaatcctggtaaagccatgttgctgtgcatgaaatcataggatgttaatatcaaagggactgggtcaagtatttcagagcagtggctagaattggacatatgatatttacatttcataacatgagtaacattcctcgatctgctttccttttgttgctgatatatatgtattttatctgtttattacagcctcagttcaggcatccttcagacttcagaagcca

SEQ ID NO: 78877 - DNA, 955 bp, Citrus sinensis
  Intron number 1 from transcript orange1.1g016663m (locus o range1.1g016015m.g) derived from phytozome v7.0 (chr-ID sc affold00003; pos 4157765 to 4158719)
cttctttgaaacgcgcgtgaatgacatgcttaatagtttgttagatctttgtctttgctgaaatttagttgagcgtaatttttatttgtaagcttgttcagatcttattattagtcaatgagattaaatagatctattgttatctcttgtatgtggttctatgatttttattattttgtcattttgtgttttttgtgtttcattctttcttttttttccaaaatttgtcacagattgtctttaaatttgttaattaattagttatatacttgtctagatctattttacacaatatttgatcgggaagtttttgtgagtgttagcgtgactaatcaaatatgctgagtgctacatttagaattttctcaatattcatagtttctcaagtttttgttatgttcagatcacaatcatgcggtcttactgtatggaggattcagatctgtttatgcttctgttgttttcttgtcgtgataagtttggtgttcggatgttgcttttccttacgtcgtaggcaatagtgctacttttaacttgggaggattcagtcataaaattagatagatgatatgtatttgtttcccatatcacaagtgctggtttctagatcatcgtaggttattgttagcacaacaactagacacacctttttgaaattttacattaccttttatattattccccagtcaacatttgagagcttatttgaaaatcgtgataatgtatctttcaatgattgcttaacgggttcttgttcactctgatattttactccaattaacattcttgataactttttgtaattgctaagaggtcttttgttccgcttatgaactattttagcacatttacgattgcttgttggtgtgttatgaattgatatgcgtaggtttctacattgtatcaacccaatttttgaatgaaagtttgtttcaattctgcaggaaaagtcaca

SEQ ID NO: 78878 - DNA, 551 bp, Citrus sinensis
  Intron number 2 from transcript orange1.1g019298m (locus o range1.1g014936m.g) derived from phytozome v7.0 (chr-ID sc affold00245; pos 85365 to 85915)
cccccactgctggtcttcctctaactagaaggtaattttgattactcttttaatttgttaatatcgttattctgggtttcttggttttggcaacaaattagttgttatatgtttgtgttggatagtaaatacagaattagttctgttatgggtttgtttcattctaatctaatttctaatttctcacagatgcaatttgaattaagcaactttgaattaacaatctgggaatgtcaatcccgctccaatttcttatgagttatttattgtagtttgaagattttttagaagtaacatttgggtttatttaatctagttctaatacttatttgttttcttttggggaagttgcagagtatggaaatagttaaaaaaaaatgataatcttccctattggaatttcacttagggggatgttatggttcaatctaattatctgattactattagttaaatgtgtagtaatgcttgcaacttggggttacagaatcttgaatgtgttttccctttggacagagccattgctgaatacctctctcgtgatcttcctt

SEQ ID NO: 78879 - DNA, 723 bp, Citrus sinensis
  Intron number 3 from transcript orange1.1g010472m (locus o range1.1g010472m.g) derived from phytozome v7.0 (chr-ID sc affold00332; pos 6161 to 6883)
gagaccccctgttctaccgctgccctgatcttgaggtaatgtgttatttcttttgttataaacgatattcatcttactcatattaacttaaggctctgttttgagatttgaattctcttgggcttcattagtttagatgcactgtgaattaaaatgttaagtctcttcacttggaaagatgtaacattctttttttttttttaattttgattggaaaacatgtaatatttgaattgtgaattttgtacacagttcttgaaccccctccccctaacccctcattattgggttaaccttcaaaaaaacatcaatactaatcattttcgacgagctattgcatctgatttcgggctgaagaaggttattcattgtcagatgaaaaaaattactttctacccctttgtggggaacggaaaaatgaaaaaagtaaggaattagggaaagatggaagggacttaatctttggatctcttttaatgactatatttggagttatgttttcttatttatgtttagtttagaaataatttattccttattttcttatttgacttaaaagcatattctggtctcttatatgctttactaaataatataaattaaatcttttattcttgtattcgagggaattatccattcaaaagtgatcatatatttttcttattatttgccactatcatatagttacatcactcaacattgggtattatctaatgcaggctt

SEQ ID NO: 78880 - DNA, 624 bp, Citrus sinensis
  Intron number 1 from transcript orange1.1g001950m (locus o range1.1g001954m.g) derived from phytozome v7.0 (chr-ID sc affold00011; pos 54720 to 55343)
aaagtggttcttagttgcaggtatttccatttcttgggtttctctttgattatcttattgttttaataagctccttttcttcatagttaagctcattgtggggttcttaattgaagcatgtgaagaagaagttttttttttttgtctttgcattcatctcatgagctgagcaaattcctgtttggggtttcgtgtcttgattttcttctttgcttggtcttgacattttgagcaaaatttcatggaaaaaaatcttcgtgaagaatgaaaatccctgtatgattgtatattctatttatatcatatttttcgtatgaagagttgtggttgaaagaaatcgtttctcttgtttttttggcctttttttattttaaaaaaattattacgaattattattatttttttaaattttgcataggaatagtaacgcttgtaatgttgcaacaaaggctggacattttacccattccgttttattgtgtgtgttcaactttgatgctgctttgacatcgtcattatttccacttctttacagtttctgcagctttggtaatgtgactgacatacattttcccttttttgttattaggcattttccagcagaattagtcctcgaaatctttg

SEQ ID NO: 78881 - DNA, 363 bp, Citrus sinensis
  Intron number 2 from transcript orange1.1g001950m (locus o range1.1g001954m.g) derived from phytozome v7.0 (chr-ID sc affold00011; pos 55972 to 56334)
atgtaagttatctctatctatatttctttttttgccttcttggctgttagtgtgcttaaagcaaaaagcaataaattttgatctcttttcttttttgtgtatttcaaattgagtcatggcaattgggcccctaaatctgacaatgaacatggtggtgttattgtttcatcttattttctctcttacaattgcagataaaattgaataatttttatatttttgaccttgtccttttcttctaatggcatttatgagatttaaatctttgcctgcaacattgttcttattgtttgcctgccttttgccaatctgtgttctgtttttgcaggttaccataactcctgaggtggcatcaaggactgt

SEQ ID NO: 78882 - DNA, 520 bp, Citrus sinensis
  Intron number 1 from transcript orange1.1g048744m (locus o range1.1g048744m.g) derived from phytozome v7.0 (chr-ID sc affold00003; pos 2945734 to 2946253)
agttactaggcttcctttgttctccttcgccttcggtaagttcccttcacttggttgcagagaaatagcgggaaaatacatgtgcataactcattattgtttttgtttgagttaatttcagtcttattaagctattgtcttacagcgtctctgcttcgattaacatcacgtagtactgttctaggtaatcaaactctcgtggcatttttgttggaagataataagttcggttagaagaaattgttgtttgatactaaaactaatctcattctgtttcattgaattaacttcatcttacctgtgttcggtgaatgattccatgtgttaaatttgtgacctggattctcttgatttgatcgtattcgctaaaaaagaaaagcgttaccaattttccatgaatataagacacaagttacatggttcattgagaatttggttttggtatattttgtaacaaatcagtatttcttgtgcaagcaaatcaggtcaagaaggcagctgtcgatattgttcgaggatt

SEQ ID NO: 78883 - DNA, 618 bp, Citrus sinensis
  Intron number 1 from transcript orange1.1g021717m (locus o range1.1g021717m.g) derived from phytozome v7.0 (chr-ID sc affold00062; pos 164434 to 165051 reverse strand)
tcctgtcattgtaagttctctctttatccgtccgtaactttaatttgttatgaaaattttatgtgggtttgtcacaattaattcgtgacgaaaacattcaaatctttcttggaattattgttttcttgatctattgggatgattgggttgttttaacttctcgttaatggtatttgaactcttgatttgaaaaaaaaaaaaacagttttttaattgatgagcaagatctaaatacaaagaatgagaagcaagaatttaattgctgtttgtctgtttgattgattggtttggtagcacaattgttttgtggatgttgtttagtaatggcagttgtgtgatgtgatttcttgtaaattgctgattgaatcagagttggagaagagagcacggtattgtgaggtgtgtgtgaaaatagataagaatagaaccaggattggaattactggcatgtagagactgtaatcgacaaatttgattatcttttgttgcgctagcttgattatccatggtatagtagagactggtgatgatgttgctggtaaactgggtgttttttgggctgttgtatgatcaatgaaatgaattttgttaaataaataaatctctcttatgtaacag

SEQ ID NO: 78884 - DNA, 521 bp, Citrus sinensis
  Intron number 4 from transcript orange1.1g021507m (locus o range1.1g014623m.g) derived from phytozome v7.0 (chr-ID sc affold00003; pos 2782173 to 2782693 reverse strand)
ttgctacaggtccgttaaattcccatgtcttttaccttgctagttaatacttctgaatcaagtttgtgaattctccgttgatgtcaatctgctatcattagttctttgatgttcaatgtaaatcaatcattttctagcaatcagaaaatgtttaatctattctgcgttttcatatattggattaaaattgaactgaggtggaatctaatgatgatgaacatttgattaatgaaattttgaccatttgatttattattgggggggttaaatagagtgaaaaatgtatgtgtagcacattcatactggaggatctcattctttaaattgtttctaatcagtaagatgtctaataatgtgaaggccgtgtactattggcttcttctatatacagtgcatttattaaaaaagaaactaggattattcctcttgatcgagtagtttctttttatatcttttgttcttaaagttaaatgtgtaattaagcttttactggttaacaggtcggcttacaactaaaagtg

SEQ ID NO: 78885 - DNA, 926 bp, Citrus sinensis
  Intron number 1 from transcript orange1.1g021507m (locus o range1.1g014623m.g) derived from phytozome v7.0 (chr-ID sc affold00003; pos 2783790 to 2784715 reverse strand)
agtggattccacccagagcccccgcgctacttctggtaagtgaattaatcattgcttcaacttttttatatgatgaagggtttttgtagttccgaattttcccattttgttgatcgttgtgtttctcccgttattgggattttactagataagtcctcttctttgttgatattcagattaagatgattggaattattctcaccgtctcccactttgaatgtttgttcaattagtttattcataacttcatgctgcatgcccattatttgatccatctctgtttgtatcgtggtataattaaattatttaaatatatacatagattttcccttctttcttttttctaatgagctgagctctgcttacaaaaattaagtttgtttgactcgaaatacttaacttaattcatttataaatttggtttatgggtttcttttgtattaacaaattggatttcatgtgtgtgaaagcattaaaagataatttgaattgacagaattcggccagtgaatgagttattgtattgagttttcacatcatgcttaataataggccggcagaaagagaggaatacgggacctgccttttactagttttgattgacagcatatttgcatgcaagcttggcacggcaataataaattacaagttacagtagaaccgaggagcaacgaattgtttgtctgcgtttttaacttaattaggggggagcgcattcgtatactaatatgcacataggggcattattatgatttttctaggaagatgaactaaagaactaggagaacatgaaaacaatggagtagagtctaagtgggttgtagcttggaagatgttgctagtagtgcagtaaatgaaattccagaactcatttttctcttctgacatcaggagcctcaagaatttccactagatctagtcattct

SEQ ID NO: 78886 - DNA, 480 bp, Citrus sinensis
  Intron number 1 from transcript orange1.1g011777m (locus o range1.1g011777m.g) derived from phytozome v7.0 (chr-ID sc affold00473; pos 45061 to 45540)
tgggtccctctatttttcattattatcaaaaacctgttagttttttccctttttttttcttttcctaatgggattctttttctttctttagtaataaaatgaatgaaagttttctttttgagcttaaaagtttgagctttttagacttctatcgcactaatatgaaaaacttgtgaattctttttcataaatatattttttaatctttaggtggatttattaggtttataagttgtgttatttgtaatttcttagagattattaagcttaaatgctgttttaatgaaggtttgatagaatatatacttctccaatatatgattttgctggtaacgatcagtgcagggaattaatcttgatgtgggtcaatttcaatgtacttaatttcttaaaacgttgaatttctggttagatattcaacaaacgcaattcactaatttgttaattttcattatacagcttaatattgttgaaggtaag

SEQ ID NO: 78887 - DNA, 597 bp, Citrus sinensis
  Intron number 1 from transcript orange1.1g032932m (locus o range1.1g032932m.g) derived from phytozome v7.0 (chr-ID sc affold00014; pos 611621 to 612217)
agccccaaaaacgcagccgctgttgtagagctcaggtaacatcactggccaatccgtcaattaatttaacggatctgatttctgtttttatctctgttcttctgtatatgttcttgcaaactttgcactagcttcgtgtttttgttgcactttcacgttctataatctctttcgcttgagctaatgtcgtttgttcaaacgcatagcgtactgaaatgtgttttgataatcactaagaacacagcgtaagaaatcgttcaaatttaattttctttagatatcagtcatttgtttttttaaaacttacgaagaaagaagcgatcgctgattgattagtcatttgcatttagcatacaaatatttaggtcgcatctgttcaagtagcattattgaaatttcatcactatattgttactttaatttaacaacagagctctatcaaagatatagagatttcagggcaccttttttcttttcttttaaattttgactatcttatattagagaagtggacgaatgattggatactttgcttctgaatttatttttcctaatgagttggatcttttaatgttttttgcagcttcattttgaaga

SEQ ID NO: 78888 - DNA, 834 bp, Citrus sinensis
  Intron number 1 from transcript orange1.1g046256m (locus o range1.1g046256m.g) derived from phytozome v7.0 (chr-ID sc affold01691; pos 18766 to 19599)
caaagcctagtgaaattttaagctgccgttgtcaggtattattctgtgctaatcaaacagcagttgagcttagccacaacggagccttttgatgagtatctcatgtgccatcttctcattcatttctccttttttttttgaaagccagatatatatatgtgtgtgtgtgtgtgttgaaaccgagctccctttttctccctttttttttttttaccgaactatctttttttcttttttttcttaaacccaaacttcttttttttttttttggttgaaactgaactcatctccctttttttgggggacccatttttttttttttaatgttgagttcatggttattggtattttttatgtagagtcaatattgtgctactgacttttgccgctccttcacattatagaatccatttgggtttgtaaacaacactggtgagttgtctcatctcaagcacaatctgcttcttacattcttacatttatgaatgtaaattttactgggtgttggcattgttgtgctttcgattgtgttgtatgccgccactgataaataaagtacagtggtgtcagtagtgaaaggttgctatcattttgttgggctaataatgaagatgttgaggtattatgtactggcattgaatgggatgttaagtttaaagtgaccaaaatgtgtgttttcaattttcatacctttatgtcacgtacgtaccctccacttttctttatgctcttatttctttatttattctttctttttcttttctctattattcttgtcaaatttttactaacttttaagcctattcagcttggcattacctcagtcagctttac

SEQ ID NO: 78889 - DNA, 869 bp, Citrus sinensis; identical to SEQ ID NO: 78551
  Intron number 1 from transcript orange1.1g016440m (locus o range1.1g006877m.g) derived from phytozome v7.0 (chr-ID sc affold00259; pos 55735 to 56603 reverse strand)

SEQ ID NO: 78890 - DNA, 737 bp, Citrus sinensis
  Intron number 1 from transcript orange1.1g004588m (locus o range1.1g004588m.g) derived from phytozome v7.0 (chr-ID sc affold00049; pos 430813 to 431549 reverse strand)
agaaactggacgtgaaaatcttgtattttaaactggtatgttttttttcttcttctgggttctctttggtttcaagttttctttgatggttttgtttaatattttgatacagaagattaaagagcttgtattttacaatacaagagttttgtttttatttgtttttgtgggtgttgaagtttgtttcttgtgttatttatagctgttggtttgatctttcgtttagtaatttgattgagttttgtgttttcattggtggtttacttatttgatagcattctgttttattaaaatactttaagaggactagtttctttttcatttcgtttctgggttcttcttggttttatatttattttttaatttgatcgatgttttctgatttttttttcttttgtggtaaattagcaagaaaggattagttggttatatatttaatttttgtggtttatatttactatgagtcttattgggttctttgtctcattgtatttgtctgattttttgcatttggtttagtgttattgttaatgcaagctaagccacataaactggtggcctcagagtggttttttttttcttctttgttcttctttataagaaataaatttgttgtgggatctgaatttgggttgctgatagtgtggtattggtttctggaatttgaatttgaagattcttgttggactcttgacaattcagtgtcattcggacaagaagattagggtaattttggt

SEQ ID NO: 78891 - DNA, 823 bp, Citrus sinensis
  Intron number 2 from transcript orange1.1g038301m (locus o range1.1g038301m.g) derived from phytozome v7.0 (chr-ID sc affold03082; pos 459 to 1281)
tttcggtggtgacgaagatacgcggttgctcgccggtgcttgggagttaatacttttacttaacattctctctctccaattgttaatctcgcaatacttctttctcttccagctagtttttggaaacttcatataattgtgttcccgtcttaaatcatgtaaggtattgggatgcacattattatagaaggcaacaaatgtagacagatgatgatgataagaaaatgaactttatcgaatctgtaagtaaagattttaaattatgtattttcctgggatccatatttttatggaatgcatttatatgtatataatcatgagattggtccagtagcttttgcaaacctaaaagactaaacattatttggtttggatttgatttgttacatgtgaaccatgctacaaaaatcttttgagaattaaaatcgaattaaagttccattttctatgaatattcataaattgcatttttcttttccctgcttttttttaaaatcaatatcaagcattcttttctcatatgtatgaactttatgattgctggaggattgctaggttgttctgttgttttttttttttttggcataggagcccaatctaagcgttaacaaatactttaaaagaaagaaagcacataatttctattgaggattgagcatgataaaatattgccgttgttgattcgtggttgttttaatttcttgtcatttacatgattcatttatggttatttggtttgcaaagttgcctatggttgattgagttgtttttttttttgctttatacaggtgttgttggacttgatttttgggtcgtataaggt

SEQ ID NO: 78892 - DNA, 586 bp, Citrus sinensis
  Intron number 4 from transcript orange1.1g023643m (locus o range1.1g023643m.g) derived from phytozome v7.0 (chr-ID sc affold00146; pos 168124 to 168709 reverse strand)
atttacagagtcaaaagtgcctattaatttacaaggtatagatatgggatatatatttaaaggtgccattaacttactttattttatgtgagaatactcattcttgtcaatctgattgctgcagtcaaactgtcataaattgtttgattttataatttcttgatgtggtctcacagttttctgttagtgttaaatgctatccagctttttcaaatttctttcactacaaatgctatccgactgttttcttttactgttttcgactcaaatcatatcttcgggcggacatttacatattttctgattttatttctctctctctgttggcttgctagtacaacagtgtaatcttctttaagcttctgtttagtttcaatttaactttccattttcaagtgttctgtctccccggggagtgtggtttatttaaaaaaaataaaaaccttaggtcttcaactcatgttcatgctagaagttccgtgcatcaacttcttacattcaatgagattagtgtagcagtttggtttctcaacaatcaacactctttcatgaatttatattgtgttcttttatttttcaggaaatc

SEQ ID NO: 78893 - DNA, 744 bp, Citrus sinensis
  Intron number 1 from transcript orange1.1g031424m (locus o range1.1g031424m.g) derived from phytozome v7.0 (chr-ID sc affold00023; pos 423564 to 424307)
aattgccggaagagcaagatcttcttcattgcgttcgttcgcattttttgttctcttggtaccacatatcatattagatgctctttgatcttagaatagttgttattttacgtacattttttgctacttgttataaagggtatcattttaagtgctttcgctgctgtcaaaaacaatttcagataagttcaaaacgtttcttaaagcataaggaagcagtagcaatccttttttttttttttctttctttctttttctttttccttttttaagattgaatgctttttctaggatttattgccatcccttttgcggagttgcttttgccgaaaagcacttttgcacaaacgctttttttagagtgattttgtataaagcagtttcaagtttacagtcaagttttacaaaataaatataaatacattttattttatttttttctgaaaatactttcacatatgctacaaggccaaaatggtcgcaaatgatgagattacaaactactggggcatcctcaattcctgaaataggtaaaatatcaagtttggtgatttcagattcagaagcatagtgaagaatcatcaatcgaccccaccaaatttttaatcattataaaaagtaaatcgcagccgtcaattagtttccgcatcaaatcagttggctaagaaatcatgtcaatttaatttaatttattttatttttataatgaacagggccccgacagcgtcgagaatcagagcaaaa

SEQ ID NO: 78894 - DNA, 785 bp, Citrus sinensis
  Intron number 1 from transcript orange1.1g030166m (locus o range1.1g025301m.g) derived from phytozome v7.0 (chr-ID sc affold00138; pos 79012 to 79796 reverse strand)
ttgctcataaacagaactgcaagccctctgtcgtggtaatttggtgaattttattatggtggcttttctttgccattttgttttgttctttacttattttctacttgagactcggaacccgagattgttaccattaggtgccaatagagagggcggaaaggagggacaggagggaggtggtcagctgggttctggggttaatgcaatttgtcttgacaagtttaaagaaatagttttttctcagagtattctgaaaacttaaggacagggtgtggaatattttttacatataacatgatttacattgagaattatttgagttaagactttttttgcatttcactaattatagactgggtatacaaatgatttggagaaagtggatatacggtgggaactttttcccgtgtatgacctctgggtctcgttttaagagttaattctgacatcctaatgccttttcttttctcatgtattaatttaattgaatattgattgaaataattgtgacctgtggagcctcgtttaaggttttacttagtgtagttgactattggcttgaagtgcttaagagtcttgaattattctagtcaaatttgaactgggattcttatgttgtaattgattttttgtggtgccatttgaataatttaagacgttgttcgtcttacataactatttcttggtggaaaattcttgttgtttctgttttttatggatcagtttgagattattgaatcatcctacctttgcgagacactaaatatttgtaatcattcaggttt

SEQ ID NO: 78895 - DNA, 493 bp, Citrus sinensis
  Intron number 3 from transcript orange1.1g005951m (locus o range1.1g005947m.g) derived from phytozome v7.0 (chr-ID sc affold00196; pos 68972 to 69464 reverse strand)
aggaggaaggaagtgcaagtccacttcctgagaaggtactattttgtcgtgaacacttgtagtaaaattagtagatagaaaaataaacaacttctattaccattttctaatatcaaagtcacatcagacttagcctgaatcaatatttttcatttttatcgactattgactttgtagttgcttctttctttaaccttgttaatacattcttcttaaccatgacaagcagtcaaactaatgtgttttttggttgtttatgggaaaacaagccaagcatttctaagatacggtcaagttttaaaatggttaggctttacatgttgtttttactgaaaacgtttctgcttgttacaatgcattgttagctttggcagcctatgtgatgtctttctggttcatgcgttaaggcaatacttggaagtagtttatttttaatttattgtgtgtttcctcctcagatacagcttgggaactcccccttgtacaaggtaga

SEQ ID NO: 78896 - DNA, 952 bp, Citrus sinensis
  Intron number 1 from transcript orange1.1g021233m (locus o range1.1g009367m.g) derived from phytozome v7.0 (chr-ID sc affold00137; pos 214181 to 215132 reverse strand)
ctgctgtcaccaagactattgtggaggttgttcaggtgagtttttgtcagctttggcttttgatgtttaattctttttacttagatctggcattcatagatctatgtttgaagtgaattacatacttgaagattgtggaattcacagtacatgaaaaaggtggctgaggattttgtgaatttctaaattgtttgatgagtgtgtatatattgtatattgtaagtttgcatatttagtaattagcttttgatctggtggtataattaataacggtgaattggaagattcaacatcttttatctgtagcttccccttttggaaaattttccgtttgtgctttggacttttattttcctcgggcttctgtatcccaatcttccatttttattgatcttagtttggtttgaaattattgaatattgtccactttatcattttgcaatttaacttacatgatcaagctgaaatttttttatgtatggtacttactttggttcgacgaatgattcattttcagttctctctattcccttttcaccttgtagcaataggctttgaaagccaattctttttgtgtacattgtgtgagaagactagactcttcttgtgatgattggtattgtctttaatagtgtattgtctaaattcaatcaaaaaacttcttattattacatctggatgctatttttgggatgctactgtttttgctgccacattctgtcattcacctcatgtcaagcaaaaaatgaagtaattgcggcatattaacatcagaagtgcttcatttttttttccccggactttatggccagcattaacatgctttttcgcgtgagttccttttttggttgaaaaggtcctttgactgccttggcattttgctttcttgtagataccaagattttgcaatgtgctttggttaataagtttaatgagcaattttgtattatag

SEQ ID NO: 78897 - DNA, 763 bp, Citrus sinensis
  Intron number 2 from transcript orange1.1g002723m (locus o range1.1g001099m.g) derived from phytozome v7.0 (chr-ID sc affold00011; pos 2180309 to 2181071)
aaagaagaggagtaaaaaggttctgttcaaaagaggtatgtccatgattgcatttggttatattctcttcccctgtccttccatctatgcttaaaatactgtgtgcttttggttcctccaataagttctatacgaatgctttaactttcttatttcttttccctttttctgaatgctttattcttgctgtctgcctttgcctattggctagacggaagcttgttttgttttatggagttgcaagatttgtgtagtaactagaacagcaaacttatctgtctattttctgtcatgggtctagtggttattctagagaaagacggaggtgaggttactttatccatccattttatgcttgaaagttattgtccttttgtatattatttggatgaggtggaaatgatatcagtcctgatggttccctgagtccttgaattttgtgagctgaatgaattcttataaagctcgtcagtgaaattttaacctaaattcattatgcatctcccatgagctcatgatggtttaaacttctgctaacttgattgtttgtctgaagtgatcaagtttctgttctttttccattggtttttatttatgtaagttgagaagttgttaattgattaactagcattcaacttcatgacaatttttattttgttctgttctaatagtattaatgcactgagcttcaactttgacatagggtctgtattctgttggagcatgtgttcatctcttcatgacaatttttgtttgactgtag

SEQ ID NO: 78898 - DNA, 749 bp, Citrus sinensis
  Intron number 3 from transcript orange1.1g033231m (locus o range1.1g032288m.g) derived from phytozome v7.0 (chr-ID sc affold00062; pos 295743 to 296491)
tggttgagttggagggggagaccgacccacttgaggtatgactcttcacatgccttgtcggatggtatatctttttcccttcctggttgtgtgtgtctgcagaccttgtttttatagtcaggatactagtcatacccactcaatacatggatcaaatgatcaaccttgtttttgttgcggccatgtgcatttcatacacgtgtaaattagaattggactgacaaatgtatacgatatttatgtaccagaaaaaagctttgactgccagtattttggtccttttggttttttcataaattttggattcctcttcataaatacttgttgttgcaaatcctaattggtctgtctatttctattgccatgatgaatgccttttggagtttcttgcatattcagaccaaaagtagactggtaatcatgggaataaaaatagtttccctgtagcatagctcagacaaaagaaaattgtggccgagagaagctacgacaaaacaggagcaactttgctattctggctgccatttttgttgtttaggctatatgtgctttttaaccaatattttagatgtaaaagcatacctttcagtaaaattgtcatgattttggtcttctatgtcattgatgctagtttgcaagtcgattacatgaagagctaagcacatgatttattgttctactattatcataatctgtctttcatgctatactatttttctgatattgcatatgccattgtctagattgct

SEQ ID NO: 78899 - DNA, 579 bp, Citrus sinensis; identical to SEQ ID NO: 78810
  Intron number 1 from transcript orange1.1g032566m (locus o range1.1g030226m.g) derived from phytozome v7.0 (chr-ID sc affold00321; pos 166200 to 166778 reverse strand)

SEQ ID NO: 78900 - DNA, 842 bp, Citrus sinensis
  Intron number 1 from transcript orange1.1g016232m (locus o range1.1g016232m.g) derived from phytozome v7.0 (chr-ID sc affold00005; pos 2015272 to 2016113 reverse strand)
tctcctgttcttctccgtcttcttcactctaattggtaactttctgcaactctctttactctttttgtttttttttttgaatttttaattattgggttagttttaattgtttatagcttatgaatattattggattgatcgctgaaattttttggattggaatggctttccaacagttgttgtttgtagttatgaaattcttgttttcataattctgaaattataaccgatattttcctggtagaaaaattgtgattttattttttaaatgagaattcaattaaactttcagtttgttgatttttaaactttatttgatttctaaataagggctgatataattctctacagcagtgataattttgtcgtgtgtatttgttaatttactatggtctctatgtagattgtaacaattttgattatcatcatcatcatcatcatctttttggaggaattggtttggagtgaaatttctttaatctttatctttcttcttctgaacttgttttgcttatgtcaatatgggaattcgctgttaagttcatgccaccctctgcatcaaatttgatctctcacgtaattcatatgtaattagtacttgtttatttctgtcatgctgattaaggttttcgtgcacacttttgttgaatcatgctgtgctttccttggatttgaaagaccatactgaattttttttagtagaagatctgtgtatacttttctgacaaagtaatgaatactgtcattttacctcgtctatacggggttgtgttgagataagactgaaaatatctgttatttttccagatcccaagaaagtacaagcatttactggaacttat

SEQ ID NO: 78901 - DNA, 731 bp, Citrus sinensis
  Intron number 2 from transcript orange1.1g003920m (locus o range1.1g003920m.g) derived from phytozome v7.0 (chr-ID sc affold00003; pos 640625 to 641355 reverse strand)
agattacggggggttcacctgctcaaaattataaggtactcaaatttattattttgatgtattctctgatccctttacactgactctctatgctcagcagcaccaagatttttggtaatttgacctgaaaaacaagtaaactttcaaactggaatacattgtctgtgtccaaacaaagaaagcattaatatgttcaagtttgattgtaaccatataaatttagctctgcacaattagtattatgttttagtttctggaaacttttatcaggattttctttgggatgagtaaaccagctgcacatgtgactcatacatatgtcaatctattccacctttgctatacttgtgaatcatatttgggttttgagctgatagtggacattaatttcaaatctgtatggatgacatcatagtaccacagatttactgataggtgttttccttctgttttggaaactgtacttgtgtagctttgtacaatagcaattttaaataacattcttcaaataagattgtagaataaaacatattcagtgaaggatgtcacgagaagggttaacagggaccctgctctatcttcacttctagtgccagcaaaggaagaggtgaatcaagtggttggactacataaaactagtaatgttggttcatcctctttgtcatcaactaatcaacctcagacatgcatattcaggtgggtacagacgcagaccaagtcagcttagagga

SEQ ID NO: 78902 - DNA, 858 bp, Citrus sinensis
  Intron number 3 from transcript orange1.1g022016m (locus o range1.1g017191m.g) derived from phytozome v7.0 (chr-ID sc affold00048; pos 385995 to 386852 reverse strand)
gcgtccattgtagggtaaattttcaaaacttttgtgctgttaggatatgttggattaaagtgcatgctgtgacttagggattggatttgaatctcacgtagtgtgtttgtgagtttaaattaaaaaaaaattaaaaactaaaaaattatggtaaaatatttaaggattaggatgctctattagtatttttctcttagtctcttataatatttcaagtctaatggaaaaatctagcttatttataaataaaattaaaaaaatagtttcattgttaacattaaaatttaaaattcaatattaattatttatttcattcgaaaaaattaggagagaaaaaatattgggacaaaattcttatccaatgtttaaattattttagttacagggacaggggactacacgtgcccttgggacagctcttcctggtctgtcttttgattgtcaagtaaaaattattgtttaattactaaccactttatgtcttgtactaatttcgaaactaaacacaaacacatttttactctatgttgtacacagtatgagatgcttatacgtagaaggaataataatcttaatctcttgcattaatctgaggtcatcacataaaaagcctaaacaatggaaatgataaatctacaattgtcttagcaaaatatatgaatattttagatgataggccatgtggatattaacaaagacaccaaacgtgaaacgttatgcttaattctgatttacttgagacatttatttcacagtaagctagtgattattaacccttttcaactatcaaacacttgattttgctgttacctaatttgtataggttagagaagatagatcttggaagtgtgagaagtg

SEQ ID NO: 78903 - DNA, 660 bp, Citrus sinensis
  Intron number 4 from transcript orange1.1g029810m (locus o range1.1g026421m.g) derived from phytozome v7.0 (chr-ID sc affold00017; pos 1258842 to 1259501)
cagttctggagggccgatatattactgtggagagggtaatgtgatttttcttcaacttggaggttttctgttttgattggttatctttcttcttaacttggaggttttctggctatattcagaacaccttgcgtcagctatgttggcagcaatcaaagatgaccagttcatccatgtcaacttaagtgaaacagcttgatcaatggccagcttaaacagcttttcaaatgacttgtgatcaactaaacatagcaactatatagcccaacaactatacaacctcagcattcactttcaactctctcaactaatcaacggacattatcaacaactttctaatcaggattttatggtatttcgaacctggcattaatttagtgggcaatagtcacatgcgtctaaattttccatctttttcctcttcctcgtttgtggctaggtttgtccaccatctattgaaattttttattgaagatatttttggcttaggtctcatttaaagttaaaacttgtaaaatggtgctaggtggtgttggttttcgtaaatgtttattaaaatattgtgtttttaaattgatttttttgaagacattggaataattaaggtgatctatttgcctttcagtcacggaggaaacgaccaagaacccctactcctgg

SEQ ID NO: 78904 - DNA, 744 bp, Citrus sinensis
  Intron number 1 from transcript orange1.1g004471m (locus o range1.1g004471m.g) derived from phytozome v7.0 (chr-ID sc affold00742; pos 70099 to 70842)
agttcaggtaattctcgtctttgttcttagtctgatgatgtttgattttgtgagctttttggtgggttgctgttaatttttgttaaaattgcttgtttggtttctgtgttgaattttgtgattgttttgacttattggtataatttgcttgtttgattagtttagcactcgggttcgagaattattatttggatttcttgtgtatgtgctgtgcttaccgcttttgttttggcaatgaggaactggcgaggcactcttgatcttgttgattatattttgttctttattctaattaatgtagttagaatttttggaaataaatctgttcgtggctttcacttggcgaatttgtagtccatagcatctttggcaatttgctaggatttctatgttgagttggaaattactttttgtctgtgttaacaagtgcagtgttgctagcaagatactgaaatcagttcactaagtttgtaatttcatatgggttgtttgttctagatgcttgatggtttgaaggttatgaataataacaataataatgagagtttgaagtctggatttgtcagtttggtttgttatgtttgacatttatgtactgtttggatttttcttgtcttcagagtcgtctggcttgattaatgggagaatattaaatgtttggttttgattgttgaagattgatttgaaataaatggtatggctttggatttaacagttgtttattcctaataacttttcaggcgt

SEQ ID NO: 78905 - DNA, 669 bp, Citrus sinensis
  Intron number 2 from transcript orange1.1g003654m (locus o range1.1g003654m.g) derived from phytozome v7.0 (chr-ID sc affold00074; pos 268973 to 269641 reverse strand)
agctgttgcttattgacaccttgcgtcaattggaggtattatgtttatcccacggcatacaaacaaacaaataaacagccctttttgctaccgactttccttttccttttcatattttttatattcttaaatttgctttcttggtgatttttactgggctagttcaggttgagtagttgatattctcatggaccattcattgttcatttacccagctgaggcttttatgtatgttttcgtaacaaatgtcaactacctattacttcattatggttaatggcctcccttttatcctagtttatgtgagaggatcaacatgggatttaaattcgaataagaagggatctgtgaattttgcagataagctgctgttctgtttatttgctaaaactcaattttgtttatgttcaaagaatcacatggaaactaagaaatcaaatgtcctgtctcaactggagttttggaaattgctacaaaaatgagtccacgcttcactattttccatgttttacccccatatctcttaagaaattatatcttctttttttttcctttttcaaaataaaattttcaattataatacatttttaagctggctggtgtgcttattacttctatttaccgcatctttcagacagaaaaagtggacttggaggacacggttgttaa

SEQ ID NO: 78906 - DNA, 486 bp, Citrus sinensis
  Intron number 3 from transcript orange1.1g029274m (locus o range1.1g026883m.g) derived from phytozome v7.0 (chr-ID sc affold00003; pos 3864961 to 3865446)
ccggtctacggtaattttttttctatttttaattataaatgtttgatttttcttatatcataatcatagtggtaagaagacacgtttttcattgtttgggttattattaaaatgatgaatttgatctccattcactcctgcttttgtttgggagatttaatttacattggcatgccaatctaaggcattttttaagttgaggtgatgtgacttttaatctaaagctgctatgaaatagaatcatggattgtcaaagatataagtgggtaagttggttgttaattgttagcaaccaattgttctgctgtctaaaccgataagaaacacagcaattacaagcatatttttgtttagagtctagaccatcttgctgcagtttattgggcttttgaattcagtttcttctttgttgatatagttttttagtcttgttatatgatgaaaaagtctttgttgctgatggtttaatttggtatgccaggagca

SEQ ID NO: 78907 - DNA, 817 bp, Citrus sinensis
  Intron number 1 from transcript orange1.1g008255m (locus o range1.1g008255m.g) derived from phytozome v7.0 (chr-ID sc affold00815; pos 26210 to 27026 reverse strand)
gttccaagcggtcccgatctgttaatttatttccggtttgtaactttttctttgttgtaataattttttgttcttcgttttagttcgtaagtcaaagaaaagtcaaactcgctttctgaagtaaccatcttctgactttcaatttttccatatatttttaatttcttgttgtagatataaatttgaagtgaaaaaaaaaaagaagctttatttttgctggatattatttgtgtactttttttgaatttttttattttcaataaaaaaatctgatttttttttttaaattgagtttcaattctgtcagaaatttgaaaacttttagttaaatactctcaaaggaggtattttttatgaacatggaggtcaatttccagctgtattattaaatttttttatcctttttgtatttttaaaatatattgagcaactaaacgcagctttctcttaaaattaaaaaatcaaaacttttgtatttgtctgtctgtgtattcaaaatattcgattttgctttaacaaaaatctgaattttttattttattttttaatttcttgagaatgttgtagagataattaatattaatatttcaaaaatcattgtgagaaataaaatctggtatcttttttttaaatattgaatcgaatccttttctggcagacacacgtttggcgcgtgttatattgcgctgtgtgtgttttatgttgccgcattttatttagttattttcctttgtgaaccttaagagctaagcattttttccttttttgtttatataggataggagtgtaagtaggtgcttaaagttcaagatataaa

SEQ ID NO: 78908 - DNA, 516 bp, Citrus sinensis
  Intron number 1 from transcript orange1.1g012727m (locus o range1.1g009668m.g) derived from phytozome v7.0 (chr-ID sc affold00109; pos 274911 to 275426 reverse strand)
tccccagtttcacatttaaagccactatttccaaggtaacctttcaacaaaattatgtttctttttcttttaattgttattttttttccatacatatatattaactgcacaaacggtttcttcaatcgtatatgtttgataaatttgaataaagcaagagtcttttatttattcagtggtataatgcatctgggtttattgaatttttttatttggattgagttttgtctatgttcagttgaatgcaattgtattgattcataaactagaactgcgcaacttactagttctatggaagaagattactcgtgaattgagaattaatctaatttttaattaattacgaaatggttcagactctgagctagctgttttgtgtgttaagttagttcatttttggtgactgtgatattgggaagtggattgctgtcaaatttgcagaatgtaaccattattttaatgatagagatgccattttggtttataactttgattggaatttgtgctagtacagtc

SEQ ID NO: 78909 - DNA, 485 bp, Citrus sinensis
  Intron number 1 from transcript orange1.1g014575m (locus o range1.1g014575m.g) derived from phytozome v7.0 (chr-ID sc affold00606; pos 43 to 527)
aggatattattgaagttttgacctttaatacggtaagcattttgtttgagactttatattatttgtgaatgctattggatttgtaaactttacttataattatgtataagtacatgggacataagatcaatagaagaactggcaataataaaaaggaaaaaaaaatattgcaatgtcaatttacaactaaaagtctggcaaacagacagagatacgttacaatgtcaatttacatctaaaagtatggcaaacaaacatagatactttatatgtttagtattgtttgtattactatgtttctttcgtacataggcatgtccatacttcatggatactttatatgcttagtattgtttgtattacaatgtttcttttgtacgttggctttcaattaacttgaacattaatttaaatttgaatttaacttcctggtctttcattgattgttaggggaccaaaaaagttgagggtatctgctttgatat

SEQ ID NO: 78910 - DNA, 658 bp, Citrus sinensis
  Intron number 1 from transcript orange1.1g020933m (locus o range1.1g019187m.g) derived from phytozome v7.0 (chr-ID sc affold00003; pos 1964692 to 1965349)
tggcccggtttgtttttcttttctttttctctttataggctgtatgttcatgcttttttatctgattaaaatcattggtatgtttaatatcatacggtcaggggcgaaagctgacaattttggttacagggccggagtgaataatgtatatatagtttagagatattttttttaatttctattataatttaggagatatcatgtatatttaaaaaaaaaattgaaatttttttgcctgcttcttttcatttgggaattttatctgttgattcttacaagaattttaagctacttggtagagctgaataccttaaagtatatagaagactttgttgtcctttgatggacttattgctgttaaacttgctaaacctttggatgtttagtgagaacagggtgccgaatccgtctgtatggtgttctctttagtcttttatgtcggcgtggctttaaatattggagtttagtttgttataatatctaccggaaaacagaagtattgcaattgtttttgtctctttaattcttgtgtgtaggtttgccattgccagattcttttttcattcttattatcatattaattctcagaaaatcttatatgcgaggtattttttattatgcaggtgaggcacattcattgaaggttgagaaaatcttg

SEQ ID NO: 78911 - DNA, 820 bp, Citrus sinensis
  Intron number 1 from transcript orange1.1g009193m (locus o range1.1g009193m.g) derived from phytozome v7.0 (chr-ID sc affold00048; pos 548519 to 549338 reverse strand)
aacgccatctctaccagcacctccaaatttaacaggtatcacgtttgttaaatgcccttttgagttttccttttaatatggttatcaaaatttcctttccttttcttttttttttttggtatatctgatgtgtataccttgttgtgtttgccatgtgaaaaaatacacttcctttgatatactagtgaaagaactggaattggagttaagtatctaagtagattgtagcgtgaatttcaatattgtcgagttcgactgatggaaaccttacttgttggtttagttagtgatagggaactgaaacttgggatgctgagcaatttgtggaacaaaatcagcctgtccttacaacaaaagtatgtgtcagttagattgtacgtgctttctaggtttgtgaaatagaagggctgaagtgcggaggagagaaactgagtgagaagatggggagatgctgaaatcatataggatcatgcaagtagttggaatgaatgcaaactaactatttatgttttttctttggaggctatccggagttgtgctaattttccacattattcgggcttgtttcagagtatttatctgtttgccaacataatgttttgcaatgtccatttgaattgagacatctaggaaatcacacattgcatgtctactaaaatctatagtgctataatttgtgctgggttgttcaagatcagataaaaacttttcttatgaatattaagttttgtgcgcattgcatctggcaatatttatcccacgtgttgattcaaattccttctcagttgtgagggttcagtttttgatcccttgggtatca

SEQ ID NO: 78912 - DNA, 795 bp, Citrus sinensis
  Intron number 4 from transcript orange1.1g019984m (locus o range1.1g018496m.g) derived from phytozome v7.0 (chr-ID sc affold00014; pos 706500 to 707294)
aggtaagccgttgcttattacggcatagtttggtctccatagggattccaatatagaatgtctgttcttcaatattatctgcttgctgtgtcttttagatggaagtttaaatgaaatatgttgtagatgaaacttcaattgaccaatacgcttgtccaggccttgaagtatgttagctttccagttcagacgcttgcaaaatgtgctaaaatgatacctgttatggtgagttgagtatgcatgtttatttgggatagtcaattaatgcagccacttcaaaatttttgcatggaaattttgttcttgtgtttcaactgtttttagtagtcttatattgtatttttcaaccttcattgtttaatatcctatttgtaaaattattgctgttcttcctcaggcaaaactgcggctcctcattggtactgagctacatgctcacgttcgggcatgcctgctatttgctttttctaatagccatctattttttatttaccctcgttaaagaattgtctgagaaatgtctttctatatttgaagttaacaagatgaaggcttttctaaatcactctttttgaggtctttataatccatttttttattaaagttggttccaaactttcctatacatggattatttcattttacaaatgtagtattgctctctattgatagatgctctctttgatttcgatccttgttctaaaataagttaagtttattactttctttttctgttatcagatgaatgctaacataattcttgttttgtttaaacagatttggggcactctcatc

SEQ ID NO: 78913 - DNA, 1040 bp, Citrus sinensis
  Intron number 2 from transcript orange1.1g046435m (locus o range1.1g046435m.g) derived from phytozome v7.0 (chr-ID sc affold00003; pos 3332495 to 3333534 reverse strand)
ggaatctacagtcctcttgtaagcgctcctattttttaagctcaagtcttatgagccatttcacattttctctatcctatttatgctcatatatcgtgcatttcaaatgtgttggactttgatgaactgagatctgagcttctctgcttgctggattttcattcattttgtttggttttaaatttatgatatgtatcttgttcttctcaaaattgggatgctttccctttctgggttatttatgtttgtcatttggcaaaattaaacatagatcctttcaagtgttccgtgaacctgtcactttagttgacaaggataacgtgggttgcttgtcttttagttattgcatcttttggatggcaatgtattccatacttctgaatttcaaatttgattcagttgaaatatcatacatgtttgtcacttgttcgggcataactactaaaccttattttttctttgattgggaattcttcttttatatatgactattaatgttaatttaaagcagtttctgttaattgaatccatcatctagaggtaaagataagcccattccacaaagattttgtggttacttccagtactaaattattgtgcttatcacagtcatattaagcacaagtgtgcagtcaaaccagtgacaaatactagttttttatcacacagaaataggtattattgaacttggacatctgtttaaaatacttcgcagattttgatcactatttcttggttgcttgcctgatgcaaataattagcatttgtttcaactatgtatgaagtttctctgtccttgaatgttgatatatgaattgcatttatagtggctataaaatatgtgtatatttcaatgcattagtgtcaggtacaagttttcactagtcaaaacatatattatcatcacattatgtagtatatgtacatttggtttgtgtcctgactaattgcaatcgatgcatgagatggcctgaggaaattcattgacacctcttttctatttagattggctgtgtctttggactgtatatttggtgtgc

SEQ ID NO: 78914 - DNA, 329 bp, Citrus sinensis
  Intron number 1 from transcript orange1.1g028696m (locus o range1.1g028522m.g) derived from phytozome v7.0 (chr-ID sc affold00005; pos 2249419 to 2249747)
tctcttatcaacttccagattcctcccttcactcagtaagctttctacagtgtcttaatcttcaaacttatgaatttgcgtttatttattgtgctgttatgtccttgtagtatttttttatgttgctccattttagtatctttattgcatttttttttttttttgcattttcctatagtttgctgaaaaaaaaaatccaagtattgagttttttctgaactgtgaactattcttttgattattcaagcgagaaatgaatctgtatgggactaattatctgcttattttaaacagataaggaagtgggtggtggttatttgaggcattgc

SEQ ID NO: 78915 - DNA, 566 bp, Citrus sinensis
  Intron number 3 from transcript orange1.1g028696m (locus o range1.1g028522m.g) derived from phytozome v7.0 (chr-ID sc affold00005; pos 2250138 to 2250703)
cgatccagattatcgaatcccaattgtacttattggtgggtaaaataagtaatcttttggcgtatgttttatcgtgtactgcattctaataaacaaagcttacaattatctgttgtagataggctgtgggctatattaaaatgccattgaaatgcaagccaggttctcttatctcaagttttgtttcattcattgactgtaaatttcataaaataaaagtattattaaaattaagacttctagaatccttgaattatcatcttcattgtttgtagatgcataaaaaaattgtagactgtgggagccagccccattgcaaatctaacattacaaatgccatttgccctcaggcctgtcagcaagtcttttttccatttgtgtcaggatacaatttgagttttctcactagtcaatgagacaaatctgataccttgtacctttatagttgctaattattcattcttcctttctttgaacttgattatatttatgcttaacatttatatcttatataaattgtttataatacaggtgtggctggtgggttagcttatacaaataatctg

SEQ ID NO: 78916 - DNA, 804 bp, Citrus sinensis
  Intron number 1 from transcript orange1.1g012725m (locus o range1.1g012725m.g) derived from phytozome v7.0 (chr-ID sc affold00138; pos 203398 to 204201)
cacactcgtcctcattgtcatctactaactaagccgtgagttctttttttttttaataaattttcttctgccatttttcatgctttggctgtgtaattttgagttctgggtttgtcttgctttcgctgcatgttacttatatacagcaaaaaataattagagtagcatgaccagttcatttttcattttcttttttaaagaaaaaatggctaatgtgggttggaaaggtgggaatctagttgacaagttggtgtttggtttgttgcttttacaagtaagaatctgttattgtagccaaaatcttcattttccgacttaattttataaaattattgcttttccttttgaggttttattggaagtctggaaggtgtcttttctttaattttctccctctttcttttagatgcgtaacaaatgcgcgcatcatgtttaactttaagtttatcaagttaatatactagatatttctttattttttatttttattttttttggagtagtaaaagtacttgatgacctttgcatgctaaatttggatgcagatttacaggttgataaactttctcctaatgagacctccttatttaggtggtgtgaataatggaattttgttatctactgggtgctaaaattttaaaaatgggatcatataattattgggatgtgaaattacaaattattttatatatatttcagttctgcttaattttgtgaaggtcttttgtgtttgtttgatcaatccactatctgaggttgttgcttgtatttacttgtgatgaacagaggatctgatctgaaaca

SEQ ID NO: 78917 - DNA, 691 bp, Citrus sinensis
  Intron number 1 from transcript orange1.1g002921m (locus o range1.1g002596m.g) derived from phytozome v7.0 (chr-ID sc affold00023; pos 685078 to 685768 reverse strand)
ataactaccttgctttcattcttgctcgtgctgaggtattatccgttccctaaatttcagttctttcgcttgatggatggtacaaattattactttttagtggaaagtttaaatttttaccttaattattgattttaggtttgattgggcttctgggttcttgggatatggttgtttactggagtattttgaattattttgtttggagagtgtgttgatgtatattttttttttctttttaattgggttttttgttctttttttttccctcattgatagtgggtttgggtggatttcttattagggtttaatcagcagtaaagttggtttcgatttgaagtcactcacttaaggttccttttatgaacttgtagaatgtttaatttacttcaatcttatgataatgatcaacttttggaatacttttacatgcaaattgactttcagaaaatacatttttctttaaattttattttcttcttctccattctttttatggttgcaaatttcagtgttttgcttgctgttttgtaagagtttataaatacaaggaagcctgattcgacaaaggacatcaatagcttctcggtgatgatgagattttaaagcttgggtttaattattggtcattatacttttgtgcgaacattaaacagggtaaatcggtggagattagacaagctgctggttt

SEQ ID NO: 78918 - DNA, 1047 bp, Citrus sinensis; identical to SEQ ID NO: 78342
  Intron number 1 from transcript orange1.1g004788m (locus o range1.1g002871m.g) derived from phytozome v7.0 (chr-ID sc affold00057; pos 393239 to 394285)

SEQ ID NO: 78919 - DNA, 729 bp, Citrus sinensis; identical to SEQ ID NO: 78418
  Intron number 1 from transcript orange1.1g018512m (locus o range1.1g016424m.g) derived from phytozome v7.0 (chr-ID sc affold00023; pos 127405 to 128133)

SEQ ID NO: 78920 - DNA, 1022 bp, Citrus sinensis
  Intron number 1 from transcript orange1.1g000676m (locus o range1.1g000495m.g) derived from phytozome v7.0 (chr-ID sc affold00106; pos 211229 to 212250 reverse strand)
tcaaggcccatagaatgtaaagtttattgctttggcttgttttacttttatgcaatggttttgtatttctcttgtgagtattagttttttttttttttaattttaattattgattgcggttcaatggtggtttcagagtttaaatgttgcatccatacaagttgtacacaaatttgggtttactttatgtgttagctagctatattatgagtgattggctaggagaaaaagtaaatactatgaagaagagactgtgaaagtaaatttgacttgatgtagaaaaggtgatggggatagcagaatctatgtgaatttaattatatttggatgtggccttttggcaatcatgataataacttgatgaattttgcacatgtagtaattgatttaaagatttatgggctacaatgtatgtttttggatcgaagtgaagtctgttaccaatgaaatgaacttgacttcaatagatagaagcaaacatattggataatctcagggagagaaatattgtggcatcttgaaacttatgttagcatggagctctaactaaatgtgtcaacttatgagaatacgtctgaacatagagttttctacattgcttttaaataacaactggacatattctagtttttatgaaatttgtttaaaaatcctgtcaagataggtatttctttttctgttctctctctttctctcttctggaggtcacttttttggaaaaatattaaggtaatcactaatttctaatgtctggagaaagaatgatataaacacaaaaaatcttggttttaccttactagtggaatggtagtattaattgtgggtctgatattgagttctattatttatttatttatttttttttcttttttgtgttggtctttttttttttgggttgccactcctgttttatttattactttcttaagtcatagtatagactttttttttttaactcgtagaatagccaactaaaatttcactcaatttataaatttcttctgtgaagagcaggacaggaa

SEQ ID NO: 78921 - DNA, 724 bp, Citrus sinensis
  Intron number 3 from transcript orange1.1g010181m (locus o range1.1g007769m.g) derived from phytozome v7.0 (chr-ID sc affold00386; pos 109750 to 110473 reverse strand)
caatcagtaagtaattaagcttccttctaattttcttcaacatattatgtacaatttcggttcatgatcatcagcttgtattttattttgattagttccaaaaattttccttgaactttgaagttgaattattagttttaagtgtttcatgaatgatctcttggtccagtcaacattaggccggggttcgtatacggggagggcaatgatgggaatgatgggaatgatttaagagtgtgtttaaagcgactaaagttataagttacttgttaattgcacttaattttctacttctttagtttggtttgaccagattcactaaatcatgctttattgtatgtaatcgaatccacttgcttttcttttcttaatttacttggagttgaagccaattcattgacgtcttgcattagtgaatgataagagatttctgatttttttaatacatggatcattgaaaatttatgtttatgctattgaatgtgtcattattctttacaattgctttccaagatatgcccgggatttctagtgattatggatctatcatttgatgaacactgagaaattctgcacttagtattttattttattttttggtttataagcacttaatgataatattggtagttctttaattggatgcttgaaagaattttcttttactgaactgtagacatggttaaaagtacagactgcaagcttaaactgaaagaaacagaga

SEQ ID NO: 78922 - DNA, 403 bp, Citrus sinensis
  Intron number 1 from transcript orange1.1g003061m (locus o range1.1g003061m.g) derived from phytozome v7.0 (chr-ID sc affold00929; pos 31344 to 31746)
tcgttcgagtttcaagtcttgtttcatctaatgtaaaaatcattgttttgttttattatatacttaaaatcttttttttgttcgcttcatcatatgtttttaagatgaaaaatgagaatttcaaaaaccacactgattttcactgagttagttaactatctacagtttctgatcattgtattcagcaaaattaatattgtgcagagggatacactgattattataattttgcaatttctagttagcatttttagtgggatgctattctacttttaaatccatttttggagttgcaccagggaatttattttgaatttaatattattcaaatgcaacttgaatgtttctctgtctttaaaatcttctgttgaatgcttatctgtacgtcttcgtagcctgataa

SEQ ID NO: 78923 - DNA, 868 bp, Citrus sinensis
  Intron number 2 from transcript orange1.1g003061m (locus o range1.1g003061m.g) derived from phytozome v7.0 (chr-ID sc affold00929; pos 31821 to 32688)
cagtttggtttaacaagctttacttacatattcaggtaagtgatataatttatttatttttttcttgttgtgcatgataaatgatcttctttttttatgtatgtaattggctgtcctagagtatgatgattgaaaatcacttgataattaacatttcattggaccaaatttccttctttgatttgtgctgacctaatttagtgaaagaaataaactttcagcaaaattgctttgcttttttaggatatatccttgataagtatattctattgactttacttcttatttatggaggaaaaagataattgttccttttacttttgatagttgaaattctctttatttattcgcatttaaattttaagaatattgtaaatgtatgaagtgacaacatttgatgagatactatagttctagtctcaaaactgtataaaccattaacatcgttgactatggcactaacttctaagatggtttatgaaatattaaacatagggtagttctcatcttctgcctttattatgtatcattatggtatgtgaacctcttattttatccttctacaagtcaaatgccactagtgaagtttttgatttctagatatgagaacctgtaactggtgaagtttttgatttctggatattagaacctgtaaatgtttgaataatgctagatgtaagaaattggactttatttatgagaccaatttatcaatgaaaatttgcttgcattaaagaatttgatgtgtctttgtttgtttcgaagaaatattgttatgtcgattctaatctttaactcatgactggcattatgatgtcatttgtctcaatcagcaatcatcagaatctcaatttgtgaaggtggcttc

SEQ ID NO: 78924 - DNA, 407 bp, Citrus sinensis
  Intron number 3 from transcript orange1.1g008598m (locus o range1.1g005032m.g) derived from phytozome v7.0 (chr-ID sc affold00667; pos 38234 to 38640 reverse strand)
accttgaccaaatatttaggtaataagcaatctctatatcgttctttctgccttagtgaaacttctcacttgcaattctgatctggaaccttggtggttttgcaattatccaaaaagtactgctgttcgttatctctgtctctattggagagtataacacaaaccatgattttggagagtttttattgccaacgaaacgcaatcactctcataacctaatagtttatccttttgagagaaacgcatccataacttgagacatgtgcctacgccattgttatctcctgagatcgtgtgattcttgaagatttttcaaattgtattactttttttttttttggttttacaataatgttttcaatgaattccatctgactcaatatcctcacaagtgatattttgcagca

SEQ ID NO: 78925 - DNA, 577 bp, Citrus sinensis
  Intron number 1 from transcript orange1.1g007771m (locus o range1.1g007771m.g) derived from phytozome v7.0 (chr-ID sc affold00003; pos 1627420 to 1627996 reverse strand)
ggtgtgacatcccaaggtgtaacctcttttttttttctctctcgtttttctaatgtacatattgtttgattatgaatttagaaaaaaatataagggttcaaggatttttttttttccctgcttgaatgcactctttatatcatcgcacaatgattctatagtcaatgaaggtggttgaagaggctcaattgataacaaaattctgaaattcattagtgttacttaattgttttttttttttttacaatagtgttatttaattgttgatcagattatttaggtggtgaggagcacgaattgggttccacttctgtttgccttaagttgtgcatataccttgttaagattctgtgagttattagagacttacgtgatcattctttgaatcagattaaattcatgtcacttgtgattgtgattttatctccatgtttaatcataataaagggtttgtatataggatgattctattatatgccagcctctttttgtgataccttgtggtttgggttttttttttaaaaaaaaagaatacatatccgaattttaactatttgtcatttcttatccagtttga

SEQ ID NO: 78926 - DNA, 454 bp, Citrus sinensis
  Intron number 2 from transcript orange1.1g011299m (locus o range1.1g008819m.g) derived from phytozome v7.0 (chr-ID sc affold00048; pos 321857 to 322310 reverse strand)
gcagagacggagcttttctcctggagctcgagaaggtaagtgttttagattttaattttgccttctcttccaaacattttcaagtagtaaaaggtaaaaaaatggtggtgtttgatcatagttctcaaaggcactttaggataaaagaagtaattcagttgttttcttcgagaaacatttgaaaatcacttttctagaaagcactttttgagtttctagccagaaaagcatttgaagtgcgacaaaagtgcttttaaccgctagcattctttagaaagcactttcaaactcattccctgagcttttgtatataaatcacttaaaaaaaaaaaaaaaattttctgactatgatatttacttcgactttcaggttttaatggaagcttccgaagttacaatgcaactttaacccccgagcaaacattattacagattgtaaaagaagttaaacaag

SEQ ID NO: 78927 - DNA, 886 bp, Citrus sinensis
  Intron number 1 from transcript orange1.1g010631m (locus o range1.1g010631m.g) derived from phytozome v7.0 (chr-ID sc affold00057; pos 66331 to 67216 reverse strand)
aggcgcgcaacctctgtgcaaaggtcagtgaaattggcattagtcctaataaaaaactgtgtttctaacaagtccatattctgttaaattgatcttagaatgaaagttttgttatgtccatgaggagtcatccaatatagacatgtaatgggcagggcaccatagtttgccaatatacttagtgtttttttttttaagggtatcaactaggtaagctataaagaaaagcttttagtgatatgcaaaagtatacccaaccaccgcggtacaatgctatttcaactttaacaccctatatcaaaaccccttcccaatttaaatgaatgaagaaaaaaggtgaatgctggaactctttagacactgaagccagcgaagcaagaagatggactttatcccataattcttcaatattatccatgctttttccttcaaaaatacaaacatttctttcctgcatcaatctacttagtctttattgctagatatattgatttcttatagcactggttgataatttcagacaatttctgtttacgttgtgtaggttgcagatatatggttggtcagccctgaaacaattgactaattttttaaaatggttagatgtatgattgtttgagtcaaattataaggactcttgaagtgaaagaggtcatgtacttttattctccgtcctgtcctaaagttatggaaaatgttaaaagtagaactctgcgagactgcgggtggcattttcatatcctttttccctagcatatgtcattgtgtcttcttcttattatcacttaaatatgataatttttacagggcttttaccttgtgtattgacaagaatttcacttcttttttaggaagacttgtactacccacacccattgatccaaga

SEQ ID NO: 78928 - DNA, 451 bp, Citrus sinensis
  Intron number 3 from transcript orange1.1g029216m (locus o range1.1g024391m.g) derived from phytozome v7.0 (chr-ID sc affold00011; pos 2274374 to 2274824 reverse strand)
attgaaaacattcgctgctggttcttccaaggcaggtatatgacatcatgttacatcagtataaattttttgacttttatgaaatgctgttttgctaaaaaattgatctacgtgtaatattgaatgtagtaacttgctatccacttatgaatattggtatttacaccattgtttcctttggttaactgcttatgttgtggaaacttttgtaacttgtctgaagtagtttggtacagacttgtttatttctaattttttccttggaaatctgctaattcttcatccttttctgttgtttggaggtgcatacactgtttgatttggatttttcttgtgtttatatgattattttttaatgtttcagcttttatttgctttctcacaggttatgggctcattgttctgttgttttgcagaaaatcatattaatttaagcgcttacttgtcttat

SEQ ID NO: 78929 - DNA, 548 bp, Citrus sinensis
  Intron number 1 from transcript orange1.1g037758m (locus o range1.1g037758m.g) derived from phytozome v7.0 (chr-ID sc affold08923; pos 420 to 967 reverse strand)
gcaaaacgctcccgtatcatcgagctctccagaaggtattttccttccttgtttctctcatttcccatccagtttctgctccaatggctctgctagtacaagctcaattgatgagctgagggtggtgatattttgtcatttcgttgaattagaggtggttctctgtaatttttcagttttctgacgaaagtgaaggttcacaaatgtttgatcctgattgttttttgattgcactgttttacagctgtgaggtaatatgcagttgtgttcattggttcattttattaattttcatttttgcaaaacaatttttaggattgtattcgaatactgtttcctaaacacatccattcaaaagttttttaagaaaaaaaaaaagaagaaaaagtttattgtctggcctgtttgatcttctttggttatttcatgatcaaattggtgttgaattttgtagtgataaaacattgttgtttcaattgctgtgatcacgattttactggtttgaatgtgtaggttgcggcacagaggtcctgattggagtggcctgc

SEQ ID NO: 78930 - DNA, 542 bp, Citrus sinensis
  Intron number 1 from transcript orange1.1g035923m (locus o range1.1g035923m.g) derived from phytozome v7.0 (chr-ID sc affold00137; pos 62392 to 62933 reverse strand)
agaagctgatttccgatatattccctcgtaatcaggttggttattattttgttttattttttatttttggattttttttttttattttgcacttaaacctgtctttatactcttttgttttttttttgggatctcgctgatgaaatgttaaaggttagtgcaaattatgttatgcttgctgtttgcgaatcttcagtttgtaaacctatacctctaaattgaatgccttttaacaaattggatatgctaattggccaacctatgctttttcatgttgggttgaaatatatggcaaattttggtttcatttttaatgaactaatcaaagaatttgcactaataatagttaacagctttttttttctcctttctctgtcctcttcttaaaagttttagttcgtgcatagctgataacgaagttttagttggtgcataactgataatggagtgtaattaaattctttcagatatatcaaacctaacgtcagggtttttatagtaaatgaatgtaatttgaatgctgctctctatgttttggtagg

SEQ ID NO: 78931 - DNA, 1029 bp, Citrus sinensis
  Intron number 1 from transcript orange1.1g004253m (locus o range1.1g003230m.g) derived from phytozome v7.0 (chr-ID sc affold00056; pos 364050 to 365078 reverse strand)
tctctccttcttgttgaagaaggactcattttcacgtacttattctcatatttatttactactgattgaagcttttgctttcatttttcttttctggttgcttaatgagttcattttcactctgtttttttccccctctttgcctgacaacatgaatctggtgatattgagtatgtatgaaacagtgtttgctatgagtgtaatgaactgcgaaagcaggatatgcacagtgcgagtaacggtttggtaatttggtttaccagctgaacttgattatgctgttaagtgtcattagctaatcgtattataactatcaaattgcttttagctgaataagtaaatatgattgcttaattttctgaacgaaagcaagattaatatgtttgtaacttcgtgaaacttgacgtgattcgttctaaaaatagcgagaacaaagagcaaagttcatttcgaagttaatgtagaaattgtatgcttcatcaagaatttgagctcttttttctcaaaattgtggcgacaatgtgaagatacctttatcgattttggaattgattagtagagtaagtttggaggaatttttggttgcttagtgcttgaagtgcaacaggtttaggaaattgagttgttgttggatcagcggtaaattataattggttgttgttatgcagttggtttgaagtgtttcatagacagctgtagaattgtaatccattggatgattttaagacatcaatgtcatcagagattcctatctattgttttcttagattctaatgtaatatggttattgcatttgcctcctcttttgtggttagaagagtaatgtgatggtaagtgatcatgattgtcctttgtgggaggcacaatgctttataattctttttacttttttttttggtgatatgggggcattcctatttctttttgtaatagttgtgtacttatcttagttgtcttgttatatgtgttaagctaatttgatgctcgtttgtagggaagatctttgctggaaagtcttcaaaagagttt

SEQ ID NO: 78932 - DNA, 633 bp, Citrus sinensis
  Intron number 1 from transcript orange1.1g009190m (locus o range1.1g008989m.g) derived from phytozome v7.0 (chr-ID sc affold00049; pos 316858 to 317490)
tcgaggtcacagagagtccagaacccaattcgacagtgagttccccccccccttctctctctctttttgtccatttttgtttatagtttcttgttaaatttgcgacatttttcttttgtgtttctttatattgtcaccttaattttgaggttttatttgtttgtattactgggtatttttctgtttcgcttggtttaaattccataggttgtttcattactgcattttttactatcttacaagttttaattcgtttcatttcacatatgaatatgtttcttttgttttatcaatcgccttaaattatgatcaacactgaagttttatcagttaaatggcttttcgttcacttcattctctgaatttgttgtaataatattgttgctaaatgttactgtgtcatatcaccgcctaaattgtgttgtgtgtatgtatgttttctttaattatattattattttctattaattcttcttgactatctgtgtcttggttgatatttaagtctgctttgttatgtagttatgggcttcttttttcttttctattcttttggtagtctcattgtgatttgtatctttctatgtttctatttatgcaggtgaggctgagtgtagaagttccagaggcggt

SEQ ID NO: 78933 - DNA, 628 bp, Citrus sinensis
  Intron number 2 from transcript orange1.1g044651m (locus o range1.1g044651m.g) derived from phytozome v7.0 (chr-ID sc affold00023; pos 655587 to 656214 reverse strand)
ttgcaaggtttataaatcacaggtacttttgtcacacttttgagtcaatgctttgtacatttattttgacgaagaaggacacatatgtcctaatatcttttaattaattaccgatcacacccttaacgttaaacctgtaatagaaaaatatagtttataactttatggtcttttaattactactattgtcagtttcatagcatgtgtttgtcaaaggaaggaacaattttatttggtgaaattcacattttatcctttaatagtaaagtaggaacaactaaattataatgacaaggatgcactaggtaattaaaaaagaggtctggttaagttggattaattccacagtagagcacttctggtgaccgtacgatcattgaaataaatattaaatttgtacttattattatgatttaacagtcatcatcagtacttcaccatagagcttgatccaacttagctattgtcttaaaaaagatttgagacttgagtaataaatatgaggaatattacaggcctattaaagatcattctccattctttattagaaaagttttgtttttgttgcttagttaccacttaatttaaacttttttcaacatgtatatctatgtgttacaatttacag

SEQ ID NO: 78934 - DNA, 961 bp, Citrus sinensis
  Intron number 1 from transcript orange1.1g018921m (locus o range1.1g006189m.g) derived from phytozome v7.0 (chr-ID sc affold00074; pos 441126 to 442086 reverse strand)
ttaagctattaagtttgcttctggatttgattgaggtaattttttcttagtactatggagatgaaagagaagaacggcttatttttctggaatataaaactaatgagaaatttattttttatcttttgtttctatctggtggtccatcagataagagaaaacacgatttcctccatctgtgctatatgtgtatggattttttattattttgttgcattttaagtggaaacaatgcttaaatttatttgatggtgattttgttgaatttattgtgcgcaaggttttttttaatagaaatatctgttttcaacttgtgtaatcatgaagctggggagtgtttttctggtcttttgtatatgttttggagaagtgcttcctcttaaagctttttaaatggctggtctcttttggtagactgcgtatctccttatgttgtctagttgggggagagtctttctgttctcttgtatatgttttggagaagtgcttcctctgaaagctttttaaattgctgatctcttttggtagactctgtatctccttatattggttttttatcttaactaatttttttgcctgagcaaaggaatgataaaaaattttcatattattgcttggatattgctttggtttgatgctttgtttataaagcttttgcgtttttaccccctttctttcttcaaattggtgataataaaggaggaaatggaagattccacaacaatatcttcagacagaatgatcagctgaaattctcacagctgatagtgaaatttctttgttgttaaattttccttcttttgcttgcttttatttctcttatctatatatttttctgtgatgtttttgttggatttttaggttactgtctttcttgtttatgttttgtcactgttaaatattaagatttgactcacaagttttatgaaacaattatcttatagaggatttttgcactaag

SEQ ID NO: 78935 - DNA, 993 bp, Citrus sinensis
  Intron number 1 from transcript orange1.1g018898m (locus o range1.1g018898m.g) derived from phytozome v7.0 (chr-ID sc affold00094; pos 452699 to 453691 reverse strand)
cccagcgtgtgtatcaagtttggaagggacgcaatgtattgattcttaatcctgcacttttctgtttcttgtatgtgctggtttttgatactcttaatggcttcttttgcatttgggctagctcagtttatgctataagctggggggttcttgttagtttattggaaaatcatctgggtttggtttggtttgctgtttgctgctatattttatatagttactagttgttgatttgtttagttattataggaacaagtttcaacgggctctctttgatgtgcttttgatggaattcctttagttattttagaatttgtggggttttgccaacatatataatgaagttggatcatggattcatggttgctaaaatgggatatttggtctcggaattttttagtcaagtgtgagagcttaacaaatttacaacttgattacgcatgtactttgtacaacatgttttgtgaatgttatgtgctagcttttatgttgttaatgtattaaactttattgttagttttgcaaacttattgtctaatttttgtaaattttggctcagggacacacttatatttcacggctataaataagagaatatagaaaaccaacacgaataaaagtagcatggatgtgcatttggcatccaatcatttcagtggcatttgggtgaagacaagaaaatacacttgcatatagagatgaatttgtgtatgtgtgtgtatattgtgagttctatgtatcatagagctttcagccaacattttttgtaaaatttagatttctaggctttcaattaaattatctgtgtaattttgtatgcattatgctgaagcatagaagacaatttatactgtctgttcatctgtcttatcttgttgctcatcttacatggggtttattttcgtccccctctatcaatctgtcaatatttatctttattgctgccatcctttacttgactaaatatcttctttggcttctatgcagaaattc

SEQ ID NO: 78936 - DNA, 741 bp, Citrus sinensis
  Intron number 1 from transcript orange1.1g023154m (locus o range1.1g013271m.g) derived from phytozome v7.0 (chr-ID sc affold00017; pos 1042013 to 1042753)
gatcaaacggttagtaaagctcctacgattgttgaggtggatttgggacagcggagctacccgatttatatcggatccggacttctggatcatcccgacctgctccaaaagtattgtttttaaacatttcactgtctaaagtttgtccatttcgatttaggttcgttgaagtttttgaaattttgatttgacttttgatacgaggtaggaatttaactacaacaagctagattacacattagatatgctataaaagtctaaattttatggttttcttgcttgactatatctggtaatttaacatgaaattaatggcgcacttgtaagtgctgtgtaatagatttttttttttgagcaatgtgtctcttccatctacatttgaagatcatttccaattcagacattgcttttacaaaagcatagatcaagtcttcctcaacttcaaaattgattttgtcagctaactagaataaatattaaaaaaaaaaaaaacgttctggctagtatatcattttggccaaactgctttgtaaaagaaacagatagtaagtagttcttcaaagaaagaactcaaagtagtaactgatttacagaatattttttgtccttccagtcaaaatcacaaaaacaaaaagaattagattttttttatgacaccgaaagcactattgtataaagataggttttttgggaattctgatactctcttgcttatatcaaataactgtttgtattataggc

SEQ ID NO: 78937 - DNA, 665 bp, Citrus sinensis
  Intron number 1 from transcript orange1.1g004796m (locus o range1.1g004796m.g) derived from phytozome v7.0 (chr-ID sc affold00014; pos 510072 to 510736)
tgtcgttgccctatccaaggcttgcttgttgccaggtacttaattacattcaaacatgctatgatatctagtcattatcaagaagaattatctggctaattccatttggtgcattaatataggtatgataaatgaaacaattacgtgtcctaaaatgtgtggcagaaatatgatacacacacacatgtacatatacattgtttttgcaccatctcttcaataacagttggaatcatcttgatttagtttgtgctctcttaagcttttaattatctcggatgtgcattcaaaaattgaatagagggccaatagagttcatgaaaacaaaaatatacatttttctttagttggttgcatatacctattttattttatttttttctcatttatatcaattaaccatcaatcatataattatattttacttctttttaagagaaaaaacctcaaaatcgtgattctttaaagtatagagattagtatgggtgccacagtaatccaagaaattggaaatccgtacagccaatccaattaaatatggggccattactctttatgttagtgatgtaattaaacccaatatagcaatgctagtaaccgattaaataataatttttacatatattgcaggtgaaaaagaactgtaagctactttctgaaaattc

SEQ ID NO: 78938 - DNA, 921 bp, Citrus sinensis
  Intron number 1 from transcript orange1.1g037207m (locus o range1.1g037207m.g) derived from phytozome v7.0 (chr-ID sc affold00167; pos 80206 to 81126 reverse strand)
catcagaggagcttcagcatatacttggctgtctggtaaaggaaattgctttcataattgcatgactgttttgtgtttaaaacatcaatgacagttctgattgttagagcttaaatagtactcttgggtccttacctgatagcttaagcttttgggtcaattaataacttgacatgagtttagagccagtttgaccaagtggtgaatctcctcagtgactataaataattaattgtgtctttctttattgttaagtttgtgtctgttgtctttagttcatgtgcaagtgctcctaggagggagttttggactcaaaattccattgctgggcttacctaatagcttaaacttttgaatcaagtgataacttaactactataatagaaatttcaccttgtagctgtttttaaaagagccattaccctcaaaatcttgattttgttgctcgctctgatgatgaagctcttgatcatcttttgacctggaaaattttgattacgattaagatttgtgcttccataaattacgatctatagattagtttgtatgagaatatatttgtacaccttttccatataaatttatcatcttttgcattgtgcttttcttcttagccttgagagtgtggagagcaaaacccatctctgtttggtgttgtgaatattacaaaagaatttttgagtgtgtcttggcttatttggaaataggctaatgcttgtcagcgtatttaaattgcatgaatctcttctttgatttctgagtctttctactcagcttttactcatggtattcagtttttgctgaaggtgcttatgaatttagctcttttaaattataatttgcattgtcttagttgtacatgaggtgatcaaaatttgttgtgctgcatgcagagagagctttacccaagattaatccagg

SEQ ID NO: 78939 - DNA, 439 bp, Citrus sinensis
  Intron number 2 from transcript orange1.1g000595m (locus o range1.1g000582m.g) derived from phytozome v7.0 (chr-ID sc affold00049; pos 423377 to 423815 reverse strand)
tttctgcattggtggtttctgattttgctaagcaggtaattgtgtaattatcttttttatttttgatgatttcatttaattgtttgattttattgtgtaattatgccattttcttacttcttccggtttttcgtttgtgaatctgtacttggttactgagaacatgaatgaaaagattgaagaaattaaaaagaaaagtgggaaaatgatgccttttttttgctattttaaattttcaggttttctatttgtcaatcaaatggtgtgtttagtgttaaccaaactttgaaggtttttttaatattgatatacttttttttcttatttattattattgtatttaattatttgctgcctttactgtagagtcttatcattgttcttattttttgttgtgaatttgttgttttaggtgtgaataagaagtaaggggtttatt

SEQ ID NO: 78940 - DNA, 931 bp, Citrus sinensis
  Intron number 1 from transcript orange1.1g001169m (locus o range1.1g001172m.g) derived from phytozome v7.0 (chr-ID sc affold00700; pos 39290 to 40220)
gaacagcctctggtcttcggtttcaggttcgatctgtacgacgtcgttgccaactttcgattcccttaattttaatctatccctattccttccttgttttgttttagggtttgatgttaattggggttttggggatttatttctacgatctttagtttttcgccgatgatcgttttggtctttatgggtttttttcttttatgcaattgggtttacctagataattttctttgtttgagtttttgtttgtgctacgtgtttctttgtctttttaatctgaacgattgttgttgagctgggtgtttgattttataatctcatgatgttaaaaataattttctgattgattatgaggagatggggttttggtatttggattacaaatgttgaattaaatttgattgttagaaaacatattgggtgtggaagttgaagataatggtattttaaaaaaaatttgtgtgttttgtcataatttggttttggaggaattgaatatacaataataagagcattcaggtaaaactgccatattataattaattcattggaggcttttattcagataggtcctaattgatgaagaattcattgtgctaactgtaatttcctttcctgtcaccacttttttcaacggcctaacggattattgccattttgattctattctttagcttttgagacttttttgtcgtatttcatgttttggttttatacattgttaattaatgttcttttgtcgtattcggggttttggttttatacattgttaattaatgttcttttgtcgtattcggggttttggttttatacattgttaatatatgttaggttttttgttatgtgacgtgaggtttaattgctaactttgattctttttgtttggtgcgtcatagcaagtggaattgaacgagtgtggggtagggagttc

SEQ ID NO: 78941 - DNA, 1019 bp, Citrus sinensis
  Intron number 3 from transcript orange1.1g031809m (locus o range1.1g031606m.g) derived from phytozome v7.0 (chr-ID sc affold00005; pos 1291696 to 1292714)
tgatctcgacagtgtcgatcccgcccttcgagcaggttttaagaacccttttcaacctcctttttttttttgggttggaaaaatttgcttctgttctttttttcttttttttatcccctttttgttatttgtcaaataatattatctgcactattgcacacatggtggtagtaaaactaaaatatggtcgactggaagtgatacttgcatctttcattcctatgaaaccaatttgatttgcaagattaagaatttaaaaatatgcaaaaaaaatttgaacgtagtcagcactcagcaaatggtagttatatagacttaccataggattgcttgatgttggcaaatcacccattaatagcatatgtgttctctttatatgaattctagcataatgtgcttttgtgatattgtaactagtattagtcttcttagtgaagtgctagtggtacgtactgaactgaggacatgtgtagagatatgtggctttcttgattgcccctacatcgtgcagagttttttaattctttctgtttcaaacatgttatgttaggctcaaaaagggaaaaaaacaccttgtgttattatcccagaatttgtgctggtggaacttctttgattattcaattattctgccttctgtcagtaagagtgtactgtaaatggaatgcgtctggcatgttattccaataactgaagtgatcccatgaaatggtagcaaaatgagtgtcctagctgctggcagaaagcattagctggttaccgtgcaatgtatagcttcaccaacttatatgcctgcttgatatttgaaaactatccagaagatattttgttattgtaccaaactattatttttcatatattgacagatttgtcggcattaagtcaaaggaggaaataagctttcctagatggtgatcgtcgtcaagtggtgtagcttagatctgcagttccaatatgttttgacattctctgttgaatttacagattctgagactggctatttgagggaagacattccc

SEQ ID NO: 78942 - DNA, 528 bp, Citrus sinensis
  Intron number 1 from transcript orange1.1g005862m (locus o range1.1g005862m.g) derived from phytozome v7.0 (chr-ID sc affold00359; pos 114323 to 114850 reverse strand)
ccctgtgaaggttgccattgagctacaaaaactaggtaagtagtattttccagcaggcaatatatgcatgcatgcatcttttatttgaattcctagaatattcataaaaaataattatagtttattgaaaattctcgtgtggggatagcttcattttatttagaaagatgagaaagaacgctgaatgccgacagagcactgtcagaactattgatacatctaacctgagttaccgtgtaaattgattatttttcagtcaacacaatagcgttggccagatgtcctgttatttttgttagcactctgtgaaatttttctgtttagttatcattgcgcttttaattatatttttttgtttgaagtatgattttacgtatatattacaatttgggatctatggactcaatgatctactgagaatggctaagaaatctgtctcaattagagatgctgcattctattagttcttaatttgtatgtgtaaataaaacttttaattttgtttccttcaattcaggtttgttgaaa

SEQ ID NO: 78943 - DNA, 729 bp, Citrus sinensis
  Intron number 1 from transcript orange1.1g006724m (locus o range1.1g006724m.g) derived from phytozome v7.0 (chr-ID sc affold00083; pos 481126 to 481854 reverse strand)
cccatcagagttttggagaagatttctgtaagtttactttctttttcggtgcttctctagtcaattgaaaggaaacttaagaatgttgcattctgtgtaaaaagttttttttttttttttcaacatttactgcagtttactacaagtgggttgttatttacaacttaagtaaatcaagaaattgggtgattatttgaatctgtttacaaatttttccttctgcttactttccgtttggatgccgagaaaatgaaggaaaaactctgcatcctgagtaattgcgtaaaagagttttttttttaaaaacccttttaattttttaatttaagattatttggaaatggggatgagataataatttctaatttttatattgcttaaaattattctgtgttcatattttgactcacaagaggaggtgggtggcaactggtgcattgatttttatttggggtggctacggaattcgctgtttatggctgctttcttatgattagttggccgttgtgttgctttctttctttttccgtgttgattcttcgagtgtgaactttcaaataaagttgtctttgacttttcttattggaattttctgtcactgtttcacaaaattttataatagaaaagattttgatcttttactgattgtgctttttactgttggtgatgcaatgtgatggtaactagttatgtttttattttattgttttgtagactccagaaatttgg

SEQ ID NO: 78944 - DNA, 584 bp, Citrus sinensis
  Intron number 1 from transcript orange1.1g024339m (locus o range1.1g019209m.g) derived from phytozome v7.0 (chr-ID sc affold00951; pos 40140 to 40723)
cttgtaacacttgcaaaatcatttttcacaacaaggtgcttaattctttatgcttttaaatcaatatatgcattataggatctgtatttttgaggtcatttgcgtttcatggggttcaatttcatagatggaaacaattttatgaacttattatttttgtcatttacaaaattacaaggcttgaatgttgagtggaaataatgtcaagaaatttcacaagatgagtaacctatgatgcatatcggtatgatctggagtagcttttatgaattactttttgagcacaagtatattatctgctagattatctagaaagcactttctcttgaaaatgagcttatcttgaattctagtgtttgtaacaagaaaatttttgcttattgtataaccaaaggggtgacattgaagaattcagaaaattaaacatttggaaaatctttattgcgatgttcgctgagttgtcttttcctaagcttgatgtgcactatattctgttgtgaagtcatctaatttgttttttaatggaacatttctttcattctgtggcagatcctattaaacgaatataaggaagagaggaaaat

SEQ ID NO: 78945 - DNA, 565 bp, Citrus sinensis
  Intron number 2 from transcript orange1.1g024339m (locus o range1.1g019209m.g) derived from phytozome v7.0 (chr-ID sc affold00951; pos 40767 to 41331)
ctttctggtcctttatacctcactgctgttgattggtaaaaccacttctttcttactttgaaagacggtacttcatgatggattagtgcttttattttatctggaatatccacattggcaatgcgactgcattatgttgttagtctacttgatgtaacagagagattattgaagtttctggggttttgtgcttaaatattaatgtctaaaccattttcatgccttgtctagtacgtggatatcagttttttgaatcagcagtcttcgtggctccatcaatgagggatttatgaaaagtggttgaaattagtgtgagagtcagaaatgaattctaaagagaatgatgcagaaaattaattggagtagcataaccagtattattattatttttggttgtagcaatgattcattgctgctaatctttggcttcctgagcatgtctcttgcacttaatagcgagttactgtatgagtttgatttaaccttttattaactatatttttggataagttattctttgagttattaagctatttacaggaaaaatccacatcatcgaagagct

SEQ ID NO: 78946 - DNA, 1062 bp, Citrus sinensis
  Intron number 2 from transcript orange1.1g014627m (locus o range1.1g014627m.g) derived from phytozome v7.0 (chr-ID sc affold00168; pos 145363 to 146424 reverse strand)
aggaccttcagacacttaatcagaatctcaagtctgtaagtattttctgttaattttttatactggctattgttgagagaagctacatagttttttaacttttgtttttgcaatgatatgtttgttaatatgctggttgctgttgtcgtgttgttgctttacttgtactgctatactcagtttcattaagcttattcttccatgtgaaacgactacaattgtttctggcctttctatattcttcctggtgaagtaaagaaagttcaaggtgcttccctgcagaaccaatactttgctagagctgagccagtatgacttggttccttttgattcgaaacaattatgagttgatatacaaatgtagttatatttttacagaatacaagaattcatctagttgcataatgagaagattgcattgtactatctttattatcaccctagaatgtgaagtagggacagatttcaatgcattttgtggtgtaaaacctctcttgaaaagattcttcttcctttacaatgtacatagccttcttgtgatgtcaattatagtttttcttgatgcttgcagttttatcttataaaatattgagcttgttctaatttgttttgtctctgacggtctgtgacttcaggtttagtgaatggggtagacccttgcaatctccattctttcttttatcctctgtttaacaccttgattatgtttgtctgaaatggtgctagttttgggtcagctggagctcagcaagcgcagtttttggtgttattattatgatgtcttatagcctaaatagcatgtttgacaatttatggaactgggaatgcgagtgagagtagcttttgctatctgtatattctaacgtcagtctcttgtattatattctgtggcactctgtaaatgcctacttttgtatttatgacgaccaattaaaattgaaaaatgaaggaaagatttaactcaaaatctctgtgttttggtattgttttcatatcaaatcgtatataatttttctgatgatgatgctctgctagattgttggtgcagaaaacccagtttta

SEQ ID NO: 78947 - DNA, 769 bp, Citrus sinensis
  Intron number 2 from transcript orange1.1g014409m (locus o range1.1g011028m.g) derived from phytozome v7.0 (chr-ID sc affold00162; pos 13222 to 13990 reverse strand)
gacatacctgtcttagcccgtgagtactcattaacctaaccttttttgtttcttttttttcctgctctctccttttgttctctttcactgttgttgaggctgtttctggtcgtgtttataatattatgaatggaaatgtgagtgacataatattttctattaatatttttgatgaggttataaaagttttcttaggctctaagccttgcattctgttattatctttctcattacttttatgagataaaaagactacattcaaaagtttttgctagagtcaagaattattagaataaggtaacaactaaagaaataacttttattaggtatgtttgatttctgcgaaagtcttagtttgaccaatgcttaggccttcttaggattgatggaacttaaaaatcctgttatcctctcttttgtcatctataaggaaaatgattacattcgatgaaagtttaaattactggaagaccacgctatgaatttaggtggtaggttttgaagaagagttacattgtttatgattcctcttttatcaatttgttttagtttttattggtttgcctacttgtggtcttttcagtgactgcttcagttcagggtttgtggatgcaacagtcaaatttagttcatcatatttctactttattatgactgtcgactttctagttcattttttttaataataataattttaactttttggttcaaagggcataacgttttgattgcaggacatcgactcttcccgcattctttgtatttggaa

SEQ ID NO: 78948 - DNA, 789 bp, Citrus sinensis
  Intron number 1 from transcript orange1.1g014409m (locus o range1.1g011028m.g) derived from phytozome v7.0 (chr-ID sc affold00162; pos 14170 to 14958 reverse strand)
tttacagtaggaaattcactagagttgctttgcaggtaacatatattagtattttattttcttcatttttttttcatttttttaaaccctagtaaaatctcgggtttctaattttaaagaaatttggttatttgcttttttattttaaatatttggctttgccttttaaacaatggaagataaaggtttatttttgttagtttaaataaagaattttgaagtagctttgtttagcatgattgaattttctaggcagcaaaacagagattttcctggaaactcaatccataagaaaaagagatgagaattaaaagcttgactcgcatgccaaggataaacttttattagtttagaccagttgataagtttatttatgattctttttttttttggttgattcaactattgagattaaattcattagtatgttactaatccatgcttaatatcgcattagtaacaatcatgcagcaataagatccataaacttttatcgctgattcaataggacggctaagtatctctgaggcttggcagtcatgggagtacgcttgcaagtataaaatccaatatttagttttacgaatcaaattattgtataaataaataaaattggtgtaatcttaactcatatgtgtatatttatttaagtaatcatgcaagcatgtttaaaggtgtctggggatcctgaggattagaatttctattgatttattaattaatttccttgtttttatttaatttaagcttttagtgattttagtttccagataatttattgaaggattc

SEQ ID NO: 78949 - DNA, 667 bp, Citrus sinensis
  Intron number 1 from transcript orange1.1g014270m (locus o range1.1g014308m.g) derived from phytozome v7.0 (chr-ID sc affold00386; pos 153885 to 154551 reverse strand)
cacaattcaatctctcgattctaacgtaagttacagtaagattccttgatacccgtttgaatacttgcccttaatttttatgaaatgattataaagtcagaaactttatatcttttgcaatacccagttttttttatccgcttatttgttgaattctagtgtgctttcggtgttgtttcagctaattattaactgttcttttttctttttttgttttgtttcccagtttgtttgagtactttattgatttatctgttgtgattatggtcaaatttgtatatatccttctttgtagattatatgagcttgatgtttactcaatttctgtatctttttgagtgtgaagattttttagtgaagaattgagcttctaatttgaaacttttattaatcattggcttgtgatttgttgattttgatataaccatcataatttgttgtgttgggacactggattgtggattgggattgattcaatgcaactatgtctaatttatgtcgtattatttttgttagaatttgtccatttaaactttattaaagtaacttctttgaacatagttattttcaccattttggtcattctatatttgttcatggcctcttcattctcgctttttcttttctcacaggtgctatagtcgcattcacagtgacctttaaattc

SEQ ID NO: 78950 - DNA, 551 bp, Citrus sinensis
  Intron number 1 from transcript orange1.1g013644m (locus o range1.1g013644m.g) derived from phytozome v7.0 (chr-ID sc affold00014; pos 1177551 to 1178101 reverse strand)
atcggaaaataataacatcgtccgccgacggccaggtgagtgtcacttcagatgctttgacacttcctaattatgtctttcttttttttgttgacatgttagacataatggatttgctgattctctgttgtcattttggcctttggtttatgattagttctaatgttttcttaaccatttttgggttcctcagtgtgatttattgtaatagttaattgtattcaacgtgcttcaattgcttttgactcttgtaaaattctatcactcttcagccatttcttgaaaaaaaaaaaaaagaaaccttcaataaaataaagcttacaacggaaggttgtttacacgaaaacataaaactgagacttatgtaactactttattgataccatctcacttttaaatttttcatacagtgattatgattgatgtaacatctggtgatttagatctaatcccaacctgttttatgatgattatccatagtgtactccatcttttgaccaatgtgagctgttctccttccttttaggtgaggcttggccaaatctttgagg

SEQ ID NO: 78951 - DNA, 926 bp, Citrus sinensis
  Intron number 1 from transcript orange1.1g033083m (locus o range1.1g032181m.g) derived from phytozome v7.0 (chr-ID sc affold00014; pos 602969 to 603894 reverse strand)
ggaaattcagaccgctgtgagacttgtacttcctggtgagctggctaagcacgctgtttctgagggtaccaaagctgttactaagtttacttcttcttgaaggaagtttgttgcatcggtcggtgaattcgggtgttatgtgatttgtgtagttagtagtttaggcctttaattttactagatgaagtcgtttttatgttttgtgttttaaatctttgttggatttttagggtttgtttggatgtactagaaatttggacctgatccgggtgatgtgcatgttcattatgttagaatatgaaaatgaaatatgatttaagaattgcccttgttggttctttgctgaattgtgataggttattgtgaaattgcttggtgtgaaaaagaagggcacaaaaattgatgctttcttgtgttgtgagaagtccctttttagccagttaagagatttggagatgtatatgtatattttgattggtgtgaatttcttgcttatgcttttcctctatctttagtgtaattctaatttattaacttatttgcctcctttccgagctttgtgaatctgaaaatgttcctatctaccttgtgaaagtggatttaattggaagttggaaacttagtaacagctttggtgtgaattacaactgaaaactgaatcctttccctcccctgtttctctgtcctgctctatcttgtatatcgttctcttctcatcttatttgaatctgccttatctcggccatttcacaatcaagattcaagaaccttcatctctcagcaactaatccagttcgaaaatcagaatcaagaactggaagcactttatttcattccacccacccatttcaccgtcacacatgcaacttgactcctattatttggctgcagcatcttcttgaggtcatttcttgtaaagaggagct

SEQ ID NO: 78952 - DNA, 927 bp, Citrus sinensis
  Intron number 2 from transcript orange1.1g038365m (locus o range1.1g038365m.g) derived from phytozome v7.0 (chr-ID sc affold00023; pos 214445 to 215371)
cacccgttactcaactaggctggcagcaggtaagaagcagatcattcacgttttcatatcaagtgcttttcaagaaaataataatgaaaaaagaagttccgttcattacgttcttgcactcctgagcagaatcttgaacttccttgctacagattgagaatctgcgtaagcatgtccataattccggactcttcaagaggattgatttagtcattgcgtctcctttgctgaggtattgctgcacatgctctgctgacagtcttttgtggatatcttgtcatgtccttgtcttaaggtgtttctgtttattttgaatcccttgatgatgaacaaagcatcgtaggaaactcaaaaggatattgttgtatttgtttgttctctgattaattgcattaatattttgagagctgattttctattctttaagttatggttgctgtgactcttaggacattgcaaacagcagttggagtttttggtggtggggactatgttgacaggatggatatagtaccactaatggtagcaaatgctggaaatagtgagcgtggtgcaatttctagtctcaacagcccgccaatcattgctgttgaactttgtcgagaacatttggtatgtcttgcacagttatgtttctattgtggttatcaatttctggctatactagtattgattgcgtcatgccgtagatgttcatcataactggctacagtttcttatcatgtaacttgaatatttcctctaatcttaaagtaacatcttggagtaacttgtaactatatgtcatatgaccataagtgcttcttgatgatttagagcttgtaagcctagtcttaggattgtgaaagatacatttattttctcacatttctcttcttatttctcattgcagggagttcatccttgtgataagaggcgaagcatcag

SEQ ID NO: 78953 - DNA, 873 bp, Citrus sinensis
  Intron number 1 from transcript orange1.1g026916m (locus o range1.1g023417m.g) derived from phytozome v7.0 (chr-ID sc affold00017; pos 484855 to 485727)
gaaataccaaaacgaaactaactttcagtattcaggtatatattttccttattttattatttttattgaactgcaattttcactgttattttttattgataattgattgtatcgtgttttcgtagggattgaaaagtctaagcttgttgaaaattgcacattgagtagtagttgtgagattttccccctccaattcgttgagttaagatcgttagttatgattttaaggttgtgcaattgtgttttatttttttacctcttaagaagatttaattgtttgctcacgagaaattaatgaacatgccagtttgataggtttagaggtttagatataaactcaatttctttctgtaatcttaaacaaatgcaaagaaagttgatgaactaacttttcatgtaatcacaaaagatgtgctgaatgctctcgatttagatattgagtggacattgtagattctgtcattgctattattaccctgacaattctgggcatatgatgtgttagaaaaggtgggggccaggggtaagaaaagaggtggtaaactgcgctgtgtgtgtttgtatttaaagtgatagttgatcatggaatgaagtaatcagcttctaagtttcaaaatttctccagctaatcacaaaggaagaaatttccaggcattgtcaaaaaatagatatgtgaaatagaaaaaggaaaaaaggaaattcttttttcttagaggaactcaaatgctgcagttttatcaaaatgatttatgatgctcccttactaatttattgcggcttatcattgtttaatcatttgttgcagccattgattcttaatctttcatatttgaactctgtgtagcgtgactataactcggatatactttaaag

SEQ ID NO: 78954 - DNA, 534 bp, Citrus sinensis; identical to SEQ ID NO: 78653
  Intron number 1 from transcript orange1.1g010907m (locus o range1.1g010574m.g) derived from phytozome v7.0 (chr-ID sc affold00215; pos 135122 to 135655)

SEQ ID NO: 78955 - DNA, 953 bp, Citrus sinensis
  Intron number 2 from transcript orange1.1g017881m (locus o range1.1g017881m.g) derived from phytozome v7.0 (chr-ID sc affold00431; pos 89380 to 90332)
gctctcagcttcctgatttcaaggctgcctttcaagtgagttgtttattatttttattttttttctgatatcttggctttatggggtttatttgaacgatgtttggctgctgagggatataaaaaaaatgagtctattgggttgtatgtttggctgtggaagagaatccatgttgaaagtgcttgagatcatggtcttgtgttgcatttgctatgaaaatgagtttttttttcccattggattttcaaatgattctttttattacagtgtctgtgtgctgtttggttgaaaggaagtttgactatttcaggagcaaaaactcctatttatgatggaaactcgtagctacaaaaatccatctcacatttgttgttgtgaaaatttgttagttcgtttataaaaatcccatttggagctgtgtttattattcttatattgaaagttgaattgggtttacttaagtggatatatttctaaatttctcaagaaaaacacatttctcattttttgccttcttattttgcatcactagtttttcttgattgacttttgtaatgatcattttcttttgctttgatttgtggatcatttatctgtcatgtcctgttttgttctttgacattaccttcgcattttgtttagttggtaggaaaagtaaagtcaggccgtttcttcttttagctattgagaagagattggagtttttctttcttctagattgttatgtatcaagttctttggttgtggaaaatgaaaagtgcaatgcaagtaagccatatatggttggtagccttgtttaagtcttgacaatacttgcatttaattagcagaaagccttagtgtttgttgttcgtgcttcagtaatatatttagtcattgtcaatgagtgagagtgtgagacatgttttgttgttggtaacagaaaaacatgctttgctgtaattcaggatttc

SEQ ID NO: 78956 - DNA, 222 bp, Citrus sinensis
  Intron number 1 from transcript orange1.1g025007m (locus o range1.1g025007m.g) derived from phytozome v7.0 (chr-ID sc affold00023; pos 849819 to 850040 reverse strand)
ggtttcctacttctccaaaacctccgcactttcaagtaagcactaagcatcgatcttgctttcatccattgtccttaatgataccttttttcttttcttttcataaaaaacaaatctttttcttttcttttaatcaaaatcaaaactgcattgacccatatgatattttaataagattttcaatgggtactcttcattttttggatatgatgcagagggggc

SEQ ID NO: 78957 - DNA, 543 bp, Citrus sinensis
  Intron number 3 from transcript orange1.1g027730m (locus o range1.1g027730m.g) derived from phytozome v7.0 (chr-ID sc affold00483; pos 104440 to 104982)
ttgattccttccgcttctgctctcttggctgcaaggtaaccttaatcacaactaatttcaatgttgtcccatttttcttgtttggttgatgagcaagtgtgggaaaagaaaacaataatgttcagttaacacattgtttgtttggttggaatggagttgacttctcataatgaattaattaccccctctaatttttttattccttaatgactaagtagcttacagaaggtggagtacttgagaattcgatttcaaatttcaattacccctttgattattgattgattaattaatttgattgctttaattttttttattccttgacgactgttcatctggtcctggatgctggattttctttaagtccgagaaagttgttacaccaataattagattgattatgaagtgtgaaacatgaacacccctttcaaatttcaattacctatttttttgtgaatttgcacatttttataaaatttctattttcaaaatattgatgttattatagattgttggaacatcaaagaattttcaaaagaggaa

SEQ ID NO: 78958 - DNA, 649 bp, Citrus sinensis
  Intron number 1 from transcript orange1.1g038697m (locus o range1.1g038697m.g) derived from phytozome v7.0 (chr-ID sc affold00608; pos 67638 to 68286 reverse strand)
ccaagcttaaacggtacccacctccttttctttatttttgtcatcttattattattattgagtgaatatgattttgtatgtaaagaagtactcaagaaattgctaaagaaaaagaatcctatttgatatatttctttcaactcatgtgaaccgtgaagattcatgtttattgagccctagacatgcaatgaattccatgttgatatttcctgcatacatgtgggtgttagtttagttggtaaaattcttaggttgaaacataggtcttagattcgaactctgcttatataggtgggtttattgctgaccatgctatgactaaatagcaaatgagtgtgtttacaatatatttttggcaaagtatcggaaaggcttcagatcataagtatactggggattgaggtgatgcagctttaattcacagttgtttttgctataagattaatagttttctaaatataacaggtgggcagctggttaaatattagtcccaaataagtttgaccaaacaatttaactgatgtgccttgaagttaagtagaagtaccacagttaatacccgtccttcaagtttgctttagtttagaattcattgatttggaaccgttttgattgcggaaataaacttggcaggggcttttctgagtat

SEQ ID NO: 78959 - DNA, 288 bp, Citrus sinensis
  Intron number 1 from transcript orange1.1g000975m (locus o range1.1g000975m.g) derived from phytozome v7.0 (chr-ID sc affold00815; pos 50690 to 50977 reverse strand)
ctttgaacagttctgcgttcaatctgattccccaggtgcacctgctttaatcttttttgaagttattattatttccaattaattgttctatttctgtaactcatgtttctgatttgatttcgcttaaaatgttaaatagccagtagtattcgtaatttcatttaaaaaaaatctatattctgttagtgaaaacttttcattcttcttgggttgttttggatctttgcttagtctacaactaatcaatatacagtgggttgttgtcattgtttcttgttttccattttg

SEQ ID NO: 78960 - DNA, 791 bp, Citrus sinensis
  Intron number 2 from transcript orange1.1g042650m (locus o range1.1g042650m.g) derived from phytozome v7.0 (chr-ID sc affold00003; pos 474971 to 475761 reverse strand)
ttattaccccgaagggcagaggtgattttttccctcacaataatcctttatccccattttggagaaattctgccagattttatgtggttactttcgtattgtagatcctcaagttcatgtttgtaactaggcacaactcattttatttgtggggtttgagaatgagatttcgttttggaattctgaccttaatttgtggttaaaagaaaagtaatagaagctcgttataccatgtggaaatgggaagggaggggaaacagggagagaagaaatatgaggtttgagaaatcaaaatttacttaacatgtggatgaacgaggtttgaagaatgtttaatgcatttaactcgaaatcataaatcctaattctttgagtgtagtggtaggatgacctagctatttagctcatgcgagtatgagaagaaagacacactgaggtagctcaaaacattttttctttttgctttgcatgtcaaattttacatgaatgaatttttatatttggatttttccaaacttggtagtacattgaccggtacaagagtttttcttttactttttttttttggtgagtgaatatcagtttttataattgaagttttcattttacctcacaagtggttgattgatgtcttcacacgtactttgccatataaattaccaatttgtgcagctgtatctttcacgacacagcataaactacttttgctctgatgaattatgctaatttactgttttcattgcttgtgttacgcagcatctgttcctgatccagtgaaggccgagcttttg

SEQ ID NO: 78961 - DNA, 895 bp, Citrus sinensis
  Intron number 2 from transcript orange1.1g024072m (locus o range1.1g024072m.g) derived from phytozome v7.0 (chr-ID sc affold00014; pos 1550427 to 1551321)
cttggtaccaccatttaattcttttctttctctttcggctgtaatttattttgcttgattgtcataagcattttttgtcgtttattttggttgttgaatgtctttaatttgagaacattgcattacaaaagatttcaaataaatgacaaaaaatgaaatgtcaggatgtaagatgatttgggatgtaaagagtagtttttgaatcaactggaattacaaattcattgagattgtatataaatgcatttatggagtcatatagtataattaattgcaatggttgaatcatgttgatatttcattgttctgtatctcctgtgctatttcactcagccttgcatcctctatgtagattttaagcccagctaatggataagattggtaggttaaattgattgccaagttatgccttctttatttgatttcttccttataataggaattcagatggtagattttgttccatggtctacgtaattaagatgttgaagtggctagatgagtaattcttagatagattgaactcagacttatcttagatagattagaaaccctgttttgatgaaacaaccatcctacctgagtaatttggcagaactttctaagagagtctactggttgagtatttctctaagaagtgttacatctgcagaaggaaaggttgaagacgctgaagggaggttatataagaataagattttcaaaaactcggaggcccctatagtaaatataattaataaagcaaaagtcagtgtattgcgaagttttagaattttgtggccgttttaaatttggtagttgtagtcacaagattaagataagtaagatttcactttccttacatttgatcgtaattgcagttcttcggaagcagttaatcgaatttacgagatta

SEQ ID NO: 78962 - DNA, 488 bp, Citrus sinensis
  Intron number 1 from transcript orange1.1g026529m (locus o range1.1g026529m.g) derived from phytozome v7.0 (chr-ID sc affold00162; pos 113067 to 113554)
attacctgactcttaaggtaacttcgatgtaaaatcggatctactatttttttcttcccatttttacactgtatagttaatgcacaattatgagttcattttagttcacgatcactattcagtcatcattttgatccgctgtgagtttatttccacttccatggttctgctatgcttcgtaattttgaatctttgaactgatcttatgatatgtacaaaacataaagctcttttgatctgaacttatgcacaattattcgctttattttgatttggttaatctcttcctgttcatttaaatttcgttttgagtttcctctgaaaaacattttatgtatagggatttagaatctgaatggctgtttgcatttgtctatcagggatctaatttgtctctttcttgtctctatgtttgactgaataaattacggttttggtgattgtatcgggtaggaagcttgaaaaccaaatacactgcagaaaggttt

SEQ ID NO: 78963 - DNA, 356 bp, Citrus sinensis
  Intron number 1 from transcript orange1.1g009392m (locus o range1.1g009392m.g) derived from phytozome v7.0 (chr-ID sc affold00145; pos 96286 to 96641)
tcgtcgagtgccgggttcgccattacaagttcaatgtaagtgcattgttcattcatttcatatacgtatacttatggatacacatataaatacattcgcatgtatatatgtatgtattattcttaattctaatgatagaaaatgtatttttccatttctagtaaaataaataatcaataatagtcatgtacaagtgattgagccaatctttatgtatataagtttcataatttggtctcatcaacttgacttaaaaatggaagctttgcatcatgtaaaagacaattcaaaatttattaatttttaacagttgttattttttatttgctgtgggggaattatcttcacaggtggtg

SEQ ID NO: 78964 - DNA, 650 bp, Citrus sinensis
  Intron number 2 from transcript orange1.1g030741m (locus o range1.1g026264m.g) derived from phytozome v7.0 (chr-ID sc affold00066; pos 524710 to 525359)
ggaagactaagagggagttactgctacagaaaagggtacttatcagctctctgtctctctgtcacacacattaaggcatgcctgcttagacagtaatttgcttttatccactgcttttatacttcgtaaacatgaattttcaatcaaatatgggactttataaagcctatacacatgcatgcatattgatacatgaagggacttcagttcaaatgtgaaaagctattaaagcttacaattttgagaatgtcaattttaggaatatttcaaatgtcaagtagtgacataggaattctatagtttgatttgcaaatataatgcagcattctgtaccatttattatctttcaaaagaagttcagggttcaatacagactgaattaccgtctcgatgcatttttgttctggtccattgatctcgaatagacaatcgctgacaagtaataacggaaaaaataagaatgagataaagagaacaacctatatttttcaggaaaggaaggaaacggattattcacgagccaggttggatgaaccttgacaatcaggatatgttttggtgatgattaaattgagtctttggataaaatctgttgaagtgttttatcttctgcaggtaaggagtgtggaagcgaaggaagctcttcgtct

SEQ ID NO: 78965 - DNA, 662 bp, Citrus sinensis
  Intron number 3 from transcript orange1.1g005976m (locus o range1.1g003653m.g) derived from phytozome v7.0 (chr-ID sc affold00050; pos 588862 to 589523 reverse strand)
aggtaacgaatgaaaatagctaatgttattttgttaactcgattttctcttacagtctcatgttgtgaacatgggagttcaagaaaaagtagagtaatgaaagtagagcataagtgtggaagtagaaattccatagttgatgacaatacgacaaaagtcaaccatcatttttttagtcacctgcaatagcaataagcttgatggtcaagtgaatacttacctatagctatatatatctctctgacagtaatttccctatttctttagggctccctatgaatttcaaattctttgcttctttgcttctattgctatctaacttgcaggagcataattcaaaaaaaaaaaacaaaataaaattgcagaagcatttcaccccttttttcttctcaaattattattatcgttttattttggagtttttgggtggaagaaaacaaccattgtttgctgggacattacttgtatcaactgtgtatcttagcttagtaacattgataggcctttaaaatttccttctgcacttaaatgtagtaagatacagtgtcgattccttgtctcccggcaaacttacctggtgacacatggcagttatatgattattttccaacattctatttttttcagtttgactgggaaggagatttacctctgaagtatcc

SEQ ID NO: 78966 - DNA, 324 bp, Citrus sinensis
  Intron number 1 from transcript orange1.1g013421m (locus o range1.1g013421m.g) derived from phytozome v7.0 (chr-ID sc affold00005; pos 2121229 to 2121552)
atcgtgtacggtgcttcttttatatcagctcggcggtacgaaattttcgaacggaatattctccaaaaccaaaaacgaaaatgctttgcatctattttcttctattatcgaatcgtttcgatgccctgtttttagttagttgctgagaatttgttcgaattctaattatagttcacattctattctattgtattattctttgcttttagtttaacaaactattagttcattatgtttttgtatcgttgattcttgtcatgtttttccttttttttttttttttggtaaggctttggaggaaaaacggaggcgttttgaaggtga

SEQ ID NO: 78967 - DNA, 1035 bp, Citrus sinensis
  Intron number 2 from transcript orange1.1g009343m (locus o range1.1g009336m.g) derived from phytozome v7.0 (chr-ID sc affold00056; pos 572496 to 573530 reverse strand)
catcttccccaagtagtcaatctccaggcacccaagttagtaataattaattttcttttttttgcatttttattttctttaatacattcatgtatttatggtgtgactaagattagattttgttaacttcaaaagtggaaaatcagctaaggtggtctgggtggggggttggcttgagtgtaatccacaagtttaattcacagttcccccccccccccccccccctcattcaaaagaaattttcataaagaaggttaatgttgtgataattcaagtgaatgattaaatattgacataatttggctttaaatttttactcaacagaagttaggattttagcaaaagaaataccttctctgagtatataaaatggaaaaaaaaaaacttgattttttgtttgtttgttgttccttaaggaagaaggggtaccccacagggggacagggggttggtggagtatttggtggatggatagccaattgaagtgcaatattttgttttaattgaaatgcaatactttgttttaccccaaaaataagaacattgcagtagctgtactcatgaaaaatatgatgaagtaaactctttgaaatcaaagtggaaattatgctagatggtccaaattggtgcacagctatttctttccagaggttaaattttagttttcttctgtgtatcttggcatatgaaaaccttggagcactggaataatctaaattttttccctttgttgggaataaggagaattggaggcatgggctttaatttgggtgttattgcggtggacataggccacctttcctttatttggggtatgcttttatgggaataaggagaattctggctggcaatgggatacttaatggtttgatgatttgacaagttctatcgctgttcgtactcgattgacctgttcttatcatggctgatgaaaagtttttgatgagatttgggttgttgaccttttcctttagcatttcttctctgatttgttctttcatctacgttttgcagaatttccaagggcaaggcctt

SEQ ID NO: 78968 - DNA, 605 bp, Citrus sinensis
  Intron number 1 from transcript orange1.1g024749m (locus o range1.1g023929m.g) derived from phytozome v7.0 (chr-ID sc affold00109; pos 46528 to 47132)
ctcgattttggattaaattcgccgaagacaagctggttcgcaccacaactctagcaatcccgtttataagtgtattcttttcaaatttgtttatttattctatggtttagatgagatcatgataataagaaacttcacccactaaaccaccaactcttactctctattactcagatgatgcatgtaaagcacgttcatagtcagtcgagcctagctgctcaagggcctttttcataatttattcgtgaaaaattccttaactttcaactttttggtccttcactattttttctctagcaatttttagaaatcattagtggatttaacttcctcgggtgtaaattactgaaagacacaaaacgttaaacttaactgtttttaaccatacgggggattttgattattttcaaaacatttaaggaaaaagtaatgaatttactgactctcttaattgacttatcaaacctttaattaaaggatattgtgacgtgtgtacacattgtctaagttttcgagcttagtattaatcatgtggagataatttagatttaaaaaaaattattgtggcaggttgttgctattttgaaattgtttcgtagcattac

SEQ ID NO: 78969 - DNA, 1061 bp, Citrus sinensis
  Intron number 3 from transcript orange1.1g025118m (locus o range1.1g025162m.g) derived from phytozome v7.0 (chr-ID sc affold00005; pos 1584323 to 1585383)
gttgttcaattatcaaagacggcttgatacacaaggtaaatataaaatttaagtttttttctatttttcagcttagaagttctgatattaactttttaatggtgtccggatcattggttagcatgaattcaagacggtgatggttagaataatgcatcaaatattttgtttttatgattctattttaggatcaactaagaaatttcttcagttttatatctcatggttcaaaacctgcttaacatattgtttctaattgacttgggggggggctgcatttatcaagcataaaaagggcggacaacaatttaggtaggtaagctttacaaccatctccttgcatgtgtcttcaacaaaaaccattcctacaagtgttcctagtttggcccttgatgtagttttgacagagtgagctctgattgtttctagttatttattgtatttttgttctacgacatgtaaattagtgtgaccaactattgttatttggtttttgattctgattgatttgtgataaattcttgtatcataattgtcaataagccaaattcttgtgtcataatcgtcagtaagccaatgaaacagttgatctggcagatgtgatcttgtgaaaaggtaaccattggtatgttgtatattgtccttttgtgcttttgcatgacactgatgcagttgctataatgggtgctatctctttactcaaatttgttgaatcaaatatataacattgggtatatatctgtatgccaaatgaaagagtgtgcctcttgaatgtggttcttgggccatggttcactatctcttacccgcattgggaatttatcccaaaaatttgggtgtctatgatgctgtatgtattgttggaaaagaaaaaggcataaaatgatatccacactgaataggcaatctaaagcacgtcttattgtcactctttcaactgtttttattaacgtccatcttgagtgaggatggtgctttgtttcttgtatattgagatgactatttcaaatgattgttatcatgtaggaagaacttcaagtggcactcttccaagctccata

SEQ ID NO: 78970 - DNA, 874 bp, Citrus sinensis
  Intron number 1 from transcript orange1.1g027344m (locus o range1.1g018555m.g) derived from phytozome v7.0 (chr-ID sc affold00011; pos 1240893 to 1241766 reverse strand)
gtgtcctcttcaagtacggtcccaagcctgttcaggtctgtttctttatattttcttttgggatttttttaattgttactattggttcatgaattgcgttcaaaatttaactttgatgagattttaggtgaatgctgcaattgagagtgaaaattttgattcatttgtgtattctttgttttgattcatttgtagatatggacttatggctgtggcaaccttcaatgacttggattttatttttcttctgaaaaaaatcttttgatatttgaaagattaaatttggtgtttatttgttgtattttatctgtcgatattgcgattggatatgaattgttcatttgcgtcatttgcatagatgggctgatttagcaagaatttaaaatttgacatcggaattcatgtatgatttgatgaagttgaggtttcagaaatcggatatcttgcttgtatgttcatatgtaataacctcctcattgtttattggatagtgagtgttggagctttggataatttgaaaactgtttttcttcagaataagagttgttcattttggttgcttgtaaggacctactcaatggcttttgaacagtataagaattagatgtagttcttgtggaccaaaactttggtctctcttttgaagggaagggttttatattctactttgttgtagttgtgtgttagcttttactccgtggcatagaaacatgtaattgggctgtgtactgtgtttttttaacttgttttcaatttatgctgtcttgtggtacattcaaatctttgcctttggatttattttttcgaatgatttttactatgctttctttgccttccaggtcgcatttaaaactggtgactatcaacaacaagt

SEQ ID NO: 78971 - DNA, 504 bp, Citrus sinensis
  Intron number 5 from transcript orange1.1g042110m (locus o range1.1g042110m.g) derived from phytozome v7.0 (chr-ID sc affold00220; pos 212892 to 213395 reverse strand)
agttgctggaatttcacacaagattgacataactggtttgtgcttcggatgaactatattgaatttttctggcaacttgcatattgattgataaaatagtcctaggaaaagttgttactaaatgaacatgtattagttgagtttagctcatcacttaaaacaacgaaatactgatgctctgataactgctaagtgtcattagttctgtttcatgatagcctgataagagcacatgcaaatgaagaggccatgttgagaccaaatattggatcaaagtgactatactcaaaacatctcaatatagggttattgccatgttttctcttcatgtttcagcatgacttgaatattatatcattgatgattacttgaattttctcttctcttaatgtgtgatactgttaaaatattttttgttttttctttggtatccaactatccatgaacatctgactttctgttattatgttctaatatttgcaggtgcctccatagggaaacggt

SEQ ID NO: 78972 - DNA, 660 bp, Citrus sinensis
  Intron number 2 from transcript orange1.1g016273m (locus o range1.1g011117m.g) derived from phytozome v7.0 (chr-ID sc affold00083; pos 516715 to 517374)
caagactgttggtcgcaggtcccgtcgccaacttggtgagcgagtccatttttgtgttcgatgtgattacccaattgctatctacgggcgcttggtatgttccaattattgtttcttgcatctgtttgtttttgttttggatagagtatggactatatatttaactattacataacgtttggttggacatgtgttcattaaaaatgcacttctgttcaaaagagggtaaccggtaacggagcaatgtatttgatttttctctataaagtcggcaatgcttccttgattgttatggccaaatgtcttcttcttggctaaatggtgcggaatggaaggatattttaataagaagtgcaatgaggtggagtttgtttgtgcatgtttgagcatccataggagatgtaggaactttatgatatactatttttgtttgttgatgctaagttgtaatccatatgtgcgattgcatatattgccttgcagagaggatgcattgctcaaggttttgaaaaagtgcaaatttgtttgctttaattttatcttttgtatgggcgagtgggtcagcttagctgcctgaacatcagctgctagcaatgttttagtatatctgtgtggatttctgtacactaacttttctttacttgcagaatccctgtgaac

SEQ ID NO: 78973 - DNA, 868 bp, Citrus sinensis
  Intron number 3 from transcript orange1.1g016273m (locus o range1.1g011117m.g) derived from phytozome v7.0 (chr-ID sc affold00083; pos 517413 to 518280)
tgctatctgtaaggagatttccaatcttgaattcttaacataaactaatgggcctgctgatattattactatgcatctcttagtaccatgtgatgtctctggatactcttcctttacatgtttgcttgtgtaaagttcaaatttaacctagaggtaatcattctccttgtagtaaattcaaatgtagccatgctgatattatttctatacattaagtgtctttttgcttgttcatggggttcatggggttcaacaatagctttatttctggaaatttaacttgctttgattcatgaactagtgtaccagttgagtttaaagcaaattggtttccacatggatccagagcgatacttccacttcaatgaaaaatgagattgagttcccgtgttttgattggcaaacatctaattttttcctgcccatcattatctgcattgcatgtttacaggggagttaatagtaaagttcccttgggaatgatattgttattattgtgtggtgcattcccctgggatttaatcttggttggttgagctttaaaactgaggatatactttaaacagtaatatgattttctcatatatcttatcccagatccattcgtttggtttgtagtatctttattaacagcataagactattttattactggttatgttgttttgaaaagacctaaattctaaggaacaaatgctatgggtgctttaaaatagaaacaaacaaacaaacatgaggactgtcagtttttcttacggtaaaatttgtactatcgtgcattctctctcccatcgatcttcttttgtactggttaaatgattgaggaatgcaattagcagtttcacatgctttgttgattgcagttgtg

SEQ ID NO: 78974 - DNA, 1048 bp, Citrus sinensis
  Intron number 1 from transcript orange1.1g022169m (locus o range1.1g016472m.g) derived from phytozome v7.0 (chr-ID sc affold00011; pos 1961558 to 1962605)
ccggttacttgactttccccatctccgtcaaacaggtagttctaaattttaattctgccgtattggctgtgcttaaattcaaataaatattccattttttcggtttaatttaaatggtgaattgtaattgaatcaatttttttttctgtcttccaaataaataaattaaagcttatttatttattttggtagtaaatcgttgaaattgatttaagtttgtttgcttgaaacttaagtttatgtttggaatatttctatttgcttttgtgattttttcccccctgcttatgaggtatgttttaggacatgataattggtttatgtaagtattttgtttaattgaaatttccattcatcaaaaaaaaaaaaagtattttgtttaattgacactaattatgtctacaattaagtgtgaaacatgttggtaattctggaagttgaaaagtgcttatcaaaatgtgtgtttctcttgtgggtctatgaactaacactttgaaggtgttgtgtttttatttttaatgaaacaaatggtttttttattttttattttttggttgtggatataaaatatgttctggataaaagttgagtgcgtgctcatctttgccaaattgcctcaatggttgataagcttctggttaatatttgctgtgttttttgttaaaggcactaaggcagttctagactgaattttaaatcttttcatgtcccaatctgagaattgcatgggaccactatttagattcagacaattttttaatcattatgagctacatgtgggaactttcttgtaaccatcgttttttttttccagtagtgcaagctctttaggaccactgttagctttagtagttctggtctactctgattattagcctctgctattaataaaatgtttgttgtttttcttttttgtttcacttgttttttaaatgcttgttttttaaatgcatgttgttagtttggttgtgactgagattgcagtgcagtttccactgaattagtggtaatagtgacatatctctgcaggcaagagatcccttacaaa

SEQ ID NO: 78975 - DNA, 450 bp, Citrus sinensis
  Intron number 1 from transcript orange1.1g024464m (locus o range1.1g024344m.g) derived from phytozome v7.0 (chr-ID sc affold00003; pos 2465585 to 2466034 reverse strand)
gcaatcgagtggtatttgtttttttacttgtttatttatttgttgaatctgatcaaatttatagttgtggttcttatgtttatttggattactaattcttattacttgaattcttcattagaaaagtttttaccttggttttgatagaatatgcatttctatcttgtctattgaggaatgttgaacaagtgcaggattgaataatgatcataattgatctaatttggtggccaaggcagtgaattgacttgtacctaagccaccgttctgattttgctaatttactgggtttagtatgaatgacatctggaggtttgacaatgaaactgtatattgacctgggtcgtggtcttggtggtgaaattaagctctatggattcaaattttagggaaaaattttagggaactggtattgatttcatgacaatgttgtgtttttaattgggcaga

SEQ ID NO: 78976 - DNA, 523 bp, Citrus sinensis
  Intron number 1 from transcript orange1.1g046578m (locus o range1.1g046578m.g) derived from phytozome v7.0 (chr-ID sc affold00003; pos 4003023 to 4003545)
gggaacttgattataatttggtgaagtgtaagacgtctaatttgtatttgacccctagtgaggaggctgaaatttgttactctctcaaggtatctttcatctttctcacaattgatgtagtttaattttcaacttcacattcatctataattcattgggttatagtttagttgccaaatttggttataaatctttttttttttaatttttattgttaggaagcttgaacttttattcaatgggtttaatcaacagggaaagagataatgtgaatattgaatgaatgttatttttaaatgaggattgaattgatgcttcattttgatggaaattctgctgaatttgatgtctaatttcaaagtctttgcaatcggacaggagggagcaaagctggaagaagctagaaaaacagttgcacaagctgaagaacatgaatcaatctcaaagcagttggctaaggccacagggatgaaacgaaagcaaagtagataagattctgtgtaaagaaagagaatcacaagag

SEQ ID NO: 78977 - DNA, 640 bp, Citrus sinensis
  Intron number 1 from transcript orange1.1g031077m (locus o range1.1g031077m.g) derived from phytozome v7.0 (chr-ID sc affold00005; pos 1375076 to 1375715)
gctgcgacgatcctaacttctcttacttcttcaaggtcccctctctttctctccctcagtattacctccgtttcgccgctcttgattcttctttacttcgtatttacttcttgcactgctcgctttgcttcacataatggatgaatttcggtatggatttttcttttctgttttcattgctctctctcgtacatcaaatgaatgcgagtacttatttttaggtttctggttttaggttactcattttacttgattttcaaatacagatgattattgtgactatgatctctagtaatgctcttcaccttgttttgctttggattttttgttttgattctttttctaagtgttcaaatttgttgtctcctgttatgtatgtttgtgtttttatgtataatgattatattcagttcaatctctgtcactcatcatattattttcagatctgatttatatatgcttatggatgttcatataagttgattttcagtaacattgtatatcactcttatcaaattatattatatgtttgttttgttgattctagttagttaatgttggaattgaattttaatcttgcaatgctctctgaattagatgtttatctgtttattttttgtgaggtgtagttgaagtgtgg

SEQ ID NO: 78978 - DNA, 495 bp, Citrus sinensis
  Intron number 2 from transcript orange1.1g017703m (locus o range1.1g017703m.g) derived from phytozome v7.0 (chr-ID sc affold00034; pos 962712 to 963206)
ggtgaacaagtctctaagaaagccactgttggtactgcaattcttatcacacttggatttggttttcgcttttttgtataaccccccattgaatgtttattgcatattttcaacttcttatgcaacattgatattctgaacgaaaaattcaaatttgtgcgattcccatgccttcttttttcatttttttttaattttctaaaaagtataaaaattttaacttttaactctgactttgggtctgtttgtaagtactattgttcttttgcttaattttgaaagcattatagaagtgtccggcattccacgaagccgccacacttaaatcctaatcataacctaagttatggactttgtttctgccagtatggacgcttaaaaattgaagctttaatttttctgctatgtatttttatcaagttttctttgtttcttggttgtgtggattgatatcaagggtccaagtgattgattgactctgttgttctagttggg

SEQ ID NO: 78979 - DNA, 385 bp, Citrus sinensis
  Intron number 3 from transcript orange1.1g004079m (locus o range1.1g004074m.g) derived from phytozome v7.0 (chr-ID sc affold00003; pos 625915 to 626299)
tcaggtaaacttttttccagttcaattttgtgtccggcattgaacaaaacttctcgtgttattgcaacaggtagttaaatcagagataaaaaatgtgaaatggaaatttaggtgtgtggaattgttttgtaagtttgtctaagctgattggtgttgcttttgtgcttggtggttttctaaataattaattcttttttactatctgccagtgggttgccatgctttacagtgaagttctctctttatgtaatgggtgtttcttcttcaatttgatattatagtttctaatgaattggttaccaaatgccatacttgcttttcttgctgtttagtgatttttaattattttttttatcggaacactttcagattttggagattgtaa

SEQ ID NO: 78980 - DNA, 719 bp, Citrus sinensis
  Intron number 2 from transcript orange1.1g024404m (locus o range1.1g024421m.g) derived from phytozome v7.0 (chr-ID sc affold00017; pos 1082133 to 1082851 reverse strand)
gatttgctggtagtgttcttacttggttgttttgttaagtttgattgtttatgtttgatattaaacgttattcatgggcatatttcattactcaataccagcatattctgtatctcttctttggattgtaattagcttccatagattctacactgaaacatatcttttgttactattttatatgaacattcaattgtacagttactaattttgtccaattcctctgttttcactgaatgaccattttgtatgttatttgtatctgtctaaacttctactaaataattttcaatagtttttgaagaatttaattgatagattccaattgctcctggaattcatggtttgtacttaggaaacattggtatatggcgtacaaactttaatagtcttctgcatgtgagtagaggatcacacatgcaattttgcaccattgagagccagaatgtctatctctaggtgttccttttttgccactatcacacatggtattgtgtatttaagtagagcaatacaaggtgaaagtagggtaaaaggaatgcacacaccagatcaaaagggccgagaaaataaatgaaacaacaaacttcaacttattatggtcattaattttatagtccattaattcattgttatttacagaaccaaattttacccattgacactgatttctgtttgttctgtgatgcttgaggttaaaatactctgtcacttgcatc

SEQ ID NO: 78981 - DNA, 739 bp, Citrus sinensis
  Intron number 1 from transcript orange1.1g027644m (locus o range1.1g023596m.g) derived from phytozome v7.0 (chr-ID sc affold00003; pos 4006350 to 4007088 reverse strand)
ggttcttcaggtccattgagtcgaacattgaaagggtaaaccatatttttttagtttgctttgcttgatttactgctttgtttatgtgatataggtgggttttccttgttttttcccttttttttcctgtgtttcattttttattagtgaattatgagctttaagtagttgatcgcttctcaacatgtaagaatttcgaatatatttatatattatgtatgtttcgtaattgacccagatagagtttaccggtgggattgagaaaattcggggaaattttggtaattttggataggttgtttgaaattaagaagtactgggatgatcaatctagaaaatttggcctatcatacctcttcagggcgttaataacttttgcatctgatatttgacagattgcagagtggtgaataatttcctttgattcatgaaaaaatatatgcattagagctatgttttgcatgagtattcggtcatagagattaggaggtcattgggcagacaatctatccatgtcttattcttgagcatgcttgagatttttttttttttttaagccattcacattaggcaggaggtggacgtgatcatgttttttgagtcaagtcgactaattgcgtgcttcggttatatctataagatacttctttcaactttaatctactgtcataaaataatatttttgcttttccatcattgtgcagctaatttttgacttccgcttcttggctcttctggc

SEQ ID NO: 78982 - DNA, 920 bp, Citrus sinensis
  Intron number 4 from transcript orange1.1g024818m (locus o range1.1g024818m.g) derived from phytozome v7.0 (chr-ID sc affold00003; pos 82426 to 83345)
atccaaggaggagactttgataaaggcaatgtatgagctttcacacacatttagatacttcagtgtcttgttcattgtttagtgtaactattgcagctatttgcttctttaagaatttatttatgaactaattaattgaattgagaagcacatgcttctctggctaggttaccacatggagctattaatggcttcatagcaagatttattttattttattttttttagcagtgtaagagacatgctgcctttgttctcttccttttgcaaattttgaattatctgaaatgaaaaggcggcaagagttagttatggatgtagaaacctttaataaggacagctgttgttgctcccctttgtattacactctcattgaaagctactaccagatttacttggtatctggacagatctcagcttgaatagatctcttatctggtgtgaagtgtatgacaagctaaatatagcagcacgagcaggatctgttagctttgcttcaagttgactctgtagggccaaaacagaaagaacagaaagaaatgttgttgtgttaaataactattgaaaacatctgttgttgtgttttaagctcatcttttgatgctctcaatagatttgttaggacctggagctttttctttctgtccagctgtttccgggtcctcaaagccttatcaatttccccatcctatgagtggcaatataattgatctatatgcctacagatatgtttatggtttatcaactctaagcatgttttaaacctgcacaacttctatttttttgccttcagttcagtcactttattagattaaatagttgtcagatatgcttgatttggcatattgttcgactaaattttatttacttaacctctttttgtagggaactggaggtaaaagtatatacggccgtacatt

SEQ ID NO: 78983 - DNA, 761 bp, Citrus sinensis
  Intron number 4 from transcript orange1.1g017050m (locus o range1.1g017050m.g) derived from phytozome v7.0 (chr-ID sc affold00011; pos 976883 to 977643 reverse strand)
agtgggcaccatttcgagaaggtattctttttacttcatttatttttttcctttcactcatttattgttttttctttcacaaagattgtcttagttcatttgctttatattagtcgtactgactcttttcttctgtctagttgaggctcaaatctgtttatttgaatcaggacagcttgatgagtgcggacatttagatttaataattagaggatccactttttattggtgcattttggatatgttctatcagcatgtagagaagatctaggatcattgataaggagagagatactcataataaggcaacaacacactatgttgaagacttggttcccaagaaatggtgcgcgtgaaaataaatgctattctattcataccacagttcttgatggtttcagatttggatagattatcttcaatcagtgttaggaatatgtagtggaaagcagaaatctcaaatggataagcttaagatgtggcgatgctttaatgaagtaatcacattttccctcttcttcttgttttgggatttcattaattttgtgagaaagggtatctggaaggtggaagtacaaactcagtcgatttccatggttagctatgagagtaattgcagccattgaatttgcatgatgtcttctttttgcccctttaaccttgcaattgagttcttttttggcatttttagtgcctcaatctacagcttcactgacttcttatatgttgtgatgacttggtaggtgtgacattaaaagaaa

SEQ ID NO: 78984 - DNA, 557 bp, Citrus sinensis
  Intron number 1 from transcript orange1.1g036195m (locus o range1.1g036195m.g) derived from phytozome v7.0 (chr-ID sc affold00892; pos 10817 to 11373 reverse strand)
agtcataaattcggtgcggtgattatggttaaggcatccacagaactaaacataggaaaaattcaagaagttattcgatctagatttagggattgatccggatggggacaagtggaagaacagcgatgagcaagtcattacgagttttcagttgggtaccagctagatatgctgggttcaacaatgggtcatcagtccctggtgttacagttttattgctagaggagctggagagcttgaaatgggtcatcatattgatacttgattctctcaataaactcaaatcatcttcaaagttacagagttgcattagaagactagtcatggggctcccagagttatcttcactaattgatatatcatcttcaaatctgacaacaatgatgaagggccatttttcccaaaaccttcaagatctatctatcatcaattgttcaacaaaagatttaacatgcattgtctacattcctcgccttcgattcttatttgcaaaagattaataataacattcttaatagctagcgatctacgctgtgagccttcagaagaaaatctca

SEQ ID NO: 78985 - DNA, 606 bp, Citrus sinensis
  Intron number 1 from transcript orange1.1g039779m (locus o range1.1g039779m.g) derived from phytozome v7.0 (chr-ID sc affold00017; pos 1130238 to 1130843 reverse strand)
gatcatcatcatcatcggttttgcaggtttggtctctctgtttcgttgctgagaaagcgtagtgatcactgaaacttttacattttatttcaactttgttctatatatgtttcctttttttaattaaaaaaaaaattatatggagctaatcaacatttgatcagtatagttgaattgttagtattaaataatcttaaataaattttccagtcctggatcttgcaaaaaaactatatcaagctaagtctttagcttttcactcacctcagttgacgtagtccaaaaatatttaggtgcaagagtgttcgtctgctaagaaagtttttagaggaagatatttttattacttgtgacacttttaggaacctgtcaaacaacttcttgtttggtgggactaaagaatagaagacaagtttttgagacattcttgaattgtttaatatttttccttagtttctcagcttccaagcagagggttctttaaccggtaatttatagtcttaacgttttataatgtttgaggttttcctatatgctagttttgatttatattgctatatgtgaaccgcaggggaccgcggccactaattcatcatcacataaaca

SEQ ID NO: 78986 - DNA, 559 bp, Citrus sinensis
  Intron number 1 from transcript orange1.1g025634m (locus o range1.1g025634m.g) derived from phytozome v7.0 (chr-ID sc affold00005; pos 1070889 to 1071447 reverse strand)
agaggtcggtttttacaggctttactaaaactgaggtaaaaatgcgatctttttatctgggtattgatcaatttttggtattatttgcaaatgcacttgattttcagaaaatgctgcttcacttcctctgcttaatttttgttcttttcgttttggaaaaagaaacatagctgaaatgtgggagtgctggtttgtttatttatttatttttttaaacaagaatattggtaattctttggcaagtatgaatttttagttctctttaatcattgcattcttttgggtttgtatcagtttggttcattagcgcgtggataattcatttgattgtgtgccgtgtacgatttgtattaagtcatttcctgtttattatcttaaagctttaacaatttttttccataagaagtcgatttatgtcctatcacacacaatcttgtctagccctgcttttattgaaattgtgatcttaattatcgatatttatggccttttttctttgtgccattgttttatgatgagcacctgattttgtgtcattcctcacaaatagcttgagaag

SEQ ID NO: 78987 - DNA, 504 bp, Citrus sinensis
  Intron number 1 from transcript orange1.1g028535m (locus o range1.1g028535m.g) derived from phytozome v7.0 (chr-ID sc affold01878; pos 9356 to 9859 reverse strand)
gagttccttgggaaaattcttcagcaggttgcacatgggtccatgatcatcttttttctgtcttttaatactgagctaagggacagtctctctctttcacgcatatccacaacacatgaacatatttctcatatttctttgcgtatatattatcatttctgatctttcttagtttatatgataattgtctttgggcatatgattcatatttgctgggcaccctatggtctgtgggtcaataataatccatagtatctgaatttctagacaaaattggtcatttttgcaaatcatttggatgtatctatgcagcagtttactattttagtgcttgcaggaattggtatgcttaaattttgggcttaaattgtgtgaaaataatcaaagtgatatgcaaattaattcaagccacatgaggaaagaatatccttttttttttttttcagcttatgttacatgtttctgtgtatggcataggtagttcgaagtgagagtagtgcagat

SEQ ID NO: 78988 - DNA, 906 bp, Citrus sinensis
  Intron number 1 from transcript orange1.1g004269m (locus o range1.1g004279m.g) derived from phytozome v7.0 (chr-ID sc affold00532; pos 71217 to 72122 reverse strand)
ggccgctcttcgccgcctcagtcaccaagcagcaggttagtattatgtttgatttatgaattcttaatcaatttaaggtttgatttgacttttttattatgcttctattttgaagttgatttctgaatcttaaatttttaatgctccaccactatagctacttgcttctttttgattttgttcataatgtgttttgttctattggttatgttctctaagagtggtgcaagctatgctttgtgttgtatttgtttatttgaacttatagacactttgaacagttaaatttttgtctcaaagcacaacataattgctcctgcaggaatctattctcctcagaccccataatgggtcgcttacacttgacttgagcttcacactgtaactactaccagtaaagtgttaagttcagttggttaattagaaagaaactaaactaagtatattttgagattgttgaaacttgaaatgagtcagccacagtctcacatttctttgttttattgttgctgttgcgacgattataagactagaacaaaccaaccaatcagtcaaccgagagttagatggaggcttgctttgctttgctttttaaagggggcacgtttaacctgaagctgacatcatgtatatttgctcttctgatgccacaaacaagattacaagagaagaaaaaaaaaattgaaaaggattgattttaaaattaattaatttaatagagatctaaaggataaggaaagacaaaagtaaagcaaaaaggacttgactgactgagatactcagagaaatacactctttcctttcctgtctatcagaaattccccatacatgctttttggtccttttcttttcttgtttttctctcttttttattttttattttttatatttttaaggttcaattgc

SEQ ID NO: 78989 - DNA, 358 bp, Citrus sinensis
  Intron number 3 from transcript orange1.1g029396m (locus o range1.1g029396m.g) derived from phytozome v7.0 (chr-ID sc affold00800; pos 56391 to 56748 reverse strand)
ttcttggtggtggaaaatgtaatgtaacatgtgtctcttgattttcatctcttaaacttctaataggaaaaaaggacaaaaacacaacggactctccttagtgttaaaaagtatcataaagaccttttttctacacatgaaaacaaattcctacagacccgccaattttttatcaaaaaaaggatactttatatcctaaaaaaatttgtatgagtatttttaaaaatcaaaggatctccgtgatcattttaccgaaacatgagatgtgactttacatttttctttataataataatatcttattttctcttctatgaatcatacaattctatttatgtatgtgtttgttcaggtgcag

SEQ ID NO: 78990 - DNA, 809 bp, Citrus sinensis
  Intron number 1 from transcript orange1.1g032604m (locus o range1.1g032604m.g) derived from phytozome v7.0 (chr-ID sc affold06022; pos 1192 to 2000)
agtttctgcaattgtggctgttttgatcgcatcaggtacagttatttgctcctacccttttcttctttattttggacaagtttttcttatcaagtcatatcttaaaagttattcaaatattaccattattgatgttgaattcctgggaattttataaaattgaactggctgaatttctaactaaagatgatggtggccctttatctgcttagggtctctaacatttccttttgatgaaagggaggggggggaaagatgaattctcatccataatttgttaattataacttgtaactctacatgttaattatccatttatcatcatctgtttgtttcccaatggttctttggttcctaacactttttgtttatgcataaacaaacataactctcaactgctaatttgatttcccaccaattgtgccacatatataccgagatagtatgtcagtatgataaaaactgctagggctctctaccattccatcttttctttcctctcgctcttaattgcctgcgaatctgttgtttgctgattggttaatgcctatgtgtgttcatataaatctgccaacctgcctataattaattggttaaagtttccatggatctatcattggcttgcttgttctttttcatccaattagaccctccaaaaattctttgtatattatttaaagcttgactgtattcttgttaaaatatcttgggcacttcaactaatgtaactttatggttttttcaacttttgttttggatatttgtgattatcaggctggatagggttcttctgtgttatttggttggct

SEQ ID NO: 78991 - DNA, 750 bp, Citrus sinensis
  Intron number 2 from transcript orange1.1g047690m (locus o range1.1g047690m.g) derived from phytozome v7.0 (chr-ID sc affold00014; pos 113883 to 114632)
atttttctccagtgaatcacccaagaataagaaaagtaaggattttattttatttatttatttatttttccggtcaaaatgtattgttttaatggctaggcaatgtataactagcgtagtggaagttatttgatagattttggtaatgaaatgttagtatatttgtgttttataagtgggaaaagtgcatttgttgatattggtattgtggtgttaaaatttttttgggttagtgatttggttgtcttttaattttgttggttagtgatttggtagtcgttttactttgaaccagatctttttgtttttggaggcaaggaagttgcattttaagcaaagtgtgaggagttttgattgggatcgagtgaaagtgattatttaaggtaaacaaataggtcattatgggatgctggggtaacctgtaagtttaaataaattttgaagcaagagctatgtagttactgaattcgttctagaggagttaactgacagtttaaattaaaagctaaatctattggctttagtgtttgagaaagaaaagtacttttcataccctttgcaagaggtttttagatctgtagtgaagcaactattacgttcagaagcaaaatcataacctgtaaacgtgaaagaagattggtcagtttctgtacattttgttcatgtggtatggtttctaaactttctgtcttgtgggttttctctttatttacagattttgagaatttctaccccaaagagaagaaggaa

SEQ ID NO: 78992 - DNA, 777 bp, Citrus sinensis
  Intron number 3 from transcript orange1.1g041344m (locus o range1.1g041344m.g) derived from phytozome v7.0 (chr-ID sc affold00173; pos 133744 to 134520 reverse strand)
cctggtgcagctagagcttgggtttcaactctacagtaagtatttagatcttgttctacaaattactacactggatatgttttgttatttctacactggtatgataacttgtttctaggtatctgctatgtatgaagattaaaaagctgttactatagaacttgaaaatctagaatgcatcagtatctggtcattcaatgttggaaacagcaatagagaaaacattttgggagctataaatgtggattatgactttaatacaatgcaaattttaaggttttctgaagaacctggatttttcttaaaactataatgtcacaaattctttagcacgagattatcctaccatgccttgccttgtcgaggaaaccactagttgtttattttcatcctatgttctgctgtaacggacaattgttaatttcattttggtttaaataagttctgtagtgcaaatggtctaacttgcacatggtggagaggcaagaaagaatgaatggatcaaaatttgtataaataaatggaaaacagccttgcgttcagttggttattatgatattcagttaaaccattttcatttggctgatcgtgttttgtactataattgatgtattccctgcctttaaggtccatgtacaagtcagctgttttcccttttcaatatggatattggagctagcattatcttaatgttgattttcttatctcacttccccctgttttgttgccttccaataaccagtgcagcacagttggttctgaaagcccataaagaag

SEQ ID NO: 78993 - DNA, 456 bp, Citrus sinensis
  Intron number 3 from transcript orange1.1g010721m (locus o range1.1g009250m.g) derived from phytozome v7.0 (chr-ID sc affold00126; pos 248763 to 249218)
gacaccataccattgattcttggtgcaatcataaggtattcacggttattctttccttatgcttgacctcccatcaattgtttttgtacttaatttactcgtagcgaggtatttaggactgttctgagtatcaattgagagcatcttgggaaacttgttggcttcactgttatgctgtgaagtttggcacttgttgatctccttgtgcatttaagattaaggtgtttctcagaaactaattttagtgctctcaaaagttcctgttttctggggcatatggttaaacatggttctgcttcaaggttagatttgagggagtttttgagttcttcaatctgcccttgttgatgcagaattattgtctctattacttgcggcctatttgacatgaaatgcaaaaagattttgatttttgactgcttccattttatatcagtgcacaagcccactccttgg

SEQ ID NO: 78994 - DNA, 669 bp, Citrus sinensis
  Intron number 1 from transcript orange1.1g047319m (locus o range1.1g047319m.g) derived from phytozome v7.0 (chr-ID sc affold07862; pos 283 to 951)
acgccaaactcaagtacacataattgatttataatcttttatactaagaacccaaaaagaaacatttgttatggtataaattaacaaattagtacaccaactagctagagtttagccgcaactacaggtccaatgaaactatcggaccaattgtcattgtttccttcgaacactgtcctaggtttaaccgcaactcaaggtcttaaatattgagtaactcagaaacattgtacttcgttaatcaaaatttattcaaaacgatcggccatataatttccgtagactccatctagggagtctggtaagtcaacatttttaatttgcaactttgttcgtatgatctacttaaattttatatttttgaatatattcttctcaattaattaaataccgtaactacaaacacattatatatatatatatatatatatatcaattagatcaataaagtatcctatctcttgttatgtatgcaagtattttttgaaaatcacactgtatatctcaattagaagtttctacactatacctatatctttcctcttcagccacatcattgacgtcgctatggcctggaatgttaatccaatcatttcaaatagcatccccattttcatttcgataatttcactagttgttgtgtgttggcttatcaaaacattcacaaaa

SEQ ID NO: 78995 - DNA, 662 bp, Citrus sinensis
  Intron number 1 from transcript orange1.1g022395m (locus o range1.1g022395m.g) derived from phytozome v7.0 (chr-ID sc affold00371; pos 33551 to 34212)
gagttttggggtaagcttcactcactcaccttctcttttttgtttttctttagcttgtattttgttgtctctgtttctattttcgtgatttttgtcttcttgtttatattaagtgtgtgttttgtatatgtgtgttgttatgtttggatccataaaatatctcaaaaagatttttcttttttcttttttttttagttacaagttttactagacacagtaaagacgcatcacctctgctcatttgttagtttgattattagttgcttataaggggtttatgtttcattattttcattaaatacgaacactaagcctgtgctatgtaataagttctggttaaagttattgaacttgtggtttcgatattggtggatttctttgtctgtttattgtctttgttttctttaatgtttttgttttgctgcattttgcttttgactagattcaaattttttcttaggttctcgatagagattgtcttcaaagttgttcttgtagcattgtgctgctatttattcaagtttgccaatccacttagcaatagcattatttagtcatttagcataagcttctgtgatgataatgcatacactgacaatgggttgtcttttctttttgttgttctaggtgttgaagttaaggctgggcagcctcttaaagtg

SEQ ID NO: 78996 - DNA, 517 bp, Citrus sinensis
  Intron number 1 from transcript orange1.1g010473m (locus o range1.1g010473m.g) derived from phytozome v7.0 (chr-ID sc affold00061; pos 333348 to 333864 reverse strand)
ggttactacacgcttcctcattctcaatctgcaaggtaacatttgtaacttcacattaaaattttgctttatttccatgtttttgacataaaggactaataatcatgattgaaggaacgagatgctttagatatttttcttgtggggttgttttgttttgtctcaagtgaagtaaagaacaaacaaaaccaggctgcaaaaggttaaacaatgttacaaaacttcttggctttatgtgtcaatgaatctggattacctcaaattggttgaataatttgatggaatgagtacaattctgatgcttccactctgtaaattctttgaagcaatggatatgcaccattatgattgcatatctgtttgtgaagtcaagtatgatttggattgtcatgcaatttttgctttcatataatcaatgctgcttcaacttgaaatcatgtgttgttcgtttatatgctgtctatacacgagcataattgacacatttgttatttttattttataaataatttgcagg

SEQ ID NO: 78997 - DNA, 348 bp, Citrus sinensis
  Intron number 1 from transcript orange1.1g044657m (locus o range1.1g044657m.g) derived from phytozome v7.0 (chr-ID sc affold00468; pos 505 to 852)
cctcaaagaattgtaagtccttagtaatatttagtcttccagtacatttttggcttggcattaacagaatatgtacatgattaattcatcagtgaaataaaggaataattttagcacatcttaacttgcaagttcatgagtgactttaggcaccatttgactggtagtttttttttttctcttaaagaaaccaaattttcttttgaattccaacccatctaacaattaacaactagtcaaaactatgaaaattaatcaactattttttttgcttattttcatactaacaataatctcttaataatttgtgtctccatgaaagcacagggtggattggcttttacaaag

SEQ ID NO: 78998 - DNA, 363 bp, Citrus sinensis
  Intron number 2 from transcript orange1.1g015300m (locus o range1.1g010484m.g) derived from phytozome v7.0 (chr-ID sc affold00167; pos 270523 to 270885 reverse strand)
gaaagcaagtgaggagtccttccttggtcaggcaagtttaagttgaactttcgtattttaatagtaaaaactgtacttttgtctcgcttggatatgctaacctttgttttccgtcatttctgtcactggctttttatgtttttgatcttaagttatcatactttatttaacataggtttttattctgttaattatcttctatgtgtagtctaatttagttgcttttctgctgaatgtgaacgttcttctcacatgtatttgtcttccactgctgatacattaatttcttgcactggtttgaaatgttctttcttctcaactattgcagcgtttgaaggttattgataattctgtggagaatct

SEQ ID NO: 78999 - DNA, 937 bp, Citrus sinensis
  Intron number 1 from transcript orange1.1g014180m (locus o range1.1g014180m.g) derived from phytozome v7.0 (chr-ID sc affold00005; pos 154224 to 155160 reverse strand)
tgggcccatctcttcttcatctgatcttgcttctggttagtctttttttttttttaaagtctttgaggtttgatcacaaatgggtgtcttctcttttttttttttggtctaataatgtgaaaaatgtttgctttatatgtttttgcttttgtactttgatgagtggctttgcaatttttttccccttctggtgttatagatcgtctagctggaaatttttttttgttctttctctagtttagtgggaaagcttgtacttttttgtggtttagggatgcatgctgtgtttttgtgtgcgttattaaatgggtggccttgattttcttttagtcatgtaacaatccctctctctttctcatggtcgtgggggtgggtgtctttgttatggattagttttagtgaggtcagtgatggatttgttagcttttgtctgtgaattctagctctctcttttattttgcgtcattaaaattttcttcaagttggtttgtagagtttgcaaaaagctttgaacttttgtttgattttgctaatgttttctctgctgttgcctttttgcctttggatgatgtggctttacaatgttgtgttttgtgttttcttttacttaatttttgttacctcttggggaatgagcatgttgaaactgttgacaatgttgagcaatttattcattttcttcagagaatttttcttcatagtttgagatatttaattaagcatctctttgttttcgtgtcattcgttgtcttctctcttgtattggctacctcagtggcggacttttttaatgttgaagctttcttgtggtaattgtatttctaaaatttgagtccttatgttttgtggactgggactagggtatgaaaatctaagtttaataccttctctcatcaatttagtagaaaagcaggtcggaaatcatcttgagggggtt

SEQ ID NO: 79000 - DNA, 692 bp, Citrus sinensis
  Intron number 1 from transcript orange1.1g004470m (locus o range1.1g004470m.g) derived from phytozome v7.0 (chr-ID sc affold00003; pos 2517720 to 2518411)
aaataaagggacttccaatcactatctagctaaaggtgccattatttttttgtcaaatgtcaatggtttgttttctgttttctctcatctgattctggcacattaagtttggtttccgtttaaaaataataaactggtcactgaaaaatgaaaaatttagtttctctattgatttatacgtagaataaataacagaaagattgtttcgcttgtcatgatattgcgtgtccatttttcttctgtaaagtgaaatgcatagtgtaaatgcttaagtctctttctctactttttgataagttgcctctgagaaataatattggagtggcaggtgtttgacaaaaagcttgtaaggaagtttttaattgcttttcatatgtgataaacccaagagtgataatgatcctatagagatcatgagattctccatacaaaacctcgaaaacttattgaaatttctctttaggttgaagttctatttcttgtttttgaaaccaaacttgaggatgaaactttgattctcatagaacttgtgtgacccttgtaaaaaatcataattcttttaatgctttgataattattctagaatgtattgaattattttatgaactgaaacattttgatctcttactggtggattgaaatgtagcaagcatatcttctgttaacattaggttgtttcaatgaaacaggaa

SEQ ID NO: 79001 - DNA, 800 bp, Citrus sinensis
  Intron number 1 from transcript orange1.1g038130m (locus o range1.1g038130m.g) derived from phytozome v7.0 (chr-ID sc affold04258; pos 1230 to 2029)
aagttttgatagtaaacacggtaagcaacaatagttctcaaatagttatttgtccaagtattcatctaaacctttgaaatttgtatctatgactcaaaatctctaaagttttgcgtcaaatattgcgaaagaggaggggggcggtgcccaacctacccattaatatgtatacaatgtttatgtaacgattcaccccgagctccacaggcgaatcttactgcggctcaaatatatattcaaaaataataataataattctaatccttacaatatctttcccaagtaatgtcgaatgtgatttacatccgcacatttctggttgaaaatgctcttaaggattagaattattttttttttagaatatatatttgagccgcaataagattcgctctgtgaaacttggggcggattgttagagtttaagaatgaaagatttaaaaaacaatacaaagaagataaatttccatatttattcatttgcacacaatgttcaatgataaaaaagtaagtaatcaatcataaatcagagattcatggtgactatgatttcttaccacacatttcattataataatgacaacatgtgattccgatcatattgcaatattagctaaatctattcttttcaagtaataatttttaattatcccacatgctaattaatgatttgtcttggcctgttttttgccggagtagcatcattgtaagttaaagcataaaagcattggagcctccagcccgtcgtttattccacctctgaacaagcttgttatcctcaacctaagcgaatacgtaagctt

SEQ ID NO: 79002 - DNA, 642 bp, Citrus sinensis
  Intron number 1 from transcript orange1.1g025117m (locus o range1.1g016293m.g) derived from phytozome v7.0 (chr-ID sc affold00393; pos 98806 to 99447 reverse strand)
tgactctgttgagactttcatttttgactgtggtgagttggtgaccctctttactgcttacttctttttagtttcttgattttcattttgtagtgattctgctgatgtggggtttaacttagaatcctgacaatgattaatggtaattatttttggtataatgaggctttcagggattttgttgtaatgggtgttgagagtttttgagttctgattttgacaaaaatttattggagactgtttttggggtgattggttttctatgatttggttgatttatggaatagacattgacagaatttctgggttctgttgttgttattgaatgaatgaatgggcttgccttctaagatcttctttttgagaaaatagatgaaatccgaaacctcatgcaaatatgaatatcttaagctactttgtaagtcgaagaagatccacttagtgactgacatgtgcggaatgatattatattatgcacgacaaattttttgggaattgttttagttgcttcttgtattgagttagaagcattcaaatgatttagtttggtttcgccttttttttcccttttaaatttgtcttgctttcgaaaattggctggttgcaggtgagttggagcctgagggattgataaggtttcgt

SEQ ID NO: 79003 - DNA, 597 bp, Citrus sinensis
  Intron number 2 from transcript orange1.1g032345m (locus o range1.1g029951m.g) derived from phytozome v7.0 (chr-ID sc affold00190; pos 150516 to 151112)
tcaaaatatcactcttcctttcgcttgcaggcacggtattgattgttctcttactcgccgtcacaattggcttattttatcttaattatcaataaaatgtgtattattttagtttatgttagatatacttaactctctaataaattaagaataatatgagagtcatgcagcacttggcactcatctattggaagattaatttcataccttgtaaaattgtttattctattctaccatctattcaatggatgaatgccatgtagcatttggataatagttatgatacggtttgggaagtggtttgggaagtgtagcagtacttataaatcaaacgtagtacataatttgctgaacaagcagatatcttcatgattcagtctcttgatcgcgtgatgtttgatttgaatacactaaagtgctgagttccttcgctacttatattttttataattgtttgcctttgaagtggaactgttgtaaatattggtgtaagtttcgctgttttgttggttaaaaattgttcttggaaaaagcttaagcttctttctacatggcatggcaggttgctgcactagctgcgctgtgcgtataaaatca

SEQ ID NO: 79004 - DNA, 888 bp, Citrus sinensis
  Intron number 1 from transcript orange1.1g031498m (locus o range1.1g031498m.g) derived from phytozome v7.0 (chr-ID sc affold00023; pos 572542 to 573429)
aggttgatcagaataccctctttgacctaatcttggtatatcctccctctctctctctctatttacgccttgcccattctatttgtttggatttttagttctatttgatgatattgctaggaagttctgatttttatttttgttagggttttggtatttttatgaaattggaattttatttacgaaatagaggattttgatttcgcttctcgtaaatgtcttatatttgataacggttctttgttattaaagaaagtcactcttttttttcctccccggttatggaattggggtttttattttttagaaaaagagaattttgatttggttttagtcttgctttgttgctttggttttgagtatttgttaatggttttttggttgttagttgttatctattgaaaccccgtgtttggaggatttttggaggaggatttgtatgataatgtgttttctagaatttttttggtgtttggtctcagatttatgatggtaatgactctggttggttgatgagaaacagtggggaactaaagtgaacaaaagcatgtttttgggtctataaattaatctaatagtttaatacgttttgggttatgcttttgtgcttgttctgcatttgctttgtctcagtgtcgtgctgttggattgtggataatgattgtgctcaccggataaaatgagaacttaatttacttgctgcattatctgtaacttcaatggttatctttgtacatatgtttttgtgtggtgcatttgtgtgctttgaactagcctgcatcttctcttgctaattgtgtaataattataatgctgtagttgctgatgttctgttttcattgcgtaatttcaggcagccaattacctgaacattaagggtttgctgga

SEQ ID NO: 79005 - DNA, 644 bp, Citrus sinensis
  Intron number 2 from transcript orange1.1g027394m (locus o range1.1g027394m.g) derived from phytozome v7.0 (chr-ID sc affold00017; pos 97726 to 98369 reverse strand)
cattttcttcattggcggctttattattctgtcaagtaattcctttcttccttttataccattaaaaggagccggggttggttgttaatttattttggtattcttgaattcttagtctgaggaatttatatttcaagataacttgtacattatgcagccttaccggcgcattatactgagtttatgcttcctactagtcaaattgggatgaatgatttagaaagcagagaagcactagtaagaagaaaaataatttgaacctttcagaagtgtttgcttcattatctgcattagcagtttttaaatcttcaaatttcaaaattctaataatcagcagaatgactgttacatagattgatttcattttttcaacgtatggttgtgcatttcttttagtcttttccaattgattgttataactgcagagtgcattcctgtgcaagaaaaattcaatccaaacatttttcatgtgaatctgctattatttcgttctcttgattttccaggatctactttggggaagggcatggttcatttatattttgattgttggtcttagtgctagtggtttgtatgttatcaaagctttggctttatgtagacagtttagtaaactattgtttccctggtgttgcagttgtgga

SEQ ID NO: 79006 - DNA, 433 bp, Citrus sinensis
  Intron number 1 from transcript orange1.1g035392m (locus o range1.1g035446m.g) derived from phytozome v7.0 (chr-ID sc affold00374; pos 72799 to 73231)
aaatttgtcaagaataattcagttcgccgtaacaagtgagtttcttctgcactctcggaccatgttagctatgccaatttatgttcagagaatgtgttaaagattcaatcacaaaccctagattttgtatttctgtgtttagttcaaaatcttttttttttttcaaatttataaaattattttcatgtgtgatcagttttgcttgaaggagtgtgttcagtgctagaaacatcgtagctctttgacttccaattcaaaatttcgaaaaattctgtattattttgtcaaattactcgaagtggttctacccagaaagaatttgagccctgaagttaatgcattggttttggttcttccattactaactgaatgccaccatcttttgttcatttttcaattacagcagtcgagttctgattcgtgggagacgaag

SEQ ID NO: 79007 - DNA, 756 bp, Citrus sinensis
  Intron number 2 from transcript orange1.1g035392m (locus o range1.1g035446m.g) derived from phytozome v7.0 (chr-ID sc affold00374; pos 73235 to 73990)
aaagtcaagatcttgcgtatccttgttagtgattgacgattgacttcttcaatgctgaacttttaaacttttagtagctagcttgtgggtagtttctattggggatcatcatttgatataatctttgattatcccatatgatgaaagaaattttaaccttttattagctaggttgtggattgtttctattgcggcttgttaaccattgccgtagaagagaaaaaattgaaagaaattttacagtagttagtgaattttggtgaaaggtggagaagatttaggagggcaaacaccagtgtgatctggcagctgaaattgagaagttcaattacagttttccttggctggctagtgtttggactctgagtttgcttcgtacttgtgtgtctcatgtacattattgtatgattttttgtcatttgagatgacattatcaagtagtcatcagttgggttgataaaaggccgattgttgtgttgtgtcaaatttgtgaatttggattcacttgttgctaatttaatacttttttttttaaccgaagaaaccgtgtttccttgacttatttcctttccgaatgtgtcccgggctttaaccagagtatgttatcttcatctctcctatatctctactattttcatttaagcgttgtcttgcatttctcgaaggatattgctagaattctggggttgaataaaaatattttcagtttaagtattgtcttgcatttatggaagtatttgtgggaaaataggtggc

SEQ ID NO: 79008 - DNA, 542 bp, Citrus sinensis
  Intron number 3 from transcript orange1.1g034740m (locus o range1.1g034726m.g) derived from phytozome v7.0 (chr-ID sc affold00417; pos 70334 to 70875 reverse strand)
aagctgaaaagtataggtctgacttgatctcactctcctacgttgaatcacctgatgtttttaatagcttacccattgcattggctaactacgagatttagcagggactgaaactgtcaccattgcctgttgtaatgtgtaatcaaggtttgatgtgtaaattaactttctattgtggatacttttgcagatgctttatctgcttttctatatttttctctgtctatgttctgtttgttgtcactatgaataaaaaatggaacaacatttcagttttatgtacagtttatggtgtgatttaaataaataattggaatttgctctcagtttgtggtttatcttcttgatttctggttttgctctgcaattgtttgttttaagtactgaatgcttgagtgtgaagagtaactaaaattttattgttggagtcaatgtaggataagacataaatttgaggaatgtgcagttcttgatgattgctatacattccattgctgagtctgaggctctcccctttttcagttggaaaatttacccagcaa

SEQ ID NO: 79009 - DNA, 593 bp, Citrus sinensis
  Intron number 2 from transcript orange1.1g019224m (locus o range1.1g019224m.g) derived from phytozome v7.0 (chr-ID sc affold00023; pos 132427 to 133019 reverse strand)
cgtatctccttgccggtaattgcttgttcaatattgaattttattattattatttagatttgtttttatggtggttcagaccttgctggatgatattgaatcagtctgtgttgtgttttatgaatatatcacaatttggtaggttagtgacattgacaatcaccatcagtttgttttagcactgaaattatgtgatttatagatcagcttctatattcttgaaaaccatatgttgtatttgaataattggaagagctggagctgaaagaatggctcttgtagaaaactagttttggatctgaatctagcgctgatgcttgtataagttatcgagcatgtaaatatgatgaccaaagtgttgagtcgaggattttgatgtgttctttttattatgtaacagttgtgcccgggtgcaattgttgggaaggttgttgtctggaatgtgtgagattgagttgatttatgttaatgagaatatagtatttaatccttcaagctaactgtccgtgtgcttgtaatttttttacctgtggttcatcagagtttaactttggaactaatggtgattttttggttgccttaatgtttgcagc

SEQ ID NO: 79010 - DNA, 526 bp, Citrus sinensis
  Intron number 2 from transcript orange1.1g008366m (locus o range1.1g008366m.g) derived from phytozome v7.0 (chr-ID sc affold00083; pos 379768 to 380293)
tccaacgagtcgccttataacatcactattcactggtaattatattgattcaattaatccttagatgacaagcttcggcatttagctactcctctcaaaacaaaattaaaaacaaattgcatttagctactatgtactgctctgtttttcaaagccatatgacgactttgtcatgcatgtttttattgcaaatattccaaaaggaggataatcgttgattatccttgactaattcggcacctaatatcaaaattttcttttattttttttatttttggaatatatctctatatgtcgtcttgatacagctgcattaggtcatatattgctttcaatttcaaatctttttcaaaacaatatgcaataacgcaaataacttgtgagctttttttttttaaatgactaaaagtctaattaatgcatgtgaaattagtgttaccaacatctgcataaagtatcatcactatcttcatctttgtcttcatactaattaattatatcatcaatgaaaattgtttatgtaggc

SEQ ID NO: 79011 - DNA, 592 bp, Citrus sinensis
  Intron number 1 from transcript orange1.1g004213m (locus o range1.1g004088m.g) derived from phytozome v7.0 (chr-ID sc affold00003; pos 10436 to 11027)
aattgctcaacgaactcggtgcgtcttgaactcgaatttagtactgaattttttcttcacttttgttattattttttattttttttgaaatccacgtactgacttctgacaggtactgttagttaatcctgtttttctgtatgaacatgaattttctcttttgatcgttttataatttctaaaattgtgcttctactatttaagcagcaaactcggtaggctatgtgctttcaaaattaatctgaattagaagcacaacagttacagataggctcttagtcaaaatttcaaatcaattacagctctggcatttttagttggctcttttggggtgaattggaaaatacttcaagtttgtaaggcttttcaatgaggcatataatatgctttgtactttgtgcttagtgtaaggcttttcagcaaactttgtgctttattaaggcattttttctccttaccaattgaaaaaaaatagaaaaaagaaagggtttgtttgctcgtggatagctgattttgcggtatattttgacactgctgatacttgtttgtttggttattgttctaatttttgaggaggcagggaaggggtctt

SEQ ID NO: 79012 - DNA, 740 bp, Citrus sinensis
  Intron number 2 from transcript orange1.1g013904m (locus o range1.1g011867m.g) derived from phytozome v7.0 (chr-ID sc affold00135; pos 178747 to 179486)
ctgtcttttttgaatacgctgtcgtatcgaattcagtgtagtctcggttactactgttcttaactatttagcaaatcaagcctttttaatacctgaattgtgaccaaatttatgcatttgggtacaagctttcgagtcgaaaactaattgtaggatttcagatctttaagattgcattttgtttccgtgaacttttaggacggttaatatgtgattaaaaaaaaaaactcatattgtggacttaatgtaatatatataatagatgctttgttagctttgcttgtttaatttttatttctttttctataagaaaacctgaagaaaagaaataaaaaactgaagaaaaattctgctgtctatgatacctttgcttgatgctaggttccagcatatgcatacttggtctttgataataatagaaatttgaaatctcagtctactgttggactattgttagactttgaaaagggatagagatttaagattcaattgtttggtataccagggatttttttttttgttttttggctgtacatgtttagagtttcctccttatcatgctgaaccatcaatagcagttacttccctatgtaaaaacgtatttaagaatgcataagtaactttttttttttaaatttgtgtcttgtgaatattcaaaaaaatttcaactcatgtgctttattcgtgtgatttggatccaaacagggactgtgttaggcattttattttaaactgtattt

SEQ ID NO: 79013 - DNA, 467 bp, Citrus sinensis
  Intron number 1 from transcript orange1.1g039682m (locus o range1.1g039682m.g) derived from phytozome v7.0 (chr-ID sc affold02472; pos 9177 to 9643 reverse strand)
aagggcaggacaccttcacaccaattagctctgttgtaagaaactgaatgaagtactttgatgtttctgtctctgctgaaattatgttgtgcggtaatcaattttcaggcccgatattgaaagcctaattttgaatcagtttattgtttggccattgacagcaccaaatgtggctttgggataggctatgggaaggaaataattgtgcttgagaacggcaattgtaccttgtttgtagaagttgaaaaagagaattggtgtttttctttcaaagcagacaagagtttatcatttatcctccacttggtgcacccttacttgtatcaagtagtggaaaaggagagaggaagagaattttattttctattgctaattttgttctgtatttactaattacactcctttttgactcagtgtaaaataaatttgcagctaccaaagtcagcggtgcctgacccctacaactt

SEQ ID NO: 79014 - DNA, 888 bp, Citrus sinensis
  Intron number 2 from transcript orange1.1g023750m (locus o range1.1g018465m.g) derived from phytozome v7.0 (chr-ID sc affold00011; pos 480674 to 481561 reverse strand)
agtaaaactaaacagcttagtcctcctgagtaagtttcttatacttttaattttggtgggttttttgccttttaaaaaaatggagtcaatacatggagcatgcaattgaaacctatgtctgtgaaagaagtgatgaacattgaagcatgcacgcactgcaatgcaagtctgtaaccagaaaaagcttcaattttgacttccacaactagaaaaagctcaatcttcttcttctgatattcttaaaattgaggccaaatgataacaattttggttttaaattgaaggatcagaaaactattggttgtttctgattagttatgtctaaaaaaaagcttttttccttttttgggaaaaatgatttttttttctttttccttgtgggtgcaaaaatacacgtgccaaacaggttataatggagattgagcttgtgatcttttttcaataatgctccaaaactggttttcattttgctacatgaaaacctgctgctgatttcaaattattttggcaagcagattacatggtaacttgcgaagcattctctagagtttacactagagagagcaaaactttttactgaaatgtgattctagagtatatttgcaaattatatgggtgctgtgtttgaagaacatgaacttagaaaggaagagaagtctaaaatcctgggcatcttcaactctgaaattgggtataatggcagatacaccttgtgactttgtttaaatgatcttaaatagacactaaagcatggaagaagaagtctttcttttactgcaaactagtcttgcacttttacttggttataatacttgtggactattggttttttcaactgctaaacttttggagaatgatatccctgactgaaatagtggttgcaggcaa

SEQ ID NO: 79015 - DNA, 454 bp, Citrus sinensis
  Intron number 1 from transcript orange1.1g020975m (locus o range1.1g019356m.g) derived from phytozome v7.0 (chr-ID sc affold00005; pos 1341920 to 1342373 reverse strand)
tcatcaaactcatattcccctctcttcagaccctggtaattaattaatttaatttacatttaaatttttttaaatttcgatccagaattttaatttttgaaatttaggttgtaattgagcatttgcaaatcgttaattggggattgctctgctcatttgattagattcgtttttcatttaaccttttgtattttgaacttaccttctgtttggttacttagaaattatacgaagatgaaaaattatgttctttaagaatcttgaatctaattggaaatggagatttttttggaaacaatttcaaattcacgcactaatttgttagaatcacatttacaatttgttttcttaatttgttataagcaactgatatattctttttcgagttattggttgaaactttattgagttgcaacaattttttttttttgctgtcttttttcttatatttcag

SEQ ID NO: 79016 - DNA, 764 bp, Citrus sinensis
  Intron number 3 from transcript orange1.1g014221m (locus o range1.1g014221m.g) derived from phytozome v7.0 (chr-ID sc affold00083; pos 491636 to 492399 reverse strand)
aatttcaggggtaatgactaatgacagattgaattacagtttaattagttgcaattgttttgtcatttggggttatacgcctgttgtttgatatattttaagcatacattgtgcttgttcttgtgctggtttgtttttgtgtttcttattttggccttatgggaccttgtttgttgaaatattatcctgataattttggaaaaagtccaaaatttgatgccatcgtacagtaaaaggaaaaaacaaaaggggaaaaatcaaagtgtattccactttagtattaattagttacatagaagaaagcctactttatgatatagcataaactttctaaatgaaaagggctgctgtagtttgttgttggaggatatcatgatttgatatgatattgttcttcttgtgccacaacgcgaagttattaagagttttaatcagcatttttcctgtcatctagttttctgtcttccaaatacctagtgaatgcaaggatactttatttcttcaaaacgggatgtttttaatctgcttcaatgataacttttcagccttgattttcatccctcagaagacaaaacatccacgtgctatttttttaagttttattgtttagtctctattcatgtgctttttgatttatggaacttgatgagcatttaactatgttgcaaacttctgacatcagtgaaacaaattttagagggcaagagaaaatcaaaatggagcctttcagttaaataaatgatctttatgtaggcaaatactgg

SEQ ID NO: 79017 - DNA, 1037 bp, Citrus sinensis
  Intron number 1 from transcript orange1.1g032835m (locus o range1.1g032835m.g) derived from phytozome v7.0 (chr-ID sc affold00003; pos 3193901 to 3194937)
cccttgttggtggaatctctggcgtcattgcccaggtactatcaatttattttttctttttttttgggtttatcaattaaatttgtattatgcactcaatttcaagctgattttgacttgcttcagcatgaactattcttctttatcgcacaaattgtgtctacaatttacaagtgataggccggttcaggtttaaatggcgggttaatataacatatactttgtttctaatttcttgtcattcaaaaggaattagatgaattgatccgttggaacaaagattgttggttgtagtgcctttgttttacctgttgtcttgtatggccttgttgttgtatgcttgggtttgttttcttattttaactcttcatgaattccagcccaacacactgactcaccactttgtttgctctggcaagtataaattgattcctaatgtttgctctatgtttgctctggcaagtatatattgattcctaatgttctgtgttggttttgtcgaggatatatagggtgcgtttgggattgaggtgctgtagcttaaaaagctacagctgctgcagaaaaaaaactgtaattataaaacaaaagttagtaatatatagtaaatataaattttaaataataattttgacaaaattattaaagatataatagatttttcatgatacaagtaaaaaattacgtcaacatagcttgaaagctacagcagttagtgtttaccaaacactttagtgctgtaacttaaaacaacctacagctgcccaacctcaatcccaaacggacccacagtggttgctgaaatccagaaattttactattagaatggcactgaaacttagatgcctttgagaatctaccgcttactcttatcatttagcaatccatgacttgttgggtaatttgaattgtgcatagtattctaataaatgtgctggttgttgtgctagttatcttttctttcactatctagtactgtatatttgtaacaaacagtatttctttcaatcttagtggcacaggtagtggcaagcccc

SEQ ID NO: 79018 - DNA, 676 bp, Citrus sinensis
  Intron number 4 from transcript orange1.1g032770m (locus o range1.1g032770m.g) derived from phytozome v7.0 (chr-ID sc affold00011; pos 590866 to 591541 reverse strand)
caaagaagtttgagcccaagtacaggctaatcagggtaattaattaatttaatgcttgtttatttatggtatctctaattatattctatacttaaatttaatttatctcttagtctactatgtttcacttaaatgattagcgaatttacttttttttttaatatcatataatttataggctttgaaaataagattatgattatctcatgatttgatcttctcctgagcaaaaatacacatgggtaattgatagttaataaataaagaaaataaagaagttaaattatatccatacactatcacttaaatacacatggcacaaggtcattaaaagctcagatcaggagaggatctttatccttgaaaatattatgtattttcacttgtttgatttgttgaaaatgtttcaatggagttaaacttaaaattaattgagtggctttcagacagtttaaaagaaaaaaaaatctcaaattgttaaaaattaaaataaaaacaaaggcttgggaatgcaattacgttaaatatttggagaactttgtcaccctaatggtcttactagacttgaatctgaattagtgggactcaatgtaatattcggatactaaatggtttaataccccaaaaataaaataaaaacgtaccgttgattcataattgtttgatggatgataga

SEQ ID NO: 79019 - DNA, 763 bp, Citrus sinensis
  Intron number 1 from transcript orange1.1g030986m (locus o range1.1g030986m.g) derived from phytozome v7.0 (chr-ID sc affold00196; pos 254451 to 255213)
aattgactcgccgtagtcctctcgacttccccatcgtaagctattcgttttaattctacttttcgagattcagcttcttattcatgtatttatttatttgtttaatcttttgatttatttttctaatattgttaatcaagcttgagttttgttgttatgtaatttgattatccctgattcgatttataatcttctgtattggtcactagaattataaacatatagagactgtaatttttgtccaagcgcaccatgtgattgaaacttccagtttttgagattgcttttggctcgttaaaagagcttgcagataaaaactgctcgtctttttttattgtctaggggtttctgatagttgctttcaaaattcttcctttttttaaatttttaatataattaaaatgactacctcaaattgttttttggaaatttttgttagatgtttatacaaaataggcacccaagtgctttaataggaagtttttttgtttgaaatcttatctaaaagtgctttgaatgtgctctttgctttcggttatagagtgcttggtagaggattcaagctttttagcttttgtttcgaattaaatgaataattatcaatatgaattgtatttcctagatgtttggttatttgaaaattgtttctagtggatttaattttttgatatgtgtcaattgtaagagctggaggtggtaaatgatatctgtttatctctatatggcaggagtgggagaaacctaagcctgcccgtagacctga

SEQ ID NO: 79020 - DNA, 640 bp, Citrus sinensis
  Intron number 1 from transcript orange1.1g048492m (locus o range1.1g048492m.g) derived from phytozome v7.0 (chr-ID sc affold00167; pos 250190 to 250829 reverse strand)
ctcaatcagtggcctgattatcctcctgaattaaggtaaaattaactcttatattgtgatggtgaagtttgagtacttaacgataatttgatcattgcaatgtagtggacctatttgatttgaatagataattatctcgttttcattatttttcgaaacaatatgttttttatttatattttttattttgagtataaattcttaaaaatttaagagatctcaaatgaagagataaatattctaatcttttagtacaagtgtctaaaagagtttttccctttttaggcatctaattgacattttgattactatctttgtgctatccaatttaatatgcttgagagtaagcaaatcattggtgacgtgaattttctcatggttggagagaactcacaatatagtccataagaggtacttattgacaagataaacaaccataagaagctgattcgtacgtgttaaataccactcaaatggttataattggttgttggtcaatatgagaacttgtaatctgttggagcacaccatatatattttgattaatgcaaaagtttaagtttgcaagaaaagattcaatgataggactttagttatgaatttatctttggtatgcttgacagagagtcgtgtgaagaat

SEQ ID NO: 79021 - DNA, 973 bp, Citrus sinensis
  Intron number 1 from transcript orange1.1g031738m (locus o range1.1g031738m.g) derived from phytozome v7.0 (chr-ID sc affold00066; pos 494388 to 495360)
cttggatcatcagaacctcgccactgctcaacaaggttagtataagcttctaaattttctttgattattttacagaattttatgtgttttgtttataagactctatctaatcagtgacttgtctttaattcttcaaattcaaatgctgtgacaatagttttcgaagcaaatttacatcttgtatttgttggttagtgttaattttgttataagatctgcactgaattatgcaagtgcatgcccgtgattatccttaattttggaccccagatgctggtttatgtaaattgagtcaagtttattaatcttttttttccctcttccttcctggaatgagttgggttagtttatttggaatccttatgtggtgaaatatttaagatgtgggttgttgcattataaaaatcttcagtttcgattttagagcttttgaattttagctgaatttttggatctagtatatgccattgtcaacctttaatccctttaaaatcatttccatttcagttttggcctcttgactattatttttgtaaattatcctcctctaatgtcacaattccatttgtgtttaattaatttcttgatttccattactaatctgctttttattttttaaactctgtgatcatgaggagctttgtgctgagctttttatattattgtgattgatagttattagataaaaataataatatgtaattaaatcttaaccatacactactcatgtagtagaagattataaaaagctcagcacaacttagcttagcaccagatccagttggatcaagggatacaaaattgtggttcccgtgtttcacgtctttagccataattttacaagtctgacttatttatgcgcaagaggtggcttgttcattaccttcatgctctgtatttttcttttcgccagatttaattgggttcccatatttaacaagctagagactgtgacaatttggtgctgtaaagt

SEQ ID NO: 79022 - DNA, 876 bp, Citrus sinensis
  Intron number 3 from transcript orange1.1g004670m (locus o range1.1g004007m.g) derived from phytozome v7.0 (chr-ID sc affold00003; pos 1987138 to 1988013)
gggcttgagctttccacggccaaggagcatcacaagtgtaagatccttgtcttttccctggttgttttgattacttgtagttcgctgagacaagtgaaacgaatagacaaatcaatgtttgagagcataaggcttgctgcaacatagtcttctgaggtgtttttccccgctgtattatttctaacagaatctggtttagttggaacttctggcagagagttatttttgtttcctagtgctgcctaatttacagacttttatgtttttagctgctatcaaagttttccaaacttactgacttcattttgtagcttcctcaaccacccacagaaaagagtacatatatatatttgaaagattacaggtgttcttgagagttactatctagtttgcagttttatgagtttagtgggtgggtgtcagttttatcacctccgtactggtttctcaaattttttgcaatccttaaaaagcctatgataaaactttattattcattttcgccatgttctttcccttcatcaattccctaaaattgcatatttcatccactgaagggtttatttgaggagtatatgacattctacagagccaaaaccagttattgcaaatgataagctaaatttgtttctataactgctgcggtcattgtgtattaaagtatgcttaagatgggaaggataatgtataaaatttctgaaaagttcaataattttgcagatgtagaagttccagttgcttgcatcatattgataggcctgtttgcccttcagcattatggcacacacagggttggattcttgtttgcacctgtggttttgatttggcttctatgcatcagtgccattggcctgtataatatctttcactggaacc

SEQ ID NO: 79023 - DNA, 803 bp, Citrus sinensis
  Intron number 2 from transcript orange1.1g028490m (locus o range1.1g028490m.g) derived from phytozome v7.0 (chr-ID sc affold00003; pos 2612054 to 2612856 reverse strand)
caaggtatgcaacaacctcatatgatttacagttcatagcaggtacttttctctttgatggcattgcggaaaaaatcttgagactttctgtaatttgggatcaacaggagttgttttctcaatttatcagcattcatctaggagaagctacttcatagcctgggcctcagctttatatagctcatatcatttggaatgacttaggaaaggctttaaggtatctagagaaacaggatatttgtatgtttgattttgatctattctgcctcctcataggtaattcaattacctgcatgccagccttagtgtagtcatacactgcattgcagtgtggggtaattaacctggatgtgtaccatacccaaatgcagtgtacattataatgtctatattctggctaatctagattagtgccaagttcaatacaagtagatccctttacttttatcggtgaagttaacatttcttccactttcacgttgaagccaaattgacctagctagtgttgttcaatgaaaatgcactagtgccgtgcgattaatgtgaactcgctcattttttgtggatcttctaccttgaatagcttataagaaagcagttgctgttactgatattaaccctgctgaattccttagatttctattgaagaccctcagctagaacaaaaagctatttaaaaaaactctttgtttcactagggagatttttatggtttgcttgtactttaatttatgtgctataccttttcacatttgtcatttcttgcaggtttcagcttcttttagactgggagaagggttata

SEQ ID NO: 79024 - DNA, 483 bp, Citrus sinensis
  Intron number 1 from transcript orange1.1g024966m (locus o range1.1g024966m.g) derived from phytozome v7.0 (chr-ID sc affold00205; pos 188613 to 189095)
gtactgtaagtcaaagttgacttaccttttatctaaacaaatcatatactatatattaatcttttacctcaatttatcctgctatttgtgtagataatttttattttgagtattatgaatattaatattaacaccaagagcttcatcatatgtacatttaaccaaacaagatggttgacttcttcttcattgtaatatccgaaaaacgacatgctaactatactaactataccttgaactcatcaatttttttgacttgaattttcttcttgtttcgtagaaacacaattttaaattatctttgatgttttgagttctaagcttttatatattctctttaaaagtctggacgtatatgtctgcaattaacacccagttgaaatcttagtaagcattgaaatacaacaaaactgattttatagaaaagctaacatcatgagtactttgacagagctttgcgctgcagccagagagtgggaaaaa

SEQ ID NO: 79025 - DNA, 479 bp, Citrus sinensis
  Intron number 2 from transcript orange1.1g030254m (locus o range1.1g030254m.g) derived from phytozome v7.0 (chr-ID sc affold00005; pos 2318015 to 2318493)
gaacctggattccaacgggtgagtttttattacttatttgtctgaacaacaattgttgaaagagcatcaatgggtgactcgttcgaaaattgttttagcgactcaatggatctcagttcagaacaaactggtagcaattattggcagttcatttgatgccattctctctatctctctcttttgtatctgggtatgtacatagaccagagtgtgctaaaaataactgttttcaaatagtcatgtttgcatctgatgtgttggtcgctgtattattactcttcattgtcttcatgtaattttgaacttagagatttgcatagatgttcctgaagtttaatcctaagtcaccagtattctgctttgtcatttttttcgcttttggaaaccaagtctaaagcagctttctgcctggaatagtttcgagaagctgagccttttgaatttcatttttcatacagggtgacattttgtttctgcaa

SEQ ID NO: 79026 - DNA, 473 bp, Citrus sinensis
  Intron number 3 from transcript orange1.1g030254m (locus o range1.1g030254m.g) derived from phytozome v7.0 (chr-ID sc affold00005; pos 2318510 to 2318982)
ttcgtacgggagaaattgtcgtatttaatatacaggtatgttgtttatccccagcaattatagcatgaatattgtggaaaacttattaatggagattcaattttgatcttgcttggaccatctgactttagcattatttatggaacattaactgtctcttgtaaggattaatcttcatccttttgattaacaaaatacttaagcttcattagcactacttcttcattttttattcgttatatctttaaaggaaaaaaagatttgagagcatttatacaacatttaacattagctacttcaatttacttagtaggttgctactgtaattcacattgctgtatgtttcttttgcttctttctatccagtctgttcttgctacttgttttaattgtattgaacatttgtccttcaactatatgttttccatgttttttcagggacgtgatattccgattgtccatcgagtaattga

SEQ ID NO: 79027 - DNA, 689 bp, Citrus sinensis
  Intron number 2 from transcript orange1.1g000266m (locus o range1.1g000266m.g) derived from phytozome v7.0 (chr-ID sc affold00328; pos 72781 to 73469)
ttctcgttgctcttccacacgatttctttaaggaggtaatttgatttttaaaatttttttttgtgtttttgcttttttttctttttaattttatatataatttcatgtaaccataaaataaaataggaattttgttcaatttattttattctattttgttatttgatattttttcagggagaaaaaattaattcttttgaattgtttatatgaaataagcacttattttattttattttgagtgtggtgtgtttttaaataatgcctcttctacaaaattcaatttaggattttgaatgttgagtttaattgatgtgggttaaattttatggtatgttactagcatagatttgttagtcgttcaactgtttcactactattcagtgtgtggtagtttgtttcagggtttttaaatcttgataatgattattgttgaatttatattattttattttattttattttattttgagtgtggtgtgtttttaaataacgcctcttctacaaaattcaattttggattttgaatgttgagtttaattgatgtgggttaaattttatggtatgttactagcatagatttgttagtcattcaactgtttcactactattcagtgtgtggtagtttgtttcagggtttttaaatcttgataatgattattgttgaattgccaatcaggctgccaaga

SEQ ID NO: 79028 - DNA, 243 bp, Citrus sinensis
  Intron number 3 from transcript orange1.1g010995m (locus o range1.1g010995m.g) derived from phytozome v7.0 (chr-ID sc affold00003; pos 4041847 to 4042089 reverse strand)
ggtgaagttattaaagctgccacggagctgccatcgtgagtttcttttgtttaactttttgtgtcaccattaatcacagagttcagaccaacaacgtactctatgcgatatgaatatgctattttttttttcaataactccaatgatttgatacacaaatcaaaaagaaaaagaaaaagaagattaattatattttttggttgtttagttcgccaaagacacccttagagctcgctattgact

SEQ ID NO: 79029 - DNA, 816 bp, Citrus sinensis
  Intron number 1 from transcript orange1.1g034340m (locus o range1.1g034340m.g) derived from phytozome v7.0 (chr-ID sc affold08292; pos 581 to 1396)
tccgatccgaccgtgaactccgcggcaaactccatgtatatatttcaattctcctttctttttttcccccgcttttggggaaaattttatatatacgacggatgcttatacgaattcttgaacattggcatgtgggtttctgtttatttgattgtagggttcgtgttatgaattgggtattcaacaacttagggttttagtttagtttcttattgaaggaaaaaaaaaaaaaaaggctttagcataaaagttattactatttttttttcgaaacctaaatgtagtgtcgctggctttaatggaagcaaacaaacacacaaggatgtaaaaggttactgtggacagagactgtttaatgtggttttagtgctaacttaggctccttataagtttaatgacattgtgaaaaagaatgaaaagtgatctattatcttatttattttcttatggaaattaaaggttacttgtgttgtcaggatgttgcttggacattgtgtttagggtttgtgaagtgatgagtaatgaaagactgtgtttaatggaagttatagtttggagcgatttcttctaagactgattttattgctgagggcacagttatttgagtttatttcttcacagatatgttggtgtcaatacgaacataaatagaagaaacttgtttgaaatattgtcttgagcatgaatttttggagcaaatcatgtactcagtaatgtagccgctgcaattcagtaattacgcattagttacttatctcttaatggttactagagttctgatcatttctgttggtggcgacctggctttgcaggcat

SEQ ID NO: 79030 - DNA, 691 bp, Citrus sinensis
  Intron number 2 from transcript orange1.1g031300m (locus o range1.1g026883m.g) derived from phytozome v7.0 (chr-ID sc affold00003; pos 3864756 to 3865446)
gaaggtcagtgtatcattattttaaggtgaataagaatttgttgttgtttttttttaacaaagttttccattttgttataatatatcatagtggctggtgggaagacacatttgtttgccttataatcgagatgatgattttgatctccattcaatcctgcttttctttaggagaattctctcttaattattttgctttggcatgccggtctacggtaattttttttctatttttaattataaatgtttgatttttcttatatcataatcatagtggtaagaagacacgtttttcattgtttgggttattattaaaatgatgaatttgatctccattcactcctgcttttgtttgggagatttaatttacattggcatgccaatctaaggcattttttaagttgaggtgatgtgacttttaatctaaagctgctatgaaatagaatcatggattgtcaaagatataagtgggtaagttggttgttaattgttagcaaccaattgttctgctgtctaaaccgataagaaacacagcaattacaagcatatttttgtttagagtctagaccatcttgctgcagtttattgggcttttgaattcagtttcttctttgttgatatagttttttagtcttgttatatgatgaaaaagtctttgttgctgatggtttaatttggtatgccaggagca

SEQ ID NO: 79031 - DNA, 907 bp, Citrus sinensis
  Intron number 1 from transcript orange1.1g046041m (locus o range1.1g046041m.g) derived from phytozome v7.0 (chr-ID sc affold00637; pos 81442 to 82348)
ttgatacaataaataaagctgtctgcctggtgcgcctttcttaactcgttttttcaattttgcgcctttcttaacccgttttttcatttgtactcaaactctagaggacggcttaatccctctctatccggtccatcgatttgagcagagttcaaaaatcttatacctctatttttgtgttttatttatttatttatttattttattaacttgcacacattagtgaggcctgaatttagatcgcaggtcttaggatatttactccttactggtggaaatagaccttatatcttttaactcaagaaatattacttggcacttttctcttaacagaatattattctgtgcttttaaaataaattaagcttatgtatcaatattcaggatgagataacctaatgagagcaattaaaattgtaattcgtcaattgagaatatataattatattctgtttacgtccagttggttgagaggataatggtgaattaaaaagtcgatgaaatcatcttctattcattattgatttagtcatttgggacttacattttcagataagtttttggtaatatatttgtggatttggggaagtcttgagtgctccaggagctctgctccttttccattcatttcttgttacgttcatacttcaaacattcatgatactatgcataatccatggtcaagaatgaatggttaacgaccaatatttcaagaacatcaaagaccttctcgtggatttaacatgatccatcagcaagagtcaaaaggtcaaaaaaatagtctttaagttgaattcaattaagttggattgtgaatgagtgtaacatatgaaagtaatagaacaacgctttgagcactacaaattttgcagggtctcatcatagcaggattagacaccacaacagt

SEQ ID NO: 79032 - DNA, 642 bp, Citrus sinensis
  Intron number 1 from transcript orange1.1g030580m (locus o range1.1g028931m.g) derived from phytozome v7.0 (chr-ID sc affold00011; pos 1611237 to 1611878)
ctgctaaaagaccgagacctaaagctcaagggagggttcatatgatcaaaagacccacttgtcatatcactgttgtgttaagagacatgtctttagatgatgaatatgcggtttcctaattacagatttcacttgtatttcaagtttgcttagttatcttttgctgtttttctaatgagtaacgtcccgttctttgtttttttttaattttttttgttattcattcccaaaaaaaagaaagagtataaatatagaagcaggtcggaagctaacttcgattgaatataattgtttgcgggtgctgatttgattgactcctttttgtaaattttgtccttgataatctgcacttaacatgtttgatgaaaaacctgaaagaactgcctaggtcaatgccaaccaacgagtcttcattaaattcataagacagatttaattgtgccaagtggttactcaaagtaaaacactggattcacgaataagagaaaagacaaaaactagagttattggagaaattgaaccgaggctttttttcttgctatatttacattttctttaagttcagttataacctaaggtctattcaaattaaccataattacttcctattgcctgatgtgatattcaatggtcgtgacagga

SEQ ID NO: 79033 - DNA, 368 bp, Citrus sinensis
  Intron number 1 from transcript orange1.1g004564m (locus o range1.1g004564m.g) derived from phytozome v7.0 (chr-ID sc affold01073; pos 29932 to 30299 reverse strand)
ttcttttggtgagatttgagttgttttggtttcaatagttttgttctgtaatgctttttttaatatttttttcctctcttcaaaaatatttgggttgtggcaacaaacaaagcgtctctattataaaactttttgtctttttaacttaactctctctccctctctctctccatcattcatgttaccattcaataaataatcaataatataacaacagttcatcttcattatttcccatttctcatttcattttttgtttctcttacaatttttccttttttatttatgataaatattcatcttcctcatcatctttattctctctctcgcacactcttgtgtcagaactcaaaccaggaagacataaa

SEQ ID NO: 79034 - DNA, 423 bp, Citrus sinensis
  Intron number 1 from transcript orange1.1g023382m (locus o range1.1g019690m.g) derived from phytozome v7.0 (chr-ID sc affold00011; pos 940021 to 940443 reverse strand)
gggaagaatctcccgattggctgcgttctttccaggtataattcattttaatttctaaatttctcaatctcccaaaaaatttgaaaagatggatatatgttcaatggatcacacctaccaagtgaaagtattttgttttttctttcaagttagtctcacaaaaattatttttggtgtcgctgctgagcatgattacatatttgctcggccactgattaaatttacttgtatgatcaggctccaactcattctgtattgacgttatcatctgattctgattctgattcttctcacaatggtacatcctcaatggaggacgagattgataatggatacacttcgcctcaaattttctgccggggttttagcaataacaacttaactacattgttttgttctttgataataatttagggaacggag

SEQ ID NO: 79035 - DNA, 980 bp, Citrus sinensis; identical to SEQ ID NO: 78279
  Intron number 3 from transcript orange1.1g004171m (locus o range1.1g003582m.g) derived from phytozome v7.0 (chr-ID sc affold00003; pos 1494934 to 1495913)

SEQ ID NO: 79036 - DNA, 808 bp, Citrus sinensis
  Intron number 2 from transcript orange1.1g023160m (locus o range1.1g018607m.g) derived from phytozome v7.0 (chr-ID sc affold00011; pos 2137378 to 2138185)
tgtcttttcacattctcttgtgctagaggtaattattaaactcattaattaaagttttcttcaattttcttttttatgttttaactggttaggtctaccatagtggtatcgatattaattaatttattttaattggcttgttaattaattaattaattattgggttgcattgcatttatgtttgagagagggatggatattttgatgtactggggatcttagctgccttattgggcttatttgtagcttgagttgctagggtcaaattcttgcatatcattaaaacaatgttttgttcccgtttgttgcagaacttagggttaaacgccatcatagtccccaggtttataatcatactcttgccacaatattagtggaatatgcctctgcggtaagttcccttttctccgctgatgacattgatgttgaatgcaattattgtgggattctggacctataggatctgtttcaatatggggaggactttctagttaagtcatctgtagaattttaagctggggtattgaagagccaactgaaccccttgtctgcttgttctggttgtttaattccaataaattgatctgttcaaataacttgttaacttggtttcaaaagagggatctttagttgatctgtgtgttagtatttcatttttgctttaagacattaccatcaaacttagctggtgtcaggcttgattcatgttcttaagcgcaatgccaagattttggtataagacaaagacacttgtaatgaggtaaccttatgttggtgaatgaagcaaactttgctcgtgcaggtttat

SEQ ID NO: 79037 - DNA, 868 bp, Citrus sinensis
  Intron number 1 from transcript orange1.1g030945m (locus o range1.1g030945m.g) derived from phytozome v7.0 (chr-ID sc affold00014; pos 698991 to 699858 reverse strand)
gctcctccaaaaggtagttaatatgtccatttctcttcttcttctttttcctgctttaatggcttaaagaatacttttgcttctattattacagctcctgggattgttcattctggttctgatgtggccctccacttgtttgccgctgaaaacagactaaaagtgaacaattagctaccattgttctgtgccgattaggctctttaggaccataaacaaattacttggtcgtaaattatttcttttttactgccctttttagtgttctgcccttgtgcaatttatatatgttttaaattagggatgttatcctccattgaggacacagctgtctgtggaacgtggtctgtgtcgtaggtagaggggaatgtagtttgtaagtggaacaatagatgagtttctcctccttttgtcagttctagggatgagtaatgtgggatatgccttgacactatctgcctcctgatggcgtctcggatctcttctcattgtggcaaggcatctttgtagtggtttggtgtaatgtgtgttaaagagctcttgtttgattctggttcatgacatgcaagtctctttctactttagatgaattatagttgcaaattggagacttagttcattggatatggacttaggtgatgactcttgttttatcggtatcactggttatttttatttgtactttacatgatgagtttttattatatggtggatggtttgatgaaacatttggtgcatttattttgaaattttttcctagaaatgaaattattgtattatttcaatggaacccagctattctttataccgatatgaggttggcgtgtatgcaggtgagacaaaaaaggctgatccaaaggttcaggcc

SEQ ID NO: 79038 - DNA, 628 bp, Citrus sinensis
  Intron number 1 from transcript orange1.1g036150m (locus o range1.1g036150m.g) derived from phytozome v7.0 (chr-ID sc affold06208; pos 63 to 690)
actatcgggttttgcggagaaagaggaccaagaaggcatgaattgttggaaagtatagctagttttattcttttttttttttttgggtttgtttagtgtcctcaagtatagatgttatggtaacgtagacttagattttcatttttttttaaccttgggatatctttacatcagtagcaggcagaaatattatgtctcattaagctttgagcatgaattgtgggttgttcacatggttactcgagaaagcttgctactggtattctacaaatagaaatttatgataggaaccatatcatgaaaagccttgtggtgctctctctagccttttgttaaccctgctttgatgttttactttgtttttgcatgtgtggccttgggatcttggaattataaggtattattcttttccacgtacctgttatggtcccggtttgcgtaagcagattaagaagatggaggtcagtcaatagagtaagtacttcagtgaattctgtgggaaggtaatacattcccctttttcctgctctttatcctttttcatttctttttatgctcatggatcaatgaatcttcgcttttgaatgtggatgtgttaaatgtttacatattccttgctgttggtagt

SEQ ID NO: 79039 - DNA, 993 bp, Citrus sinensis
  Intron number 2 from transcript orange1.1g026421m (locus o range1.1g026421m.g) derived from phytozome v7.0 (chr-ID sc affold00017; pos 1257153 to 1258145)
cgcaggctgattctcctcgcaaaaagtaagggctaaatcgctgaactcgttaaaataacatttgcgtggcaaatatttttaattgattcattttatttaatgttctgtttaatgatctgagaggttttagtttttttaagtaatgaattagaggtacttgatgttctttgttgaccaagtcttatgagattatgggtgtgaaatgtattcagcttaggaggttgtagtttatttgaactttgatgccttgatggtctgtttggttctggaagtgtgagattcttagcttctgttcaacaaaaggaaaaaatattatgtcaagccgcagatgtcagatgttttaactcttaatcttagttgaatgatcttttgtgcgggtgaatacctcaagtgcatattgttattgttattgttatgcagtatctttataggaggatgtcatttcattataagggtacaaaaagtatactgtactgaggatatggtaacagctttgaaacagctttgaagctatataaggataagttcatttgcccaagagttcttaaattttatttttttcaatttgtgtttaatatttgctaggttgtgcttttggaccaggaaaaatttcttgctttttgggtcaattaaattgactttcatccattctcattatgtttgtgaaaagatgacaggagcatttatttgatttgtgaagtttattatgcaatgtcacttttgttattggctatgagagaaacatgaaaaatttaaggaatgcgatgaacagggcaataagagatacttattgagattacatatcatattatattttaggttagtttgagtgtcttccgtgcactattgattgatgctttctttgaatgagtttcttttatgctatattatattgttaagctctttcggtatgttcctgtccttctgcttttgatgtttaataaactggatgcattagggatttgcggtccccttcccctgtgagggaacttt

SEQ ID NO: 79040 - DNA, 1063 bp, Citrus sinensis
  Intron number 2 from transcript orange1.1g030922m (locus o range1.1g030922m.g) derived from phytozome v7.0 (chr-ID sc affold00005; pos 365060 to 366122)
ggagggcctcctctgtattctcagaggaaaggttagttgatttcgatttctaattttattcaattaaattaataatctttataatacttgttaattaatttcgctaagccttatttttattagattatgagatcatttgagtgtgtttttcacaagttattggtcatgcacaaatcagattcaggggaaaatgttgatttgtagtagccaaatttactcatcttgattaggcttgaataattgtggggcatctcagagttttcagcggtattacgcagcttatgcttcaattaaatcactgcattctttgagtttctattttggcttttactcaaatctgatgatgtttagtagaattagtggcagtatttaagctgattattattgctcagcaaacaatatacatccaaagctttcgattagaatgcatacagatgtattttggtcttttgttcagctactttcttggatttttaggcagtctgtattttcaataatattctagcatgtttagtttttatcctgtgattacatgcctggaggtataaattttgagttggaattagtgattggagatgtaatcctaattatttttgcattctattgaacagcatcatgatgctaaatttttgttcgccaatgatggggaatgacaaaatgagtttgagtccctacaagggactcatcctcccatgtacattttcataactgtgctatagattttgcctgtatttggttcatatttttgacctatgcctggtagacgtttgtaatgtcagtagataataatcaggggaaagaaaaaagaatacaaacttataatttattgaatagcatcatgatacctttgcaagtataaatatacaagacaaaacttttacactcctgtaatttcttcctttctttcttttattttttcccctttttggatgcaagttggtagtttccattcattttgaaaatatatgaatgcagagtttagaagatgtaatataaatatacttttttttttggcttttgtctggaaggccatcctgcattaattggacgtcatcgaccattc

SEQ ID NO: 79041 - DNA, 672 bp, Citrus sinensis
  Intron number 1 from transcript orange1.1g017670m (locus o range1.1g005739m.g) derived from phytozome v7.0 (chr-ID sc affold00005; pos 400696 to 401367 reverse strand)
cggccactacattactcattttctctttcttatctgtgagacactgccattatttgatgatcttttgttttaggttctgctgttctgctgtttgtttccatggaaaataaattcccggaaaatgtgataagtgctttttaaaaaaaaatttatttggaagtatataatatttcggggaaaattgacaatgaagcgtttaatttttccttttctatttaatttatcttcttggaaaacaataaaaaatttcctatttcagtttttttttttctgatgatgatttcagttggatgttttgcttagtctttattttttttcctcgcactgtcatattactgaatttcttgtgttttttcagccagttagctttatttgtggggctgcagctaagaatatattgttcttttggattatttggtatgggttagcgaattgcttaaaaagtttgtgaaaactgttttcatctcaggggacgatttatgttgcttgtttaatatttttcatgggattgatgtctaagttaatttgattttcctgttccagtggcttataagcttgttgtaaagtgaagcatgcactttatttcactgaaattttgtgtcttacatattgaaaaggttcgttgctgttttttcaggtttagctttcgggacaggttctatttaaaattta

SEQ ID NO: 79042 - DNA, 539 bp, Citrus sinensis
  Intron number 1 from transcript orange1.1g008583m (locus o range1.1g008599m.g) derived from phytozome v7.0 (chr-ID sc affold00003; pos 3415934 to 3416472 reverse strand)
tggaagttgataccgttgtgaattctacaaacgaggtgagcactaactagttaccttattcaaccttgtttggtttctaattctttgatgattgtggtgtggacagcatttaaccatcttacttatgtgtcttatgctatgtagtcatgcttttcagcagttttgtcttttggaattatgttgctaccaatagatttattcttggcttgtatgagttgggctcatatacacgcttcaattaatctgaattttttttttttttgctttttttgaatcacagccattatggaaaatggtattagtatatatatttgtgttcaacaatgcactgtaatattaatctcactgttgccttccgctagaactttgatgagtataccatgcccatgggatgactatcctaggaaagtcctttcttgaggagtgattaggaaagctggatgacccttcaggaagtgtatattccagccaatccatcaccttatctaatacatttcattactgatccgatacttttgcgggttgttgacagaacttgg

SEQ ID NO: 79043 - DNA, 1031 bp, Citrus sinensis
  Intron number 1 from transcript orange1.1g034771m (locus o range1.1g034771m.g) derived from phytozome v7.0 (chr-ID sc affold00023; pos 649070 to 650100)
ccagcaacaaaccatcaccaagacaccaacctcaagtaagctttaattttttttttttattgtagaaattctaagaaattattgtagagttttgaaaatctgtcgaaaatgttgagttactttattgtggatttttctcgctgttttgtcttaaattgattggagttttgtcttaattattcaatttagttattttctgggtttttcatttcttagttggagtatggatttcaaataaagatcaaattttaaaattgagctataagttatttcttactatttcaagttgctttagttttaggattttgaaagtgggggtaatctggaaaagttttgtgggtttaatctataaacaataatttgaagccgagtttgagattgagaatggctgctagagtggagattgatgaagacagtgagactaacaaggtcagcatgtcatcttggattagaagcttgatcagcccatggatgaagaagctggcaggcttagaaataagtaaagagaaatatacaagctgggttatagtggtttgataagttggttctgtttgagttggtggtactctgtttctggaaatgttgttcatggttttctagatttatgcttgataaatcagaattttcagaatttaaaagaagctaaattgtgtgcccagaaggaagataacatttaagcgtgtatttgagaagaaagatggaagataacagttaagagaaagcagaagttaaatcctcggtgcagtgcagatagcgatttcaattaaaaaaaatctttaaaacggtgttgtttttggaatctttggggtttgacccagggcaaacattagtgctgatataaattaattaataaattttttatttttcttcacacccactataattccgaatagacccgttattttttaattttattttatttttagaatataaatggaaaacagaaaaactaatacctacttccctaatcctaaatcctagttttcaaatttacagacgctgtgctcgagggagagagaggggcagagctg

SEQ ID NO: 79044 - DNA, 604 bp, Citrus sinensis
  Intron number 1 from transcript orange1.1g025079m (locus o range1.1g025079m.g) derived from phytozome v7.0 (chr-ID sc affold00003; pos 939334 to 939937)
ctttgtaagtttttgtgtgtgtgtgttgttttttttccttaaaaagtttgtgttttgagtctgattttgaagctttcttttatggctaaaataggtagtttttgtttgtccataaacttgatcactttcatgatcatcataattaatgaggaggtaaaaaagaatttagtgcctaatataggtattatgttggattttgatttgtgcatgcaattaatgagtttttggaatttatgtgaagacatgccaaatgggaatttggcatatatgtctaatttgggagctttattggctgtatatgaaaataactgcaactttcctctctttttgtgtggttgattcacaattgatgaatttgatatttacagtgtgattctatttagcttgtcgagcaaaagtgagtttgcttattgtatttgaggaagcgaagttggttttttctttttccctttgcttatttggtacttatcattgcatttggatgattttgttcaaattgtaaaggaaaatgttgacattggtttactcagctgcatttattttctctaactacaaacctggggctgtagggctgctgcaattccaagagcgaaaggtggtgcac

SEQ ID NO: 79045 - DNA, 934 bp, Citrus sinensis
  Intron number 1 from transcript orange1.1g046373m (locus o range1.1g046373m.g) derived from phytozome v7.0 (chr-ID sc affold01193; pos 26960 to 27893 reverse strand)
cacttctattttggtaagtttaattagattcccgttcagtggaaatttccatattgatatctttctattaattaatagattctgtccataatgttcaagtaaatacgccattttaattcattaataaattattagttgccatagatttaattaggataaattgttggatataaatttgtatttcaaaataccaatgtctattggagagaagtgagtgaaattttgtttgcatttgtcttgaattatttacaattgaacgagtcaaatctgcgtatgattgaattattggagttgaattcaacagacaaacacacgatgaataattaaatttaaataaggaaatgaaccattattcaaattaaattaggaaaaaaattgtaaggatttctttttattagggatacatgaatgcaaagcctttaaggttaattaaatagttcattttcttttgctattctaaattattgtgtttggattgcatcctcatacaaagccttttttttataacctttttacattgtgaaatcttctttagagtagtgaaaattggtctttaggagagcactttgcacgcgcctagactaattctcagagagttggtgtttgcaggtcggataacaacttttgattgggggaggcaactgtctagtttcatattgcgaaaactgggtaattattgcaacttctatgttattatcattgacaagccattattcattgcagttatgcttgcttcgggccattcaattatgtctatttaaattatattggttattatttgacttatcctgtgttgtctcggatgaggctgcgttaaaaaaattacttgagaaaaagatgggcctgatcaaagaaacagaccattatgggtggactccaattcattacgctgcatattataatcaatatcaacagatacatgtactattagaaa

SEQ ID NO: 79046 - DNA, 666 bp, Citrus sinensis
  Intron number 1 from transcript orange1.1g031853m (locus o range1.1g031839m.g) derived from phytozome v7.0 (chr-ID sc affold00003; pos 2741756 to 2742421)
tttactgcaatcaacgctacttgccgcgtcagctcgtaggtttgattttttttctttaaaaaaaatctattttaaaaaaattattgtatcatagccttttctttcaaatctatgctgtatctttgatttacttggtttttttttcttcagttctttctttctggctaatattaggtatttttttcgatttaaatgtctcaattttgcaatatcaatgaatctttaattgaatgaatggaagatgagctgtaatattttggtattgtatctgtttaatttttccgtctgaatattattatcatggattttttactttcatatactgaatcggtattgtatctgtgacctatgtcatgtgatatgaattggggtttgtattgaaagcgcgttcagattgcaatttctgatatgaattttagttggaactgcttaaaggaagtttcctgagatttgtctttaatctaggctcaatttaagctctgtggtaataattaccggagaatctctacttgttgatttttgcaaaatgtaaactttaagttgttgtatcctttttgctgattacacttgaggaactatcactggttcattattcgtattataattgatgacactgagtattgttgattttgggttggtcttttactgaatttgtaggcagtgaga

SEQ ID NO: 79047 - DNA, 662 bp, Citrus sinensis
  Intron number 1 from transcript orange1.1g027521m (locus o range1.1g027521m.g) derived from phytozome v7.0 (chr-ID sc affold00005; pos 1181652 to 1182313)
tcactttgtccgatcaggctgtgattttcttacgggtacgtttcgattctctgtttggttgctgagaaattaaaagaaaactcccccacacgaaaagtttgtttctgttcggttgcaaagaaattactggcaaatttcctttttcttttctaaagatttcttaatctaagtgattatcagttgtgctagggttttatacttttatcgtcttgttattttgattgttatattttcctttgattccataactcaaagtatgaattagctgattaggtttagctcaaaatttaatttcttttcttttattgattattgtagcaatgattgattctcgggcaaccataatggaatattcctgagaatcaagttttgtgtttgaaaggaggattatttagtagttgttatttttcatgaaaaagagcagcttttcatgaagctaattgaagagttttaacttgattattttgagggattgaactccgttgtctcttttagtttgtggtcatattctggggatgtctgttcatcgtaattaaacttgaggaagtctgaaatttcactgaatatgcagctatgtcttaatgtccattgatatcaatgagtttttccattttatgtctgttttaggctttgggtattgcttgcggggagataggtgcgtt

SEQ ID NO: 79048 - DNA, 890 bp, Citrus sinensis
  Intron number 1 from transcript orange1.1g039237m (locus o range1.1g039237m.g) derived from phytozome v7.0 (chr-ID sc affold00005; pos 923215 to 924104 reverse strand)
tcaagcggccgaggacagcggcagccgtatctgtggtgcttaacaattatttagctctttatccatgcatgcatgtagctcgatatagagcacgtacgaatagtttacgtgaccattatttttcattcaatttgtaaataaaatcatagctaaatgttgtgaattagtttttaaaaaaagaaaaaaaaaactttaattagatttaacttttgtacgtttggattgatatttgatttaattatacgtatacttatttagtagtggctgtttggtattgtttttcagctttcatttttcattttgtaaaaatagaaaatgagaaaacatgtttagtgggcttggatatccgcaacatttttgccaccaatgagaacaattcatattcattttctaatgtaacaaagaaaattgtaaaacttacaattttcgctcttcactttataccccattatccatgagagaaaagagaaaggggttaaaagaaaatataagatgaaaaggaagcaatagttgagaagttataagagaaggcacatgttttatttaaactttctcttttcatgattattttcataatcatttagtttgttagtgactggatttcagttattttggacaacaagtacttgggaaatttgagacaagtaacaatttaatattagaacgaagcatattggctagagaattaatgttatatagtttgctatatgtattatttgtatagttatactttctggttacaaattgattatttgttatttgtatttttatttgataaattgtcttcttatataatgttatataacttatatttatccaaaataattattgtgggacaactttgagaccatatctttaatttgtaggtctagaagcagttgaagaagaca

SEQ ID NO: 79049 - DNA, 813 bp, Citrus sinensis
  Intron number 5 from transcript orange1.1g029733m (locus o range1.1g027698m.g) derived from phytozome v7.0 (chr-ID sc affold00014; pos 671352 to 672164)
ttttcataacttttcttgcttggtgtctaattgaggtgagttctgttatcttatgtgcctagtgcctacttaaaaattcagtaattgtttgcaaattgtatgggctgtttgctaaaagtaagaaactttgacttgtaattaacgttgtctgattcctggatgagcttatttattgacatcattatgaagagaatggcataatacatcagttcacattgcatttaaaaacaattaaattgatataacttaatgtttctgatcagattgtcagtattaaagcttttttattgggaaaaattgtacccttttaatgttacctgagattaggtgtaaatcttcttacacattttctttcaggcattcatttagtcagattttctttccagcactcatttagtttctttgattgtaactttcttactttcagccgtttcttcatgtgtatgtgtatgtgttttttctgtaagtgctttggatgcactctctttccattgaacacaatagaagttttttgtatctgttctgtggtctttcctttttacgtaacattttagtagttagtagatattttttgttttaatatcgagtttggcttcatgatcttaatggattgagattcaatgactatcttcttgatgcaggtaattaggtatccgttttatgctctaaacaccattggagcttgtccacattggctaacctacctcaggtattaatttacattttattttccgcatatatcatatgcacacaacaaaagttataattgcataacagtttaatataactctttcgcatatttgtaggtacact

SEQ ID NO: 79050 - DNA, 813 bp, Citrus sinensis
  Intron number 2 from transcript orange1.1g019258m (locus o range1.1g019258m.g) derived from phytozome v7.0 (chr-ID sc affold00048; pos 147108 to 147920 reverse strand)
ttgatattcatccatcacgaaagcatacttgtctggtaagatgctgcacgcttctttaaattctaatatctgagaagttgggtacacatctagttggtgttattgaagcttttgacttggtttcctccctgttttgctcatgttatacctttatgacttggcatttcagtagttagaattttgctgctagtgtgcctttctatttctgttcttacttcttagcttctatattgtttcgtaagcatctgagtgaagtcaataatgaaaaatgagatatgcggcatatgccttttggtcaactatagccctctaccttcattcaaaagcatttgatggcagtttttttccttagtgcttagctctaatatggctgtgttagatttaaactagtaatgtttgtggacttggtgtaactctgatgtgtttggctattggcttcatggtgaagtaataaattattgactttcttatgtgacagaacaatggttaaagcttgtgccatattgtattaatttaattgtgaaatgaggcttgaatgataacttgatcttcctgattgtaatcataattattcatataatttatttatttagttttgaaaccattctgtgcaaagcttaatggcttgtgctttggtgacactgaaacttttaaatagattatgaatcactttgcagtctataaaacttggattagctttcttattgtggccaaccatgtgaggtaacactgtttgcatgaattttatagtttagttctaattttcttcaacttgtaggctggaggctcttctggtacagtatttgcgtggga

SEQ ID NO: 79051 - DNA, 790 bp, Citrus sinensis
  Intron number 1 from transcript orange1.1g021913m (locus o range1.1g021913m.g) derived from phytozome v7.0 (chr-ID sc affold11870; pos 618 to 1407)
gcttgaggagaaacaacttacagctgaactccaaggcaaaaccctttcttttttctgatttataatctatgtattggtatataattcatttgccatttggttatatcttgtttgtgagggtgattgaagatattaatgaaatgaaaatgataaaagttcaatgatctttagtgtgttaatttatgagctcattttgaatgtttggaaactgatatccttttcattctgtaagtttagatagaaatgggtcttcgtttatggagttagcgctggaatttcatgttacatgatatgattgacaatgtttttgcattaggaaacatggatgaaccaagagcgactgttgccgtaatgatggatgttgtgaaatattcaaaagacctttaatatcagtgcattctttgacgttttactgttgtactcactaaacatcaatgtataatgtggctctttgagaatcacactacgaaaaacctgagtatgctaaatattatgtttgcacttcattgaagatcttgttgtgaaatttgcaggctcaccttttctattttagctctttgtaagtattaattttcatttgtgatgctacgcatattaattttcatttgtgatgctatgcatattttatgaacagtttggaatttggattagttctattctgcataatttccaggcaattggcgtcaattttcttttgtcatctttacggcttatcactgaaggttgtattgttttcatgtttctgctgcttgcaggtcccagtcgtgcatttggtgaccttattgcggca

SEQ ID NO: 79052 - DNA, 207 bp, Citrus sinensis
  Intron number 1 from transcript orange1.1g000677m (locus o range1.1g000675m.g) derived from phytozome v7.0 (chr-ID sc affold00014; pos 872864 to 873070 reverse strand)
cgctcgtcaatttctcccgctctctcgcaaacgaggtactttttttttttctaatcagattttggaattatcgtttgatatttaatcttctcgctttgtcaatttcgaaaatttgaattttctttcttgtttttgattcagttactcttaggaattataattttggtgaataaaaggagagaaagctagggtttgtttgtcatagta

SEQ ID NO: 79053 - DNA, 870 bp, Citrus sinensis
  Intron number 1 from transcript orange1.1g021268m (locus o range1.1g021268m.g) derived from phytozome v7.0 (chr-ID sc affold00074; pos 542129 to 542998)
gtatcccttcctgtttcttcagtgattttatcggcgtaagtactgagtagttttcttttcatttcccaaatttcaaatttgtttcatttttattttggatttattaaattaattactgatttttatttatttttccaaatattctatttagtattaaataaaacctgagaggttccgtaatcaattacagtagcacacggcactgctttgttgatccaacacttcaacttcattcccgacccctgcatgattgcttgcttcatgtgcgctagtgtgcttcctgaaatgagcaacgtcacttatgggatcaatatagtttagaaattggaactgtaatcagatgaaaagaggttagcttttttgggttttattgtgttagatgccaagtgattagatgtaattaaggtctgaaagtcataaaagcaaaactagcctgaagcatcttggagttgtatgacagacataaactgctaatgtgtcctatattaccgtgcttttttctggcaacatttgctgtaatcctttttgctatgctctttgatgatcagataattacttgtataacaggcgacatcatttttaccttgttaaaagatcttcaagaatttcgttccctttctcattaatatttatgtctgtgataagctttcgtaagctgacaattaaaggtcaacaagtgttcaatttctaagtacaattcatttaaattactgtatgtggagaagttttagtcatcaagatcaagaaagcatgttttccttttgattggtgccgtttatatgtttggaagtccgctattattgatttactatattccctgttctgttttgcctgagttctgttttgtgaatttttgattttgtgtaggtg

SEQ ID NO: 79054 - DNA, 842 bp, Citrus sinensis
  Intron number 3 from transcript orange1.1g034724m (locus o range1.1g034726m.g) derived from phytozome v7.0 (chr-ID sc affold00417; pos 69897 to 70738 reverse strand)
tgtaatcaaggtttgatgtgtaaattaactttctattgtggatacttttgcagatgctttatctgcttttctatatttttctctgtctatgttctgtttgttgtcactatgaataaaaaatggaacaacatttcagttttatgtacagtttatggtgtgatttaaataaataattggaatttgctctcagtttgtggtttatcttcttgatttctggttttgctctgcaattgtttgttttaagtactgaatgcttgagtgtgaagagtaactaaaattttattgttggagtcaatgtaggataagacataaatttgaggaatgtgcagttcttgatgattgctatacattccattgctgagtctgaggctctcccctttttcagttggaaaatttacccagcaaatgcttcttctgtctaccaggttttctttttccccctcttccttcttatgcaagggatctgtttttaaacggtacctactgtgtcactgattttattatccctctgtgagctgcattttctgttttaaggtactcttagcttactggttttcacaaaatttaatgataaatatttgaatggattctcacctctgtattgttagctcttaacttcattgtttagttggatttagtcgtagaatcctggctggtagtaagtctggccatcacaactgttgtgatgaccattttagttaccaaaatagtagtcatagagtcacaaactcttgtataaactgaatttatacaaatagagttatatcatatcaattagtagaagaatttgtggccttatcgttactctcaattatcagtaagaggtggaaattgcagaagcc

SEQ ID NO: 79055 - DNA, 718 bp, Citrus sinensis
  Intron number 1 from transcript orange1.1g003086m (locus o range1.1g003086m.g) derived from phytozome v7.0 (chr-ID sc affold00017; pos 165469 to 166186)
ctgagagattacgaaaggcttccaagaatttgattgtaagtacatttttcttgattttttttgtttttcttctattttttaataaatcttgttcttccgattgacttgattagtagttttgtatgaaaaaggaaacctattggcatgaaggttaactgtgcagataacccagttgcaggcagatttagaatttgacgtaacgcatatttaaaatttactttctttcttttttaacatcagaattgagctacttatgacagaaatcaaaagaaaatgaaagtcatttatgttgttattcttgtattgaatcagacttacattgaattcctgctaggtgtttctgcttagctcatagccaccaattctccaagttagtacttcccttgttatttctggatgctgatgccggggaaggaaccaggaaatttttttgattaagagcattaactgacgtttaaatttataaatgattactgttgtatattctgagattagaaacaattcacatcctacccgttttaattcatagttaacaagagttcaacccaagaatattttctatatgtttcctgtagtctttttatcatatgaattgctaatggaatttcctcgcaagtgatggtacttacattctagcaactcatttctattttagccctcggcttaatgttcaatattttcagcttttcccttgcttcatatttgtgggggagaaagt

SEQ ID NO: 79056 - DNA, 718 bp, Citrus sinensis
  Intron number 1 from transcript orange1.1g019926m (locus o range1.1g019926m.g) derived from phytozome v7.0 (chr-ID sc affold00446; pos 10349 to 11066 reverse strand)
ggagtcctcgtgggtggaaatcacacctcctccaggttttgcactcgctaagttatcgtttttgcttagttttagccggctttttactctcacactcatcttttgaattgttaaacaagaaaacgaacaagggattttgtttttttagtttcattttgctcaagattcggatattgaaactgaaaattgatggatttgaagaccctgaaattcaagatccttcatgggtctcttgcgagacgtgtgcttttacgctcttttatgattgtctcggctttgtccatcgttcctttgctgcaaatcttatttgggtccgatcctgttatgtttaacactgtttattctaatgattgtaccgtgatttcgggttattcaaatccgtatatctttctggatcggcttatgtatcccattttgggctcgattgaatcgaagcattgcaaggagaatgtcaatttgactgttaatgtggttggagagctaatgggcatgaaaatgttgagttatgatgtgaaagctctctgtgtcggcgagggttctgcctcctccgtgtatgcattgcgagaattgggatttgaatatgcatgtggggtttatagacacccatttttctcgctgaagcataagaagttcgtttatgaacttgactacgaggacaaatcctttgattttgtgttctccagggatctagataaagtttctgtccctgcacttctag

SEQ ID NO: 79057 - DNA, 475 bp, Citrus sinensis
  Intron number 1 from transcript orange1.1g033978m (locus o range1.1g033978m.g) derived from phytozome v7.0 (chr-ID sc affold00005; pos 2471197 to 2471671 reverse strand)
gctaagcgttgctctcgtattttatttttatttcattttttaaaggttcagcattcgctttttgatgttttctttggcaactgggttttttcatcaaggctatcatgagctgaacatgttaagtttcttgatgccatagtgattagaatatcctaattatttgaaaaagattttagcatatgatagtctccatgctcaaaaaaaggattttctttctttggaatacaaagattgcatggcccctttaatggtggtggaccagtggaccatgattcatcatgggttccggcgctcttttctttttaccctgaatactttaatatcaaaatagagtttttttctttttctttttctttgttttttataagcattttgaataactgactgacaagaatgataagatgatttttgtttaattatttcttttgattaatgaacagagggtgtaattgcgggagctaaggcagctgttgtt

SEQ ID NO: 79058 - DNA, 586 bp, Citrus sinensis
  Intron number 1 from transcript orange1.1g025854m (locus o range1.1g023633m.g) derived from phytozome v7.0 (chr-ID sc affold00048; pos 475646 to 476231)
tccatcagtttgatcccgactcttttggcgtccaagtgagtccactcagtcgcatttttctttctttctttcttttttttttcaaacatgagtcacatttctcttatttattcctttttatttgcttcggattatttttttttttccaaaaatgcaaaagaagaatgagaatggagagaagaaggaaaaaaaaaagaagacaacccaactcatctgggaattaaaagtcaaccgtatagaatgtgcttttatttaataatttagctgatcatatccgtttcatcagagcaatgatacaattacaaattaccgtgacagaatactatcgattgaatagaaacaaaaatagagaaatgaatacatgtgatgtgatgtgcttatcaaatcaatagtattatgtcacatcagtttatgattccagcattacttgcttaattactatcaaaagttacaaataagctgatgagcacagcgtttagtctttactcgcaaatgttttcttctataaatatgatactggtggtattttgcttttgtcaaagttctattaggatcataaaaagcacttggccgagcgtgagtttga

SEQ ID NO: 79059 - DNA, 774 bp, Citrus sinensis
  Intron number 2 from transcript orange1.1g025854m (locus o range1.1g023633m.g) derived from phytozome v7.0 (chr-ID sc affold00048; pos 476349 to 477122)
taaggtttgtttgctttcttcattggatcaaaaggacgattcccattttctagtatcttaattcgcatatgattggactttggacatgttaatttgatgtttcatttgttgcattctgatattattacccaactctcctgtagttcactgatgacggagaagatcgagtggtcgttgggacccttgatcttaatcagtgttacaggcttccagatgaaattacagggaagaaacctgaggtaatttatgagattttggaacttttgtttttagatgttaagtgtccttcactataatagctaaattatgtgctatacaccgtatatggcatttttggttttgaataacagattagggcttgtgtaaaagctaatcttttatctcttgtgctgcctttaatctttaacccgtgagtggctgattcgaagccatttcaatgatctgctgtcttaaattggtagtgcagttatctaggactcccctcacattcagctgaatggtgtttgatggttttaattgaattcagatgcatgcaaacgattctgtttgtctagcttgcctgttccctttctatattctataaatggagatcattatttatgcacaggatacgtgtaatattacagctcaatacaaatctatgcaagtaggttgacatatgaattttcaagcatggtttatgacagaaaaaataactcagtaataatgaaaatgagcaacttttatacttttttaacaggggattggaggtgattttgcaagagcatacttaag

SEQ ID NO: 79060 - DNA, 540 bp, Citrus sinensis
  Intron number 1 from transcript orange1.1g004256m (locus o range1.1g004256m.g) derived from phytozome v7.0 (chr-ID sc affold00208; pos 97997 to 98536)
gacagttcttcccattagctgctgttgttggccaggtctacaacttaaaactaaaaccaataactcactgtttatatttatgcttgtgaattttcttcgtgaatgggcaaatgggttctcttgttttttttttttttcatttttagactatatagtactgttgttatacgtgtttgctaattattgaggtgttgtggcttttagttcaccacttctgtgaagtggaatttgctttcgaaattaagcagaagcatagcaacatattaccctaaggctttagcttcagaaccgtccatagtgaagtagattctcagtttggtgcaaattctagtagttgatatatcactttgatttatgtctgtgtacattttatgataaattgttcttaatagagattacatttttgttgaaaatttttgggaaggataaagcctctgtacagcttttcttgtgtctaatttgttaaatttgtatgatggctaataatgctggttagctaagatgatggatgtataatgaagatgcatatcatgttatagg

SEQ ID NO: 79061 - DNA, 367 bp, Citrus sinensis
  Intron number 3 from transcript orange1.1g024361m (locus o range1.1g024361m.g) derived from phytozome v7.0 (chr-ID sc affold00005; pos 1736386 to 1736752)
tgggacaccttaccggttagaatttccattccattcaatatattggttatgaattgcagcataagctgaaatactgtttttcctgcattgatagcgtctgctgtttctgaaagttgaattgccatgctgagctaactagtcacaattatgcatgctatgactacatacttagcttgacttatgttttgaattttctaaaagccaaatgattttgattatggaactcaaaatgtttattatgttttttttttcttctccagattcatgtttaagcaatggaggaattttgcttccttttaaatttctctaccttgatgatgtaggtgctactaccttatactgtcttaatgtgcatttctgattgcag

SEQ ID NO: 79062 - DNA, 1050 bp, Citrus sinensis
  Intron number 1 from transcript orange1.1g001298m (locus o range1.1g001044m.g) derived from phytozome v7.0 (chr-ID sc affold00017; pos 959690 to 960739)
attatagtgtttttgttgctcgccttgctatcgttagtctaaattttgtttttggatttttgatgatcgtgttacaatctttcatttgtatggatgcttcacatttgcttcaacttgcaaagttgaagcaaatgttttggttttgatattctgtaacatgatcaaacattcaatggcatgtatctgctttaaagtgttcgaaagtcgtactattgtgtctagataattttcattagcttgaacatgcaaagtctagaactgtagcagtagacgtggacaaaattttggtatttcttctttgtttttcaaactgaaattgacatacagatcatttagatcaggttagcccaggcaaaccagttataatgatctgctcagtcaatagtcacggcctctttgaagtgttgtttgaataagtcaatcgtaaaggtattttccttaacatgaacaaactttagttatagagatggataaaattttgattttcatgaactattctcaaacttcaatgacacgcgaaccagatcagccatggtaattgaaatataatagtatattttctgcctgtcattttctctttggagtgtgctagaaattgccaaaagtttgaagatgcaaattttaggaccttaattgcagagatggattaaaaaaataaaaattaagttcttatattctgcagcatatgctcaaacttcaatttgaccgacaaatcattttagctatggaaaatgacttaagaggatatggtttccgcttcgttcattgtctctctttggggtgttgctagaaactttcaattgtgttgaaattttcactagcttgaacatgaaaaatttcggtagcgtaatggatggaagtttggtttctgtattctttaacattctcaaactgcaatggattagataacaggctagccattgtaaccgtggctttagtatgaattatagtccacttgcagctgaaaaaaaagagctctcgttttcaatttttgtcatattcatttctggaacagtatactgaaagttttgagagctccgtacgaattat

SEQ ID NO: 79063 - DNA, 534 bp, Citrus sinensis
  Intron number 1 from transcript orange1.1g029103m (locus o range1.1g029103m.g) derived from phytozome v7.0 (chr-ID sc affold00196; pos 102602 to 103135)
cgagaaccagcaacaagaacatacaagtcaagctggtgggtatgtctttccctttattttcttctttgaaattattttttgataagatttaattttctgcctgcatggatcattgcattagcaacagggttcctacgttttatttagattcttttgctgctttcgttcttgtgttagatgtatcttactccaggggcttcaagatttggctttctgttgtgattatgttatttttattaattaaaattatgaagatataactgctgctttgattaaattaggaacgaacaacagtttagtatttaattgaacaggagagacacagcatataattagtttcaacttttactgtagaactttgcttcagctgcctattattgctgtttcatgaagattattcagtacccaatatagcagctattatattctatttatgtactactgacagagatccttgttaatgaaatttcttgatctttttttattcagttaattgacacattattgagcttttgccaggtacttcttggggac

SEQ ID NO: 79064 - DNA, 374 bp, Citrus sinensis
  Intron number 4 from transcript orange1.1g047668m (locus o range1.1g047668m.g) derived from phytozome v7.0 (chr-ID sc affold00048; pos 3455 to 3828 reverse strand)
aaccagtgattcgactcaacggcgacgttttactggtaaaaataaaaatatggacttgactggcataattatgcctctgttctgattaaacgttgacgttttcagttatgaaaacagaagttgcattttgttgctacgtattagaaactccttagctttatatgaggattaaatttcgttttctaatatcagattatgatttggaatcaataaaatagaatcaaaagcttatggccatgcgttatccatgatttggaagataatttaatggtttggattagaaagggcctgaatccatgtggagtgtttaaaagcaacgatgttgtttatttgactacaaacttttcttatgaatatagacttaaacagtgaag

SEQ ID NO: 79065 - DNA, 384 bp, Citrus sinensis
  Intron number 1 from transcript orange1.1g012715m (locus o range1.1g010088m.g) derived from phytozome v7.0 (chr-ID sc affold00065; pos 227675 to 228058 reverse strand)
aagtggtatgcatgtgttcttcaaattatctttgtttcccttcttttaattttgggttattgtcagagtcaatttttgatatctggtgcttggaatccctgcataaaaaatcttattccgtcttctaggagatgtctgcctatcagttatgtgaaatcagtacttctcttatcagttatgacatattaaaggacattctacacatataagctggaagaatgtttatcatcacttcttttccttataaaattgtgtttgtcatgcgatggtagattttatttttattagtaaatttgtttctcgatcttttcattcctgtatttaatcatttggttaataagtttatggaaattggaaatgacagtttcagaaccatcatcatct

SEQ ID NO: 79066 - DNA, 572 bp, Citrus sinensis
  Intron number 2 from transcript orange1.1g004153m (locus o range1.1g002335m.g) derived from phytozome v7.0 (chr-ID sc affold00003; pos 1915005 to 1915576)
tgttagcaactgagtgctcgttggctttgtttaaggtattgcaaattctttcattacagtttctctctctttatttttttgtttttcctttttgtgctgcaaaatgtgctgctgacaaatttagggaagtttaaattgtcacataaataagcatagctttgtggtaataatccatctatgagcatgagatgctcttattatatgctatctcaaaattttgtaattggtgcgtggatattttgagagagtgctacaataattgcgtggatgagtaaggtaagtgtcttcgtatatccatgattatgaactcgacgctattctctcgatgtttccttcaggttatctgttcagctggtgatagttgccatgcctgtggtgccatctctattatgcttttaatgtgtggtaacagcttttaattatgtttctggaagctttattgaacatattcttagtggctgagaaaacaattatgaatttgttaagtgcgtaaacttgctcttacatatttgcatagttgtttgttttttatttacccaggacttcctcgatatcctgctccatacccatct

SEQ ID NO: 79067 - DNA, 998 bp, Citrus sinensis
  Intron number 1 from transcript orange1.1g017024m (locus o range1.1g017024m.g) derived from phytozome v7.0 (chr-ID sc affold00153; pos 162825 to 163822)
gaaattctctcagaattcgaaaaaggagaatccaggtgagttctctcctcctggcgactgaagacccttttaaattgtctgccctttttgttacaatccgacgtcgtttctggattaatttttctcattatgttttgttaatgtttatttgcttcttgtatttgacttttgtgtatacccacgattacagtgttatctgggtctcagcaggtgacgagaaagatttaatttgcgttatctcatctgggttttgtctgatctcgtctggggtttgatttgctatgttatttggtgaatttttttgttcgttgttttgtgcttgactctatcatcatcgtaacaaacttaaagctgctttttggaatataatgggggacttaaaactatgagttgcatttgcattgcttgtaatttttatgtgtctattgcctctctctttttggcaatgtctatgtagaaattcgatatacgccattaacataagttggtcttgttttagactcttgagttatgaattttgttttaagttatcagactgttattgattagtcgcttttattcacgttggctagtgagagtgtgagccctttgattttgaaaggatgccttgaatggggagaaagaagtcagaaatgactcaaaactaaacaaaagaggtcttgctttgcggctaacataaaactataaagaaaactacatcagatgctattatatatactctgtttataatgtttgatcgtatacaatgtttaaatttatctgtaattttgtttattgctggcatcatcttagtttttggaatgttttgtttgtttttgttcaaaactataccgagtgccttcatccatgcaatctaaaatagagaagtactggctcacacataaacatggacagtcctcttttatgtcttgctgaagtttgaggtcttttttagctgactaaaaatttgatatgattacatagggctccagtaagtactgttgtgaagttaaaaagtt

SEQ ID NO: 79068 - DNA, 448 bp, Citrus sinensis
  Intron number 2 from transcript orange1.1g019461m (locus o range1.1g019461m.g) derived from phytozome v7.0 (chr-ID sc affold00074; pos 379603 to 380050 reverse strand)
caaaataaaaggtactcggtttctattagggttgcatatatgtatcaacttggatgacatttcaaagaaagtcaatctttttcaccacttccaaaagtattattatactccatcaacaatgaaggaaaaggtggtaccaaccttgttttactcataccatgtgaataatgaagagcggaataacccatagttttgagctgtgtgaattaatttaaccacattatggtagcaaaaatgcaatgaagcaaaaggtggtaaacagttcctgctctttttgcacttgttacaccaagaaaaggacagatgtatgttcggtttcctcatgttgttagagtttatatcatatggcaattattacttgttgggcaaatgctatttttttttcctcatcaatagaagattcacaatttcctctcacttattgggcatgcgttttcatatagttcaa

SEQ ID NO: 79069 - DNA, 816 bp, Citrus sinensis
  Intron number 1 from transcript orange1.1g019461m (locus o range1.1g019461m.g) derived from phytozome v7.0 (chr-ID sc affold00074; pos 380167 to 380982 reverse strand)
gtctaaaccctctcgtgaaatctgggcaaagcttggtacttccattactttaatgctcaaatgctcattttgttttcttgaaactaagtgacagatgaaagattcattatttctctctctctctctctcttttctttttaaccaaacaatttggctaatgggtcctcaatgcatgcacttcgagatattgtgcactcaactatttattttatgttctttttcaaatttattcatgtaagtgattttgttctagaaaatgtacacaatttcagttgcaaggtgaacagaattagagcctttatcaggtttgtgacatttaacataaacccagaatgcaaattgggactcatcatagaaattttgagggaaagaaagcagttcaattacttcaggaaatatttgtatgatgataataagctcccatgtgtagggcattcaagtaagagtttttacgtttagtgcagctgttcaattggatatgaattttttaggcagcttattgattgcatacgattcatgaaaggtattattagtgaatgggttggccatcccttatagaggtcttttgtggattcatcatgttgacattcaattataaaggattatgttaagactcagattttgaacttcttgttcactttgttatttccagatgttgattcttagccgctactaaataagttataacaactaaaaacgtgctgcctgagaatcaaaaacagttgatttggtgctaatacattgactcatttaattttataatttcttcatattgattgattatcattgcagaaccatcagactcaaggtttgccg

SEQ ID NO: 79070 - DNA, 567 bp, Citrus sinensis
  Intron number 1 from transcript orange1.1g023679m (locus o range1.1g023679m.g) derived from phytozome v7.0 (chr-ID sc affold00003; pos 4117677 to 4118243)
tcgggtacacggggttagtttgctttgtattgcaggtttgtcatctggattgttgttccatttgttggctagataagattcaattggactttgtgttttcgggtttagtgataataaaaatcgatttggaattttcttaaaccaagttgattttgattttaatttttaatttcactatgacggtgctcgaagctgtattttatgctccatagaattatttaggtttttacttactgaacataaaatgctgggatttgcttttgtgatcttatggaatttggaatctgctgggtgtgtaaatgtttggtgggattatatggaaagattttatattcttttggatgaaattttgtgcgatgtttcttagcatgtactggattttcctgtgatgtaattgggtcaaatagtatggtgtttgaaaaagaaattgcttcttattcttaccttacctacaaaggtggaggataattgaccatttagaaccaaaaacacaaagcccgccattattaaaccattcaagtcattaactattatacacaatcccattagcaggttaaagtgtagtgc

SEQ ID NO: 79071 - DNA, 509 bp, Citrus sinensis
  Intron number 1 from transcript orange1.1g014946m (locus o range1.1g014946m.g) derived from phytozome v7.0 (chr-ID sc affold00049; pos 372936 to 373444 reverse strand)
attggcagcggcttacaggtggggtttcttttctttattctttaaaggattttttaaagaaaaaaattgttttttgatttataattttagaatttatcagtaacattatagtgaatttggctgaaatttgataaaggctccaaatttattacaaaatttcaaatatttttgttcattaatgacaatgttgaaaatgtattaaaatttttggaattcatagtttcatttcttaaatggtagaaggttgataagcgtttttattattggctctttgagtttctgatcacttatgtgtttactctgttattgtggagtgaaaattttattctatttatgttatttgtaattaagtaatattgttcaaggccatgtaatatatgtgctaatttgtaattatagtccatcatgcaatttcagttgtaggatgtaggcaattttacgatttaaggattatattatgtaagctgttgctaatgttgctcggtttcgtgcctagggagttgatttct

SEQ ID NO: 79072 - DNA, 544 bp, Citrus sinensis
  Intron number 2 from transcript orange1.1g031871m (locus o range1.1g031871m.g) derived from phytozome v7.0 (chr-ID sc affold00322; pos 108620 to 109163 reverse strand)
aagatacagagaaccttgctcgtaagtttctttttttcacatcagtgtttatactctatattgtaggaatttttttcatctgttatacagttcttggatagtgaaatttgttctttgtttggagtttggagttcttgtagtgattttgcattgtttgtgttgaaacaattaatctgatgtgcttttattgtgtacgtaaatgtgcatgaatgatctgtttgcaatgtatgctctgccattttaattttgaagatcgtttaagggcataattttaaagttattttctttattcactcaaccaccattggtgatttacatctcattctgaccaccactaagtcttcatgttcaagtgggtatgccaatgattctgtcaaacttggcccctattggcatagaatttagttatttaatctttgagttcacttttgttgctccgcattttactttgcggcattttcacttatttcagcagatttttaacacctgtcaacaagaggataaatgtatactaaagtgcttttatctgttctatattgtacag

SEQ ID NO: 79073 - DNA, 770 bp, Citrus sinensis
  Intron number 1 from transcript orange1.1g031871m (locus o range1.1g031871m.g) derived from phytozome v7.0 (chr-ID sc affold00322; pos 109224 to 109993 reverse strand)
acgcgccggtgccgatatcgagactgtcagaaaatgtaatattttttgttgttattttatcagatcagtcctccttctctaattaattgttcttttttttcaatgaaagaaaaacccatgtgccgtgtttgatgatatcttatctcatggaaagtagggttttatattttataatttgtaattattatgatctctatatttttgttttaattaatccttgtagaccgttcatgaatatacaatagcgtgtgtgtttatgattgcaggttcttttttgaattttcttttctagggttttgaatttttttgtgatggattcacagattagggtggtttctgtgattttgatggaaaagacaaagatagacgataatgggatttatttttaatttttggttctagatgatagcgtgatttatatttgtttttaaaatatgtagaaaataaattcagaagttcatgtaagataaaatgtatgttatgaaatatgttataagcccatcttgtatgattttgtgccttctttttagtatatctatgactttttctacgattgggtaaggggttaaatctaatgagctttatatatcaacctcttctgatcactgtggaagctttatttgattttttttttaattcttgagatttgttttcatatgtatgtgtcaggacttgtgcaaatctgtgatctttcaaacttatgtttgtaattgtaagtgtccccatgatttgtagtccagttgcttacatcttaatttcccatacagcac

SEQ ID NO: 79074 - DNA, 827 bp, Citrus sinensis
  Intron number 1 from transcript orange1.1g003469m (locus o range1.1g003469m.g) derived from phytozome v7.0 (chr-ID sc affold00050; pos 254209 to 255035 reverse strand)
tgttactgaagcttttccttgattcgttttagcgtgtgagttaaactatgttgctttggctttttttttttttttttttttttttcccttttttgtttgtttgaagtgatgatcttctttactggctgaaatgtgaatgggaccgttgttattctttacttggatcgttgattaaagcagcttttttttttttttcaaatttttggtttattttatatgctgccatatgattttgccgattgaagatttgaacttgaaggagttttttatgaatgaatcatatagcatttatttatttatacatgtgtcacttgctcattgttgttgttgctaataaaaagtgcttctcgttggtgatcaaaagtgctttcatctctcggattcatacttgaacaatcagtttgttcttctaaaatcagcgtgtatctgctgtgctgttcgttcaagtatgtatccagcaatctgatcgtcttccaagttttttttaattattattattattgtttattttattttacctgtaaaagaatggatggattagtctgttatttagttggtatggattttgacgagttcaggtgtgaaatgataatttttttcccttgtataatttttattaatttttaaactcagaaatctctcctgggatgcagtgggtttgagattcaatttttagtttaaaatattaactttagtcaaactttaagcttaagtaatcagctgtattattgatatggtcattttcattgtatactgggttccaattaactgtttgttattgcaatggaacagatcttttgggctgcttagattggcgcttgatcagc

SEQ ID NO: 79075 - DNA, 786 bp, Citrus sinensis
  Intron number 2 from transcript orange1.1g033805m (locus o range1.1g033805m.g) derived from phytozome v7.0 (chr-ID sc affold00062; pos 202099 to 202884)
gctcaaatcggccctacacttcatcagaagatcaggtttgatacacaaatatcataaatttaatttgccgtaaaatacacaattactatggaatgcattcttgggtgaggatcaaaggcgcattaaggcaaatgtggtcaccctttacaaatacttgtagcttgatttttaccctctgatcttgatttcaagtttttgttcaatcaatgttttaagtgtactaaaaatatatgcatctaaactctcgatagaattcaaatatatatgtatatatttaaaaaatatatatatatatccgcaggaatttaccttctctctctacccactcattctctctctatcattttcttcactatgtctctcaactttctctctctctctatccttttcttcactacttctcccgattttctctcagctttctctctatttagcattaaaaaaaagtacaattatttccccggcacgatctatcatacgaggggtccaaatgatactgtcacaaattttttttttattaaattttacaagtttcttgttataaactcaattactttctcatcatttttttttaatttttgggttatatataatgtatgtgataattaaaacagtcattaaaaaattttgaaagggggtggcgtaacattaaattcgttgcatggtaaagatgacttttttaattatcattttctacttttgttgactctggatatatttatgaaaacactgaagacttatatatatacaggtggtcccgcagattgaaaagtagaagaggttata

SEQ ID NO: 79076 - DNA, 469 bp, Citrus sinensis
  Intron number 1 from transcript orange1.1g020801m (locus o range1.1g020801m.g) derived from phytozome v7.0 (chr-ID sc affold00094; pos 440592 to 441060)
taactgcaggttcagtttttgttgtaacaggtaagccgcttaatcgtcgacatatattatattagaggcgtcaagttagccgtacaacaatttgcatgttatcatgttggcattaatttttataactacgcttaaatgagaatacactcgtgacatattttacacttggtgtttgtgtactacctatgttgtatagaagattttctcatctgatataagcgggaatttgagtattaaactttgtttcattgaacgagctagtatccttattgattcattaccctactcaaccttataaatacctttttttttgggtggcggcgggggggggttgtcggaaatttcttagttttaaaaatgattaatattgcatgcatcttttgcaactattagatgatttgattattattattttttttttcttcttcaaatagcaggaacagagaggttaagcattagtgcaagcacc

SEQ ID NO: 79077 - DNA, 574 bp, Citrus sinensis
  Intron number 1 from transcript orange1.1g016498m (locus o range1.1g009144m.g) derived from phytozome v7.0 (chr-ID sc affold00135; pos 259845 to 260418)
tggattactctatcgaacaaacaaataattatccggtacaattactattcagtattattatcgtcttcattttcacttccattatttttgctgagttttatgttgtaagctcatgtagttttgtttagtttctgtttttttatcttctataagcttgtttttatactagtgtaagcagatctgagctagtttattgaaatttaaaacctttcctgataatttattaaaattttgaaagtacataatggtcttctttttttttaatttgttgcatttattgttttattacttgctcaatttgtttagattactttaatgggcagtttctatgtatgttgattaggagttattattggttgcagattctgcgtacctgattgattatgcgagaatgatttatttatttaatttaatttgcaggagttcacacttgatctacttttgcatcaaaatttttttttttattttgaattgcaagtgtgtggatttgagaatctgaaagaggaaggaagagaattgaagtgggtttgatttaagttttgaatcggagttgttttctgttggcttatagtga

SEQ ID NO: 79078 - DNA, 855 bp, Citrus sinensis
  Intron number 2 from transcript orange1.1g022337m (locus o range1.1g022337m.g) derived from phytozome v7.0 (chr-ID sc affold00050; pos 576563 to 577417)
ctcttccagattccggctctcttcgaaggttatattcttcttcttcttctttttttttttgagttttctttcattaattaccacttaatttattatagccttaattaattgctgcgtgttgtgttggtcccgttgtcttattcttcggcgcgagttgtggctgtagcgccttatttatttatttatttttaaaataattttgttgtccttttctttgttccacttctcatcggaaactctagtaggagtagcctaccgcccacgtgttcgtggtagtagagattagaaagtagcttgtttgtttttttatttttttaattaatagtttttcttagctttctttagcttcttctaaagatcttgggagatttctgtatattcgtagtaattatgtacgatttacatatatttttaactgttttatttttccactatctgttacatttatgtatttattagggggtaaaagttcagataaataaggtatcctagtctctatttagtgttgaagtactggacttttaatcggcggctgggaaattggattactaaaaatagaatagtgatagacacctcgaaaataaattcggattaaacctcacaaggccccccaaaacaaaattgtgaaaaaaaggtggggtttattttcggacgacaagcattttccataaaaatattgtaaatgagtaagaaggtaaatatattagagatctatggtggaatttgacataacattttagttagaaatctattgaagtttggcctgcatcatttttttattataacacagtctaaaatatttttgaagtcatttattaatccctctttcaggcacagttgtcgataatattcgat

SEQ ID NO: 79079 - DNA, 456 bp, Citrus sinensis
  Intron number 1 from transcript orange1.1g014774m (locus o range1.1g014774m.g) derived from phytozome v7.0 (chr-ID sc affold02464; pos 11318 to 11773 reverse strand)
ctttctgtttcgtttcaaatttataactgttaactgtaagctctcctccattttcctttttgctacattatacgttttaattgtttgtttgagcattgaggaaaatctgtacattttgaggctttaacgtgaatttatgcaaatggattttgtctttagctttcgaattgatgcatagaatctctatttttcttcctctgtgtataatttgtttgaatttcatgtgggtttttcttaaaatgtttgattctcatctgggttctctcaattttgtatcatttattaatttatctgaagttggtttctagttagttgaaagaaaaatctcagattcaagcttatttgagttgattaatgttcgttaatttagttacattctttattttgacgttaattattgcttattctacaatacttattattgactgcaaaccgtttgattgttgtccttacaga

SEQ ID NO: 79080 - DNA, 419 bp, Citrus sinensis
  Intron number 1 from transcript orange1.1g029912m (locus o range1.1g029912m.g) derived from phytozome v7.0 (chr-ID sc affold00014; pos 891340 to 891758)
aaggtgcccccaaatccaaaaacaaggtaatgaattcgaatttattagatcccatgctggtttgaactttgttgaacttttaattaagatcttgcggctcgtatacatttgtactgaattcgtgaataagcttgaatttcataaagaaagaactgttttccctttaaaattggagaacaatattatgtttccttttcaaagaatagtttcaattttgattatttaactccccaaccatctggtatcttctcatgtattttattatctaaaaactattagacaagttagtacttgcaacgaatgaataatatagatggtacggcgtcggtaagtaattatattataacataaatggtaataatatggctttgtattatgttacaggaaaattgtacatacgcagtgacaatagaaacgac

SEQ ID NO: 79081 - DNA, 633 bp, Citrus sinensis
  Intron number 1 from transcript orange1.1g033662m (locus o range1.1g033653m.g) derived from phytozome v7.0 (chr-ID sc affold00510; pos 23782 to 24414)
tatcagtgcaagaaattaggcgaccctttgctttggtaagctaatgtaaggcataagataaaagcaagagaagctggcacatataaatagttgtttgctgtacctttaggtaaagtcttgggtatcgattattggggttaggttgctggataattcattattgaatggttcatgtgcttggaatgatatttacctatttactgaagaagataaggtttaagactttgtccacataccattggtttgaaatttgtatgatacatatggtaagggtgtttttgctatattaaagatgttctcctataaaaacttatactagggtgttggcataattatggttaatttgtatgagatttaatctttattagtatattagttttgattattataagtttatgccgatattgtgcatcaattatggtgctaattggaatattgaaagaaacctcttgccttgtcttctaataaagtggaatgggactaagataacaagattcattaagtagatgcacaagcaaagaggcattggtgcagaaaaggtccgtgaaaaggaatagtattgtttagaataataatggttgaaatgatgtatgatgattgtttattataaatttttggtgtaggttacactat

SEQ ID NO: 79082 - DNA, 554 bp, Citrus sinensis; identical to SEQ ID NO: 78613
  Intron number 1 from transcript orange1.1g004623m (locus o range1.1g004634m.g) derived from phytozome v7.0 (chr-ID sc affold00014; pos 1556752 to 1557305)

SEQ ID NO: 79083 - DNA, 561 bp, Citrus sinensis
  Intron number 1 from transcript orange1.1g040085m (locus o range1.1g040085m.g) derived from phytozome v7.0 (chr-ID sc affold00005; pos 129496 to 130056)
tggcctcaaggcaaccccagcttctggtgtatttttttttttcttctttttaatgagccttcataatttcttttctcataatcttttacatgttttttgttgtcgatttatttgatccgtagctaacgttaacatgcactcatatacacacacccaaaaaaaaaatgttcgtataatacagaaagctgcaaagttgatggagtcggacaaaatttcaaatatcaaattaaaacctttatttttttttatggatttttatttttcccagcttggaggattggttagaacccaggcctcaatatagtttcgcctccccctggctgctactgagtgccttcagtagctatcaatgccttatttattagtcttatccttaaaaccaaaatgtagttaatgcatgtgccagtatagaatgattgttctacctcaaactgcacatgttcttgcaggaaaactgcaaacagacatagaatcagttccttgaaatgacaatgtgtttgatttaattttttccccttttgttgtcgtgatagtgaaactctcaagtcagtgacctcaaag

SEQ ID NO: 79084 - DNA, 791 bp, Citrus sinensis
  Intron number 1 from transcript orange1.1g021558m (locus o range1.1g012433m.g) derived from phytozome v7.0 (chr-ID sc affold00011; pos 32587 to 33377 reverse strand)
acaacgtcgttgcgattttgaacgagtgagtttgctggtgcaatttttggctaaatttaatatctgtttaggctaaactttagaccttttagctatttgcagaatttcaaaattaagcggaagcacaacaattacaaatatacccacaattttagataatgttgaaggttgaagctgttttattgacaatcaagaatttttgcctactcatatttttttttatgggcaaaaaatatgattttttttttaactagttgatgtttatggtaaagatgggcatgagtcatttttcaatgggtgcattttcatactcatgttgatttttgaggtgtggaatcaggcccaaggttttgggcttttagtctgttcttttttttttttttttttcttgaatgagtgctttttattctgttatagattagaaaagatgtgtgtcattaatttctttccggatacatctttgcgtcatgcagttattgtttggaatttttttttgattttttcctttcttcataagtgatgcagccatataacatattctaacactgtggaccaaaataccaccagaataccagattcatgagtttcaaatgatggcagtttatctaattatattggtgtctctcgtgtttataggagtattatgattagtttcatgaattatagaacaaaagtttttgtcaactcttttttttttttgttgatagcagttccgttttcacttctcatgtatttgctattcgatgtgtatttcagcattgagatctacaagcaccccaaagaagaaagga

SEQ ID NO: 79085 - DNA, 791 bp, Citrus sinensis
  Intron number 1 from transcript orange1.1g048070m (locus o range1.1g048070m.g) derived from phytozome v7.0 (chr-ID sc affold00880; pos 51221 to 52011)
gctgaagcaactggggtctctgataccgctcaagggtaatttgtaattatatcttcattttttaaaaataaaataaaatgcatgtcattttcgtatgtaaatataattttcaaaataaatgccatatgatcgattcccagtttctctttcaagtcatattgaaaacttggaattttttaattttatttatgttgtgcattttttgtaaactatgggttgatgccctacttttagatgatgcaaaacgatatttctttgaagtgtggttgaaaaggctctgcaaattgtttttatttggatgtccaaaaaaatgtctccagaaaagggagtttgtaaattcaaagaaaagttaaaaaagaaaaaaatcagacgatcgaaaaacatttcagaggaaaaaaaatcataaaaaaatttaatgtgcctttagtattatttttcaaatggttttgtatttattttgtaataaagaaataattaatttttaattgctaacactttaattaaaatgtacttatttaccgaaaataactttaaattaatttatgttgagaagcgcttttgagggcactttcatttctgctggaggatacactagagatgatgggaacatagcagttgccgagaattgcacagatttggttgcttttggtcgtttgtttttgggtaatccggattcgctgaagcgctttgagctgaatgcacctttgaatgaatacaaccgaagcacgttttaccttcctgatcctgttgttgggtacacagattatccattactagaaattccttcttga

SEQ ID NO: 79086 - DNA, 536 bp, Citrus sinensis
  Intron number 1 from transcript orange1.1g028655m (locus o range1.1g028655m.g) derived from phytozome v7.0 (chr-ID sc affold00003; pos 2628739 to 2629274 reverse strand)
gttctggttatccaaatctcctacttcgcttcagggtaattccctgcttttcttcttcctctgtttgcactctccttattatttttggtagatttgtcattgttcatgttaatgcatgcaaaatttccgtttggcgggtttgtgattcttttatgatcttgcttatattctcttccgaatgaatgaacaaaatgtttttggaggagataagcaattagtaatttggttcactagaaaaacaaatgaaaaaaaaaaaaaagttgttagcttttgattgattcgatgttttgagaacagagtacctctgtttttattgtcttcattaaacggaaaaaaaggttgaaccatttattcataaaaattcttacttttaaagtgtgcttgctccttgcatatgatattcttctgctttcattttgtttttggaagaaagcttgagttagcatatttatttggtcagtcatgtcaaattagcacaagaagaaaatgataatctaatgttttatgtgtctttctttcatttaggtccacaatct

SEQ ID NO: 79087 - DNA, 413 bp, Citrus sinensis
  Intron number 1 from transcript orange1.1g009704m (locus o range1.1g005851m.g) derived from phytozome v7.0 (chr-ID sc affold00386; pos 102478 to 102890)
gaagaagaaaccaaatcgatcgcctcgaaattcaggtatttttcttttcttgttctccacagtgatttgtcggtttggttcccgagaaaatggagaggacaatctttttttatttttttaagaaaaatgtgaaaatttatttaaagttgagttcttttgttaggttcatttaagtactgaagtaaagaattttttttttttttgggtaaaatgattgacagatgtgaaattttgaatggtaataatttgctttatttatattctttgacaactgtaaatagaattttgaatctaagttaggtttttttttttaaaggtaattctgttattgatttggactttttttttaaaagcaaaattatcttatttttgtttgtgcagatttgggctctatagaagctgaactgcagtct

SEQ ID NO: 79088 - DNA, 770 bp, Citrus sinensis
  Intron number 1 from transcript orange1.1g028009m (locus o range1.1g028009m.g) derived from phytozome v7.0 (chr-ID sc affold00011; pos 103266 to 104035 reverse strand)
tctggagcaccgatcaccccggcattgatttcactgtatgtatggagattcgcgccgttttatagtttcactgcatcgacttgttttattaatgcatgctgttttggttcgattagggttaaataagtagagtttgacgaaattatgaacttcttttgcttctacattggatttcgctggtgaagtttgcttccttttagggttttgcatttaacttaaaacttgcatgtttggcttaaaattcatcaatatttagtccataaacttcaattttgatttgataattttattttgcatagttttggatattgatttgtaggtttagaggctgaggctttatactgattatgcaaaattacaaacttgagatggaatagtcattgatacattgattttgaacaatggtggaatgagcaatatgtgcataagaacttggaaattaagaaatcattagtgtggttgtttcttgaaattaagggtttacaaagtccttctagctatctgtttaggttgactgtacggattatgagctgttctgctttgggaaccttggttttcttcttgtggtcatggagtctctatacatatatgacaatcgccaatattgtggtttatgagctgcatttgtcttatgtattattttgacacattgagcaatttaccagatagcgacactatatgttagagtggatattagattgatttatcatatgttagtcgagcatttttatcatcttgggttttcatgcaggtgacatctcctgctggaa

SEQ ID NO: 79089 - DNA, 513 bp, Citrus sinensis
  Intron number 1 from transcript orange1.1g023947m (locus o range1.1g019149m.g) derived from phytozome v7.0 (chr-ID sc affold00005; pos 1866848 to 1867360 reverse strand)
ttgcaccttttgaacggactaaaatactcttgcaggtgaatacggtttttcagtttcattcactcaatttttatgttccagacagtgtaaatatttctaaaggattgtatgaatgagggtaattttatctgcatggtatgtgcacattttatattgtagattttttctttggttacattgcatttatttgtgctgatggtttgtttatgtgtggttttgatactaatagttctggggtcaatgtgtaaacatcaattaaatgatcaaaatgtgtatttagcttgggatgaaaaagttttatctgttaatgtagttgtgttagtttattacattatgctttcttatcttttgagcgagctgggcatattgcatgttagctcattctcatgttgctgagttatttgtttgaagcttatcatatatgatctctaaatagttctaactctctcattatcacttgcattgactgattctgtagactagaactgaagggttccagtctcgtggagtgta

SEQ ID NO: 79090 - DNA, 316 bp, Citrus sinensis
  Intron number 2 from transcript orange1.1g011018m (locus o range1.1g011018m.g) derived from phytozome v7.0 (chr-ID sc affold00014; pos 1774563 to 1774878 reverse strand)
attcgccgtgttcttattagcactctttgcattcggtatgcatgtgtgatcgaaatttaatttttcattcttgtttcggttaataagtttgtttttgttcttcatatgtaagcttgaattttttgtttgaatttaaaattttactgtttattaatagaaagattacatttttggtaaagcttgtttgtggatgtattgggtactggcggaattttgattagtgtaggttttttgactgttaattctcagtagtagaatgcactattttcatttgacattatggattttgctggtgttaatggcggtgggtcagtgg

SEQ ID NO: 79091 - DNA, 755 bp, Citrus sinensis
  Intron number 1 from transcript orange1.1g035229m (locus o range1.1g035229m.g) derived from phytozome v7.0 (chr-ID sc affold00003; pos 38566 to 39320 reverse strand)
gtgttaaacactccgatcaactgcatactttgcaggtaatattttgcaatgattgataatgacatgaaaagttcacttatgctcttgttttttaaatagacaaagtgcttttccatttgtcatctctgatgctttgtcactttatgctttcttagtctttctcttgtgctttcttctagattctcagctgtttttatgataatattcatagtactcttaattgtcttttgagtttctcttttagagaatgttaaagatctggcaacaagacatatagtagtaggaagaagaaatgccaacattttcaagaatttaattcatcctgtggttagctctattgtgaaatggttaatggtattcagggacctcctgtacctctcgattaatgtatagatagatttggatggtttcagatcaatgtaaatagtttgctaaattctcgaaatcttcagttagaaatctgcaccgaaattcatgggaagctaccttagaatcagtggagaactctctaagttctatgtagaaatcaagtttctaatcatatcagttaagcttaccgtaaaaaaatttcagttggaaggagtgtctgattcaattgaaaattgttcattattggttattggcgccattattcactaatgtatgcaaatttatctttattctaatcactggccttgcctcagctggttagatgaatgctatctcatttctaaattgtttgttgctgaacatttggcaggctgtgagggagattt

SEQ ID NO: 79092 - DNA, 879 bp, Citrus sinensis
  Intron number 1 from transcript orange1.1g007490m (locus o range1.1g007490m.g) derived from phytozome v7.0 (chr-ID sc affold01645; pos 5004 to 5882 reverse strand)
tcctccacctcctgcctctgtaacgagacttcaaggtaaagttaaaattgttaaacgcactgatttctattaattattttaaccaatatgtttcatcatgacattttttgtgagtggatgatgatatgatacttcaggcaccgacaaatttttatttgtccacagtgatcatagagttataagtagttgtataaatttattatatacagattgatgcaacacaaatttattaattggttgaaaatttaaaatgataaaaataaatcgaaaaatattgtatatcctattaatcgaattatgtcacatcaattatataaaataaatttttataaaaatttataattctatcgttattctttaatttaaatattctagtgaaaatctttattctaggtaaaattcaatggttcggctgagacccatatccattaaattagaaaatgaataaacaagttgaacatctgagttggcagccacgaagagattggttcgataaaaatatcacggaaacctcagaatatttgcttttactttataattaatccttcttgcagtgtttgtacaattatatatcatcattatattgactagaatcgttaggtgtaatggccttatctctcaaataaatttcttttttaaattttgggtacagtgatttgattgtcaacatgattgataatcttgaccgtttgatccattaggccgttaatctaattaagaattctctgaggaaaaagaagatagaaagatggatgttaattttggttgtttaatcatttagtttgtcgttttacagccgtgaatttatacttttaccaaacgaaacacattactgttcttgcaggaaaaagtggtctctcatcatcaacaattatcgcc

SEQ ID NO: 79093 - DNA, 636 bp, Citrus sinensis
  Intron number 1 from transcript orange1.1g036903m (locus o range1.1g036903m.g) derived from phytozome v7.0 (chr-ID sc affold00359; pos 26460 to 27095 reverse strand)
tactaaaaagaaataaggtaagaatcgacagccatctttttagtaagtttatcattacgtactcatagttagtttaaaaattatatttgtatagccaaaaaaaatgaaattaaaaaaaatcaaacaggataaaaatttttagtgatacaaaaattgcttttatgattgtctatatgagtgcaatcggagttcaaatgttcaaactttaatacatagaccaggacactttggctcctagatatgccctattaagctccattgttaatgaatattagattaactaatgatgcgatttaaaaccttatgatggttaaaaatcttggcttatgaatttgctaaaatgttatcttctcaaagttttagagaagtagagatgaggatgaccgtgggtgtcgagagcaagctttcatctatcaattttgggatattggacggtgtaattttttattcttcaaatttaatgaagtgcgtgggcagaaattgagtgttctattgtagtaatttgaaggtgtaaataaccgcacacattaatgaacgcagattttttcttcaattaatgagctctttacaaattttaccgaagtcttttttatttttatgctaatttattgtttacttttgtttataaggggacgg

SEQ ID NO: 79094 - DNA, 429 bp, Citrus sinensis
  Intron number 1 from transcript orange1.1g007112m (locus o range1.1g007112m.g) derived from phytozome v7.0 (chr-ID sc affold00005; pos 1080614 to 1081042)
ctttcagtcaaaagacacacttttcttctggtacctaccattaaactgatctaatctatctattcccactttgttattttttcatttcatatttgttgaatattatcctattaatatttgtattatttcttttttttcttcgaaaaaatattgtaatcaaatgaaccccattgattctttgaaatccaatttgtacacgtgggcaatgtatcttattcattccatttgacaacgaacattggaaaaggccaactcaccatattaaaaaaaaaaagagacttttcttacttttcgttgcttataaatggtgggttcggtttcattttagcaaaacattaaccgtcgcagagttatttgctttctggtttgttttgcttccgctttgtgttattagtctttgcagaaactattgttgggtaggggggaaag

SEQ ID NO: 79095 - DNA, 640 bp, Citrus sinensis
  Intron number 2 from transcript orange1.1g007112m (locus o range1.1g007112m.g) derived from phytozome v7.0 (chr-ID sc affold00005; pos 1081170 to 1081809)
cagcttatcactccttggactgtctctgttgctaggtgatcacacattgcgcaacttcatgttttgcttgattgtttcttctgttcatatgttcttgttctttaaagttttgatctttacttagctgtttgtttcaattgtgtttgtgttttggttgaatggttctacttgtacagcttagtagaagtgttacttagatctagagatgcataatttgaaaagtcaaagcttgttgattactgattatttcgtgatcactcaaacaaaagaaagaaaactatggttctttctcaagagtcatacaacttctatatgtaattgtttttcacagaacctagatctgaatatgatcccagaaaaaaaaaaaaggcataagaagaagcttgttgaatgaggagaggctgttactaatttgaatctcgagaccaattcagtatatattgtgcacttggccttaattttcctagcatcttgtatgattctttcgatatgaaatacattgtttgagcctatagtctttgatgactgaaagggaataatttatttatttaccattgtttgaattgttaactaacaaatttatttgatcatcatattcgttgcagtgggtatactttgttgcgggaccctcgtcacaaca

SEQ ID NO: 79096 - DNA, 642 bp, Citrus sinensis
  Intron number 1 from transcript orange1.1g029828m (locus o range1.1g019781m.g) derived from phytozome v7.0 (chr-ID sc affold00472; pos 19380 to 20021 reverse strand)
gccccacaagcgaaaagtcaacgttcgtaaaacaggctagttttctcttctaacacgcacttatgcatggtttattttttaatttcatgtctgtgcgtactgttacatattaatatattagggttacacattacataagtttcagccattaggatgacatcctggattacgaatacattatccacagtttcagctattactattagggcgacatgctgagggacactgaaacgatttatttctaagcacttaatttttggcctagaattaaaggttggaggggtccaagggttacccaaagtattgtgccttggttttttgggggggtactgagtgttgtatatttgactttgatttaaaaactaagataggataggtttattgcttatctcgaataatggcttatatgaacttgcaacattgatactttggtgtgtttggcagccattttgtttcagtgttgatattgctgaaaattttcactgatgctccccccccccccggccacaaaaaaaaacctggtctattgtttatcgtagagtttaagaacgtgtttcgtaaaatctcaactgatgagtatttatgtatatgtgtggtgcgtatgcagtcaaaattggtaggcctgggtatcgtgtgacaaaa

SEQ ID NO: 79097 - DNA, 563 bp, Citrus sinensis; identical to SEQ ID NO: 78821
  Intron number 1 from transcript orange1.1g002402m (locus o range1.1g002402m.g) derived from phytozome v7.0 (chr-ID sc affold00259; pos 154708 to 155270)

SEQ ID NO: 79098 - DNA, 721 bp, Citrus sinensis
  Intron number 1 from transcript orange1.1g033677m (locus o range1.1g033677m.g) derived from phytozome v7.0 (chr-ID sc affold00003; pos 3363085 to 3363805 reverse strand)
gagatctctcatcaatctgattcaaataacccagggtcagtttttaactggtatttcttcaaatcatgctttattagttacaaaggtagtacatggttttcttccaattgtttgatatacttgtgattttatttattttcactttgatctttttgtgattgctagaacacacttgcattgtgaaataaatttcataaagatgattctttgtacattctatagatattgttgttgcttctgtagcacatgaaaaactaaggagatcgtagatgaattccagttaaaatttcacagccagaagtacttttcttatctgatatttttgttcattcttagttgttgcatgctatcatttgtgttgaaaaggttaatcttctttttgttgatttttgagaatagaatgacttttagaatgtttccaaaaccctaccatagtatttggtattaagtttcatgttttcaattttctgttgcagggttgacaggccattgtataatgaaaatcatttgctcaagcgtagagctaaaactagctcctgacaacctctattttttatttaattgtttcatgatgggtttactttcagatttcaaagccaagttgtttagaacattgagcatgctatttggtgtggactaaaatgctgtttgagatgtagtatattttcagtatgctggtaggccacgttatcttatgtgtcttatactctgtgacagatac

SEQ ID NO: 79099 - DNA, 641 bp, Citrus sinensis
  Intron number 3 from transcript orange1.1g027648m (locus o range1.1g027652m.g) derived from phytozome v7.0 (chr-ID sc affold00374; pos 98817 to 99457 reverse strand)
ccggaggattattagacagccttcaaggtaatggttttgcggttccagtagataaatgattaatctaaacttcttttgaggcttccatgaaaaatttatatgcatgctctttataaacttttggtctctattttcatcctcattggacataacattgtgagagaaaggtaatagaggtgatgtagacaattattttgttttttcttaaattagcaagtgatgctcacgtctctatgggatagcctagttgttttggtcttttcatagtggttgtacttagtctagggaactgatctcactctcaccaacttggagaggaattaacttaatttatctttgtgcatggtttgaaggggggtgggatggggtagggggtgtggaaacgtaaaacaaaaaatgtaagtgataattctaaccttgatagttctttctgtatgtttcataagatattcattataatttagtctctgtaattgatagtaagttcaaatatttggaaggaaattttctctgtactggtgcttctatcactgagcagatatctgcctatcaatcattatcttcactctggagtcagtatatgattgatttttctggttttgaattgtaattgacagaagtcacagacctggcaattttgt

SEQ ID NO: 79100 - DNA, 621 bp, Citrus sinensis
  Intron number 1 from transcript orange1.1g027648m (locus o range1.1g027652m.g) derived from phytozome v7.0 (chr-ID sc affold00374; pos 99862 to 100482 reverse strand)
gttattctcactcaatcaaaaatcccaacaaagaggtacgtacatgcactcgactcgacttgttaattttttttattttttatttatttaatctttggtgaaaatgatatttctttcactccttagcatttaaagcgtctgtttgttgatcttttttatgccttcttgtttgatttgatcatgttcttgaacaaccatacatcaattgtaggaaatgtttggttgaaattgcatcattttaattactttcataccattttgccctctgggtttgacatgtggtgtttaagcaattttccttggctaaaaaattgattttgggttttgcccactctcaattttttttttttttgttaatatatttgtatataataaaagaaaaagtacttgcaaatcatttttggattctgcagattctttggttgctcttcatgcaaaatgagcttattgaagttctgcatttttttttcctcttttatacctgcgtcgcgcggctgatttcattgacatactgatttgttgattattgtcgatgtttaagttctgaaaatagatctatactgctcttattagtaacttaattctcttcagatattttgggcttgaagctctgacagcagc

SEQ ID NO: 79101 - DNA, 964 bp, Citrus sinensis
  Intron number 2 from transcript orange1.1g048034m (locus o range1.1g048034m.g) derived from phytozome v7.0 (chr-ID sc affold00218; pos 8774 to 9737 reverse strand)
cactttatctggtttgctacattctcttctttttttcttgttctttattattccatggttctgattaggtggtaacaagtgatgatacataaggaatttggatcatacatttcaagtgactattgcaacaaaatgaagtttgggggaacaagaatatcatggatttttgtccctcttgtattggcacttcattcttgtgttacccccttaagccccttatccaagcaatttggaatcaaaagaatgctctttgaaattttttctgcctgaattccaaattctccacactgacttttcctcattactacctattattttaattccctcttgttagataattaatacacttgagctgcacttgattcttttgaatgattttccatttctaatgaagctgaagtctgggtttgttttcagaaattttggatgtgcttaatcctaggtgttaagatctttttctgcgtttctttggctgctcccttttatacttagtgtactatggtttccacatctttcttggtgttttggaatattattgtgtaatgaaacaaaaacagaaacaattaggacgagaaactttatggaggaaaccgtcttcactatatttagaattttgcaaagagacaataaaacctttatcacaattcatgccatgatttgtgaattaatggttaatacaaagttattggttgattctgataatgaaatgtataaagacaatgtaagtgctagtaatttggataaagttaaaaagatattaatcatcaatagaagagacttaatcttatgtttgcggcttatattcataatacatcactttgttgcttacagatgtacttgtgtggtttctggtgcttttaattggtcttttaggatagtacaataatgctctgcctttttggtgtttatactttttacctttttgtttcttttaaaggctggagagaagcggaaggaagaagaa

SEQ ID NO: 79102 - DNA, 553 bp, Citrus sinensis
  Intron number 1 from transcript orange1.1g048034m (locus o range1.1g048034m.g) derived from phytozome v7.0 (chr-ID sc affold00218; pos 9999 to 10551 reverse strand)
cctttactctgctgccaagtactaaaaccctaaacccccaattacttcattttcttattatcgttatcattttttgatactttaattattgtttttaaggtcattcttcgtttatatgaagtactaaattggtttgcattttgtttattgaagcgaaaaagggagttttcaaaatgccaagtagatactacctaaatatttgatattggctgtttcttttatcattatgtctccagttattaacaattagcttgtgggtgctgtgtttctgtaataaatgataacgctacagtgttgatgctccattggtgaatgtttagggagaaaaaataaatcaaatatcgagtttagtgttttgcatgttctcttaaaatttgagaatgtggaaatcaatttgagctaaatgattgaatcgtgctcatttcgaatgagtaaccgaagtctggaaatacttactagtttaagtttgccatttgattttagtatcaatgagtattcttgggccattatatattcagggcagcagaacagctggtgggaatcaagcaagacc

SEQ ID NO: 79103 - DNA, 956 bp, Citrus sinensis
  Intron number 1 from transcript orange1.1g025868m (locus o range1.1g025868m.g) derived from phytozome v7.0 (chr-ID sc affold00062; pos 536919 to 537874 reverse strand)
gggtttctcgcctcaaagacacagatctcttcactgtaagattcagattccatttttcaaattctacgtgctgcggtgaatcctctgttgaaaagtttaatttttgaggcaaatgtccatttgggttcgcgttattctgtagcagggatagttttcttagaatcttgttaatgaattttcattttgtaccagtgacgttattctttgattaagaaatctagtctttgtatggtgagttcttaactttgctgtatgtgtaggcgtaagaatgtggggaggtcaaaattttatattattggtcacttagtaattaagatgtaatatgaaatgaggcctgtaattttgtagtccatagagttagctttgagctggagctcaagcttcaatataatttggagcttggtcctttttgcttcattttgcggacgagtggggtggacatgcatgctctggtcctttgcgataggatattgattgacctggaaaaataacagagggatttccgttgcaatatggagatggttggtggtggggaaagaaagggtagaaaatcagttaatgaattgtgaaaacataggcgatcaatcagggatgagatagggaattcggtcgagtttactaacaagaagcagggaacgtgtggagaaaacaaattatatggagattgagatagcggaaagaatttttagtatggatttcaagcattaattcggaggatcaaagttaaaaatggtccttggagaagtgaacggcaaggaaattgacttgttgaatggtgaatgatgtggaatctgctctttagattaagatctttatgtaggcacgaaaggttttcctggatatatggctaatttatattacattgagaatgtcttcttttgaattttcctgttctcatagttctttgtttatgttattaaggtgcaaaatttctttacatctgctgaatcaaaggg

SEQ ID NO: 79104 - DNA, 898 bp, Citrus sinensis
  Intron number 1 from transcript orange1.1g023434m (locus o range1.1g023459m.g) derived from phytozome v7.0 (chr-ID sc affold00057; pos 365957 to 366854 reverse strand)
gcccaaaatagagagcaagagataaaattgaagaggtgactgcacgaccttagattacaaatatgtgttaaactttcaattttgattgataggatttatgtctttgcttggctatatttttgagcccttttatggattgtggtgtttgatgataatttggatgctgtgatatttggtcacagataactcattttcttctgaaaaccaaactattctatgtagttctcttattttgattggttgcagttatagaaatgattcctagttgaatttgatatatgtttcatgttgggctacttcagatttctgtatttcgctgtttgcctgatttttgtattggatattacaagttggatcattacacagttaataaagtggaacttcgacatcttaacaattgattgtctggtttagttgcattgctcgcgctgtccttgtgaggctaagtagctagaatggtatgggattaatttcataattttgcactggtgaaaccaatttatggttcggagaaaattgacctgtcactgaaaacacactcttgagtagtcctaatacctggtgtttttgttgaacactcttttcgagaaaacgtcccaaggttcacgtaaatgttggaagtttttcatgtcggaggctttatctatagaattttgtaactggtgtaattgcatgatattttaatttcttgaagcacaagcatttcgatacagcatcatttaggccttttgactagtttccaatgcttatcagctgattaaatcaaagacagatcaatagcttgaagttatttctaatagctcttttgttttggtttcccttcttttctccattttcctggttctcttcaatttcccttcaagtgatcctgccttagtttaaggctcccctgtggaag

SEQ ID NO: 79105 - DNA, 679 bp, Citrus sinensis
  Intron number 1 from transcript orange1.1g012761m (locus o range1.1g012761m.g) derived from phytozome v7.0 (chr-ID sc affold00003; pos 3512161 to 3512839)
aacggtctccaataacatttccagattgccttctggtaagttttattcatttgctttattaattaatttatttttctgtattttgttcttattattgtgtttttagttatggaataaattgatcggatctgagtatctctgatttgttactgatcttagtgctttattcaatttgcttatttggtttttcactgtatcatcaataatcatggttagattttggagatagtatcattctcgtactttttggattattagtccgttggttcttttgataaagtattaattgattaatgagatctcctaacgaatttgataaattgggttgatctgattagtaattgagctattgaaagacaaattatatgtgtttaaagtttaatttagtaagtagaaaattccagtttttgtgaaattatcttgtaactaactatgattggacaaatggtagtgaaagtgtatcgtcatcactccatgaattgggtcatgctcttatgggatcactgcactttcttctttttaccgttgtggtagaatttatgttcttgttagtcttttacaatttaaggggttaatatttgtcctcggattgcttagtgttgataagacaataaatacagatccgttattctctgttttggttgacttgtaggaagagacagacttagatcaagaagta

SEQ ID NO: 79106 - DNA, 580 bp, Citrus sinensis
  Intron number 1 from transcript orange1.1g018251m (locus o range1.1g018238m.g) derived from phytozome v7.0 (chr-ID sc affold00473; pos 53670 to 54249 reverse strand)
tattgtcagcaacttttgaattgaaaggtttgatttctgtttctgtttctgcttttgttttgtgggtgtgattgctttctttttcctgtttggttgccaagaaaagggaaggacatgaaagaaagtttaaaatattgctttgtttttgctctgcttttatgactaacaacaaaggtttctttttcttttttttctttttttgagttttgttaaggtaaaagaggttttgctttattatgtgtatttagtgatgaatatgttgaaaggtagtttgagagtagaaattatttcatttcggttagcttaaagttcttgcacttgttacattttcttgctttgattacgcttttggaaatagttaagctggacattcaattccagtttctacttgtttctttattatatatgaatgaaacggtaacttgtttgtcatgaatgttcctattggattcatctactatttggcttattgaaattgaatttcttaattgcaagagaagtgaatttttttttttaatccttttttatgtatgccttgttcaaagcttcaagaattgtggaggcaaacaatttgaagggt

SEQ ID NO: 79107 - DNA, 928 bp, Citrus sinensis
  Intron number 1 from transcript orange1.1g002420m (locus o range1.1g001208m.g) derived from phytozome v7.0 (chr-ID sc affold00065; pos 323932 to 324859)
cgaggttctttttctatttttttttttaatttaaaatttattaatgtgtcatttttctttaaaaaaaaattcatttgttggagatagaaaattaggagaaacatatgtaacttttgaagggattaatgatatttgaattgtatgattttctaggcgagtggattttattattcctctttggatatgtaatttatggaagaagaggggaaaaaaaggtttatttcaattggttgtagttaggatttttagtgggttggtgttggctgttattttatttattcgagttttgagattaatgcttaattgatatgatataatgaaaggggactgagtaccataatgagagaatgaagataactgctggggaaagtatagtgtagaaatgtgcagcagcaaattctttatgtttaatttactattactgcataacattttaattgtgttcctaccattagttctggcaatgtgattttgatgattagacgggctttccctttgggtctcatatcagctgattattgatattttaagatcatgatttaggggtgaatagcatcatacagaccagtatattgcatgactttgataaattacattgcaaaagtgtgtatgatgtatgtgtgtatttcaagaaatttagcacgttaaatgtgtcagtaggaagcctgtaataggtctgtaaatgtatgcaaaaagccaaagacaacaaccagaatgaatagagaagtttttttttttctaagtcatgtttcctgtcactgtgcaaccattaatatcatttatttggtttgcagtttccaagtgctggaagttgtctgctgttgcttttaactcatcttttgattctgtttatgacgagttctattttctaggtgaagatattaatcctgtaactgagtttacttggtgcttttgtaggtttgtaaac

SEQ ID NO: 79108 - DNA, 712 bp, Citrus sinensis
  Intron number 2 from transcript orange1.1g026063m (locus o range1.1g022993m.g) derived from phytozome v7.0 (chr-ID sc affold00003; pos 2688864 to 2689575)
tctttggtatgtatgcataatgtggtttggaaccaactcttcacatgctgtacagctgggtatccatcttagctgtctttagttgtttcctgaaactttgcaatatggttcagattcttgtgttcttttgtattctctacagtttccttcatggagttcatttacaattttcttgagcagtttattcttcttctcaaatattatgttgttttgcttggtccacgttcaaataattggaatgttgcagacttacaggtttggataaaattggtttagtatgctagaaatttaaaattttactaggtttacaggtagacttaaaaacatgaatatttcatagttcttgtgtttctcataatatggtgccttgggttccaggacttcaaatatgttagaaactaaaaaatgcttgtaggatagtagaccctttgttcttctttggacttgtgttctgagataatgatggataggtggatgcttagacacggtacaacttcctataagtttctataaagcacaatgttgctacaagcataaaatgtaataggataagaatttcacttattttccttgatatgtcgaaggttgaggtcatactttgagttgctactacacttgatttgatcttctctctgacagctttcattacaccttggaggaaattttattctgccttatttcatcagagtttgcaggagatattaacaacctc

SEQ ID NO: 79109 - DNA, 700 bp, Citrus sinensis
  Intron number 1 from transcript orange1.1g041265m (locus o range1.1g041265m.g) derived from phytozome v7.0 (chr-ID sc affold00048; pos 690992 to 691691 reverse strand)
ttggtagcattcttcttatatgctaatggttttttttttacttgtagtgtctatcatttttcatataactaagttagaataaaacacacacacataaatatctagcaatgagcaatcttttttgaattttttaaaattccttaaccttagtcttttctattttttaaaatttcatcaaaagaactattttataatgaaaacattgaaaaaaaaatgcaaacacccgttaacaaaatactcttaaaggtagctctagagatcagagattttaataaacttacccatgaagataataatgagtaatagcatttggatacctgaaatttttattttctcaaataaggatatagtgtatttacttataccaaataggtcctcgatctctattgagctaaccagagcatacccttcgaccattaaactttgaacttcgtaatataaggatacgtaacttatcactgaagtgtacactaagcttgtaccatgcatgtgtttactcttttatctaattgattgaaaggtatatgtgacaagaatccaacaaaagagaatcacggaatttattcgagattggagactagtgcagtcattgcaatattaagacctatttggggcaaaattcctcagttgaaaacaggacaaatcaggatacaacattagtaccaactttctaatattgttttgctttgccttgacaggg

SEQ ID NO: 79110 - DNA, 438 bp, Citrus sinensis
  Intron number 2 from transcript orange1.1g047450m (locus o range1.1g047450m.g) derived from phytozome v7.0 (chr-ID sc affold00230; pos 211158 to 211595 reverse strand)
aagctttacagaagatcaaagaaggtatgtcttagtcccctccaatttctctctttatttacaagaagattgctggtttcctcactaaaaaaatttcattttttgctatgtacctccataatgttttagcataataaaaaaattgaatagtttattacaataatattttcatttttttttgtaaagtttttacgaaagtacgtgacgagggtaaagcaatactaccaaagtatgaaaaactgatatagaaattaacgagagacatagttacttgaataaaattgtgactcattattttaatgaattatttgttggaactttgattggttacttgaatttttaattttgccaggaaaacttgtacatttacataatgttaaaataattaatcgtggttctaattcataatgttcatgtgatcgtgttggtacagaattg

SEQ ID NO: 79111 - DNA, 546 bp, Citrus sinensis
  Intron number 1 from transcript orange1.1g044796m (locus o range1.1g044796m.g) derived from phytozome v7.0 (chr-ID sc affold00048; pos 309156 to 309701 reverse strand)
ctttttgaagcttgtatgttactcctttatccacattgcattcaataacaacactttgttttgtttgtgcatcctaaagtattaaaggatttagaaaatgtgaattgctagatgtgacattgttgttaccaaagaagaaattactaaagcatgaggcatttgatgtttttgagttctgtcagtctgtctgtttgtttattttctgatttcatcccggtttgtttagcattgtttataatgctttttttttgttttattagattccgaaaaccttattctctatagtagttcattttactattacctttggagtttactttgagtggatctgatcctttctccttctgatttgctgtattgttatcaaatagacatgatgatgttcaagttcagatggtaaatggagatagaaatttatggataagtacttcatattttaaagtctgccaaaatgctgtttgttttgcatccaagattcctatagactttctaactctagattggtgataatttacgttagggaaaattcgaggagtctatcaagga

SEQ ID NO: 79112 - DNA, 437 bp, Citrus sinensis
  Intron number 1 from transcript orange1.1g019318m (locus o range1.1g019318m.g) derived from phytozome v7.0 (chr-ID sc affold00109; pos 267204 to 267640)
aagccgttggaagtatcttgatttttaaggtaaattttctcagttacccttttgtttttttaataatttttattgtttgttttatattgtatatctctgttcagctataaatgccatattgcttgggattactcattcatttcctaagcgatagcatgcacgtttgtagggcattgtctatatgtccgagtgaaaattgcatcaaatcatttataatcgttcgtttgtcatgtactttcttctgatggatttcggttacataacgtctgttactcggattcgtccacttaatatgagacatcagagtcataaagaaaccatattggttgttcaaatggtaggttggacattcttgtaattctgacatgtgcaagtacttttatgcctatgggtttggagcaggtgttcaagtcctttggttggttccttcccgtcgt

SEQ ID NO: 79113 - DNA, 703 bp, Citrus sinensis
  Intron number 1 from transcript orange1.1g038620m (locus o range1.1g038620m.g) derived from phytozome v7.0 (chr-ID sc affold00014; pos 1917034 to 1917736 reverse strand)
caggtcagtctagtcctgctatcgcaaatcccttcttcaaactaaattgttaaaataaactcgttaatttgttgtaattatcgaattagggtttgatttagggttcatgtagttgtgttagtaaatttgcttgccaatgctgttgagtttgtttgattacttttgctaaatttgtgagttagggcaattaatggttctagccttgacattgcttttaggttatatcttttcaagtgaatttttgagttttggtttttagtgattagtgaggtcgtttttatattggaccaaatttaagctataatatatgtctattttttatgtataaattttttatgatcatggaaatgcatgcttttgagttgtaattgagtgagcttgctttattgagtaacttatgctgttttaaggcttaaattgttaggaattacactgctatcaataattttaacatcctcagttagtccattaaacaaagtgtcgaagtgatgctttgggatactatttgtgtgcatgttgcatcttcttattatattgcaaagagggatttcatcggaaaataggagttgtagaaatatgtcaaaaagctgtttacttattgttaatttgggttttgaattgatgtgtgctcagaaaataaaattctttcaatcgttttcttgttaagtttatgtggatttctaatttcctttcagctaaaggt

SEQ ID NO: 79114 - DNA, 782 bp, Citrus sinensis
  Intron number 2 from transcript orange1.1g030644m (locus o range1.1g030644m.g) derived from phytozome v7.0 (chr-ID sc affold00353; pos 131153 to 131934 reverse strand)
caggaagtcttgtccattaaaaacacgtaagttcttttatctcggtattgccatcggattttcatttgtgttagtagcagttgttttcatgtcttggcagctttggtttatgttctcttttagcttcttcttggtgattatttgacccttttctctttaccgtggcatgatttctttatcaaccttttttcttgtttcccatatgtttggtgtttattcaggcgattcaaaattccagactcttattggaatatcagttgttgacctgatatctgccatactgtggattgtcgagactagctgagactagctgtgaattttaggcaaatattaaatatactacaaagaagtatcatttttctgcaagtacatgcttgttgtaaagtgctttatggcttggcagggatgagtttaaatgggtgttaatattttttgtgcgttatttcactcaaaagcaaaggcttttgagggatagaagaaatgattttcttttactagtttggggtgtctcttcgccagtgctattatggatccgctgcttgtcctagaatgcttttctccttttgctgactatctgtcttttcttgtttgttgtcttattctagatatggttttaaagatcgtctatagtttagtgatctgagacctaaaccaaatttgctttagaacgacaaacctaagaattgttttaggtctcagcatgtgaaattatgctctcacgtcctaactttttaagtggtgttgcagggaaattgcaaaacatctttctctaccacctgtta

SEQ ID NO: 79115 - DNA, 960 bp, Citrus sinensis
  Intron number 2 from transcript orange1.1g025340m (locus o range1.1g025340m.g) derived from phytozome v7.0 (chr-ID sc affold04036; pos 5287 to 6246)
gagagtcagctgcaaggtctcgggctcgtaagcaggtaaaattttgtttgatatatttataatctactatttgtttatgcctatggctttaaatctgagtgattcggtgtttgctgctgtacctttttatgctggtagtgctgtctgttaacttaatagagcatttggatagtccatgatgcatgattaaattaaatgaacatgtgaaatgattacttatcggtttgtttgaacaatcccatgagttttgacttacttgatgttctcatggtcatgcgattgctgaaatatccatcatatgcactaggagttgttgctgaaaaaatagttggtgtctgtttaaattcatttttgataaactcgtactgcctaacagcctaactttattaactttaggtttataacagttgagaaacttgtctttctttaaagatttactttgaggtcaggattaaataattattgaagaacgaaagaaacacaaataaatgacaccaagagcataacaagtgattgacaagtttcctcttcttgccgctccataaattttgctagccattaaccttctgcttttatcatctatggacatgctgcatcctaaacttcatgaaagattatgcggcagaatgataatgtgctagcaacctgacatgatcagagatgaaagattttgagaagtcaaggtcatgagaagttttaaggatccaggttgttgcaaggtaatggaacattgtttgaggaacataaaatccggcaatagttgtattgtgtcgacatcaattaagaggatgattaactttttaacattttagctgattgctcctttggataaagcaaaatagagaggcaacagaaattactctattcaatgatgaaattatttgtgttcttttgttgtctcaggatgtgtgatgaatgcttgtcttattttcttttttgtttttgtgctaggcttatact

SEQ ID NO: 79116 - DNA, 661 bp, Citrus sinensis
  Intron number 2 from transcript orange1.1g005273m (locus o range1.1g005273m.g) derived from phytozome v7.0 (chr-ID sc affold00048; pos 111198 to 111858)
caagaaaggtatgtgatattggcaaatttataggctttttttctttttgtaacttctgagctgttttaacgtgtaaatgtgcattttgtttaaatattttaaaatttttaatgacataatttacatggagtgaagaagatatcagtgtttctattattaaaaaaaatggataaaacacttagaaatggctttttacaagtacttgatacgtgcttttccggaaagaaagtgctttcttgtaaggtatttgacaatgtgctggtttaaaaagttttttgtaagtgctttctagaaaaataattcataagtaatttctgaaaaagtactcaatttgaggagttttgttggatacattttttactcaaaagaagctttctgcaaaagtacagctaaatatactccttgtttcaattgtcaatactagctgttttgctctggaaatatttacttcaattactttgaccttttatactctctagctgtttttcacaacccatcaaacacctgtattattgtatcatgtatggtaaggtcttcaataagtgctgcaaaatgattaacattataaatgatttagttttagatgtaattgtgtcctatcaatttggcttattgatcattttcaggtattaaaggagcccaagtttgtttatacggtgga

SEQ ID NO: 79117 - DNA, 475 bp, Citrus sinensis
  Intron number 1 from transcript orange1.1g021436m (locus o range1.1g021436m.g) derived from phytozome v7.0 (chr-ID sc affold00057; pos 156662 to 157136)
gtaccggaaccgattccaggactaagaagagaaacgtgagtttcttttttcgtatttttatcttcttcttttttaatattttaaattttaaaccgttgttaatttttttaactaaagaaaaacaactcttgagttattatttctgtttattttgcttaattttggaattattaaattgattcaaaatgggtttgtagttaaactttgttttttttttcttttttttaaaagatgaggaattttctttttcaagtccagaaaattttgaattttttggtttttctttgacttggagacattgtgagtatttttttttggaaaattttgactgctaatgaaatctttttagctaaagaactggattccgtttatttctttgtgtttaccagttgggtgattggttagatatagaatgattatcttacagggattctttaatttgattacaaatttgattgtttttaatgtcagattc

SEQ ID NO: 79118 - DNA, 820 bp, Citrus sinensis
  Intron number 4 from transcript orange1.1g029719m (locus o range1.1g029719m.g) derived from phytozome v7.0 (chr-ID sc affold00109; pos 287682 to 288501 reverse strand)
agccaaaaacattttcacgtcattatttggcaggggtaactactttcttttcttaacttaactttgatactcttcctttaaaaaaagtgtgattcttcctattaaacaattttaatgctttaaataggatactgatttctgtcttttgactgatctggctgtagagtaagagcaagactgatgtctgatgagtggatgcctgagagcattcagaaaatgcttgtggctttgattgtatctgtttcaatatgagtattctaaatttctaattatgaaataagagcctaaaatttttaagttgaaaggtgagatcatgagttcaaaatgactgatcaagtaatctgaatcatgtaacggagaccatcctgccggctgcacttacaaatattcacatacagaagctactcagatagcacgttacatttgttaagtattattcatcttggcattgattaatcgatgaaattgatttgatttgaccagaaggttgaggcccgagggatttgtgggtaataggaaagcaaaaacaaaaactgaaaatataaaaaggttacttgtcctcttcaagttagcttctcagagctcttgaaaaattgatcatgtagctgtaggaccacctgtatgtagtaggctctcatatctcgtttctcatgatattgaatgcaggagatttgtgattaccttagtgttttaaattacttgtctcttcctcttattcggatctaagatttgggaatgcagtgagtttaaatgtttaatattccatatcaattttcattcttcaggctggtgtatcacctctcctgcagcgtcagttgga

SEQ ID NO: 79119 - DNA, 422 bp, Citrus sinensis
  Intron number 2 from transcript orange1.1g030913m (locus o range1.1g020825m.g) derived from phytozome v7.0 (chr-ID sc affold00005; pos 1596521 to 1596942)
ttaggtaggaaaatactttgttgattcttacatcctgtttacagtatctgacgaatattgctaacttgtaatcaacaggcaccattgcccaatgcttatctctcaatggcagtatgctgtcacccgcaaagatatggcagagacattttcttttaaagattttaaagaggtatagattgatttgttggatcttatattgagctttgcctaaaaacaaaatgaagtttgattggtcctgtttcaaatcataccttacttcaaattgtttattttcatgagaacattatgattatcttcagaacatgtcataattaatggttctctatctgaatatcatccaggtagacataaattcatgggcttctggtttattgattttactaataaaggtacttgtgcatcatttttgttgccgttgcagc

SEQ ID NO: 79120 - DNA, 620 bp, Citrus sinensis
  Intron number 2 from transcript orange1.1g023419m (locus o range1.1g016095m.g) derived from phytozome v7.0 (chr-ID sc affold01120; pos 13046 to 13665 reverse strand)
ggcttccacaacacgaaactgaacgataccaaaaggtaagtaagagtaaagtaatccctcaaaaattaacaaattagaagtcaacaattttataagcttcttaacatgatcttaattaagatatgttatcttgatttgattgcatatcttgttggaaccctaactcacaacctttcactggaacctcacttgagctaaatttttcttcatctcccacaactgttttcgcctcaagtttgagagaataattcccaaagatttcctatatggatccgttgtgatagaaattcaaatgaaaggatcttatcaagaaaagatacgaaattttagttccaggaaaatattcctgtcagtttaagaatctctaatcatgtagaatttaatggggtttgattattgtatgttctcgagaattcatagcaacatgcatgaatgttcaagacttctgctacttctcaattcccataactataaactgattcttaatgccctaaaatattttaatgcgagtccttggtcttctgtttaattgcatcgtttcgggaaatatccgttcatcttttgatattctccatactttttcaggcagaaatatcactttgccgtgtacacaagagacc

SEQ ID NO: 79121 - DNA, 661 bp, Citrus sinensis
  Intron number 1 from transcript orange1.1g030026m (locus o range1.1g030026m.g) derived from phytozome v7.0 (chr-ID sc affold05577; pos 2086 to 2746)
cttcgcatttgtcgcctcaaacctcctatattctggtaattctcgactcgttatccttcatttttgcttttcttgttttcagatctctcaatggatagctcgataggtgtttgctttagattctatctttttttggttacagacattatttgcatagttcttgaatttaaggtacccttatgctttgttaattgttatgccaacaaaaatttgtcaaactttctactttctacgcgtaagtgggaggtttaaatctgtttattgaatcatgtattgatttcagatctgttcattgaatttctacgagttactgtgtctgcgtttatggctttcttgttttattctcttgctctcttcgtttattgatgctgaatttatatagcttatataatgaaataaaatgataggtttgtttcactgtttttgtatgtcattttagtgtttagtgcgtagctggtgttttaaggtgccggtatatgatatctataatcaaatttatttcttcgaggaaatttgaatctgttggaggaattgcttttatgttgagaccaagatgattgtttttttttttctattgctttgaaaatcaaatttttgggtagaaattgaattgtcatttctttctgttatgcaactaattcagaaacttggccgcattgaa

SEQ ID NO: 79122 - DNA, 638 bp, Citrus sinensis
  Intron number 2 from transcript orange1.1g025743m (locus o range1.1g019781m.g) derived from phytozome v7.0 (chr-ID sc affold00472; pos 19380 to 20017 reverse strand)
cacaagcgaaaagtcaacgttcgtaaaacaggctagttttctcttctaacacgcacttatgcatggtttattttttaatttcatgtctgtgcgtactgttacatattaatatattagggttacacattacataagtttcagccattaggatgacatcctggattacgaatacattatccacagtttcagctattactattagggcgacatgctgagggacactgaaacgatttatttctaagcacttaatttttggcctagaattaaaggttggaggggtccaagggttacccaaagtattgtgccttggttttttgggggggtactgagtgttgtatatttgactttgatttaaaaactaagataggataggtttattgcttatctcgaataatggcttatatgaacttgcaacattgatactttggtgtgtttggcagccattttgtttcagtgttgatattgctgaaaattttcactgatgctccccccccccccggccacaaaaaaaaacctggtctattgtttatcgtagagtttaagaacgtgtttcgtaaaatctcaactgatgagtatttatgtatatgtgtggtgcgtatgcagtcaaaattggtaggcctgggtatcgtgtgacaaaa

SEQ ID NO: 79123 - DNA, 906 bp, Citrus sinensis
  Intron number 1 from transcript orange1.1g014012m (locus o range1.1g014012m.g) derived from phytozome v7.0 (chr-ID sc affold00049; pos 288497 to 289402)
gaacaactcaatgtacgtatttataaattataattcacctatgtttctttgtaatcgtttttccttttctttttttttttagggtttaaaatttagttttgattcgattatcttgagagaattagagaatgatcgttggtttagaattataattttactctacaaatagtttcataatttggtcaactcagttcttctcttcaagtgtctgtggaaacaacagaggattttttaagaagccaggggaataacagaggaagctaaattagatttttttttttttgggtggcgtggggtggggggaatgtgtatagaggaagatcctaatattcctaagttatgtcaataatcgagttggtgtttgactttgatcagctgtaaagaaagccgtttatgaaagaaaataaaactttcgttcgcagagtctcctaattctggctacatataagagatagtagtaataatcaataataaatgaatagctacactgtacgaacggttctgtagctgaatcacctgcccaaaattgtaattacaagatctcgtagaactgtccagaattagtatgattaacttagctgatagcattttaggaattcttagctttgagttagacttgaaggatgtaaattgagaaataaaggactagaacaaagtaaagtatagattcttgttgctgatgaattgtttaatgtgttgctgtcaagctggcaatgatatgcacttttaggttaatgggtactttactcaatataaattggaaaagtataagatctattttttcatttttattttttttggctgaacaagttttttatgaatgtaattgttaatgtgacttcttttttttttttttttgtaatttatgtagagatcattgaagatcctcagtatttttgtcctccc

SEQ ID NO: 79124 - DNA, 826 bp, Citrus sinensis
  Intron number 2 from transcript orange1.1g032832m (locus o range1.1g032832m.g) derived from phytozome v7.0 (chr-ID sc affold00003; pos 3236403 to 3237228)
gctttgaaacctgttccagtcattgttcgctgcaagtaagaatatttccagtaatgttagcctgttatgttttgtgcttgatgttttggatataagttatttcattatggatctttttaaagataagaaatgattaggagaattattatgtcctggcagttttgttggtaaaataagggggaaaaaaaatggacttgttattttatacaaggaactgaggcactctgtggcttggtcaagccattgttaagttggatattttaacaattccgtagtgatatgagactcaaactttgatttatggtaatgcaggaaaattaatggttttttctaccctagactttagcattatttgtttgattggttgcaaacatgataacctttcccccgtttttttcaaagtctaaacttgcatttgttttttggggtgggtgacagagcattgaattagtatcaatttgtgagccatattgtcgttcatcttttttcttcttttctctttctgagataaagagggggtcctttccaaaatcgacatcttagaatggtgtgttaaatgcaatttcttggaggcttgaacgaagatatggtttttcttctgttcattttcacccttttttctgcgtaatgttatattacctcgcctaagccattgtcttaatcaaattctactacttttcagcttaaggtttgacacatgcttcatttagtgccacctctgttaatatttgagatcaagtgcataagacattcattatggtcttttgtgtaatcaatttattgtgttacaggagctgcggtcgtgttaagctaccacacttcttct

SEQ ID NO: 79125 - DNA, 229 bp, Citrus sinensis
  Intron number 1 from transcript orange1.1g036311m (locus o range1.1g036311m.g) derived from phytozome v7.0 (chr-ID sc affold00003; pos 1858158 to 1858386)
tcctcctgctcttatccctctgttttcttaatcatgtaagcattcgcttccaatcaaacaccacatttgttatttatggattttgttccttcgcattatcttcatcttcttcttattattatttttatttttattattatgttttcaatgatttttgttttttttgtttttcgtttttggtttgtgcaatgcaggttaattatttgggcggcaccgagatttcagacag

SEQ ID NO: 79126 - DNA, 679 bp, Citrus sinensis
  Intron number 1 from transcript orange1.1g027291m (locus o range1.1g027291m.g) derived from phytozome v7.0 (chr-ID sc affold00106; pos 384271 to 384949)
atcgtttcacttgctgtaagttaatatctctaaatatgtacttgaatcatctcttttctgaaattaaaattaattacgtaaacctgttgcgtacaatcatctctatcaaattgtacgatcatttcacgttcttcgaaattccgcttcttaaattcaattctcgtttggctactgaggaaatgcaggaaaatttaatataattaggaatctggatctgagattacaaatttcttttgcaggaagaaaagtaatattagaatttgattaggagtaatttatttctgtttacttcattttctcagcaatcaaacacattgatggtggaattgtttctaattacagttgtttgcgaagtgccttctaggtgtatgaagaaaagattagctacataaattagatataattttaagtttttcattaaaatccgtatattgtaaaataagattacataaaaaaaatctgaaaaatctggagctatttagttgtgactggaaataaaattgggtatcaaattcacaagtttattactgtttgttgtactagattcactcaattttatgtataaaattactctttaactaattgtttgccgaaatgtcttgttaataggaggtttaatttgctttattaaattgttggtgcagtctaagaaaaggggtctttcattggaagaaaagcg

SEQ ID NO: 79127 - DNA, 1015 bp, Citrus sinensis
  Intron number 1 from transcript orange1.1g047223m (locus o range1.1g047223m.g) derived from phytozome v7.0 (chr-ID sc affold00951; pos 37566 to 38580 reverse strand)
tcctcgattctccagcaagctggtaagagggaaacaaataaatatttacacggttttcttttctggccaccttttgctttcttcaaatgctttacattatatattattatattatatttatctgttggacttggacttattatcttttaaactagaaaaccaaaaaaagtctactttgtaggggaaactttgtttgaaatttcatcaagacaaaattctgactatattcaagcacaattaatggatattatatatatttacagggggaatttttatcattctttttaattttaatgttatttgattgcccggtttgtcccttgtagttttggttctagttgtactaaatataatcccacctagttgcaacattatacataattaaaaaatcgacagaagaaaatattggcaaatgatacttatcccaccaatgaactccacctatacaagaattgttcatatatttttcatatatttttttgtaattttaagtgatttttttttggggggggggggggggtgttgtttatatcaaaataacattcttatagcatgaacaataacattattttattctttctgcgattttattattcttcaaatatcagtgttcataaattttcttggcaataatttatcgcctaaagaaaatagaaaatcttgcaaggacgaatggatgatagtgctagaagttccctggtagataagataaaaaggtgattaaataagttgcgggtctgttgccctgccgtaatgcaattaaagacttgtttaaataattagagatgtcttattcctttgttgggtttattgaccgagaagccaaactaagcaggaaataatcattaaatgtaataatttgcttccctaaaggaaatttaatggtcaattaataatacatattttctgtaatttttttttattattaacaacaattttttttaacttttatatctaatttattttattatttcttgcatgtacaaattaaaggtggtccaaggaagaaaaagaa

SEQ ID NO: 79128 - DNA, 762 bp, Citrus sinensis
  Intron number 2 from transcript orange1.1g029140m (locus o range1.1g027148m.g) derived from phytozome v7.0 (chr-ID sc affold00003; pos 896851 to 897612)
cactggctagaaatcttgctgcagttatttatcgagtaagttctgttctgcttcaactgatttaatttataattcatttgatttatagtcttgtaattattgattaggaggaataaatgtttcttaatcttttttaatccctttttcgtgaccaaagtttattatcccctttgcccaaatttaactttcaaggaaacttgttatgcgttactcgaacacataaaggcaaatttagctatttataagttgggagtcattgttgctgttttgaggtttgtcatgcagctgtggaggccttctaatggccatttcaatttttaagaaggatttggagagcatcttctgtttccatctgatcaactttaattcttagagcagtattccatctttagtccaattagattgagagcatagagccctcactttgagttgtcttatgctcagtcgacattgctctgtttatctttggtctttcctgatcattttacatctaggtcccattcataacttcctgcttgcttttatttccaataggatgagaaggagatacagaagactgcattcaagcaatttcgtgtattgcagtcagctactgagttcagatacggatacaagcttgttgtaatgctcctgtaccttcttagcattttacatttcacatggatttacttcttgccattaaagccttgtatatacaccaaggtgaactgcgatattacctgtgcctaaatctttatttttctaccccaattatgcaggaaa

SEQ ID NO: 79129 - DNA, 802 bp, Citrus sinensis
  Intron number 1 from transcript orange1.1g002483m (locus o range1.1g002483m.g) derived from phytozome v7.0 (chr-ID sc affold00065; pos 270388 to 271189 reverse strand)
aatatattcttgctgctaggcatttgttattgcaggttttttttttttttttaattttgatgtttagcttatatacttctgtctgttgaaaataatttttggcataatgagcttcgtacggttgcaatttgatattggcatgtatattattatagtggcagcttgcaaattgtgttgaaaaaaacaatctagacttaaattgaagtggtggtggagtcataaaaatgttgtgttatggaatttgttggtgagttcatagctcagtcatgttaatatctcatttatatgctgctctttagttttaatgtagctagattttgatcaaattgtttgaaattttatgccaagtgcacacaaaatgttagccaaaatggtcataatagttggtctttgatgtgaaggatattgagggtttgtaaatgaaggatatgaaggatttgtaatagatcccactttgagtgaagaatagaatgcaaattatatgcatagaaagttatctgtagaaagctggtcttcctgatggtgcagccaagattatgtgaatagttatgaacttttgtgatagaattagaaatgtttggaacaaatattgcatggaataaaattttgcatacttttatcccatttgaagctagatatcatgggagtgttgcaaccatgatgatgaggggagacagcatgttgcaattctgaattagttttaatttattttttttactggttttagtcctttttattatttaattatttagcaatttgacattgctcacatattttcggttttccagctatcaaagagtcg

SEQ ID NO: 79130 - DNA, 901 bp, Citrus sinensis
  Intron number 3 from transcript orange1.1g033373m (locus o range1.1g031606m.g) derived from phytozome v7.0 (chr-ID sc affold00005; pos 1291696 to 1292596)
tgatctcgacagtgtcgatcccgcccttcgagcaggttttaagaacccttttcaacctcctttttttttttgggttggaaaaatttgcttctgttctttttttcttttttttatcccctttttgttatttgtcaaataatattatctgcactattgcacacatggtggtagtaaaactaaaatatggtcgactggaagtgatacttgcatctttcattcctatgaaaccaatttgatttgcaagattaagaatttaaaaatatgcaaaaaaaatttgaacgtagtcagcactcagcaaatggtagttatatagacttaccataggattgcttgatgttggcaaatcacccattaatagcatatgtgttctctttatatgaattctagcataatgtgcttttgtgatattgtaactagtattagtcttcttagtgaagtgctagtggtacgtactgaactgaggacatgtgtagagatatgtggctttcttgattgcccctacatcgtgcagagttttttaattctttctgtttcaaacatgttatgttaggctcaaaaagggaaaaaaacaccttgtgttattatcccagaatttgtgctggtggaacttctttgattattcaattattctgccttctgtcagtaagagtgtactgtaaatggaatgcgtctggcatgttattccaataactgaagtgatcccatgaaatggtagcaaaatgagtgtcctagctgctggcagaaagcattagctggttaccgtgcaatgtatagcttcaccaacttatatgcctgcttgatatttgaaaactatccagaagatattttgttattgtaccaaactattatttttcatatattgacagatttgtcggcattaagtcaaaggaggaaataagct

SEQ ID NO: 79131 - DNA, 445 bp, Citrus sinensis
  Intron number 1 from transcript orange1.1g015180m (locus o range1.1g015228m.g) derived from phytozome v7.0 (chr-ID sc affold00003; pos 3138248 to 3138692 reverse strand)
ttgaatagttctgcacttagtgccctgccctgaaggtggctgcactcattctgagtcatatagtgttaaaattttaattttttgcttaagaattatgaaaattttgctgctctcatgctggcgattatatttgagctgacttatcataggctttgcgtttgctttatggttttttattattactgaatatttgcttgattttcttcttccttgtgtggaattaaatttatggtttttctttaattattagcatcaactcttctgtatgtcgtcaattctgtggtcttttgcatggtggggttcatggtgtttcttttttgatcatttattggagattttgaagtatagttgattgtttgtagttgtcttgaatgttgcgtcttattgtattaattttattttgttaacaggttgattgattttcaaacacattctttcctcagaa

SEQ ID NO: 79132 - DNA, 386 bp, Citrus sinensis
  Intron number 1 from transcript orange1.1g031446m (locus o range1.1g031446m.g) derived from phytozome v7.0 (chr-ID sc affold00023; pos 37468 to 37853 reverse strand)
atattctaatatttaacacaggacactggtaaatttcttttctttatgctactgtttacactttcaaattcctatagattggtattaaattgatgtttcgctaaatggtgggatcaaatgatgactatcatgattgacacctttttgatatctgttttttcaagttctctggcagtgtttggaatgtttctgtggcaaatagtgaaatgtaatctatgcttccttgaccacattaaacagtttcccattaatgcccatttcatgtgtgttattgttgtttttgctcttattatgaccatgcaacatatttttcttatccattgtacttggaattttggtttttgtacataggtggtgggctcctgcaaaatttgaccctgtgaagt

SEQ ID NO: 79133 - DNA, 722 bp, Citrus sinensis
  Intron number 1 from transcript orange1.1g003545m (locus o range1.1g003545m.g) derived from phytozome v7.0 (chr-ID sc affold00003; pos 4029629 to 4030350)
taaacagctttcagttcaaaattgtctcaaaggtatttcctttaccttaaatggttcggtgtttcttcttttaaaaattaatttgttattttttcagttttcagcttatgcacgacttttttttcatctggctgagattcgattttaagaaataggataatttctgcttggtgcccacttgattatatgttatgttgtgtttacgtttgttttgatcattcaaatttgacctgggttgattgaatgattgttgttatatacttgcttcaccttaattgtagttaacagttaacttttctggatagagggtagactcagacaactcctttctttctatggccaaacagagcatgatcagtgggacaggacagtgtgtgttccgaggctcattttgtgttttgtgtcttttcaaatttaaacttggctttatctgttttgatttattgcatattatcatctctgtatcatttcctttcagtaacagtgcatctataacttttgtttttgttccctcctgctcagattgatctgtttgattactctgataaataagcgagcattgaaaatttcagaaatggatttttaggccataattgctcgtaatagttcattgttagacaggaagtagtatagcttcactgttccttatatccatgttgtgtgtgtgttttcccatcatttatatataatgatgataactatctgctcttccaaatatcagg

SEQ ID NO: 79134 - DNA, 1062 bp, Citrus sinensis
  Intron number 1 from transcript orange1.1g031112m (locus o range1.1g031112m.g) derived from phytozome v7.0 (chr-ID sc affold00301; pos 20106 to 21167 reverse strand)
acccgatttacaaaaatacccaccgactaaacgtatgcaaaatcgtcgatttcaattttcttggttctcaaaatttccttggcttgagtattccttatcaaaatataaagcattttgttttccatgctttcattgttgatggttgtcaaaattggaagtatgtttcttgtgacaaaaaaatgtccttttgcactgcatgaagggagtcatggttcttttcacaatgccgccacggaaaaatggagcaatttaaaggatccatttaaacatattgataaaagaatgaatgcacaatcttcacaacaagcttgtgcttttagaggtcatgatgagtcagttaattctcttaatcgtggaaattttattgaattaatcaagttgttagcaacaatgaatgaggagattaataaagttgtgttagaaaatgctcctaaaaatgcccaatacatagcaccaaatattcaaaaggagttattgagtattcttggtaataaagtgcgatacaagattcgggaggaaattggagatgctaaattttgtattcttgttgatgaagcacttgatgaatctcacaaaaaacaaatggctattattgtgagatttgttgattgtgatgggtttattagagagtgtttctttgaagttgtgaatgttgatgacacaaaggcctcaactcttaaaaatgagatatgtaatgtgcttgctcagtacaatcttttagttgaaaatttaaaaggtcaagggtatgaaggtgctagtaatatggctggagagtggaatggattacaatctttatttcttagtgattgtccatatgcctgttatgtacattgctttgctcatcggctacaacttgtactagttgtagtatctaaagaagtgcatgaggtgtggttatttttttctaagttgagttccattgtcaactttgttaatgcctcttccaaatgttattctgagttgaaatctgctaaagagaaataaattatagaattgatagcttcagaagagcttgagactggtacaggtgctaatcaagttcgaactttacaaagggcggga

SEQ ID NO: 79135 - DNA, 619 bp, Citrus sinensis
  Intron number 2 from transcript orange1.1g024743m (locus o range1.1g024566m.g) derived from phytozome v7.0 (chr-ID sc affold00162; pos 100664 to 101282 reverse strand)
aaaataagtaagtatgaaaaaaatgttttagcttcaattggtagtgtttgaaaatggaaaaggggcaggaatgtttgataggtcttcgagatattgaaagtactaagaggatttttgctaagatttgtcttgcatgagtttttttatttatttttttgaaaataattgacactttcaatgtcatggatgatgtggaagataatagtgttgagaaatgatgttacttttgagttttacattagagtacatcacttgtttgataatatgctcgagagactctaatacgttgattacaagaatgtgattgatacaatggatacaactttgcaggaatttgtatttcgccatgttgcttaattgtaggttgaaaagttaaaagatcactcatctcttgtttatttagcaaattaattgacagacataattatattctccatcttgtgtggatctgaagtaaaattgttatgaagctgaaaagtaccctgccaagctgcaccaattgtcagcttctggagggccaggtcatgttcccatgttatcaagcatgacagaatctgttaatagcaaccacatataagtaaataacgtattgcatttttttgtaggtcacctggagcgc

SEQ ID NO: 79136 - DNA, 832 bp, Citrus sinensis
  Intron number 4 from transcript orange1.1g005433m (locus o range1.1g005433m.g) derived from phytozome v7.0 (chr-ID sc affold00017; pos 316521 to 317352)
caaccacatgtatgacttttatttctccccttcccatttttataacttatcatttttagttcactacggtacttgcctctttgtgtaatgaaggtagttggttgatgtagtaaagtagtatttaagcttggatacttaagcaagaagatatttcaattgatctgtaacatttaggaccaccagaaaaaagcaagggaaccatgaaattgctatgcaaataataaagtattgatgaacttattattctgtggaggttgcatgcaaacttagaataactagtgcttttgttcattcctttaaaacagtcaatttgagtgtggtccttggtagcacttacttcaaacagtagaactcataagaaatttggaacctttaagtttgattatgtgtgctgaatgttctggcaacaacacttttcggttatttcacagatatgaaggtcattgttaatagattggtgatgtttgaaacaaattgtgttttatggtgtggctcacatgtttccgacttcccgtgctaaatgtttttttcacttaaattgctgcacaatccatctttttaattcttttcatattgtactcaataactgatgtatgtcacactgatctgatttcatcattttgtcagccctccttgttttaaaactcttatagcttcagcgtatggaatcttttgagcttgatatcttatttcttagtctttcttcttcttcttcttcttctgttttttttttaatagattggattgcagttaatgattgtaaacaataatttttaaatatcattttctttgctgaacataatatattgtcattttatacttgtagactatc

SEQ ID NO: 79137 - DNA, 448 bp, Citrus sinensis
  Intron number 3 from transcript orange1.1g031565m (locus o range1.1g025056m.g) derived from phytozome v7.0 (chr-ID sc affold00074; pos 93676 to 94123 reverse strand)
tttccaagtaacgttatctccacaggtatgtgataagtaggaaattagaggtttttttttttaaaatgtgagccttctaatgtctaaacttatgaagctgggttgaagcttcttcctgtgatcagatattaagcagaggtttattgagccgaaagcaatctatcacccaaatacaattttaaatttgggggctgaaagaaatttttggaagttgctgtgttttctgtgtaaatggatgactatgtttgattcttatcagtaactctactaggttcttcatacttatggttatataaggagccattattattttggtcaacgtgttagtgatctaaatttgccatgatatggcaaatttagaaagacaagaatagggatcttttgactatgtttgtgctttggaaagtccattttcttaatgtaattaccttgttttctgttcaacagg

SEQ ID NO: 79138 - DNA, 891 bp, Citrus sinensis
  Intron number 1 from transcript orange1.1g019249m (locus o range1.1g019249m.g) derived from phytozome v7.0 (chr-ID sc affold00017; pos 636910 to 637800 reverse strand)
gtgcttgattgaactcaattttgttctcatttgatgtacgtatgtttactattttctgcttttttttttgggcgaatcgtcagccttaattttgtacatttctttagtctagggtttgtttaatgatcattctacatttcatcacaatttagttaattaaattagggttttggtagttcagatcgttgaattgagctttcaagtgtgtaaacttttatttatcttgtaaattagtagacttttgacattgttgttaacgagaaatcaaaattttgaattttttttttttcgttttcttttgatctcatataagtgatcataatcgcaagcctttggatatctcacgatactgaaaatgtgttctatttatccaaatcccatttattcagctggtattagtgtattttttctgcttacatatccattttttaactcgtaagtgcagcttggttctgatttgtggtttttaatgttcagttatagtgtggctggaatcaaataatggaatatttgaagactagaaattggaagttcttacactttttccagagtttcaatgattataccttttgatatttaggaatctaggtggacagtgcatagaatacatagattgaaatgttggaaaaatgttaaagtatggattgagatacaatcctgattttataatcttatcatgcttatcaacttggtggagtttgcaaatatcagctgcatgtagatttctttgaatatacagtgggttaatttttgtgcaggcgtttctcaaaattgttatgtataatcattttattactgtttgcaaagataattgagtattgattgggaacaaatttgttaatttagtgtttagaccactcatatatatgtttgtatcatgtaggataggga

SEQ ID NO: 79139 - DNA, 344 bp, Citrus sinensis
  Intron number 1 from transcript orange1.1g019971m (locus o range1.1g019971m.g) derived from phytozome v7.0 (chr-ID sc affold00005; pos 2325907 to 2326250)
cattctcaccacttcccatccctcccctcttcaaggtttggcttcttcacccgtcctttttttaatttgttttctttttgttttaatatattcacatatttgcaattttctgttgtgtctgtgatttctcgacagtgtgtgcggccgttttgttttttctttaattattttccatatatattgtgtgcaagtatttccaagtataccagctagtttaagcttattatcatgcaactgtttaatatttttgtttttgtgattttgttgtattttttggttttaggaggttgattttgtattttatgtaaaaatcttgatttgcttagggaggaactagtaaagga

SEQ ID NO: 79140 - DNA, 726 bp, Citrus sinensis
  Intron number 2 from transcript orange1.1g030251m (locus o range1.1g030251m.g) derived from phytozome v7.0 (chr-ID sc affold00011; pos 2020890 to 2021615 reverse strand)
gctgaggattttcgaagcctggtaagttcatttctctgtatttttcttctccatttttttccctttttcatgttttagtagttagcgtagtcatttttgagagtttgatctcctttggggtgtaggacgagaagcacttgtaggtaataatccatggaaaatattgttagtgtacaccgaatcgttatgtcatttggaaattgcaattttacttctgattgataaacttcttgttgaaaggctaaaaggtttctcatcccgtgatccagtgttaacatatgtggttgagtaatgattaattgtccacttttttagggatttgtgatttatattctggtgtttttcttggctctgtccatcaaaaaataaaccacaaaaatagaatataattctcacttattttcaaagacttaaaaaacaatatacttatgatgctttaccttttgtttcaagtctcaatgatcttgaagtctagttacgtaattactttgtggagcatatgctaccttttaaacatatatatcaccactctgttcggtttaatatgtgttttgctgcacctatccatgcgtgattaatgtggtacattactgagtgtgcttatatctgagagcgtatgcaaaatggtatgttttttaaccttggcaactttaaaattctacttatccatgctcctattgtgtttatacagatctctgaatttaatctagagggcttcattgtagg

SEQ ID NO: 79141 - DNA, 560 bp, Citrus sinensis
  Intron number 1 from transcript orange1.1g012117m (locus o range1.1g012117m.g) derived from phytozome v7.0 (chr-ID sc affold00199; pos 17659 to 18218 reverse strand)
caatatctacaagatagttcactaaatccgttaaggtcagcttgagttgccataaaatctgctttttcccttgattggtttttgcaagagtgattagatttgaaactattctgagatcagaggttctattgatttcatctcagtgatctattgtatcttgtggtatattttgtgcgtgtttttgtaattgtaaacatgagttttagtttctcatggtgtgggttggctctgaatattttatgaaatgatccagagaatgatttcttttcacccttgtatagctcccttgttaatatcaacttgatagatcttggggttgtttgtctgcaaagctcagggcataaaattctgtatagtttgataaagctgtgagggcagcagctactttgatatgtcttgtttattttagattctttaacttgaagattttttttgtctcaattgtttgccttattattcattgtttccctatattgtagttatgttttcttttgacattagtcctaatccttgaagatggtacaggtgttgctgtgaacgaatattgcacagataatcaa

SEQ ID NO: 79142 - DNA, 831 bp, Citrus sinensis
  Intron number 3 from transcript orange1.1g030276m (locus o range1.1g030276m.g) derived from phytozome v7.0 (chr-ID sc affold00173; pos 206605 to 207435)
aggttattttcttgcatctccttgtgttgtattgcgtatctctcttccaatttgattgacataaagatgccataagttttgaaatttgtattgataatgataggtttaattctggggctaaacaggtttcttgaacttttaatgtgaaattcatgtgaagtaaactaataaagataaaatgtgaatgtaccttgattagggatctttctagtctataatgtgagaagaatggttacgaagttcaagttttgtacataggttaatagaaattatataattttccttagaatatcccatttgtttccaaggggttgcttaaatttttccttcagaaattgtctcagcttgctgctattaacttaggaatgcacaacctgccgtcactcatttaactcatgctacattgtacttgtcatattctttaaaaaataacaaatttatggggaataaggtacgatagaatagattacgctaattgtacataggataggaaacaatctatttgttacttgttttcaccagcaatgactaggcctcttccctccaaaaaccgaacaaagagaatgaaagaggctgaggttttgtcctgtatcacagctgggaattttttcacaaagaagtacatattttgctgtatgatgcaaggctcaggagttctaataattatttagttcttccgagcaaagaaaatgagtttattgtgaccttgtgatgtttaaatgttgcatattcttattttgaatattgatttattttataattttaactacttatggtactggatctgttattgcagatttttgaaaagaacccaacaaagataaagaatta

SEQ ID NO: 79143 - DNA, 812 bp, Citrus sinensis
  Intron number 1 from transcript orange1.1g019361m (locus o range1.1g019361m.g) derived from phytozome v7.0 (chr-ID sc affold00215; pos 165304 to 166115)
tgcccttctcctccttttgccaactctatctataggtatttcttttacttttttttttctcctcatttattaagctaagattattctgtagcttctgcagctgctgctgctgctgctttattttattttatttttaaataaaaattttttagcaatttttgatgaattgggttttgattgaatttgcgttccaaacttttctttcgtgccagtggctatgagggcactttgagaacatgattatgaaaataataagataaagttggttaagagttgttctttgagttttttagtgcatttgggtgtcgatgttcactgaatgtgcaaaatgtagaaggacctgttcggtcttatgggcttaattctgaaattcatgctttttttagatgcttctcatcacatcaagggaagcacttattgatattattatctatttttacaatcatgagatgattttcagtcccttaggttgcaattagttgagcacaatgaactttagaggatacccttttagatggatttaaattgtttaccagactcaaaaggttgaaccctttttctgagcattggtcatcagtatctaaatattcacttttgagatcgaataactcaagactgatgtttggctgtcgtaatgtagctctgaaagaccaaagtgaaactatcagaatttattttccatcaagtttggctatttatcatttcgttgtccatggaagatgtacaattttgtaatctcctacacggaatttctactaaattattttgttgttccgcctgtctaggggaaatccaaggaaaaaggtgtataa

SEQ ID NO: 79144 - DNA, 844 bp, Citrus sinensis
  Intron number 3 from transcript orange1.1g015509m (locus o range1.1g014300m.g) derived from phytozome v7.0 (chr-ID sc affold00005; pos 1163625 to 1164468)
atcttggtgccataaaaaattggatagcgcttcaggtagtctgactatctcttgtgtattctcagatgaggcactataacttaacttgaaaatgactctgttgttgaatagacataatgccataattttttcatgtaaatctgatatccaattattttgcttacgacctttttggaatgctttgatagtggtctcgtattgctgctgatactattctcttccagtattttgcatagcaccttttttctcaaataaatccttggcaccttttgtgcatgaataataggttggcatacttgtttttcatactttatacttttagtagatgttgcatgtcagtttcaaaaaccaaatatgctagctggttgaggaagtgaaattgttgtcaacttcctgaatttatatttttcaatctgtgtaatgatttgggcttctaacaggactggttaagatgatctcatttgaagtaattgtcacctttattagtttacatcttttaccctcttttttttttggcagtttttcatcattttttggttttgtgatttcgtagcccttttgtgatttgatgttgcagaattcatatgagactctctttttcattgtcgatctccatgcggtatatctttcgaactattccttttgtctttgtataaccaatttttagactgaaaagtaaattaactcattcaaaaaaagaaaaaaaggaaattaacaaaatccacatgattgtttttatagattacaaaatcatttgaactgggttttcttacagcagtaattgcagactatttttaactctaccttttacttttatgtttgtttgtatagattacattaccgt

SEQ ID NO: 79145 - DNA, 429 bp, Citrus sinensis
  Intron number 2 from transcript orange1.1g005861m (locus o range1.1g005861m.g) derived from phytozome v7.0 (chr-ID sc affold00168; pos 226183 to 226611 reverse strand)
tggaaaattttctgtttttaaggtattctaatgtagttttcagagggctaaggatttaactttctgttcatgagtaagaaaatatgtctttgatttgtattttttgatcttgtgcggtgtttgtggtgaattcatctttttcattcaagcttatttgacatataagaaaatttgttgttttatcctatcgagtgcattgtaaatcctctacggtactttgattctttgttaggatttgatggagtatgaatcttttgctgttttatcttatgtttatattgtttttcttttgatgagcccttgaaaaatagaactcaacttcgaggttggaaatttttgttgtacttgtgcctgatattagtactcatcttcaaacgcaatgaacaatggattgatttttattacctttgcaggttgatattggtggca

SEQ ID NO: 79146 - DNA, 962 bp, Citrus sinensis
  Intron number 1 from transcript orange1.1g014112m (locus o range1.1g014096m.g) derived from phytozome v7.0 (chr-ID sc affold00049; pos 498761 to 499722)
cagttagctgttcttttgacttttggtgactaaaggcaggtgataataatgggataatagagcaatctctgttgttgattgtttttattgtgatgatcactttattttcattattttttgctttgaattttagtgggtatgttttagaattatgtgacaggatctgggttactgtgtttttttttggctttgactgattttaaagtcttccttggattccggcttctgtgtagtaaaagagatggttgctttgctttatttgtatctggtcatttatggggctttatttaactgttttatgggtctttgctcgctcttaagttggagtaattcacactagagctaaaaagttccagtttttggcgttttggagtagttgacgcgaaaagcttcatcttgtaggtatttttcttttctgggtttttgaattccagttcaggtttagcgaacttttagatttgggactgtgtctcggctcttgattttggtcaaaggtgaaggaatcatgacttgaagttgatcataaaattttccatactgttggtttttgggtttcatgtgaagggtttttcttttgtaaaattggcttcttcatgttcagagttagtgtttgctttagctttggcaagtgattcactttttgggaggcagcttatatgttggtcttaaaagcttattaacatttccgaatttgccttgaatttggagctctctgcctcaaaggttttaccgacaaaaataggcttttaagctctaagagtttttttcttagtctgtgaatttctgttccaaatatcagatgtgccgtcaatttgcttaagtttcttagctttgaattgattctttggattggtttaaagggatacatgtttctgctttctagttgggaatttcattttgcttgacctgatttttcagttatatcttttgtgcttttctagtttcaaattcttggtgttccc

SEQ ID NO: 79147 - DNA, 821 bp, Citrus sinensis
  Intron number 2 from transcript orange1.1g040494m (locus o range1.1g040494m.g) derived from phytozome v7.0 (chr-ID sc affold00011; pos 1710183 to 1711003)
agttgcagcttctattgttctgcatcattttggaggtaattactggggataataattttactttgaattccatacaggagatacactttactcactcattataatatgtgtgtaattgatccattatacttagttttttttaattaggtttaaaccataattgagtgtaaaatttattccctaatcccttgtacgcatattgtgactgtgtaagcctttttagagatatttctcatcagtttttttttttttttttttggtttgttttattatttttttccttttcaagagatatttcgtctgtcttatcaagatgattctgtttgcaagcttctgtcttctaacatgttattcaaattcttgaactttattcttccaatcagttggttctcaactattgcaaattgcttctgagtttctacggccaatgtggttgagatttagctctgtgcttagggataaatgggcaatgatatacacaactctaactagggaattctaactgatcaattcaatgagctttatttctagtgtatgttactcttgtatgagttttgttttgccattgcctaaagtacttattttgattaagcaattaaatgagcttgttgctactgcataatatccctagatatgggtgtgttgggggttttgtatcttttaatatatgccaaaagatctttgacttaaaacttgaagctccttataggaaagaaaggaaataaagtctgttatacatgaatttctttcagcattgcaacttttgatatctcagatatggtctattgcagtttgggcaggcttctctgagagaacacgag

SEQ ID NO: 79148 - DNA, 802 bp, Citrus sinensis
  Intron number 2 from transcript orange1.1g044976m (locus o range1.1g044976m.g) derived from phytozome v7.0 (chr-ID sc affold00003; pos 261482 to 262283)
ggagggctgttggggaggcacacgaacgccttaaggtttgtgaaaaaaatatctacacaattacctgcaaattttttctttcaaggttttattttattgttctccaagaaaactcaaaaaccaaaagatgaaaaaagccctatgtgctgcttctatgacaagtaatcagggattgcattgccttggtaggtgccgagaattaactgttgcatgagaaacatttctcttaatttccatatttatgtttacttttgtttcatggaggaaaaaggaaaaaaaaggttatttgaatggtagtaatcttttagaaggggaactttgacttgctgtctgcactagaaggtcatatgataaatcttctctgacacctttaaattatctgtttgtccgttttggagatctgtttttccaaaaatgtaagtggattttatttgcctgatatctaaattccatgttaaaatttcatgctgctgctgcttctcctttaataatttaaattacaaaatttcctttctcctccccgtatgaaaaagaggccataatggaacgtcttattgcttatgtctggatgaagtacacaaaaaagggaatgggtcatgttgctgtgattagcatgctagaatgcacttaacactgacattatgaaatgaaattactctataaatcaagtttagctgcttaataaaaagggacttatgtaatgtgcacaaagcttctttttgaagtaattatccgtcttatggcacatcagtttgttctgagaactatggtgtactgtgtattatttgtggttaggttggaa

SEQ ID NO: 79149 - DNA, 824 bp, Citrus sinensis
  Intron number 2 from transcript orange1.1g032941m (locus o range1.1g032138m.g) derived from phytozome v7.0 (chr-ID sc affold00162; pos 126306 to 127129 reverse strand)
gcaagaagtttgacaagggtatgatttcagatcctcgttgtcggttcaatgcatgatttcattgtctgttgagaacttgggctaaaaaccttggttttgtgttaacataatatcctagacatgcaaaatttgatgattgctcagctggtgaaactacatagtcattgacctataggatgagatgttgagtataattgattttttacctgcactgaatgatgtctgaatctaaactatgatgctagtctcgctaatcagtgaaaagaatgatctagaagaattactagcgtcgtcacatttccctgctctgcacttttttctctttcctacttcgtaccgtacacatttcgaccttgttctagttgatgaagaattcgaggttcagtattgggaagttctcttaaagtatctgaaaattgcttgcaattacagaaaagtggtccacaatgaacatctcaagaaagaattatattatgcttgaacttatttggataaaaaggtttatgtaaagattagatttaagttttcattgatctttaatttggttgtgggctgacatgaagtgatttttttgttcagattcctatttctacataatagagcttttttcttataatgcagtttattttgttaatactgtgttaaaatattttgctatatgatgtgccacacatgtttttagtcttatgctggtagttttcaccaggtgttcgtgaactgtttaacatttaattcatagaatttctttttctgcgcatattgggcttaccttttgatgtcattgtatagtttcccgcattgaagcacatagtcagaactgtgac

SEQ ID NO: 79150 - DNA, 584 bp, Citrus sinensis
  Intron number 1 from transcript orange1.1g032941m (locus o range1.1g032138m.g) derived from phytozome v7.0 (chr-ID sc affold00162; pos 127198 to 127781 reverse strand)
cagaaccgtcaaaaacgaaaaaccctcggcccaggttcgtgctttgtcttactctccctcttcgctagctcagatacttcaaaattatttttatttaagtttcgatatttgtttatcttacttcatttttttttaattttatttggcttttaattaaagctctgttaagttcttgaagaattaactaactttggtggcggcagcttgaaccagcataatactgattctttgttcaagactttagaaattagagcttaagggcctgtttgtaagaaaaaattaaataagtacttattctataaagcacttcgagtgccttttttctgttcaaaattgctttttagttgaaaattaaaaatgaaaacgagagaatgtatagtaagcaaatcaaatacgggtcttttttatatctgatttttacagtctaggttgtgacttgtgaggttgaaagggtgatagtgaatgcttatttgtttatgggcttgtatgtatttttgtatttgtgggaattcatgtagtttctttactttcttctttgtgtatctgtaggttacagttactgctgagggattttgttttttctt

SEQ ID NO: 79151 - DNA, 860 bp, Citrus sinensis
  Intron number 1 from transcript orange1.1g021098m (locus o range1.1g021146m.g) derived from phytozome v7.0 (chr-ID sc affold00135; pos 206425 to 207284 reverse strand)
tattctagtttctcacctgactctcaactcaccaagtaagtaaattttttgttttggttcttattttgttttcctcatcttgtatagctcactcgttttgtttattgttatcatcattattattactttcaaatagtttttttactcatcagatacatttgggaaagttttaattttgatcggttgtgggttttgattttgatttggtgggtaattttcttttgcttacattttaagcattgatttggtttcatgcaaaatggaaagtaagttcattatttgatcttaatgttgtgtttgtgtgatctttttgcatttgggttttgagttttgagacttttgatcaatggaggctctactttcaccgtctgcttttgcatgcaggagattacaactttctagctcttattcacattttgttttcatcgttctctttgctaattatttcattcatgtagtctgcttctgctcaagttacattttttctggttaaattttagatttattgaatttttgtttctggctctgatttgtttgctgggttcctcaggttaaggtccagtttcttgtcgtgcctagaatattttattttttccccttttttttaggtccaaaaataataataacaatattaattcacattgaacgaatgtattttaagctgtgtacttttacgaggttgtttcgagttcttgtttttaaaatttttgtttaatttctttttagttttgttttgagttctgtgtttagattttgatgaaatttaatatctggtattatgaactgcatgtttctgatggcctgactttgagatggttattccaggttccgaatttggggctgagtttgaagatttggtt

SEQ ID NO: 79152 - DNA, 561 bp, Citrus sinensis
  Intron number 1 from transcript orange1.1g014343m (locus o range1.1g011441m.g) derived from phytozome v7.0 (chr-ID sc affold00438; pos 76901 to 77461)
gacaatccagcctttttgcttccacttttgaccgggtaccgtttgttttttgttttttgaataaaagaattaatgatcaatttctgttgtactataatgttgtagattctgcttattgtggttgtatgttatttaccgaatgtgttttatatgaactgttactttaagcttctgtgtaatttctttcttctggagtccttggatgaattaatttcctatctttgaggatgtgaatgctagatttttggggtaatccaatttcaggccttcaaatcatgaattcatgaatttattgcatgtttttctttttaatttaagttttttttccctatataaaaggaaaaaagaacttagtcaattatcattattttaagacatcgtgatgggctgctgacagatcagttaatggattgattctcttaatcttcttgtgtagtcaaatatttcaattttgaatgtgttgttatttgtattggtctttctagcgtcaactgatttattgtcttatatttataattacatgtaggtgaaaaagagacgggtaacattgtcaacagaatt

SEQ ID NO: 79153 - DNA, 773 bp, Citrus sinensis
  Intron number 1 from transcript orange1.1g017125m (locus o range1.1g017125m.g) derived from phytozome v7.0 (chr-ID sc affold00014; pos 347608 to 348380 reverse strand)
agtctcctctccccaaattatctgttaatcttaccgtaattttttcaattgctctgctcattctttctattttagcttggctgtttaatctgtttgattcttcagaaaatgtgagagaaaggaacataaaatttcagattccggactccctcgttcatatagctgcctgatacggatctgtttttaataatcattatttgatctggattttatgattctttgtgattaatgtgctgccgatggatctataatgttcgtgttttgttcttgtttgctgtcttcattgtggagcaggaactgacgattgaattatatgattatttcttgtttgaatcattttactataatgtgttaagcatcaaaggagagattgtactttgtttcgattttttgccatgtatggtttaagatttttagtttctccatgatgttaaaaatttcaaatctcgaaaattaaaacttatggtttaattacattacttatcaattgtgttctgtatgcatgaggattgagaaatttttacataattttgtttttgtgggaccatgggagagagtttgtttgtcatcttttgatgtgaacaatttttctgttctatatgtggagtaagttagaaattgtgtagatcaaatgactcaaatttgcttagttgtggttgctcattgattgctggaatttattattgatgtctatgttcctgctttgttttgttttcgttaattcctgttctaattgtgagtcattacttacttattccagctggtgatagaag

SEQ ID NO: 79154 - DNA, 546 bp, Citrus sinensis
  Intron number 3 from transcript orange1.1g023866m (locus o range1.1g023866m.g) derived from phytozome v7.0 (chr-ID sc affold00218; pos 20013 to 20558)
gaccttcaggtttgcagcgttggagtcgttgggtggtaaagtgtatatgtgtttagtcctagagaaaatggtgcaattatgtaataattatggttatggttttcacttttcacgattgattaatatctaaattgctttgagctttgaagatagcttgctcattttggggatatgattgtttgctagtgcgttagtatttttggattaaaatgaaatttcatactagctactcctctgtaagatgccagacgtagtaatattgtaccattggtggagaactgtattggagaaattggagggagaaaatagataaagaaagaggaggaaattgaattgaaagatcagacagtctaactttgtgaatgtaatatttcctcttttaatactataattgggttgctatagtctcaatttttttttcccctaccactttataattgcaccttctttctactcattttatgcatccgattgcttcttttaattttttagtttatgcttcagttttgggtagctgaaaaaaaaaatgttatattttgttcagga

SEQ ID NO: 79155 - DNA, 489 bp, Citrus sinensis
  Intron number 1 from transcript orange1.1g006931m (locus o range1.1g002211m.g) derived from phytozome v7.0 (chr-ID sc affold00023; pos 1372426 to 1372914 reverse strand)
ctttacattggcctgctttcctgttgagctttgaggtgagtttttcttcctcgtgacccccggagatcagctgaattttcactcgttatttggttgcttttgggtggtattgcttgcttgttttattacacttctttagaaagacaatattttctttttctttttttccttccctccatcagccttttgcttttggcttctcactattattaagcttttgcatgttggatcacttaattgctatttttcgtatgtttggaacttccaattgttatttctctttcaaggtggaaacctgttcagaaattgattttcttattacttttttcatcaccccgtgttttttcagctactcgaggttgtccttgccttggtcaaggaagattctccttcgcagttcgttcctgcagattttcttaattcatttcaaaatttgttgtctgtcttattttggatgttaggtggtcggattcatcatttagcatcacc

SEQ ID NO: 79156 - DNA, 683 bp, Citrus sinensis
  Intron number 1 from transcript orange1.1g014151m (locus o range1.1g014151m.g) derived from phytozome v7.0 (chr-ID sc affold00133; pos 377060 to 377742)
agcgagtcttcaaagtaatgtaacttttacattctttactcatactgtattttttggcaatattttaatttatcagtgtctgaatgatctgggatttgggtgtgtagtgtgaacttaactttagcattgctcgcttttgtttctcttagatatctgatttttagcacttattgcgggaattactttgaaattgagagtttaggaggaccctatgtagactggtggggatgaatttattgttggtggatttgtaatttgtcacaagcattaaattaacagatgagagcaatataactagtctttgtggctctataaatggatattttaatggaaacttaaacgcaacatggatttacacagtgttggtgctaattagtctttcctagctaatcaagagcacctatctctgcaaacttgtaactcagaatagtagcataaaacaaatagaataaaaacaaaaaagtattcatacttcttcaatacctctaaaaactttatattgccctgattgaagactagaggataaatcatgcttgtctttttgtcttcctttttgtcacaatcgaacaaattagatattctgcatagcaagattttcttctcatggccatttatgttaaaggccatccatctctttgatatgtgttttattttgacaactaattgtgttcaggccttggatc

SEQ ID NO: 79157 - DNA, 737 bp, Citrus sinensis
  Intron number 1 from transcript orange1.1g018372m (locus o range1.1g018157m.g) derived from phytozome v7.0 (chr-ID sc affold00049; pos 310521 to 311257)
agtttcattctcttgtttttgaatctcccaataaggtaataaaagaaagtttcacttttcactcgtaattttgaattagggttttgccagggtttaaggctttttttctaaatttgactatttttcattcaatttgtgtgtgtgtgtgttgtttttttttttggttaattgaatacgagttcccatgtgctttccgtttatgttattaaagttggggacttttatcaagtttctctattttagagattagactagtgtttctgataaatcacagaattgcctgaattctatagtttttgggattaattggtctatctgtgtatgaatgagaaggtgcttcgggattgataagcgttgatttttattatgtatgtaatcagggttttactcggtaggataactgtttttcttttacaatttattgggattgatatgaatcagctggatttattttctctcttacatttgacttccccccccccccccccgggaaagcctcctgctgttaagcgtcttaagtatgaatatgagaacttacaaaaactgaatatgagcagactttttttttttccatgcatttgaatattatccatacttgaatgcttctttgatgttttcttttcttcctttgtatggcatatcttcaagtttgacatgcaaaagcttgagttatatgattgttttctgtgccagttgacacaggtgtctctgtttcatcaaacgacactcaattcatc

SEQ ID NO: 79158 - DNA, 652 bp, Citrus sinensis
  Intron number 2 from transcript orange1.1g000828m (locus o range1.1g000828m.g) derived from phytozome v7.0 (chr-ID sc affold00014; pos 931968 to 932619)
tggatatataagtttggcttttacctttaccgttgacttaattttttctaaggatgtgaactttttgttgtcaaagcaaaatttttcaagagaatcaactgcaggaaaagttagcttgatctctttaatgtagatttttctataccactaggttggattttgttgacaaaccttcatagtattccatgtggtatatctgtgaagctggttcttgggaatctgtccatttgatttttccaaccctattttattaatttgtatctttagtcgtggatctggactatgagaaacagtatataagctcatttcttttcttagactctaggccacagtacttttttataagatagtactctggtatgtcctcaactctttggtatcctcatagacaactctagcatccctaatttatgcatctgtttttctgcatctgcatattatctatgttacattctttcatttattctaaaatgtaatttaggacagggacagatgcagccggcacctcaaagaatctatctctaaattttcttcctcccttgtattgaaggaggtgcagctgaggatgaagtcggtcttaggtttaaataatataccttagaaaaaatatgccttctagtaatgcatattttgatttgtaattctttcaggt

SEQ ID NO: 79159 - DNA, 697 bp, Citrus sinensis
  Intron number 1 from transcript orange1.1g018433m (locus o range1.1g016424m.g) derived from phytozome v7.0 (chr-ID sc affold00023; pos 127405 to 128101)
gaatctctgctcatctttaccctccaaatctccaggtatttacatgtattattgttcttcaatagtgtgttttatttatgaatcttttatcatatgatatggtgactcattctttgcatatggtttagttgttttcttggtcatggctgttgtttttgtgcacatatgtaccaagagtagtttgtttgggattgtggcatcgtggcttaaatatgatagttgcttgctgtactcgaagctcaagccatcaaaagaaaaaattaatgagtgatttcataaatacctctggatgttagttttagcatattgggatgttgtagtatttttaatagagaataaaatcacttgctgtcaaatataaatgagtgggtaacggcaacaaatattagctgccaaataaaaactattgctaatcaccttttaactgctgtgtttttcaatgtcaaagtagaagtaacgctctacccataagattattaataattcataggaagagtaattaactccaattttttttatagccaaaattgctttgtctggggtcagttcatatataacactataacaggaattgaataaattgagaatggagtctactgttaatatttgtattgtgtataaattttggtggacgttagagatcaaattaattactactgaagttgttggatgtgctctgtggattgtgtgctggtag

SEQ ID NO: 79160 - DNA, 527 bp, Citrus sinensis
  Intron number 3 from transcript orange1.1g033383m (locus o range1.1g031391m.g) derived from phytozome v7.0 (chr-ID sc affold00328; pos 54001 to 54527)
ttattcacctttggcaacttgttggctgttgggaggtatgttcactggtttacttaattgacagatgggctttactgattatatactcttctcaatgttacttctactgagtctgatatcctaagttttggaccacaacaagtttattggtcctggtgatgacggcatcactcatgtttgaggaccatggtttttgtaatatgagaaactgtactcctctttttcattttcgtgcttatgctgaagaaaatcaagtaactggtgactgattctagctcgggatatcatgaaaaaagaataaaaataataaagaaaagagcattgtggtatttaatgatcaattttggactttgattagctattgaaatttgaaggatgattttgtaatgttcaaaaggacaatcatgtctcattttcagaattgattttctcctgcaatgatgttcttcccaacatttctcagattctaattctttttcgatcttttggcagcacagccttcgttatcgggcctgctcagcaaataa

SEQ ID NO: 79161 - DNA, 657 bp, Citrus sinensis
  Intron number 1 from transcript orange1.1g020824m (locus o range1.1g020824m.g) derived from phytozome v7.0 (chr-ID sc affold00005; pos 2253555 to 2254211 reverse strand)
tgtctgatcggattgggaatattacatttcataaggtaaattgcaatatcttatttttatatgttgattacatttgtgctgctatgagtttttttttctttttctttttctgagtgttaagaagtttatatgaagtttattaagtcttgaatcttggaatttatatagtatcctgaagtttgtggtaggttattgaagtgctattttagcttacttgaactattgatccagcagatgtatcttcatgagcagccatttatgaagttttgagggaaaatgtcataagtaggagatgatgtatctgacgagctgtgtggggactttttatatagttaagataaatttggatgaagatcatggtgctcaagcaccagtagtttttctgcttttgattttaagcttgtattcctttaggatttgctgtaggtgttgcatggaagcatggcatagctagcttctgaatataaaattatagctataaagggcgttggctggttttgtccaatataaatgttcagatgctgaaatgatacaaaagaccaccaggtcttatgagtatttatgaattttgtataattactttcgtgatctgatttttgttagccttgcttttttgtgccagttggtcggtcgtcttgacaatagtgctgtttcagc

SEQ ID NO: 79162 - DNA, 823 bp, Citrus sinensis
  Intron number 1 from transcript orange1.1g020171m (locus o range1.1g020171m.g) derived from phytozome v7.0 (chr-ID sc affold00014; pos 1530618 to 1531440)
ccgcggcgcctggaaggtgaaatttttattaattttatttggagttctaattattattattattttttggtttatgtgtttggttttgaaaatttgacgatttgttatggttcttagatgtggtttttttttttatgggtttcatttttgtaaaagaaaatgcaaatgctttgtagctatcaagaatactaattataggagagaaatttttatgtgtttgagggtgttcatgtggaaaatgggagtgtttattcattttttttttaatttcttatattgatgctgaatttaatttggaatggtgttgatttcttggtttttttgggcatctgaaaaacattaattcttcctttagctgaataacatgttggattttgagtgatgcttgaggattttatcctttggttgcttgaagttttgttgacaagcatcgttaacatttgagttaaaaaatgtggtttatgacctggttgcaaagtaaacatttggtgctactgatgttcaaataatataatactggtggactccccagttattgtcatgagtgttatctagagagaagccaccttcatcaaggtctgcatattgttgacaaagttactaatcattgaaattatgaacctggttaattatcatagtaatattgtcttgcttttagctgtatactactttatagacattcttatgtttatgtttcattcgttttagggatgatatgaatcacattttgcatgtgtcaacaaatattcttcttttcttagtggtttattgttctttttccttttttcctgcagtattactgtcgcatttttcggtaaagaag

SEQ ID NO: 79163 - DNA, 606 bp, Citrus sinensis
  Intron number 1 from transcript orange1.1g013754m (locus o range1.1g013197m.g) derived from phytozome v7.0 (chr-ID sc affold00065; pos 150750 to 151355)
aatcgagataattggttagtttatttatctggtttgtttgatttttctgttaagatgtgaagttgcagtataaggttgaggcttgatggggtttggagaaaaagtagaacagttggattacttattactgtgttgggtgaaaaattggatctgaactgtagtatgttacatgacaaaagaagctgcgactggtctggtctagttcagtttggatggttgtgaaggacacttttgtttggtggttgttaattgagagctttgtactattagttgataagattcttagaaatggaatcgctagaagtacactttgtttttttttttccatggttgtaattttcttcaagctgtgactgttacattttttttttccgtttttgtgctgtttgttctaaaacttggaataatgggattggttcttaatggttgtagtatgaggtttatgtcatattgtttaatttttatggctatatgagttttgagtcttttgaaagttttttctgtaattggtattaatatgaggattatgtatgtgatttactaacctttcattaatttggttaacttttagatcttaggttaaagaaaggaagttaagggaagtgg

SEQ ID NO: 79164 - DNA, 871 bp, Citrus sinensis
  Intron number 5 from transcript orange1.1g030433m (locus o range1.1g025628m.g) derived from phytozome v7.0 (chr-ID sc affold00005; pos 944501 to 945371)
tgctgactgaaggaaaaacatcaagatattggctggttggttgtgcagatttattccttgacttctgaattttcaagaatatgtagtatgcttgctttcctctgaaaagatgcaaattgactattgcttatacaaaaggtcttcacctgtcttttgctattgagtttctcttttggttggaaactgactttagtaattcaccggtgatgcaatttaaaacattgaaaggcatactgctttgtaatttttattggcatgctctgcaaaaaacgaatccaaggaaaacatgtgtagaatataattgattgcattagaatggtattatagaaccattaaatttttggcatcttgatatgggattggagatgaatttgccttttgaagaaagaaataaacacaggatctgagacttttttaaagataaaaattgagagcatttggtgaaattcattaaaggcccttcattttctgcttttcctattcagttgacaggaggctcatttcattcttatacatgtcatgctgaaggactatacatacaatcaacattttgttttaagaaatttacatagcataagcttataacttaaaggattaacagccaggtttatgtttgtgaattcctagatgttttgacgtctcctgtctttcaagtatgtccaacaaatgatttgcttttgtaaagccgctaaattttgatcgaaggtcattctgtactgctatcacgtatatttgatattaacggataacaggcagaatggttgtttgccttctgttatatacaatggattcttgttctgttatatttgcatgaccggcaaaaatgaatctggcaggttgaatttcgtgcccagtgttcatccacctgtat

SEQ ID NO: 79165 - DNA, 668 bp, Citrus sinensis
  Intron number 2 from transcript orange1.1g042013m (locus o range1.1g042013m.g) derived from phytozome v7.0 (chr-ID sc affold00049; pos 185142 to 185809)
ggaattcttttggtactatagctgcactcatacaggtatgcctaataaacttatgttttgtttttgtttttattttttagaagagagaattatttcaagatttggctcccttgttgtggaattcttttggtactattgctgcattattacaggtatgctctttatttgttggtcttctatttttgtgtttcttccctcagccccatcatttgtcataattttatatagctcattcagcaatatactgcttacacaacgaagctctttgtctctttcattactttttccccccttactgaagcttctgcctttctgtataaaagttatggtatgctacatgttgtttagttagggataatttatgttgttctgatgtcgtaatttgagaaaggattaattataaagcagcaggatgaacggttatgaggaaaatggaaagtggacgattttttaatggaaagccatgcatttgcttattgtctttataatcaacttccggaaaggtcatctgttgttttttgtgctacatctgtctctgtgcaggaatgcagtaataattgagttgtaatgtagtcagttattattttctctgttcgtcatattggattcacatgttttaccaccttttatcaggagatagtgtcaatataccctgttctatcaccacc

SEQ ID NO: 79166 - DNA, 362 bp, Citrus sinensis
  Intron number 2 from transcript orange1.1g043551m (locus o range1.1g043551m.g) derived from phytozome v7.0 (chr-ID sc affold00003; pos 2707373 to 2707734)
ctggaatccgacgcaaagaaagaagggaaaacaaggtagtttttgaaacttgatcagttaatattataactagcttttgatgattatatatacatatatgtatgttacgtttgtgtatttttcttgctgattaattaattactagagttctctaatctgttgtcatttgtgcactggaaatgattgtggattcattgctgtcgcaacgtacatggagcagtttatcttggtgggtactttaatctcctttcttcgaaagttagcatctcaaaatttaattaattaacttgatgaagagggagagatactaaaacgatatttgttttgtgattgttaattaattaattcatgatcaggagcct

SEQ ID NO: 79167 - DNA, 320 bp, Citrus sinensis
  Intron number 1 from transcript orange1.1g034102m (locus o range1.1g034102m.g) derived from phytozome v7.0 (chr-ID sc affold00074; pos 109682 to 110001)
gtagccattgatgttttcaatttattttcacaatggaaaaaaaaggagggttaatgttgtttcttctaaaacaaggataattttgtttttatcattagaccacggttttggtaatctgtaagaatctgaagagaataaaacgaaaagaaaagtcaagtcaatggaaatgagtacctcaccacacgcattagaaattttagaatattatgtttgcttgggaaactttaattcgctaaccttataaatctcatcaataatatgttgtctccattcaccaaccatttcaccggctgcggaaacaaaggcagccagcagaagcc

SEQ ID NO: 79168 - DNA, 548 bp, Citrus sinensis
  Intron number 1 from transcript orange1.1g017636m (locus o range1.1g017636m.g) derived from phytozome v7.0 (chr-ID sc affold00003; pos 4334316 to 4334863)
atctggtcctgcatttgctgccaagtactttgaaggtatttctatgttcagttctaacatcttagctgcctacaatataccgcccattttgttttattttagtttctgttatggtgtgtagtgtgagctgagatctcttcaaatttcttctgttctttttgcaaattttgtaatatttggaggattttaatgaggcatagcttagctggtgatttagtatgttcttctcacttaaaaaaattgaagctttttttgtggaaacattgttatttattatttgctcattttttgtatttttagctcttttctatgtttgacacttgattctactttgatctgttctacgaagtttgtttttttaccttaatctgatttgatctgttgactgcttgcttttgtgtggcttttactgttctcacttttcatctacactaacttgttcgcagatatataaacagctttcccaagtttgtttttatagtaaagatttactgataatccctctgttgtacttcttcttcttcttttttcatcagggtacctcccaa

SEQ ID NO: 79169 - DNA, 681 bp, Citrus sinensis
  Intron number 1 from transcript orange1.1g007899m (locus o range1.1g007812m.g) derived from phytozome v7.0 (chr-ID sc affold00011; pos 1521414 to 1522094)
gaacaacttgtcaacttcataattcggccacccaggtaaacaaatcttcaatcttttcattttctttttcattttttcattttatttataatattacatgggttgattttctttctccaagttttgtgtgtctggttgatgaggacgaggaaataaattcggacttggtgcttttagaggaaaagatttgagatatattttagttttcttgcatcaatttttggttgctgttaaatttttgtggatgttgaattaggttgaattagcctgtttgttggatgtgttcaaaagtatagatcttttcgagttaattttgacggttacttgagagtaattctatactgttgaaattatttctttatggtatttgtttttagtgctaatcttgtcaaaaatgaacttttattattgacttcaattggaatttggattgggtgacgtatgaggctttgagatcgtttttcttgttttagttatctgtggacttggttttcatataattaatttaatgtgataacgaaagtaaagaaatcaggattttggatctctgaatctagtaggtcctgaataatttattgtcttgtattttttcagtttgacaacagaaactatgctttagtcaaatgaaaagatcataagtctatatattttcgtgatgcagagctgaatacagtccagaac

SEQ ID NO: 79170 - DNA, 726 bp, Citrus sinensis
  Intron number 2 from transcript orange1.1g027951m (locus o range1.1g027951m.g) derived from phytozome v7.0 (chr-ID sc affold00011; pos 202113 to 202838)
aaatctcaagtttctcccttgcattgcccccgactgtgagctcattctctatcttcaactttgagctggtcctatattttcagttaacatttttcttttaggcattttgtatcttgtgtgtatcctattagtttttatcatattttttggtgacgattatgacttatgagttataagggtgaagtttagttcaatttggtttgggattgttgtgggattccaattatatgcaatgaaatcatgaattaactggctatagagtatatagtatttgattgatttggacaagcttattgctaaaataaggatagaagatatggcagtattttggattcagttgtataatggagtccaattgtattcctagaatatggtgttcacatcaaaagagaaattatatgtaggactgttgttttcattttctaattcaagtcgccagtacatgataatcacagcttaatttactgatgattcgtgtatggtgagattcaatctaatttctctaatgagatttattaaaacttataaagatgtgatgcttgtatcgtatccaaattaaaaattgagacttttagttttctaatgctgcgtgcttggccttaaggtatgatttgtttcaatttgtattttgtgtttaatggagaaacaattccacagtttttttattttgatgatcgatttgcctttttaggtacactcaatcaggattgcgcgccatcaccctcc

SEQ ID NO: 79171 - DNA, 757 bp, Citrus sinensis
  Intron number 1 from transcript orange1.1g037309m (locus o range1.1g037309m.g) derived from phytozome v7.0 (chr-ID sc affold00137; pos 38812 to 39568 reverse strand)
aaacatatacaagcacagccctacggaactctccggtttgtcttctttaacttattcgtcttttagtgttttgtttctaggtgtatgaaagagtcctagggtttaacaactgaaaacacctagtaatatgtgaaaataataataataaaaattgatactgcatttactttgtgtattcttcactgtccattgatattgtttatgttggtacttgcattagtggatgcgttgtaatgcgacttgtcatttacagatattattttgcagattgttgtgcaatcaattatgcattaaacgacagttaatgggtctttatcagaaaatagtaattgtcggcaattttggaatcgaacatatttaacttgcaacacatatattatattccttttcatgtcaagcactagcattctttattgtcaacttaaaccctaaacacgataacaatgtttgtttgtgagttatttttaattttaagtaaatttaccatagttctatagttagggtttgtagaagtcaattggcttaaggattcttcagagcctggtacaatcatgcatgaaattaactaattaatcgagtgtttcaaagcccaaattaaaattttagccccttttggtagaattcgaaatgggtggtcggaagcagcctggaagcatcaaaacgttttatttgattgcatgacgaacttataattacttgtatcattagtttcttttttcctgattaaataaattaagatctttgacaacagagaaat

SEQ ID NO: 79172 - DNA, 494 bp, Citrus sinensis
  Intron number 1 from transcript orange1.1g015611m (locus o range1.1g006929m.g) derived from phytozome v7.0 (chr-ID sc affold00106; pos 199272 to 199765 reverse strand)
gcgcctgcttcttgtgttctttgccatttcatcaagtttgtttatcaattatccttttctctcatttctttcttctttctttttttttaaagttcaatattctgtgaggatgactttgtaggcaaattccatatccaccctccgtgaagttgaaggaccatctattaatttgctgactttttggaattaaatttaccatttatctttttctttttttaagtggtttttgcttttggaccttggttactattagccgcttcacttatgacctggttgaaatcctgaaaaagacattcaatgattgtgatttagtttcttttattgttatttttaatgtgggtttatagctatatatataaatcctgattttagtttgatttgtttcttttctcctgatttattatggtgattttattcaactaagtaagagatggtcatcttgttttgtttgcaattcagttctaggcctcgtattcaaagacaagtgcttaatt

SEQ ID NO: 79173 - DNA, 466 bp, Citrus sinensis
  Intron number 2 from transcript orange1.1g022356m (locus o range1.1g022356m.g) derived from phytozome v7.0 (chr-ID sc affold00227; pos 38104 to 38569 reverse strand)
aaaggtatgcatttgactttagtcatgacatcaatttcagaaaacataaaaataaaaagggcaaaaataaaataaaataaaataaaatcctatctgtctatcttcttcttgggtcccatgatcccttccactctatcacaacctactaattgttctataaaagctattttgtgagtctttcgtagttgggcccaggttcacaattgaaaattattagttgtatacatttgcagtgttttttaaaatttaattttgatgttatatggaaaaaattaaaaaaagtgctaaacaatagtgatgttttaaatttgcactgtgcagacgacctcactgtgacttgctccaatatatctctcgataaaacctattgttattggatatattatcataattttttggctcaatattttttctaattctgatgtgaacaggtgtttcatcgttcaacatagattttgcagcgaag

SEQ ID NO: 79174 - DNA, 525 bp, Citrus sinensis
  Intron number 2 from transcript orange1.1g033702m (locus o range1.1g033355m.g) derived from phytozome v7.0 (chr-ID sc affold00056; pos 452747 to 453271 reverse strand)
atattaagggaatccttggctctggtatttatttaatcttttattttaatcatgttttttttaaaaaaaaaaaaatagggtctgttttcttatttcttcgtgcccttttaaccatgtaagcttggaggaaaaacatttaatgtcaacatttataatggaattgtggtgttattgatatgcttagccagcactaaattggatctattgaacttgttttgtttaataataataataataatcatgacccttttgttccaatttattattgtggagtttgaattgtgtcattctgttctttgcttgtatgcagctctatttatttgaaacttaccatctttatctttttggagtttaaaatgaatagctctgctatagtataggatgagcatttgtgttattagtagagtattgagaatgtggtattgttgtcattcgtgcgcatcatttcattcttgcacctgaagggctgaaatatgaatctgttgtgcagttggagctgattgtgaggacaataggcttgagctc

SEQ ID NO: 79175 - DNA, 810 bp, Citrus sinensis
  Intron number 1 from transcript orange1.1g025195m (locus o range1.1g021153m.g) derived from phytozome v7.0 (chr-ID sc affold00880; pos 14960 to 15769 reverse strand)
gttcttctctgatcgattatgtaagagttctccattatatttccccgtgggtttaaccttggttcgttttcttttaatcttgttagacttgtatgtttattcttttggttctatttttattggctttttaggctcatgttgagcagtggacggatttttctgccatggagattgatgctaatatctccaggtgggtatatccaagacttggatatatgcaatacattcctccggtgagttaatgtccactatctacttcaaacaaacatgtgcatggcttggtccttttttttaacttttacatttgtaaataatacttgttggtatggttgaagttatgcattttttagcatttgatatcatggattttctttgtttggaatttcaattaattttcttctctgtttgcaacttttaagtcgccctcccctccccctggggggcggttgcactagtaacgtagactaaataataggctcttaacatttggcatttgttactgttttcttgtacgtgaagcaaataaatgcaatgaattaggtttccaaatgttttagcagacgagaacatgaaatgtttcttcgttcactttttgtatataattgaagttttgttaaattagcatttaatccagtaaaccgggtttataaagtacatatacattcatgtagtttagttttcatttctgcttggaaggggtggatatttcattttgcacctttgatcaattgtttctgtttagtttgacataactttgcttatgttttgtatgaaggctgaggaaggtgctgttgccgcactgaagagagc

SEQ ID NO: 79176 - DNA, 938 bp, Citrus sinensis
  Intron number 1 from transcript orange1.1g002211m (locus o range1.1g002211m.g) derived from phytozome v7.0 (chr-ID sc affold00023; pos 1372426 to 1373363 reverse strand)
catgttaacatctgttcttactctaaattacggctgcaccccggattttcttttttaacttttgtctcttcagttttgtcgaaagatttcatctttgacaacggttgttgaccatgattgataaacagtaggaaagttagctccctgccacgtgataagtgtggcaatcgctaacccaacttagcaagttgttctttttcatgatcttgaagtactattattcccttaattcttaaaaaaataaaaaaataaaaaggtattcccttaattaagatattaaaaggtgtacgctgctgagccaagtggttgcttctctttcctgtgagcctttaggctttttaattgtaagtattacttttaacaagagatttctttttttgggcactgttttttttttttattattaagaatatgggtggttgtgttcctggtagtctttcctttggttcctttacattggcctgctttcctgttgagctttgaggtgagtttttcttcctcgtgacccccggagatcagctgaattttcactcgttatttggttgcttttgggtggtattgcttgcttgttttattacacttctttagaaagacaatattttctttttctttttttccttccctccatcagccttttgcttttggcttctcactattattaagcttttgcatgttggatcacttaattgctatttttcgtatgtttggaacttccaattgttatttctctttcaaggtggaaacctgttcagaaattgattttcttattacttttttcatcaccccgtgttttttcagctactcgaggttgtccttgccttggtcaaggaagattctccttcgcagttcgttcctgcagattttcttaattcatttcaaaatttgttgtctgtcttattttggatgttaggtggtcggattcatcatttagcatcacc

SEQ ID NO: 79177 - DNA, 753 bp, Citrus sinensis
  Intron number 4 from transcript orange1.1g014792m (locus o range1.1g014792m.g) derived from phytozome v7.0 (chr-ID sc affold00034; pos 318486 to 319238)
ttgatttgactggaaatttgctttcagattggaaggtgggtgttcctgcatttatctgtgtgtaagatttgcttcaaatatgtattgttatcgctctcttcccttttctgttcgcattaaattttgtactcatttaatcagtgagttatttttttgccatctttaccaactctcctaaatgccagtaattcatgattgttgtataaattgttaaacgagtattttttttcatcttgagatatagatggaagtgctaatttcaattacaatcaattgcttggggagtgttcattatttacaagcaatagttagttttgaactcgatgtaatggtttgagtaacgcatttcttttatttatttatttctattcttttttccatttgcatatgcttttgttctctagatcatagatttatgatttgggtttgtattatttaaatggatggtgtcttctcttttctgctgcttgttgaaatttcgttatatgccaaataaatactggacatattggcttgatttaaacgagggatgttgagtctttaatgccttaacatttatatgacaaaaggaaaatagaaacaaaacagaggttttctgaatctttgatcttgcttcctttcatacatcagaatcggtaatggttcatttgcctttgtgaagagttatgggcattcccagggaagtgttcatagatgtcgaatttatctttcgttgcaggatattggtgcctttggtgagcagttgcctgctct

SEQ ID NO: 79178 - DNA, 582 bp, Citrus sinensis
  Intron number 1 from transcript orange1.1g010445m (locus o range1.1g002926m.g) derived from phytozome v7.0 (chr-ID sc affold00003; pos 4286342 to 4286923 reverse strand)
ttgccgtacggttcttgattttgcttttgatgttctcttctatttcgataatttaaaaaattggtggttaggttcttgaattttcagcttaatttattatttttcttattattctagatttttttgtttgttttttaattcaagtaataatgtgctttagtatatttttactgcaaatgagactcttgtaggaatctgttattaatgtatatatctcttggccattgtaacctatataacgtacatttcggttcagatggctttagcatttttgttgagtatccttacaggtggtagatgtcactcattactgctgcaagctaatgcatttttcacgacttgttttgttgttctagaatttggttgtctgatatggactgttttgacctttgttccctttaattgaaagagagaagataggaaacaaattactgtcaaaaacctttggtaggacttttaaggagggattccgagagaaagttctcaacctccttgtgagatcatttgagtttatctcgttgttgaatcattttctttacttgtgcagactgcctcaaaagatattgctggagaagagcaggg

SEQ ID NO: 79179 - DNA, 682 bp, Citrus sinensis
  Intron number 1 from transcript orange1.1g034201m (locus o range1.1g034201m.g) derived from phytozome v7.0 (chr-ID sc affold00005; pos 2176144 to 2176825 reverse strand)
tgcttggaagtcttcccttcagcctttccaatcaggtaccaatgttttgtttttcctgctctttttttcttccttgattgtacgcaaattattctaaatcattgcacggttcattttgttagatcgaatttctatttggtaacagcggcgtgctgagttcttttgcatttcttctattctctttcgtggtagtgagaaaataaaattctacagttgtgtttggaaacttggatatcttttttgtctcgcagcttgggttatatatatatatatatatatatatataatttgataatatttattaaatttgtaatttccacctgggttctgaacttctgatgatatctcaagtataaacgaattctcatgatttatgcattatgatgactatcagtgtgagtgtttttcaaatttttgttttagtaattgaacttgtttgtttattctataagaatttgtaactattcttttcacaagtgatgattttattggcatcttttgtaacttgttttacgctattacttgtagcgcattgtttaaatttctataggttataagaattttgtgtagagggagtagcgatttatgttgactctgattgaaactattatgaccacttatgtgtttagatataataaatatacttttgatggctcttcttaactttcattttccagtagca

SEQ ID NO: 79180 - DNA, 945 bp, Citrus sinensis
  Intron number 1 from transcript orange1.1g010968m (locus o range1.1g010968m.g) derived from phytozome v7.0 (chr-ID sc affold00023; pos 313333 to 314277 reverse strand)
cgggtcctgctcctacacgatcacggcctcaattggtaaagttttcgcactctgttcggtttattcgaatgaaatttgaaatggggtttttctttttagcttgttctatgattttattttttttattttgttactggagttgatatcttagcggtgtgcttctgctttgcaagttgcaactaaagcgtacactgactttttttaactgttaattttttcaaatgtcgcagtggcttaaacttgactgttagtgatttcatttcacagtagtcatggattaaaagctgggacaattcaatcccaagtacccagtttctggtttctagtatatgctactgcacaattggtaatttgagggtattattgaccgaagtttgcatctgttcatttgagccgacttactagtagtgatattgacaccttaattatttaaaacggtttctgtttttgatggtggtttggttcctttcatccttattttaaaatagcataaccaattggttccctgcttgaaatgccttatcttacctcgcaaagcattgattaatgtcaataataaggagaagggagcgagaatgcaatgaactatgcggtgaccaaacagaaccattagctaaatgaagccgatagttgaattaggttgttgtctgttggtggttttaactttatcaagtctcaaatagcaaaattggagtttgttttcccctctctagatttgtttacatatcagttggtgcttaaagttctgtgcaaattagcattgtagtttggttcatgtgaggtgcttcatcttatggagatagtttctgaactttagggattctagcatttgctttcaattaaccctttttcataggtttttttttgctgtgacgagtctaaaattttgatttatggtggttttgattattttaacgtgaaatggatcttctaggtggattcctg

SEQ ID NO: 79181 - DNA, 648 bp, Citrus sinensis
  Intron number 1 from transcript orange1.1g010363m (locus o range1.1g008975m.g) derived from phytozome v7.0 (chr-ID sc affold00005; pos 2704782 to 2705429 reverse strand)
ttcaagcgatccgccggtgggttttgacaatcaaggtcagtcatcttttccccaactgttgttgcatcaaaagggtttgtttgtttgtgtttttatttgggtatgtgtagaattatgcagaatgtagttctgttacgtgaatgctgatgtgggtttattgaacttttatctaaattttaacttctaatcattttggaagtttaaagcttttgaaattggagaaaaaaaaaattggaatttggtaacattttccgaaaaggatacctttttctttctcacggtttcaatgtatgaactatgaagcttatcttgaaggatatgcagagattatggagcctgggtggccataaagttaatttcttgcttatttttagtatctacggtattgtgtagttgcaaattaggccagaagagaaagacaatctcgatgtaggtgaaaaagaatttctcagtaaaggtcaatttggatctaattcaaccataaaaggcagcaaaaagttacctttttttagaactttatttcaccttcttatttgttacctgatgatactcaatcttgtgtgctttaaattgaatgttattgatattattgttgttgttgttttggcaaatgtgctgacctttataattgaaactgtggcagggaaa

SEQ ID NO: 79182 - DNA, 988 bp, Citrus sinensis
  Intron number 2 from transcript orange1.1g045650m (locus o range1.1g045650m.g) derived from phytozome v7.0 (chr-ID sc affold00095; pos 131354 to 132341 reverse strand)
caagttgggttgcacactccactgaggtaatttattcttcccttgaaaattttcagttccatagtcattttctgtgttgtttctttaaagatgttgcataacctgctagttgttatttagtcatctataattgtgaagatctacagtagagcatgaagtaggtgcacacgctaactaaggagacattacgaattgtgttatgaattatgaagggatgcccttcagcaaacatatgattgctgccacacatattcaaagattctccaccttgtttaggtttctttgatgataagaagatattacaaaagacttcctattgaaattcaatgggtttagtataaatagattatgctgaaaactgacctatttggaacaaggatataatacattatgaagaaggatagaatttaactgcatagcagcttagtctgtttctgattaaatctcaccttacaatgatgcctatttcactagggtgagtcaatatggatattattgtgtgccattattttgttggtcttgtctatcttctttgatgatgagagagataatgagttactttgttagtctcctcaaaaccaggaggaacagaggtaatattgggggttggggctatgtcctttatctttattttgttgatttgaatagaagtgcaggcaagcagaaagtatattaattatcaaattggatgctttgctgccttgttttctctcatgttgaagcagtaatgagacaaagagcatgctaacaaaagaaggttaaggtcgaccattaccatgtttttcaaggtggttctcaaatgaataacataacgttcctgtagattatgattcaaaatctgtgatttgagctcatgatttttgcttctcgagttataattttgatgtatctgcatttgccttctcttttgtttctgaagcttggttattagtcatttttagttacctcaaaatgatcaaaggttgtttttgacacttgtgacctttag

SEQ ID NO: 79183 - DNA, 963 bp, Citrus sinensis
  Intron number 3 from transcript orange1.1g032372m (locus o range1.1g032372m.g) derived from phytozome v7.0 (chr-ID sc affold00065; pos 487048 to 488010 reverse strand)
gtgttgaaatatcaactggcaagggacttctggaggtatgacatgctctttgtgtgttttctaattctgatccaataaactattgcctttcagatgcaaacataagttttaagtatcattcttgatgtttttgccagttaacgtgatatagctcagaattgtttgattgttaacaaagaattagaaacctatccggttcagataatatactagacacttatataaggccagaaataacggagttgagtaaatgatatagttttttttttttgggttaaaaaacaaagacaaatcaaaaacaaagaatgctaagggtagaacgacttgattagtaatgaacccagaatattcttggcttatgtattgtttgattacctaattgggaggaaacctttagcctgatgtgaattactcctttcgctttaatgcatttgggcttcaatatcaggcacacaagagagcatatagaaagcacttcctctttctgtgctttagacaaagtaggctttaacaagttttgtccccttgaaagatatgcttctcaaagaagctactcttgttgaagagcttagaatgtagagtggatggaagctttgcaatacattgtacaggcacagaatacctccgcccacctccccccctcccgagaaaaagaaaatataaattcacacacataattgacttattttttacccactgtctgaaaatgtcaaactcagggttgcaaaacaataatgagttgatgggtctaatcctgggcaaatgatttcaatttaatgatttctttggtgttctccattttgttggtttcaaatccatgcctgaaattctctgagtccccaatttcatcacggaaagcctactcaaaatataaaagcgcttatgagcaattatataactacatccatgtctattttttgttttgcagaattttgggcttacatcacccttgccaacagcagc

SEQ ID NO: 79184 - DNA, 805 bp, Citrus sinensis
  Intron number 2 from transcript orange1.1g011274m (locus o range1.1g011274m.g) derived from phytozome v7.0 (chr-ID sc affold00011; pos 222343 to 223147)
cccctgtttctccatcggaaatcgacgacgtgaaggttcgtttagttcatctgacaacaaagaaccaaaacatgaaacacaaaagcaaatgactcttgataattatttgggctatggggattgattagtttaattaccgagttttaaaaaattgtgaagtgtgctgtgtgtttttttatctcttttaggatacaaaagcgctgagttactcctgaatactgactcggaaacaaacatatctcaggctttctctctaaccaacgctgctttaatcaacacttacactcggcagcatttgttttgatttgctttcttcaataatacaaaagtaaaaaacaccactttttttttctttctttaatcccaagaaatccatttttctcttcatattttcttttcaggtattaggaagtgaggttcctctatattttcctttattataattttgatgtgatattagaaaatcagttcactttgatcctttgaagctataaacaaccacgcggtgtgactctgcataattagttaaaaatgaataatataataggattaattttattataggcctggcttactttttttaattgatggatgattattattgttttaccaagtttttgtacagaaacggaaaatgcaaaattagaatttttatttgtggtgggtgcagcacaatttgcttaattttaaaaccgaaaagaaaaattggaagaaagtattaacgataacaaatttctatgtccaatcactggcgttggttctctgtgcagttctgtcgtaacaacaataacaacagcagcgctaa

SEQ ID NO: 79185 - DNA, 710 bp, Citrus sinensis
  Intron number 1 from transcript orange1.1g010073m (locus o range1.1g004515m.g) derived from phytozome v7.0 (chr-ID sc affold00005; pos 2052760 to 2053469 reverse strand)
gaagacacattctggtttgaagtaatcatcattccttttcttttgtatttgtatatttaattaataacggttttttcattcctttagttattattattatttttttttgtttgaatctgtttttgaggtcaagaagatccactttggtaaagaactatttgctatggtgcattttggggtcataatagaagtgatggcaatcaaaagagggttgatatgggataatagtgtaattagtaatgtcttgaaaattatttagtagaagaagaagattataagacaggcttgagagttttcttttataaagattatcatttgtcctacaagaaatgcaaatagataagggattaggattctctcatgatctgatatattcctgagcaaaaatacatgtgagtgattggtagttaataaataaagaaaataaagttaaatcctcccgatacactatcacttaaagaggcatggcataagatctttaaaaacccatgggagaacatatcaggagaggatcttaatccatagataagacccttttgcatatactaaaatattttaccttgtattgttagatacattgaacctcaatatgttttattcccccccccccccccacaaaaaaaactacaaaacaaaatataaccttaatatgtttccaattgtatgatctgatgtcttattggtctgatttatatttgtcatttttgcag

SEQ ID NO: 79186 - DNA, 741 bp, Citrus sinensis
  Intron number 2 from transcript orange1.1g021172m (locus o range1.1g021187m.g) derived from phytozome v7.0 (chr-ID sc affold00017; pos 547823 to 548563)
gtcctccacaggtaattaagcattattcttctctctctctctctttctctttcagttgctgagatgttaaattaaaatgatgaaataaaaattgtcttcattatcttccacatggaggccttgaacagtaccccttgacctaatatgcgcggaactatctctttcaactttttgttaccaattaaataagcgttcagaattcattagctattatcagtttttgtatacaaattgcacagtaactttcttgcattagatgacaagtacgtgcctcataacttctccttaatttggaactaaattttagtcacatttagttcggattgaaatttgtcaaattttagcttaatcatagaaattaatgacgctgctactgctttgcatattcatagaccactatctgcacttgtcctataatatatgttttctataaatttggcttcttattaattaaggtcaaaaagtactaaatagtaattctaaagcactttgaatagctttctccctgttccttttcgagcatggctttctctcttcattcattttgtcaaaagcaaaattccatttttcttcttactcctatatctaacctacttctcttttatcaaacagtttgaaaactcacaaaagcaaactgacaataaatggactaattaaaaagaaatatcactttttccttccaaaatatcatcttaaatatctaaatagactttgttcaattaaatattatcaggaagaagg

SEQ ID NO: 79187 - DNA, 671 bp, Citrus sinensis
  Intron number 2 from transcript orange1.1g034230m (locus o range1.1g034230m.g) derived from phytozome v7.0 (chr-ID sc affold00049; pos 301475 to 302145)
gcgtctggtcttacatcaagaccaacaatctccaggttcttaatcttgcttattattattttccagtttccaattaaaagtatatatgttggtgattttatgtgtgtcttcaaactttaataaataatccatggtaatcacgtgtctgtcctaaaggtgatgctttgagtgtcctaatggtgatgcttatcttatcagatattacatgcaactatttatacaaacggagctggcatggtatggttagatgagtatgaatgtgttttttttattctcgtttattcattttgacattttcaattttaatcttccaataattttgtgcaaccttagtttgtatatgtaacttagtttggttgtgttactcattattgtatgaatggggctcttgttttagcaattgattagcttaacctgaaggagttggaattttgcatattgcgttcgatttttagtgctatgatgccgatattccatcattttatttattgttttagcaattaaatatcctaacctgaaggagttggaattttgcgtattgcatttgatttttagtactatgatgcttatataccatcattttctttccttcttattttatagcaatttagttgaaaaatatttattactaacttttatactttcattggattaggatcccaataacaaga

SEQ ID NO: 79188 - DNA, 690 bp, Citrus sinensis
  Intron number 2 from transcript orange1.1g000235m (locus o range1.1g000235m.g) derived from phytozome v7.0 (chr-ID sc affold00017; pos 1231916 to 1232605)
aggtagcccttaccattcgttgtgtttttaaggcagatatcgtgtttgttctgccttcttcatagaaggattctggttcttgattttaaaatccttattttgattatcagtagttatagatcacaatgggttttaattgaattttttcctacttggcttttttgctagcatcaggggattccaaatagtatttgatatcagacatttgcatcattttcagagaactcgttagattcttaaaaactgaaaaattagaccttttaaatgttaatcatttggcacacatatgacaaacctcgattaggtagatgtaaatcattttttattcatgcatgcagggttgaccttgtgcagttaaaaaaatagatgtggtcaatttcaccattagacattgggaaacaggatttgtaaacgagttatggttttggagtggattgtggtaggctttcatatatgcattttgacgcaggccttccatgtggactaggttatttaaactgttggaataatcctccctttctcattctatgtagtttctcatgaggtagatgagatgaatcttgttattccttgtatgccttattccttcttcctcccttggaattctagtatattattttctgcttcatgcatgatttacttcttgttcaagcaggacgatcacaagtttaagcaagccttgaaaattag

SEQ ID NO: 79189 - DNA, 493 bp, Citrus sinensis; identical to SEQ ID NO: 78759
  Intron number 1 from transcript orange1.1g019294m (locus o range1.1g016851m.g) derived from phytozome v7.0 (chr-ID sc affold00011; pos 871212 to 871704 reverse strand)

SEQ ID NO: 79190 - DNA, 809 bp, Citrus sinensis
  Intron number 3 from transcript orange1.1g001549m (locus o range1.1g000989m.g) derived from phytozome v7.0 (chr-ID sc affold00003; pos 761463 to 762271 reverse strand)
agagatcatcctttgattctgcccttcgccaagtatttttattgcttgggtcatttggtcaatgtgcttgactgctgacaatgtaactttggtcctttgtttaattgttaaattctagatctaactggtttatgtgcttgctttgggcaatggttaaattcataattctacccatgagctgttagtttcttttaacttgtcttctgagtctgatgtgggtgtgtgagtgcgtgcttgccttctgtctcaagtaaatactgaataaaattggctctgcgttattgatggcaaaaacaaatagagaaaggtaacataagtggccggtttccttgcaaggtttctaatgtatacttagtaactaaatcacatgtagattaacatatctactatgaatagctcaatctaaacagcagatgggaagccctttgcatgtgtgcgtgtaaagcttgacaagctctttgtggtataaatcgattctaaataataagtgctgaatgctgacaatagtaatcattggtagggaaatgaaacaagatttgtgtaacatcagaaatttaatggctttaattcgttttaacattttatataattcacttaaatacttgatatggtacatggtccatcttcatgtattaagggaaacaattaatttggtctttgtagccaaatccgtaaaaaatctcatcatttactttattcttgtgttactattacacccctcagaaaatgttcgtctataggttttgaatttcaaggatgttaccataatgaatgttcttgtgcaggataatcgaagaagtcctcagaat

SEQ ID NO: 79191 - DNA, 887 bp, Citrus sinensis
  Intron number 2 from transcript orange1.1g021948m (locus o range1.1g018945m.g) derived from phytozome v7.0 (chr-ID sc affold00126; pos 7866 to 8752 reverse strand)
ttccacttggatcaaataggtaagctgaagcatctgattttaaggtgtgtcagtattattatcttttctcacaccatcattgtttatcttttcttcctgatgtttacactttgactaaagaaatttttacaaattttgacataagtgctggattatttacaaacacgagattgattttcttattattagatggtttagctttcatcggagttaagaatcatgaagttagattctgttttcaaatttttatgcaaatcaacatgacagtcaaaaagatatagctgttgttgccactattaaatgattttcttttagctttcaccagagttaaccattttgaagtagatattttcagagctttattcaagccagcatgacagttagaagatgtcgtcgattctgtctgtggattgacaagtttcgctacacattttcagaatgtcttcactccaaagattttatagcaatcttggctcttgggcctttttagggaatgttttttttaagaggtagggcttctacagcttttggttttatgtgtgtttcagtatatcagcgttatgttttataggcattacaaacttagttgaaaggcaaaggcactacaggctttgaatggtcagatgtatgaccattgggggatttcattttataattcaattatagagccttagccttattgattttattattttcagatgggatcacatgtatggcactttgaaaatagttgtggcagttggatgagttgtattttgaaatttcttttttcagaatcatgattctccagtgcaaatatttccatcaataacatttaaatgttggcaaagtaaaatttattctctcgttgtgcatactttggtcgcagattttggacccatctggta

SEQ ID NO: 79192 - DNA, 946 bp, Citrus sinensis
  Intron number 1 from transcript orange1.1g020649m (locus o range1.1g013395m.g) derived from phytozome v7.0 (chr-ID sc affold00003; pos 2231408 to 2232353 reverse strand)
ctttaccaattcaggtcagttgtataattaattaatacttcatcatatgatgtagatattaaatatttgaagtgctagctttgaagaatagaatctgcacaacacggcaacaaaataatatcttttaaaattgtgttctgtggactaaatgtgttaagagccatgacccacaggtgaggaagctgattcttggctgcttttgttaatttaataatacacaattagacatgtgatacgaagtttcaacataataaaacaaaagttcaaattggcagtcataagtaacaaaacatattttcaagtcaatatatatatatatatatatgatttttcagcgtagctcgctgtaattgatgtcgatgattaggagctttaaaccagtagaccagcttgttattttgttgaaaagaaaaatcaaggacagagaaattaaacacggcgttaatagatgcttctgtgagacatattgctgagaagcatcctgtcaataattacttcatgaagggctgaaagtcgccacattcttattatttaagaatattttaatatgtcctgctatttttaattttgtactgttataatagttaaatccccagctgacttgttaaggcagatgctttgtccatcattatattttccacttttcactgtatgctctctcaattatatacatcttggctatgcgtgacgaggacatagacgaaggaaaaataaattttattttcatctagttaaagcataaatgctattgggtatgtccattcttaatttgttcagatttttaccaggcaattaattaattaagttgtgctgctttttaatataaatcgatcaaaattatcaagttaaaatgagcatatgtttttaagggtggcgtttatgctcaactctgaacacatgccactttcatgccaaacggttctgcctctttgcaggaattggtaga

SEQ ID NO: 79193 - DNA, 862 bp, Citrus sinensis
  Intron number 2 from transcript orange1.1g046693m (locus o range1.1g046693m.g) derived from phytozome v7.0 (chr-ID sc affold00011; pos 1584044 to 1584905 reverse strand)
caagggtgcaggcagtaattgtcccaatggagccacgggattacacaattacctttaatttatttcaacttgatcgttttaacactacaacaaatagctatattactgactcttgataataagtactttatacaaaggcataacacagccgacggataaatataaaaaatagtatacatttttctaagggtaatttatcccttggtggtaatggatattttgtcggaaatgcatgtaagggtaagtcaaaattactctgatttttttttaaaggaattatatttttctttttgaaataataatcaataagaaacccatttaaaaaatattattttagtgaaggaacgaatgacaacgactattatatgaaactgttatatgaaactgttacctatttcaaatatataatatttaaaaaaactaggttaaaaataaaaattacaaatcaatgaagatacgatctcaattctatctcaattaaaagttaatgataagaaaaccctagaaattctatcttaattcctgccatccgcaacgacctctcattcacaccagcactaacctctcactcatggaggcatttgtatatttgtgtattttcgagggtattcgcccccacaaataaccctttttcttgtagtgcagtgttcttatttacgttcagttgtgtctcaactattagaaaaataattatctattgtgtgcgtgagtgcagacattcagctccaccaactccaacaacatcaggatcaatggactattgtcattaaacagccagatgtttcgcattgtgatcaacggctccaaggacgtgcacgtcgaatgagctaaagtcatagctccaggaaacagccctaacaca

SEQ ID NO: 79194 - DNA, 801 bp, Citrus sinensis
  Intron number 2 from transcript orange1.1g025455m (locus o range1.1g017378m.g) derived from phytozome v7.0 (chr-ID sc affold00237; pos 237900 to 238700 reverse strand)
ttttcttcgaccaattcaattgagtggaaacggaggtatgcctcctgcttttttcttctcctagagctgaatttgatattgttttgagggtatgtttgtaattacatatattgcgcttcttctacttaactttgaaagtacaatgtttataatgtttggtggtttatagtaagcagtagccacttttacttggcaactaatgttctatttcacagcagttgtagattaagagccacggcttatcaatccgaacatatcctgaattattgaaacaagatagaaaatgtgttgttgattaatgattagcttaaattggagggtatagatcaagactcactgtggtgtagcataattacgtgggacttatggactcgttaagtggggaatcaggagtaaaaagttgatctgaattggatttgatataactcaaactggctggaattcttgtgtctttccgactggttctggataatttatcttgttttaaggatattccattttttttagatatatatatgaagttcttatctagctagcaaccgtttgttttgttattttcttgctcttgaatgtcggctggtagccaagtgctaatcatttaaaaaggtatgtgttgtggattaatttttttttctaatccttgtattagtgaatggttagagttagttatttattaattagtattcttctatgtgctggattgggctgttgatggtaaattggggtgtttggatctaataaaacaggagaaatttaatatgtgcagtcagtcggggtcctgaggaagcattcaaaaagact

SEQ ID NO: 79195 - DNA, 128 bp, Citrus sinensis
  Intron number 1 from transcript orange1.1g006718m (locus o range1.1g006718m.g) derived from phytozome v7.0 (chr-ID sc affold00083; pos 252910 to 253037 reverse strand)
tttggatttggagaaaaaaggctcaacacttccgggtattttcttttctacgtttctctttagactctataattaatttcttttgataatgtgtttgattatttgtgattggcattatagacgttgaa

SEQ ID NO: 79196 - DNA, 730 bp, Citrus sinensis
  Intron number 5 from transcript orange1.1g002200m (locus o range1.1g001900m.g) derived from phytozome v7.0 (chr-ID sc affold00003; pos 1554931 to 1555660 reverse strand)
caccggtcagtaatctgctgggtttactgacttgaggaaaacttttgatcaaatttgattaccaagttatagatgttcttaaattcacacataatctgttttcagataactggctgccttaaagataacttcggctcaatagaatttttagatttaaattgggtgtatatctgttgtccttatatttgggcctgttttcactttgttatttattaccaaaaagataacgaggtatcccaaaaggggactactttccaaataataaattgtgaagaggaatgcagggaatgattaatcagcaaaccttatatcttgaacttgcattaactcaaggttctttatttatttattaaaaaagttttcatttttactgggaaatggtcacaataaccaactattttagattggttctgatgtttttcaacattggtatgcttaagatgtgcaaagcctcgtgtatctctcttgtttggtttcctcccgttgatgctttcattggaggttgaagtttcaacctgatctctggctgattagcatatcaaaaaaggtgtagcatccgctagaatgcagtaaaaaaacggctcttattatcatacatatgcttaataaattacttgtataatggtctctgttaatagtttctgtggccattgttcttgaacaataagtcatccttttctcccttcttcttttaggtttaacattgcagcagacttgatacaagaagcca

SEQ ID NO: 79197 - DNA, 585 bp, Citrus sinensis
  Intron number 1 from transcript orange1.1g008212m (locus o range1.1g008211m.g) derived from phytozome v7.0 (chr-ID sc affold00003; pos 2753455 to 2754039)
ttcattagttttttcgctgattgagtaatgagcagttgttaatgtttctaaagtttcttcattttcagataaattcttagatccaacctaactttgttcactgttagcttcctccatttcattgtttcagtttgtatttgcttctcttgattaaagttattttcttttttggggttcttgtggactagatctctgatatttttttccttattttaaatgctcctttagttgtttttagttgttgttgtcgtatgattccttttctgggtattgggtagatttggactgtggttgttgtttgtttccttttgactttgaaattgttgaatgtgtacgttcaatgtacttcaagctagggttcctttttcagctgtagttgctgtctatgttgaggtttttggtccaaatttttgtcttttctttttccttaacatgctgcccgcagaaacttttaacatttactggtctttagctcgtgcaaaaatgctaccagccactgttaattcttttttttttttgggaggttttaattatgcattttattttactttttgtagatttctgtattcacattgattatcaaat

SEQ ID NO: 79198 - DNA, 286 bp, Citrus sinensis
  Intron number 1 from transcript orange1.1g012543m (locus o range1.1g012543m.g) derived from phytozome v7.0 (chr-ID sc affold00062; pos 490099 to 490384 reverse strand)
agttctaagccaaaagggttactttcccatacaaggtgcaattcaataacttcttgcttctagtgtgtttcattgataattttttcagtaggcattgtttgattattaaatatttgccctcgacagatcttccctgaggatgattcagattcttgttacataaaaagtagttaaataaaatctgaaggacaccaattcataatagtaatgactaatgatcactgcacttggtatctaaattatcttctttttttaattatttttgttcttcattgttcagattctc

SEQ ID NO: 79199 - DNA, 1006 bp, Citrus sinensis
  Intron number 3 from transcript orange1.1g012895m (locus o range1.1g012895m.g) derived from phytozome v7.0 (chr-ID sc affold00056; pos 599668 to 600673 reverse strand)
tccggcaaattttcccatagaattcgctatcgttggtaggtgagataatttatttatgtaagaaactgtagatattgctaggaataagcacagccataaaaaataggcatgcataaaaataaaataaaaaagacagtatttcttcatatgctggtaaatttaatgtgtcccatttgggtatttgtttaattatggcaaattatgaaataaattgatacgtgaatgaataaaagtgagtttcagttacttgagaaattttagaatacctttgatgtattacaactaattaatgcatgcatgacatgtgtaattgaatttaatataatcattacttacatgatggtttttcaaaataaatacacacatgtcataatattatttgtttgctgtatgactgacataatactttagatgtattatataatttctccaattacgttgttagaagatgttggagtttgcaagatgacaacaattaaaatagacttgcttttctggagttaggtgattttgatgctaataaaacatgcttttgatttaatttttaggttggtgacggtttttcggttagtgcttcgagaataagcaagaacactaaaatggaaaagttagaagagtgtacacttcttactattatcacataaaatctgtgttattcagttggttaaaaatttataatatttttctaggatatatcctactttcacctaactgtcattaattctcagtaaagacaaagaatcctttagtcttttttttttttttaatttaaatacctatttaatttttatattataaaaactatctcaaaacacccttacagcttttacgtttaaaattaaaatttacagatttctttgaatattttacgtgttaaccgtccttaagttttttttctcattttgatccgtgttgatgaaattttcatgaaaatctaagatgtatctccttcagctagctagacgtgagaagcttttgtgtctacaggagaccttggacaaacgga

SEQ ID NO: 79200 - DNA, 592 bp, Citrus sinensis
  Intron number 2 from transcript orange1.1g024630m (locus o range1.1g024630m.g) derived from phytozome v7.0 (chr-ID sc affold00083; pos 345672 to 346263 reverse strand)
gcctagtgccaacgtcaacttaaattgcgaaccttgtaagtttcttttctttgctattataatatttttagcatgactatcagtgctcatatgttacatttttaacgctgcgtgatacattgcatttcatgctactgtatttcttaatggtcttgtctataattgctacaagcacggttgttaattggtacacatgcatttgttgtttactgcaagtcagttattgatgatgatatttgattaaatgagaaatctaagtctttccgttatgtttcatgctttgtcgtcgtccgcattgtattttgcattctttttggaacattgctgaatgtcctctttcatgtgaatttggaaagctgacctaattcttttacctcaaatgagttttacttgaaggcctaaagactattagactccatctgagttgccaggaagtgcctctaattagtttgtgatagatatctctagtacaagaccgtttggactagtttcaatagtctgtcttgttctttttatgatttcatttcaacggtctaataatatcttatttagtgcagtaccatttggacgaatttttcagttgtcttcttta

SEQ ID NO: 79201 - DNA, 692 bp, Citrus sinensis
  Intron number 1 from transcript orange1.1g001685m (locus o range1.1g001685m.g) derived from phytozome v7.0 (chr-ID sc affold00259; pos 188922 to 189613 reverse strand)
cgtattcgctctgttgtaaattataaaaatcaaaagtaatttttgttaatgttcatacaataatataatttatagttgttatcgaatttgttctaaattcaacctagattttcgctcttgttttgttcttccctttcgatacatttttgcaatctccagcttctctttaaccgtaagccctactacacaacgacgccgtttctgttccctgtctatttctcttcaattccttcgtttactttttttattttaattttttttgttattaccatttcggttatctttttttttttttgccctttatattcagtttctggagattttaagttattgaaacagaagcttgttcgttattgtgtatacggagatttgctaaaaaaggcatatcttttgagtttaattttcttgctttatttattatacttattgattaataaattaataatatttcttttgtttggtcgctgagaaaataaaagagaaaatcaatcacttagttgtgtgttatgcaagtaattgttgtcttattattctcctcgtgattttacgttttgttgaatttttattttatttattgattagggttagcattagggtttgaattttctgctcatcctaggctttaatttaaatgtggtttatttatttatttgtttgtttgtttgtttgtttgataaattgtagtatcattt

SEQ ID NO: 79202 - DNA, 666 bp, Citrus sinensis
  Intron number 1 from transcript orange1.1g013271m (locus o range1.1g013271m.g) derived from phytozome v7.0 (chr-ID sc affold00017; pos 1042088 to 1042753)
tccggacttctggatcatcccgacctgctccaaaagtattgtttttaaacatttcactgtctaaagtttgtccatttcgatttaggttcgttgaagtttttgaaattttgatttgacttttgatacgaggtaggaatttaactacaacaagctagattacacattagatatgctataaaagtctaaattttatggttttcttgcttgactatatctggtaatttaacatgaaattaatggcgcacttgtaagtgctgtgtaatagatttttttttttgagcaatgtgtctcttccatctacatttgaagatcatttccaattcagacattgcttttacaaaagcatagatcaagtcttcctcaacttcaaaattgattttgtcagctaactagaataaatattaaaaaaaaaaaaaacgttctggctagtatatcattttggccaaactgctttgtaaaagaaacagatagtaagtagttcttcaaagaaagaactcaaagtagtaactgatttacagaatattttttgtccttccagtcaaaatcacaaaaacaaaaagaattagattttttttatgacaccgaaagcactattgtataaagataggttttttgggaattctgatactctcttgcttatatcaaataactgtttgtattataggc

SEQ ID NO: 79203 - DNA, 735 bp, Citrus sinensis
  Intron number 1 from transcript orange1.1g021566m (locus o range1.1g020861m.g) derived from phytozome v7.0 (chr-ID sc affold00014; pos 638506 to 639240)
ctcactctcctacccgccctgaccggatcgacaaggtgcttcagtttctttatttacgaaagacctacagtataattataatggcctttcaagtattttaattttataatgcacaagctttcttttttttctttttctttttttaacacaattagtgtttttaatttttacctttgggaatggtaattttgtaggcttgaccgtccgaagaagttgcagagaaagaatgatggaattgggtttgattcatatagaaatgaaatcagctagaaataaataatgctcatcatttacctttgattcttggttaatgagtccgtactctgttaaaatctagaccaataaatcttaacgttgtcactcaaggggtcagacaatttcacgaggagaattgtattgttcatgcactaaatttgatgtttttctttgtcgcctagctctatgccaaagagtttattggtccagattttaagacaatgagggcatccgcacctgataatgtttctttcgcttggttaattagctagatgatgagacctgtagcttaacttctttcttcttacactaaagtgcttttgtgtgaagctgtgcatttattttgtctccacaaagggcttgaacattttaattaactttggcatccttctgtatgatcctttcaattggatgtcgtttcatttgttttccttgtttcatgcagtactactacgagccgaggactggacggcagtttcg

SEQ ID NO: 79204 - DNA, 668 bp, Citrus sinensis
  Intron number 1 from transcript orange1.1g031790m (locus o range1.1g031790m.g) derived from phytozome v7.0 (chr-ID sc affold00014; pos 1339255 to 1339922)
tcataacgttaactcccgacacattcactgacaaggtaattataatttacaatcttaccctgttttgtatttgttttgtttttcattcagatatcaagatattacggatccatggtagcatcatgaatgcgattctggattatgggtttttctttatttctgttgtttcccttctttgcatcgacaaatcttatgttgccgactgtatctgatgcatcttcatttatttgaatactcaagagttgaaaattttgttattttttggattcctatgctgtaggagttctgtttcattagattcaaatgactagagtggagttgtgacattttctttaaatcctgattgctaaatgcaatattacttagaatctttagcttgtgattggcaattgggtcatgcttgaatgtcgataatctattcgctgagggttgttagccaggggtgccaaattgaactttttatttatgttatgtgctttttctattgtcattctattttgtttttatgatgtcccccccccccccctcccttcttctggggaagtgattttgtttgcttcattctgttaatctaagtactgacacagaaatgagttcttggcttcggatatgactttttaagtaattatgtttgctcattatgtccaggtgaaggaaaaagacaccgc

SEQ ID NO: 79205 - DNA, 740 bp, Citrus sinensis
  Intron number 2 from transcript orange1.1g004800m (locus o range1.1g004784m.g) derived from phytozome v7.0 (chr-ID sc affold00065; pos 278319 to 279058 reverse strand)
tagatatttaacttctattgttcagtcagctaaaggtaatactttgtatcatgagctttttgtgttgataactggtaattcaatattcgcaagtacattgtatgctgtttttagtgatcatatattattctatgatataattgcagtttgcaatgaaaatgttatgttctggaactttttggcgaattaatggctcacttgttgcaatatctcagtttttgtacgctgttcttcagtttcagtgtagtgagattccgatcaaactgtttgaacttttgtgctaagtgcacacaagtgtaccagtcggcgatagcaattggtcctagatgcaacaaatgctgtacttgagaatagagccccattttaatggtttggaatagagccccattttaatataggaatagagtgaaaagtacatgtatagagagtcagtgtggtaaataaataattgtgaatctttgtgatagaactagaaacatttggaataagatttgcatggaaataatcatcttattcactggttgtggttgaagctagataacgtggaaaccttggaccaatgaccataactggatagtgcaatttttgaaattttctactaaataagttttatttattttgtctatctagtttggtggcctttttttcttcttcttcttcaatcatacagctacttgacatttcccacaattttctgtttttcagctatcatttgaatcgacggtcatcctttcatccct

SEQ ID NO: 79206 - DNA, 570 bp, Citrus sinensis
  Intron number 1 from transcript orange1.1g004800m (locus o range1.1g004784m.g) derived from phytozome v7.0 (chr-ID sc affold00065; pos 279115 to 279684 reverse strand)
cttggtttcgtcgatcttctctctgtctctttcaggtgattatcttttttttttgttaattctctatttttttaattgatctttgattgtattggatgattatgctgttgttttgatgtattttttctgggtttcttttcttgattttttatctttattctttgaagagtttgtgagggatcgagttgaccgatgttggttttttgatttcattggttctttcttcttcttcttctttaatctttctttttgtggatgtactagtttgatttggccatcgtgattatcaaatcatttgatgctgaacttctttttgtggttaatcaaaataagttggttaaattggtactttgattgtccaaggactggccttggcgatttttctgatgttttttcagacacagtttcattttttctatgttttgagtttgttttgtagatgtttcaatgttccaaagtctcatggttgacaatgtagatatctaattttgttcataatttcttattgatgtttaatagtcctgtttttcactgtttgatttggggtttcaggtataatttttgagcttt

SEQ ID NO: 79207 - DNA, 533 bp, Citrus sinensis
  Intron number 2 from transcript orange1.1g042357m (locus o range1.1g042357m.g) derived from phytozome v7.0 (chr-ID sc affold00005; pos 2188695 to 2189227 reverse strand)
gaggaggcttgcgtgctactgcttggaaggtagggcttaatttttctgtcactattatgttgtgatcatgtaaactgctaacaatttcgaagtataagaattattcgagcagggaaatctaacttgatttgtgactttacacctttgtcagtgttgaagcttactgcattccaccagaagcagtaggaatttgatataatctgataacactttttaatggatattgatcatggtcgcggaagaagaagacctcaaaaataaaagattaatagtggcacttgaatccccctcccttcttttttcatcagtgcttgttgattacgtatatatgattaattatgctaacgcttataattctgaaatgtgaaaacttgtaaaacaatagctatgctaccaccaataatgcagacatttcagtgacaaaattatatgaactttaactgattgctgtttgttttgaattgtgtatcatttcccttgcacgttttattacagcagctgctcttaggttatttgccttcttgtcgtgactt

SEQ ID NO: 79208 - DNA, 467 bp, Citrus sinensis
  Intron number 1 from transcript orange1.1g042357m (locus o range1.1g042357m.g) derived from phytozome v7.0 (chr-ID sc affold00005; pos 2189248 to 2189714 reverse strand)
ataaaaggtccgatcttgaatacgaggtgagaatgtgatgtttcattgtttaattttcttgtaagtgctcttgagtttcatttgtattgaaatattgttcttctaagttgaatgtgtattttttccccagctcgtatgtatgcaatgtgacaaatggaaagtttggtattaaattcttagttcttttctttctgtgggtaaaaaaaaaagtaaattagggtttattactcgtattgtgcatgtcatcattgattgttaaaaatgatttttgaaaattgatgtcaaatgcttcattacttttttcttttgatttattcctcagtaaacaaaaaggttatgttgtttacgcgtatcctccactatttgtaatgtttgataatttgttctgcattgcttatttatatatttatattatgtggaccgctatcacagaaggagataaacttggaaaagctacaaaggattgc

SEQ ID NO: 79209 - DNA, 638 bp, Citrus sinensis
  Intron number 1 from transcript orange1.1g048602m (locus o range1.1g048602m.g) derived from phytozome v7.0 (chr-ID sc affold00857; pos 39410 to 40047)
gctccaatcccctcaaaggtatcaattgacatttacttttcttttatacctgtaccattcaatgatgtgatttactattcgatataaagggcaaatgacattttcatctctattcaaatttaattttatcaatttgggtttttgaaacttttaatatctcatttcctgcatggtgataaaatagtttaaaagagagaaaaaaaacttctattgttaaagaataaatgcaacatttttacatacagattgattataagaaaccactatacatacatattacaattagttaatttctttggtgaagaaacacatttactctttagtactatgttttacatatttttttattttttactatttaaaatccatggatgaaatgaaataggaaaaaattatcaagaacccaagtaataaatacaatttataagaggaaataaacatttaaagtttgaaatattattaatttcaaatttttaaaaaaattttagttttttaaactaatatttaatttttaaatatttaattatgaataaaaaaataagcttttataacttttattttcaccacaagctttaacataaaacaaaagaacttgtgctgtatgtataattgcaggtgttactgtgtctctgacttgc

SEQ ID NO: 79210 - DNA, 1001 bp, Citrus sinensis
  Intron number 1 from transcript orange1.1g024009m (locus o range1.1g014195m.g) derived from phytozome v7.0 (chr-ID sc affold00468; pos 61951 to 62951)
gcaggacctgccacccttacctgttcctcggtatgcgtgaatgcgtctattctatcactgttgacaatcatatgttgggcctgcaccagagaaactctccttgtttttttgttgattttctttatagaaaccgatttgcttctcatctaaattctagtgtttgcagcatttttttccctcaatacttttttgttttcactgttttgatccttattttaaagttcatttatggagaccgaatgcattttgtttaaagggaaagacaaataatgaggaaggttttaaatttaaagggaaagactaataatgaggaagatattgtaacctctcctttttatggactccgacactagatgtttttattgtaacttgtgttaatggagttgcagaaatgttgatgcctttctaattaatggttcttacttgggcttctattttgtcccctagttttttttcttttttttaaacatcattagaagtcaagaagaatttcattaattttgccatcagtttttaattacaatttaagaagttctatcagaaagacaaatagtgcagagatgagaaattaaatgtcaaggtatatgaatgtatttgctgcagcttcatgtacattctgaaaggggactaaggtttgtacagagagtgttatcctttatgttatttatgagattgctcttaagtatatttaaatcttctacaatcatcttactaactaatctttggcttataaatgaaattcaatttggcttacctttaggatttttgacatgtttgttattttattgtgggttatagtcctaaatgtgctctacttagcagtggtactaagttggatagctaacagcaagttcttctctgattagtttaagatagcaatgcccagctgtaatccaggaggggctctttttatttgttgtcgaagattgttcatgatgtcttttgttctttctgctgttttaaaatttagtgaaaaatgtctaataagataattttcaggt

SEQ ID NO: 79211 - DNA, 522 bp, Citrus sinensis
  Intron number 1 from transcript orange1.1g004980m (locus o range1.1g004975m.g) derived from phytozome v7.0 (chr-ID sc affold00023; pos 1218209 to 1218730)
ccaaagtcaagttcttttgcaagaatcttcataaagtgagtcactttcttttctgttctgttttatgtcatatttagttttgatatttctgagtttgaaaccactgagtgaagtttagcttagcgtttttggcttaaaattgcttgtttatttcaatttatgaatcctgacatcattccagaattaggagttttggtgcttttgagaggggtttgtctcatattttcttattttggttaataaatattgtgggtataatacaaggttttctgtggataagtctgtagcttgctgatgatttattgcttttggaactccttaaagtcaagcaaaaatgttaggttctttcagtttatcgtcaaaaagcttttttctctgatgttacaagaattttagttctttgtgattgtaatccaactatgctttatgttttgtatatcagttcaatgaaactgtggtaggtattctgcctgctgaaatgcatttctgattgcagttcacaaaaacacatttttgttgacg

SEQ ID NO: 79212 - DNA, 767 bp, Citrus sinensis
  Intron number 2 from transcript orange1.1g016811m (locus o range1.1g016811m.g) derived from phytozome v7.0 (chr-ID sc affold00815; pos 17833 to 18599 reverse strand)
ggcagccagtttcaatctctctctccagtcgaacggtaaatatattgttccgctgattattagttactgatttggttttgatcctgtttgattgagtgtaggatgtaattacaactcattgggtgccggttggttgaatttttttccaactgaggggcagtaggttcagttcctctgggggacacctgcttgagatgttatataccagaactttcatgattatttgaggttgtaggatgtagctgtagttcccatttttttattcactgcaacagtgaaaacttctggtttttggaagaaataaaaatacttctgataggattgtatggttttgttcaataaattttgagatgtatgaatgtgcagagtgaagatgttctggtacttctcataaaattctactgctttttgagatgtatgtgcacatcagagttagctatattgttgagacatagcaacttaagtggagttatattgttgagacatagctatttaagttgattacaactttttcatcttattggtgtcatttgattgttcttaaagttaggtgttattgtgtgagatttcgtaaacaataaagtcttaacttgctgggtgaagaaagcttaaatttgtatcagctgcctgtttctatctttgtttgctctcttggtccctctttgatgcatgttcatttatattcatcaagagcttagaagattgattctctagccccctcttggaggttgtggcatgacatgatttttttcccttacttctgtagg

SEQ ID NO: 79213 - DNA, 927 bp, Citrus sinensis
  Intron number 2 from transcript orange1.1g037000m (locus o range1.1g037000m.g) derived from phytozome v7.0 (chr-ID sc affold00050; pos 69039 to 69965)
tgattttaaaggtaagttatttgatttacattccagtttccttgcatatctacatgctgtgattggcttccaaaacaatatgaacttaatcttgtttactgttatcttaaggggaccgtagtacgaattgtatatactcaaaatctgttttttgcactctctttcatatatctattacatggttaatttaagagctctcttttaactaccaaaagctgtcgaataggtcaattttgaatgtttaacatactgtgagcattgctgcttgtttgaatttcgtcttaactgcatcttctgaaaacaaatacattagattcaaactacaacataagtgtcatgtaccacattaagattttcagctgcctgaggtgccatccatcattagaaactgttttatttctcattttactagatatggctgtcacacctgcttcttagtcatctaagatatcattttgtttgacaattgcgcaatagcttgcagtaagtctttgttttattgcagttacatccaaatcatgtttggtggctttagatttgagacgctaatatgaaatgctgtcgtgaattattttatctttatacttaataaaatctcctgctaatatgctggagctaacctatattgataaccaaaaattatatttatccttgttgatatcaaattaattttacgtttttacttgtcgctaatgtgtgctcgtttccacaaactgtactagtttcataaatagaccttttttcttttctcttccgatgtgtctgtgtttcagactatacctgtaaattagttgtttgggataggttaatttaagaggattaagcttgtagacttcaccacgtttgcttcctagttactctcaaccaatcatgttcttttactttctcccgtgtagacaactgcatcaaaaagtggtgccttacgtc

SEQ ID NO: 79214 - DNA, 522 bp, Citrus sinensis
  Intron number 1 from transcript orange1.1g040686m (locus o range1.1g040686m.g) derived from phytozome v7.0 (chr-ID sc affold00094; pos 80132 to 80653)
ggattagaaaaggtaaatttgtgaaaaacaaagctttgaattaattagaaactcttcacaagataaatcactatgcactgttattattgtttttcttcttgtaggatggatttcatccatacttggaactcactctaagcactcgaaagaagatatcttctgtgcttaagcaccttaagagcaagtggggtagttcaagcattgctcttggggaacccatgttcttcccctataatactttggagaatttggctagttacagatggactatgaatgacaatgacatcagtgcaggagatgtctatgcagctataggaaaccctactgttttccgtttgaggttggaggactgctcactttcttttattgtttgctcgcagtaatttagttccagattctgactcatttcctttttataaggtatggctggtcgtccaatctcaaaacggaaaccggtggagtaccctctacaacgacttccctagagggttgtttaaaagctcaaggtttacagagaagttg

SEQ ID NO: 79215 - DNA, 857 bp, Citrus sinensis
  Intron number 2 from transcript orange1.1g006765m (locus o range1.1g006765m.g) derived from phytozome v7.0 (chr-ID sc affold00371; pos 144015 to 144871 reverse strand)
ttattgtggagggaataaatttccatcttcataaggtaaaatatgttaccaggtttaagaatctgagaaatttgtcagtctttggcattaatattgtctatttcactcttgtttgctaaatgtattgacctgaatattgtgcaagctattttgaacctataaattgttaagagtttgaggcagcttttggattctattagcgtcagagaatctagtcagttgttgtgaaagcatttttcgttgtgaaatcttgatatcaattggagtgtcggacttttcaagttggtttcagcgtgacataaattttgctcaggggagacacaattccatttatttccaccttgaaataaccatctttactcccttcccttctttgagacaatttctgctgaattccctttgctgttagctctgctcgagaatttgtttgatgaagtcttgaaaacctttgttttttaaatttggcatgcacaaatttttgctaaagtttaaaggcaatcaatatatcatgtcattttaatatttactatcctattgctagatcaaagtgccattctactgatttagaaatacgttttatggttactctcatttttttaaaaagaaattgatgaggtatttttcgtgtaaatgaaattagttcgtttttacttgtagtattataggctgattacattgtctgccaccagaataaaccctgtatcactgcaggtgctgcaattagtcttaagtttagtgctctctttagactctgaagaatagtgcccatatgagggaaaaaattgtacatagttgttgcattgtaatttaaagaagatttacatgtatttatgactgcagtttccattagtgtcgaa

SEQ ID NO: 79216 - DNA, 452 bp, Citrus sinensis
  Intron number 1 from transcript orange1.1g018780m (locus o range1.1g018825m.g) derived from phytozome v7.0 (chr-ID sc affold00003; pos 3115854 to 3116305)
tcccgctcacccggtcgtgtaatacaatcctatatgtaagctcacgcctctctccctccatctctgctttctctttctctctttggccccttcccccccacttttaagcccttcccttcatcctctttcaacctgtcgtttgatttgctcatttgggtatgtatgcttttctctttctttctttctttctgtcttccattttttttttccttattaaaggtttaatttttcacccttctactcatgtgggtttttgtttgttttttaggatcttcaaatctgctgaattttaagtttatgaatcattgctttgattacgatattgtgttacgcttggattggaaacttcaattgattattattatgagatacattggttttttttttttttgaatttgtttcgtgattcttaaaagagggaatttcaagacattttgtaaattatctgcagg

SEQ ID NO: 79217 - DNA, 771 bp, Citrus sinensis
  Intron number 1 from transcript orange1.1g008619m (locus o range1.1g008254m.g) derived from phytozome v7.0 (chr-ID sc affold00484; pos 58122 to 58892)
ttaaactcttgtgtacacttagctcattgttgcatgtaccgtgagttttaacatctcctatgcttttttttcatagattctttttactgggtttgttctattttctgcacttgctgtgttggttctgtttttgtcatgtgcatgcatgtattataaggcattttacagctctcccccccccccccccctccttttccacttctttttctgatttattttcagttttgaaattttcttgtttgttttcctattttgagatctcccactcaaaacaagatatttttgagatttttctttatatttcttgattaattgatgtctttgagcaaaatatttggagtatttgatgaatgatctgacagttactacaggcatagcctcatcttacttgtcatgcatttgaatctaaagcaagtgtttggtatgtaatggaatcttaagcatcatttgatcttcacagatcagtcaaagtatcatgctttcatgggctattattagttataaagtttccattaataatgggctgttccctttatgctgatcttgctttactaattatatttactctctttaaatttgtttattttggctcctctcaacaaaattcttatagttcagtaccttttttatctgtcttatcattatccttgctttaatttggcttaacagcccatttttaatttgatttaacagcccatttttaatttgatgtagttactctaattttttaatgtaatgcttttttttttttgtcatgcagaattgatttgg

SEQ ID NO: 79218 - DNA, 813 bp, Citrus sinensis
  Intron number 2 from transcript orange1.1g041407m (locus o range1.1g041407m.g) derived from phytozome v7.0 (chr-ID sc affold00262; pos 102809 to 103621 reverse strand)
gaatccatcggagtcttggagtgcatatttcaaaggtataccgtgtgtactggtgtttattttatttttgcatagcatcaaatttagtaaatacttctagcattgccttcaattatcatcttgagaacattgtcatcaaacttttattagtttcattggattaaactgaacatgatagaaacattaggttcatatccactatgtgtaggagtaagctctgcacagacttgattcttggttatcgaaaatggagttcctatataattagttttgacttccaactttttggccactttcctgaaatattgtctatcgttgatccatgatgagatggatttaaaatattcattgcacttcacaatctattatgtattcaatttttccagctccctgctgttttcagcaaagtacaggctgtatgccaatatctttgtactttaggctgtaaaactttactttgttgtaactggaaaaaggatttcaaacaatgaactaaacacataagaatacttgtttatcaaaagttcctttgtcagccctgtttcttatttgcttatgtaactcttggtcctcttcgcatgatttgcttcattcagcaaatgtaaattaggtacaaaaaaaatggagttgtgggtattatatgtttttttaattcaatatactcacaaaatttttccatttgttccttgatatgccaccagtttgagttacaactctattgggttcaatactctctttcctgttatcactaatactgattttgtgattttggaaataggtccggtctactactttggatacgtggctcccgga

SEQ ID NO: 79219 - DNA, 720 bp, Citrus sinensis
  Intron number 1 from transcript orange1.1g041407m (locus o range1.1g041407m.g) derived from phytozome v7.0 (chr-ID sc affold00262; pos 103669 to 104388 reverse strand)
tgcggattgtgggagcaagtatgcatttcagaaaccctcttctgatatttccaataatattacagtttctccgttgctaatctgtattatctttgggggtacttaatttctgatgtttatgttatgatggatttgcagacttttgttgtctcttatacatagtatagtcttaaacaagttagtatttctctgaaacataagactgggggtgaacatctgagaaatgtttaattgctttccggtcaatatcttgtatcaattcagctaataacgtttaattgttggatctgcaatgttgttttgtcactctttgtttgggattacaattgccctgttaactaagtctattcaccttgatgctaaatatcacatctcagctgttctgactctgttatgtatatgtggtagtacaagaggagccatagtgagaaaaaggaaaatacttgtacagagcactactcaaaatttctcactccacgttataccgagatcattagatccaaagttatttttgttggcatgaaaatatcattttcttacctatctcttaattaacactgtgctcttcatttttacagtgcaagtatacgcttacagttggaagttttggtttgagttttaaatttgttgttctgagcagttagatactcggttaaaagaagaaatcatctgatattgtagtgttttatcatagaaatgtattcatttcagggcaccacg

SEQ ID NO: 79220 - DNA, 902 bp, Citrus sinensis
  Intron number 1 from transcript orange1.1g013907m (locus o range1.1g011867m.g) derived from phytozome v7.0 (chr-ID sc affold00135; pos 178585 to 179486)
aaggtctctcagctgaagctatccgtacggtacaggtatctcaatattctttttgcgaatttttttatttttaatttacgagctaattttaatttttgattgaagttacggtgatttgatattacttacatttcttacctgtggttctcttttttcaggaatctgtcttttttgaatacgctgtcgtatcgaattcagtgtagtctcggttactactgttcttaactatttagcaaatcaagcctttttaatacctgaattgtgaccaaatttatgcatttgggtacaagctttcgagtcgaaaactaattgtaggatttcagatctttaagattgcattttgtttccgtgaacttttaggacggttaatatgtgattaaaaaaaaaaactcatattgtggacttaatgtaatatatataatagatgctttgttagctttgcttgtttaatttttatttctttttctataagaaaacctgaagaaaagaaataaaaaactgaagaaaaattctgctgtctatgatacctttgcttgatgctaggttccagcatatgcatacttggtctttgataataatagaaatttgaaatctcagtctactgttggactattgttagactttgaaaagggatagagatttaagattcaattgtttggtataccagggatttttttttttgttttttggctgtacatgtttagagtttcctccttatcatgctgaaccatcaatagcagttacttccctatgtaaaaacgtatttaagaatgcataagtaactttttttttttaaatttgtgtcttgtgaatattcaaaaaaatttcaactcatgtgctttattcgtgtgatttggatccaaacagggactgtgttaggcattttattttaaactgtattt

SEQ ID NO: 79221 - DNA, 984 bp, Citrus sinensis
  Intron number 1 from transcript orange1.1g007174m (locus o range1.1g007174m.g) derived from phytozome v7.0 (chr-ID sc affold00135; pos 266958 to 267941)
aagtgaaaaaaaatcatctcgtctcaacttagccggtacatttaactttcatttgcgacttctttttttccttcttttccctcaatttttttttttttgattcatgttaaattaaagttatagttttgttctcttgtaaatgatcttcagctcttttgagcatgtgggttcttattcttttggcttttggatcatcactgctgcggtttatgtgttgagctcgtgtcgttttggtttggcttcgcttggcatactgggttcactaaaatttgcagcaggctctgtctttttctctgtcccttttttttttgtcttttctaatttgggattatttagttttaaatttgtcttaatttcatttaagtaaaattaacgaaagctttcattttgattgaaaccccgagcttccggatttgtatggataatttagttccatgtttgtttagcttgtgttcaagataagtgattttattttaagtattcgttattattattattattattaggatgatgatttattttttttttcttttgcttattcggaagggaatctggctgtaagcttctgttaaaagctattacactttttttttttattgggggggggggggttgggtttgccgtttatgtattttagttccaactgtaggcagatctgggctctggtaatgtgggtcattttttttttaaataaatttcgttttgttaaaaactcttgacacattaatttgttgtaattttgttttttgttacatttattattttattacttgccttgtttatctaattaatgggtttatgggaatttgtacttggggttatatgtctttgaatagaagttgatacagattcactgtaccgggtttatctaagctggaactgatttgttttatttatttaatttgcaggacttgacggttaatgtatatttctatattctgaattgcagagttctctgttttcaagttatttgtggagtacttt

SEQ ID NO: 79222 - DNA, 707 bp, Citrus sinensis
  Intron number 2 from transcript orange1.1g046050m (locus o range1.1g046050m.g) derived from phytozome v7.0 (chr-ID sc affold00262; pos 219603 to 220309)
gcacctctgattttcaaggtaaactgacaaatattttcttacatatttctgtttccacagtaaactattgacaacatcaatgggctctcaattatctttcaaataattggggcaaacaggatcgcatactcgcattgatgaatttcttaatcaaactattttgtcaatttattatgatgaatgagtcaagtgtgttgacattttcactaccttttaagtaaactgaagtatgtcaatttatttaggggtaaataaaaattgacatagcaacagaaatttattatatatacccaaataatagcgcagttggtttgttctgttatgacggaagcaagagatcaacagttctaagtctaaaagaacacgtttagctaacggaaatttaatagctcctcgccagatctgtttgaaacatctgacgtatttcttgctcaatgtttgtagattttccaaaattcagaaggttagaaaatttggtcatggaatacagtgaaattcacatcagctttcctcaaatcagtaaatctatggtttccctaaagttcttatcactagtcaactgtggactaaatggcacgattcttaatcaaggttagcgactcttttctttctatgtctctctctctccactctaaaatgaattatatactaaatgctgagttatatttgcaggtctgtgtgagttggtgcatctacaagagttgcat

SEQ ID NO: 79223 - DNA, 575 bp, Citrus sinensis
  Intron number 2 from transcript orange1.1g019209m (locus o range1.1g019209m.g) derived from phytozome v7.0 (chr-ID sc affold00951; pos 40767 to 41341)
ctttctggtcctttatacctcactgctgttgattggtaaaaccacttctttcttactttgaaagacggtacttcatgatggattagtgcttttattttatctggaatatccacattggcaatgcgactgcattatgttgttagtctacttgatgtaacagagagattattgaagtttctggggttttgtgcttaaatattaatgtctaaaccattttcatgccttgtctagtacgtggatatcagttttttgaatcagcagtcttcgtggctccatcaatgagggatttatgaaaagtggttgaaattagtgtgagagtcagaaatgaattctaaagagaatgatgcagaaaattaattggagtagcataaccagtattattattatttttggttgtagcaatgattcattgctgctaatctttggcttcctgagcatgtctcttgcacttaatagcgagttactgtatgagtttgatttaaccttttattaactatatttttggataagttattctttgagttattaagctatttacaggaaaaatccacatcatcgaagagctgttgctgcca

SEQ ID NO: 79224 - DNA, 734 bp, Citrus sinensis
  Intron number 1 from transcript orange1.1g019903m (locus o range1.1g019903m.g) derived from phytozome v7.0 (chr-ID sc affold00023; pos 831755 to 832488 reverse strand)
ttgcagcttttcccacagcttgcgctcttgaagtacggtttgtgcagctcatttttgtttttgtttattgacatttttattattattctttttgtgttggttatgaagagtttgaattgggcttacttttgggcatcggaagatgttgaattagatcttcagttggcttgtttttgtgttggttgtttataattgccgtgggagtgggacgatgaagaatttgataagtgttttgataaagtttatggttttgtgctttgaatcttgcccataattctgtttggttgtggcacttagttttataggcttgagaatcttgatgtaaatgagaatgatacctataggattctgaacatgtaagaattgctgaagaaagatttaaaaagcttattctattgtggtgaaaggcttctcattccttgttcttatgcattaatttttggtgttctaagcaatctgacagtgaaattgcgattagacatcttctagtgaatttagtttcaaggctcaatctagtgcagccaaccaaaaaaaaaaaaaaaatttcttaatattttagaagctttttctgttgcctttgcagcaaaaattttatccgagttttgatattggtaatttcaagatgtttaagaaaaaagtatagtatttcaataatatgtttctgttggataacaaggtctgaggatggctgtgagtatttgcattggttatcccctttttctaatcacaggtcc

SEQ ID NO: 79225 - DNA, 585 bp, Citrus sinensis
  Intron number 3 from transcript orange1.1g031606m (locus o range1.1g031606m.g) derived from phytozome v7.0 (chr-ID sc affold00005; pos 1291696 to 1292280)
tgatctcgacagtgtcgatcccgcccttcgagcaggttttaagaacccttttcaacctcctttttttttttgggttggaaaaatttgcttctgttctttttttcttttttttatcccctttttgttatttgtcaaataatattatctgcactattgcacacatggtggtagtaaaactaaaatatggtcgactggaagtgatacttgcatctttcattcctatgaaaccaatttgatttgcaagattaagaatttaaaaatatgcaaaaaaaatttgaacgtagtcagcactcagcaaatggtagttatatagacttaccataggattgcttgatgttggcaaatcacccattaatagcatatgtgttctctttatatgaattctagcataatgtgcttttgtgatattgtaactagtattagtcttcttagtgaagtgctagtggtacgtactgaactgaggacatgtgtagagatatgtggctttcttgattgcccctacatcgtgcagagttttttaattctttctgtttcaaacatgttatgttaggctcaaaaagggaaaaaaacaccttgtgttattat

SEQ ID NO: 79226 - DNA, 746 bp, Citrus sinensis
  Intron number 2 from transcript orange1.1g036966m (locus o range1.1g036966m.g) derived from phytozome v7.0 (chr-ID sc affold00289; pos 77482 to 78227 reverse strand)
ttggcggaggtcacggatcctactctgcaacgaaggttactttagttacgttagaagtgatttaaagtttttttggctgctgagaaaatgcaggaaaatgaatcgaaagtatcaatggaattagtgaagtaggatattttattattttatatgaactgaggttaattatgaaaaatatgaaggtcgataatattaaaagttttattgaactactcaccaatgaatctgtagtagtgaaattttcaattggaagtgatttgcttttgcttttagcaaaaatgttaagaaaatgcaaggaatgtttgctgatctgtttttgttttaaacaatgactaggtgtatgcttacagaagcatatgaagcttttctattgactatattttctttttctttcagtaatttaccttaggcctgtaagagatctactatatgtgatagatataggtcctgctccttttgaggtatcagtgttgtgcttataaccgctgcaattaaattcactacactagcatcttgctgcatctttttggggactcttttgaagatatgtcagtttcatgaacttcgtacatggaatatggatccacgagacactggatagagtaaatgcaatttgtttgaacataaatatataattgcagaaacatgtttatatttaagctcctttcctttctgtgagcttgcttcgcataattttttttcctcatagcttatctattcttttgttgccatgcttaagcagatca

SEQ ID NO: 79227 - DNA, 354 bp, Citrus sinensis
  Intron number 1 from transcript orange1.1g000860m (locus o range1.1g000860m.g) derived from phytozome v7.0 (chr-ID sc affold00014; pos 1709313 to 1709666)
tagctctggctggcaaacttgacggcaacttgaacgtcagtacttgctgcttatcacgtcaacaatatataatttcagagctgttatccttatagtccaattttatttttttctttttcgtctgcttagaagagtaattatagtcaaattctttgtgaaatgtgtaatttcatggaacctcttactaataagattcaaattcctataagctctcattaataggatcttcctcgtcatttgcgctaaaatgttactttagtcctggtcaacggcagtacttgtgttatatgatgaattacaaacccatctttgtttgcagaaaagtggtagtatcacatacaacggctgggagct

SEQ ID NO: 79228 - DNA, 636 bp, Citrus sinensis
  Intron number 1 from transcript orange1.1g042098m (locus o range1.1g042098m.g) derived from phytozome v7.0 (chr-ID sc affold00050; pos 152221 to 152856 reverse strand)
atcacagcgtaagtgattcttgtttgcacttgctttactattttatgttttaaaatcatctctgaaggaaacattggcttagattcatctgcacagctttgactaattggagagcttttgcccaactgatgacttagcttttctcttcagaatgactgtctttgctaatgtttagatatgtcaatgagaaagatgattagtatttgaagatctgttgatttttgctgaaaatcaaattgatttgatatcttagagttcctcgctgattgatgaacgtggaaagaaaaatttctcttgctgagattttgttgcgcaaaatgtgattgattatcttgaaataatggcttttctcatttcctccttattgattatattgaaatatgaaattttacctagtaaacaattttagaagcattgtgctaagatgatggaacttgacttggattggctctgttacaacatcatcgatataattttcgtaagaatgcgattcctgacgggcaacactgactgtctttgcatcatatttttacatatatgcatattttttcttttttaacatatgaatcttctatgcagtaactatattttattggtttctgtgcttagtaactgtttatttgacgtaagacagat

SEQ ID NO: 79229 - DNA, 986 bp, Citrus sinensis
  Intron number 2 from transcript orange1.1g044642m (locus o range1.1g044642m.g) derived from phytozome v7.0 (chr-ID sc affold00057; pos 1376 to 2361)
ggtggcaagaagaaagcttggaggaagaagcgcaagtaaaagtttctctcatctttagttgattttcgttgtagcattctgtttagttgttttgatgagcgggactcattgttcgcgtttgggtttgttaatttttggtatgactatgagctatgtagcagataagatcatgtaaagatgcaccaactttgattagtgttgctcaaaaagttgtcctatgtatttaagcaatccaaaaactaatgttactgaaataatttttccttatagattgctagttatatgttcttggaggagagctcttttcggccatcaagttgccctatctcgcgcaattttaagggtcatacagtctttagctaatcttgcaactatctgttttttggtattccctcactgtattgttactgataagagcccaataatatgatcgttgtctagttctgaatgtgctgtatgactatgtttgtcatattggaaggttttcgttctatttgtttataggttgattttatagtaatcatgaatacttaggctagttattctggccctgggacgagctgtctttgaacttgggctgagaagaaaaagaaagcctaatagagattctcctcttcggatggagtaagaggctcctactacaatattacatattgcctactttacgggtactttacgggttacaggtgaagtgagagttgttggtactgatccatgtaagacatttctcaattagaataattctatgtatgaatattcaaaacatacccatctgtattactgacaccaaaaagggattgtatgcctgatattttggaatgtatggtgtatacaagtggcctttccagggaattgactgatctttccttgtggcctttgttcattgttgatagatacaatttgcactgttggtgcttgctttataatctcatttttttattgtctattaaggtacgaacttggtcgtcagcctgcaaataccaagc

SEQ ID NO: 79230 - DNA, 540 bp, Citrus sinensis
  Intron number 1 from transcript orange1.1g026479m (locus o range1.1g026479m.g) derived from phytozome v7.0 (chr-ID sc affold00138; pos 101398 to 101937 reverse strand)
ataagcttagaagtattctttcttgcaactctaaggtataattaaattaattcatgtatatatagccctctgtgtctttattgttattatgtgcatgagaattcattaactctttatattcaataaacttttttcccctctttttacaagtaggcgattgtttctgaagataagattttcaggagaaactagatttaatttcatcacatgatcatttttctaattatttatttattttttcttcaaaatactgtatgaatgagtacagatagtaaaatcttggatagataaatcatacatgtctccaaatcgatgctttttagctttgaatgttcaaactgtaagtacagtatctgaaaaagaaaaagagggaaaaaaacaaaagaaaaatcattcctagtttctagggttactgtgtatttgggaaagtaggcaagcttttttattatttcggtatttcttttattgttattattatttaattttgattttttatttttaacagctagacaaggcttcactccttgcaagggtggttca

SEQ ID NO: 79231 - DNA, 900 bp, Citrus sinensis
  Intron number 1 from transcript orange1.1g027000m (locus o range1.1g027000m.g) derived from phytozome v7.0 (chr-ID sc affold00023; pos 962901 to 963800 reverse strand)
ggcatccagaacgacggctgaaggcgtcctttaaggtgggtactataaaaaaattgttttttttaagtcttgatttgttaattatttatgagctagcttttagttgcattaggaaattgttataggttattgtttgatgatattcattccaaatgaaaaatgtgaacaaatatattaaactctgttggaaggttcagttgtttagtttaaatgaattcgtaagctgcaaattttaaatccatgtggcctgtaatccttgcaattagaagattagcaacaatatagtttatgttacaagttatggcttaactacacaatgcctagtttttacatttggaaggaaaatggatcattattgcagtacaagtaggttgaaattaaagcgtggtgtcgcaggacggggatggatatgaatacttcttgcacagataatatatattagttttgcccttttagtttaggatgataatgcaagccaagtgtaggaatttgaatttggcacctcaaataaaatttgccaagacttaccttattctggaactagcgtgctgcatagctgacatagccgttcactatccctttgggatatacttctttgttctggttttatttgatatgtttactcattttttcagttttccccactttctttgtataatctcccaggaagctttcatttttgtgaccacttttagtttgccaattttctgatgaatatttggggtcaatctctgaaaaaccaaaatcctgaactatattttcttaactgtttatatagtgtcctcttattgttttcatccagttacaacatagtgaccaagaaatctcatttttgttttgattttgtgcttatgaacttgtacaggcttttgaagaagctgagctccccaggctgaagga

SEQ ID NO: 79232 - DNA, 677 bp, Citrus sinensis
  Intron number 1 from transcript orange1.1g014271m (locus o range1.1g014308m.g) derived from phytozome v7.0 (chr-ID sc affold00386; pos 153885 to 154561 reverse strand)
atttgcttctcacaattcaatctctcgattctaacgtaagttacagtaagattccttgatacccgtttgaatacttgcccttaatttttatgaaatgattataaagtcagaaactttatatcttttgcaatacccagttttttttatccgcttatttgttgaattctagtgtgctttcggtgttgtttcagctaattattaactgttcttttttctttttttgttttgtttcccagtttgtttgagtactttattgatttatctgttgtgattatggtcaaatttgtatatatccttctttgtagattatatgagcttgatgtttactcaatttctgtatctttttgagtgtgaagattttttagtgaagaattgagcttctaatttgaaacttttattaatcattggcttgtgatttgttgattttgatataaccatcataatttgttgtgttgggacactggattgtggattgggattgattcaatgcaactatgtctaatttatgtcgtattatttttgttagaatttgtccatttaaactttattaaagtaacttctttgaacatagttattttcaccattttggtcattctatatttgttcatggcctcttcattctcgctttttcttttctcacaggtgctatagtcgcattcacagtgacctttaaattc

SEQ ID NO: 79233 - DNA, 871 bp, Citrus sinensis
  Intron number 3 from transcript orange1.1g045723m (locus o range1.1g045723m.g) derived from phytozome v7.0 (chr-ID sc affold00095; pos 84377 to 85247)
acgaaggttcgagaccttcaaggcgacctcagaaggtaaattttgaattttcgcttgtgaattgtctcatcatcacagtcatcattcgtcgagcttaagtaatggctctccctttaaatatattaaatttaaaagagaaaaagtttctgactctaatttgtcacttattagttgtttcatcactccggatttttgaattgtgatcattttaattaggccttttctcttgaagggaattttagaggagaaatatgtatttgttacggtgttttgcgtctactaagttattgtattttatattaagagttacttaattatgccacagattgttactgtggcagatatcaaatgcacaattttggcacccacaaatgtgacatgggtttgtcgatagtgattttaaggagagaatatttgcatcactatttccagtttgagacttaactcctggggattaataatgcattactaatgaagtggaaggcctttattttacatgtacgttatatgatatacgcgtagagcaccttgcagagagaatttatgtcgcccctcacacacacacacacatgagtttttatgtgtgtattttgtcagaaataacaacttaacgaaaagatggttccaccttaagataagtctcttaataaaagaaatgtaaatgactttcagaaccgttaaaatctgtacacgacaaaaattgaaccctcagaaataacatcaattattaatttatgaattttgctttcaatgttatactattataactttcctgtcttcatgtgcagttatttggattttcttttttttttttttggggcattggctcaatgaggtgtgtgctctccaatgtctgaaatacaggctgtag

SEQ ID NO: 79234 - DNA, 1009 bp, Citrus sinensis
  Intron number 1 from transcript orange1.1g018886m (locus o range1.1g018886m.g) derived from phytozome v7.0 (chr-ID sc affold00167; pos 117725 to 118733 reverse strand)
tcattcttgactccactatcgaagataaaaaggtaatattgtcaaaacttttatattagctcttgcttttcgaagacttgttgttagagaatttttttcattaaaaaataaaaataaattttttggatcttatgttatgtttttggttaactctaaatccacataaaaaaacatatatatatttgaaagctgactaagagattgctacatcctatggactctctgccctgtaatgttatatcatttgagtgataagaaaattttatattcaagtagtttaggcagttttttcatctacatatgatagataatctggttgaatttgtgtataatatatggtttttttggattccattagtttctcttgctctagtatgttgttaaaggctccattttaacctgttgaaaatggtttctgtcactttagtgcttactagttcattacattcctcaagaaagataaggaataattgcgtgcttgattttgaatttttattgccagacttttcactgagggtatcacttccatgtgaattggtgtcaaattatgccagatatgacattttcttagttgtttatagcaaatattattgttataagttataaaattgcattctgaagagttgtacatggtgaaatctagctaaactgttcagcaagcctttgcttcagagtgaacacttttaattgaatcacattgaagctcattccttattgaaaagcattgtttccattttaatagcataaattaccaacttttagtcagctttcaaactgaatgatatgtttgtcatggtcttgtgtctcggaagattacttcaaacccttcttttctcttgtactgacaatgggacgcatcttttttttgtagtccttatctacagtgacagtaaccttgtaactgctaatgctatggaagcacattttcttgtttacagatacacaatcatctaactttgtttgccaaaatgcagaagattccacaaaattttgtgggaagatttgggga

SEQ ID NO: 79235 - DNA, 493 bp, Citrus sinensis
  Intron number 1 from transcript orange1.1g036449m (locus o range1.1g036449m.g) derived from phytozome v7.0 (chr-ID sc affold00017; pos 1052257 to 1052749)
tgctgatttcttacaccagcaacactttccctacggtaaaatttctccctttattttcaaaaaaggaaaattattttcttttctggttaactgtgtattttactgttggcgtttcggaagaatgtcaaagatggaaactttttgaaatttggcaacagagggctttatctaaatcaggcatactttgtaaagtttcatctttttgggtcattttgtgaaggatttggggaatatgtgtggattttttaatgaaagatggttgctttgatgttatttttgatatctggtttagaatttgtctccaatgttgtggtatctaatgcagttggtagattaggaatgaatgatgatgagttgtgaagattcacggcaatgagaaacaaatgctaggatattgtgctttctcatgctgtaatattgttttggaataggatttttggaaatatgtgttgcataatgtggttaattttttgttttggtgggaaacaggatt

SEQ ID NO: 79236 - DNA, 337 bp, Citrus sinensis
  Intron number 1 from transcript orange1.1g035290m (locus o range1.1g035290m.g) derived from phytozome v7.0 (chr-ID sc affold08347; pos 1419 to 1755)
ttgtaagctcatttttctaagggtttatgagttgtttgattgagtaataataaggatttttgattggatctctgctggaactgtaaatatctgatgcgatcaagtgaatctaatcgttttacttaagttgatttgattgtaagtcatgagaaattacttttagttgctgcggtttggttcggtaactgctgattagttgagtgttttatattgactaaaattttgcttttgactggtgatgctttcagtaattggtgactctgggtatttttttcttctttgtttttgcacaaatttgttagggagctgggaaatctgctgttttgaacagtttaat

SEQ ID NO: 79237 - DNA, 629 bp, Citrus sinensis
  Intron number 1 from transcript orange1.1g002372m (locus o range1.1g002211m.g) derived from phytozome v7.0 (chr-ID sc affold00023; pos 1372426 to 1373054 reverse strand)
cttctctttcctgtgagcctttaggctttttaattgtaagtattacttttaacaagagatttctttttttgggcactgttttttttttttattattaagaatatgggtggttgtgttcctggtagtctttcctttggttcctttacattggcctgctttcctgttgagctttgaggtgagtttttcttcctcgtgacccccggagatcagctgaattttcactcgttatttggttgcttttgggtggtattgcttgcttgttttattacacttctttagaaagacaatattttctttttctttttttccttccctccatcagccttttgcttttggcttctcactattattaagcttttgcatgttggatcacttaattgctatttttcgtatgtttggaacttccaattgttatttctctttcaaggtggaaacctgttcagaaattgattttcttattacttttttcatcaccccgtgttttttcagctactcgaggttgtccttgccttggtcaaggaagattctccttcgcagttcgttcctgcagattttcttaattcatttcaaaatttgttgtctgtcttattttggatgttaggtggtcggattcatcatttagcatcacc

SEQ ID NO: 79238 - DNA, 874 bp, Citrus sinensis
  Intron number 1 from transcript orange1.1g010818m (locus o range1.1g009577m.g) derived from phytozome v7.0 (chr-ID sc affold00892; pos 54142 to 55015 reverse strand)
ttgctggtcgacacaggtactatttgattttgagtgacaatttataaactgatggctttatttttattagtggcttgtcagttagtctagttttgtagtttcgttttttggtgttgtatgatgattgtttgctaaaatttgtctagaaggtttttagcctagcagggtcaaaggagagaaagctttccaataaacatccatggtttatggaatattattaaaaggtacaaagtgtattagataacagagtgatgctgagctaatcatgagctatgatagcattataaaagcagcggtatatgaaatatgcagtgatgctttcattttcattgtctatttgaaagtgtgtagtgtaaacattttgggctaagtttgagtgatgaagtgcttagtagggttctgtttgacatagttaaatgattaatatgagttatccaagcaggtacagagtaggatatctaggtttgggtttggtattagtttgaagatggccactgattatttgactatgtatgtatttgtatttgtgggtttctaaatgctttctgttgaatgtaactagggaatgatacatcttttgtcatttggacgcatgaatggtaaattttttgctttattttgggtacggtaattagtagtaattaataaagattatttgtgttgatgaattaaaacttatgcgctaaatagttttgcccctacttaaggtagggcttgtcttcactttcatcttatgctcttcttccataatttgtatttattgtaattcttatttttactagtctatagaacacaacattgtatcggagcgtctgatttctaatttttttttttaataggagaacgcactgtgggaggaggttgtgggagtcaa

SEQ ID NO: 79239 - DNA, 682 bp, Citrus sinensis
  Intron number 2 from transcript orange1.1g016165m (locus o range1.1g009050m.g) derived from phytozome v7.0 (chr-ID sc affold00049; pos 293738 to 294419)
ctttgtcgaatttatctcgacaagatctcaagcaggtataatgtttagcaaagctctttttatttgttttatcgtttatttatctgtgttgtgggtttgttttacttctgtttgaatcttatgaggggctgcttttgcgccggtgtatgtgggacttaaatatggtgagcaaatgtagccttgaaagcagagcagcttatagtgttttgtgaatacctacttttactttgcagctatttgtcaagttcatgagtgggtgtatattgcgagaatccatttgcgagagagtactgctgcttagtatctagtagttggatttaaaatttagaaacggatgtatcatacacaatcagcaagatgaaaatatccttatttgattgcggattgattctattcttaatcagtggggtactggggagggattctttttgtaaatttcttgagtagcattggtatgtaccctttatttgtgggatcttcaataatcttctttgccaaaaactaaaagccaccctttttgtttattacttatcgacttatgtggttacctcttcatttggagctattatttagaaatctagctgctaatttactatttggttcttatgatttaattaacaatgactgtttttcatttctttggcttttttctttttcccttcaaaggtttgggcaattgcag

SEQ ID NO: 79240 - DNA, 554 bp, Citrus sinensis
  Intron number 2 from transcript orange1.1g025825m (locus o range1.1g025843m.g) derived from phytozome v7.0 (chr-ID sc affold00310; pos 156880 to 157433)
ctgaaagcttatcatgtaaggtcatcccataattaattcaacattcttgtcagtgttacaaaaatgtaagatgtttatatttcatccaatatattttggcttagtgttgcattattgctggtatagaacatcctctaagcttctagacacaaaagagctatgcaccttttcttcttttaaatggcgattccatgttgttgttgttattgttaccttcacttttatggagcactaaagggtaaacacatttgtgagagagtgtgggtgggctttacaaatttttgaggacttgacatgtcttctatggatttctactcgatttactttgagatattatatctaaacattgtttctgttttgtaactctgttatctgttttcaagagtttggttgctcaatcatatccttcgatatgcagatcatatatttaaaatttattggatttttcttatgaattaattaagagtgggaacaaaaccaagcttccacatcaaaaccattttcagccttattacatactgatgtttcctgccttatatgtagttgctgtggca

SEQ ID NO: 79241 - DNA, 696 bp, Citrus sinensis
  Intron number 6 from transcript orange1.1g036476m (locus o range1.1g036476m.g) derived from phytozome v7.0 (chr-ID sc affold00050; pos 440857 to 441552 reverse strand)
agaatacaatttctctgcttgtgaagactcagaatgtaagttctcacctcttttgtatatcgaattgattgcaccgtgaatttagtactgtttcttgtttgtttattttctcattcagatactattgctaattaatcaacaaaggtcatatttgcagttctcgtcatcatggtcttcttcctaggttgtttggagatgtggtgtaataatattttgattacttatccttttcttttgatgtcaagtatttagaaaaagtattttggaaactaacagaaatatggatgaagtagagtctcaacataatatcaaagttattcagtatgattttctatcactatgcttttttttttttggtgctttagttttttagtatccattatactaaatggtacatatagcagcactcttgaacatcaattgccttgttgttatgttggatacagttgttgagaagtttgtgaaaaaggttgtaggttgtcatatttaggtaaacatagcttccaataaatgcttggctacaatgaattaaatcatcatgttaatttcctatttgctgtttggtactcgttgatgttaggtatttaccttgtttatttctttcttttggctttgataaaaaaagtcttgctctatctcacttcccattgtttaatttgtttccttgtgtgatattctacattttctgtacctagg

SEQ ID NO: 79242 - DNA, 568 bp, Citrus sinensis
  Intron number 1 from transcript orange1.1g013414m (locus o range1.1g013438m.g) derived from phytozome v7.0 (chr-ID sc affold00005; pos 663182 to 663749)
ttaactgatctttttgaggaactaagacagatcaggtatgctgatttttacttgtcagtgatggttaactgtctttggattgattgactttaaccttcaatataatcattattgttattggtaggtgaaataattttagagctacaatatcttggttctatattaattagattctataatatgaatactcagctctagtggcaaatctatctgaactcgttcgacatgtttgtttgatttataagttatcagaaatgatatgagtctttcctttccatattcttctaattaatcatgtgttgtccacatgtttcaaagccatgggtcccttttttgttttgttttgtttttgtttgtctttttctgtcatttttttttttatatatatctttattttggcatggttcctagctaagcacactctgcttacggcacttgcttattggttttaggttctacagcaatgatatgacagatggattgttagtgtgctttcaacgcatacactagtaataaatatattttcctctgtacatcatttattttggactttcaggcggtttggaac

SEQ ID NO: 79243 - DNA, 931 bp, Citrus sinensis
  Intron number 2 from transcript orange1.1g039505m (locus o range1.1g039505m.g) derived from phytozome v7.0 (chr-ID sc affold00944; pos 29218 to 30148 reverse strand)
agcaaaatattttaccagattttagtggatgttttacctaaattgtggggtacaataaaaatagaaaatgtatccgctgattattcagtggagattatacatgtactctgatcggattatttatccgtctgtctcgtgaataccaacaagggactccgttcatatcagcattggaattaaggcctctgaaaaataatacttacataactcaacactggctcgctggaactacctctgcggctggatgttggtttcacatcaaatggtacgtacattgaggttagacatttttacgtaactgtcgcacctcagactcgctttcaaatcaagcagcaatagtgtttacgtaaaatcattgctaaattgcagtgcaatatgcctctggtataaagatgatgcttatgaccgggtcaggtggccgtataatttgcataagtgggaccaacgtcagaagctgttgatgctaatggtagcaatgatgattcaccaatttcatggattgaagaaaaatttgcaagcagatccatgtgctcttcaagattacttatggaagggtcttaattgcagctatcccaatgatgattcacctagaattacctcattgtttgtttgagtcttcgggctagcaataacatattttgtctagtctagattattatttcaactagaaatttgtctatgaatgattgaatttcaaccagaaatttatctatgagtggattgaccgggggttttgctcattatcttaccaatttcaaaatgcttacatctctgtaagtatccgatcaaatctgacagtagttgttaagtatccaacatatgaaataatgttggaatgaaattgctaactgtttttaatcattcttttatggacttgtcgaacaataatttgacagaaccggtgcctaaatttctatctcaattgtcatcc

SEQ ID NO: 79244 - DNA, 822 bp, Citrus sinensis
  Intron number 2 from transcript orange1.1g046996m (locus o range1.1g046996m.g) derived from phytozome v7.0 (chr-ID sc affold01120; pos 3427 to 4248)
aaacagaacgataccaaaaggtggtcatctgcaattagaaggcagcaattttctaagctttctcattaattttcattttttttttaaagagttttgaccttattgatgatgaagaaatgttatctttgatttgcaaatcatgaaccctagatcatatgcctcttttttatcctcatttgggtcaaaattttttcacttcccacagtggtttttaccccaagcttgagagtttactataggcttaatttctaccagaaaatagacccatcgggagagaaaaacgaaaggatcctgtcaagacaaatataagacaatagattttccagaaaaatttctgacagaaactgttcccaaatcatgtataagttaatagggttttgattaatttgtcttccttttctccaaaattcatagcatcatgcatgaactttctcacttaactgtccattgaatgcttcttctgccacttcttataactacaaaaacagattcttaatgtcggattagtttttcattgaagtccttgatcttttctaaaattactttacttcaccaaatatctcttcattttcttctttatctttcttttctccaaaattagcaccaccatgcatgaactttctcacctaaatgtcaaaattgaatgcttcttctgctacttcttataactccaaaaacagattcttaatatctgattagtttttcattgaattcctcgatcttgtctaaaattactaaacttcatcaaatatttcttcattttcttctttccccatatttttttcaggcagaaatatcactttgccgtgtgtacaagagacc

SEQ ID NO: 79245 - DNA, 744 bp, Citrus sinensis
  Intron number 1 from transcript orange1.1g030646m (locus o range1.1g030646m.g) derived from phytozome v7.0 (chr-ID sc affold00005; pos 2167102 to 2167845 reverse strand)
gggtaagtaatcggattcctatttatttttttcttcaatcaattgtttattttcgcttgattttgatggagacggtgtgaatctgctgctttggtatttgaatagtttccggtattaattctactgaaaggttgcgttgactcgtgtgctgtgtatttacaattacaagtttgactttattttggtttcttaatttatcttactatttatagaaggatgattcaattttttaagcatttaatgaattgataatttttaacttaatttgatgaagtggctaacaagttactctttttattctttgttttgagcgagctacttattagaagttgagctaatcctttacttcattcggtttcgatactgatttttcttcatttttcagtttcttgatgtgtgggagtcgttttgaacacttgctcttgaactcttagcaagtagctggctgctaaattttctgttagttcgatgggtgctggttcttgttgtcatctagttcatccagtttcttgaacctagacaaggttgtggtcttgctgttgttgatcccttttcaaatgatttttaatgtgtttgtatcatgcaatgttgtccaatatggtctcagaattttaagtttaataccatccgccacggttgaatagatttgctgctagtagagtacctactgtatctgggtatatggtttaatccgattgtaacagcgcagtggttgttttgggtgctgcactaagtccacaccaa

SEQ ID NO: 79246 - DNA, 899 bp, Citrus sinensis
  Intron number 1 from transcript orange1.1g004074m (locus o range1.1g004074m.g) derived from phytozome v7.0 (chr-ID sc affold00003; pos 624175 to 625073)
aagcctccttggctcataccgattttcccggtacgttttggttcaaaacctcagttttttttttccactttaaagtaaatgaataaatttccgtccgtatttcctttattttttatatatctatttttcggggattttcagttttacgttggcaattcgcgttggcaacgtgccttatttgtttttatagttacctataaattcggcgactcgcgttttattctgtttttgcgagtgtcgattagctgatagagatttttgtgtctggtctcggttaagatttcatcccgggggtcattttcgagaaatcattttccttattttctttgggttgtaagatgctttttttttttaatgaaaatatcattttccgaatcacgaatacctgctgcttgataaaatgtctaaatcagatttaatgcttttatttttgcatagttcttaattttttgcttcttgtataacgctagtactatatcgttttaaattttgtattcttatattttaattatgtccagatcaactttgatcatgagaattgtgaaatgaaatcgtactttgtaattctttttcgaaattccctgtttggtttccaagaaaattggaaactgggaaactacatcatcaatcaatcaagccaaaagcaattcgttagcgtagctgagttggctttctattaaaaatcgaaaattcatccagacgaaattttatacgagactcggtttattggcttgctattttcagtcattgcaaaagaaagtagaaaccggggcttgtttggacaagtataggtctgcttgagatattcaaaacattttcctttgtcagttggtgattatgatttcttctactttatcatttcagacgatatagatttgcaatttggttttccactgtga

SEQ ID NO: 79247 - DNA, 765 bp, Citrus sinensis
  Intron number 1 from transcript orange1.1g013568m (locus o range1.1g008417m.g) derived from phytozome v7.0 (chr-ID sc affold00011; pos 436164 to 436928)
taaaagcgaaaagtcgcttctcgattacgagagtggtacgtttgtggtctctcttcactgccggttattttcatttattttacgcgtgtaattttggaatttgaagcatgattagcagatttgtagaaatttaggaagataatgttggtttgctggtgttaattaagaaaaaattaaatttaggtgcattcgtcgaacctttagttcagagaaattgaatagattataactacgctcacaatcctcatcctctagcatgggatcatcatagggcttgctgatcacactgattgctaatatttaagttatttgataattatattagagttttttcgctgcttatgaaaaatgattcgctatttgacaacagtaactttaaatctgtcagaagctggtatcatctgtagagcaagatttgaggaatatgatgcagttttcaggtcttatttgtctagtaggaactatgttttcaggccttatttgtccggtattcatgcatcaacgaagccattaaggagacgtgaagaaatgttgtaggaattaatagcttgttactctattcttttgtttgactataggcacttcaggctcagtgtgcatgtgtttcaatgcaagtatactatggaaatttaagtgtttgtgggacagtgcaacatgagaacatcttctatcttgctctccctcttcttcactccctccccttcccttgtgctcaacttctcacactgtttatacatgtttgatccaggtgctggaaaaggggac

SEQ ID NO: 79248 - DNA, 1008 bp, Citrus sinensis
  Intron number 1 from transcript orange1.1g002874m (locus o range1.1g002871m.g) derived from phytozome v7.0 (chr-ID sc affold00057; pos 393239 to 394246)
tctttaattcatttattttctctctctccaaacaggtactgtcttttctctctcgttctttctttcttccttttacgcttcttcgtaattttcgtatgtgatcagttgttttgtttattaggaattcaagtaactgttattgaaatagtgaaattttgagtttagagtttgtgtttgtgttttgcttgacttgatggctaaatgaggcctctttttttttttttgaagaacgagttgatgttttttgtttttggggtctaattattgatatgattattatccacttttgagttttttaccttttatttttttttgtccttcatgtgtgtgttgactttgtgcggactgttgctaattctgtttgattttttgatgtgtcgcggagttttggatgtattattaggttgttgaagtttgtgatttcgtacctgatcttgagaatttgctttgctcaattgtgtatagagaaatgagtatttaataggctcaagtgaatgttgtttcataattgctaattacttttgattgtaatgttcatggagctgaattttctcacttaacaaattgtaattgtgtttgtacttagttgattactaatgaatttcacaagagcttttactaatgaaaaacagtagaaatgtgggcaactgattaacgaaatagttttccagcgcgatagtaagggaagaaatcatggaagcccaattgtaattgtcctgtgcttgaggtatttggttgactgacattttgtggtagataattgagctcttggaccatgtttgcagtcactttgatcatttctgaagaatttagtgaatgcacttaaattaagtaaattcctatagattaattaaatagttatatcgtctttcttttctttgcttaatgtactgttttcgatttaatcttcaattcttatagatttatatctgtgcatctctttatgaatggctatttgatgatgttaaggcagctccataacaataaacaaattgaaaatttgttaat

SEQ ID NO: 79249 - DNA, 688 bp, Citrus sinensis; identical to SEQ ID NO: 78789
  Intron number 1 from transcript orange1.1g014384m (locus o range1.1g014331m.g) derived from phytozome v7.0 (chr-ID sc affold00062; pos 363655 to 364342 reverse strand)

SEQ ID NO: 79250 - DNA, 721 bp, Citrus sinensis
  Intron number 2 from transcript orange1.1g010680m (locus o range1.1g008171m.g) derived from phytozome v7.0 (chr-ID sc affold00023; pos 815281 to 816001 reverse strand)
gaaatagacccgcaattgaagtccgtcttgtgcaggcatgtgttgatttgttaagttcatgcatgagcattagcgaaaatttcaatatttttctatcaatagcttgcactgtatacacactcaagatgtctctcttctcttttgagacttgaccatttgaaaattctagaaagcattcaacatcaaattaaatgtttgcttgggaaaaagaatactttaaaagagtgaaagggattatgtgtaacaccccaaaacatttcttttcttgattttgtatgtgtaaaaacaaaaactaattgagccaatgatggttatttattgcattggaatgttatttttcttgattgagtttcgaaattcgatttgattgggccccatttgttgctaccattgttttctggaatgtgatttatttaagaattaatgcatctcattcaaataagtatttggatgttaaaccctcaacatttccgtttgggtggttgaagttatttgtcagtacttcatgtctccagtttaacatagtgatgtctttactaatgttatgtaatgaaattattgtgtccagttacttgttcttgccctatcaaggtcatgtttcatattttaaacttagatgctggcttgatttcgatgaatcctcttgcatttttcgattttatctcatgtaggtgtttaacattctgattttttttattttcatctttctttttaagtagga

SEQ ID NO: 79251 - DNA, 915 bp, Citrus sinensis
  Intron number 1 from transcript orange1.1g027059m (locus o range1.1g027053m.g) derived from phytozome v7.0 (chr-ID sc affold00329; pos 5209 to 6123 reverse strand)
ctattagcgacgttgaagtctctgctgatttgcaagtactgtaaatgaatttttttaatttagtatgtgaaaatttagttaatatggggtatttgaaatggatttctttcaaaatttgattttgtggtcatgggattaaggtgctgtagctgctatagagatgaaatcattagctatcaactatagctaagcggataattgctaaatattagctgctcaagaaaaagtgagtgtttattgaacacgttagcagttttgatttcgaagttaagcagaagaacaacagctattaacataacctttagtttagttgcatgtggattgtttgaaatggcattatgcaatgtgtttagtcattagtgtgcaagatacttgtgctgtggtgttgtttaacgacagcttttatggtttgattatgagagtatgttcattgttgtgtttggatagtccgtggaaaagaaaggaaaagaagtttcttataattaattgttttactaatgtgttctacctttggaaatttaggtggatgattacttttaaaagtgtattatttatctggctacaatagtctatgataagtcaaaggtttttttatgttacttgcatttccatcgtaattttgctgctgatgttagaaaagctgaatggggttttaagagtttagccgtatattcttttcatatcatttccttaatgctataccattcaaccaagggatcttattaggcctttcactgtccttgttactttcagttcgaatgccatagtgttaatcagtcgtattatgttaatttagattcttttgtttttgtattataaagttattgtgggagtagctggccgttgattaacttgtagttattcttttacaaagtcactgaaatgtttgtcaatttctgtaggtagttaaagtat

SEQ ID NO: 79252 - DNA, 429 bp, Citrus sinensis
  Intron number 1 from transcript orange1.1g011544m (locus o range1.1g011544m.g) derived from phytozome v7.0 (chr-ID sc affold00074; pos 522251 to 522679 reverse strand)
ttaagcatctccgatttgcaattcttatcaagcaagttcgtctctccctcatatcaaattttacatgcgtttctagctcgatttattgattaatcttcaattttatatttaggtgtattaaaatgacgcttttcgtcatctgaattcggttcaaatgtcgatcaagtttgaaatcagctgcttgaattgattaaatttgattttttttctttatgctggatcgaactagcaagtgttgaaatttgcacgtaattctctcaatttatatatttttctcaatggatccgagtcgacgtgtaccttgttacattgacttaatcttagttatgttactttctgtttaattatgcttttggatgctaattgtggatattaagaagcaagatgcttgcagggagcaggtgtctgcgccgaatattgattgtacat

SEQ ID NO: 79253 - DNA, 1047 bp, Citrus sinensis
  Intron number 1 from transcript orange1.1g012563m (locus o range1.1g012563m.g) derived from phytozome v7.0 (chr-ID sc affold00014; pos 411124 to 412170 reverse strand)
tccctatccaaggtgagcgccacatttttctttgtctctctctctctctcccctcgttatttctgtataggtgtccaagtttatttgtttgtggatagaaaaaatcaaaaattcatttccagtggtatgattttttttttctttttataatattaagacaacgatatcttaaacttttcgccggcattggtgtagataaaaatgaattttttaaatgttctcctccaaccattcattggtggaggtcagattgtgggttcaccactcacaagggtcataaattaaaaaaaaaaattacaaacttgagaaggtcaaagtaaaaactcatatacttaacgggtcaatcttatgaaaacctataaagtcctaaagattgctccgtcaacactgtgcgtcagcagatcgaagaggctcattaatttcgacttggtgttgtgcaatagtattgtcttcgagaattgaatgtgccagatagcgttagatgaaataatattgtgcaactaatgttctagatatatgtcattggagaagaagaattgcatactactaaacatggtgcaagaactctggttttaaatttaatcatgacctttatatttcaataaattaagatgtgtttaatatttgaattctaatatcaaatgtcactcatctattgataatttatttcataatttaataaaatgtattaatctgttgagacttttaatttacttgaatattgatgtaccttagcattactctttatttataaactaaaattagtaaaatgaagctgcagttggtatacaacgattcatatgttttttaatgttaataatgataagtagcaactaataagtttactctaattattgtattttaatagatctcgtgaatctcggaagggcgtacaactataaatcccaatgttatttacgtgtatatatttatttattagcgcttaagtggagcggagtaggcctaatgttataatgaatgtatctcatttcatttgtttttccccgttcagatccccaatcagagtcacctgtgatagagtaccca

SEQ ID NO: 79254 - DNA, 739 bp, Citrus sinensis
  Intron number 3 from transcript orange1.1g032395m (locus o range1.1g026274m.g) derived from phytozome v7.0 (chr-ID sc affold00017; pos 1143859 to 1144597)
attccaatcggatagaggtatctatatcctttaaatttcatttttttttcttcctttattggggacctgtttcattaaaatttaaatgtttaagttttttcattgtatttatttgtgtttttttttaataaagtaaaagcacctaaaagcagttatcttaaaaaaaaaagtagatattaattaaagtgcttttaccattttgaaagcgcaagttataattgctttcagctcgttggtgaattctgttgaagaagcagattatgaatgtaaatacataacttggtactttaattaatttgtcaagaatgtagttacttcttgccttgatttaatttaatttttcttttacttttccattgcaggtgctgaagaacatgagaagagtctgcgaaatgaataaattgaactgtagagtaaattatcgcaatttttaactgtttcacatatttaccctgccagttttctgcttgtcttcgcattgaaagatgaaaaaaaaaatgttgccttttgagttgtttttcagtagacatgttatattctgtaggtaatgggactgacatggggatttttggatgcatctatattcgatttaaatcccaatattattctgggggctgatgtattttatgatgcaagtggtaaaatttgtgcttttgaaatcttgatctgttctctttttcccatttgatttgttggctcaagctgaaatgttgtttctggttttgctggtaagcttttg

SEQ ID NO: 79255 - DNA, 569 bp, Citrus sinensis
  Intron number 2 from transcript orange1.1g003179m (locus o range1.1g003179m.g) derived from phytozome v7.0 (chr-ID sc affold00261; pos 189366 to 189934 reverse strand)
ctgcagttgagggtttcagtagtttttcctgcttttttttctgtttatgtttgaaatttgaaatttgaattttgagctcattttacagctttgttggctatactgttgattagagaacaatttgaaaaaattagtgtattactaggatttcgagtacaacattttaaagaaagcatttcaagcacatttagggtcgatgagtatgtttggaattgagatactgtaattcacaacttggaagataatgcaatcactagttgttatttaagtgggtgttttgtctgtagacattaactgctgcgtttagttagtagacattaaccaccaagtaaaagtgggttatcaaacacttttgttattgttctctcaaagttaattaggaaacaaagtgaaaaccacaatcttactgaagaatgtgttatgtggcttaaggttttgaaagttagaatcaaaggagagaagtgagttattctagtgttttttaataatcactacataaatagaagcacataattttgatttggaagctgattgtttagatgtttatttcacaggaactgtatttgcat

SEQ ID NO: 79256 - DNA, 336 bp, Citrus sinensis
  Intron number 1 from transcript orange1.1g047844m (locus o range1.1g047844m.g) derived from phytozome v7.0 (chr-ID sc affold01738; pos 217 to 552 reverse strand)
cagcagtctgcagtcgctcttgcggtatggatgcgcatgctttcgtacaaaatttaatggaaaatgctacttcccccgaaacaaaccccgaatcaaaccccaacatcgtaaaaacgcaccgttttagccaaaaaaaaaacaaaaggttacttataacaacgccgatattcacacaaagaagagcatgagtgcaaagagtacctcacgcgtcccaagttcacgcatctggctctttcatttctttctcagtacactgctttcctttctccctcatcgcaactctttctctctcgtcttcaagctgccagccgttgccacaagctccaccgcagcagc

SEQ ID NO: 79257 - DNA, 369 bp, Citrus sinensis
  Intron number 1 from transcript orange1.1g045499m (locus o range1.1g045499m.g) derived from phytozome v7.0 (chr-ID sc affold00321; pos 133966 to 134334)
ctgttgcttgtgctctttaaaatgttcctttcttcaatggaagcccacaaaatacatatgttcaaggatcttaaactttataatctttcccttgattaattagctttgttggttcagttgaagttttgtagagacatctgagattgtgcttttgttttcttaaattgggtttttgtttgcagggtattgatttggaattaactggaaatttttgattggtggagatgggtttaagagtggccagagtaagatgaaatccatttaattagattcttagaagtgcttattaatttcgtattgtgatgatattgactggttgctgggtgccaattgccaaatctgttgaaaggtacaaccacttgggaattg

SEQ ID NO: 79258 - DNA, 985 bp, Citrus sinensis
  Intron number 2 from transcript orange1.1g045499m (locus o range1.1g045499m.g) derived from phytozome v7.0 (chr-ID sc affold00321; pos 134401 to 135385)
ttgttggtgacgtctcctgcaaatgatatcttttatgagcccagtgaacatccctcaaccacattgtggtcaacaaggtaatgacattacctcgattattaagagaaatgttaataacagaccagtagtgtgtatacaatgtattgaatgtcctacatttttcatggaatgtagcaaagctctttctgaacagtaattttgaatactttgttttgtagctttgtcaattggtttgactcttgttctgttgtgggagtgtttgtgttcataaggcatttgccataggtgggagatagcaagagagccatggataagtacacataataaattttattggtgataagaacaccatagtgctgcacaatacatgcctagggtctctttttgctgctccagtcttcctagattggttcttacttgttgaacttggcaaccatgatccagcttaacctgaaagagagttttgtcaagttgctccgtagaaagaattttatagttttataaatgctttgcggactatattcttggttgactctataataaactactgcaagaaatatttaatcatttggtgttcaatttttcaggttaaattccactctttccacctttgggactacaattgttagcgacctcaccaatggctctcgtgtaagtattaaatacctttctttctttaactactctttactttttcaagcgcaatagagttaaatttgagccaaattattgatgagcttcttataaatgggttcgtccacacaataagagtggaaggagatgaatttgggttaaagcttacatgcctttagtcaaagataaattcttttgctctatgtataatgataatataagcaaaaacggattaaaaattggtaacattacttattattctcagcaaatttcggattcctccaggcacaatggtggagaatgcactgtgaaagcagcatttaatacttgagaacattctgagggcttgcat

SEQ ID NO: 79259 - DNA, 717 bp, Citrus sinensis
  Intron number 1 from transcript orange1.1g016339m (locus o range1.1g016339m.g) derived from phytozome v7.0 (chr-ID sc affold00003; pos 522717 to 523433 reverse strand)
aagaggttagaatgtttgtctcctataatcctaatttgattatttcctctccccccctaatttctgctctttaagtttggtttcggttttgtattatgtagatgtagtttctggtggataataatggcatatgaatatacgacacttttgtagttttgtttgagataaacaagctttaattctttttgcaataaacattaatcgaactttttttttaacccccttgggaagaaaatatgataacagtctaatgtaacttatggattcaaacctgtctctcaaatggcatttgatttaattacaaaaaaaggaaatttccagctatctagaaataatttagtgagtgttttgattttgtttgaagtgttttcgaataagtaagagtacttttgtaaaacttttataaatgaaagttctttttagagaagaaacactcaacgtaagttttgaaagtaatttttttttttttgagttaaagaaaacttttgaagttctatttgaagaagcacatcataggtgttctttcaaacagcttataagcctttttttttttgttccttggcataggcagtaccacaagaaaagtgagtattcattttcttcgttgtaaatcatgttataatccttctcttttctcttaaggtcctgttaatagtaatactacaactttttggctttgcaggtcctgaatacgtggaagtctaggctgcatacttg

SEQ ID NO: 79260 - DNA, 499 bp, Citrus sinensis
  Intron number 1 from transcript orange1.1g010829m (locus o range1.1g009193m.g) derived from phytozome v7.0 (chr-ID sc affold00048; pos 548519 to 549017 reverse strand)
ttgtggaacaaaatcagcctgtccttacaacaaaagtatgtgtcagttagattgtacgtgctttctaggtttgtgaaatagaagggctgaagtgcggaggagagaaactgagtgagaagatggggagatgctgaaatcatataggatcatgcaagtagttggaatgaatgcaaactaactatttatgttttttctttggaggctatccggagttgtgctaattttccacattattcgggcttgtttcagagtatttatctgtttgccaacataatgttttgcaatgtccatttgaattgagacatctaggaaatcacacattgcatgtctactaaaatctatagtgctataatttgtgctgggttgttcaagatcagataaaaacttttcttatgaatattaagttttgtgcgcattgcatctggcaatatttatcccacgtgttgattcaaattccttctcagttgtgagggttcagtttttgatcccttgggtatca

SEQ ID NO: 79261 - DNA, 207 bp, Citrus sinensis
  Intron number 2 from transcript orange1.1g017247m (locus o range1.1g017247m.g) derived from phytozome v7.0 (chr-ID sc affold00065; pos 442197 to 442403)
tgagcgtctgcttctcactttggtctctggtaagaaagatattaataaataataaaaacgatacccttttgttttgttttgtttcattagagctagctggtaatcatttttttcaagttttttttgttttgttttgatgatggtttgtttcttcttgtttttttcctattagattcaagatctgtaagttaccttccttcagtgttg

SEQ ID NO: 79262 - DNA, 673 bp, Citrus sinensis
  Intron number 2 from transcript orange1.1g001681m (locus o range1.1g001681m.g) derived from phytozome v7.0 (chr-ID sc affold00003; pos 2361751 to 2362423 reverse strand)
atttcttcacgaggagaaccgtgagtttatatatttatttttacgctttgaattttgaatttttttattattgcagttcatttggttaatcatgagattaagctctgtaatcaaaacattagtctcttcctgctaaaatacttcggttgttgcatgaatttgatgagtgtttgtgttgaatttacttggtggaattttttgggctttaatttttaatttatttttttcttttaatgtttgacttgttaagatgatcaggtttttcttcgattagattcctcacagaaagagagacatcaacagtagtaattattcttttgtttttggttacatcaataatctatctctttgcaggaatatactttgctaatatgagatattgtactgatttttgtttggaaatctataatttgatattgatctagttgaaagtgtttctgaatttcgcaaaagcagcaatgatctctctgaagtggaaggatataatttgggataaagttctaaccatcacacccccccacccccccccccccccccccccccccccccaaaaaaaggaagatctaggtttactgactgtgctttatgaattttaaaaatttcttaactaacctattatgcatttttggataatgaagctctgggcagacccaagtggtgggaggaggaggag

SEQ ID NO: 79263 - DNA, 450 bp, Citrus sinensis
  Intron number 1 from transcript orange1.1g016852m (locus o range1.1g016852m.g) derived from phytozome v7.0 (chr-ID sc affold00003; pos 4392503 to 4392952)
ttggcaagactgctgggtatcacagcagaacccaggtttttaacttcttacccttttttttcgctttctttctcttttattttattttattttaaaacattgagaaattttgtttcatgttctgtttacgtagtgcataaccgaattgagactggttacgtttttctattgattctctagctctatttctgttgttgattaatttctatccagattttttaagtcttttcattcttctgtggattgggcatttgcgtttttgttttcttctaatcgcttaattgatttcagcttatgggagcttttgggaattgagtgattgaggggtgaattgggtttttgagtgggcgaaaggattttggttcttcttctgtttgatgcctctgattgaagccaaaaaaactgttttttgcaggaggaaatacacgagctgcttctgagttttgctga

SEQ ID NO: 79264 - DNA, 634 bp, Citrus sinensis
  Intron number 1 from transcript orange1.1g023849m (locus o range1.1g023849m.g) derived from phytozome v7.0 (chr-ID sc affold00023; pos 179884 to 180517 reverse strand)
gttcacacccggaaggtaccttttttctttttttgggcgttaatggtggttttgagttttcgtgtttggtgcttgtttggctgctgagaaaatgtgggaagaaaaattgagggaatgagagagaaagaaaacgggaaggttggttcctcgtgactttttgtttcggtagtttttttttgggtttccgggggaattgggtttgtttcagttaaatgaagtttaatttagttgagttataagtgaacagcagaagtggaatacttcgcattcagttgaattcaactagaatttgtttgaattccaatctaatgattagttgcattgtgttataagccaagttgtttacaacccaaggcaagattggcctgattattctaacaatgaccctttaaagggggagacatatacagtagcagcacaatggctgttgcttccgttttggggtataagaagaagggttacatgttgtgtgactgtggagtcgattgtgttgttgtttctaagtgttgctaattaattgagacactgggctaggacatgaaagattcggttctttcttggggtttgtaagttataactgactttgccattcttctcaggcttctagttattttctgtttcatcaacttgttga

SEQ ID NO: 79265 - DNA, 482 bp, Citrus sinensis
  Intron number 1 from transcript orange1.1g011488m (locus o range1.1g011488m.g) derived from phytozome v7.0 (chr-ID sc affold00138; pos 213429 to 213910)
ggcttccagacccattgttccacgacaagctagaggtatattttattgctttcatttttctttcttgtgggttctttccaattctttttgaattcccattttctaaaacccaatagatgattcttggcatcaatcctttccgttgatactttcaatctgctttttatttgatacacatttgttccttttctgttttgggcaatttgtttcgatgcaatgtgagatttgatcctcgtagtaacgtttgatatgtgtttaaatgatgagaaaactcgaataaaagaaaaagaaaatctatgtcctcttttctattgaataaaacatgaatcttttctgttctttaggtttttttttggggggggggggtcgatcagtttattttcttagcattctttgagactcgttatcaaatttcttagcataatgatatcaattggtttcttataggtgaggcagttgtaggaggagtagcaattaagcag

SEQ ID NO: 79266 - DNA, 491 bp, Citrus sinensis
  Intron number 3 from transcript orange1.1g041101m (locus o range1.1g041101m.g) derived from phytozome v7.0 (chr-ID sc affold00003; pos 1782517 to 1783007)
gccttgccaattcctcagactcgattgcttcacatgtgagcatttctttctacccgcctctttcattacaacaaacataactttggtcggcacaacatggtctgattagaaagaaacatgagttactatttattaagtccttcaattgcaaaattatcaaaaacattgactgacttgtcaagcttaagttgattcttcacagtgtttttcattcattgattaataagactgaatgtctggccaagtcagctcctttagaaacggaagtaaaggcctaaaatccaaatctatgagcttcgacacattctttctgaaagtcccctgccaagcatgcattattgtcaattaattagaaacaaatatatgcatcttactttattgtctgtactaccgaaactaatgcttaatgtgatgattcattctgttttgactttggtgaatgttatttctttacagcaatcaaattccactcgagttctaattcctgtttt

SEQ ID NO: 79267 - DNA, 568 bp, Citrus sinensis
  Intron number 3 from transcript orange1.1g019716m (locus o range1.1g019716m.g) derived from phytozome v7.0 (chr-ID sc affold00017; pos 1660709 to 1661276 reverse strand)
ttatcacagtgcaagcaggagaggtattcttctaatttttcactatcctatttgttatttcctatatacattgatttgatttggatgtgattggatttgggtcatctgtaattccgagtgatgttattcttgtgccttagaacgattcacgttgaaattcatgtatgacatactttacttgtgggggcagactgttgttgagcaaattttctttcagaacatgcttatttatgcctgaggcagttagctgtctggtttaaattattatatggtttcactagttggtgattcaatttaacacctagtcaataatgtaacagtgcatgtatgtcctgccacaattattttgaaaaagaaaatgaataattaaggtggcttgcagatggtgaataactatcttcgtttagttcatatatatacttagtcaatctagatgatgatttagttgccatttcacttatattcttctctttcgaagttttagtgtctcccaatttaaatgtctttcttcatccttttgtttgtccagggacattatatttatttcatatgacttttacttctcagg

SEQ ID NO: 79268 - DNA, 556 bp, Citrus sinensis
  Intron number 2 from transcript orange1.1g019716m (locus o range1.1g019716m.g) derived from phytozome v7.0 (chr-ID sc affold00017; pos 1661280 to 1661835 reverse strand)
cggctctactacacgcaaacacactgctgcttttggtactgtctatttatactattatttgtttttttaatatataattaactaatgctgtttctttaatttaaataaatgttgttcatgtattttttattggagtgcactgtcaatgacgtatatgcccttgttagttattcttgtttattttaactgctccattgctgatttgcttttgatttccatcctttttttctccattttatgcttcttactgccagaaaaggttttttttttaattgtgaatttttaaattgcagttttttaaaaaaaaattgttttatatattttgatctgtctctcttctactggaacaaggaggaagtagaagctcacaacataaatagttattaccattaattgactactggagtggtactttgttttctttagattattaattctcagtcttataaaaatgtgcgcaagcacaaatgtggggtttctgttgttcattgtgtcattattattattgttgttgtttcttacatctcaggatcagctggggttggttttacacctc

SEQ ID NO: 79269 - DNA, 747 bp, Citrus sinensis
  Intron number 3 from transcript orange1.1g031164m (locus o range1.1g027973m.g) derived from phytozome v7.0 (chr-ID sc affold00237; pos 135441 to 136187)
cagtgattggtaagttgttgtgttttgtgaagttaactagccctcttgcccttttgcgtgttcttcatccattacggtgtacacaaaatttgatattttaaaacaatttctctcgtgaataattgaaggttttgattattacacaaatggatttctgtttttcatgttttctacctttcaactttctgctgcttgattttgtatttgttagaaacttattttaggatgctgatgactacttgccacaccacaatctagtttttttttaagttggtctggatatgtcgagaaagtctaggaatattttccaaattttgcttattgttcattgtattctgtctggttatatcctgaaatgaagggttcagcaaattggaggagagagttgggcttcaactattcacttgtgaagacctctaggttctcatgtattttgtcattagcttgtgtttaaatagaagtacaaataatcctggaactttaacttcttactatgtttgaagtctacttttaactcttctttgtctgtattcatttctcagatattagaacgaactatctgcagaacgattgctcccaaaaagaaaaaagaataaaataaattgtcatttcttttataaatggtgttgtttaatagtcttaataagatgcagtttgcttgattattaaatttaattagctgctgtgtaaaaactttgcagatgaaaatatactgaagcctgcacatatcaatatggcaggtcataa

SEQ ID NO: 79270 - DNA, 1020 bp, Citrus sinensis
  Intron number 1 from transcript orange1.1g021939m (locus o range1.1g021939m.g) derived from phytozome v7.0 (chr-ID sc affold00049; pos 358456 to 359475 reverse strand)
aaagcaacgttcaacgtgttgacgcccctgtcactgtatttttttcccccgttttgatactattttccgtatctatattagaatatatgtttgtgacttgtgtgtgtctgaatgttatatatggttgtgattaaattaataggataaaatttattctgattttttttttgtttggtttttggttctgggtttaatttggatttaggatttgcttttgagctgtgcgatgtttctctcctttatttttatttacgcaaattattaccaaaagaaaattgatgggtctgcttgtgtataactaataagacgtggtgggtgatagctaatttagctggtaaaacctctggggttgtgaatgttggtgtgggattcgaggggatttaatttccaaaatgctatgcttaaaatataaagcaaaagaggggaaaaaaagccttaataaggtgtgatatattggagaatgaaatagatggtctgaattttgagttaattggacgtaaattgttatgtcaaaagagttatgtattgaaatataggaagaatatcggatttgattgaaagatgtttcttaattggagattttagtaggcatggatctgcattacattatgactttggggttatgcatagaatttcataatatggcctggattaagtgaaatgctgctattgaaagtgttttcttccttggttttgaacggttaaatgtctattaatctttttaaaagccattgtagcaactacactagtgtttataaatgtttatgctgctaattaacatttgtttagaagctaagtttacaaatatagagttagagaatgcacagcgcatccaagtgtaagttaccgacgaccacaaacatgaagttcttctaggtagattttggtgacgaaaataattaaataaagactgttgtctatttggtatggttaaccatctaggtaattgggttgagcttcagtatgatcttagtttcgaagaaggatgctaatgttttttggctgttctattgcacagat

SEQ ID NO: 79271 - DNA, 744 bp, Citrus sinensis
  Intron number 1 from transcript orange1.1g024828m (locus o range1.1g016322m.g) derived from phytozome v7.0 (chr-ID sc affold00112; pos 195871 to 196614)
agtatacaagtagtgtgatcctttttagttgcatcataatattatgttagtcatttggctatgagtggggtcagttttcttttgcttaaggtagcgtgatcctggtttttgtgtgatggcttcttcagtttttgtagctcaatacagttattataatttaagtttcaattattatagacaaatgagatttttagttgtctgattgtatcaacctgaggtgtaagatatcacttaaaaaactttttatcatttttctttcttttaactgataaatccatttatggtttttgtatctcaggtcttaaatttattacatcattattacttttcactcagataaagacatatgcagaaagcaccaaggatctttttctaattatgttatctgttaaggaacacccaacacggaactgccattaatcaaactattctaaaaaattacttgtcatttttcttgtaacttcttggggatgcaacagtatttcattatgaattatgatggttgctagtagcaatgactgaccgactagatgcactagtcttttctaaaaaaaacaaaaaataaataatgcttactgcgaacccgcatattagactagatgtgtcaacttcctttgtttgatttctaagctacctaactatatatttctttcgaattctatcatgtatgtaatatgattcttaacaacttcctttgtacttattcttgaattgtaacatattctcccttttcaggttattcaa

SEQ ID NO: 79272 - DNA, 696 bp, Citrus sinensis
  Intron number 1 from transcript orange1.1g004962m (locus o range1.1g004975m.g) derived from phytozome v7.0 (chr-ID sc affold00023; pos 1218209 to 1218904)
ccaaagtcaagttcttttgcaagaatcttcataaagtgagtcactttcttttctgttctgttttatgtcatatttagttttgatatttctgagtttgaaaccactgagtgaagtttagcttagcgtttttggcttaaaattgcttgtttatttcaatttatgaatcctgacatcattccagaattaggagttttggtgcttttgagaggggtttgtctcatattttcttattttggttaataaatattgtgggtataatacaaggttttctgtggataagtctgtagcttgctgatgatttattgcttttggaactccttaaagtcaagcaaaaatgttaggttctttcagtttatcgtcaaaaagcttttttctctgatgttacaagaattttagttctttgtgattgtaatccaactatgctttatgttttgtatatcagttcaatgaaactgtggtaggtattctgcctgctgaaatgcatttctgattgcagttcacaaaaacacatttttgttgacgatgtttctgcgacccggacagattggttttttggatactggcaaaagcaatccttcctggaagttcctctttttgtttttcatctttactgtgctattgtgttttggttcatgataccatttgacattgggatttactagtctttgttagatacaaatctgaagaaaattcgat

SEQ ID NO: 79273 - DNA, 613 bp, Citrus sinensis
  Intron number 1 from transcript orange1.1g034826m (locus o range1.1g034826m.g) derived from phytozome v7.0 (chr-ID sc affold04681; pos 1973 to 2585)
tatttttgcgttcttcatactctttgcttccttcggtgagtgacttgatgttaaccagtacttaatagtttttcagcaatcaaaatttaattttaagttttgcctatgatattaagttgtgcagtttcaaaaagacttgagcctaactcgtactcaaaaagttagtttatagttgaagttttcttgaataactgctcttaagcgatgagggaatacttgcgcatgagtctgacactaaataccattcataagcccacgtgcctaactaatattagctaactgagtgcattaaatatgctgtgtatgtgttacagaaatgccagaggggaagcaaaatcatatatatgtttcatatgcatgcatattaaactttcataacaattttttttttatttcagattttagtgtgtgtgtgtgtgtgtgtttgtatactggtatattgtaatataaagcactcttccattcatgtaagcagagtttaaacctcagacttcttgtttcaacctaagagatcattttaccacctgaatttgttgacacccatgagctttgataataacttatatatctaagtgcacgttaatgattttgtatgcttgttacagaagtgcca

SEQ ID NO: 79274 - DNA, 903 bp, Citrus sinensis
  Intron number 1 from transcript orange1.1g029808m (locus o range1.1g029808m.g) derived from phytozome v7.0 (chr-ID sc affold12493; pos 808 to 1710 reverse strand)
gaagcatttcacaagtcttttggtgacaaattcaagtttgtgacttttgcttttcttcatgttttctttttccccctccgtaaattttgttcctttatgatttttggctcatgtctgctaaacaaattttgagctttgtgactgagagctttatgttttttgtaattttttttaccttttctaagtaatgttggatgattggtggtctgttgttaatttatttatattaggcaccattaacttcttttatgcttgccatggatgcacaacggggatttccatttgagttattgctcactgatatggcagtggttcagatctcaatgctttgataccgtgtaactaattgatataattacagctcgacagtttcttcaaactagttgacagttggagacaagaatgaacatcctgttagattagttggaatctggtttgataagcttgtccaatgtaactgcatgattggcctaacgatattaataagtgatttgctggtcttattaaggtttcaatgttttggttctttgtatttaaataccattatgcaaactatgagacctgtctgccttctctttatttggctaaaacttcatccggtgtgacgtggagcatagaagtattatatacatttacttttgaggtcattatgtttcttccttgcttttatttcaatcgactcctttcataatttcctttgttcttttttccttcttttcctctaggtgattgaatgcctttacatgaactcctttcattatcctcttctgctgctggtccaccaatagagctgaccttcttaataaaacttagaataagaaaaacgagtacgattgacattccttcaatttctttttcctctgaatagggttcctactgtaggaggaaaggcgctcgatctgc

SEQ ID NO: 79275 - DNA, 625 bp, Citrus sinensis
  Intron number 1 from transcript orange1.1g009183m (locus o range1.1g009183m.g) derived from phytozome v7.0 (chr-ID sc affold00023; pos 164411 to 165035 reverse strand)
acaacttcgccgatatcgcgcagtatattattgatgtaatgcaatttttctcaattgctttaattgtgcagctactctgcgtgtggcattttagttatatttcaaatgctgctattttctttttatatttgagtaatatgaacaccttttatcaacagatcacataggaactctaatagaaactgtgatacaagttatggtacaacttgtggctactggactaatgcattatgaatggttgagattgcatttaatatgtgttatttctaaggtgtatttgttacacgtgttggataaaatcttagttgttgaaaattcacttatccaatgacttgaaagttgtttttataaatgaggcactgttgatttgcagctttaaatgtggtaagaattgaaaagaaaaggtcaaaataggaaatagattaaataaaacactttctatatgcttttgactaattttgcttgtggttgattgatgaggtatctttagcatttttgtgtttttttttttcttttgggcttgaatagaaaagtttatgttaatacgggtttttatattttcttgaattggttttcttgttttatatggaatatttataaattctattctgactgctgttgaagc

SEQ ID NO: 79276 - DNA, 695 bp, Citrus sinensis
  Intron number 2 from transcript orange1.1g032171m (locus o range1.1g032171m.g) derived from phytozome v7.0 (chr-ID sc affold01430; pos 6081 to 6775)
atctaaagttgagaagactagtttcagagattcaggtacttgctgctttttgctttaacttttatcacaaaacctactatctttgtgtatgattacatggatcttgaaattcttgctgttatgtcataatgttaatgcatattttgtcttcacgcatttcttactgaacttgtgtcttgagctgtaattgtaatttccaatttttactattagatgggtattttattggagatttctttacttaaaaaaaaaaaatgtttgacagagaatattttaacgatgagattgcaatattgtaatagataatcttcaggaactctttttaccttttagtagttatgcagttgctcctctgtgttagcttatttattctatcatatgtaacgaatgactttttaccaaatttgatttcaaagctgagcttccagcttatgacttatatttgtgtcttgcacttttgttttacaatcaccattagatggaagagtgcttagagtttgttaattgattcaatcccaggattagtcttttgaaacataaaatttatcggctaagctatataaatctgtttcatgtttcttatcgcacactatttcgtatggctttgctccatgctcatacaaaattattgttgtattagatgtcttctgtctttcattcacatgtacttattactttttctttcaatcgttagg

SEQ ID NO: 79277 - DNA, 602 bp, Citrus sinensis
  Intron number 4 from transcript orange1.1g025348m (locus o range1.1g025348m.g) derived from phytozome v7.0 (chr-ID sc affold00327; pos 138668 to 139269 reverse strand)
ttctgcttcaatttccttactttgtacacgttcaggtatatctacacaaattcttaattttgaataaatcttgccgaagcaaggaaaaattgatttaataaaaattaaaaattaaaaacaacttgactccaaacaatccaacaaaaaagataaatgacaaactaaacagaagacgaaaggccagaaacaacagtagtaatagccgaaaaaacatcgccttacagaacctataagaccgaaggccatgagcatctctttgaaaaaaagataaaatccctctaaataactatatgatgccagtaatgctcacgagcctgctcaatagctaaaatcacaaccattagttctgcaaaagggggggggggggggggggggagaaggccaccccaagaattgcccttatcattacgaaacaaaaccccacaagtagcctttcccggcttacttttcgacatgcctttggcattcaccttattcaaccaatagaaggaggaaccaaccagtggaaataatacgaggagccttgcagatttcacgtcatcatttggtgatattttcaaaccaattaataaagtgggtttgatatatgtctattcagaaat

SEQ ID NO: 79278 - DNA, 586 bp, Citrus sinensis
  Intron number 1 from transcript orange1.1g010285m (locus o range1.1g010336m.g) derived from phytozome v7.0 (chr-ID sc affold00023; pos 603397 to 603982 reverse strand)
caaccaagcaataatcttgcttaaagctcatctgggtatctcttttttctttctcttgatttttttttttttggctaattcatatgtctttgtatggatttgggtttcttttcttgcgagggattcttagtgcttatggtttgttagtgttagttgaaatggccatgctgttggtttctaatatctctaattatttttgcaattaatcaactagttatgaatttgtaacttcttacatacctctaggattcttgcttcaagggaattttgactctttctgtttctttcttaagtttggtggagaagaatgagtttgaagcccaaaagaaaaataaaaagatggtaaaagatttaatcaatagaacaatgtgcgggaggggcaagaagtcaagggatcgattgcccccgcatacctgaaaattcttttgtagggtggagcggagttagggtgtgtgcaaaagaatttgccaagtaatattagaggggggtaattgtctatttgcttgattaatgtttcttgattttggtacaggctgtgttaatcctcctttgaattagcagtggtttgggtgaattcaaaggacac

SEQ ID NO: 79279 - DNA, 962 bp, Citrus sinensis
  Intron number 1 from transcript orange1.1g027923m (locus o range1.1g027923m.g) derived from phytozome v7.0 (chr-ID sc affold02464; pos 6333 to 7294)
atcactcacatagccccaccatctccgtcaaggtgtgtgaattttttcgatttcgtagttttggatcattttaggttggaattttattttggaaaagtttgactttttttaaattttgatcaaattgtagggttaggtttcggcaatttttagtgacagtgtgttgagtttatgtcgattggtgatgaatgtgtatcagctagaaatgagtttgtatagttataatattgattgttgagaaaataatttgtttggttagggaattggtttatttctcgcaaatgatgtgtttcagagtgtttttagtagcggcaaaaagaccttcaaactagaaatgctgttgtgtttattttgtggtgttcgtttgaaatggataaaaattttattttcatggcgctcaggtctagacgtccggatttacaaaatccggatttaaactagaatcagagttgtatagcattgtaaaataatatgtccgggcatccgaatttgagctagaatcagtgttctgcaatactgtaaaataattgtacaacttccagattttacaaaataaccatataaatatgtagtgatttcgaaataatcatttgatagaatgattcttcagaaaatgaaattcaagttgctaaagcacttgatggttgcattctcccaaaagcaaacccaggaggttattgtgaaaagtagttttacttgttaacactttctgctaaatcacttccaaaaatagcttaattttgtcatgggcattgtaattatagttggaccattagagtatgcttttgtttacaaataagttgtatttttctgtagcatttgtaaatgaaatatggattaaatgaaacttcttgtttatttgaaatcgtgtgaggaaatgctgttccgtccttttttccctttttttttatgtgatcaatttctgaaaatgtttcatgttttacgataggtgacatcaccat

SEQ ID NO: 79280 - DNA, 674 bp, Citrus sinensis
  Intron number 1 from transcript orange1.1g001375m (locus o range1.1g001375m.g) derived from phytozome v7.0 (chr-ID sc affold00011; pos 1307276 to 1307949 reverse strand)
cctcctctgctcctcctcgctctgctttctaccaggtggtctcttgtcttcgctttgttgtcctgtttttgattcactgatactttgtgtttcgtgagctagatgctaaagaaaggatacattttgccaaaaagggttgaatgctttttgtgtttaatcaaattgagctagctggccaagtagttgcttctgggtcatctcagttggttacctggttcatttgcttgtgttgtctttctcctttttgttcatttcatgttgctatattctttctgttgtgttttaaacaatgttagtttctgttgtattttattgttaaatctggtccatgtcgagttaaatttattgcaatatgctcatatctttttctctttcttcttgatatgagtcgccatttgtcattcctctgcggaatttgtttctgttgtaaatgacttcgttttatatgatattgtaaggcctttcttctcttgtatgctcaatcttggagcaatggaaagtttttgctgtagctaatttcctttaggactaatttcctgtagttcagcgttcttttctctttttatttcacttattattattattattattattttgggggtattgttacaccatacttatgtattattatttccacagggtcattccaaatcgacgtttgcagcctgcagctt

SEQ ID NO: 79281 - DNA, 523 bp, Citrus sinensis
  Intron number 1 from transcript orange1.1g046813m (locus o range1.1g046813m.g) derived from phytozome v7.0 (chr-ID sc affold00014; pos 437765 to 438287)
tcagcctgctcctctgtttcctccttccacaaacggttagttatatatacatatacacacacacacacacaatgaatttgcgtcacggaatttatgaatatgctttttttttagctttttgtttctcaattccccctgggtttcgtagttcgtatctttttctaaaaaaaataattattttagtcaggttataatttttgttccaagctgtcttctttacatgcaaatgggctcgattcttgcgttgaagactgaacataaagtggctcttatctagtggtcgttttctagtaacgtgtttaagatattgttttagccgtttgattgcgtgaagcattttgtttttacgtttctcactgctaggcctcgtctccatccaactgatttgcttcctaattctttcaatctccttctctttgcccttcaacattttatttgaacacttcgaaaaattaaagagtctaacgtgggaattttcctttttcatgttcagtagtttgtgggccatattacttaccaagga

SEQ ID NO: 79282 - DNA, 554 bp, Citrus sinensis; identical to SEQ ID NO: 78613
  Intron number 1 from transcript orange1.1g004634m (locus o range1.1g004634m.g) derived from phytozome v7.0 (chr-ID sc affold00014; pos 1556752 to 1557305)

SEQ ID NO: 79283 - DNA, 657 bp, Citrus sinensis
  Intron number 1 from transcript orange1.1g037168m (locus o range1.1g037168m.g) derived from phytozome v7.0 (chr-ID sc affold00014; pos 1626486 to 1627142 reverse strand)
tgttcttcacattgccattctttctctgcattttggtaagtgatttcagtatacatatcattatcaagtttttgatcacttcttgattgcgaacaaaatgcaataacagatttagccctgctgattgcgaacgattataagtacttaattgatgagaaagatgtggatgggatgactgctcttcagcttctcgcatgcaagcctgaagcttttagtcgcaaacatgtggaaggaattctcaagaagctaatcagttgcggtaagtttccttacttccaatgtgattttaattttcctcttctttgatttccttcatttggttggaaataaattatgaagtaatattgtcttaggtactcccagttgtatgcactaaacttgtgtttgttgaaaagttaaatatacttgtagtttggcccaaagacaagaatatcgacaggaaaagcgacaacgtgaattagctaaggagcttgccaagtttctaatttttagagatacttcatgggaggtcactgaatcaatccaggaccaaagtaggcctaagatacacagatatggggcaaatcctagtgcctcatctcgtgatcagaaagggattgctgaagtctcggccatcgatcatgctgaaacccctctgtttctagcaacaaaatcagg

SEQ ID NO: 79284 - DNA, 403 bp, Citrus sinensis
  Intron number 1 from transcript orange1.1g011048m (locus o range1.1g011048m.g) derived from phytozome v7.0 (chr-ID sc affold00005; pos 2779101 to 2779503 reverse strand)
caacttcttaccagtattgttttttgtatttttcagttgttcttaaaattaaaaaataaatttctcattatatcaataatcatttcttttgatgaattattcaagccggaatcttggataatataaagaaattgtttttaccctattggtggattttttatctattctatggcgtttagcctctaatctttttctttaattttatcctccttttttttttctctctcccatttttatagaagagagtgattgctttctgttagtcgcgtctctttaaattcaaaagaactaaagctacgagcatgaaaataacttccaaaagaaaaccttacacactaatgaccatattccattttttaattcctcagctgtggaggtttcaaggcagcaactacaagcctac

SEQ ID NO: 79285 - DNA, 977 bp, Citrus sinensis
  Intron number 2 from transcript orange1.1g023488m (locus o range1.1g023488m.g) derived from phytozome v7.0 (chr-ID sc affold00062; pos 12205 to 13181)
tccccagccacttcaaggtattgtacaaatctgtcggtttaaggatgctctatgttgctttacatttgccatttgatgtggttagcaaatcatttttattctgaatggacctgtagttagtctgtgtcgctaccccaaacagttcagttgattgcttgttagtgaatgcaggatgcagcaggaaattgtataagcaatagcatatatttaaagattatgtaaaaatcatggtcagaaaaaataattctgcggtgctttggtcatttatgttcataagatatgctttgctggaggtcttaattgtcattcattaaagcttgattcttcattgatggctaacttccagataaacaatatactataacttttttttacccctatttttgaacgtatgaattagctggaatgaatagtttcaagagcttatgcaaataaaattgttttgaataaataatgtaagtttttaaagcatttgtcatagatgatatcattgcaagaatcacttctcttgcgtgttcatatgaaacttaacaccctagaaattgagcatgataagctttcttgtatgcgggcaagaatacaaagcaatgctttctttaagcagatgcagatttcatttcagtcgtaggttgctagggcttgaaacgatatcctaaatcatgtggcaatctgaaacatgaggacactattttggtcttagaaggaaatctttttaggaaagttggtagggggaaatcttatggatgaattttctaaatggaggattttgtctctcttttttgctctttcttgctctatctgttttatatttggggtggcccctagtcataaaaaatgttgattaagttctttgtttacattcttatccttttggacactattcaaatttaagttctttgtcatttgttgatgtggaaaatggtcttttctttgttgatgtaggtggaaccaaatttgctagttgcttcatttgtaaa

SEQ ID NO: 79286 - DNA, 487 bp, Citrus sinensis
  Intron number 2 from transcript orange1.1g022845m (locus o range1.1g022356m.g) derived from phytozome v7.0 (chr-ID sc affold00227; pos 38083 to 38569 reverse strand)
aaaggtatgcatttgactttagtcatgacatcaatttcagaaaacataaaaataaaaagggcaaaaataaaataaaataaaataaaatcctatctgtctatcttcttcttgggtcccatgatcccttccactctatcacaacctactaattgttctataaaagctattttgtgagtctttcgtagttgggcccaggttcacaattgaaaattattagttgtatacatttgcagtgttttttaaaatttaattttgatgttatatggaaaaaattaaaaaaagtgctaaacaatagtgatgttttaaatttgcactgtgcagacgacctcactgtgacttgctccaatatatctctcgataaaacctattgttattggatatattatcataattttttggctcaatattttttctaattctgatgtgaacaggtgtttcatcgttcaacatagattttgcagcgaagaaggtgacagtagtcggagat

SEQ ID NO: 79287 - DNA, 635 bp, Citrus sinensis
  Intron number 2 from transcript orange1.1g029888m (locus o range1.1g025405m.g) derived from phytozome v7.0 (chr-ID sc affold00245; pos 149161 to 149795)
attctgaagggctacgtgtttggttggttgtatatgtacgtgagttcacatgattctggttatcagaagatttggaatgttgaaataacaccaaagtttttggatttttttatttttgtgctcctaagcagaaaattgtagcttccttcacattgctgtataaaatctttattcattttttattaaaagttgtgcttcagtcctctccctgatccacaaaccttggcttgtttgatgaagctacgatttgattccaattgcctatacacatactagttgactagataatgcctgataaagattttgccacttgattgagttctttgctgcttccatatacattcatgtcccatttcttttcaagaggatttttatcttttatttctttacatatcctgcattcatccactctagtttcttatgttcagtcctggctctgttatgaattgcattaattgcagttaatgtagtttccattttcttctgaacaataaccctgttatattattttggatgtattatatgtttcacttggtatactgcaattcagaattatgcaatgtgatctgcagtttctttttgacatgtttaattaattgataattgtacactattgcaggtgaaggagctagaag

SEQ ID NO: 79288 - DNA, 742 bp, Citrus sinensis
  Intron number 2 from transcript orange1.1g018219m (locus o range1.1g018219m.g) derived from phytozome v7.0 (chr-ID sc affold00262; pos 153422 to 154163 reverse strand)
cccagtttcacgtttctcctggcgtttcttctggggtattaataaattttcttctctaaataatttgaaatattggatacaaaaatgttaaagaaactggagcctgatcgaatgcttacaaaaataattttaaaacagacttgtttcaccattttaatagatatttttcaatttacacgataaacaaacctattttatagttgtttcgccaacattctgtcagataacttttgtttaaccgaaattttggttcaatgtgtattatataataaaaaaattataaatttaggataaaatatagagaattaatggcaactataatattccacatcgctagcgagcgagttcatagactgttttataaattattggctctcctaactaagtagatgcgttttaagttacaaaactcaacaataaaactgtggtggactgtctacgcaggctgttatagctactttaatcgtagcagataataactaaaaatgacggaccaatcttttagtcttaatagctaataacaagaaatatataaaaatgatcggacctaacataagacacgggtagagtttgtaaaaattaaattccgtactcctttatttttcctaaaatttgtttttgactttgggaaggcctcgtcctatacctatagttccacccttgaatgtaatacgtacacaaacatatacattagtatatttaatacgaatgcttacaaattcaagcatcttcgacctgcagg

SEQ ID NO: 79289 - DNA, 677 bp, Citrus sinensis
  Intron number 2 from transcript orange1.1g023090m (locus o range1.1g021153m.g) derived from phytozome v7.0 (chr-ID sc affold00880; pos 14955 to 15631 reverse strand)
ttgagcagtggacggatttttctgccatggagattgatgctaatatctccaggtgggtatatccaagacttggatatatgcaatacattcctccggtgagttaatgtccactatctacttcaaacaaacatgtgcatggcttggtccttttttttaacttttacatttgtaaataatacttgttggtatggttgaagttatgcattttttagcatttgatatcatggattttctttgtttggaatttcaattaattttcttctctgtttgcaacttttaagtcgccctcccctccccctggggggcggttgcactagtaacgtagactaaataataggctcttaacatttggcatttgttactgttttcttgtacgtgaagcaaataaatgcaatgaattaggtttccaaatgttttagcagacgagaacatgaaatgtttcttcgttcactttttgtatataattgaagttttgttaaattagcatttaatccagtaaaccgggtttataaagtacatatacattcatgtagtttagttttcatttctgcttggaaggggtggatatttcattttgcacctttgatcaattgtttctgtttagtttgacataactttgcttatgttttgtatgaaggctgaggaaggtgctgttgccgcactgaagagagcgttgg

SEQ ID NO: 79290 - DNA, 995 bp, Citrus sinensis
  Intron number 2 from transcript orange1.1g019343m (locus o range1.1g019343m.g) derived from phytozome v7.0 (chr-ID sc affold00095; pos 207329 to 208323)
tgtggacttcagggctgatctttgggaaaggacaggtatgtactctatgtttggtgatcaattaagaatgatttgaaataatttataaattttttttgtgaatttccttgttaattgttattgaaattcaagactgtaattattaattttgttatgaagttacatgcttagaattttgagttcaaagtcttggaagaggtcttcacattatagtgactgtagagcctcttgttgttgttcttcttgattctccactggccattgttataaggtttgtgtttctgttttcaagtatcttatatgaagatcaactggaagtacgatggcctaatattgattttctcttggttaattatttcctgttgacccatactcagcaggttttggaggtattttagatccctttcttgttatcaggaggcagtatttgagctgtggttggaaattttttctagtgttgcttcttagaatatgttgtaggtttggtgtaacctgagaggagaactttaatttaaacttgatgatatttaggaagctgcggcttcgtgaatttggaagtagaagggattagttcataacatgtttgtcacctaaaacttgtgttgctgcccatcatgtcttacatcattgatattgctgttatgggaatattttctttacctttttaccctctacatccacaataatgttagatattataaatattgttacaagtgaaatacactgtgtaagttgaggtaactgtatgattttccaaagtataaagcacctgacctggctgaccaattgaggtccatgatcaaactaattgtagccctgaaggactatcatcactgatgtatattttgtctttttgtcatgtatgttatacattgtcctgtttttcttttgttcttcaattttaataatttaataattatttctggtggtccactcatcttctctattgatgcttactttcttctttcagggaattgttgggttggaaacagaat

SEQ ID NO: 79291 - DNA, 584 bp, Citrus sinensis
  Intron number 4 from transcript orange1.1g046465m (locus o range1.1g046465m.g) derived from phytozome v7.0 (chr-ID sc affold00532; pos 101696 to 102279 reverse strand)
gcttatttaatcactttgagagtgacgagtttaaggtaacttatcttttgttattaattttaattttgttgaagctatgaatgatttgtttttaagacaaaaatcttacatgaaggaaagagcaagaaaaaatgttggtaatcgcaaaaaactcaagtacaatcaccgaggtggatcattgtcatttcttagccatcatgaaaaaaaagtaagttaaagattgtatttacactctaatttggatggtcttacactttctagtttctgatttatgttaatatactattaggctattgttatagaattctagaatggtttatgtatgtgttaatgcttgagagtagttgataaatctttagacaattttttttctggatgatattgctgatgatggcctataatgggttgaaattaacttttgaaattatcagctgcagattagtatttgtggtttgatgttgattgttacttgaataatgatttgtgtttttattctacctctactaaagtgtagatacttctctttttttttttttaattttgttgcataataaactagaggaaagccattggagagcaaccta

SEQ ID NO: 79292 - DNA, 1030 bp, Citrus sinensis
  Intron number 2 from transcript orange1.1g027043m (locus o range1.1g025826m.g) derived from phytozome v7.0 (chr-ID sc affold00003; pos 1762611 to 1763640)
agagtttattcgttccaagaaccttcaccttgccggtatgtatatggatgtatatatcatattctattatattatgtgtttctccccccttaatattcaagttgataatattagtttaatgcgaatctcaaatctcgaggcatttaactgaatacgttttgcaatagacagtgtaattattggtttactttgtctgaattggagcttgatctgagctcaactggcctttaaagatagtatcatggtacctgctttgcttgagctgaattttgtttaaaaactggactagttgctcgtttagtcgactgcatcatttaaatgtgtgatatcaagatctcaaactcatattgttgtaatgcattttcgttaattatacattagctggcagttaatgccttagccatacaaattggtctttcattagataaaagctaatatataattgtgagaaacaaattccaactagatcattagtactaactttagcagtcaatatgctttggaggcaagcttttagcagacaatatgcttttgaggacatatatgttcttttcatttgcttacaaataaagatgaatccaggtttccggcatcatgatgcttctgccagtgacaagacccttattaaggtataaattaatcgttgactgctgcaacaccatgatcttaaagaaagtgtatattctagataaaagctaggcatttttgtctttagattataattgaagtgaagagttattgttgatctttctgaactgcagtttcattcaattttgattcttcctcaaatccaaaattcactctacatactcatttttctgacaatctaaatttttgcttctctactgctactcgtagttcatatatagttctaaaaattgatttgagcattcaagaattgcttagaatttttgcttatgatgtaataacctttctgattatggtgctcttagttgagctttgttaactagttactatatgtgagtaggccacaggtggtggggcttacaaatttgctgatctcatcaaa

SEQ ID NO: 79293 - DNA, 495 bp, Citrus sinensis
  Intron number 1 from transcript orange1.1g001964m (locus o range1.1g001964m.g) derived from phytozome v7.0 (chr-ID sc affold00005; pos 901133 to 901627)
tgcggcgagctctcttgaggatatctgctgcccaggtcagcttaatttatatttttaattttctttgatctgcttccatttttattttgtcggcttttttttttttgcctcgtagctctggtcgttttgctatgaacagagataaaatcgagattattgattcgttattttttaaaattttgcagcttttgatctgatcaaaatggatcttgattttgttgaaatgcataattactaaaatttattcgtttgttttaaattagaggcttagttagctgattccttatttgtatataatgcttgtcaaaatgtgactttgtttgcttttggcttgtcttcacttgttcttaattatacaactgaaactaccatataaatttaagctggaattcatagccattcaaggattgattattttggcatattaaaaaattggcttcctttgatgtgttggttacaggttggaaggaaaattgagtcaacagtgcttcccct

SEQ ID NO: 79294 - DNA, 1018 bp, Citrus sinensis
  Intron number 1 from transcript orange1.1g035242m (locus o range1.1g035242m.g) derived from phytozome v7.0 (chr-ID sc affold00208; pos 108471 to 109488 reverse strand)
cttctaaaaaaataatcccatcgatttattgaactgcaaataaaaacacaaacacaactgtaatgttttacttcgtggtggaattgaggaaacaacctaaaattttattattttctagtcaaaacaacctataattgatttgtaagcacaagaataacatatcagaaattatcaaaagaagaaattaaattgattttccattagcgacgagcaaaatgatgatagtctctacggtccattcattttaataacataaacatgtattgatgcaaatccattgggttgcaattgtccctcgtctaaatgcccattgcccaagtgttttaaagaactttgaccttgtcaaacaaacagaacaaaaacacagaacaaagacaggaggttgaactacatgcatacagatataagatggttgtatatccatgctataagctataaattgtcaaacagtaggcaataaagatattaaggttttgattaatggaacagagaattcacaaaacctattttgctttaactttcccaagggaaaaatattacttgcctttcaaaatcatttgcaagttgttcaattactctgaagctaattcctcaaaatcaatattgaaaagaaataattaataacactatttgtaaaatcatagcaaatcctgcagttgtccatgcatacattttgtttgttatctcatttctttctttaacagccaaagatcatgaagttcatttacggaaatgtagaaaaaaggtaacactaaagcatttcagaaatggatttaccttgtagatgtgtatctgggttatcatgtggcaacatcaaccttcatcccatatgcacccttgttctagcagagaactagaacatccaagattaatgggttcaaaagtgagggcggcagggcattctctgaacatcctctgttaatgaagagatgtctaaaagaagtgtgagtctatgcattccccactcaaataacagcttgcagatcttgagatctctgattctgcatggtgtaaaggc

SEQ ID NO: 79295 - DNA, 583 bp, Citrus sinensis
  Intron number 2 from transcript orange1.1g028032m (locus o range1.1g025056m.g) derived from phytozome v7.0 (chr-ID sc affold00074; pos 93676 to 94258 reverse strand)
aattcaaaggtttgtgggtgtttatactttcgggtctctgtttctaccattctgtactgagtcttgggtttctgtggtctgcttcataacagaaattcactctggtgagagtggattaaatacttccaatcaatgtttccaagtaacgttatctccacaggtatgtgataagtaggaaattagaggtttttttttttaaaatgtgagccttctaatgtctaaacttatgaagctgggttgaagcttcttcctgtgatcagatattaagcagaggtttattgagccgaaagcaatctatcacccaaatacaattttaaatttgggggctgaaagaaatttttggaagttgctgtgttttctgtgtaaatggatgactatgtttgattcttatcagtaactctactaggttcttcatacttatggttatataaggagccattattattttggtcaacgtgttagtgatctaaatttgccatgatatggcaaatttagaaagacaagaatagggatcttttgactatgtttgtgctttggaaagtccattttcttaatgtaattaccttgttttctgttcaacagg

SEQ ID NO: 79296 - DNA, 621 bp, Citrus sinensis
  Intron number 1 from transcript orange1.1g048146m (locus o range1.1g048146m.g) derived from phytozome v7.0 (chr-ID sc affold00003; pos 3030935 to 3031555)
ttgtatcaggtctttatcccatactctatcttgggtaacaaatatataatccaattaggccaattaaataaacttcatgtctaagcttttagtagaatcttttcgaaagctatctatctgtgtcttctcctacaagcatttgggttgaactttctgttgttgcagtttcctctcattcatacatcaactcaccgttaaggattttaaaatagtgatgcctctgtttttttttttttaataaatttgtttccatggtcacggtaattcttttgctggattatcgagtatcttccagttccataagtcagaaatttctacctcaagcaaaaacttttttgattcgtcaactgtgtttttggactcatatttgtcttggtaaaagtacactgcttttgttgcacgtaggacatagttttccttctatgctatagaatctaaacaactgaaattattcttggttgatgcttactttcaagtccaacaccaagttgaacaaataacaccaaagtgttgctttaagttaatctgctcaaatattatctagggagttgaatgaaattcatattatttcgtgttattggtttccacatttatcaggtgttgggatactatcaattcctt

SEQ ID NO: 79297 - DNA, 481 bp, Citrus sinensis
  Intron number 1 from transcript orange1.1g043914m (locus o range1.1g043914m.g) derived from phytozome v7.0 (chr-ID sc affold00109; pos 367620 to 368100)
ccgaggtctctttctttctttcttttgttcttttgcggtgtataattatgttaagattctcgctttatcttatgattttgtatttactgattgtgtaattcgataaagattactgggcttgttgaagtttaaaggtctctgtttgacgttgcaggttaagagttcttgtcatttataaatgtgtttttatgttctggcaattggataaagcttttcaaatgtaaacttgcttctggtgtttagagactaattgttatgtgattttatgtttggtactgatgctattttatgggtcaaatgcggagagggtggtaatacagtggtttgatttcaattctgattttcttggttgtttactggcttaaagattttcacttctttgttgcctcagtggatgatagttcatgagtgatcttaattctgggattgaaactgttatgtgctttgtttatggtagtgggtgaggaagacgagggattgc

SEQ ID NO: 79298 - DNA, 1003 bp, Citrus sinensis
  Intron number 3 from transcript orange1.1g040491m (locus o range1.1g040491m.g) derived from phytozome v7.0 (chr-ID sc affold00057; pos 440145 to 441147)
aagcaccttctttacgaggtaaatttcttgattgatacttgaccagttgaccatgtcagtgttccatttctaaggaccgatatgagagtacttttgagtgtcacctggggtaagtcactgttttctgttctcaaggcatgagaaagcagttatcttaccctgtatatggaatcataaccctagcaaataagttataaactactctgacatttaaaaatctagtctgatgccttttcccagtattgaggtaatcatttacttttatctaaatacgagaaaacacaaaaaatccaacaggttcttaatttattggcattcacaaccaacaaagagctatcaatttgataactttcctgaaattctagggacaattgcctccactgcttaaacatctcttttccacctcttctacgaagtatctgcatccccccactgctgcttttcctattgtctttcctttctttggtagtttcacttcgacaggaaaaaagaaagcaggtgggggggaggggggtggtaggaaagcacactaaggcctgactttgtgatgtgatgagatgcatgatgcagtacctataaagtttattgcagcttgataaagtgcgtgaaatcatgtgaaatcttgttttttgtgtcaaagatgctgttgtatattgttggaaactttagttcttagagcagtggcctgtgtttttgatttataattattttagctaatttaagtggattgaaagttcagcaattggcacatatgattaactatcagctctggcagagaagtgatgtcaagaaaatctgaccatggatttcttcttactttgagtgaagagttgagaaatttgtttcttgtcggatgtttgatataataatagattttgagagattttcatggtttttttttttttttttttaatttataggattgtgttatatttgaaacttatattaattttcttattgattgacaggttcctgtaagagttgctggtggactattatttga

SEQ ID NO: 79299 - DNA, 1016 bp, Citrus sinensis
  Intron number 1 from transcript orange1.1g034772m (locus o range1.1g034771m.g) derived from phytozome v7.0 (chr-ID sc affold00023; pos 649070 to 650085)
ccagcaacaaaccatcaccaagacaccaacctcaagtaagctttaattttttttttttattgtagaaattctaagaaattattgtagagttttgaaaatctgtcgaaaatgttgagttactttattgtggatttttctcgctgttttgtcttaaattgattggagttttgtcttaattattcaatttagttattttctgggtttttcatttcttagttggagtatggatttcaaataaagatcaaattttaaaattgagctataagttatttcttactatttcaagttgctttagttttaggattttgaaagtgggggtaatctggaaaagttttgtgggtttaatctataaacaataatttgaagccgagtttgagattgagaatggctgctagagtggagattgatgaagacagtgagactaacaaggtcagcatgtcatcttggattagaagcttgatcagcccatggatgaagaagctggcaggcttagaaataagtaaagagaaatatacaagctgggttatagtggtttgataagttggttctgtttgagttggtggtactctgtttctggaaatgttgttcatggttttctagatttatgcttgataaatcagaattttcagaatttaaaagaagctaaattgtgtgcccagaaggaagataacatttaagcgtgtatttgagaagaaagatggaagataacagttaagagaaagcagaagttaaatcctcggtgcagtgcagatagcgatttcaattaaaaaaaatctttaaaacggtgttgtttttggaatctttggggtttgacccagggcaaacattagtgctgatataaattaattaataaattttttatttttcttcacacccactataattccgaatagacccgttattttttaattttattttatttttagaatataaatggaaaacagaaaaactaatacctacttccctaatcctaaatcctagttttcaaatttacagacgctgtgctcgagggagag

SEQ ID NO: 79300 - DNA, 594 bp, Citrus sinensis
  Intron number 4 from transcript orange1.1g043626m (locus o range1.1g043626m.g) derived from phytozome v7.0 (chr-ID sc affold00050; pos 96646 to 97239)
ggtcaggtatcctccgagttatttttgctttattttgtattacagttgcaggaactaggatgcagggttttactgtgtttctttcatttgaaagagggaaatgaaggaaatttttttaagatttgagtctaattttgtttctgtattcttacctatttgtatataacatgcatttccaaatttgtaacacacacacgcatacacacacacatatataagcaacaactcttcagtatgattaacgtcacttagctgacagaaaataatttacagagcaacattttatattttattaatgtaatgcataaatttctgtctctccctcttgtatgcattcaattgttcgagccatataactttttatacgtactaatctttgttgaatgttaatcttctgcactgctttttttctgaaaattcttttggttggccttgacttttgttaagtgctcgttttattcttcttttggtacttaagagtaaaatttctgtaatatttagcagtaacttcaacctggagttgactggatgtgtataattattcgttattatgtggcagggcttgggacttcggcctggagttgttgacggggc

SEQ ID NO: 79301 - DNA, 763 bp, Citrus sinensis
  Intron number 1 from transcript orange1.1g014297m (locus o range1.1g014297m.g) derived from phytozome v7.0 (chr-ID sc affold00497; pos 91319 to 92081)
ctaatattggcgcggattgtacgcttgataacgaggtaattataatttctcttttactctttatagaattttttttcatacgcacttattcattttaattatccggtttatataataatgtaaaatatttttaaaaaaaataaaatgatgattttaaaacactagaggttggaaagttaatattgtcaatgctgtgattgcttgaggaattggcatagtgaactggtttggctttgattcttgattttaggttaactcatctttaaaacatccgcgtgagatgaagaataatttctgttttttaaatattcttgtagtgtggaatcatttaggataaacaatctaattatttcagacttctgattttagtcaagtatgtctctttctcaaattagggtgcaatcaatgctgtaaaatcataagtttgttggtgcgctaccacagtttaaaatattaaaacaatcactacattcatcttacttgattgatatgacacacgcatattatacattcatctttcttgattgatatgacacacatgtatagcttcagagtcaaaagaaagaattttttttttttaatatttcttgtttacattatgcaatgaatgaacagaaatataattatttatgcatttctacattttacaggtttgtttagaaaaagaaaaaggaaaaatatatatatgaaggttttataacatgaatctgtgatttctgttatgtaactggagatcatcttgtgcaggaagaggaagatcaat

SEQ ID NO: 79302 - DNA, 667 bp, Citrus sinensis
  Intron number 3 from transcript orange1.1g028368m (locus o range1.1g028245m.g) derived from phytozome v7.0 (chr-ID sc affold00017; pos 1312581 to 1313247)
gttttggcagcggaacccttcaaggtcacttactggtgagtacttgtttgcatatcataattgtaaattctctctagaaaatgaagttgtttggttactatgaaaattttcatagttgtgagaaatgagattgcagccagagttagaaaaaagatactttaatatataatatactcttcctgtcatctaaacctggtactgtcattttatttggttttttcaatattttgtttcaaaagaaacacaactaaatgctacaagatggctcatcttgtcatagttaagcaaaacatgaagttacttctttttttttttttaatgcaaactcagatcaatatgtcaatgtagttacatacattaaaacaagaaaaaactccatagcttaagaggttagctgagaatccatgtggcagctgatatatttttatttaaaagtctatctcagctgttgaatgttgcctatgcataaaatttgtggttttgtttatattttttgctcacatttagatattttggataatgtttcttcacctaacgaggaaaaaaaatgtttgacttttagcattcactagacaatttaattctttaaaatggagaagcactggccagtactaacatgacaactgcttgaagcaggctggggaagaacgtttttctatagagctgg

SEQ ID NO: 79303 - DNA, 960 bp, Citrus sinensis
  Intron number 2 from transcript orange1.1g048334m (locus o range1.1g048334m.g) derived from phytozome v7.0 (chr-ID sc affold00327; pos 180409 to 181368 reverse strand)
ttgtatatcaattgctattctacatacacatccaggtatttacaatttcttcttgggatttttttttgtttttttttttttggtttttataatggtctggagaaattttgttttttttttcttaaatagtcctcgactagccaaccaaaatttattagtatataaaagcaaacatcaggtagggggaacaaattacccgcaaagaagccatccaatattaaacaaataatcgacgacaaaaataaaatcaagaatacataaaatcaagaaatgaacagcccaaaagatcaaagcacgaacagaacaagcagcagtctgaatgaatcttctatgaaaaaccaaccagcaagtaacacagagcctcaatgatctactgaagataataatatgatttcatgtatctcctccccctccttaagttcattctttaattaatttatttatgggtagggattcggcttaactccccaccatcttggtggatgttcattaaaaaatttaaaaaaaatgaaaaaaaatgtacctctaaattgataatttagttggtttgacttcttgcagtggaagcaagtggtcaaatataaaatttaaaatttaaggggattcatttagtttattaagaaataagtggaatttttttttctttttaaagaacttatgtaaaatagagttaatttatttaataagttgaatttaccttatcatccaggattgtatctttttccgtatgtaatttcatttcattttattttttgttttttaatggccaagtatagaaatacgtgcttgcaagacctgtaataattacaaaaccactggtgtttgctaccactttcatatctgtattctctcgtttgcaaatggccttctcaaggtaaggataattcaaaaattgatgtttagtaaagatcacatacataatggatgtcattaatttacttgtttcgattttataaaagg

SEQ ID NO: 79304 - DNA, 492 bp, Citrus sinensis
  Intron number 1 from transcript orange1.1g019213m (locus o range1.1g019213m.g) derived from phytozome v7.0 (chr-ID sc affold00017; pos 346829 to 347320)
tcttgcttgcagtcgcttgcccgctaacgcctctggtacacttttgttctttttttcttttttcttttttctttatcacatatattttgtctctttaaaactctcacagtttcaaagattgaccctgaaccacagttatgggacagcatttacagaaattcttctaggaggaaaccccgagaaaaaagaaaaagaaaggccttgtgtgtgtggtgtatctattctattgcgtgtaatattgaaatcgaaccccccatcggcgcttttctttttctcttttcctctttgtgtgtgagtgtgtctttgttgatatatgtgtagcaaaagcaagtgtagcgtttcatcatctatgtggctacccgcttaaaaaataattaaatgaactccttttgatttaataattatgaaaattaagataatccatcggtttttattatctgggtttaattgattatagggtttgaagtagcagagaatctaccgggtgaagtg

SEQ ID NO: 79305 - DNA, 376 bp, Citrus sinensis
  Intron number 2 from transcript orange1.1g016023m (locus o range1.1g016023m.g) derived from phytozome v7.0 (chr-ID sc affold00337; pos 124377 to 124752)
cacgctgttaaagctcaaacactcgtacttagcgggtccttacatcttggctcaacccagttattttctgtaatgattaggaaatattggatcacttagcacattatattgttgagtgctgagaatagaaatatctgtttctgttcaactaatatacttacggatgaagaattaattagccaaaacaagcactgccaataatatgtaagcctgagggagatttatgatgagtacataaaacaaaatttcttgccatatatcattttgcattagatgtaggcttatatacagttttgtttgctttcagattaatgcattgagttcagtattaatgtttgtagtgggaaggatcagctgctgccgagtcaggaggaag

SEQ ID NO: 79306 - DNA, 762 bp, Citrus sinensis
  Intron number 1 from transcript orange1.1g009844m (locus o range1.1g009844m.g) derived from phytozome v7.0 (chr-ID sc affold00637; pos 62284 to 63045)
ttgatacaatcaataaagctatttgtctggtaagcctttcctaaccgacttttttttattattttaattatagtctgagctcgactcaatcacctctacattctctgcatccacatgagtggagtattcgaacttagaactactttttcatgttttagtattttatatttttatttttaatgtagacacactagtaaggtgaactaatcctaagccttaacaaagttatttcttaccaatgaaactagactttaccttagaccttttctttttactcaagaagttttactaatttgtacataacatttaatataatattctatcttttttaaaacagtttacgcttatagtcattaaaactgttgtacacatttttcttcatgatgagattaacaaaccagagcaactaataaatttgtaatatgtgaattaataatatttagttattctatttccacattgaaaggaaaaaaaagtgaattaaattgttgatgaaatcatcatccattcattatgtatcgcatgagtcaatttggacctacgttttttaacaagtcattggtaatgtattggtagatttgacatggtgcattgaatccaattctactagtaaaattcaaaaggtgccaaaaaaataagtgttgaagtcgaatttcattaagttccattgtgaataactgtaacatatgaaagcaaaacaacaccttacacactatcaattttgcaggctcttatcttgggagcagcagacaccacaacagt

SEQ ID NO: 79307 - DNA, 522 bp, Citrus sinensis
  Intron number 1 from transcript orange1.1g029456m (locus o range1.1g029456m.g) derived from phytozome v7.0 (chr-ID sc affold00003; pos 3600041 to 3600562)
tctcgatttaaaggttagcccttttttttttttctttcttttcttgagttacaaaatacagttcctttcgttttacagaagcaataaatgaggagccatagcagatcttgtgctttctttgttgcttcctgaaagtggaatatggtcttattgattctttattgccttttgtatattcgctctgccgcgtaattattatagttaaggtatttgccggtctctctttctccaacacatacactcaatattattagatcaatattagggttaatcaccaaaaccctaaaaagagcagaccttttttttttaccccttttgaaggaaaatttattgatgtaggccaatttgattttgattaggagctttttttttttatttaaatttatttttaaatttgatattgtggtgtttgtttgtttgttttttccgctttcgttctgccgacgctgactgcgtgtgttaatttttgatgtgtgggtgtgtgttggcagacgggagagatttattacataaactggagga

SEQ ID NO: 79308 - DNA, 559 bp, Citrus sinensis
  Intron number 1 from transcript orange1.1g003316m (locus o range1.1g003169m.g) derived from phytozome v7.0 (chr-ID sc affold00310; pos 71520 to 72078 reverse strand)
acatttgcagtctctctcgctcgccgccttcgaaagttcgtatattctatctctttcttgatctgtatttgtcctccgtttacgttcgctgtttcttcatttttctgtcagattcgtttttccttcactgccaaacaagcctccatattttgtcatcgttttcttactggataacgaaatgatttagcgttgacctttattttatttttttccaattacttgttgtttgtcagtgtttatttttagtaacagcttacttctaagttacttacgactgatgctttgagttgtatcctggatcattattctttttttttaatttaattttatagtgaatccgctgctgaatcttaaaaaatgttgttattattattatttgaagttaaaaaaatgcatgtatctgatgtcaaattgcagtatattttgttaatatctcaaccacgtgacattttatgttgatgatattaaattaatgtctgatttattgcttctttatttatttatatatgcttttttgtggacaggaaatactgttgttgttggtaatatttgagaatca

SEQ ID NO: 79309 - DNA, 992 bp, Citrus sinensis
  Intron number 4 from transcript orange1.1g025632m (locus o range1.1g025632m.g) derived from phytozome v7.0 (chr-ID sc affold00003; pos 4170284 to 4171275)
agaagaacagacaagtgggtgagaagaaagaggtggtgaatgagagaccttgtgaggttataggtgcagtgggtgagaaagaaaaggagaggaagccactgcttgagatggataaagagaattctggaggtgcagtgggtgagaaagaaaaggagaggaagccattgcttgagatggataaagagaattctggaggtgtagacaatggggaaagtggtaacaaggacaggaagagaaggaataagtaagttcaatttcattccatctttatgtttaattgttatgttacatgaatatcatgtttgtgtataggtggtgctgctagtatttcgagttgattttatttccataaatcaatggagtcttttgcgcagctcaacactttttgtcacattcttcagttgttgaaaatgttttctgcataatgaacagaaagacttttcatgatcacattccaagtaaatcaatacgcatgtttatttgccgcatgcttgcgtctgctataatactagtgactaaatatttgttcactacattgtgcagaagatttgatgaggtggagaacatcccagtctctctgaatttagagaatgtaaagaagaaaggagatgagcgcctgttgcaaatccgaactaatcctccctctcctcaatgcttttctgtcactcgttcagccaccaaaaccacctcttcaaagagttccacttataggtctatggtatgcaagctaaacgcttcattctatttcacatgggaaggctagaagtttaggaatttcaaaatgcatcaaagattgaattctcaaagtcaagatttttaaataatgtattaaacatcttaagctttggtgaggatataaggaaactaattccatgtttctgtactttgtttgtttgattgattgattgattgatcgatcgcttactgtgttatactgagtgatgatttggtgatcaggagaggaaaatccttcaagaggtattcgagcagaa

SEQ ID NO: 79310 - DNA, 971 bp, Citrus sinensis
  Intron number 4 from transcript orange1.1g003957m (locus o range1.1g003957m.g) derived from phytozome v7.0 (chr-ID sc affold00056; pos 430411 to 431381 reverse strand)
atttgacaattttaaaagaggtatgtattgatgttttattgctcaggttgaggatctaaatttgatattctatagggcaggtggtctttacttttgtggtgtagagggggtattggatggggaaataattatgacgttgtattggtaaaaatatgctcttttggatataattgagactggttgtacttagaagtctgttgccatatgtattggtggactgtagaatgcggagaaagatattgaccaagtggttgctatcttttctcttattaggacttgaactgctgttttacttgaaccaatctttattttgattttctcaaaagaatattgtaaggcattgaacacgcttgatcctctatccatagtgtgttgaattaggtccttaatacaatatggctgctaatttatcgaaaatctatgaaaaattgcttttaaagcaattataaaactcttattagttcataagattagatatcacaggatggaaaatatgtgctagaaccagtaaatgggcaacaggtatgctctgcaacatgctatgcgattagaaatttacacgtgttaagattttagttgatcttgctcttacgtgattgacggatattagattctgtgacagctctattattcttcatgaagttaaacagtaaagcacgtcatctgtctcttttaatcagaaaaattgatttcaaattttcctataagttgggttacctaaactataactgtaagaaaacatataattggctctagctattgcacattatcttctagtggaaaagaaattaattttgctgattaattaaagtttttaggttaagaaaaaaattaaataagaccatatgcgagtctttctatttgagaaatttattgaatctttcagttgattatgatttcttcaatgaacttattcattgtttctgtgttgaacagattcgaataagcattctgccgctgtggtttgctgc

SEQ ID NO: 79311 - DNA, 991 bp, Citrus sinensis
  Intron number 1 from transcript orange1.1g041349m (locus o range1.1g041349m.g) derived from phytozome v7.0 (chr-ID sc affold00003; pos 3657268 to 3658258 reverse strand)
tagaaggaaattgtatactgcgattcagaagcttcgtaagggcttttcgtgacttttttcttaataatgataatgatgagaataatttgtaattgtatgattatgtaactctttttgatgatgatgaaacctcggtcttcgatcaaattttagatataagttgcacgcctaggttgtttgagtttgtctgttgtaatcatattactaataatgatcatgataatgatgtcagttttgttatgtgtggtagttttggattgagatggttgtttgttttgctttctcagtgcatgtatttgatttgtttctacaatggctcgataaattttaggatggaaaacagcagacaaatttatcacttgattaatgtttgtgtctcctccagaaatggtgagtgcttgtgcatgttggtgagcagagaagggaggaccatctttttggatagtttcttttattgtaacactgctgtagggcctaataagggaaaaagaaaagttcagttatggaatgtgtgtgagtgaagtttcttgaaacttgtcgaaggaagggaaatgataactgtttcattggtagcttgtttttaattgaactttcttcctagagacatttggggctagtggagttagataataaggttgcttgtacaagagggggactgctttgctgtctagagtcgattcgcgtattgtgtatcaataatgtagggcttttgattagccagatggagtttagtaattagattctgagtaacttggtcacatgacttgtgtggtaaagtccatttctcttggtgtcattccatctgactgcttctgattggggtccaccatgaagtttagacggtttaggttataacctcaaagggagtcaatatgtcttttcccattagacttgtaattcgtttgcattttttcccccttcttttgtccatgtctcactgtaatgttattttacaggggcagagaataccaatattgcaaagtgttgcagc

SEQ ID NO: 79312 - DNA, 314 bp, Citrus sinensis; identical to SEQ ID NO: 78730
  Intron number 1 from transcript orange1.1g006749m (locus o range1.1g006749m.g) derived from phytozome v7.0 (chr-ID sc affold00005; pos 2135380 to 2135693 reverse strand)

SEQ ID NO: 79313 - DNA, 571 bp, Citrus sinensis
  Intron number 1 from transcript orange1.1g003634m (locus o range1.1g003634m.g) derived from phytozome v7.0 (chr-ID sc affold00003; pos 302044 to 302614)
tttcggtaattttattctttaactcaatctgggttgttcccagttcgttaattctcttacagctggtgactgattttagagctcttttaagagaattaaaagttgtatgttgtttatgcgatgattgtgattgagctagaaacgtgacgtgcccagatccgtagatgatagttttgttttgattcgtattgcttttctttatattgtattgtaataattgccaattgagtgatcatattttattgggggttatgttttgtaattacttctaaagatttgttaaaatttctgccacttgattacccggactgtttggttattatgtaagtgcaatgtgaaaatggtgaacccagaagtttatgtttttacttgtgacttgactggtttcttatcgatgttattgattctctatgttgaagtttgttttttgcaattgtgtatgatgtgtgcttttggtaaaatgtaattattagtgtcctttttggtgttttcttctagcagattcctcactcgtgttgtttctatttttttctcttgttttaagtagggatttttcatacgccaaaagtgc

SEQ ID NO: 79314 - DNA, 312 bp, Citrus sinensis
  Intron number 3 from transcript orange1.1g020296m (locus o range1.1g020296m.g) derived from phytozome v7.0 (chr-ID sc affold00005; pos 2429732 to 2430043 reverse strand)
actgcaagggtaagccacaatagtcatttgttcaggtatatcttcttggctcaattgttttttttttgttttgtacggtagttgaatagaactcattattatcaacacagtatgttcatctcaatgctttactatctgggaccagtcagatctttgtaggatttgaggagttccttgcattataattcttaaagtgaatccatttgaatgttaccatgtttcctcggtaaatttcatacttttcattcagaattctttattttctcaaaaatggcaggttttcatttgatccatctgccaagttgggtttgg

SEQ ID NO: 79315 - DNA, 226 bp, Citrus sinensis
  Intron number 3 from transcript orange1.1g040435m (locus o range1.1g040435m.g) derived from phytozome v7.0 (chr-ID sc affold00023; pos 1248066 to 1248291 reverse strand)
ataaggtttaacatctgtcttatttgatatgattgatgctattgtcaaaagcacttttcatagagctcttcctagataagaaattacttggaagtgcttttccgagaggcatagtttggatttccttgtggtttctcttttatttcttttgctgagcatatgattgagttttacagctaatgattatattttaagtctccttttttcttttatggtgagaagggtg

SEQ ID NO: 79316 - DNA, 494 bp, Citrus sinensis
  Intron number 2 from transcript orange1.1g040088m (locus o range1.1g040088m.g) derived from phytozome v7.0 (chr-ID sc affold00074; pos 103658 to 104151)
ggttttgtgggaataggggaaaaaaaattaagcttgtaagtgggtggtgtttggttgcttaggttattgctgaactgctttgcttgttgaggaaatttgatttgagcttcttcttgtatgctaaagaatagatgaagatcttagtttttgaattttgacattttattattatgtttatgtgaaatgatttttttggattcgatgattccttactgtttgataccctagaaaatgaaccttggatgctgattgttttgagtccaaagatagtgttattaagttcttacagtttttggtttaagtagaatttgaagtttggcctctgatttgaagtttcaattgcatttcttaattgagtctagagcttggttaactagtctgattgagatctcattttaaaaaaaaatagtctgcttgagagtcttacagtgtggttctgtgttaggattggctaactagaaaacagttaccattcaacctgggaaagatcaagt

SEQ ID NO: 79317 - DNA, 651 bp, Citrus sinensis
  Intron number 3 from transcript orange1.1g040088m (locus o range1.1g040088m.g) derived from phytozome v7.0 (chr-ID sc affold00074; pos 104243 to 104893)
gcaaaggtgatagctaatcgggtaatttagaagtctgttgcttttatctagcatgattttcattttctaatgcttccttggtccatcacttggatgaatgcttactatcatttgtattgtattttagattttgtttgctaagtgaatgaaggaagcttcttaatcttgatttgaatttctttatctttggtcatgtaataacagttggattttcaatatgtttttccagaaattggccaaaaggcatagtgcctgattacttccaatttgaattcgttatttagctttttaccacctttttcctccttagcagtgatgaagcactaacttgtaagaagaaacctgtcttaatggtttctccaatgaaattcactagttacgcttggcttctgagcttacaattaaaattgttgctctaatgatttttccttacatcattggtgataactgctagcttcgtacacgttagtatgaagttggtatgctcagttaagctagtcatgttctgaatagtcttgccactgcagatggtgaactgtgtttgtgattgttgacaatagtggagtttttttttttcatattatctcctctcctctgctattgcaaacatttgcaggttggagataactactaccagccagatctgaagaa

SEQ ID NO: 79318 - DNA, 842 bp, Citrus sinensis
  Intron number 2 from transcript orange1.1g035398m (locus o range1.1g035398m.g) derived from phytozome v7.0 (chr-ID sc affold00329; pos 1810 to 2651)
ggaacattaagctcaagtacctcaaggtacaatcttcctttgcttcaatgcttggtcttaatttgtgctttagtttgtttgttactgaaaatgttagggttttaatgtcccatatgtgattgattttaactgcattggttttttaagtatttgattaagataacaaattgattgtggtttctagctgtgtattagctaatgtttacaatttgattagaatttatagtgcttttttttaataatttgttgttttgaccaaatggagctcactgcgtcttggtgctgccctaactcatattattatggaatggtcattctagtattagtttatactatccagaaatatttcttagttttgaaaaatccgggatactgaatctctttcagagaaatatttgggtacagtttacaaaatcttttgtaagcttgtataaaatctgaaattaataaacagtagttttcttgttctggtgagttttatgaaatttttacgccatcgcaaaacaagtgcactaaacttttagatccgtaatgttacttggtgtactattatttagtagatgtgatggttttgatgggattgaagatttagactaatcttgtaattgggaaagttccatggtgagggaaaatgtgaagcaagaggtagaatcatgaagggagtaaaatatctagttcttatggttattgagctttatcgatattagtttttgtattcttcttgctgtgtttctgctgatcggtatatttatttttactgcctatgtacaatggatgagtacttacccaatgttttctgttactcagtccaaggcaaaatctctcaaaaaagctgaagcaaa

SEQ ID NO: 79319 - DNA, 1010 bp, Citrus sinensis
  Intron number 1 from transcript orange1.1g043633m (locus o range1.1g043633m.g) derived from phytozome v7.0 (chr-ID sc affold00065; pos 600961 to 601970)
ataaggtgagtttaagtctttttagtttgttcatttattttctttattcctagttccaacactcacagggaccccatttccttcttttgctaacttttagtagagccttcttgatccgtttttgattggttacaatcctatcttgtcaggaatagactctttatcatttgggacattgtccgttgctcaatttcatttgttctatattttgggaactaactgtcgatggatgttcttttatctatcaatttgtgcattagacctttgaaaatccttgcttgtcaaatcattataaatcccaaaatcaggaactcagtctgagagaaaaacagatgaattggggctcaaatttgtttagtttaaatggttccatgtttcctcttgaaagaatctatcatgaatgttaattttagatttcgtttggtatagcttttcaaacaaagctttgttagtagagattttacaagtagagtttttttttttttaataattctttggttgtaaataaaagtttttattcaaatttgtaaaattattttagtgggcaagttttttaaggctatgttatgaaatgaatgaaataatactgtgaaataagtaaaagatattttgggcattataacattttaaaaaagctttttaacatttgctcccaagagttcaaaatttgaacttttattagtagagtcaaaatagcttatttaatcttaaaaaactctagtgaaaaagcattcaaacaacaacaaaaagactcgaaaagaattgatgagatttaataagtattatggttattagataagttacatcatacaagcacttaggttgatatcactacagttattttcttccataaatagttcatgcagtatcaaattgtttaaaattttgatgtgcggcttgtgtctcaaaatcatcttagtcgccaaatatatttaggtttaatcctgtgaatctatataatcatgaagtttttttcattttgattgataggaggattgtcggtgtagccc

SEQ ID NO: 79320 - DNA, 616 bp, Citrus sinensis
  Intron number 1 from transcript orange1.1g023156m (locus o range1.1g013271m.g) derived from phytozome v7.0 (chr-ID sc affold00017; pos 1042138 to 1042753)
atttcactgtctaaagtttgtccatttcgatttaggttcgttgaagtttttgaaattttgatttgacttttgatacgaggtaggaatttaactacaacaagctagattacacattagatatgctataaaagtctaaattttatggttttcttgcttgactatatctggtaatttaacatgaaattaatggcgcacttgtaagtgctgtgtaatagatttttttttttgagcaatgtgtctcttccatctacatttgaagatcatttccaattcagacattgcttttacaaaagcatagatcaagtcttcctcaacttcaaaattgattttgtcagctaactagaataaatattaaaaaaaaaaaaaacgttctggctagtatatcattttggccaaactgctttgtaaaagaaacagatagtaagtagttcttcaaagaaagaactcaaagtagtaactgatttacagaatattttttgtccttccagtcaaaatcacaaaaacaaaaagaattagattttttttatgacaccgaaagcactattgtataaagataggttttttgggaattctgatactctcttgcttatatcaaataactgtttgtattataggc

SEQ ID NO: 79321 - DNA, 616 bp, Citrus sinensis
  Intron number 1 from transcript orange1.1g012659m (locus o range1.1g011874m.g) derived from phytozome v7.0 (chr-ID sc affold00005; pos 1472108 to 1472723)
ctccctgtttcgaatcttcataaattcaatcaaacgtaagttttttttttttttaatttaatcaatttatttaagttcgccgtttatctaatctgtagtgtttgttttccggggtcgttttgagcactattaatgcggcttgcgttttaaggatcctatgatatttccaccatgtatttgattttttttttgtcctaatttattatgtttcgtagacgtggtaattctcatttgatttgttgcatttgctttcatatcacgagctctgttattcttatattaaattgcatttttttattaatttctattttcgaattattctagattgattgattttcttattaactaatcaatattatagtgtttgaatgctgtgcattagtcattattttgcattacgcgttatgttacctttacatatgataattgtcattgcttaaaaaatttgtgtcaaaataagttacaaagctactacatcagtgtttcttcagatagaaacttttctaagatccatgcttcatctgaacgtatggacatgtagacgtggctatgagtttttcagcattttaggcttgtcaattttatcttgtcctgtgatttttcaataggcaataga

SEQ ID NO: 79322 - DNA, 413 bp, Citrus sinensis
  Intron number 1 from transcript orange1.1g037844m (locus o range1.1g037844m.g) derived from phytozome v7.0 (chr-ID sc affold00991; pos 23249 to 23661)
tcagaccaggctgaaaagaaacaacgtacaagccgaacattatacaggtacaggccaaacattacacagtccacactgaatttttaaagaaagtcatgtaagagtattatggtcttcttgctttccctataaagtataagcatgttttaggtgataacacaatgctaagaatttccagcatcacattaagagtaacttttgttgactgaagaaaataaaagagtccaatttgaattgctgcaatttgcctataaaatcaaatcaagcccttaagtctattcacatctataaagttaaacaagttttattttgaggaaaccatgtgtttatcccaattagcttttttcatcttctttaattttacaattgctaacttcactgcctcatcctctttaattttttttgaggaaacc

SEQ ID NO: 79323 - DNA, 958 bp, Citrus sinensis
  Intron number 1 from transcript orange1.1g004553m (locus o range1.1g004553m.g) derived from phytozome v7.0 (chr-ID sc affold00610; pos 82723 to 83680 reverse strand)
tcggaatcgggtggcctaaaggaagtggatctaaggtaattttaaaaatcactcttttttattatttctgatggttttgtaattggtgttatactgattttctaaccctgcatttgtgcgttgcttatgttggatagtacatattttttctcttcgtatttgtgttgtagcactgtatgcattgcttcatagaaatgatggcatggattgcttttaatgttttataaaaagatgttgtatgattatataaaaaagatggccactgttatatgtagggaccgttgttattgtgaaatataagtttggttgttaagttagatgagcttgtaacttgtaagattaggatatcacatgtcgaatagatgaagttgaattatgttagagtttagatagtagaattggcctgtgcgcagactcttaatattcgaactaagtctttgattgcagttggtatgaacttgtgttcagcataattgccccattatgtggcctgaagttgaaccacaattgcttcagaagaatttcataggtttttccaaccttgttctcttctaaattttaatgcgctaattaagaatcaagatgcttgtctatttatgttctacctcatgaagcaatcactttaaaaccacttcatcttactcttcttactccttatgctgtgactgtgttgttgacaatagactcacagtttctggtatttgatctgacactatattggctaacactttagttgttgatgtacatgagacagctctttgtttgacactaaatttattgctaattcaattttttttactatttaggtaatcgacagacttgattttaactatttttgttgacttttgctaagaaacctctcaaatccttagcatattttattaaagctaggtaggcacacgttctcctaaatcattttttgttccgtacatttattttgcaggtgagactggaagta

SEQ ID NO: 79324 - DNA, 654 bp, Citrus sinensis
  Intron number 2 from transcript orange1.1g000715m (locus o range1.1g000715m.g) derived from phytozome v7.0 (chr-ID sc affold00011; pos 1920809 to 1921462)
tcgacaagtcacagaagagcaaagttcttcaagaagtaactgagatttagtattgaagtttgaattatagttattgtgatgttggattgcttcattgtgagctcattcgaagagtttttggctaaagtgaattggctagttatggatttgtaaaggattaagcttaattactttgtaatagctaagtatggggttttacgaaaaaaaattgttttggttactgaaggataatggatattgacggacatgatttgctaagaaaagaatatggtcagtgtatttttttcttcaaaaaaattagttgttggaacttccacttccaaacacattgttaaaatgacgactggtacttaccttgctgtgctagatgatagcaaggacctgctattttcttattttctttgttaatcatttggaggttaaggtacccataaataaaagcattaagttaatcctcatgttagactaattaaattcattattttgtttcactgacttggctactgcaactttttgtttgttattctttgccttcaagaagtcttgttaccccttgtatattttgcctggaatgatttgatatagttgatttacgtgtgtgctttatgtaactggctctttctattttcacttttgtgttcaatgcaggttagg

SEQ ID NO: 79325 - DNA, 736 bp, Citrus sinensis
  Intron number 1 from transcript orange1.1g041783m (locus o range1.1g041783m.g) derived from phytozome v7.0 (chr-ID sc affold00005; pos 485994 to 486729 reverse strand)
ctcaccttactgcccagaatcgtcttcacaatcaggtaattaatttctttcttgatagttgttacccttttcaagaaatcaaaattcttattacttttgagaagctttcattttacattacttaagaaactgctgttatataatttcttgcattgaacccttttgaatcaaaggcatgattggttgtatcaagcgttgaattgttaattaggttgacgggtgtgatcctaattcgtaaacgcatttgaaaagagcaagaagggtttttgctgtatctctattttgttagataacaatctttgatctttctatttatgtgggttgataggtatggcctattagtgtggattttatattccatatagcgctacttttggttcaatctttctttataattctttagtatctctagtatagtttgcagaatctgttttgacactgcaatttgtcgaaagtgtcaatgccgtgacatttttatctggaatggtggttctaggttacagactagaagtggattggctaattatttgaatataattctaggaatttttttgcaagagtattatgtgatatcttcaatttatgtgttgttcatgctttgcaaatactttctttaggcttcatttcttgaacatgatagttttcatgtctcatgatgatgcatgtgtctttactacatatatttttagaatgttgtaagtgattcactgttaattagtttatggtctttgataga

SEQ ID NO: 79326 - DNA, 783 bp, Citrus sinensis
  Intron number 2 from transcript orange1.1g047395m (locus o range1.1g047395m.g) derived from phytozome v7.0 (chr-ID sc affold00003; pos 1200537 to 1201319)
cctgtttgcgcttggagagaatttaacttctcgctgtaattacacttgatcattatttttgatgagttcttttttttgttttttttaaagtatcttgctaatatttgcttctgctttatgtggatgaagtagggaataccgtattttaaatgcataataatgatatctttctatttttttaatttttttatctttttcaatattttctttctttacttgaatgaattgtgaggatttttagggtctcaaaagcttctcttatgtgtagtacagtataggcagaagctttaaagaaaattgaggctcagaatattaactgtttacattaaccgttgtggatttgggaatttttaaaaaattttttatttggaattaggttatcttcagcagtggcattaattctctgccatgtgctaaaaatataatctctctccctcttgtatatccacctcgtttccatataagaaaaaaaatatttataataatatttccttataaatcttattgctaataaaataaaacgtatcttgtcctttcccatggtttagttgctgttgagtttttttttttttaattactttattatcagtgtctttatttactgggtttcaatatatggaaaacctttattttcaagttatttgaattataaaaaaaaagatttgcttatttatttgaattttttattaatcatttattaattttccaagagttacttattctcattttattgccctcttgcttgcagataaaatcctcagaaaaattggtgaaggttggttt

SEQ ID NO: 79327 - DNA, 923 bp, Citrus sinensis
  Intron number 1 from transcript orange1.1g034819m (locus o range1.1g034819m.g) derived from phytozome v7.0 (chr-ID sc affold00167; pos 88597 to 89519)
agccttcgaagcaacaaccggtggccgtcgcctgaaatattaaacgtttcaaaggtgattttaagtttattttatctattaattgacattcaatattacaattttcgaaaacagtagtttaacccaaaaaaaattaatttttttgtcgtgtcttaattgatgtaatataatcatataaatcatcagttattgactaggttcttgtagaaatgcttattagctttgtctaacactaggctatgatttgtgcataatctttttcttgcctttgggcttgaaatgtctttgaaaatttgaatttaatcgatagattttccttttcacatggctttgcaacttattttgtctctcttggggaggtagagtttcattgtccatggacgggatagtttaaaaatgtttcctaacttttgtattgcttaatgatttgttcttgagagttgtaatgatgatgggcttgttatgaccataatattcagtatttaatattcagattctacttgttttccattttgcttcggtagtaatgtgagtgtgtattattttcttgaaatgaaagcttaacaaccatgttatcgccattgataaccttattgtgtgaggttttagagccctttcatattacataaaagaaagggcaagaaatttttatttacattagtggctaatcagatcatgtaaattccacatcctatgctttgcttgcttcctttctttggaatatatttgtttactttggtttcttcattgtacttttgaagaataatcggaatcagcttagcaaaatactttattttctatttaaaataaataatgatcttacttattgatgcatcaaatggcgagtttataggtagcaaccttggttgttttagtgtttgtggacaaagaattttttcttgatcagtttttgctctttgcag

SEQ ID NO: 79328 - DNA, 859 bp, Citrus sinensis
  Intron number 4 from transcript orange1.1g035950m (locus o range1.1g035950m.g) derived from phytozome v7.0 (chr-ID sc affold00356; pos 145627 to 146485 reverse strand)
ccagaaatatcgaacggcaaggcacattccagaaggtatattattttcaagtccctgataattgatatggttcttaaactataaatttacctgtttgcatttgatttcatccttgtccatgccaaatgccagtgcctaaacttcatgaattttgacgcttttgttgttttgcatcaaatatcaacatggattggtgtcacagacaagaacaattaacctgacatcataacgaaaatatatatttccaaaaaataaaaataaaaaaggccattaatatgcctttttgaagagtactttgtgtatacttggacccagcatatagattatttgattcttatactttatattcggaattcgcatagttaattcagctatcgtacgattaatgaaacatgcttttgtcccatgacattttgttggccaaatgctatatattaaatgagctgatgtaattgtcgatcttccctttaatctgaattaattagacctcaaaagaacaggtactcgccagttaacgaaactaatatatcatttctattttgagatgaccatcatgggaataggtttcagcacaaaagggctactagattctattatgtgaagtaagacatccataaaaatcatccattaattaccttaggcctatcaacctgggattttcagacacaacaatcgtcttcatattagaccctaatgtaatactaatagaattagccgggccgccttagaggctcagttagaaatggggggaaaaagttacgtctcagtaaatttgctgtgcattttatgctttaattatatatgcgtgtgagtttcgtatgcaggaaaatcaaagcgtgagaggacaaccgacctgaat

SEQ ID NO: 79329 - DNA, 176 bp, Citrus sinensis
  Intron number 3 from transcript orange1.1g035950m (locus o range1.1g035950m.g) derived from phytozome v7.0 (chr-ID sc affold00356; pos 146447 to 146622 reverse strand)
gattgaccatctttcacgttaaaagtcacttgcaggtttgatttgttgtttaaatattttatggctgtcaaatataatcataactcaaagcccttagtttttttcttttctttcttctccttttattttttgtatttccagaaatatcgaacggcaaggcacattccagaaggtat

SEQ ID NO: 79330 - DNA, 760 bp, Citrus sinensis
  Intron number 3 from transcript orange1.1g026175m (locus o range1.1g026175m.g) derived from phytozome v7.0 (chr-ID sc affold00014; pos 1376529 to 1377288 reverse strand)
ggaggttagttcttatgcctaatatttgtattgatttttcaatgcggtttgttttgtgaatgtaagagttggatttgcattgtaaatttgtgttttttttttgttttttgttttatatttttaatgattttgcttcaagtgttctaaatttaactttcctcttgaaaccatgggcattctaactttgtgttttatgataatttcatgtctattagtttcacctgttttatttttaatgcaaatggctacaatggtgaatctcttccttttaggaaaactggtatgtattaggttgatggtgcagttaacagtctattgtctctatgattccattcttggggtgagaatttcaaaggcatccatcatcaattagaaacatacggagtagcccagtttggggcttaaaagtttacgtttagtggttatcaacgttgttccttccataaatggtgtatcttgttttatctatcacaaatgaagtatagtctggaattggaaagggtgcttagtgataaaaaagctaaggaattaacagactgatatgttggtgtggaatgttgtagagaccaaatgattgatctttagttctccatagtttgcttcagcttcctccgcattgttgtttagttaaataaattataaattgcctggaatttggaatgtttagtatccttttctaccatatgttgttttatattgacattttttagtatgaaggctgacttgttgctttaaaaataatgtaaaaattcaggttcct

SEQ ID NO: 79331 - DNA, 893 bp, Citrus sinensis
  Intron number 1 from transcript orange1.1g028290m (locus o range1.1g028290m.g) derived from phytozome v7.0 (chr-ID sc affold00003; pos 1386981 to 1387873 reverse strand)
ctttattcgtcagctacctagattccttaggcgaggcaagctgttaataacttttacaactccaacgttatgatttataagttatgaatatcaattgacaaacatgcatttttatgttgcttctattaagtgagttcttattgtatgttctggcatgcatcatgtgctataaggaatatgaggacatgtgaaacatcccattgtgtttggcatggactcattgcaggaaccataattatttttctttgaaaattttgagttgtatatgtttctaataaacaatgagtaaattggcttggtgaaattctgagcacttcaacatagaagaacattgttcttttatacaagatgaaatagatatctttagtctttgaatgtgcatactattctggggatcttaagacttcagtaactactaacaatggtctattggcccttctctttaactcctgattcgaggatgatattttccatgtttttaaccatttttaaacactgaacttggttagaaaatagatcagctaacaatgatatataatatgacagagtgctatttatacatatttacgactaaatatttttgctgcaatgactgcttatattttgtgtttcatttgaaagtgactggaaaatggaaactccctcaagattagtctatctcatggtatctctgagctaacttgtttcgatgatactgtacatacacactattgttttcggtgtattgagttctctttcctctggcattactgctaaatctaagtagttttattaaccccctaaataaggtcaaaacctttccaatttactatttcctttttgtgccattcacgatgaacatgattcttctgtttgcagatccagaagtttgccttgcgattttcaacgaatta

SEQ ID NO: 79332 - DNA, 403 bp, Citrus sinensis
  Intron number 1 from transcript orange1.1g025475m (locus o range1.1g025475m.g) derived from phytozome v7.0 (chr-ID sc affold00003; pos 3935610 to 3936012)
cccgtaatttctcctccactccgtacctctttttctgtttcttctactttgtctttgttgttcccttttttaatttatttcttttaatttctctgtttgtttggtcgcggctgttattttttttctttaaaaaataatatatttgaattgctttccactactgtcctgtttgattgctaagaaaacgcgggaaaatggggaggaatttgagtttgcttgtgattgcgaattctcttctgagagtctagggtttgaattaattagaccgttggattcttgcaaatctggaatagcacatatgagatgttatctaattattggatagtttaaatctttaatattttctcgatactgttttatgaatcgtgcttgcaatggaaagttcttgaatttctttgtagtg

SEQ ID NO: 79333 - DNA, 747 bp, Citrus sinensis
  Intron number 3 from transcript orange1.1g044925m (locus o range1.1g044925m.g) derived from phytozome v7.0 (chr-ID sc affold00700; pos 52728 to 53474)
gtgctgcgctggccgctgctgtcgaggaaaagaaggtaatttatgctttcagccttaatcagttcgatgattagctgtagaaatactgcactaattaactcattgtatgtaaactagttttagagtcagctttttgtcccacagagatcacttgttcagatctgcagaagttatgtgcactattctctgtgtcgaatttaagtaatacttagaccagccagtttcttttagataggtttttattttcagataactctatcacttgcctatcagactgcttgagaataatatgggatggtaattctctacattagatctctagttttatgttacatatatccccttgaagaatttgctatgtagtttgattttggactgttttgcggctgcttatttgggaacatctccttgcacaattgtttctgccgttgaacagttttagcaatagctattacttttaaaaaaatcctctttgtcattgagggttctagaaaataattagtcgcttctgatgcaatccttcttcttgaatttggttgctgaaaattggtttccactctttggttcgccccactagaatacagtttcaagttgagctacctggtaaagttatttttgcttgttaattcatttccactctgcgtttgtggcttaaatttgaagggctttattgtggcggtcattttctaattaaggttgtgtcgtcctttttctcttatcaggaggaaaccaaggaagaaagtgacg

SEQ ID NO: 79334 - DNA, 925 bp, Citrus sinensis
  Intron number 3 from transcript orange1.1g030359m (locus o range1.1g028980m.g) derived from phytozome v7.0 (chr-ID sc affold00005; pos 2043143 to 2044067)
gtattactctttttgaggaaatcgaagctttcaaggcacagatcgagtatttcaaagctctctctctctattcagaaacctaaacctagcagccgccataaccgatacctgtttctttcttttttggtttttgtagagctgtattttgcggccacagttgtattttgtgtcagggctatagctggtggcctgcgtcatagcttaacgaaccccatcaatactggctcgctcactcacatagcactcataatctcttactaccttatatcggggaaaaaaataataaaaaatctcttactagctagggttttctttttactttactattcaaccaaaaactatatatatatgtatgtatgtaaatgaaaatgcagtcttgatttgatttgatttgattgacatgagcatctcgatctaggtttaatgatttctttcaagagcctttgtcctctattttggaagcaaaactaaaattgacagaactggggctttagattgacatcttcaagcctctgccccgagttcagttcagttatttgtttgatacaaatctataacggattcagtcacttcaaagcccccacggccccccctccttttttttttttatttcataaaacatcatttcaactctttccgcatttctctctctccttttattattgttgcaacaaagattacaataccccaacaatatttctttctactttcttttcacaactagtgatttagtttttcgatgaacaacttgaggcaccctaaggagctagcttagtgcatttcagttgttatgattttcagtttagtaattacttacaattaccaataagtgatagatcgcatctgctggttcttaattcttttaaaactaattcaaataatatttacaggctccaagttacgcgtcacccgagtgcagaattga

SEQ ID NO: 79335 - DNA, 778 bp, Citrus sinensis
  Intron number 1 from transcript orange1.1g010074m (locus o range1.1g010074m.g) derived from phytozome v7.0 (chr-ID sc affold00003; pos 460805 to 461582 reverse strand)
cagacacggtggctattttgtgggtaagcttctctctctctcttctctttccgacactcacacaaaaagtaaacattcgtgaacttcaatttgttttggtatctatgatgactcagacaaatcttgtgcctactcatgttggtaaaacttttatggattaattttctataaaaccaacccagaaaacacagaaaaggcacaaaacttttacccatgtcaggcaaggaaatcttgagttaattattttttatttttttaaaagaccttacactgtggcaaaaaatgacagcgtgtaaacaaaatatcttaaatctagaacaaaacgatcattttcagaatatccgaccgacttcaaatatgtttgcttctcagtgataatttttaaaagttgatgtgtctctcgttatctttctaatacctttcatgtgtgcctaatttcctttcttttattttcttgtctgtttgcttcaaagattttgacactatcagtggcactgcttagccctatgcttggatacagatatcctagacgaattctctaatttcatcctacagattaaagacttcatactaaccctcctaaccctaaccctaatttgttgactaattagtcaatactctttggctgattggctcgctcgaaattaaaaaaagtttcagcaataatgcttcgtagttactaggttgaccaaaatatcttaatttgtgcgtctgcgtcaatattgtatcaatacttttatccaattattattttttttttccctcaatcatacaggag

SEQ ID NO: 79336 - DNA, 1031 bp, Citrus sinensis
  Intron number 1 from transcript orange1.1g001837m (locus o range1.1g001837m.g) derived from phytozome v7.0 (chr-ID sc affold00050; pos 134601 to 135631 reverse strand)
ctctcctcatttctcagcatcaaattggtaagaaaaattaattacccctcaccctctttttttgttattctgttttccattaacaaactttacttgttttaaaaggaacaaaattgtaatggcatggtgtcatgatattaatgcttttgccagactgcatgcctttttttctacccccaaaaaaaaaaaaaaattcctttttttaaagtttccatatgtggaacaagttcgtgctagctgatgtgttgctgtggtcattacgtgggacttgggagctctataatttgttgcctttttggtggggtgattaatgaattgacagataaatgtcgtggttcaaaattaaaagctacaaagtttgattagggagattttgttccagaatccagactcccttgtaattttattttatttcgtatggattcgatatattgtaactgaattccttgcaaaactatgaaacgtcccaactgaattattatattttattcactattattcatttatttatttatttcaagatttttgtcacatgcttcgtacatttcgtcgttgagatttatttatttattttgcttattcttgattcgggcgaggattttgagcattttgatgcatgctttttcagaattcacacacctaatcatgattaagtacctgaacattttattaataaattcgtttaaagattgagtgccgacccatgatgaactgtaggaccaccaactttactaataatgctcttgtccacaatacccatccccccttatatttttcgattgaaaaatgttttcaatttttaaaattatcatttttgttaactattacctcttcattagccagtgtaattgagcagaattaattgaataacaaattaatctcttttacaaatctatgaggtcttgccaactcattattttttgtatcgatcgataatcatgaaaggttaattgttcttactatggttacggcttttatctttccccttaatgacagtcaaggctctaaatcaagcaagattcgaggcaaat

SEQ ID NO: 79337 - DNA, 892 bp, Citrus sinensis
  Intron number 4 from transcript orange1.1g027470m (locus o range1.1g027470m.g) derived from phytozome v7.0 (chr-ID sc affold00017; pos 378987 to 379878)
tgtcttcttctgcggctaccgttcgtgaaagaaaggttttatctctctgtggatctaattattccgtctttcaaattttttttttcccaaaacggaacctaatttgcattaaaaaacaaaaagaagaaaaaactacttccaaggcaaaaactttgtccacacagacacagcactggatcttattaatcaagtaaaaagaaaaaattccacaatatttgtataaccacgtccttttttcaaaacgtagattttctgaattgtataaattttcaccgaaagcttttatcaatttatcactgtactttctttaatatttgttgcatatttttgaggtaattaggaagctttattttgaagaagtttgtaggatgctccagacatcgattatggtgcagtatcccactttaaaatagatgcaaaatattaactatagatttggaatttttgtagatcaatttgatattattttatttttccatttttttttctcaaatcgattaagtgatatttgatgaagcataaatcgttctaattctaagtaaataaaaaaaaaacaaacaattgagttagtaattaacaataaatccaagagagatattttactataatcagctcagaagccaaccaatgacaacaaacattggtttttttaaattattattatttcaaataaagctgaatgttgattatgttatccaaaagtgtatgagagattcatgaaaaactgtgccaatttttttgatactaaatttttaagtattgaaacaaagccaagtaaaatatatggttgtttgtgtaaaactgtattgtactatgtcattggttttggtgtcagatcattcaataattaactgaagctaacaaatgcaaacttcttacattttacagtttc

SEQ ID NO: 79338 - DNA, 1049 bp, Citrus sinensis
  Intron number 1 from transcript orange1.1g022600m (locus o range1.1g022600m.g) derived from phytozome v7.0 (chr-ID sc affold00005; pos 590686 to 591734 reverse strand)
cattttcttggcctctattgtctacctcgtggcaggtaatagattcttgacaactttaattgaaatgcattctctacttatttatgtaaatttcgctgtgggcatgcgggcttttgtttcaggccaattttgtagctaaatttgattgctattggtaggttagtgttattctaggtagcatggagaaagaaataaaaattacttagagacttgtgtaactctggcaacaggtttcaaactcctttcagataatttcaagatttgctttggtgcagttgtcgttcttggaatatctttgtatgaaatcaaaagaaatggacaaaagatacattgttaattagaatgccctatctttcttcgattaaagtggatctaattagagcattttcaaatggaagatttttcttttgaacaaaagcggtcattgttatgcattagtttagtgaaaaacttaaatttggcaaccagttaggcaaaagacaatcgttggggggggggggggtcactgtacttgatgaagcaatatttaatagtgaaagtgaggttccctgaccaagggaaaacgggaagctggcttgataggcagttcctttaggtgattttaagcttttgaaacgagcattgcactcattttatggtccagacacatatattgagctcatgtatggtcttgaaattgttgaattccccctccccccccccccaacaaaaaaaaacaaaaaagagttttgcttgcatcttggtcctgcttcggtcgtgaaattctcaccaaagataatcattatcctgaggtcgtcctttgaatctgtgactcaattttcattttaagttgcttgtctttgattttagatgaacgttaacaagtttattcgtttgatacgcatttttataatgtagtaatttgtgatttgatttcttaccgataatttttgtaatcttaaagatggtcctcagtttgatttcttgtttttaatatacttcctgctcaattcacatggtttgtccatgatgcagggattactgttgcgtatactgctccacgaaggcat

SEQ ID NO: 79339 - DNA, 354 bp, Citrus sinensis
  Intron number 2 from transcript orange1.1g019410m (locus o range1.1g019410m.g) derived from phytozome v7.0 (chr-ID sc affold00340; pos 165104 to 165457)
ctaatttgccccataatactgaggtctggctcaaggtaatttccacttccaatcttagtttatgtttgcagttgtggtgttgtttctgtgccagccagtttagtttagtttgtaatatctcttctgggttcaaacccggatcacccatgtgagggagaagatttaatttcctattgtaaataaataaataaagcattagggtgtttttgcttttaatccagaactgttgtggaatgtaacgattggccgtaaagtataagccagcgggttgggttttttttttttttaataaaatcttttaactacttcacggagtttttgattaatattagagtaattttagtggagtttcgg

SEQ ID NO: 79340 - DNA, 835 bp, Citrus sinensis
  Intron number 2 from transcript orange1.1g018426m (locus o range1.1g018426m.g) derived from phytozome v7.0 (chr-ID sc affold00168; pos 302928 to 303762 reverse strand)
ccacacttatttcctaagctccctcttcccctcaggttctgtctatgtctttctcttggtaaatctgtacgcgtaggctagtgtgttttaatccagtttatgtaacatccaacatcgctagcgaattagtctctgaactaagtgttataagtcattggttagtcattggttcttctacttattaagtggacatattttggattacaaaacttaataacaactgtgtgctcaaacagttgtggaccaaacacttaaattggagaggcttagttcaaaaactttgatttaatttgggttttttttttaattgtttacttgaatacattttaagtcttataaacttaaattccattactttattttaaattctaaatagtaataataataaattatttattttaaatatatgaaagtatcctttttctaaatagtttttacaaaatattcaaaaacaatataatgtgactactgaaatttaaattaaaattttaaaatcatcaaataacactcttactattaaactataaatcttttgttatataaaatatatttcaaattctttttatttaacactttcagaagggacttgaggtacatttaaaagaaaaattaatagataaaaggggttgaaacccctcctgagccttagttgggtccacccatgcacccaaatcagatagtatctacttggttgttgagacaagagtatgttattgcactttgggttgtaaattatttatttatttatttatttggcaagcaatgagaagatcaagttaaaccttctaatatcgcaacttctttctattgtagagacaccttggaagtttactca

SEQ ID NO: 79341 - DNA, 607 bp, Citrus sinensis
  Intron number 2 from transcript orange1.1g039176m (locus o range1.1g039176m.g) derived from phytozome v7.0 (chr-ID sc affold00062; pos 124037 to 124643 reverse strand)
aggacgagtgttgaagcaattttactggtatgttttgttttggttacttgagttacatttttgacagctttatgtataattttgttgtgaaacctcttccatggattttggagctggcatatgtatttaagtagcagcagctgtttcttgattaatacctgtttgtaatggtaaattttgagcttcatcaattcaattttgctagattcaccttcaaatggttgagccattcagttctggcttcactataccagacaaaccaattagactttagaaactataagaccaatgaggaatgaaaatgggccattctccaagctgtctctgtggtttggactttgcaaccctgaggttatgattcatggttgtcatccacatttgcctttacatatgacttatggactgtataaagaatatttgcagagaacactgtttggaagcaacaaaattcggaacatgttgattatatcaaaattcagaagcaacaaaattttcagattatcttgggcaaggacactattgctgatgtaataacttcaataatatttgctatatgttgttttatcttgcaggttcaggaacataatcatcctcacatactacttct

SEQ ID NO: 79342 - DNA, 323 bp, Citrus sinensis
  Intron number 3 from transcript orange1.1g043061m (locus o range1.1g043061m.g) derived from phytozome v7.0 (chr-ID sc affold00003; pos 4259689 to 4260011)
ggtggagaaaatcttgcaaagtcaacaaatccctcgtacgtttattcgtgtattgaattatatataattaattccatatatactactccttttttttttattcataatataattttattaatttcttaattttcttctgatgtttccgcagccgtgcaatgacgcaccaacggtaagtcaaatttaaaattcttgctgccttatattcattcctaattcttacctaacgttatttttaagatgaaatttcaatctaattttcatttttatttttctccaaccaaaaaaaaaaaaatggtcttacaggcagtaacattttacgg

SEQ ID NO: 79343 - DNA, 653 bp, Citrus sinensis
  Intron number 1 from transcript orange1.1g032841m (locus o range1.1g032841m.g) derived from phytozome v7.0 (chr-ID sc affold00003; pos 4387631 to 4388283 reverse strand)
caaagatccctctacttctctcagctggtgccctggtacttcctttctgaatttttctttgcaattttttttcccttattttttcttcatgtttagggcgtttcatttttgcctttttaaaaataatccgactgctgtaagtgtaagtatgtaattatactctttatatatatatatatataatttctatttccctgtgttttcaatcaaatatgattaattatacattccttgtattgattagtagtaagtaaggtgttattaggagattcatgaactatggatacggtgtggttaatgctcgcagaagcgaaagtactactgtaaattcattcgtagtgaacacaataataccagaagggagggaaaaaaaaatcctaattttttctattggaactttaagtaatttggatttatagttcgattggaatcaactttgagagtgtaccttcttcaacacttacccaccgttggacttggactgtctctagtgaagcgaaggagtttttaaaaataatcgtctcttctacttttgatatttgatattgcaaaaagccacttggtggtggaataaaaaaaccaaccataatttgtttttgtccctgtgcactgttttagattgcgtgagagctgaacctgtaatctacaaaacc

SEQ ID NO: 79344 - DNA, 686 bp, Citrus sinensis
  Intron number 3 from transcript orange1.1g047357m (locus o range1.1g047357m.g) derived from phytozome v7.0 (chr-ID sc affold00003; pos 3275084 to 3275769 reverse strand)
tggtacatagtcatttttgttttgactttgcgtgattcatggttaccatgttcagctttagattacttgttttatcttggagaagagattgctcaacttgattttaactttaatcaattggcgaatggttgtctgctgctatatgcattgaaagtgtctttgagaacatgtttgttgaaagggtttttgagagaatgtgcttttgtttttttttcctctcccatctgaaagttgctttattaaaggcatctatcaactgcttccctttgtgtatttaatccaaacactagaaagcggatataaaacccattttaagcatataagaacatttaccaattccaaagagtttcaaatgcaccactaatgttgcttggtgccagttttgctgatagatgagaatgggcagaaaaatgtttgtcggtcaattacttttgggaactttgacggaactaatgataagtgtgaattgtgagtgcgaatagtctgttcatgacagcttgttgaaggttatttttttgttttttgaattttaccggaatagagattgattagttagtttgatgccttgcgatttgaacaatctgcttgccagatgaagtggagatgtttgtatatattcggtagacaatttctatgactaataactgatgttacaggtttctggggagcagagagaaagattggcc

SEQ ID NO: 79345 - DNA, 431 bp, Citrus sinensis
  Intron number 2 from transcript orange1.1g017794m (locus o range1.1g014043m.g) derived from phytozome v7.0 (chr-ID sc affold00003; pos 3837154 to 3837584 reverse strand)
caaaataggtacaaaattggtgtgcaattatgttgatactcgctttcttcctaatttatcaggaaatgatagtgaagccatgtttatttcattctttttcattatgctggtcagttccattctatgtgtctttgtacaagaaagaggttttatcataccaacattttatgggtggctagataattaaatgggaattttgttttttggggtcctttataggatttctaaatactaggtggccatgctattctcttttgcctgtatgatctttatttgctttttcaacgataatttttctttagattcttgtttcttatgcatttctaaccttaacagggttttgcaatgatgggatacctatatgggagaagaaattctgtgcttcaattgggaaggtaccatggcagaagattgtggatactcagaagttt

SEQ ID NO: 79346 - DNA, 731 bp, Citrus sinensis
  Intron number 1 from transcript orange1.1g017794m (locus o range1.1g014043m.g) derived from phytozome v7.0 (chr-ID sc affold00003; pos 3837703 to 3838433 reverse strand)
agccttcttcttcaggtatatcgctttttaattaatgtaaattttctagatttggtctttcttcttgtttgtttttcttgtgttgggttgtttagaagtgctgttatatttatattccttgatgggtttaaggtaagattgatgattgcgtcggtagtttttgtgaaatttgtttgcaaagattggaaattttgaaatcaatatgggattgaattcggggaatagattggatgataaagaaaagaaaactaattgcattgttcaaagagtgaatagaattcaaattatgtaattttgattgtctttatcccattgtagggttggtttgtttctttgaattgtaaggggcaactgctaattactggacttgtatgtttttctaagttatttgtgaaatgaacattatttgtgcgattatttgaaataaatatcagtgtaaatgttgattggaagtagtatataatagtgtattttaatctcaagttgtgttgccatgcagtaatgtgtaaaatgtactggattgatagcactagcatcacttccatctttatctctgcatattgttatttaagcaatatacaagtgttgtttgctaagtttcttcaacttgattaatgtttgattataagagagtgtctggtgtcttaaatgccataaattttggctacgtgatttgttttcatgattgaatgtactatatggcttaaaatcaattgtctctttttcttagg

SEQ ID NO: 79347 - DNA, 917 bp, Citrus sinensis
  Intron number 1 from transcript orange1.1g024153m (locus o range1.1g024153m.g) derived from phytozome v7.0 (chr-ID sc affold00017; pos 54250 to 55166)
ccgcctccaaggcaactactacttccaagaacagcgtacgtctctaattatccttttaaaatatttatattttgatcatttttcgctctttttttttctaataataattcgatgacctctagtcttcagtcttgaatgttctaacttgatcaattaaataaacatttgtctgattttcaattcttaatgttaaccagctaattccaggttctgtttggggcatgagtaatgtgattgtattttttatttcgttgttgctgttgtggctttagattgggtatgaatgaccattttcctttacagatagttgggtatctttggtagctcagaagcactttcatcaaattatatgttcaacgttcaatgtagcttagaaacatatgctcctgcatagctattaggatggttttataatcggaagtgattgagattttagtgaaatgacttacgttaggggtctaatgtaactctgcttttcacataattttatgaccaacagatgtttatgccaatgtaggatggtcgaattatgcagtactgaatctcttgctctgtttagtctctattaatgatgctgtgtactgtttagagtagtggtatgctcttgtttgcttctgtgtctaaatttttccttaaaaactaccttccctttgtcccagattctctctctgcacaatgtttcattttcactcttttggtcttacaagctggcataactgttttgtttatgcaccatattaatgccataaatcttcttatgcttatccaagcaaaacattcttcattctttattggaagtcttgcatatttgtcttactgttggagaattctcctgacactctggatttattttatgatatatcattctttcaactgatcttaatcttggttataaagtctccaggcatcgaacactc

SEQ ID NO: 79348 - DNA, 405 bp, Citrus sinensis; identical to SEQ ID NO: 78565
  Intron number 1 from transcript orange1.1g020123m (locus o range1.1g010507m.g) derived from phytozome v7.0 (chr-ID sc affold00048; pos 591720 to 592124)

SEQ ID NO: 79349 - DNA, 485 bp, Citrus sinensis
  Intron number 1 from transcript orange1.1g037673m (locus o range1.1g037673m.g) derived from phytozome v7.0 (chr-ID sc affold00011; pos 378959 to 379443 reverse strand)
gttccttggaatcgatttgctcatccggtaactcttcttgaatcttcgtatatttcttcgtcatattttgactctgattataattttcgcgccattgcatctccagcagacccaatcgctaacctttgcttttcatttgtatgaattcaattttacttaaaaaagaaaaaagaaaaaagaaaaaaagaaaaaaagaaaaaaaattctcgccaagatgagaaaatggaagttggcgttctgtttgtcatttgaggcgcaagttagaagaaataagtagtatgcatagtccacatggaagtaaataaagcattatctttaacattattttattcattttaaattgcttgtgttctttaacaaaacaatctcaatctagttttccaagaaatacttgatgggtaatttttcaatgactaatcatcttgtgtatttctaaaatttatgcaatagggtcgctgggattgcctcctctccgcagcacgact

SEQ ID NO: 79350 - DNA, 729 bp, Citrus sinensis
  Intron number 3 from transcript orange1.1g007937m (locus o range1.1g007769m.g) derived from phytozome v7.0 (chr-ID sc affold00386; pos 109745 to 110473 reverse strand)
caatcagtaagtaattaagcttccttctaattttcttcaacatattatgtacaatttcggttcatgatcatcagcttgtattttattttgattagttccaaaaattttccttgaactttgaagttgaattattagttttaagtgtttcatgaatgatctcttggtccagtcaacattaggccggggttcgtatacggggagggcaatgatgggaatgatgggaatgatttaagagtgtgtttaaagcgactaaagttataagttacttgttaattgcacttaattttctacttctttagtttggtttgaccagattcactaaatcatgctttattgtatgtaatcgaatccacttgcttttcttttcttaatttacttggagttgaagccaattcattgacgtcttgcattagtgaatgataagagatttctgatttttttaatacatggatcattgaaaatttatgtttatgctattgaatgtgtcattattctttacaattgctttccaagatatgcccgggatttctagtgattatggatctatcatttgatgaacactgagaaattctgcacttagtattttattttattttttggtttataagcacttaatgataatattggtagttctttaattggatgcttgaaagaattttcttttactgaactgtagacatggttaaaagtacagactgcaagcttaaactgaaagaaacagagaggtgg

SEQ ID NO: 79351 - DNA, 606 bp, Citrus sinensis; identical to SEQ ID NO: 79163
  Intron number 1 from transcript orange1.1g013713m (locus o range1.1g013197m.g) derived from phytozome v7.0 (chr-ID sc affold00065; pos 150750 to 151355)

SEQ ID NO: 79352 - DNA, 1015 bp, Citrus sinensis
  Intron number 3 from transcript orange1.1g043117m (locus o range1.1g043117m.g) derived from phytozome v7.0 (chr-ID sc affold00374; pos 92981 to 93995 reverse strand)
aagaccacagatttgaggttttactctcaagcacttcttctatcactctgtttgagtcatttctacagcattaatagcacttgcaaaaaatatatagcatttgtgtcatctattcattctcttgtgaatctacaaagatttcaagtttcctggtttatctttgacacaaaatgttatcactatgtcgctgtgacatatttgtttctgaaactttgcttaagagaaatatcaaagagaattttcatggggttctttgcaattgagtttccagcatcaattttttttttcaattattattagtatgttctaagggatttaaaatgaattatgcaatgtagaaacacttgtttgtgaaactgctaaaattattggtaccaatttctatgaatatgaataaagtaaatgaaaggtaaatggaaatgatgcagtgactgcttctacacatctatttttccttatcctttagagatcatcttctgtccttggtccacacttgctaggaaggggaaataagaaatcatattgagttcctcttacactgaagtttacatttgacaattgaatttaaaataaccaaacttcagtagaataggaaaatcctgatagtttggccttgttgggaagcatatggatgaactttcttttctactttccatcatgacatgtgatttaataatatttgatacttagtatcggcattttttgtaggaatgcacttcatgaaaaatgacaacttctaaaatttcatgtgatattggaatgtcgaatgggatatttcctcttatcgtttggatttttcttttttacccttctctttattagcttttaggggtatggctgtttgtgtgctgcctttttactttagcttggtgcttttgttttattgaagagatttttcattgatgagaagaatgtaattgtttagtccaatgtgttgtacttcactagttatttgataataatttctttgtacttttcagattttagaacttgaaagtcagattgagaagaacaa

SEQ ID NO: 79353 - DNA, 651 bp, Citrus sinensis
  Intron number 1 from transcript orange1.1g008451m (locus o range1.1g008451m.g) derived from phytozome v7.0 (chr-ID sc affold00468; pos 8070 to 8720 reverse strand)
cccgtaccaacaccacccctaagtattgcttccatttacccatttccatgtatctatctctgtttatgctatgcttgtaattatgggagctaattacattagggttgccgagggtttagatttgtagttatgttatattctgaaaaaataatggcatggtttataattagtttatttgtaaatgtactatttaaaaactctaactgataagtggaggtaaatagagattgaaacattgcttgtgtgattcgtgggtttttagaatttaacatttgtctgttattctgaggttgttatatgactgttctttgagtctgaagtttaactgaaaagtctaaggaatgatggagtgttttggaagttggttttcaatgaaaatggattaaggatttgatgattttggtatcattggatccaaaataattggatgggttatgcatgaagtgtcatgtggcatgaaaatgtccagggaagtttgaaaaggaaaaattttggaagagggaattttaattttttttaataagaaacaaaagagggaattttagattaaatcaattaaagatagtcattttgttgctagcagttttattgagttaatgatataacatttttgagctgtctttcaggcaagatattttgggtcaatattct

SEQ ID NO: 79354 - DNA, 1038 bp, Citrus sinensis
  Intron number 3 from transcript orange1.1g023501m (locus o range1.1g023501m.g) derived from phytozome v7.0 (chr-ID sc affold00057; pos 104384 to 105421 reverse strand)
ggaaagcaattcagttggatcacgattctgtcaaggtctgtttgttttttcctctgttttgttataattgtttcaacttattattttttccttttctttttgagggcatttttgtgtttgttgatgtagttctttgattatgcttcttgaaaagaacaatggaattttgctcctgttcactaagcaccggggttaagttctggagttctctgtgggtgtttttgtgcctaagtttgcctgaacttaggccttactgacacttgcaaattgcttttttgtctttgcatttgggaataggttttgtttaagagttcaagtgggctcctttctaatttcttttatcctgttgatgaatgggttatacacaatgcttttttgatactcgaaagaaaaagagggcctttttttgacaggtcaagtatattgaggtcaaaagattatcgaataatgattctcgttatcaacagtgaagaattttggagactgctatcataaaatatttacacttgaagacctcttgaagagtattgtgtggattaattgttttctggattgatgttattgacttatctggtccagaagttgatagatgggggattgatcatgatgaatagtccagactaaattagtcaatgtaatcttaatcataagtgattttcaaatgggtgctattttttatattttggcacgggaaagcattctggggcttattaggaaattttaatgtgtgagccttcagtttgtttgagatgctgctctgcttcagctgcttaagcaagcaacttatgctgcatgaaactttgtgtcgcttgtttctttttcacagaaagtgttgaagtaaactgtggtctctaccatttagtaaatttcttcatgtgttccttgtttcttaactagcggctgcttcctctgtttattcctattcttgttgtattatgcaacattttttttcttcttgataattataatcttatgctttctgttacattttgctaaatgacagggacactatttgttgggacaaacgttgctacagag

SEQ ID NO: 79355 - DNA, 492 bp, Citrus sinensis
  Intron number 1 from transcript orange1.1g040633m (locus o range1.1g040633m.g) derived from phytozome v7.0 (chr-ID sc affold00011; pos 1274431 to 1274922)
cgacacttcttctcgaactgggattttcattaaaggtgaaaatatacctcttttgcttcgctttcatcccttttttaacattttgatatcaatgtgttgtaatttcgaaatttgatttgaatgaaagagtaatgtgtttttgagaaagcaacatttgcagtgtttggttaaaactgacaatgattatatgactcaagtgctgcccccccccccccccccccctcttttttttttttctgaagaagcacttgagtagtggtttttgagaaagcttctatagttttgaaaagcacttgaagtgtttattagtaatcacatttgatagatacctttccaaaaattaatctttttttaaattgataattatcattttttttttcatatgttgctattcttctttagcttaggttatatttctctagaattcatgtgttttgagtggtcacgtttgtgaagactagggagaaaattgatgcaggactgccagaatct

SEQ ID NO: 79356 - DNA, 590 bp, Citrus sinensis
  Intron number 3 from transcript orange1.1g004400m (locus o range1.1g004400m.g) derived from phytozome v7.0 (chr-ID sc affold00609; pos 63498 to 64087)
ggcctctctgccacttcttaatatgtatgtcatactttttcttttctttattatatagtgtacttatgaaaattctctaatgcggagggtttttgctgggtcttactaataagtcatttcatttgtaacttacatcaattcaaaatcagttattaatcaaaatgaaaagtttgttatcaaacacttaggggtcttgagaaactaattttgagtcaactgtaagttacaaaaaaataacttagcagctgtctattttttgctaaatcatatataagtaactacgggagattgataacatatataataaagaatttgagatgaacctttaatatttttttaaacccttacttatcaactaaatcttttaaattaaatattttttaaaatatagtatcagagttaatgtctcattcatcccacctgcaacatccttcaattcgtagctcaatttctggttatcatgcttcatgaatgtaaacgtgatgtttattttaaatttagatgaacggaagatattttacatttaaactaacacatatgggattcttgtttcagttccctcatagcaaaccggctaaagggtccaatcc

SEQ ID NO: 79357 - DNA, 515 bp, Citrus sinensis
  Intron number 1 from transcript orange1.1g022539m (locus o range1.1g022539m.g) derived from phytozome v7.0 (chr-ID sc affold00003; pos 2561897 to 2562411)
aagatttctcgcgttcttcctgatcattttgggtattgccctgttttctctctctctctctctctctctctctttctttctttctttgtatcattattattattcatgcccaaaatctatttcctttttcattttttatgtctttgattattattatttttttggttttttgtataattgtctgcctgtgtggaaatcattgatgatgaataatcttaatatctgtaatgtaggcgctcaactaattattaatattataaatattttgaatttgataggcaaatcttacatttgccccttgatgacctgtttcttcatacagttttgctgctccacagggacatttattatcataatatggatgtagatcgctggattttaaatttgtttaaaatggtttttacaaataatcttgtacaaacgcagcatcaatgtgaagtaggtttatgtttcaatgacttccatttaattgtgttgcagcaagccaatcactgtccaggagatcctgaaaattg

SEQ ID NO: 79358 - DNA, 570 bp, Citrus sinensis
  Intron number 1 from transcript orange1.1g009163m (locus o range1.1g009163m.g) derived from phytozome v7.0 (chr-ID sc affold00003; pos 3473076 to 3473645 reverse strand)
gtcgcttgaagtttgaattttgcatacttgttaaggtaaattttgttattgactgtaattgtttatatgtcagtgctatttaaccttctttttatgtattgatatttggcaatttttttttcattgagttgaatgtaaatctgtttctaaatgtattatgttatttgtttgttaagacttagatactgataagcttacttgtctctgtaagtttcttttggatatttatttatcagtgctggaatgtgagtggtgctcttcgtagcaaatacatttttggaaattttttttgaatagtgcatttatacttcaatgaatgccccaattgtgtctttgttctacatgttatttgtttgaattagtggatgcactgatttcaagcaacatcttgtttgacaaggatcagtgtgcctagctgtgccattgtgcataaataaaaggattttttattttgtttatatttgttctctggttgagaatatgttatgattatcaacaaaggggatgacctaaatttgaagtttcaattggcttaatgttggttggttgtccttcaggtcgaggtaaaga

SEQ ID NO: 79359 - DNA, 990 bp, Citrus sinensis
  Intron number 5 from transcript orange1.1g006827m (locus o range1.1g005652m.g) derived from phytozome v7.0 (chr-ID sc affold00005; pos 1873023 to 1874012)
ctcgctaccataaagcaacacgtcttacttgtgaggttggtgatttattatcatattcccattttctttaatttctcgtatatgtatatgtgcatagtgtatctgtattatattagtctatgaactagattctaaacgaatcaagtatgtgctgacatgcatatatgttcttgtgcatctgaaatccatctatgactgttcaagtgaaacgtagacatcagactagagtttctgttaattttggttcagtttagattgcgtgttcagaaatgttgcatcatatgagtgtctgtgggatatgaatatcttatactaacaatctgtatggccaactcataactcattttggagtataatgccggaagataaatccatctaggttatttatttattataaggctattactttcatcttaagcctatgatgccattcattgatgtcccttgctttacatcatgtttccaggtcagtagaagatgcaaatgtctttcttgttaatgattttgataaccgtctacaggtatgtaacaaactaatttacttgttttaatcgctcagataaatagatattcatccattggtacaatgcatctctctcttgcaattttcatacatatggtgttaaacatttcttacatggggaattatgggttcttttaacagtgaaaatcttgtgattttgaatttaattttctcccaactaaaggaatgtacaaacttgcacctgctcagctgcacatatccattatctatgttgttttgtctttagaaaaaatatctttatttctttattttgcattttcattagcgacacaattcatttagtcaagtttacctagctattcaaattttcgcgctttgatcgatcaacgttatgtcttgttttggtatgattaacactggatgttctcattgcttgcaacagagaactttatcttctttggagctgcctagggcagtttctattgcaagtgggtcatcaacacctg

SEQ ID NO: 79360 - DNA, 765 bp, Citrus sinensis
  Intron number 1 from transcript orange1.1g013154m (locus o range1.1g013154m.g) derived from phytozome v7.0 (chr-ID sc affold00138; pos 191635 to 192399 reverse strand)
ttctctctctagcgaaaatcttcagtaagtctcaggtatctgctttctctcttactcttgggatctaaaattttcgatcgcattgtgcataatttttgttaactgttatgtgaattctcttcgatttatagtttttagtaataatttgtttagatgattagatctgtagacttgaagtcaatgaatttttacttcatgtataatttagtacgttttcattggaattatgtttctacgatattgatgttgtgttcgttttatttgttgtgaagatcctggagctttatactgctctactgttttgttttcattccatgtttcaattgccggattctttttttttttattttggtaaaaattactagatctattataattcattctatgtgaaaccatgtgtgacttgaagtttgtttagttgattgaaaatcttgatagtttattgcttgtttgaattatgcaatattcttttgttgttattgaaatactgtgatagaattgagatattttcacattttttatgtgttctggagaatctgcaaatcgatctgtgcttttagtatgtgaagtttaatgcaaattgtgttgcttatgatgtaatattagtagttttaagtgtcatgatgattgtttcgtgatttttaagctttgatatttgatcagattgtgtatatcagtattctttgaattgctataatttatggtatcttatgtacatttcacctctcaattgctaatttacatttatgtgaaatttcaggaaaa

SEQ ID NO: 79361 - DNA, 486 bp, Citrus sinensis
  Intron number 2 from transcript orange1.1g039968m (locus o range1.1g039968m.g) derived from phytozome v7.0 (chr-ID sc affold00057; pos 520696 to 521181)
caagaaattgaagaagaaagatctggacaggtttttatcacatgattttgcagcaagtgattacattttggattttgtttataaggatgtgcatgctatgttcagtttatatgctctgtatatgttttttgtttttttctttacttcagtttcttctctatagtatttttacaacacgttcatccttttgttaatttgtttcattaatgcctgtctcttttgtttctttttcttctcaacacaataaaatgtaactaaaatgggcatgcgcatgactgatgttacagttgagaagcacatttcagtgcatttcagacaaagaatggttatttgctgttttaaaggtttggttatttggaattacaatttagttttgcagttgtatttttcgtcattttttagccatgtatacggtccatcctttgaataaaatcatgtattgatggcgttttttctattgcaaggttggaggatctagtaaagcag

SEQ ID NO: 79362 - DNA, 597 bp, Citrus sinensis
  Intron number 2 from transcript orange1.1g011117m (locus o range1.1g011117m.g) derived from phytozome v7.0 (chr-ID sc affold00083; pos 516778 to 517374)
tgattacccaattgctatctacgggcgcttggtatgttccaattattgtttcttgcatctgtttgtttttgttttggatagagtatggactatatatttaactattacataacgtttggttggacatgtgttcattaaaaatgcacttctgttcaaaagagggtaaccggtaacggagcaatgtatttgatttttctctataaagtcggcaatgcttccttgattgttatggccaaatgtcttcttcttggctaaatggtgcggaatggaaggatattttaataagaagtgcaatgaggtggagtttgtttgtgcatgtttgagcatccataggagatgtaggaactttatgatatactatttttgtttgttgatgctaagttgtaatccatatgtgcgattgcatatattgccttgcagagaggatgcattgctcaaggttttgaaaaagtgcaaatttgtttgctttaattttatcttttgtatgggcgagtgggtcagcttagctgcctgaacatcagctgctagcaatgttttagtatatctgtgtggatttctgtacactaacttttctttacttgcagaatccctgtgaac

SEQ ID NO: 79363 - DNA, 556 bp, Citrus sinensis
  Intron number 3 from transcript orange1.1g028109m (locus o range1.1g027730m.g) derived from phytozome v7.0 (chr-ID sc affold00483; pos 104440 to 104995)
ttgattccttccgcttctgctctcttggctgcaaggtaaccttaatcacaactaatttcaatgttgtcccatttttcttgtttggttgatgagcaagtgtgggaaaagaaaacaataatgttcagttaacacattgtttgtttggttggaatggagttgacttctcataatgaattaattaccccctctaatttttttattccttaatgactaagtagcttacagaaggtggagtacttgagaattcgatttcaaatttcaattacccctttgattattgattgattaattaatttgattgctttaattttttttattccttgacgactgttcatctggtcctggatgctggattttctttaagtccgagaaagttgttacaccaataattagattgattatgaagtgtgaaacatgaacacccctttcaaatttcaattacctatttttttgtgaatttgcacatttttataaaatttctattttcaaaatattgatgttattatagattgttggaacatcaaagaattttcaaaagaggaagaaccggctagca

SEQ ID NO: 79364 - DNA, 790 bp, Citrus sinensis
  Intron number 1 from transcript orange1.1g009764m (locus o range1.1g009764m.g) derived from phytozome v7.0 (chr-ID sc affold00005; pos 1513341 to 1514130)
atagctgggtttcggaatcattactttcttggtgagttttttttttttttcgtttacttttaagtgtttcgatcgttctcaacaatgtaactctccatttagtggcgcaatgtgtgtgttttgtattcttaatgaaactatccatggtgtagcatatcttatggtatattgaaactcgcgtttcattaatttaaatgttcatttttactctttagagctatgtttttaatcctagcctatatttgaaattgaggtgtcgtgacttttaagttacaactgttgtggtgaaaaaactcataaaaattggtagttgttataaaaatgacttttaagtaatagctttgacaaaaatagtaaagatattatggatttttcgtcatataaatgtagaataaaatcaactcagctcaaattacagcagcaagtgtttatcaaactcttcaatgttgtagcttctaagctacggctgtctaattatattaccaaataaaactttagtctaaggaattttcccttggataaaccatctagagattcaatgatcatggactcgtatgtctgcttgtaattttgttaggggatttaatcaatttttttattttttattcatttatttattttgcgtttatatctggtaaaaacacattaaactccttgtgatcaatgatcattagtcttttccaaattctgatttcttttctgtaacgagttatataaatccctttgacattgctatttcatcaagtgtaatgatgtttgtacttactaatttctgcttgatccatgtaag

SEQ ID NO: 79365 - DNA, 897 bp, Citrus sinensis
  Intron number 2 from transcript orange1.1g033392m (locus o range1.1g033375m.g) derived from phytozome v7.0 (chr-ID sc affold00106; pos 420590 to 421486 reverse strand)
gctggtcagtgactggtttcttggcttcttatccatgcccatttatcgaacatcatcgttttgttattctatcttcatttaaccatatttaagtagtctttttgagattgttctctagttattttttccttctttttatagttaagtaaatggggttgtgttagtcgaaatctatttgcatttgcattatttaattgaaaatttgatgcttttgagtagtgatagaccgtggaggattggaggtggatgatggtgagatggtggttctaggatgggtatttaggtcgttttaatggtgaatttggcaatcagttgtatttaggattcatattttcgcaacgttttctcaacatggacttgcagttggaatttggtggcttatgaggccaagcttggttcattagccattgcttttagttcttaagggtgtttgtaggagtgttgtggcagaggtgtacaattttcagcgtcagtgcctccccaaatttcgtatggttgaggcacttttaactttagagtgtacgtatattatgagaaacactttaactttagactgtacaaaatttatatcatattaggatcagatgacacatggagcttcttaaccgagctcgtagcagagaatggaagggctagtgttgtaggtgttagcattttatggctttttctgttaatgaataaactttttacaataagctgcctttgcagcttattgttgtcagaatgagagaacttttaagtgtgtcactgctccctttggtctgtgttgtgtttcttgcatcatgcgggattgcctttgcaatttttagtaccatggtaaagaacttgactaattttttgcgaaccgccattgtggaaatagtacattcaagaagaaagctccaaaagccattaagg

SEQ ID NO: 79366 - DNA, 577 bp, Citrus sinensis
  Intron number 1 from transcript orange1.1g014022m (locus o range1.1g014022m.g) derived from phytozome v7.0 (chr-ID sc affold00017; pos 1193808 to 1194384)
gtttgacaggttgatttttttttttttttcacatttttgtttttgcacgagctattgttttagctgcaatttatgtctataaacaagaaagttaagttttgttttctctcttgaagtctgattttagattcaaatggaccaatatcgacatgtttaagtgtctgtaagatgataatagaagttgtcaattttgtctcttggttatataaatgttgccctaattattcaaagcagacgctctggttcggtccttcaaactaaatttgcgattaattaatgatatgaatgggtaatattttcttgtaaagttttctttcttttcttttctccttttttagggtcttcaactttcttcttgttctttcttgtttcatcattttttttttgtgatcaacattactacacattgatttccgttttctaacagttacttgactctgtgcagaaaactcgaatagtatctttcggtcaattgtaaggaaccagtcaagcttacctcgctgcacttctcgtaaaagtgttttgccatctatcttccccacacacagttcttctactgcaggcacagaaccaagga

SEQ ID NO: 79367 - DNA, 870 bp, Citrus sinensis
  Intron number 1 from transcript orange1.1g014555m (locus o range1.1g014555m.g) derived from phytozome v7.0 (chr-ID sc affold00050; pos 350644 to 351513 reverse strand)
tctccgcactcatcttctctttctctcttcgaccggtaagtttcaatttttataattatatatataaaatttccaattattcaattcaatcaggagtgcttttagcgattcaagattcaatattagtacttcgttcttatatgcacataaaaaatttgggtttctttatctttgtattaatgctgcagttgactcgagaaattggattttgtgatgttggattcttttaaaggacaagtgtttgtttaaagtttcaatttttagcacaggatctgcatagatatttatttatttatgtgtaaagcaagtatagtacttgtagcattcgaagcaatctgttggattgatcgcttatgtcaatgaatttacttgaaaattcctgaacaaggaaactgctctttctcttgctttttcaatttgagtcaataaagtataatttgtaacccgaggatgtattgtgtctgacatggccatcaagtgtttagaatatttactagcctaagttgggaaatgtagtctgtattttggggtttgccgtgtgattttgaaacagaataaaccaaaggagaaagaggagataaggttttgttttggtgtctcaatgaatttattgtgtgtcatttgtgaatttacctattcaaatttgtacaagttgactaaattttttcccatccaattagtgagatgaagggttaccttgagcaaatttataagcttcacgtgtgtaagacctgaccatatctgtaatacagccaaaaatttatcgtccaatcaatgtaaacctcagcaagtttttggcttgtatttttcttcttgtttaacattagatgaattttcattttcaggagttgaatattcctgattgaaatc

SEQ ID NO: 79368 - DNA, 527 bp, Citrus sinensis
  Intron number 2 from transcript orange1.1g004544m (locus o range1.1g003250m.g) derived from phytozome v7.0 (chr-ID sc affold00014; pos 1684922 to 1685448)
aagcagcaattgcgtacagtgagtgtattctcttctctctctattctaatgttttcttgttttcctggtgtgcaaatgcagaatgtgcttccacataattgcaattgggttgattatttggtgtttgttgcctagccatctaaattttacatttggttctggggtgacacaatattattgatcacactggaagatcagtctttaaagcaaatatatgcataatcttgggaattatatgattgcttcacttaatttccttgcacagttctttgcaaccaagttaacccctttgccttttgctttggattgtttgtccttctttttctctttttctttttaaattattttttctgtttcacatttgacatttcaagaatattcatagctcattgcagtttttcaggctaccgacttagtgttgctatttgccctgctaaaaaatcaagtgcttccttttgttcttttgtcaatttttgatctgacttctatttcttaattgatatttctgcaggcacctgcgactactg

SEQ ID NO: 79369 - DNA, 767 bp, Citrus sinensis
  Intron number 1 from transcript orange1.1g027746m (locus o range1.1g027754m.g) derived from phytozome v7.0 (chr-ID sc affold00208; pos 176597 to 177363)
tcagccgtggggtgctttagcttctgtcaccgccggtaatcttatctcagcctgtttctctctgtttaatgttgtttcttatgcaatttacagaattgaattcactttttcgcatatgggttagatatatattaacagtaaaattaatcctaaatcaggttttatcttgtagtatgtaaatttcatgtaaatttttcagctttacgattgtcatatatttaaagatctaaattttgtttcgagattatatgacttttagattgttttgttgcattttcatttttgttttgttttaaattttttgctttgtgtataggatatcgattaagcaaggtaaggttcattatcgactgattagatacatccgttttaataagatcatctcattttgttaaactttgcttgaacaaatatctaaatagtgtcgaaagaagtttactgggaaaagaatttgttaagccacccaaatacaatttctcaccatgtctggctttgtatgatttaatcagtggacatggattttgatcttgtgttgctttgttgctggcaggtggctaatttaacttcatattaaactttctcaattattagttgaattatttagatttgaagcatcaagttcttaacaaacaccattttaataattgatcaaacaataaatcttcaaggaccaagtattatgaccacggtgataatgtttctgacatgcaggcaacatgttgtgatagacagtgaaatcaacagaagaaaacaaaacgtaggagaaa

SEQ ID NO: 79370 - DNA, 920 bp, Citrus sinensis
  Intron number 1 from transcript orange1.1g014965m (locus o range1.1g013577m.g) derived from phytozome v7.0 (chr-ID sc affold00003; pos 1298293 to 1299212)
tgtcacacttgttgcacggttttttcgttttgcaggtatttacatgttcactctctttttatttttctgctttttaagtaattctacaactaaaaatcagttcaaaagctggtagctttattgatcggcatcgctcgtatgctgctaaagttttctgtttttttcttaattggttttttttttccggttcttatgttaactgtgttttttttggggcgaaaaaaatatattattattctcttttaaaaaaaaaaaatcttcagaagtaacttaatacttaggtttatgtttgtggtcgtgtaattctttgtgtctttgaatgtaagcaaaggtcagttgtttgtctaatctgggtatttgggcttttgttgatttaaataaaagttttgatttttagtgaaaaatgggaacatggtaagttgagggtttgaacgggatttttggtatgattgtttattcaatcaaatggaacatttgttatgattcgatgaatttagtttcttgtagaggattatgtgtcggaagcacatgcttgcttggttcatttcgtgttttcaggaatagctgcaaatttattgatttcgtttcaaaatctttgttcttgcatgtgtgtatatatttgacaatggggatgtgagattgtgattatgccacagagttaatacattaccgcataggattaccttgtgaagacattgaaaagggggaagttctcgatttctttcttttatcatcttagattgtggctagtagagtagtaacattgttttgtcaatagtgagcaccattttccggtttcatgttgttgcaatagatgtttctctggatttgtgagttaatgtttcttaatagacctcttttcttgtaacaatgtattgaatacagcaggtcctgttttgcttccacaaggatctgtgtct

SEQ ID NO: 79371 - DNA, 961 bp, Citrus sinensis
  Intron number 1 from transcript orange1.1g028931m (locus o range1.1g028931m.g) derived from phytozome v7.0 (chr-ID sc affold00011; pos 1611345 to 1612305)
cggtttcctaattacagatttcacttgtatttcaagtttgcttagttatcttttgctgtttttctaatgagtaacgtcccgttctttgtttttttttaattttttttgttattcattcccaaaaaaaagaaagagtataaatatagaagcaggtcggaagctaacttcgattgaatataattgtttgcgggtgctgatttgattgactcctttttgtaaattttgtccttgataatctgcacttaacatgtttgatgaaaaacctgaaagaactgcctaggtcaatgccaaccaacgagtcttcattaaattcataagacagatttaattgtgccaagtggttactcaaagtaaaacactggattcacgaataagagaaaagacaaaaactagagttattggagaaattgaaccgaggctttttttcttgctatatttacattttctttaagttcagttataacctaaggtctattcaaattaaccataattacttcctattgcctgatgtgatattcaatggtcgtgacaggaatgatcttgctcccaacattaattccaatctaagcaatgtttgttctattaaggttgagtgctaccttcgaggttgttgtgcaggacggggacttgagctgttttgaaccatccaagtactcctctctatgaccacggccatccttgctgattttctccaggtcagttgtcttacttttccgggcaattatagctgtaacttgttgttagactctcttgttttacgaacaatttacaatatgaaatgaaaatcttagttgcgtcataagtaatcatctacatgccaatgcatacctatgtatctttttgtgatggggtagtacatgttgctagtaatgtataccacatataattatgttcctctgcaattaattatgtgcattattatgcagattttaactgagggccaagtactactgcaattgaa

SEQ ID NO: 79372 - DNA, 390 bp, Citrus sinensis
  Intron number 1 from transcript orange1.1g005175m (locus o range1.1g004911m.g) derived from phytozome v7.0 (chr-ID sc affold00003; pos 4211450 to 4211839 reverse strand)
tgacctgcgtcgttctgcttcaagtcttgtagctggtgagttcgtttttattttaatctcttccgtaactttctatataatttgctaatgtgtatgcctgtgtcttgtttttctttttcttttaatcatgttttggttgctaagaaaatgaatgagagaaaaatagaagtagttgtagactttgattagaagaataagaaaaagataagaaggttgctatgttgattgtgcgcggatctatactgatgtttctcttggttcttttcgttttgttgtatgcaaatacttcgatttacaggatcgttgatttttttattttttatttttgatttttcagttgattgaagcatgtgttgtggcccagataaatcagaatctaacaccgaagat

SEQ ID NO: 79373 - DNA, 986 bp, Citrus sinensis
  Intron number 1 from transcript orange1.1g048400m (locus o range1.1g048400m.g) derived from phytozome v7.0 (chr-ID sc affold00056; pos 33215 to 34200 reverse strand)
ttaagctttggcttaagagagaagatttacaacctgtaaagttcttttattccttttctttttctttatacgtatatactttttatttatttataaaatgctataacatgctgcttgaaatcttcagtgttacctcatcctatttgtttttactataattatgagcatatgttttttgaatttgtgacttttatttaattttaattcttgttttgcttaattaaatggtccgggagtatttatttctcagtaattaatgatttttcaatttccttaacaactttaagcttcatctaagtttaaaagaatttgctaatccagaaatgagagttatttttgtttttttaaatatccgttcgtatttcttaaaataaatctttagttcactgagcttcagtattttcagtatgattaattccgctgtctctatttttccaatctcttaacattcttgtttgactcatgcattggctcttttttttttttttcccttcagaaaaaatctacgtcctctttagttgtttgctctcggatacttgattaatgagctcctaatatttgatggagtggggtcatttgtttttgtgacttggaattgtcagaaatacacttaaattgatattattttttattagcaattcttttttgaatattatctcccctaaatatatgctaaaatgaacaatatattccaagtttaatccaaacagtaaattcaaactatatgaatttttgggtatattatatttaaacatttgatgttctttaaaattagaatttcaatctaagtcaaggtttgtgtgtttagatgcaaacaaagcttatctgtgagaatgtggtcatcgctttgattaatcaattagcagcactttctcattcaaattgatctgttgaggagaaaatatttatgttatcaaattaatttatggatgtgacgaattggatttataggttttctcattcaagctccgtggagcatataacat

SEQ ID NO: 79374 - DNA, 544 bp, Citrus sinensis
  Intron number 2 from transcript orange1.1g020208m (locus o range1.1g020208m.g) derived from phytozome v7.0 (chr-ID sc affold00023; pos 264518 to 265061)
ttcttagttcaggtacatttgttctaccgtgtgcataaattactgtagaaacagcagaaatgaaactaaattgagtcattggcataattttattatgatattacaggtaagccaatataacatcttcatgaaattattatgtcctaaggcctctaaagtctaaactattttaggtggcatacacataaatgacaaatatagctttccatcaagttccaaaatatcctcaatgacataaaagaaaaggtcaatcgtaataattattagatattactaaagcaaagcatcaaaaacttacaaattcattcattgatattgcattagaaattaaacacaaattatagagactgtgtcttacagaagtaacatccaaagacgcatttggtttttgaatcatcgcaccccaaattttgagatgtaactttcatcaagtttttccatctcatttctgcactttatttcttctttacgattgctgatacacttcattttctgtcttgtacacacagttcataggcacagttcttgctggaaccatcaacct

SEQ ID NO: 79375 - DNA, 743 bp, Citrus sinensis
  Intron number 1 from transcript orange1.1g046759m (locus o range1.1g046759m.g) derived from phytozome v7.0 (chr-ID sc affold00003; pos 3233811 to 3234553 reverse strand)
ttggattagccgacgccagaatcttggaagcaagagtgggactaaatatcaccacttgaagattacgtcaggtaacagcagggcttctccaacaagtgagcagaccaaaacagcacgagctccaccaaatgttgcttcaaaaacacgtaagcaaaactttcttctttattcagccttctaaacttttttttccttaaatatatttattttatttattctatgagcatgccaatagcaacactggaaactaaatccccaccctcccaaaattttgtttgcgggatttgcgaacattttttacaacctgagagattttacccattgaatcaattgatactcacaacctactgatttatttataatgcatagagctaatcatttctgtgatctcatctgtgaattgttcatttcttaggtagatatataccaattaatgcttctcgcatctgcttcacttggtttcatgatttacaactagctgtgataatttttaagttgaatgaattcctggccccttgcagaataatatctacctatggatcctgttatttaactctaatttgatttgctaacttgttcatttcttcatatataggctcagtccttaataaccctaaagctactgagctgccttcttaaggcaaacttctcgcaggacttattgctgctggaggatttgaagaaggttcttgtttaagtaggtattagtcctttttatatctcatttacaaactcataaatta

SEQ ID NO: 79376 - DNA, 831 bp, Citrus sinensis
  Intron number 1 from transcript orange1.1g010970m (locus o range1.1g010970m.g) derived from phytozome v7.0 (chr-ID sc affold00298; pos 18864 to 19694)
ttgtggaataggttgtgcaaagaggctaacattttgtgggtcattctaggtttttgtcactttattcttatggagaattcctatgcttttggtaaaggaaaaatggccaaagctctttggatctgtgctgtggcagctctgtttcgggtaacatggtaggaaagaaatcttcttattttttagggaaaaatgcagataatattgaggaattgtgggatggagtccatcttctactttgctttgggtttcagtttctaaggagttccaagattcatcttttttctccattcatctaagttgggagagtgttttgagatagatgtctaggctggtctagtattgtaaagagatgtttggtatattctgtatagcactgaatagttttcattttttgctttttccgtggacagctggttcactccttgtaatgattcttcatcattaatataatttatggtttcttatccaaaaaaaaaaagaaaaatcgtttctcttttgcgcatttgtaatgagtcattatgttttaaatatgatgtttactaaaagaagaatgttatgccacctttgctttgccgatatagggaaaatttcatgttttgagagtatacctgttacatttctatctgttcttccaatgcacatgtatatttccttcacacatacttcccaagcattatatagcaaaacatttgagattttatttctgtatatagtctttcaatgcacttatatatttccttcacatattcattttgcatatcttgtgacaaaatgttgaacatgtttctcttttcagaaaattttcattcagagatctcgcacaaataaaat

SEQ ID NO: 79377 - DNA, 709 bp, Citrus sinensis
  Intron number 1 from transcript orange1.1g012676m (locus o range1.1g012694m.g) derived from phytozome v7.0 (chr-ID sc affold00003; pos 1355303 to 1356011 reverse strand)
ttgtttcgcttaatctttcgcgcaacctcttggaggttaacagatgattttttttaaattttttaatttcatttttaaagcggtgagcgagcttgtgattcaatatcttctgtaatgtttgtactgctagaagctttagttgggctgggtcaattaactatcattacttcgtagtggtttgattgccatgagtgatgcttgaatttattgtgaattcaaattgctgcttagtttcctttattggatattcgtctataatttcaaatgttgacatgaaaaatcattgttgaattcattttatgttttgatacatgatagtgtgacattaatgatttcttgtatttctagttagaactcgttaagtttgtcctgctgttctcttggagcttatttaattgattacaattagctgaagtccatattatctgttcatcagtcagatatctcacttaaggtggatgcttttcctgtataaaatcttgttttggttgatgaaatatttctttgttgtagagcactttaagaacatgttggtcatttgcaatataaatcagattcttctgaaccatgtatgaattgtgatatccttcatttttcactgacgaaggaactgtgtttctttgatgataagagaaacatcttagcaagtggaatttgtagcatctgttgacatggatcctttttaacttatggtttgtttaaacaggcc

SEQ ID NO: 79378 - DNA, 238 bp, Citrus sinensis
  Intron number 1 from transcript orange1.1g027219m (locus o range1.1g027192m.g) derived from phytozome v7.0 (chr-ID sc affold00003; pos 3770866 to 3771103 reverse strand)
tgattgattcatttttgaggttgcggccttgtacggtcagtttctggaaacagcgccatgattttaggtcttcttaggtttgatttcaaaattgattgtttgtaaaatgttatgaataaataattcaattggtttgtgagcaccttgatttttttttttttttcaactttccaatttaaacctgatcttatgttgtaacccagccgaaacggattggaattttccagttggttgcggt

SEQ ID NO: 79379 - DNA, 399 bp, Citrus sinensis
  Intron number 1 from transcript orange1.1g001954m (locus o range1.1g001954m.g) derived from phytozome v7.0 (chr-ID sc affold00011; pos 54319 to 54717)
actgggtttggtttggtttggtttgttggttggtggtgagtcttcaagacttcttctttttggtgcttttaagattgtttgttcaagctatttggtgggtggttactctcttgaattttttttgtatagcaataaattttgataggtatccatccttcacttggatagtgatttcactacccttttcaatgtttattccttctctttgtatatatgttcttgttttttgtttttttctagatggtgctattctctttctatagcagtctcatggttccaaatgtatctgtacaataaaaaaaattaatttttttatgctcttcttgtgttttcatcttcttgggcttattcatcaatcttttagctggattttgtaagtcttggatagggacaagccta

SEQ ID NO: 79380 - DNA, 748 bp, Citrus sinensis
  Intron number 1 from transcript orange1.1g020984m (locus o range1.1g011028m.g) derived from phytozome v7.0 (chr-ID sc affold00162; pos 13243 to 13990 reverse strand)
gacatacctgtcttagcccgtgagtactcattaacctaaccttttttgtttcttttttttcctgctctctccttttgttctctttcactgttgttgaggctgtttctggtcgtgtttataatattatgaatggaaatgtgagtgacataatattttctattaatatttttgatgaggttataaaagttttcttaggctctaagccttgcattctgttattatctttctcattacttttatgagataaaaagactacattcaaaagtttttgctagagtcaagaattattagaataaggtaacaactaaagaaataacttttattaggtatgtttgatttctgcgaaagtcttagtttgaccaatgcttaggccttcttaggattgatggaacttaaaaatcctgttatcctctcttttgtcatctataaggaaaatgattacattcgatgaaagtttaaattactggaagaccacgctatgaatttaggtggtaggttttgaagaagagttacattgtttatgattcctcttttatcaatttgttttagtttttattggtttgcctacttgtggtcttttcagtgactgcttcagttcagggtttgtggatgcaacagtcaaatttagttcatcatatttctactttattatgactgtcgactttctagttcattttttttaataataataattttaactttttggttcaaagggcataacgttttgattgcaggacatcgactcttc

SEQ ID NO: 79381 - DNA, 488 bp, Citrus sinensis
  Intron number 1 from transcript orange1.1g018923m (locus o range1.1g018923m.g) derived from phytozome v7.0 (chr-ID sc affold00048; pos 174000 to 174487)
aacgaagctccatttatcgaggcgtcactaggcaagtatatgtaccactttaaaatttaatttgatttaggttctgtgcatgcttcgtaattttttttgttgtcgtagctttatgttcgttatgataagcaaggctcattacatcctttggtttgactggttctcctcatgctgtcgagaatagaggagaagttaaatgaggtgttttgtgaatgtttcaggcatcgttggacgggtagatacgaagctcatttgtgggacaagaattgttggaatgaatcacaaaataagaaaggaagacaaggttttcattttcttgcttgaatcttctcttttcataaggatattcttatgtttcttttgagatcggtatgtagcaattttattgataatagttttgctttctgttttgggttcgttttggtggtggtttcgctggccattaattctactcaaatgcagtctatctcggtaagtaagttcatcgc

SEQ ID NO: 79382 - DNA, 565 bp, Citrus sinensis
  Intron number 1 from transcript orange1.1g002290m (locus o range1.1g002290m.g) derived from phytozome v7.0 (chr-ID sc affold00773; pos 7183 to 7747)
agagacggcttgaagccagtgcaccgtcggattctgtgagcttcattcttttttagagctttggaatttatttatttatttatattattggcgaactagagtgcctttagaagtgttttggtatggctttattcccttctcatctatcaagcgtttctccataaagcatttctgtctatttgagctagaaaactaataagaaatatttatttatttatctattcataatcgctttttaaaatgcataaagaaacttctgattttatgaacaaagataaatttgttcacgtaacctgttgggttggcaataatcataaatatcaggagaaaaagaaagaaaaactacaatggtctctgctcaatgaagtgtacctgattagttgttttagacaaagttagcaaacacatgccttgctgaaatattttcttttgctctctcttcttactgtgccagagaaaggccatatgatgttactataaatttcttttacttaattctctctttttttttttctgattaacatgttatttcttttgattggaatttttttgcatcagatttgca

SEQ ID NO: 79383 - DNA, 554 bp, Citrus sinensis
  Intron number 1 from transcript orange1.1g038698m (locus o range1.1g038698m.g) derived from phytozome v7.0 (chr-ID sc affold00484; pos 33347 to 33900)
tggagtatgttactgaacttgaataacctctgcatatgtcatatgttaattattcagagaaaatttatttatttatttttttaattgaccgctagtaacatgactgtgtgctttcagttgaatattagcaatcttgataggtctggatcactttgagttaccagggtcattcgtgtaatatgtagaatagtgccatatggtggatgcattatcatcctctagataatttctttctatacatggaaatacctgggaagtacactgctcaactggtctatgctgagaactattgtagctttatgtgtttgtccctaacagtttggattgttatgtatcattttcttcttgcatctttctctttatttgtttatatttctaaacatgtaatggtattattgtttgttcttcctaattaggctcagacagtatattatcaaatcgcattcaagcattgcttcttgtctaattaatttaagtttgtaatattctcctaaactgataatgtcaattattttgtaggttgcaagctggggtgcataccttttaaaaagaaa

SEQ ID NO: 79384 - DNA, 888 bp, Citrus sinensis
  Intron number 1 from transcript orange1.1g042959m (locus o range1.1g042959m.g) derived from phytozome v7.0 (chr-ID sc affold00049; pos 314375 to 315262 reverse strand)
aggagccgccgaagcgacggttccgttacactccagtaagttgataatttattaatttatctaggggtttaagcagggtttttaaatttttcttttccttttttttttggggtaatattttctgagaaagttggttgcttggcttttttctagatgactctcgaaattttagtttgattttttttgcttgctttctttcctttttaattatttttttggattattaattttttaattatgtctttctttttaattattaatttactcatctatttacctaaatactgggttctgcttgatgttggattatttgtttttttttgagggggggggggggtgtttgtgttgtttattatttttaaatttcggtatattttcactttccagtgcttactagtactctagtataactggtttgtgttcaaaacttctactcaaaggtggatggttgatttaagtttgcagtgcaatgatatcatttcttgagttgtatgtagtacatctttttacatagcttaatttgataaatctggtttagaagtttcttgcaaaggttagaagtgtggaagatgtgatgatgtgagacgctccttggttcagtggctaggagatagtgttctcatgtgggaggttctaaattagtattgtgggtctgctggggttgtgtttgtcaatgctcgggaagtgttttccaaacaccccccccccttcctcgaagtaagggatcatgaaagtaggaagaattttaacatgttgatatcatttcgtaccaattcattgacattatatttttgggatgtttccattttgtttgttgtcttgagcattgattgatcactgtcgtattgtgcaggttgctgttctagaggaacagaagaaggctggttt

SEQ ID NO: 79385 - DNA, 611 bp, Citrus sinensis
  Intron number 1 from transcript orange1.1g000884m (locus o range1.1g000884m.g) derived from phytozome v7.0 (chr-ID sc affold00014; pos 1055397 to 1056007)
gactgctcgagatctctgagcgagtttacggttcgtttcgtttcactcgatatgtgtattatcttattgattttatcttgttttttttaatcaaatttacgaggcagtttgtgtacttcttgtaagtcgtgtttggcgaaatgaaaattagagtttcttgggcaggatttgagtatttattgaagatatcagcttatagttggcgctgccgaatgcagccttaatgatttaggaaaataaatgaatctttcttgttctaataattcggggctactgaatgtaattaattacgaatttcaaattttggttaatggaggcttcggtttatttaatttattttctaatgaaacagtttctttgttttgcgcaaccaataggacatgtaaaaagcattctgttaagtatattaggaaactgtttataagttacgagggtttataactattattagccagcttaaatttggttaatgtccatgtgaggtactaggtgaatttgaagaagaggaggaaatcttctaataaacagtttcaaaaatgttttaagtgcagtggtgactaatgcttgcttattttgagtgcatatagttttcaattgctgcttcacgactg

SEQ ID NO: 79386 - DNA, 896 bp, Citrus sinensis
  Intron number 1 from transcript orange1.1g043019m (locus o range1.1g043019m.g) derived from phytozome v7.0 (chr-ID sc affold00094; pos 58047 to 58942 reverse strand)
gctacatacggtttcagttttggtatatcccttatgacttataaagattctgctttgtattatttcttagtattattaatttttttcctttctttttgcctgaacaaatctagccacttgacttgtgtttcttcggttcatagtcttcccagttctcaatacttgttaatgttatcgggatagatggatgagaactgaacgataatgcccattgaacgtggttgtaagagtatgctctaactatttcaagtgaataaataaaagaaaggaaaagaaaaaaacaacttgattcaagggtaatattgagtaacaatggtttgctaatgcatgacctacttgtcacttgtttccgttattctgttttgaagctttttcttccctcgtcgtttcttctttaggtgaaggcaaaggaaaagagtgttatgggctttcgatctattttagtctccattaacaaaatctggttcctctttgattccactggaccctgttgcattttctcctatttcgaatgtctttctatttaataaatttttcccagtttgtaatttgatttaattctttttcctgttcagttttttatttaattattttctgtgtgtacagatgtaatatgtatggatatatgcccaccatatgtacccgcttgtgtgtgtgtgtgtgtgtgtgtgtgtgtgtgtgtgtaagaaagatccatagaagcctgacctgatttattggagtatggcttctgaaaaggcaccaggactgtttgtatggcaacaatgtttgctttagttaaaactaaaaaatattactaaactgcacatgaacctcagcactctgtctaagctctgatattgttttcaatatattgtgcagctacaacgttaactggtctgcattttgccacaacc

SEQ ID NO: 79387 - DNA, 550 bp, Citrus sinensis
  Intron number 3 from transcript orange1.1g026703m (locus o range1.1g021425m.g) derived from phytozome v7.0 (chr-ID sc affold00289; pos 57977 to 58526)
acaagcattttaaggacgatcttttggtgaatcctgtgagtttcttctttttttgatgttgcttttggtttttggatatggagcctttacttctaattataaggatcattttaaatataatggagtagtagctagagcaaaagcattgcagtataactggagtgatttcttgaggttttcttttatccagctgcaagttatgttttgttcaaatgttttcttttgtaatcgaccttgatatttgggttgtttaactcatcttgaatttgcaattgtcaacctttttgtctaggggtgaaatttcgtaggagaatgttgatataaatttcattgtcgttcatattaggaataagattattcgagtctggtgctttgcatcaataggtcggatggtagaaacacagtcactttgacatcttaagtttatggccatctaatatatactccgtgttgcattaatcttgcgaatgtttggcaaatgcttcggatttctaaatgtttctgtggctagtcagtcagaaatcacgaggaggctggataaatccacaat

SEQ ID NO: 79388 - DNA, 975 bp, Citrus sinensis
  Intron number 4 from transcript orange1.1g035419m (locus o range1.1g035419m.g) derived from phytozome v7.0 (chr-ID sc affold01137; pos 5389 to 6363 reverse strand)
aagtgtattcttactaattcttagaattcttccaggtaattgatgcaaacttttatacataaactccttttgggtaatgtttagaaatgcaattctttatgcctttggccgtaccattaaggaactaagcttgctaggttatgtctgttttaatgaaaaatgagaaaattagaaaaaaaataatatttattatgttaaagatgttgatcttggtgttcttcacaacatttttaaggtttttgctgatccagaatttccaaatgtcgttttaagagttcgatagttattgtgtgtctaattttccaagccatttcaatgttatttagtgtataattttccaagccacttcaatgtctagtgaaatatcagttacataaacatattttaagtgtgactactgcctgtaatcattgtaaattgtagtgatggatgttgatatttgccctattatttatatgtttggcttaatcttgatggatgctttatgtaacactaagttattataaagtaccccactaaattgatatatgatatctgagaatattcattatgtagtagtctattaattttgcttgtggtatgttagtaaatgagaggaaatatttgaattccttgaagtaattagcgccaatacactgccaactcccatcatatgaaagggttaagttttatatatactatagcatttgactcttgttcttaattcatgatattaatttaagtgtgtacttgcattagagatgattattcttcctgttctgtttcagctcaggtgtactatcaatggtagtgtattttgttttgtgattttttctacatattctctactactagatggagcttagttaattatgtgattgctacaaaatgaattgtaacaaataaataggatttgttttcagttttgtaactaatcaagtgtaattgggaaaatttgcagctcattcaagtttgggtgaccatccggcaatcaaa

SEQ ID NO: 79389 - DNA, 810 bp, Citrus sinensis
  Intron number 2 from transcript orange1.1g035419m (locus o range1.1g035419m.g) derived from phytozome v7.0 (chr-ID sc affold01137; pos 6755 to 7564 reverse strand)
ctttgaagaggtcataaacagccaatcaggtatcgattttattttaaataagagcaattgtgctagctattgaaatgatatatggtgtagagttcaagattgaattttgtcaatggccgtacaaatatagtgtagctagattttagttatatttttataaaaaataacaactatatttattattataggttgtggggtttcagtcttgattgtataatgcttgctcttaacttttaggatttttctactgttgagcttcgtttgtgcttgtgcatagaagattgggttgttgtccattgtttctttttattgatgtagagtggtagtgcatgcaatttcttctttatgggttttgtaaaggtagtccaatggagaaaatttataaatggattgtttaataagttttcaaaaatatttttataaattttggtaactaaagtgagtcaaaaagaaatagagcaatctgaagtaatgccacttgtgagtagcttttgattttgtttttggaaagcattcttgtgatgtttgtgtcaattttttgaagaaatttaaaatttatccatataatgattttgatgtaaaagtatatagaaaaagatgcatcatcattacatggctctttatactagctacctaattcctttaccaacccactctcccaatattttccatcaaaatcttcctccactttgcggcaacagtgcacaaatttttcaaggtcttaatctttacttgtttaattttgcgtcttatattatatttagatcaaaataacatgtctgagaattgtatattgatttgttatagata

SEQ ID NO: 79390 - DNA, 541 bp, Citrus sinensis
  Intron number 2 from transcript orange1.1g023541m (locus o range1.1g023541m.g) derived from phytozome v7.0 (chr-ID sc affold00065; pos 467803 to 468343 reverse strand)
ttccgagggataagaacataacgggtatgttacttcgatgccctttgccgcattgcgcagataattctgattattttgttttccttgttaattgactatgttttgactgattctgtggtaagcacttttatatgaagtgcttctctggcctagacttaccgttgtttatgactttaggtctcaaattatatttagtaggaatttaaaaacaaaattttggatttctggtggcctgcagcagcttaaagggccattttttttcaactacaaatactaattgcccatggagcgatccaataatattaagagaatgctatttcattgattttggtttcacttcgtactagtgtgaacgccaccaatttcctctcattttctttattgtctttggtaatataaagataagctagaaaaaattataaagcaattcaaaattcaaaaactgtgctatactggacaaatgacaagaataattttttgtttctatttttctttaattcagatatgtttgtgatgaactctattttccacagctgaagtt

SEQ ID NO: 79391 - DNA, 447 bp, Citrus sinensis
  Intron number 2 from transcript orange1.1g022729m (locus o range1.1g022702m.g) derived from phytozome v7.0 (chr-ID sc affold00003; pos 2816571 to 2817017 reverse strand)
cagaggtttgtcttgaattccattgatttatttttgaaatattactagcttgttagtttgtggggtgcagagtgatgaattagtgtatgttcttctaataattatatgcacgtttttccattgaatctgtagaataaagttggaaacatgtcctttttttaatggtttcataatttttgaccttttcatgtatcatgattttcagaaccttttaataaccagtggaggctttttcataaagctttcttttctccatcatcatttctttagctttttgatagatttattgggtaactgtttaaaggtaaattacgggtaatcatggctaaaacttttctcttgcataattgtcatagtttaaatttcttatatattttgtctattgggaaaattagaattatctctggtgacacacactttgaatggttaattttatgctggcagata

SEQ ID NO: 79392 - DNA, 592 bp, Citrus sinensis
  Intron number 4 from transcript orange1.1g037495m (locus o range1.1g037495m.g) derived from phytozome v7.0 (chr-ID sc affold00056; pos 175817 to 176408)
agctgctatcgacaacttttatattcagtgttcttgtaagatatactgttacatcttttgctacttgaatttatttttattttcttgcatatggttctgttttgcagtggttgaatgaacgaatctacttcttgcactttaaattaacaaacgtctcttctggttactttagaggcttgtagaaaaatggtttccacaaaaagtatttgaaataaaaattttcacatccgtgctcatctgctttttagttgatcacagagtcaaacctttttgactaaccagattatctaatgcaatatagaactgtcactttctgctttcaaattacagggtttttcgttttttcagtaatatttgttttggtggtaaattgatttccatttcatacttcagtacaagctcaatattgtgggcacaaaattaagttctgattgcaattgtattggtcatatagctgagcaccgtactaatatcatcaatcacctccttagttgttagcgcccaatttattattggcttattaactcaaattattttctgatttgctcttccattttcccttctgcttcatgccaggtaacatcggcactct

SEQ ID NO: 79393 - DNA, 783 bp, Citrus sinensis
  Intron number 1 from transcript orange1.1g025240m (locus o range1.1g025240m.g) derived from phytozome v7.0 (chr-ID sc affold00003; pos 3950690 to 3951472)
aacactggcaagctttttgagttttcgagttctgggtacgttctgggttttgttttctggttgcatgtgtgtgtttggtcgtacttgttgatgggttcttttcgcttttagatttgcccctttttcctaacaatgttacttgttcatgggttctcttcgcttttagattttttccattttttttaacaatgttcatgttcagttatgaatttgtaatatatatatttttaattttcttgtgtcgattttttttttaagtttactaagattatttgtggtttttttaaggaaaaattgcttaaatttttgtaagtgtttttggattttatttgagaaattcttatgttaataagaaaattgctgtaggaatttgcgatcttgtccaacaactatgaacaaattcagtctctttctctgtcttttgctgttttaaaatcattatacatgttaattaggtctccactgcaatagaaattgtcgtgtataagtgcccttcagtcagaactgttctattgataaactctactcgggaaattctcaaagttattttctatcatgtctatcgattgtcttttaattgatggtggggcatttctcggaggagatgatctgaattgttaatgttaaaatcaaagcaaaataatttgatcatagatcgtgtaaaaggactacaggatctcaaaaacaggcttgagaaaggtggctgcacacagaagaggaggaatttgtctcagtctttttaaagaagatttgacttattttatttcttcttatttttgtagt

SEQ ID NO: 79394 - DNA, 1049 bp, Citrus sinensis
  Intron number 1 from transcript orange1.1g030067m (locus o range1.1g029394m.g) derived from phytozome v7.0 (chr-ID sc affold00062; pos 189444 to 190492)
aaggatccgtttttatctgatatttctcctattttgtaagatacatgcagtttatttcagaatttaatgatccgtggcttgaattagtttgattagtttcatatatgtctcgattcatgagctatagattactgtgcctgattcttgctatatatatattaattatcctagcttcaaatttaggttttaacaagtattttatggataaaatttatttttaattactatttttccttgattttggtaagtttctttatcatgatctcattaaatagtggattcgtcttcttagtgcatttaattattttttttcaaaattcatacaagcttagatttagaggttgaagtttcatatactaattcaggtatcaagagcatcgagatgcaatttgaacaaatgaaggctgaaaagttatgttgacattgtatgtatagtcgtttcatattccgttgttaaagctttatgtagtagctataactccaattcgccggaaaatatctgaattttttctttttcttgttgcctctctatttttaccttttactcaagttaccattagtatgtaatttgtcttcattgttcatcacatgctgacattacaccattatgacttttaaatgtgcttgctcagttcattttttctcttgtcttgtataatgttaatcgactgaaactgtttcttttgggtgttagaaagagcattttacccttcaatattgttggttgagaaatcgatggcagctatgcatatttaggatttcagagagtcttattcatcattctcatcttgtagaaagagcatttaacccgtcaatattgttggctgagaaacggattgcagctatgcatatttagtcatcttgtcccctggcctacaagaacagtgatattaatggatatgtagaatttgttagtctattgttttatatctcttctaccagatagcgcaagtactttttacttggcatcaaaattttaacaagtgctttcgtttgttttttccttgatatcaggtcgattgagtgattgcctggcttgctctctgtgt

SEQ ID NO: 79395 - DNA, 728 bp, Citrus sinensis
  Intron number 2 from transcript orange1.1g039727m (locus o range1.1g039727m.g) derived from phytozome v7.0 (chr-ID sc affold00003; pos 1885861 to 1886588)
ataacgttcacggaaacatctatctggatccggtattgtcagctccatctctaaattttcgttgtttccgaatcatttgtaaattcgattctcgaatctcttgtatgcgtgcctttgctgtttgttttgtttgtttacttgagcattaacttagaaccgattgataaattttggtttaatctgttttacaactttaactgattttgtatgacatttttgagtttgaatttgattttaatattttgatttatgattttcttcttgagtccggatcttctttaagaattgttgacgcaacttaaatttgaaagtgtgaacaaaacttagaaaagaagtaagtgaaaaacagagcagatatggagactttagagatcgtttatctcgtatcatgctatattagttatttttatatggaacgaatgaacatctttgttaaatgttcagtttagtagttgttaatttttgtgacttgtaaatatcctagtagttgctgtgttttgtcactttattgtggagatagctgattggtcatttattgtatgtgaaatagaaaacgtgacgtgtcttttacttaattgtctgatctggacttggctttttgcatttttgatattaccattaggttgttacagatttcttggagatgccatagctataaaattgaacttgcttattgtttttctgtgaatgtagctggctttgcaattcattgacactgaagagtttca

SEQ ID NO: 79396 - DNA, 278 bp, Citrus sinensis
  Intron number 1 from transcript orange1.1g003659m (locus o range1.1g003341m.g) derived from phytozome v7.0 (chr-ID sc affold00014; pos 810981 to 811258)
atctccaaggtgccatcttttctcttctttattcatttatcttcaagccctgtttttgattcatagcaagaagttcttttgttgctttttttttttaatttgtattagaaaccccttgatttcattctgtataggtgcctcaatcaaatccaagattttgtgatgatgggtgattgtagagggtttcatttcttaatctgggttgcttcagttttatgctttgtgtgcttttgctcttgtcagtttgatcctgctgataactaccttatagactgtgg

SEQ ID NO: 79397 - DNA, 613 bp, Citrus sinensis
  Intron number 1 from transcript orange1.1g004095m (locus o range1.1g002402m.g) derived from phytozome v7.0 (chr-ID sc affold00259; pos 154708 to 155320)
ctcttgatcgcgctcttcaggtggtattcgttgaatttattttttaatgaataatgttcgacatttgttatgtggaggtgagtgatgtaagcactctaaaatgtttgactttttctcgggtaaagtccacgtcctgctttcagctgaagtcctttttcttttttgcttaagcacttgtcaagtgctttttcagaaagtagtgagttcaattgcttttatggatggtgtttctatagaaagtgctttcgagtttcgagtgtatatatggaaaagtgttttcatatttctgctgttgaaagcaatcttgctcaaagacttttgtatttttacttttatgtttcacagaaccacttttcatgaactcatactctgtgcttataataaaaagcaaagagaaatttctaaaaatagtttgaaccagatgtagctggtgaaggtgtctttctttcttttcttttgcattgtgaattgattgtatgtcaagtttcataatgagtgattttttcatctgcaataattttgttgctgtcatggttaacacttaacatgcttttcaccacagtatgtttttgcagcagcacagaaaatcaaggaaacaaagcactgggaggta

SEQ ID NO: 79398 - DNA, 454 bp, Citrus sinensis
  Intron number 1 from transcript orange1.1g020213m (locus o range1.1g020213m.g) derived from phytozome v7.0 (chr-ID sc affold00023; pos 1441877 to 1442330 reverse strand)
tgtggttcttcctgattattatatttaagttcaaggtaatgcagcttttcttcaactcttcggaatctcacttgtccaatgtcaatttcaatttccttgtgccaattacagtaacactgtgtgtctttctttttttcagaaacaacccaaattttggttatttagacatcttttgcacttatccgtgctatcttttattttgtttatgattgtgctagttcaataattgttgataaagattgagaaatggtgcttttttgcgacttcagttcatctttacataaacaaagtaaatcaattgatgttctatcgtctgctaagcaacatataccccaaatagttgcacaacaatcaagtattaaatgtattgtcaaacagaaagaaatagatggacacgcgtgcttgtgcttcttttgctttgagtttgataggctaaatcatctcctcaggaaat

SEQ ID NO: 79399 - DNA, 814 bp, Citrus sinensis
  Intron number 2 from transcript orange1.1g003209m (locus o range1.1g003209m.g) derived from phytozome v7.0 (chr-ID sc affold00286; pos 107316 to 108129 reverse strand)
aagcggcagtcaagttgtcaggcaatccttctgatgtacgttattctatgcctaaaaaatgcttataacaataaatgcacacacaattgtagaattttgctatctgattcaaggttggtttcaaaatggtgaaagatctccctactttcatcttaaagttattaagcagtggtaaacttgtacttaaattagctatacatacaaattatatgtctctgtaagtattttccatcttgtggatggaggtcattgaaaactaaatgagagattaaaatccaattattccatcaactccacttggaactttatcctgtttataatgatttgatatttttgaattttagccaaatgttaagacatttggagctatatggaaaatggtgcccaagatatttcttaatcagaaattttactatcttctgtgtttgattcctgactaatggcatcttttcctaaggcacatttgactttagatctatcctctgctctgtcacagagtctgttcttaatgttttcaacataagtgcattaacttcagatataacttaaccactggctgaagttagaaatgtcattagcctaacatgttagttttgaaagcataatcaatgcttgaccttcgtgccactgttcattgcgaatcatctgtttgatggatatgactttttgattctctcttctaaattggaagttcttaaacttcttgaattatgcaaataaattatttctttcaaaaatattcaactactctctaaatgatttttctcgtgattttgaaggtttaccaacctctgggtgatatcaagctagaatt

SEQ ID NO: 79400 - DNA, 544 bp, Citrus sinensis
  Intron number 1 from transcript orange1.1g041318m (locus o range1.1g041318m.g) derived from phytozome v7.0 (chr-ID sc affold06631; pos 979 to 1522)
gttcatgtgcgttgtttttttgtttattaataagtttgatagtattaaatatttgatagatgttttaataggtttttcactttggttgttgcaggcttggatttacgaagcgatcagaggtttgccgtcaacatgagtcgtgaaaacgaagaagaagattccccgcatcgtgcaatggaagcccatggcgtcttcgagaatcaactttgctgaggtttattcgttcttcaacgataaatctcgtcttgtaagtaatatgtatttgttatttttttaactttactaaatttaagttatgtatatttacttaaaagtttcaattgaatttatggcagggggacgttttacaaacccttgagccaaattcaaaggagagtagcagaaaatattggctcactgtgaaggattacatgccaagcattctagactgggttcataaggtcggtatcctctaagtagtcaaaattttttaatcgaaatttttgacttttcatttactaattttaaatgatactttatacagcaccaaccctcaatcaacgcg

SEQ ID NO: 79401 - DNA, 788 bp, Citrus sinensis
  Intron number 1 from transcript orange1.1g045400m (locus o range1.1g045400m.g) derived from phytozome v7.0 (chr-ID sc affold00062; pos 110895 to 111682 reverse strand)
ccggtgagtgcaccctcaaactcatacattgatttcaatactgctatattgctacagttgccatgctttgttcattttcataacaaatagcagcggaatcagaattttagtttaaccaaggcagatttaaggaggcctaaatttaaacctaagaggccaaggcctcagcatcaacataatacacagttgctgcgagatgttgaattttgtataaaatgtttttccttctttgcagcatgctcgatagctgttaatgttcaaggtaataatgagatgactgaagctgcatttgatttggttcggcaattaagttagttcgagaatgcatatgatcagaatataatcttgagtttgtttttggtttttaatttcgatcctgttcagacattttctcagaattaaacaagaggtcatggggttccatactctgaacatgtttcatgttctgatttttctataaaagatataatcttgaattttcgtattctatttgttgcctcccaaattttgtttaattatttaattggatggcatgcagcatcaggccttgagttgtcaacaaaggaatttgtcacaatttagacatagtgatagagatgggttattaattcttttatgcttggaggaaaaaatgaatacttacatgtataatattatatataagtcatcaagtgaaagagactgcttaggacttttaagttaaattgactaggctaccctccaatagttgacttctttgtaaccttacgaattattattattttccatatacgcaggcttgcaaagga

SEQ ID NO: 79402 - DNA, 489 bp, Citrus sinensis
  Intron number 1 from transcript orange1.1g007512m (locus o range1.1g007512m.g) derived from phytozome v7.0 (chr-ID sc affold00065; pos 497584 to 498072 reverse strand)
cctctgttaaggctggtgagcttttatagcttattgttttctttttgagtttctttgccgcattatatcgaacgtgttggagatttaaaaagctaaatgaccaactttgggtttataaagtaagaaaaggcgcaatttttaagtaaaatgtattgtcgtgtttgagtgataattagcaaaagtcttaacaagttccaatagaatctgaaaaaccgatttagaatctcgaaacaatgaaaaaaaattgtttttattttttatctcatctttattgacttgatgggaacttatagtacactgtgagatctggtgggatctttatgcagcaactgtaaattcacagcatctgtatctaacatatctgcgattaggatagtacaaaatgtagagttatagtttactactttggtgtaaggaggtttggtttcttgaaatgttcttttatttttatctttttttaatttctaggaaagtggcaaaggaacaaat

SEQ ID NO: 79403 - DNA, 238 bp, Citrus sinensis
  Intron number 4 from transcript orange1.1g043731m (locus o range1.1g043731m.g) derived from phytozome v7.0 (chr-ID sc affold00005; pos 557727 to 557964)
tcaaggtactggtcgtttgagattttcattattcaaagtaaattggttcgaattatctattgtgtacatacttcaaggtacaataattaaaatctatatataagcctcctaagagaagaagaagatttcttttaagatattgtgcaattatatgtttgttaaccgatttcgttcaagttctctatatctgtgtagtgctgttaactgtttcaggttaatagtgtgaggttgccccgtc

SEQ ID NO: 79404 - DNA, 851 bp, Citrus sinensis
  Intron number 1 from transcript orange1.1g041547m (locus o range1.1g041547m.g) derived from phytozome v7.0 (chr-ID sc affold00023; pos 985278 to 986128)
gcctagtgatactgttgcaaagcttttattccattgtacgtaatctttttctttgtagttggtttatttcttgttttgttgctcactggatttgccaaattcttggaagtttggatggtttggtaaaatattaaagttgcatgcataaaaaatggaagcaagattgtttgataaacggcataaattgattattatttattaatcgaatgatattagttagtctctttccggtaactgtttcttgtttgattaattcttaatctgttgtttatacttcaacttgtgtacccatgagtgtctttttggttcatagtctttggaatttatgacattgataattgtttgtgttgaatcttaaggattgatagtttcgtagagttttgacatatatctcctttcagtgaagtggcaatgtaaatttataacatgatttggttgatgctaacggacacaattctctttgcctctgttaaatgtgctctgagggtgaattacgttttccttttcaattcacatgcttaaacacgaagtagtggatgctttgattaatccctcgggtagtatttggtgaattggtttattgattgaaatttatgagtatgctttggaagcatcagcttatttatcattgaagaatgaattgaactccatccattgtgctagatgttaccatagattgttattttttatttctctttgggtcaataataaaattagaatttcctctattagatatgctttcagattgagaatgaaaatatacatttcttcttgtgttgtggttgattacattttgtctttcttcattccttgcaggggaaaaacaaaccattgagtggctgctgcgttta

SEQ ID NO: 79405 - DNA, 854 bp, Citrus sinensis
  Intron number 1 from transcript orange1.1g027595m (locus o range1.1g019043m.g) derived from phytozome v7.0 (chr-ID sc affold00331; pos 159843 to 160696)
aaacccaagaggaaattcaggaaccccaaattgaggtattttatccaatgtctactaataatttttgttttttaagaataaaaggcctttttttcagttaaattttcaagctttggggattcataaaaccttatgatatttgatttattttgatatattcatagcaactagataacttttatttgcaagttgtagcattgaaagaggttaagtggttaacatgtggtggcactttacctgcaatgtaagttctgtgtgggggaagttttaaacttaacatgatttatgggaggctgttaatttaattgaaataaggaaatttagttttagaataatccctctttggatggataagaagaagagtcaggaattaatatgtgagagtgggtctacaaaatgggatattaagataactttttcatcgaattggtgccttcttattgaagttaggaacttcagcatttttgtaactagttctctttcatggattgtactcctcaaatgttcacgtaaactcaacttttagatttaaagtgcaatagttggacctttctcaaaccctcaaattttcacctttagacccaaaattaagattttggagcaggatgttgtgataaaagtagttgcataaaaattgtgtttgtcatccaaagtctgtttaaaaattgtaacatgattggcttgcggggaaaccaagcttatttgagaaaaaaaaaattaggtggaacaatagaagcatctgacactaagggagatgggtgtacttctcttggctttttgtttccaaaatcgttcaactttctgtggtgtgcaaaccagattcattgtgggtttttccagcggacttggcttac

SEQ ID NO: 79406 - DNA, 854 bp, Citrus sinensis
  Intron number 1 from transcript orange1.1g001327m (locus o range1.1g001327m.g) derived from phytozome v7.0 (chr-ID sc affold00742; pos 60188 to 61041 reverse strand)
ttcttgtcctaaattttcagtctttgaacaggtcagtttttatctctgtctttattttccttcttgaatttcattgattgacttgttgtttgtcaattggtatacacgatcattgatgtgaattggagtgaattatgatcttattattgattctctattagaattgagtttgtttaaatttcatttattgactgatcttctttactttttgtcaactcctacttgtcattttaatgaggttttgagtttgttctgaattctaatatatgctgatctcgtatgtaccatgagtgttttttttttaaaatcattttgatctgattgttattggattaacttcttatctgttagctttgtgttcacgtaacataattaagtttatattttccaaattaaaatatggtttgcaagcttctaatttgggatgaatgggagacatcaagccagtgggatatttataggtgagaaattggtgcatatgtttttgattcgaggcctgcgctagagtttttatcgatttggaacttccatgggaaatttgtctaggtccagttttgatatttgtttaattctttggataaagtgcttttgatgaggttttgtggctcttcatcatattcgctttgttctatgtatgagtcttaatactttggccagattccaataatgaattatatactgcagctgttggtgttggattgacttgctgttttcctccttttctgtttgtttagctttcagttggggggaggagatttgggcggttccttgaattgttcctggttctaactttgttctgtttgttaattatgattacagatttgatcacatcttggatatttgatattgttctg

SEQ ID NO: 79407 - DNA, 924 bp, Citrus sinensis
  Intron number 2 from transcript orange1.1g020137m (locus o range1.1g020137m.g) derived from phytozome v7.0 (chr-ID sc affold00255; pos 125797 to 126720 reverse strand)
ggagttgaattgggtgtccctccgttttcaggttcatttccttttcattctgaattgtgatgtacatatattggatgtgctagggttctcgctttgcttgtatgcagatcaggttcacatacgcattgacatcttatactgatatatgagtaatttgatcaaatgttcttgttataatgtagttagttccaactgcaaaattaagttttcttttttctttttaaactcttgtctatgtatcaacaagttgttggtggaacctaacaagaagttaatgctacgagaaagtgccaaattttttttttttcaatattgcttacttttgcgcaccttgtttatgagctccttgatatcattcaagatttttgtttagcaaacatcaactatagacctcttgaatacgggatgctatggaataatgcatcatttggttaggatctactttcggtgataaatttgatagttgccctttttataatgggtgtagatgttttccctttcctatttcagaaaagccctgccaaaaagtgggttctatcttctatgtttgcttgtaaggttcctggggatgtacgagagatcttggatcaagttaaactcccgttagggttgttgggtagggatgggtagtagaaatgctaaaagtttgattcgagggacaataactattcaatatttgacacaagtgagaacactcttaagcttttggtgatggtagtggagtggatttccttgttaaggttgtaggagttgcatcagtttttgtattccacgttttcttttgtaattcctagaagcacgaccatcaccaaatccttgatcctgcgctaaagcgtaatttattttcatcaatcacttagaactgttcttaagttaatataattgatatgcaaattgtcaattcgacagaatttcctcagctaa

SEQ ID NO: 79408 - DNA, 441 bp, Citrus sinensis
  Intron number 1 from transcript orange1.1g047130m (locus o range1.1g047130m.g) derived from phytozome v7.0 (chr-ID sc affold00048; pos 480383 to 480823 reverse strand)
attgcttctcaaattaccgtatgtgctcttcaacaattcttatctttatggtgcattagattgattagaaatttcgtctttgatatcatataccacttctggaatgagctaaatcgctataagaagccaacattgatcatgcaatatgaacatggcaagttgaaagctacaaaaatttcctttcagtgctcatttctttagatcaaattcaaaagaaaagatatgcgtaaacatatgcacacacaaaatcttataaatgaacaaaatgttagatgacttgacgcggaagtaaaaaatgactttcatgtgagcttctatcatcacgctgaacagaaaattcaattttcagtgaagacatattatttggcgttctcatactgaagaactggggattgtttcttttcagggcggcttaatccttggtcaagcaatacccggcct

SEQ ID NO: 79409 - DNA, 491 bp, Citrus sinensis
  Intron number 1 from transcript orange1.1g013606m (locus o range1.1g004313m.g) derived from phytozome v7.0 (chr-ID sc affold00074; pos 97447 to 97937)
tgaaaacagaggaaaaaaaaaaagaaaaaaaaaaggtgcgcttttttttttcatttattaataataatattaatgattaattattattattttgtgggttttaatattttgatccaaagcacagaacgcatttcattttacttcacagtttctgtcgtactatgttcaaaacccacataaacaagacagagatttttgcttctacaaaatctcaacgcaactctagtactaaaaaacactaaagaaaaagaagaaaataaaaaaaacagatttttttaattttcttgtatttttctcgtaattagatctattttaagcataaagctctttacttcaggtatcgttttcaaaaagttttaatttgttgccttttaggatttttttttaaaaatattttttctgggttctgtacagcatgcaatatttgcttttgttttgctgattttgtttactgggtttgtcttctgtgttcacaggcttaaagggtttgt

SEQ ID NO: 79410 - DNA, 572 bp, Citrus sinensis
  Intron number 1 from transcript orange1.1g021549m (locus o range1.1g021549m.g) derived from phytozome v7.0 (chr-ID sc affold00003; pos 838263 to 838834)
tatcatcggttttagcaactcaaggtctctttcaggtattttatcaaacacctcgcattagtgtactcagcttctttctcatttagttgtttttcaactgaattgagttatgggtatgcttatttgagcttttagagtcgtgagttctctcatttattgtttatttggagggaaattcgattcattttagttactttagctctgcgtggcattgtttacgaaaattctgacttggactacaacttgcggtgggtaaactatttttgcttttgctgtgtttttgggataagaaacttagattaaactgtctgactttctgcatgggaatctttttttattttcgtttggcatgataaagatatttcttttatgatgttatatatcagtattggggaaattttgaattctcttcgtagtcggaaggatccagtgcgcatgcttgattgtataatacgacttttctaacgaatggttgtaatggaatttttcttttcatcatgaatttgatcttgaattatctactaaccattccagcagtctgcagcttttgtaggatccttcaaccaaataaa

SEQ ID NO: 79411 - DNA, 764 bp, Citrus sinensis
  Intron number 1 from transcript orange1.1g017240m (locus o range1.1g011835m.g) derived from phytozome v7.0 (chr-ID sc affold00146; pos 42596 to 43359 reverse strand)
gataaacagtctaaattagccgataaggtttgcattctctctctttcttatatatatatatattagtattttggtttaaaattttaaagcgtggaaaattttgagaattaaattaaagcattgaaacctcataattgtaaatttttaaaaaaactttccgctctttaaaatcttgaattgaaaatttctaatatgtatatatatatatattatgtgcgacgccttaccctttttttttaacgagctattagactatgtactacaatagagttaacttttaatatttcataaaatattaaactatttgatttaccggagtgtttatatgaaaaaaataaaaataagagcgaccgcatgaaaagactgtcatatataaatagtaagttgttattaaagggagtgttttacttcaaatgaatgctgtatataatctttaggttaaaccgcacctcaagtttgttctttgtttactttttggcaaaaaccacttttgcttatgtcagccaaacactagaaggcagacaaaagagataactttttgctgtttcagagcatttcagttaaataaaaaacactggcaaatgctctattagtacagtgttattaatggacatgtttatagtatctttcttgtttcttttcctatatgtattaggttctcaattatgaattttacttctgttgactgttgtctgtactatggtccggtttaaatttaattttaaatatttacatttttcagctaccgccaatatcaattggta

SEQ ID NO: 79412 - DNA, 582 bp, Citrus sinensis
  Intron number 1 from transcript orange1.1g024477m (locus o range1.1g024477m.g) derived from phytozome v7.0 (chr-ID sc affold00003; pos 3891632 to 3892213 reverse strand)
gtagtgcctgagccagaatctttacccaaatttaggcaattttactaatcaaatctacaaactaatgagcattccagatttttctgcttgttcttttttgtttttgttttttccctctctttctctgtacatttgaagcccatggtcggtcatctttcccccactcgaagcttggattctcttcggtggttgttgagtggtttcaacatcgaaggtcctgcctcattagcttttatatttcttgtgaagaatctccatctgggtgttctttggattgctcaaagagttgcatttttgttatgttgtactcaaaccattaaacttttgtcctttgaaatttgactgagtctagggttttgttctgcttattagtcttgaatatcaagtggtcttagctaagcatatattcttggattatcatatcatttgcaatcacagaatcctacttttggtattgaaatgagaattctttgattcggttccatgtaagtataattagttattcttgctccaataagtgagattttggtgttgcagataaactgctgcttgtgtagctgcatatagtttttgtttgtagtt

SEQ ID NO: 79413 - DNA, 508 bp, Citrus sinensis
  Intron number 1 from transcript orange1.1g037553m (locus o range1.1g037553m.g) derived from phytozome v7.0 (chr-ID sc affold11382; pos 738 to 1245 reverse strand)
cgactcccgtgggtttcaccagtgcagacccgcctgtaagctcccccttttttctattttgctaatatctctatttttttttttttgggtttcctttttgagctctctattgagcaaaataggaacttgtgtgacgtttgatcaggctttgaatgttggtccttttttccccccttattaatgtttttaattatattttaaaaaaattgcatctttgggttgctatttaagtgcatgtattctagcatgtttgtttagtttatatgaaattttaattttattgccttggtctttactattgttctgttagtaattccatgaacttggagccaagaaatgtgaactttttgccttgaaaactaaaggatgaatctttaatatgtagtggagtattgatcaagatttgcattgaatacatccccgttccactttgaaagtgttcttatttcgtgatgtcttgttgttacttgcagttttccgcactggcgctgtgaattcagcatcgggg

SEQ ID NO: 79414 - DNA, 626 bp, Citrus sinensis
  Intron number 2 from transcript orange1.1g013925m (locus o range1.1g011867m.g) derived from phytozome v7.0 (chr-ID sc affold00135; pos 178861 to 179486)
catttgggtacaagctttcgagtcgaaaactaattgtaggatttcagatctttaagattgcattttgtttccgtgaacttttaggacggttaatatgtgattaaaaaaaaaaactcatattgtggacttaatgtaatatatataatagatgctttgttagctttgcttgtttaatttttatttctttttctataagaaaacctgaagaaaagaaataaaaaactgaagaaaaattctgctgtctatgatacctttgcttgatgctaggttccagcatatgcatacttggtctttgataataatagaaatttgaaatctcagtctactgttggactattgttagactttgaaaagggatagagatttaagattcaattgtttggtataccagggatttttttttttgttttttggctgtacatgtttagagtttcctccttatcatgctgaaccatcaatagcagttacttccctatgtaaaaacgtatttaagaatgcataagtaactttttttttttaaatttgtgtcttgtgaatattcaaaaaaatttcaactcatgtgctttattcgtgtgatttggatccaaacagggactgtgttaggcattttattttaaactgtattt

SEQ ID NO: 79415 - DNA, 548 bp, Citrus sinensis
  Intron number 1 from transcript orange1.1g027499m (locus o range1.1g027499m.g) derived from phytozome v7.0 (chr-ID sc affold00007; pos 1750634 to 1751181)
tgatcgcttcagttttgaggtttgttcttttctttttctatttttttgggatttgagtaactgcgttgtttggttgatgagaaacggtgggaatgtaaatagttgattttcttggcattgaattgatgatgggttttttatcctaaaaacattaatttgcatgcatgcgcggtcggtgatcatgtgttaatttggatgaatgttcaaggttgatcattgttatcaattggtaaattacggaagagttttaagcttttgataccataattcatcaatttttattccagttgccattctcaaagcatcattaagtgaagcatatttcttggtgctctagtttttggatttgttgtttgatttagtttgcatttgggtagggcaggattaatccaaaatttgaaattctctgctttatatagaatgacttgatttaatgcatttgatgtaagttatactactgataggtttcgtggcaattttgaaaattaatttatatcattatcgatcttgcagtctcaagccagacctggaaatattgatctttcctc

SEQ ID NO: 79416 - DNA, 754 bp, Citrus sinensis
  Intron number 2 from transcript orange1.1g005425m (locus o range1.1g004736m.g) derived from phytozome v7.0 (chr-ID sc affold00175; pos 223419 to 224172 reverse strand)
agaagagagaacaggttctgggtcgaattagacaggcaagaagttttttaaaaaaaattattagtaattttaaacccggggatggccatgttgtgatatttttgcgatcagttggtttattcttcattttgtaatttggctatgaattgagcttgtttgagttgcattggtgatcttagagattttattttgttagagaatttagtgatgaactagaaaattagaagaattgattcaaggtggcaatgataattggctttcattattttagtttaagagtcgtagtgctagtcacaggcaagtatagcattcctctgggttatttaatttcaaatctagattgtcatttagcctttatgtgcagataattcattatgttttgggaactttttggccttttaggacatgatatgtagatttggggaactttttttttcccctgcttggtggcagagttctctgattcttattttgtttccatacagtgattttatgtttttatccaatagtgccagtagatggtatgtatgaggtgaaaatttagtatgtctagttgaattctttttgaatcttttttgcagatcatttcattttgatttttctgacaccatactttggcatgcgattgcaagtttctaatctattcgtcttcttactgggttagctgtattatatttcctttccttgtgctgaaaatatcttattcttcatgctgtcagattgctaaagattgggtgaaggaactgactcggtt

SEQ ID NO: 79417 - DNA, 724 bp, Citrus sinensis
  Intron number 1 from transcript orange1.1g019849m (locus o range1.1g019849m.g) derived from phytozome v7.0 (chr-ID sc affold07398; pos 1768 to 2491 reverse strand)
tctatccccttgggtatgtgtattttcattgcaattgcagctttagattgatttcgtattgcttgtggccaacatattgcatgtgtgtgatttggtcgcactaatatattttccttgatgttttttgaaaatttttggttttgtgaattctgggattaaagcatctttcgagtaagcctatttgttaattgatttggcttcttgactgtacttggagtacttaaaaataaagttttgacgaagctttggaacctttttggacccattttccaaagctctcttgtttgtagttgcttagtagaaggtcagagtggaactcttaagttgtgcatttttctcattaaagcttgaatctttgcattaggtaattacccatttgcatttcatcgtgtgggtgataagtttcccttaggttggtcccacttttgcaccttttttggtctctcgttgatgggtttcatacacatcaatccaaaatcagtttcttcatcaaataatagtgctggttgtcaaactcaaacactagggagtcttggtagactaattttggggataacgtaatgtagcagcttcctttgtttaattatatgttcgctaatttattttttctacatactttattttgacgttactttttgcttgttcacaatatttccttttttgtaaaaacatgttatttcaatctgcagatactactctgtcacccttaaaataggtaatccac

SEQ ID NO: 79418 - DNA, 864 bp, Citrus sinensis
  Intron number 1 from transcript orange1.1g025334m (locus o range1.1g023418m.g) derived from phytozome v7.0 (chr-ID sc affold00047; pos 509765 to 510628 reverse strand)
atcggtaagagagaaatcttcaataagatgaaggtatctttttatctttcattacaattcttattatcataggtacccacttgtcgcatgaagttgagattgacatggcaccattgtttttcatgtttttgactgtatgggtagcaactgggttcttgtaatttaaccttctggatgcaaaagattcattttttttaagaatgcccttaatgttaaaatttggttcagctgagagctggagaagtcagagtttcagaatttgaccgctagtatacaaaattgaattaaatattaagatggattcaggttcatgcttagcaatgaagaggaggattgaggaaaatggaaaagttctgtctgtgtaaggtggcggttatcttgattacttagtttatcctttcagacaacttattttaggccacacttttatcctagtcgaggggatgcactcgcgatgcatcaaggccaattccatccgtggcttcccaccccagtttgtccaaattaaggaatcccctcagaaatgtgtgtgagaggagtagaacccttgatctcttgcttccaatccaaggctaaaccaatggggctgtgatgtagggactttttttaatttataaggtggatagattatgcactaacatggttgtattgttgaataagttttttaatttcatctttattattgatttaagaaggaacaagttgtatgtatcaaccaccgttaccttgtcttacttcaaaaacaaagtagtggatggttaatattttatagtgtcaacacttttcttccctttgtctttttcaactatggagctctttgtgattgcaggagaaagtattgggctcatctcctgattctggaaa

SEQ ID NO: 79419 - DNA, 692 bp, Citrus sinensis
  Intron number 1 from transcript orange1.1g033016m (locus o range1.1g033016m.g) derived from phytozome v7.0 (chr-ID sc affold00007; pos 1330217 to 1330908)
gcagcgtttgctcatcgatccattcaaatcaagttagtttagtttcttctcttttctttattaattttttttccttatccaaatagtcgttagggtttcatgtaacgtctgtcgaattcgattatttaaaaacatgcacattattatgaaaaatctaggctttaattcattcgtttccgattcttgatgttttgtttcaatttatcgagactattattttgacgaaatttaaatttttattattagtaattgaaagattaatttaatgttcctttaaattgaacttaattatacttacttcggtgctctgtccgtgattttatttttatgagggtatcgttagagcttaaatgctttcagagagctaacacctaaacaacatgatttggaatttcagaatattttattagataacgtctgttggctgttatttttgaagagttacacacaatgctcttgcttgatccattgttttcgtattgctgaagattgttggatgggttatcttatgtttggagcaattttcaccttgcgttagattttagtttaagcagaatcttagtcatgaaacccgtaattagcctatattttttcatctatttgtccattcctcgttttctttggagtttgaattttccctttatttatttttgttaggctgaccctgaactagaagcaattagacaaagaag

SEQ ID NO: 79420 - DNA, 533 bp, Citrus sinensis
  Intron number 2 from transcript orange1.1g023796m (locus o range1.1g021924m.g) derived from phytozome v7.0 (chr-ID sc affold00007; pos 95003 to 95535 reverse strand)
tgcattgcactgcaaggatactcagaactgaaggggtatgcttttttgttaacttttttttttttcttttaatcaaaattgtgcatttctgatagattattatgtaacagttcacgttgttcgcttcctcggcacaaagtgaagttgttgggctttagaaattagaggcaaaccgaaatttcattttttagactgctagtcgaatacttgccctttctgttcttggcttcccaattatattgtttgcttggtgatgatggcctttttagagcattcttcttcgtcctttggtttgagatataaggctggccttcgtatttgatgtttgtacatgtgcataacaaataaactacttagacgcacaagtgtattagtcatcttgataaaattgacattgctttttaattatctgttgcttctcctctgcctgtcctgccctatctcgtagttcttcgctttgatcttgcctggaggatgaccagccgttgactttgacaggttagaggactctacagaggagcaacgccatcatt

SEQ ID NO: 79421 - DNA, 1028 bp, Citrus sinensis
  Intron number 1 from transcript orange1.1g026875m (locus o range1.1g021942m.g) derived from phytozome v7.0 (chr-ID sc affold00004; pos 1472116 to 1473143)
aggaagttgagagcttaaacagaaggtgagatctgctattcattccaaatttagttttatttatttacttttaatttttttaatggataataaatgcgtatagatggtcctaaaatttgttttgttttgtgttgttttgttttgctgaaatatacacgcatttgttttgtttgttctgtcctttgtctgtagtcgtcatggattttggtttccattaatgttttacttgtctttttctgcaacggtctttcgatttttacttggatttgactttgaatattgcttgtgaacttatgattatatatatactccttattaaatttgcatgaaacttataatcttttagatgtttcaatttatgatgaaaaagcattactaattagatttagcttgattaatcctgttgattttagatctatcaaaggagatctggctgtggtatcctcgttaatattagtaggtttgatgaaaatcagtattagacagaatgttcacttgggaagattcacttgtggactagaaatgtatgttttctaagctatattttgctgccttggcatatctttgtagtccaaaatggcatttatcaatcaggaaacaagaaaccaatacaactacgtatcaattttttaccaatttgtcagatagttccaatttagtgtttgcaattgtatggctggccatttaaaagcttaaaacatcaaggcacggagaagtgatagtcgattgtttagcaaaaatgagatggaatgctcataaacttgtttctgttttccataaatgcttctttttttttggggaggggggttagtgtgtccttaaatatcagtttcagctcgatccagcaactttggtgcaaataactgaattagatggctctgttaatataaagttctgtattttattatttaagtgaaataaactttttatctctctatatttggttctgtttttatgagagtattaaacgacctaagactaaaaccattgatgttctactttgcaggaaaccttgttcagggtataaa

SEQ ID NO: 79422 - DNA, 622 bp, Citrus sinensis
  Intron number 2 from transcript orange1.1g024256m (locus o range1.1g017586m.g) derived from phytozome v7.0 (chr-ID sc affold00035; pos 12270 to 12891 reverse strand)
gatttgcgaaaatcgttttcggtttcgcgttctatgtacgttcaattttgttgtacatattccgtttcttttatcgtgttgtgttcttcattcattgctcactgttttagcctctaatttaggatacttttttgtagcgctgtcgcctgtcagtttggttgctttatatctttctttgaagcatgattgtttggagtatttcgtatatagtagaaagtcaaaggtttagaaatatttcatattttatcattggttagtcatatgctgatatgtttttctttcattttatgctgcaaattcagactttgcttgcttgccaatgaaattctagcggaaaaatgacaaagtgttgttctggtattgtcgggtttaactcatctaatttcaaatattagactcgatgagatacttgattaaatttgtaaaccactggtgaaggactgtgactcaaaagttcgtagtttgaacattaccaactgtgcctagacttggcaacataagtgattaattggaagacttatttgtgatttcctgcattggaattgtaatctcagtatcttcttcattcccacttgcttttgcaacaggggattggctggagaacgcactgttaagcgattgc

SEQ ID NO: 79423 - DNA, 713 bp, Citrus sinensis
  Intron number 3 from transcript orange1.1g018682m (locus o range1.1g012164m.g) derived from phytozome v7.0 (chr-ID sc affold00007; pos 1095654 to 1096366)
aactcgattttactaatagcgttgagattactaaggtaatttgttgtttttcaatatttggatagctgggaagtgaagttgtattttaattctagtgattgattggttagataatgcccataaatatggtaaatttgattacataataataccctacagaagatgaatgtgtagtaatccaggggacttacttatcagaagtgttgtaacatggaatatgataatctgcatagttctttgctggaggttgacattgattactagtggaggaagttgagttgctttattcctggaattgtttgttttagcaatgtatcagaatacacaggagggatcttaaggttagatattgcaatgcaggtctcgcttaaggggttataggagatttgccaattagagcaaggttaatgccattttgtgaaatatgctgaaatgaaggttcaagcaagtggaaggccctagctgacagcttaaaggaatttttataaagttaacattgttcaaagaaggaggcaaaagagaaaatacatcaaattaaattctcaaaaattttatttgtcaaattgctgatgttgaggaaatgaggttttttttttttttccccttcagaagtgtagtggctctgtttccgcttgccactgtttcatctttaacaaagttaatattaatatatgccaggggacattcattcttgcattttggcgtggaattca

SEQ ID NO: 79424 - DNA, 827 bp, Citrus sinensis
  Intron number 2 from transcript orange1.1g033481m (locus o range1.1g032784m.g) derived from phytozome v7.0 (chr-ID sc affold00035; pos 501890 to 502716 reverse strand)
gcttaagcagcgaatcgtctctgattggcccaaaggtttaatctttaattcaattgtctttaattagtgagctgatcaaaattttgaaagaaaatgcaatgatatagtacaagaatgtttcagtacaatttcatacgttcactagttttgatcaataattggttaaatttcaaagccatgctagttaatacgttcactagttttgatcaataattggttaaatttcaaagccatgctagaagttcgttacgaaacattcttgtactatatcattgcatttaattcgttcactagttttgatcaataattggttaaatttcaaagccatgctagaagttcgttacgaaatctttgtgaatgtaaatgttgttgttctttgttggaatggcacttttagttgtgcacgtacacagagaaaaataagcgggttttgttagaactgtgtgtatgatgcattgataagagtgtaacttagtggaaacttgacaaaaagctcctgattagcaagttgaaattatttaggctgggccaaatatatgttgtcttcttgaaattgtgaaccttccattggatgaatggtgtgattatattactcgaagcattaaattttgattatatagtgttggctttgaattgatataggcatgttattgacgcagaagatggagtgcaagcagttgaattgatttagaagaactcttttcaatttcattttgtttttaaatttgcttgtgtaataatcttcttgtgtgctctttcttctcatttttttacctattttaatttccttaggcaagacaattgtgccaaaagcagtgactgaaatc

SEQ ID NO: 79425 - DNA, 244 bp, Citrus sinensis
  Intron number 1 from transcript orange1.1g016526m (locus o range1.1g016526m.g) derived from phytozome v7.0 (chr-ID sc affold00151; pos 176933 to 177176 reverse strand)
cttcgtcttcgtcttcgtcttcgtcttttctaccagtaagtaaatttttttttttttttttactcttagggtttcaattttaattgattgtataacagtagggtttcttaaatctattcaaggcttacgatctgcaatttcccaatttgataatcaaattattttgttgtgttttcttcattcttttctgattcttttttgttttctcctttcaaactagctctatacacattcaaatcaattg

SEQ ID NO: 79426 - DNA, 727 bp, Citrus sinensis
  Intron number 1 from transcript orange1.1g033353m (locus o range1.1g033353m.g) derived from phytozome v7.0 (chr-ID sc affold00422; pos 108190 to 108916 reverse strand)
tctccctcgtcacacctacgtctgctgttttccaggtttctattttccgttttttgttttgcttttgcctttgatttgcttcgcttcgctgccctcatttttatcattttcatttttattgttataattatttttttattttgtgttttgcaatcgactaaattgttgcaaatgagttagttagatggatgcatatgatatgggaactatgtgtaaagtgatgctttaattgctaggattcctatttggaattggaattggaagttctggttctttagggagattggcactttcttttttcatggtttttttaagttttatcagtaacccattactgtttttataatggatccctattacacttttgttttttgctatatggtgtttgaaatagctgatttgaaagttcccagattggttggccgtctcttttacaatattttctttgcagtgcattagttagatctatgatatgctatgatgtgatatgggaacactattttacattaatttcttcttgtatacatcagttcttaggtaataattagattggtaaatgggttgttgtggtttttattgcatgtgatccgaggttgctggtggtttcctaatgatgtgtgtatttagctgatttaaatgcactcagattgatagtccatttctttttattgtaaatttgttatcttatacaggtgattattggtggtgctgttggtagtggtttcat

SEQ ID NO: 79427 - DNA, 673 bp, Citrus sinensis
  Intron number 4 from transcript orange1.1g022669m (locus o range1.1g013023m.g) derived from phytozome v7.0 (chr-ID sc affold00007; pos 222071 to 222743 reverse strand)
tggtgagctgggctgtgggccttcccaagcgagctgtaagtggacctattaaagcccactaatttgtgccaattgatcactagtatttcattgagatcgatttctttgattttcggtagactttccatttaccacttgccatattcacagtgtttgacgatgtatgaactgctgctggttcgattcgattcatatgaatgaattaattaatatttgcttagccacgtggtgtttgtgtatttcttcttgcattaccaaggtcattggaaatgattttgattttgagagttttattgattacatatcacattcatgattaaacaattaataaaaatgtaaatatttaaacatgtcttgatcacacattacagtagctgtgcatcagcccatgtgtagcatgctttctggaagcttaagaggaatttaaatacttttgcatgccgagcttggaaaacaattgcaggtagaaactgattaatcatgtcagacatatgtttgatttaaaagactgatattattattatgttgagtcataaattaataatctttattgcaacgttgagttctcaattgtctcattgcgattttctcccagaaatgtgtactcataatatcacataactgtattttttgtgtagcctattgattcaaaactcctgaagctcttaatccc

SEQ ID NO: 79428 - DNA, 467 bp, Citrus sinensis
  Intron number 1 from transcript orange1.1g008309m (locus o range1.1g008309m.g) derived from phytozome v7.0 (chr-ID sc affold00407; pos 70182 to 70648)
gtcttgttgttggtgacaggagtgtgcaggttaagctttaaaaaaattcatttgttgaatcaatattatgatcagttggaaaattctatgatttttttttttaaccgtaaaagatgaagaaaagctaaaggatcagagaaagttgaagtgcttctgtttccaagcgatcaaccactgcaaacattttaattttttttttgttttcatggaatttctttgatattatctttccaaattggattacagtgatagttgttgtcaaagtgctggttttggagtaatttttttcagcttggatattctcagtaaatgttgaatgagaggagatatgaaaatgggatactgtactgtcagcgataatcatgtttagttgtgagttgaaatactagtacatgaatttgatgttgttgttgttgttttttcacattatagagatcagggaaagttcctggtgttggattggtgca

SEQ ID NO: 79429 - DNA, 719 bp, Citrus sinensis
  Intron number 2 from transcript orange1.1g001302m (locus o range1.1g000482m.g) derived from phytozome v7.0 (chr-ID sc affold00025; pos 1134148 to 1134866)
cggtctgtttcttgattctttttgtctttgaaatcctcttataagtattttttttttcctcgtccgttatattaagtttttcttgcatctcctgatgctgagcttttgaacacaaagagtaaaaacttgtatgtctaactgattaattaagtattttcagtttttttgtgtaaattacttgcctttctcaaaactaaggcattcttttaagtcttgggttggcaactatattggttactgcatttggattgttttagatgatggtccgcatgaaatcaaacatttacactgcagttatttaggatttgattttatctgaaatgcatgcttttcaccattgcttaaagcttagggaactagattttagtgatgaagtacaggcacagtttgcatgtagatgaatgtcttagtttcaagcatttctcatgtctcggtttttgcatgttgttgaagtataattgatagggttatatctcatagttctggcttttcatcacaggcctttcacactatttgttttcactttatcattaaagtttgtaatggtaggaaggtctttgacagacaaaactaaaacttgggtggttggtcatgcactcatgcttcttgtattgatattgttctgaaatttttattgtgcacttatttccatgtttaaagcgtggctagatggtttttcttcaattttaagatgtttctgattgtaaattaacagaaag

SEQ ID NO: 79430 - DNA, 375 bp, Citrus sinensis
  Intron number 1 from transcript orange1.1g041256m (locus o range1.1g041256m.g) derived from phytozome v7.0 (chr-ID sc affold00312; pos 183907 to 184281 reverse strand)
gctggtatatatagttacttcttttctttacaaattttgataaattggggaaatgatcaaaaccttctagctgtatatatcaatgaaataatcatttgcatctcatgttttaaacccatcaaaatccgtaagctgctaaaaagagagttaacttcaattattttacttttaatgtggtaaaagatacaaaaaattgaaaatcaacgtgttattgaaatacgaaagtagaaaagattgatttcaaccaacaattctttgtcttggttaattatgcggtctagttttacaaactaagcttctaaaattgttactaattgtgtttggattttggaaaattcaggtttggattgaaaaagcaacttcttgaaggaggaa

SEQ ID NO: 79431 - DNA, 488 bp, Citrus sinensis
  Intron number 2 from transcript orange1.1g030587m (locus o range1.1g020846m.g) derived from phytozome v7.0 (chr-ID sc affold00004; pos 1592714 to 1593201 reverse strand)
tgattcacttgttgctttctatagtgacgtcactggtatggcattttatttttggagttacttgtcatgggatactttggaccataaagatgatttgctgatttttttaatgagagttgcttcttatttacaaacaaattcttactctcttctttttaaactgagtatatcaacagatgattaaacatgcgttggtgtgctttaaacatggtttcttattgtcttatgttgtaggatatgccttgtttagttccataattttaatattgttccgaagtaagagactgttcacacatgcatgtgactgggaatggggacagataaacatatttgattgtccctttagtagcaaatatctgttggctattatattgttttatttataagtgaaaaaaaagaatatctgttgttttctccatgtaattttgttagagaatgttcattaaattttctcttatgggacttgatgaattgcatgcattataggg

SEQ ID NO: 79432 - DNA, 744 bp, Citrus sinensis
  Intron number 1 from transcript orange1.1g030587m (locus o range1.1g020846m.g) derived from phytozome v7.0 (chr-ID sc affold00004; pos 1593564 to 1594307 reverse strand)
actttcaggatatcgtcggtgttatcgaggtacgtatccaagcttctgtattcatgccaattgaattttgagaactggaattttttattcattttttcctttttagctgtttgtgggacagaatctgttgttcgaatttggctgtttgaaatttaaaaattggaagtctgatttttgtttctaattatataaaaaattggagttaaatttagaggattccgtattcaaaatttagcaataaacttcgattaatgatcattttggaaaaagaaattaaaggatttttgggcaaaagaaaaggattgatattctagtgtttgtattttagctgctttgtcgctttagagttctgtaaaggtacaagccttttggaagtagttttgaagcttctcatggtaaattttccttcctagcaaaaccaaccaactttgactaaacatgcagggaagaaaaagttcttagataatgatttttttgcctggattcttaaaatgtcactgaatattgatattcccaagttccagtgggacattgctaatcagatacatgggaaaagttgttggtagagttaattttggttttggaaaaacttactatcgtggttaataatgagaaaaggacgatatacttgggtgacatagatgttgatcagttttataattttataagatttatttgctttattaatttaagtctgttagtatatttgatgggaagtgtgcaatttggtttttgtgaaggggg

SEQ ID NO: 79433 - DNA, 302 bp, Citrus sinensis
  Intron number 1 from transcript orange1.1g015604m (locus o range1.1g015635m.g) derived from phytozome v7.0 (chr-ID sc affold00007; pos 1004592 to 1004893 reverse strand)
aaccagccaactttctggcgcaatttccctttcaggtgaaaagctcaaaacacttgaagattcttgcttttagttcctcgttctttttttttttttttttctttttttggggtttctttgttattttgggaattcgtcaattgttattgttttttaaatattgcggtatgcggattgccaaataggctggtgggttcaaacaaataatgacaaaatttttattattattttctaaaattttaattttaattaatttgttttgcgcggcatcagtgcagtgattaggagtgttgactgctgct

SEQ ID NO: 79434 - DNA, 605 bp, Citrus sinensis
  Intron number 3 from transcript orange1.1g029008m (locus o range1.1g023205m.g) derived from phytozome v7.0 (chr-ID sc affold00025; pos 664337 to 664941 reverse strand)
ctcgaccgtggtttgactgttgccagccttagcaggtactggactcaatctatggttgttgatccattgaaggctttgattttggcatttattatcgtggtgtatgttaacacttttcctaatattttcactgggcataactaaacttcttcgctgcatattttcctaaagagggaaaggttagcattctgcaactattttgtccagaaattatttagatatctctggaatgtttctcggccttacaaattataacggggcaactatgcattggtcgatccttttattcatgaataataagaattaatatgcagtaaagcccagttcgaaaaggtttgatagctttactttaattttaggaatctttagtattgccaggaggccacttattgtcttgataaagatgggagttgggggaggttgatgagattacttcctagttattggtttatggagatgtttttgttggattctttctacgctccttattatgactttaatgctttcctatatcaggtagaccttctcaccaatcgtatttacatcgacttgggtgtttcttcttcacaggtccggtcggtcatctttacgtgattcttgggcaa

SEQ ID NO: 79435 - DNA, 720 bp, Citrus sinensis
  Intron number 2 from transcript orange1.1g027041m (locus o range1.1g021901m.g) derived from phytozome v7.0 (chr-ID sc affold00182; pos 184294 to 185013 reverse strand)
gggcagacccagttgagcttatccacttctttcaagtgagtgccaattaagattttttctttctgtttgatttctgctttcatggggagaaatatttgtactgatacgagcttttgagctggcaattgttgtgtattcatttgattttccttatgttgtttgcttttgttgctagcttgttaaattaaataaaaaatgttcattggtcaacgtatgtttgtggtaactgtattttatgttgaacatcaacctcttttaatctaagaaaagctttgacattttgcaatttctctgcctttatgatcttattgatgtggaagctgaaatcagatacttagttcggtttagttgcataattaaatagcaatttaatgtgtataaaggaagagttgccaatcttttatttgaataatactttgttccttgggtgtgaatgcaccgggttctcttcttataaatgatggcactttattgagttttctagcaatctaagattacttttgtaaacttctcttggtaatgtttcagtgatttatttataggacaagttctgcatattaggacactgactgccatgcaacagggggttgatactaagagataagagtatctccattttcgtttatactccctgctacaacatcattcaacacgatttttctaagcattattgtttcactttcaggaaaagttcaggtttcaaattaaagggttggagac

SEQ ID NO: 79436 - DNA, 800 bp, Citrus sinensis
  Intron number 1 from transcript orange1.1g006074m (locus o range1.1g003648m.g) derived from phytozome v7.0 (chr-ID sc affold00007; pos 1654354 to 1655153)
gcccgccaaaaaacttgtcatcaagctcctcaaaggtacgcccttgcttactgcttgtttcttttattcgatcattcgtcttttgtttgtttaggttttggttgaggatatcgagggttttgcttctgagtattggagaggctttaaatttggatttttgtttgttttgagctgatcttttcgcgtggttacttgaatttatttggtggacctttgaattggattggttacgggatctgggttctcgtttttcatttgttaattgaggaactttatccattggttgaaattgatttgggtatttctcacttttgctatgtttatttgtaaccattaggaaattgcaatttcggattgattggccgagtctgtttggttccattttattttattccctgaggcacttattaaaccaggagctgactagggttttatttttatcacttgagtaagtaaaaatgagaccaatctagggttttccctggtgatagtttgaatcaatctgatcagttgttagaagtgatttggtagctagggttttggtgtgctgttctaatttattgttattcattgcgatgatttggtacaattcaattttctatttaatttggttgcatatgcaaatgtttaatgcaactggaaaaaccttgttgaggcagatattgctagtctagcaatttgaaacttgaagaattctcaacttatggtctaattttagaagatatgctgacgtgataaataattctgaattttgtgtctgtgaagctaaacccacactgcctacaaattttgaggaggat

SEQ ID NO: 79437 - DNA, 434 bp, Citrus sinensis
  Intron number 1 from transcript orange1.1g024875m (locus o range1.1g024875m.g) derived from phytozome v7.0 (chr-ID sc affold00314; pos 133776 to 134209)
ttggagcatttttgttggctttgacatcttagaaggtatgtgatttttttaaattattttgagctgtttaattttataattcatatttttgtttttatttcaattttttgtttattcttgatctggattgttggttagattatgttacgttgtttgatttaaatttgtaatttaaaattattatgcatgttattattttttggagattattctggatgcacattttctaatcttattgcaaaatatgattaaaaaaaataaagattttgcattttatagtcccaaacctagataatgtttttattatttgaagtttgaatctatgtcttgtgacgagaagatgatattggtgctatttgtgtctcgtgtattttactctcttgaatccttggttggcagttctgatttgaaattgtagccctcctattgtaatc

SEQ ID NO: 79438 - DNA, 532 bp, Citrus sinensis
  Intron number 2 from transcript orange1.1g017858m (locus o range1.1g017858m.g) derived from phytozome v7.0 (chr-ID sc affold06678; pos 1175 to 1706 reverse strand)
aagttcttacatataatacggtaagcagtttgtttaaaaacttgatgtgaatatatttacatacgctcgcactcgtgagtcttagaattaatggaagagtggcaatgattagaaataagaatagtggttagatgacgtagcaataaattataaatgcgatgacaatttgcataattgtttgcaagcataattattacttgtgttattatgtttctttgtgtatttacaattaagagattaactgcctagcaataactataaacatgaattattgaaatttgattggagtaatgacagagagccccactccgatcccacataaactccatggaagaataaatgaaaattgaattaataactaagctacctctaattgtaaattagtgacaaaaattctccaaaaagtttttcttggtggggttcaagtgcaattcattagtggaatatatatatcatctttcatttgattttagctttatttttttatttatttttaggggacagaaaaaattgaaggcatctgtttggatat

SEQ ID NO: 79439 - DNA, 648 bp, Citrus sinensis
  Intron number 1 from transcript orange1.1g021842m (locus o range1.1g018434m.g) derived from phytozome v7.0 (chr-ID sc affold00197; pos 170852 to 171499)
gaatccactgacaagatcatcgctgagtacatgttcgtttcttgttcttctcttacactcaactctgtttcttattacactcattagtaattacacatgtgtctataagcttgttttttattcgtccgtgcttgttgctgcgtgtgctttaatgggtgtgttttgtttttgagtgttcttgttttgatctacaactaaggggcggtgcaacatctttcatacacagagttttgtttgatgttttctcttatgacgctttaatataaatgatccaccactggttctataacatctgtgtttcgttgattctttttggaattttttttgctttgttatatttgctaagagagtggtagaagaaagaacaatcatctcattcaaagccaaatagttgtcgcagtgtgcttttgtttttattatttcctgtgacaaaatatgaaagtttttgttttccattttatttttactttcataaattagcaacaatagaaagaggggctctgtgtttttacttcttgatttttgtctatgtgacgagtcaacggttttgttccgcagattttcatcttaatacttgtgtatggttgatatgtatgctgattttgtaattttgttttcaacttcttaaataggatcggtggatctggc

SEQ ID NO: 79440 - DNA, 914 bp, Citrus sinensis
  Intron number 2 from transcript orange1.1g023593m (locus o range1.1g022936m.g) derived from phytozome v7.0 (chr-ID sc affold00213; pos 149429 to 150342)
tagttagcaggtatacttcactgagaagtactatttcattatggtgttggctgcgatacttaaagctgcttctaaacacatttggcacatgttttttattgtttttgttctttctattcaatagattctcataagattctatcttaccttgtatttgagaaagggtttttggaacaagtaatgtttgctactattagcagccatcaaatagctatcaacactcattttaagaaaaattcagggctttgtgtgatgttgtatctaatcagtaagtcatgtgcaaatgaagctaggaagaaaaccagttttgatatgagaatggaaagtgtactatgttaatagctgagatttggagtaatgtattgcaagtgggttgggtttccttgaaaggtccaaacttgtaatgaaagttggtgattgtcagttcaaatgagaactttctttggttgatttgtacttcaattgatcaatatgaccaattgttaaagttgattctgatttgtgggagtctgttctagtgctaaatatcatttttcatctttcaatcgaatctgacattagatttaagcaaggtttattggtgtttcttaggctttctttatattttaatgtttaaatgtataatgattgagttaagcatgagcgtcaaatctgaagttaagagcaatttctttcaatcactgaatctactcttgttaactccggttcttttttcttcgtttctttgatgcatttatttgatttatgttcaatttgagctagtacatatttgtttgttacttgcattgttcctccctttctctcatctgttgagaccctaataacaggaaagcttctcagcatttactagtcatttatgtctcatgtatatatctcatacaggtcattgtctgccataaaggcccttgaaaacg

SEQ ID NO: 79441 - DNA, 769 bp, Citrus sinensis
  Intron number 2 from transcript orange1.1g013569m (locus o range1.1g008612m.g) derived from phytozome v7.0 (chr-ID sc affold00035; pos 415129 to 415897 reverse strand)
agtatagcaaggtatattaataacagtttacaaatgtttgattttttattctacttagcttacaatgtaatcatagtggtcgccttgttggttgtctctcgtggtatttacttgatgtacttaaaatttgtgctactaacggttgtttcttgtagcaagttatgcatctgattagttatattaattgatggctactgatggcattaaattttccacaaatatttatgaccattaaaatttctatatatgaatgtccaatcgttgattttagttttaatggggttggatatctcacatttatttggggactgatgatgctatacatatttaggtgcttctgtgaaatacacacacacacacacacacacacacacacaaggtgtctgcgctgaacccatgggtggagtaactttgattaccaggttaagagtcattcatgtggtttacttggtcatggtggtcctctgaaactggatatgcagcttatagtatttgaacttgaattttgctatacaaaattactataatcagttttgtataattttgagagttgaaacatctgatacaacagcctcgatggaagtatctgtttatatttagtcctagacgtgggatatgtggaattttttcataaagacccactgaagttatgtaaaagtgtttctgttcacttttcacattttttttcttgatagcttttgattcctttttaattatgtttttcttatcagcagggtagttttgtaatctgtgaaaagtgcttcaaaaa

SEQ ID NO: 79442 - DNA, 788 bp, Citrus sinensis
  Intron number 2 from transcript orange1.1g023487m (locus o range1.1g023487m.g) derived from phytozome v7.0 (chr-ID sc affold00004; pos 544595 to 545382)
ctctcttctccactccaccatcacttccgtctcaggttccattattctttcctttttaacattttttttattatattatatttcatttactgaagtgcgtatctggttattttgtattttatcaattctttctgttaatgctgtgctgtttgttaattcttagtattgtgtgcatttggtggttaacatagctgcatgattctggaaattgctgtcatgattttgtccagaaatgtagtggttgatgtaagattttcgctgactcaaatagaaataaactttgagttgttaagttgtattaatgaagccgttgttgcctatattctattggccacaaggaacataaagtcaagtttgtggcagaatgtatataggggcaatgtttgacacatgaaattggttcaggtgtgaacgttgtcgagtcgttagaatctgtgttcatgttagctcaagctgaaactttctaattgtgtacatcagaaaggcgtgttattttaactttggtggacagctgtatgtatagaaatacagaaaattggatgctgagaagagtggttcaagctcatatctaaaagtttgaaccctgatcacatgtgttatgacttgaacttagtttgacacaaagatagcaagctttcatcttcagattacaaaatttgtttgtattaatttcttttgctaatagttttattcaaaggttttcgtatgaggatccattgtcttgttaccaggagtaatttcaaatgtatttctgtgtcttttgcagtggtgttcatagtggttaatca

SEQ ID NO: 79443 - DNA, 639 bp, Citrus sinensis
  Intron number 2 from transcript orange1.1g032761m (locus o range1.1g032761m.g) derived from phytozome v7.0 (chr-ID sc affold00229; pos 145543 to 146181 reverse strand)
aatcttttgttagatcagctgatttatcttttcaggtattacattttggattcttgatgattcttcaatatttttcattatgtttaattaattaattaatgatcttacaatataatcataatcgtttcatgtttgtggaatactatcaaagatgtacttattctctttccccatcgtcatcattcaaagttgaataaaatttgatccggttaacatgcgcctgaaaacagcatgaggagagagaggtctctgaccgtctgatgcatcatcgtggtcattattagtaagtcacactagggtttgtggtccacatatcaccaaacattaaacggtgcacgttagcatttaccccatgtattattagaatttataaagtttttataatccgtcaattgtcttttcaatgggtctccgtaacctgcgccatcagtgtcagcggcttaaccgcaaccatgtacacgtacccttcaaaattctttgagaatccagtgaacatggaccatgttaattattaaggagtctactatttttcttaaaaaaatcttattataattattttttactattattactaattttctattatgtaaatggttaatgtgtttgtaggaaattgggaaaataaaagatcaagaagtg

SEQ ID NO: 79444 - DNA, 587 bp, Citrus sinensis
  Intron number 2 from transcript orange1.1g016799m (locus o range1.1g013452m.g) derived from phytozome v7.0 (chr-ID sc affold00036; pos 339630 to 340216 reverse strand)
gtacttcaagtttaccataatacacattggaattggtaagccgatttcttttggaacatgccttggtgtttgcatcagatgcattctgtgctatacttgattatggttcttttattggctttcaactgaggtcaagctttaaattacttgaatgatgggaggtaatgatgttcgatagacataaccgaagaaaagtatctgcctccgacttgtggcggaccatattttgattctccttgtgagaaagcatatgtttgctaattccctagaattaggagcttcaactttatcacgttattgtgtcagagaatgcagtcctctcaagaggctttatcttataggtgtaggtgcttaatcatatctacccagcagaagaactaatattagtatggtatctttagtatatgataagccctttaattccttataaacttatataaactgccatgcagcatttctacacatgctacatctgtttcttttacttgtattagcatttaagcattttgggtctcctcaattacatgggttttaatattgaaaattttacagggaatattggcaacgtgccacttgttctgatagca

SEQ ID NO: 79445 - DNA, 535 bp, Citrus sinensis
  Intron number 1 from transcript orange1.1g014188m (locus o range1.1g014188m.g) derived from phytozome v7.0 (chr-ID sc affold00238; pos 66285 to 66819 reverse strand)
tgcgattaattccataggtctatttattaactcttcagcgtattttttatttttttggtaatatgtacatttttctttcaagaaatcaagatattggcagctatagtgagagaaataggacaatcggatgagaggtggtgctgatcgtcgcatccactggcatctgtggagaacctggatatagaatacccttcataagcctatagccagtgaaagccacattgtttgagtgtgatcaattccttagatcagtttattgcctcttcagtatacctttttgttttccaaattgtatttctaatatctacctttttttggggggggggggggggtggtgggtgtcggggggaagaactcaatatattggcagctatagttagagaaataaaaccatcgaatgagaagtagtgttgatcctttcacctattgatatccatgttactggtttgcttctcatctcgttcttgacctaattatcttatttttttctgactttcaaggttcttcaggtccaagcatagatattttgatccaa

SEQ ID NO: 79446 - DNA, 705 bp, Citrus sinensis
  Intron number 1 from transcript orange1.1g000361m (locus o range1.1g000310m.g) derived from phytozome v7.0 (chr-ID sc affold00007; pos 2554755 to 2555459)
cttccaccaaagacggtcttgttaagctcttaaaggtttgcattctttatttctcagctaattgcttatatatctatatctatatatatatatgttaattcaaattttttttgtttgggtaattagctggtgacagttagccaggtagtcagttaatttagtttctgttcggctgccgagggctgagggagtcgttcatagtgaacgaatgggaggaatcatttgagtttgttgtagttgttgttactgttttcgttgaagaaggtgaagccttcatcttagggttagtgagaagtatagtttatggtgaatttttccaatttctagggttgaatctgatagtttgacggtagttcgaggaaattgtcaaattagggtcgtttcatgtgtcttgttgattttacagagatgctgggttctgtttgtgctgggaaaatttggtgaaattaaatcgacttaggggatttgtttattggtctgagggattctttagtcactctgatgtatgttttactggactctagttgctaaaagtcctgtacctatgctatgctcatgtttatacagttattccattatactcgcacatcaattagacacctgagactagtgaaattatttatttatgtccaatgatagcatcttgattctgttacttggcaatgttctgcatttttttcttctcaacctgcagcaagctgcgac

SEQ ID NO: 79447 - DNA, 849 bp, Citrus sinensis
  Intron number 1 from transcript orange1.1g023304m (locus o range1.1g014957m.g) derived from phytozome v7.0 (chr-ID sc affold00286; pos 49472 to 50320 reverse strand)
aactgaattcgccgttgcctgattcgtcaactaaggtcaattcagcttctatatttggtttaccatttctagctgtacttgattgattgattgctaattgaattgtttgaagctcgtggtttgcattgttgatgagtaaatgcatagaattttcgtgtttctgctcgttgtttactaatatttttggaatttgagtttagttgatgattttggatagcgaatatttaaacgaattaaattgaagtttagacaaacctgaataatcacttaggctccgtttggttgctggaaaattgaagcttcagccgtgaagtgaaagttgatggtgtttggtaaataataattttgacaaagtagtaaaagtaatctagctttttcgtcggacagccagttgcaagtgtttacctaacacttgaagctacagctgctagacagtaaatcggtgcagagccttagtaacattagctttgattaagctgcaattgaatgtttagttgctgagataatgtacgaccacgttcttaggctaatttgattagctttgatggatggaatattttgatgaggaaagtttcaagtttagcttcaagttattaaatctgaataatttgagttgctgatttgaaaattggaatgttgacgtaaggcattgtgatgggaaaaagcacgtgtacatgaagattttgatcagaacttattcgattcggctactcagaattgttatgagctttaagtacataaatatattcagatatgatttcatttatatgctttaatagaatgatcatgtggtagattttggacttgacactagattgtttattcttatagaaatcggtgctagcaagt

SEQ ID NO: 79448 - DNA, 965 bp, Citrus sinensis
  Intron number 1 from transcript orange1.1g016481m (locus o range1.1g014189m.g) derived from phytozome v7.0 (chr-ID sc affold00123; pos 240552 to 241516 reverse strand)
ttcagtttacatagtttcatcaaatccaaagtcaggtttgtgtcctttaaaagctctgttttctccccacttgttcaataattctatgtatctagaataaaattgtaatttaatcctgaaaatgagttagatgatcatgatatatgtcataattaaaatcagtttctcacatgcaaactgtaattccacttaacatacgctctgtttttttctgcccttcctttttttttttcctgggcttgttattttagaatctttttttataattcaaatttttctctggttttattgtattctgataactgatattcttctgttttttttttcaaagattcatttgtagggttctttattctagatattccatttttattctgcaaattaatgaagaaaacagaaatgaagaaagttcaaagcttttttcaatttcaatcaatttcccactgtaaaggtggtacattttcttctactctttttcagtgcaactggatacttgtcactatagtgcgttgattcttatctcaacagtaataagtcaatttaaaaaaaaaaaattaatttatcgttttaaaattaattctttcacccttttgcctttttttttcttttttttttttcaacatatactgttttgaaaatttagaatttgcttttttatcccatgctcatacatatttttagttgatttttccatattttagcgtcacgttaatcttgataagcatttgaatttcattttaagaacaacatttttatatttgagaaacccattaattctgatatcacggttattttttattttaattctttagaatggtaaatttggttcttcaagctaatttattctgccttcaactgtttgatagaactgataaaaagaagatacaagaattcatccctactgattggatgattatatatatgatgttatgttgtcatgtgtttcttttcagaatcaccaaaag

SEQ ID NO: 79449 - DNA, 538 bp, Citrus sinensis
  Intron number 1 from transcript orange1.1g010547m (locus o range1.1g010547m.g) derived from phytozome v7.0 (chr-ID sc affold00010; pos 2077972 to 2078509)
ctctgttcttgcttgtttttaaggattctgccaaggtctgattgtcttgattacgtctgtgtttatgtgtgtctgtgcatgcgtgtttttttattttgctcttttgaatgttttgtttggttgacgagaaaatacagaggaaacaaaagaggtaaggaagtgaaaatcggaatgatttttatatagaaaaaaaaaggagatgacaagtagattatagcatgttttgaattaatatataaaacagttttcttttttttttaaaaaagaaaatatctgaagagatttctggagaagtatttcaaagagatggtgtaaaaatgttttttttttggaaaggggaaagcacataaaatgtttttttgcaacaagcactttttaagtttcatccctctttcgaactaatcttctcggcacaaaacagaacataattggtgtgttctgctatcaaatttgattttagccactggaaggtgatcgcttctttgttgatttatgtgttgcagttatctcacagtgagtgcagtctccttccttacaa

SEQ ID NO: 79450 - DNA, 514 bp, Citrus sinensis
  Intron number 4 from transcript orange1.1g008747m (locus o range1.1g005072m.g) derived from phytozome v7.0 (chr-ID sc affold00475; pos 120034 to 120547)
agattcttgctaatcagggtatgctacagtgacaataagataatgtgttgtttattttttgaactcattattgaataagaagaaaaacatagcttgcttggattacaaggcattagtttggattgccatcgatatgcatgttaatgctatgattttacttcatccactatcaattaggtttattatttgaaagacattttctgctcaagtacctattatgagtgagtatagcaggacaattatttctgcatacctgcaggattcttgtttatgaaaatatttgtaatggtggagtgtacatgttctgcgtcaagtcacatgttaattaacctacacatacttgcagataaactttattcctctattttaacagaattttatgttgccacattgcccattaattcacttctctatgaccacttttggttttctttccgccggtatcaatgaatcacttttttccctgcttccatttgcaggtgcaaaacgccttgttcctgtgggtcttggagat

SEQ ID NO: 79451 - DNA, 657 bp, Citrus sinensis
  Intron number 1 from transcript orange1.1g002413m (locus o range1.1g002018m.g) derived from phytozome v7.0 (chr-ID sc affold00010; pos 407067 to 407723 reverse strand)
gatcctggatcaacctccgattcttctcccaagtaaaaactcacctatctctcccgctcgctgttgataatatatacatatacttgtgattgtgtatgtgaataataatctattggatttgaaaatgaggagatgaaatggatgtgaaattgtacttgaagagtaactgaaatgaagattctactgtgtctgttactgatatctgctgatttttagttgtaactgtttgcattctagtgttttctcttgcattcatttctattagatttaaagttgtgataggatgggcatgcagcgtgctatgtggagcatgagtatggagtgtttgcattctaacttgaaacgacagtttatacaaggggtaaaagaaccattttataggatgaaaatagtatctgattttaaatgttctttgtacttgcaaaattagaatttccatttccatttccctggcattgcatctgcatctgcagctgcattggtataacaaaactctcaacacaaatctactaggtgatatttttatatatttaataattcaaattagatgtgaaaaaaatttatgggcatttttattgaatgtgtatttgcttacgtgaagatacatttcgtttttgttcagattgtctttctaatctgttatatatcatggcagga

SEQ ID NO: 79452 - DNA, 644 bp, Citrus sinensis
  Intron number 2 from transcript orange1.1g025326m (locus o range1.1g019880m.g) derived from phytozome v7.0 (chr-ID sc affold00070; pos 350015 to 350658 reverse strand)
actctctcaaggagacgtttaaggttagtatcaattcatttgtataagttcatttgatctgcttttggtttggatgctaatcaaagtagtgtaaagaaagggaaataggagtgaaaggtttggttttagttatggggactgcccaaagattgaagcttggagttgactgatactaattcaaccattgaaatttttttctttttgggtgattttatttttcttctcttaagcttttggattacatggcagcttggttttgttattgatttgatctgggtttgtactgtagctactttttcattcttggttctgatctattggtcttcagattattgtaagctgttaactctacttttattgaagattttctagtttgctttgaacttctgcttttctaatttgctgtgattgtgtacttctgatagtttgatatgcgcttttggacattttcattgcctaggataaaataaaagttgagacccttgacttggtttattgaaagttcaggttcccttcttttttcagatttagtataattggatggctaaagttgctaattacacatgtgccggcatgagtatgtgtacttgctcctgatttgcataaattaagttgtaacgtaagttttgtctggtgatcccaga

SEQ ID NO: 79453 - DNA, 901 bp, Citrus sinensis
  Intron number 2 from transcript orange1.1g029645m (locus o range1.1g028297m.g) derived from phytozome v7.0 (chr-ID sc affold00051; pos 566660 to 567560)
ggcatttctgttgttgctggtactctttagtattattattttttattgttttgtttctcactcattttctttttaaaatttttatttccccccccccccccatttttatttgtttcatctctctctgtctccctctctctctctctctctctctttattttttattttttaactcaaagtttgagaagcatttcttttgtcttgtttcatctgttgtagtagataaagaagaatgaagaaatcagaggaattactagcaggataaatatctatatatgtataaaaggacagtttttggtcttatttaccttttctcattctgtgctttgatcttgtcaatcacttttgtttttttgggattttttttcacttttacttgaaaactatatattgacgttttaaaaaatttacctttttttaattcctaaaaatttctgtttcttgctcgttttagaaagaatgacaaattttcccttttttttgtcttcaataacatacaaagcatgcatgtgtcagcgttattgttgttcatgtatgatcatatcaaaacgtggccaggccttcctcttgacaatctaaaaatgaaaaaaaaaaaagaagaaaatatgacatgcatcatgcatgtgagtgttactttcatggcttcatatatacttgtatttgaaataaaattaatgggtattgttcgaacgagtcacaatgtactgggcgatgtaagtaccagcgtaccattgtaacaaaacacaatctggtcaactggtccttctaaaaaaaattgcaccttatgtccagttgtgttgttcactagatcatttatgttgtttgaatatcatcgttgtatcttatcttagcaaacgtgaatgtaggaattgaagctagaggattcgtttttggtccatca

SEQ ID NO: 79454 - DNA, 856 bp, Citrus sinensis
  Intron number 1 from transcript orange1.1g009746m (locus o range1.1g009747m.g) derived from phytozome v7.0 (chr-ID sc affold00287; pos 90871 to 91726)
gatcaagattttgcggctcgcttgcagatcggtcggtaactttctttcattttttttttaatttttgagaatttttattttaattgacggagatgctgttgttttatttgtttatttattattattattcttcttgcgaagatgattctactttctttcattttggtgttgtaaataatttgcatttgtgtatattttcctctttgactataaatgtgatcatgcattgtatattttattttatttttattttttgcagcaaacgttgaggatttgctccggctgttttttatttatttattttatttttaattttgatcaattttcgagggtgggattgtgagtttcagctttcctgggaaaattgaattcataatgcaaaagaggaatttgtgtgaattgacatgcaacaattattaatgcaagaaggatatatcagtttttgtgtattagcagaaatgaattcttgggctatatattatttggcaataaatgataggattgcattacttgcttctttatgttggcaaaagtgtgcggcttctgctgaatcttttgtgcagttacgtgttatatcaaattgcaatagctaaattggcaattagattttgtttgttttcgaaatggggatgcgtgatcagtatatcgtgcagtttggaaggttcttaatgtcaaagtctatatacgtctaagtggacatgtaaccgtgttgcaaatttgtatgtatatgtaaatttactcgcatgtttctgcttttttcgctcataaaaatttgtatgtaccagcagttggttgtagttaatatttctgtcacttttcaggttataccgcacttccagggaagttggctgtgcgg

SEQ ID NO: 79455 - DNA, 505 bp, Citrus sinensis
  Intron number 2 from transcript orange1.1g003650m (locus o range1.1g002476m.g) derived from phytozome v7.0 (chr-ID sc affold00016; pos 799625 to 800129)
gattccatacgttgaaaggtacggatacagaatcgtgatgcttcaaaacgccgcgttttttattgaatgattgtggaaatgaagttttttgtgtgagaaattgcgtagcatttgttgtttgaattggttaatgtgaatcggtagtgatgtcgacaattttggggaggaaattttggactaaagacaaaaattaatattcctgatgtgctgaagaactatagtagagcgagagaagtgctctgaatttcaatttaagataatctgggtttgtcagtatgcttactggcatgaattgtttaggatgacaaagggaagcaagttctcttgaattgtcaatttaagttaattttgtgttttggagtatgtagtttctggctgctttttcttagaatggttggttgggttttccaaatgtttgtctggcagtgcttatgttttatttcttcttgtttttagggaatttgttaattgattttgttggtttgctgtttggtgacagatttgg

SEQ ID NO: 79456 - DNA, 659 bp, Citrus sinensis
  Intron number 1 from transcript orange1.1g028956m (locus o range1.1g024770m.g) derived from phytozome v7.0 (chr-ID sc affold00010; pos 1536143 to 1536801)
caagcttgatcctgccaataagctctactttccctgtaagtgctataatttttttcatttttcgaaaaatggtcacgtttaattcctcaaatgaactgctagaaaacgcaactgctactgctagtagagcagtaccgaaataattagaattttactctatatcatttacagttgaaaaacaaatcaaattagaaattagatagcatgaaaaagatagaaagcaagacaaatatttttagttaatgacaagaatttcacgtcactaatgagagaaatttagtaagcccagctagatttgaacaagtttagttagtggaatatgaaaataacttttcaggtgcgggtgctatctagtcgaaatggtaaaatttgttgtgtcgaaaataagagctctgggaagtccaacccgcttatgtgggtgtggaagtgattgggttgctatttggctaaatcataataaaagagaccctcatttatttatttttattagttgcatgcttatttagcaagtttgatgtagcatttcaaatttcggtttatttgactattgtgattctaatttaattctgaattttttcatgatttatgtcgcctattttctttcaagatgaggctggcaagcaggtcaggagtgcaatcaaaataaagaacacaagcaa

SEQ ID NO: 79457 - DNA, 562 bp, Citrus sinensis
  Intron number 3 from transcript orange1.1g009878m (locus o range1.1g006297m.g) derived from phytozome v7.0 (chr-ID sc affold00004; pos 87462 to 88023 reverse strand)
gcttcacaccttctgtaagtaaataaatttgtgtttgcaaacttttgagcttttctttcttttgatatatttgatggtttaatctgctgagagtcatgtataagtttagaataggcgtccatttacagttgctactagtatgtaactttcccaccaagttaggtaccaaccttaatgctgcaatgtttctttaatattccattccttaatatgtttttagcctttcattttcaagaacgcgaaagaagttttacaaactggacttccctgttcctgtgtgtgcacctttctggttaagcagattttgcaatttgcatttctggaggcaatatctctttgttatcaaattccctggaacatcacttctatgtgaaaatatacagaatattactcttccaataagtactcaatcagtcaatcttcagtgtatgaggcctgttcatagctcataattcagattattttgtaagatgcttgatcccattattgtgagcggtatagtaaagcaaaaaattgggctgatttagggtgattattttgcaggttccaactggagaagttt

SEQ ID NO: 79458 - DNA, 565 bp, Citrus sinensis
  Intron number 2 from transcript orange1.1g001557m (locus o range1.1g001557m.g) derived from phytozome v7.0 (chr-ID sc affold00051; pos 622725 to 623289 reverse strand)
ggcggatttggaatctggctcgcaagaagaaacaggtttttgttttgattttgctagtcttttcaattcttcttcttgctttttttccgcttagttttagctattcacattgtagtcttaaacgttgaaatttaattttgagaatttgttctgttctgttgctgtgcttcgtatcgtacggattttcacatccgttataggatcacgtaagaatcctcaggtgcaggtgcagatgttcgtattcttacggatcacatgcaattttatgcaatttctaacgaagttaaataataaatcggagatgacggccaattgcatactagttcgctttatttcgcttagtttatgctctgttttcactattattatttttttaataatctcattttagcatgacagtgtgaatgtggcacatagtttcaatttttttttttccctacagatatatgtgtttttcaaatactcaattgtttttcaattatttatagatttgttaacttgattctacttctctttcaactcaaatatagattgaaggagaggaagctcagcgtaaagctaaacg

SEQ ID NO: 79459 - DNA, 574 bp, Citrus sinensis
  Intron number 3 from transcript orange1.1g006297m (locus o range1.1g006297m.g) derived from phytozome v7.0 (chr-ID sc affold00004; pos 87450 to 88023 reverse strand)
gcttcacaccttctgtaagtaaataaatttgtgtttgcaaacttttgagcttttctttcttttgatatatttgatggtttaatctgctgagagtcatgtataagtttagaataggcgtccatttacagttgctactagtatgtaactttcccaccaagttaggtaccaaccttaatgctgcaatgtttctttaatattccattccttaatatgtttttagcctttcattttcaagaacgcgaaagaagttttacaaactggacttccctgttcctgtgtgtgcacctttctggttaagcagattttgcaatttgcatttctggaggcaatatctctttgttatcaaattccctggaacatcacttctatgtgaaaatatacagaatattactcttccaataagtactcaatcagtcaatcttcagtgtatgaggcctgttcatagctcataattcagattattttgtaagatgcttgatcccattattgtgagcggtatagtaaagcaaaaaattgggctgatttagggtgattattttgcaggttccaactggagaagttttgaaattcggtg

SEQ ID NO: 79460 - DNA, 1035 bp, Citrus sinensis
  Intron number 1 from transcript orange1.1g030271m (locus o range1.1g026253m.g) derived from phytozome v7.0 (chr-ID sc affold00517; pos 91202 to 92236 reverse strand)
accccaacataattcgcctttttgacgctttccaggtgagccctttaaatggaaatttcagattcttaattgcctttcttgcgtttgttgaatttgagtttctttgatttgggtaatgtaatttatttatatttagttcattggttttgatttttagcctgtttgtgggatatccatttaattatctttgataaaggatcgtcccgtatgattttgcttgatttgttgtaagagcataactgtctgcttaatttttttaatttcatttttggataagctgttggatacttgtcaagtgtttgctgaattgcatttgttaactgattgttcaaatcagcttggaggtctgaaaatgtatttttagatttttctttaattattttggagataatagttgttaatttagtgtagatttatcttggaatgcagattcattaattcattagcctgttggttaagttgattttatcaattggatattccataaatgaccattattttttatcatgacatggagatgcaaattgcttattagagaaaaggatggtcttaatgttcaaactatgctattttttgtggttcttttattttcttttctgactatttttagctaacttattttataccttgaattggaaaatgcaaatggttgattttagctaatcaattttattatttataccttgaattggggatggaaatagttgatgtaagataagatgtgttggaattaagcatactttttggatttctattttcctgtccctcatatacatttttgttattaaatggtctggcggcatgcccgttgcatgcaaattacaatttaaaataagtgatttcttgattgtccaaatctgttcgtacttaggcatatttgtcttagagctacaccattcccttaataaagaaagccgtataggttgttgcaaatgatatataaatcatttatgtaacgatagtactatgacaaattgaagttggctgcccctgctgtcaggctgaaaattgtatattccttgtggttgagttttg

SEQ ID NO: 79461 - DNA, 528 bp, Citrus sinensis
  Intron number 2 from transcript orange1.1g016409m (locus o range1.1g016108m.g) derived from phytozome v7.0 (chr-ID sc affold00026; pos 743294 to 743821)
cgagaggagatcctctctccactttcaagttcttggtaagtctacgattggtatgtatatgtatatatatacatacatacatacatacatatacaaacacccacactgcaactctgttttctgccaaatgaacacaaattaggccttagctaaaaaaaaaatcagatttgttcaagagaaggtgaggatgaaagctatgtgctaaacaatgctgcaatgtatacattctcctacaatttgcaaatctgtaaactgaaactacaattttgtgtggattccatgcaaaagcttttttagcttttttttttgtttttgtttttgttgcttactagtttggccaatgaatgaaaagaaaatttgtttgaaaagacttggcttcggcaaattgatgccaactgcaggtcattagtctcatttcatgtaggcttcaaaaggtcaaaaatgcaatcatatgtgttatttcctttttaactttctcttcttttcatggacttattattatgataaattgataatcgatgcaggatt

SEQ ID NO: 79462 - DNA, 562 bp, Citrus sinensis
  Intron number 1 from transcript orange1.1g027346m (locus o range1.1g027346m.g) derived from phytozome v7.0 (chr-ID sc affold00007; pos 1186778 to 1187339 reverse strand)
atctacaccttctcctccgttgaagagttctggaggtaaaatttttttattttatttttttcttgtgcgatttgttaggtttttgagataatttaggaaagactaaaagttttctctgttttctgatgtcaatgaatgttctttgtttagattatgtgaaagtttgatggaaattgaaggaaaattctggttcttttccctaaagaatcgatctttgcgagatgtcgtcataattttagcctttttattttttggatttaattttctttttggtccgtccttactgcttgaaggattgatctttgagtggcaccattaataacgcaattgaactttcgagaaagattcattggtaaattttacatgcttttgaactctgttatagggattgtttatcatgaaatttctaatgtgttcacttttctttgctttattgttttgaatggcttgttgttagttgtctttctttgtttgtttatcctgtaaatggttcttaaaagttttcattcaagtttttctgtattcagcctttacaacaatatacatcatccgagcaagttgg

SEQ ID NO: 79463 - DNA, 981 bp, Citrus sinensis
  Intron number 1 from transcript orange1.1g021837m (locus o range1.1g021497m.g) derived from phytozome v7.0 (chr-ID sc affold00025; pos 336128 to 337108)
ggtttcctgagtcactccgatttttcttctgtacagtaagtcaatttcgattacgtgcttctcttctttttttttcattttatcccaaaagactccaagaaatccttccttttggggttattcttcattttcagttgatgcccacgaatcacgattgctgatttgagaatcatatgttcaatttttaatttgtgtgtgcttagcttgtgaactcggataatttggggttgctcaattttgttgattatgcttttggtcaatatctatggttagtaattttgttatcgtcatactcaatatcgatttaaaatgtttatttattttttaaaatattagtgatatttgattgattgattgattaattaatttcttggtcactgtggaatttattgcttgtgtttatacgtggtagatgttatctcaagcttagacttttattttttatgatgatagctgttgaatttcaaatctaaaatcgttagattaatatgggcttaagttgcttttttttttaattaatttgcagtacttttttttggggtaaaaaaaaaaaagagagagagagagagagagagaagtttctcagctttttgttaaatgttgtttggttttcctgaaaatgaagcccttcttagtcagtccatgcatttttaccagggttatattggcaaacttttatttctttgatttgggctttggaaattaattaaaggttccaaattttaatttgtttttacaaactaccaagtgttcttccaatttactgggcaactaaatggattagcatgctacactgcacccaagtatatattgaactcattggaagtttcttgagtatttgaatgtttcttcgtggaagcgttgatgtggaaatgaatagttttaatcttttgcttttttcccaagcacattattattgttttcttcaggcttaactcatgatcactgttatcttctaccatgtgcagtcatctttcgagc

SEQ ID NO: 79464 - DNA, 629 bp, Citrus sinensis
  Intron number 2 from transcript orange1.1g021837m (locus o range1.1g021497m.g) derived from phytozome v7.0 (chr-ID sc affold00025; pos 338187 to 338815)
taatttacgtcagttctgttgaatgataacttattagaactattagttggaaattcgtttttctaattatatagtgatccactgaaaggggaatctaactttcataggtttatacattttaacttgccttctacaatctttgaatcaacttctgattggattagtttccatggcctaggcgattttctcagagttcaatgtgtatcaaactaaggatttatacgaagctagtttcttttgattgatgtttctagattccccaaaatattattttcagcttattagttccattgactcatgatctgtataatttgatgcatggtcttcctgtatttcacagttcccggagacgccgttcccgcttctatgataattaggtaagacatgcactactcccctgcatttgtgtagagttttgttgtttgtaaaagaactcatgttaaataagcttatcaagagtcttaatgaattgttacatttgaagtaccctttcattggtttatttatgtagcttacgttttcaactatatttttcttctagacattttttttgcttcgttttattatgttatgtaatcaatggtcctagttaattctgctggctgtggttgaatagaaagtggaagcaa

SEQ ID NO: 79465 - DNA, 783 bp, Citrus sinensis
  Intron number 1 from transcript orange1.1g009693m (locus o range1.1g007452m.g) derived from phytozome v7.0 (chr-ID sc affold00004; pos 2355668 to 2356450 reverse strand)
tgtaaaagtacaataaatttttctgaatttactctagtaattttccaatttttaaattgaatgttttctctttatatagatactaagtagctttgtgaaagatcactatttcactttcctgttcttttcatgatttgaatatatagtaggagaagttgtgaattggaagactgtctcagttttcatccatatagatgacatgtttgtgtgaccttactgatatttgatcctcagacatgggcttttggttgaaataacaagtgatgagtacaaaatgtgttaggtggttctgtatgtgatacggatgaaagattctgtaaagaaattgggtcacataatatctcatgtgcctgggccattctactaaaacttcagtagagttgtaatatgatcttctaaagaaggaaaaagaaacgcaatcaaaatgttttcattggttattggtgactgttggatggttgcattttattagttaaggtgtagccttgcccgtagacattgtcaatatccattcatttaagtggattctgaactttgaacatgttattgtcaagaaggcataacttaaaataagttttgatcgttagactctttctctgctagtcctgtcatgctttacagaacaaattgttatgtgtttgaactgatttcaaaatgaaattatagtgcttaaatttattgtttatcatactaattgatggttctcttagtccagttaatcattttacggggttgttcttttggccaggtactgattgcttctggcctgccaagtgattccag

SEQ ID NO: 79466 - DNA, 1020 bp, Citrus sinensis
  Intron number 2 from transcript orange1.1g006889m (locus o range1.1g006224m.g) derived from phytozome v7.0 (chr-ID sc affold00016; pos 749695 to 750714 reverse strand)
ctagggtaagaaaagatttcaaatatatatatatataatgtttcatttcctttaatgaatcatgtcaatgtgtatagattcaataaacatatgtagctatctaggtgaatcacataggcaagctagcagtattacatgttcgttcgaaatgtgtgaagaagctgaaatcgcttaactagtattgcatagcttgcacgttacaattaaagctaattaaactgttaaggctatgatcttggaccacggtcacaagtcattttctttagctgtcctgtgcaaagtctttagctttgaaaatagactaaaaaattataaaataataagtagatgcttataaaatcagtttactttgattttgtttattgtgacctttgaactaagcattctcgtgtcatgtatcaattgctttagaattttaattatagtgaaactgacaaatttgtgcacaatttattggcttctagtgggaactaaaatcctattttcacatactccttgtgcatacgccaattttcattagattttgaccacgcaactctcaatgaattaacaaaaataaacacatgtatgataataacccaacaaaggagggagtatataattaaagtacccaatattatcatttccaccaatgtgactgattgagaaacacatgctgagaagaatctaaagaaaaattgtgaacatagcgaaaatatctaaaactttctttgctatagaaaagatgaaatatttttgtcatagttatcatttattactacttctagaagtgctatcttttgcagaataatttgaagcaagattcgttttttatttctttttaagtcaagaagaacctctaggtagtaggtaagataaagaagtaaaccaaacaaataaattaatcgacaagattaaaagcttcttacacggctagttaaaaattcaattttttctttaaatataaacaattaattaattttgcattatttttaattaattgaaggtaagcaagcaagatttagaggatacatataacgt

SEQ ID NO: 79467 - DNA, 900 bp, Citrus sinensis
  Intron number 2 from transcript orange1.1g000247m (locus o range1.1g000247m.g) derived from phytozome v7.0 (chr-ID sc affold00300; pos 27767 to 28666)
acggtatattgaagatcgtttgtttatttttgtaattttttaattttttgcttcgcatgttgtgtgcttgtgttttatgtggattttatcagggttttggagtttgtttgagagaaaatggctattattattattatttttttgttggatgctttttaattactatgtttggattctgcattttcttttctgtttttctgttttgaatatctagacttttgatgtcgtttttgagattttgtttttttggtgaaaatgtgattattttagtagtctgcattttggtttagggtttggtttggtatctctttataaagtgtttaatttttagttccattattgctttcgttggtcaaatgttttcaatgtgttgtttattttttattttttgggtcaaattaattgtaattctcagttcagcaattcaggttctgggattattgtggctgtttggtgatatttactcatccactctttcatttgattgttttgtggttttgcatttaatgtgttttttgtgggttttgggggttttcaagccgctattggagtttttaggtggaaatgatgatgatcagaggggtatttgtaagatgtggaacgacattcatgctttcatatggttactttgctttcaaaaggaaaataaaaattttatgcatgatattggactttacctcaggtggtctttttattttttagtttatggcatattaagatatcatttggtggaattggcttaacctcttgatggaattttttttaatcattatttatttatttgttattaatgttattataatattaagtctgaggaggtttggttgatgttgcagagtctattttgattaatcttttaagctgaccctcctccttttctcatcactgaaaatagatttt

SEQ ID NO: 79468 - DNA, 780 bp, Citrus sinensis
  Intron number 6 from transcript orange1.1g030577m (locus o range1.1g028487m.g) derived from phytozome v7.0 (chr-ID sc affold00225; pos 80566 to 81345)
aggtataatccatatctctcattgatccttaccgaaatgtttcatttgcttttgattctgccatgtagttcatgaatttggaggaatattttttgcttttattcattacaattaatctgctattgagctatctcaacagttgagcttttcacattacaatttagtttcttgattggttcccatatatcttggatcagcgcatccttatttaatttaacctgaattaggtttgtctaaacccagttttgtgcctttcgggagagaaaaagcaacaaaaaaaggggggggggggggtaacgaaaataaaaacacccacttattgtgggtggaaaggtggccatttgctcagcctagcctttaacctgtggaatttttcttcagttggacttgataaatcacaaaagagaaaacgattctcatgaaccatttgtgaacatatatatgcacaaatcaccatatctgttaatgttattcttcttactaagagaattaagttggtttgttttctagaaaccgaatgtccagtgtagagttggaagtatgttttagctttaaaaggaaatcgcttataactgaataaatgacgattgttgcctttgggatggacatttgaagatctaataaaaagaaattatcttttcatacgcatgcttgcttcatttcagtgaagatctacagtcagttatttgatgtatgcatcttgttattcagtccttttttggttatcttaagactttcactaagtttgacaattttctttttgtcagaagttttggcttt

SEQ ID NO: 79469 - DNA, 428 bp, Citrus sinensis
  Intron number 1 from transcript orange1.1g037166m (locus o range1.1g037166m.g) derived from phytozome v7.0 (chr-ID sc affold00067; pos 42220 to 42647 reverse strand)
cctttaagtggcctcacttttgcaattaaagacatgtaagtcttcagataacttgaacacataacataaatgaatttattttgattctttctcattaaatcactctttttcatgatgggtacataatattttgtagaaccattcttgttctcatgtggctttaatttcatgcaatattgtagttgtttcaccttctggatatgctaaaattgtttgcaagcttttaaattctgtttaatttcttgtagaattgtgtctttggtaatatacttaccaatcaactcttggagaagtgtctatgctaactattgcatcaattgcagtgtatttatattatcttaatgctttttgtgtgtgtttttgcgagctcatagactctgtgcggttggatgttgatattttaacttgaatttttggaagcagatttg

SEQ ID NO: 79470 - DNA, 731 bp, Citrus sinensis
  Intron number 2 from transcript orange1.1g021802m (locus o range1.1g021802m.g) derived from phytozome v7.0 (chr-ID sc affold00036; pos 435895 to 436625 reverse strand)
gcaaggtatgctgaatggttaaattggaaattttgaacttcaaacagtgttagtgtatgtaattgcttcttgcatgtttgatttgaagaagtatttgttacagttttatcatatcagtgccaacgaaatttatgccatgtgacttgggctactttacttttctctggtattactgttaatgatgcaaatggaaattaaaactatgtaaattagctctctctctgtgtcttgaaattctattttagactgctttttatacataatttttggaatgagcttccgcatttctaattctacattcaaaaccacaattctatcagttcctaatatcacactatgcaccacgcttctgcatgacagcccttaaaaaaataataataataagtataccaaagaggtcttgcaccagtgactggcagatttcctaagggcctctctgttgaaattttaatctgggattgtatgctatttcagctgctagctctgtgtgtgtgtgtgttgttttttttttttggagcctccattttttccttggtcttttctgttcctcctagttgtgattaataaacttgtcttagattccttcttttctttacctacaagatttggcatttgtttctcctccccgttcatcctttctagtggcattgttccttatgaaattattctgtgaggcttacctcggactctcttgatgataattatactgtggctgcaggggcctggtcctg

SEQ ID NO: 79471 - DNA, 498 bp, Citrus sinensis
  Intron number 4 from transcript orange1.1g011906m (locus o range1.1g009532m.g) derived from phytozome v7.0 (chr-ID sc affold00117; pos 29420 to 29917)
aatcaattaccggagaagtctcctcaatttatcttgtatgtcagtattctattattcattttttattctgtaaatttttcttttgatgtcgtcttgaaatcttgacaggagattgttttaccattcttgtgtcatacttactctgtccatgccattactgcttaaaagaatttaagtttttgaaattgttataattatctcctccaactttgaccttttagaattcttatcagaaaaaggtaaaaagaaaaagcttttgaccttttagaactgtgtagaacatgattatttgatggccggttatggttgaactggagtaaaataattcatttgttgtattatgggtacatcaagactgtagattaaatgttgtttgttcttgtcatcatgctttgactgagcaattggtatgctattgttgatctagaattattacttaactcttaaatcttaaatattgcagtctgttggccgtagtgtcagttgtcagataatcag

SEQ ID NO: 79472 - DNA, 785 bp, Citrus sinensis
  Intron number 3 from transcript orange1.1g028144m (locus o range1.1g028144m.g) derived from phytozome v7.0 (chr-ID sc affold00271; pos 70472 to 71256 reverse strand)
agcttccaaggcctccagctaccagcagacgtacgtgagactcattacacttcccttcgctttacttcttcctttctttcacattttattgcgggaatgtttttagagcttcaacattttcaattttgcaagaaaaaagaaaaaaaaaaaaaagtgcattggtcaggcaacaacatagtgttatttctatccctaacaaaggtttgatacacacacacacacacgcacatatatattgttaaatttctcactttctatgttcgttatagatgttgtacttgctcaatgaatttaaaaaaaaaaccagaaaaagaaccaaccgatctgcttttttgatcactactaacagtagtcaagggtctttctaaattgtgttaagttaaagaaacgggacctttagtacattaagttatagacacagaaccttttattatgcctgcagtttcgaccttccctcttattttatggggccttgattaatttgtcaacaagttttcttcatttattactagccctaaaaaactgcattaatgtttctgcgtgaaatcaaactaacaataatgctttctttcaagtcattctcgacaatttgggcccctttttttgtagggtttgggtgagcaaaataaagcttatgctataccaaaatatagttgtagtaaaaaaaaaaatctatgaatagggccttgatagatgatgattttagtggtgttactgcgtctaagtctgtgtgtgtctgctcatttacagcaccagagaagagacaaagagtcccctctgcgtac

SEQ ID NO: 79473 - DNA, 459 bp, Citrus sinensis
  Intron number 5 from transcript orange1.1g010356m (locus o range1.1g007251m.g) derived from phytozome v7.0 (chr-ID sc affold00027; pos 1119087 to 1119545)
ttggtgactggggtacacaggtgcttgtactttcttaaaatttgtatcttccatgggtactttcatgtttttcaagggcttgagccattgccagctttagttggggtacacaatgtagtcttttagcatcattcctttcaagagtaaactttttgattttgtttgtagactttcacatgaataggaatgagttctccacttaggatgcagacaaaatttgtctgctcttgtctgctgctgcatttactttgatggtgtgcagactatttgtcgctgtgccaaagatgaaattctggttgtgtggcactctcttttcgaaagacacattttgatgatttgtactatttgtaatattccgaagtttgtgttctttatcattttgaagttaatgcagttaataaatatttttggctcttgattgtatttcttaaagatttcttatttcttgtgcagtttggc

SEQ ID NO: 79474 - DNA, 706 bp, Citrus sinensis
  Intron number 1 from transcript orange1.1g007381m (locus o range1.1g006449m.g) derived from phytozome v7.0 (chr-ID sc affold00287; pos 65477 to 66182)
tcgggtcctctcgatcggttcgctaggccttgtgagtatcatctcctcactcccggtcgcttctatttctgtaaaatttttcttttatttaatttgatttatttttttctttttgcgttggtagggttttactgtgcactctttctttgtttgataatttttattaattatttctttttgtgtctttagtgagaagaactgacttgattgaatcaagacagtaggatgagcttaagatgagatgaatgaaatatttcatttctgttttgttttgttttagttggttcttgagagattaagagcctaaacttaaataaataaacatcattttttttggcaaaataatttgtcatgtgtttagctttctacccaaaacaaaatttaatttaagcgacaaatagaatgatgaaagatttcattggtgtttttattgattttttttccctttagaaaggttacacaatacatgtacatttagtgtctggaattttgggtttcttttctgttgttcatggattagtttgtattccatgctgcagaaattttttatccataataatgggttggcagtcggcacttaaatcttgtggataagtcaattatatttctttctttgccttcacaaatgtggaattacacctgtttctggttgcaaatatattgattgttgactgtgccgcaggttttgagggattctcaggaagtg

SEQ ID NO: 79475 - DNA, 1015 bp, Citrus sinensis
  Intron number 3 from transcript orange1.1g034012m (locus o range1.1g034012m.g) derived from phytozome v7.0 (chr-ID sc affold10640; pos 668 to 1682)
gggattcttatttaacgttgggggacttcattaaggttctttaaactctgtttatatttatagtaaaaagttttctgtgataataaaccatgaagaaatgtgaggacatggatataaattgaattcaaccttaaagcttgctttctttctcttgtagaaatctctctctttgggaaggattgagaagatatattgagaacctctgtattcttttcaaaactttccatcgactctttaaggtgtcttatagtgtaaacccaacaaattcaatgaaataagactgtcactttatccaaccttttgtctgagaactcaactttgcaccacatgcattctgaaaaagtaatcaaattgttcagattgacgtggccacatatctttacctagtcaatcatgttcaccaacctcctccttttctcactttactacctgatttgattgggttcttgttgtagtgttaattctgtgtcttgcaaacatgtacatttaggtcaattttcatttcttgtggaaaggaaactggaaagaaaacagaagtcagctctataaatgactgagaattcagtgttagtgttttgtgttgcaaagttttgtagtggccaggtgatttaattgactagataattggagatgatgtaaatttaagtgaagactttgacaaatttgataagttaaatgggagcatgtactcttatatatttacatattagcttgttgtcctctgaaaatagatatggaatagatgccctttgaggatcattggttctgttttaatttaggtattttgaagaattctgtgcttggggttcttcattaagagttcagctgattgtatttgtaccctttaataagctggatatccctgtttgaagaatatatgatatccggattattttatgccttatctctatttgcttcaatagtttctttgagttgcataattttgtaatttatgtttatgacaattctcagagctttccccctctttcaggtttttggaaattctggcctaaaa

SEQ ID NO: 79476 - DNA, 1040 bp, Citrus sinensis
  Intron number 2 from transcript orange1.1g031288m (locus o range1.1g031006m.g) derived from phytozome v7.0 (chr-ID sc affold00035; pos 488759 to 489798 reverse strand)
gtcctcatcgcaagcttcttctacgcagtggtaaaaataaataaataaataaaaaataagaccaacaaactccatttttgatcttttaagttttctttttcttctgtgggtcatgaaacaagacgaattttgttatgaaacgttgctgagatgatgcgtacgatttgctgttgtgtgttttgtggtcggattggcccacgtcttttttttttacttctcttatgcttgagtctaaagtgcgccgttagggttttagatattgaatgaggatagctattaactagttgtactagtagtggttctgctgctattttttgtttggcaaaagtgctgctgctattgagagagtatcttttttcctttttttggatgggatcggcggatcgccgatcattataataatatatcctatcagcagctttcatcgcctgctttttgtgtgacctttctgcttgattcctgtgactgatttgcgcaccgggtctcatgcgtgcattagcaaattctcatttttcttgataccttgcatctgggttgggttctgcatgagtgactttgaatgtgaaatgaagaaaaagtgattcaattttcattgttaattaataaaaaaaaaaaaaagagaggagcaaaaggcattttccttcaatcgtattagccttttttgtgttgcttgtgtcgcaatcgtattagccttttttgtgttgcttgtgtcgctttctttgcatcccaataattcctgtgaatcacctcctaaaagtgtattttgtctgtaaatgcttcctgcattggtgggttttgtccttgtgggtctttttctttagcattggaaatgtttctcttttatgcaaaagtgtcacatgttttcaaaagccataatagtagctggctataagcctttaagcctttcactatctctcgattcattaaaatgtccctgttcttttgtttttttgctaatgtgactagtgcctagtgcctagtttaattaattaaacattaacagccaaaaccaaagcagcaaagaagaaagaaccagagag

SEQ ID NO: 79477 - DNA, 632 bp, Citrus sinensis
  Intron number 4 from transcript orange1.1g004223m (locus o range1.1g004223m.g) derived from phytozome v7.0 (chr-ID sc affold00004; pos 2893736 to 2894367 reverse strand)
aggtagcagtctctccttttccctctctcactgagatataaacaccccttttttgttttttttttgaaaaagaaagagaatgggaaaacctgcaagaaataatggatgaggagattgcctcttgaataaaagcagttcaaatcaaacaattaaggacaagaataataaagatgtcaacaaaaacaaagcaggaaatagaattcaccgtagactataatctctatggaagatctcttaggtgatagctcccctcttgggaaggatatcatcaattggcttgttacatcttgagatgaggcctttcatatcatcattggaaagacgatgcatattttattccttatgggtgggggatgcaaatgttgagcaacggtaatgaagcgtattaaattttagttgaacaataacattagaatcatttgatttgttgcaagtttacaagttgaataattctattcagaatttaggaaggaagactactatgaaatgttcatgcagttataattggttttaaatagcaatatgttccttttgaccattggaatttagtatttatgatatcatatcttgggtatcgatgtaacatttcatttacagggtctacctacttctgctgttattttgaagtttga

SEQ ID NO: 79478 - DNA, 428 bp, Citrus sinensis
  Intron number 3 from transcript orange1.1g004223m (locus o range1.1g004223m.g) derived from phytozome v7.0 (chr-ID sc affold00004; pos 2894506 to 2894933 reverse strand)
aaggtaataccgttaaactcatattggttttattcatacttatctttatttactcatatactatttttcctacaaagggaatagagatagtgataattttaaggtgttggcatattcttggtgcttacccaaagggttcttgataagatttcctaaacttaaaagacaaaacaaggatatcttttttatgaacttaatctggtaatatggttaaatttacactgtacttcacaatctagattctcagttaaacctgcgaaatcctgaaaatttttagttcttccagatgtctgtgcaattattgatggttttgatattcttctcattcttgttggtttgtcattgagctttgcttctatatagtcaaatgagagctaaaatctaaaacatagtggcatctgtttgagttgcagcacctgagctcggtt

SEQ ID NO: 79479 - DNA, 493 bp, Citrus sinensis
  Intron number 1 from transcript orange1.1g004223m (locus o range1.1g004223m.g) derived from phytozome v7.0 (chr-ID sc affold00004; pos 2895441 to 2895933 reverse strand)
tctgagtcctctacttttgccgatctgaaactgaggtttgttctttttcttcttcctttctttcttccggtcacttttatgtcatttacattgtatatattctcatttattgctatcgttgttaaaattggaatcaaatgcaatgtcgtttaaataaatttctatttgctactcccgttaattgtagcgagtcagctttgacatacttttggtgaataattatttcatttaatgtccaatttagctgtgtcgccccatttgttgtcttctgaatatggcaggatttgatgaaaattgaaatggcaagttgttagtattataatcgtgtttttataatatttacgctgaaaatgacactaaagaaaaaaaatggtagctactagtttcaacaaattctttggtttcttttagatatttcctcagcgcatgtgaagttcgactaatttttgaatgttgcatttttactctcaacagcagtaggcagctttatttt

SEQ ID NO: 79480 - DNA, 721 bp, Citrus sinensis
  Intron number 2 from transcript orange1.1g024293m (locus o range1.1g024293m.g) derived from phytozome v7.0 (chr-ID sc affold00007; pos 1986650 to 1987370)
gaacctgcagagcaataaagtgaaacctttattgggtaatgattatttcgctttgtctctattttaattgttcacatttgtattattgctatgggatatgcctgagtaggagaaacggaaattagagaccagctttaacattttgttatgaatgtatcaagttgggtcactcttgttaagtcagatgtgtgctaagtgaggtggaagcaaaactgcaaaaccctgtgttcttgttggttgttactgacaaaatagaactgctttgtacagtgcatgctttagggtatttttgttactgttgtgtttctgctttattttgaaagcacagctgtttagcgtttgtagtcacccacatccacttgctagttggtagctaatgtttatgaaccacccacccatttatatttgacaaatagtgattttatttcacagtagttgtggattgaaaatcatagcatctaaatcccaaacagatagattgacttgttaggaattcttcagttaattttgctatcatttgatcattgattaatgcaactttctctccccttttcttgtttcaggtgatattcatggacaaccttttcttgattaaaagtcaaatctaattgcatctgcattttgtgtcgcacaactttatctcacattcatgagagaataaaatatgatgtctgatttaaaactcatctactgttttgcagctggtgtgcctaacctggca

SEQ ID NO: 79481 - DNA, 1037 bp, Citrus sinensis
  Intron number 1 from transcript orange1.1g010142m (locus o range1.1g010142m.g) derived from phytozome v7.0 (chr-ID sc affold00007; pos 2733304 to 2734340)
tccagatacctcgttaaaggtggtgctgatattaggtacagcagtatatttaatatctttccgctcctccctccctccctccctctccatctttcttttcgttttagctacaaaataaaatttaaaaaaaaaaaagctgatatattttttgaaatgatttgctgcttggtgcttacttgcagttttctggggattatctactagtaaggtttctatactaaacatatccaagttctttcttgataaccaaaatctgagtcacttcaaaaaagttttatcgaatggtttggtgattttatccctatactgtaggttagaccaacaagcatgagtccaatttgttatttgtaacccaaaaacaaaaaaaaaaaaaaactgaaggaaagctatgtggggagaaatcccacaaacgaatagcttgagttagatgctctaaaagtaagggagaaaaaaaaaaaaaaggagagtgagtccaatttgttatttcaactttaatgtatatgaaaacttattatcttattgtacccgcatgtgcttcgattttcaacaattcatgacctctttaagccaatttgttctgagcttgtgctggtgtttctgttgaaatgagtttgtgtttgaaatagagagagggcaattttaattgaaaaggtggtagtagttttttggatgcataatgtatcaatgtttgcaggacttctgtcaaatttcatgggaggttaatgatacaaatagacatctgatcaggtttctcatatttttcctgatttagttgaagaatctacttctaaaatcttttcgatctaggagcaatataggtctgagtgccttaatagctgccccctcctcttttattgtaagagcccatcaataggcaaaagaaactggtaccttttttgcaaaaatcagatgcaaaaacttaacagtgctgagactacttcaaataagcttgaaatttctgtatatatcaagtagtcaagatttctaacacgctgttctattcttatcatgcaacaacaggtatattgctgtaggaa

SEQ ID NO: 79482 - DNA, 808 bp, Citrus sinensis
  Intron number 2 from transcript orange1.1g005188m (locus o range1.1g002868m.g) derived from phytozome v7.0 (chr-ID sc affold00016; pos 1571922 to 1572729 reverse strand)
cactgtaagtatctaatctgctgattcttacttttctgcttcactaagatgacagaaataggttgcgtagatggtatcactgctattgtgttattctgcacttatgattacatatgaaattattgaggactgctagcacatggtttgccaagttacaccccattacccttgtgtcagaagatgctgtatgagtttttgactgattctcatgtgcagaaatttagagaaggctactgttttaattaggttatacaaaatcttaaaatgactataatggttaaactttggaattcataaatttatcatagaaatcttacatattcaaggaccataaatccactatggtacttggtttgtagatagacacttaaaattctagtcaccatgcaatatgtagtcttctgtcaggatcgcatcttttgttttgttgatggcagtttattgaagattgtggcctagtcttaggaatattctaaattatttgcttcctgatgtggattgttcattttgttgatcttcctcaatcaataataacttccatagatcagccaacttctctgtaatctgatagtgcaccgtttcctcccatgattattatcttaatctttaggcaaatctataccatatgatctaggacggttggaagggtaattcatattataaattcctgtaatcatgtaatagtgctaacatttaatctcattttacctttttgtctgttcatcaatgtgtaccttttcctcaaacactttccgcttcagctgtcattggtagcatatatattttgactgcgcagatttttccttct

SEQ ID NO: 79483 - DNA, 502 bp, Citrus sinensis
  Intron number 4 from transcript orange1.1g019316m (locus o range1.1g019165m.g) derived from phytozome v7.0 (chr-ID sc affold00035; pos 301381 to 301882)
gaaggtgtgttcttttcttttttttttcctcaaaaactctttcgttctttctatttctttggtgtggtctattttttttttttccggttcatgcaattttgttcgtgtattctttttaattatcttttgctgccacaatttaattgtgatttaacagcttatcctcttactttagtttggcaatttgggaccaataaaatgccataacttttgaatccttttttgagaaaaacagagtttttttatttttttctctcaccaatctttcaaaaatgacccaggtttttctttatttttttaactttattatataattaaactgttcaattcattaagattctatggtacttggtccaattgaagtcaataaatatttacttcaattctaaatcaaatcccaccaaccccagtccccagatcagaatattattgtaattatcatcataattccttttgtaactttctaggggtggaatcagcggagccagatctaaagaactca

SEQ ID NO: 79484 - DNA, 526 bp, Citrus sinensis
  Intron number 1 from transcript orange1.1g004145m (locus o range1.1g004145m.g) derived from phytozome v7.0 (chr-ID sc affold00070; pos 417516 to 418041)
agaccgcccaaaagctcctctatttaggtatataaatacatccatacgagacttttacgtcagggttttgtgtgaatgtatttcctttttgtgtttttcttataaagttttgttttttattttgtttcttgcatttggttactgtgcaaaaggttcactatttagctgtttttctatatgcattggggttttatgcgaagattaatgagtttcatatgtgggttttgtgtgttgatgcagtggattgaggcctttttgcaattgggaattgtggaaaaagttggtgtattttagtgttatgtatgcatatgtgtactcgagtgtgtattattggagtttcagtttacatgaatgcattgtgtatttaggttgaatgcattgtgcatttagggtttctctgttttgtaaattagaatgtttagcaatttgtatattgagtttactcattgtcttacaacagattgtatagttctctttttatagttggatatgatcagtttattgttgtcctcggcagatacatttc

SEQ ID NO: 79485 - DNA, 792 bp, Citrus sinensis
  Intron number 1 from transcript orange1.1g009278m (locus o range1.1g009278m.g) derived from phytozome v7.0 (chr-ID sc affold00271; pos 134371 to 135162)
ggcaaggtaatgactgcttctgcttcgcttgttttgcttttatatgtttcttcatttgtgtatgtaactgaatagattatagtttatagaccaatgcatgctagtagtcatattaattgacatatgatactgtaaaatctaggatacggtcagaatttaacttgttttatgcaactgttgatttgtttatatttctgcatatgagagtaacaaggacagttaagaggaatatgctttaagtgagaggcggctatagtctaaaatttgatggcagtgaagattttgtttgtttggggatttgggaaacatccatgtaggacttcatgaacttttagtgccactgtgtacacttttctgatagtaatatatcctcctgttgtttcatattgaacaaattaattagggttaggtggtagttttaatggtatcaatcattatattggtttctggataagagatgtagttaaaaattttgttcaactgcatcatttaagtttttaatatgagaaatagtgtaaatttcaccagcctctgctaattcagttggttttgaacagtttggaacatttgaagcctttggaacagaaagcattacagcttctgctgcttttagtagttgatctcagccttattgctctaaaattatttttatgattccacttagtaaaggtttttaatgtagttagtctttattcaagttcacttaactagaaaatcatgtcccctttttttcttatataattctgtttataaatcatcaaaatcctattaatagaatcattcttttttagt

SEQ ID NO: 79486 - DNA, 284 bp, Citrus sinensis
  Intron number 1 from transcript orange1.1g009788m (locus o range1.1g008553m.g) derived from phytozome v7.0 (chr-ID sc affold00007; pos 2437687 to 2437970)
acccttggaaaaatctcagaaatttggattttgaagtaagcccattaattttcatccaaaattaggaaaccccattatccccaatattcggagccagaaacttttcgtacttatctgagaaatttagggttctgttttactcaaaatctttgtttttgtttcttctgagtcaataaataaatgccagtcagtctgtcggttgttcttgtcgttgcatttcaagaaattctaacatttgcttctaaacaggcgctcgtaatcgtaagctcactcaactttgagaa

SEQ ID NO: 79487 - DNA, 664 bp, Citrus sinensis
  Intron number 2 from transcript orange1.1g026937m (locus o range1.1g016948m.g) derived from phytozome v7.0 (chr-ID sc affold00151; pos 221507 to 222170)
tactgtcaacgcgggagagattctctacttgtaagatttatattctttttttctttataaatgaatgcatttcgactccagttataatatcttcaggtttgcagttaggctgtgattgttctgaaaagcgttttgaatgaaatgagtatacgggaatggtctacttggatatatatcttgcaatggaacaagggaaaatcaagtttagtatctgtttctggttggagtggcatgttttggcgataagtgatgaaaataaaaatagttgcattcaagcatccatttcatatatcagttgtatacaaagacacaaattttattattgtttagttagataaagtgttgagttagtctgtcctgtacataaatatagcatgcagggttgtgggcataaaccgcatgtaagattcatttataagcaataggcctgtggggtaacttcttaagtacatccctctttcattacctacaaggaaaacaaagtttctctggttccagaaatgttaataaagaatcaagctttggtttaggatggtgcaaaatggtggacaaagaaaaatattataatgtttgaacttgactttttgaatggtcagattaatttggtttcgaaaagcagttcgtaactctgaggtcaatgtggtggagttaatgcaggccaagc

SEQ ID NO: 79488 - DNA, 607 bp, Citrus sinensis
  Intron number 3 from transcript orange1.1g021838m (locus o range1.1g021838m.g) derived from phytozome v7.0 (chr-ID sc affold00007; pos 1495025 to 1495631)
ttcagcctggttgggatttgtttgctccttggaaggcaagttggttttgtatctcttcagtagataatctgtacttgttttgattacgtagactcatatccatgttgaaagacaaccattttgcaattgctggtacaactatgcccacaccttttctcttgtcagtcattgctctaaaatttcaatctgttcttgtgtcaatccatggacaaatgcacgcatgttgttgtacagggatgcacatgattaatcttacctgtgtttatcttacttgcttacatctttgtttatgacttcagaagtgtattaccaaacgattattgggttaggggttatagtttcatatttggtattaattcttgaaatgatgaaatccgtcgttagtctagtggagttatgtatacagcctttcatattaagttccacggttttatcgttaacatgcatgatgcatcccagaattcaatcctccatcttgattggatgcatgaaagtttgttgtttcatattttcatcttccggactatttggtagattatgcgctgtagttttatgtagcttatgaatttcaggttgataattttggcacagtaaaccttgttgaagc

SEQ ID NO: 79489 - DNA, 702 bp, Citrus sinensis
  Intron number 2 from transcript orange1.1g002489m (locus o range1.1g002489m.g) derived from phytozome v7.0 (chr-ID sc affold00010; pos 1665782 to 1666483)
ttcttgtggtatggaatattttggttgtttcgcattttctgcatcttctatttttctctatgattatgtatgggtttgaatatggagcagaggatgcttatgatgccatttctggcctaccatttttctcggttatattgaacatgctaagcaatttgtttccccattatactgaacttgtttcaaagtttggaactttttatctgtacacgaatttgcattttttgctaggcaatgtttatttttgtttcctgtgcaaaggaagttggaaatcctaagatgctaaatgactttggttacctttattaatgaggttttaattgaggcatagggagctgcttcgtcaataattcgtggggacagtttagagtgtaaggagccatcttgcacagttgcagtatttgttgactgctcttttacatgctttgactctgatgattgactttctcctctactatcgtcctcgcacatgtcaaaacattattaaattagtttctgcatctttgtaatctgagttttcacatgcggagaagaaaacattttgtcgatttatttatctgcaattttccaattctaatcatttgaagttattttggctgattgaaccgaatgacattattaattatgttcagttggatgtgaggtaactaatacaactctgtttttcatattatattctattttacaggccccaacaccttc

SEQ ID NO: 79490 - DNA, 1037 bp, Citrus sinensis
  Intron number 3 from transcript orange1.1g031846m (locus o range1.1g031846m.g) derived from phytozome v7.0 (chr-ID sc affold00038; pos 746993 to 748029 reverse strand)
agctttatcagaagtctttagaggtggctgcaaaggtacttctttatcatttcttttgtcaattaatgtttgccccaagatgcttatgtttcacgtggttggtcttttagtttctctcgcatgttttgttcataaatttggtctgacttcaattttcaaatataatacagaattcaattatgattttgggttctacatttagtgaggaaatatggattctggtcccatattctgataataatgctgcttgggcaagagcaggagtgattgtagatattgattggatgtaggttggataaatttgtcttctaggaaaatcctaaggaggtcttttcaaattgcagtatgctatgtggaattggatgggtggttgccattgaaatatacagcatctttcccttatgagttttgggtgagtaaggtgagaaataggtactagagttgtctgaaatgctgataggagattgcaaatgaattggttcttgaattctgctagacattgctttgcggtacataactatagctgcatttcccattgttttgatttgtctgaataaaacatgtaatttgttgtcttttgtcaagttcttgctgtaaatgagtaacctataatgcttgttccgttggaagaattgaagtgacagtgtcacaatcatgtggaattattggatagaagtgtctggatgcactcaggtggtccaaggacttgatcatcttaaggtggctgtttcacctttatgagttgtttgagtttcaattacgtttgctggttgagaactaattgacttaagcttgtattaaattagagtgtttcaatattctttgcaaaagaaatggccatttgccatgtctatttatcacatctacaatgtgcttgttcattgtcatagaaatgtcagctgaaaactctttatgctattggctccgcaaagattcgttctgtgtaccatatgtaagtacttattaattttgagttttctcagctagattgataccttattgtcgtttgtttgtgtccaaaggctccggagttgcac

SEQ ID NO: 79491 - DNA, 746 bp, Citrus sinensis
  Intron number 1 from transcript orange1.1g025031m (locus o range1.1g025031m.g) derived from phytozome v7.0 (chr-ID sc affold00007; pos 484834 to 485579)
cacaaagagggcttcaaggttgtctactcactcgggttagtattgttttggataaagaagatgtttaacttgttaaaatttgatatttcgtccttgttgattatgaaatgaaaatgatgaaggttgtagaaatatcatactcagtttatcatttctttattttttgctgtgtgtgatttatatttgctttgtggaaaatttatggaacgcaaaagaagaagaaagttaagttttggacttttgaatcaatcagttactttgattgctattgtaggaacaattgaattttatattgacctggaatcgtggatatcataattatattcttctcgaggtttgctttaaatttgggaatggaagaaaaagtgaactaaatcttcactctttttctatggatttctagggaggtagtggcaaatttgactcacttgagcaatatcctttattgaggttccgttgtaaagcagaacattttaaatctttgtattattttcatgataaaagcgtggtagcttcattgcagtttgagttcgtggacttattaattgcattagttatggggtaaatttgagactttaaattcttttgctcgttcctttttctttccatgaacaaacggaaacttaatagatcatgatgttgattgtggaaggaactatggaaatattggttatttattggtcgtttaagtgattggattcttggttacaggagaagtttcattgccaggtgggaaggcagaggag

SEQ ID NO: 79492 - DNA, 670 bp, Citrus sinensis
  Intron number 3 from transcript orange1.1g001055m (locus o range1.1g000351m.g) derived from phytozome v7.0 (chr-ID sc affold00010; pos 450842 to 451511 reverse strand)
tgtcctggttccgcaaagcacaattcctagcagcggtatggccaccaaataaatttttgaagatgtagaaccatatttatataatatcaaatctctactgcaattattcaaattttatttgaagaggtttcttccttcaaattttaggaatgccaatcgtcagtaaattttttttttttgggtcttccctattgcattagtgtgctacacatgtattttttgtttttatgcatttatttttacacaactgtagtgatgataatgaggaaccttacctgccacataatgctcttcaatatctgcccaaaagtgaaactaaatgcagtataagtgttggaagagcatgatagggcgtatttgttgaatgttaagaagcatggatggaaatattcttctagagagtctaaataaattgaaacgttctaaataaattctatttatttaaatttgtaacccttaactggtctgtttctaccacactcttaatattggatgcttatccataatgctctgttgattacactgatggtattctatatcggtcttgtatgaatacatttgtctaccttgggaccattggtttgtttggttttgttttttcttatatatttctgattctttctctcattttgcagtgtaatagctttatactgaacagcatcccagtttt

SEQ ID NO: 79493 - DNA, 545 bp, Citrus sinensis
  Intron number 1 from transcript orange1.1g001055m (locus o range1.1g000351m.g) derived from phytozome v7.0 (chr-ID sc affold00010; pos 451745 to 452289 reverse strand)
ttccccgtccaggtacaagagttttgtctcttggtttttgagttatcattggttgtgggtttgtttagttttaatttgtctaacctttctcttcgctgacttaacatatatatataaatattttgttgcaataatgttagggatcctaatagttaagtcccaactattatgtatcattcatctattgaatagtaaatttcatagttggtacaattaatattctaccatccaatagataaatgccacatcaattgggattcaagttggcactcaactgttgggatccctagcattactcttttttttttttgagtttttggatataaaaatatattattagtgttgttgtttttattattattatttacttgactcttttgtcttttagagcttccaatgtaaacttttattctacatttcataatattacaatgcattactttgttttctgttcataactgtctccttcattacatagtacttacctctttttttttttgtgtgttggggggggggggggggaacagacttttatcataagcaga

SEQ ID NO: 79494 - DNA, 1013 bp, Citrus sinensis
  Intron number 3 from transcript orange1.1g031849m (locus o range1.1g031849m.g) derived from phytozome v7.0 (chr-ID sc affold02116; pos 7375 to 8387)
agctttatcagaagtctttagaggtggctgcaaaggtactcctttatcatttcttttgtcaattaatgtttgccccaagatgcttatgttttatgtggttgatcttttagtttctctcatatgtttttggtctgacttcaattttcaaatatagtacagaattcaattatgattttgggttctacatatagtgaggaaatatggattctgatcccatattctgataaaaatgccacttgggcaagatattgattggatgttaggttggataaatttgtcttctaggaaaatcccaaggaggtcttttcaaattgcaatgtgctatgtggaattggatgggtggttgccattgaaatatatggcatctttcccttatgagttttgggtgagtaaggtgagaaatagatactagagttgtctgaaatgctgataggagattgcaaatgaattggttcttgaattctgctagatattgctttgcggtacataactatagctgcatttcccatcgtcttgatttgtctgaataaaacatataatttgttgtcttttgttaagttcctgctgtaaatgagtagcctataatgcttgttctgttggaagaattaaagtgacagtgtcacaatcatgtggaattattggatagaagtgtctggatgcactcaggtagttcaaggacttgatcatcttaaggtggctgtttcacctttatgagttgtttgagtttcagttacgattgctggttacagaactaattgacttaagcttgtattaaatttgagtgtttcaatattctttgtaaaagaaatggccatttgccatgtctatttatcatatcacatctacaatgtatttgttcattgtcatagaaatgtcagtagaaaactctttatgctattggctccgcaaagattcgttctgtataccatatctaagtacttaattttgagttctctcagctagattgataccttattgtcgtctgtttgtgtccataggctccagaattgcac

SEQ ID NO: 79495 - DNA, 984 bp, Citrus sinensis
  Intron number 3 from transcript orange1.1g009687m (locus o range1.1g009688m.g) derived from phytozome v7.0 (chr-ID sc affold00038; pos 302183 to 303166)
agttcggaagaaacgctgctctaagactggtatattcaccttagcattgcatacttgtttctatatctacttaatttttcaaattggactgtatattctactatgaatcttataacatgttatcatctaacattatatccgaaactatgtaacttgaagctttaaaatatggattctttgtgtgtaaaggaaactcttgagccaaaaagacaattgttagagtggatgccttgaatgatagttagttattgcatcattacgaatgttctcaattttctattggacagaactatttggcttgtttaggggcttctaataatgttttacattgggcggataaagtaaaaaacatataatgcagtacgtagaagaacgctgtacgtgttttgatggcttttatgttcctgtccataagactcccaagtacctcaatgtgttgcaagagaggggaataaagaaaatggggaatgaaaatggatcctcaaatataaaattcaaaataacacgaaatgccaataaggagcacataaaattagcctcatctccatgaaataaattcctcagattatatttccaggtaattgctcactttacaatcctgtcacaccaaatgttgcacactaaacgtttgctgtattttctcaagtccgtccttcctcattgaggtgtcaggatcaatcattgataaatgtgaaaatatataatcactgatgtctcattgagttgtcacaatcaatcaggatgtttaaactggcccgtggtaggtatagttgacattaattgaagagtaaactgtttatcattcaatcttattctatctagtttgcttaaagaactgctatgcaaattgcaatcctctattacatgtttgaccttctcaggatgctacatacttgttacatcttattcgtatactcacttttgtataaagtcaatactgattgctgaaggttacattttcactgtgtacctgtagattggtat

SEQ ID NO: 79496 - DNA, 599 bp, Citrus sinensis
  Intron number 2 from transcript orange1.1g028416m (locus o range1.1g026482m.g) derived from phytozome v7.0 (chr-ID sc affold00303; pos 15523 to 16121 reverse strand)
gaactaccaggttcatttttctatttatcatttttttttaggcaaatgctaagttacaaagattgtaacttacatctctcatgtgaactacataaattacgaattttataattttgtgtgattcacatgagaagtgtaagttacaattattataacttaaaggctccattttttttatattatcacatgtttcgatatgtaaaggaaattacaaacatagacatcttatatatatatattccaaattaccagtgataaacaattagttaaataaattatattaaaaaaacaaaaagctatctagtcaaactgtaacccatataatcgaataacttatttaatctcaagtgttaaaattaaaatagagaaaaaatgttagaaaaacaaaataaaaaattaataatttattatagacttaaatggtaaaaaaataataataatagagacccaaaatgttattcctcataaacataattcagaaaggcttgcaaaaccatgtttgatgttattttctaatttactatttagattgccacgttgctctaattctaaacatactctgatttcttcgctcgtgtatgaattatgaaaggctctat

SEQ ID NO: 79497 - DNA, 913 bp, Citrus sinensis
  Intron number 1 from transcript orange1.1g011476m (locus o range1.1g007975m.g) derived from phytozome v7.0 (chr-ID sc affold00010; pos 1591653 to 1592565 reverse strand)
tcactttctaagttgattgtgatttccaccgtcgggtatatactctgcttgagctacttttttccccttcttttttggatgaatcaaactaattcctatctattttttcgttaattaagctttgccagttacttttagcttcggtttttctcttagatttgttctctgcatctaatgcttgatctgttttttttttttatgaatttatctttttttttgtttaaatttcatcatgtaaggggagcatgtgcaaagcaaaacaaagcatatcttttttttcttttttgataagaaaacagagcatatcttatttaaatgataacaattaataagtgtagattgtaattttgaaaattttataatgtttagttgtgtaagctcaaatttgagtctgcaaatttcgtgggctggttcatactgtttgattttaatcttacagttgcatatctgatgtttcaaaagttcatacatgaatgattttgcgtgtttccggagtatataccttttcttctctctgttttattctgttgcttcaattttcatctattacgcatgtttttatgatggggttttggatttttttttttttgtctcgactctgttctgtttcttcattttcatctactgtgcatgtttttataatgtggtttcggcaatctgtagagatctaagattaattgataaaactagaatcaacacaaggatcaattgctgaagcatagtattttctgaattttgtaattgcttagttatatatgtagcagaagctaagtatgagtttagtcaagaattttgaattaacagtgttcccggagatggaattatgttttcttctaaattttcattttcctctggctgatgcttgttattgattgtttcagtggcggcagccttattgcttattctgaggcaa

SEQ ID NO: 79498 - DNA, 694 bp, Citrus sinensis
  Intron number 2 from transcript orange1.1g004124m (locus o range1.1g004129m.g) derived from phytozome v7.0 (chr-ID sc affold00026; pos 894712 to 895405 reverse strand)
ggaaagttgttatcttgtgagtgattcattcattgatttgttttataaaacatgttttttgcttctgaaaatgattaattgacatcatatatgtttgttgcgtaatgcatgtattcatgagctacttttggtctaaatttttaagtgcgaaaatccacaacgtttgaatctgtttttgatcactagagggtgtatagatctcataatctttgtttaatagagtcacatggtcatcattgtttgtatttctttttttacgaatttgaaaatcaatttgagatggtaattaattacattgtgtaaagtaaaacctgtgtgctattaatgaatgacacttgccattgtttcaactgctaccggtgtgtttgttgagtcaattattgattttggctgaagatctaattttgaagggtaaggctcttgattaaagtttaaatggatggacagaagatttattgcagccccatttgattttgttgatgaagaaattcaattgaatgtgacatttaagacttttgaaagtgacaagatgacaaaatgtttaatgctgcatttgtgatgttgatgattgtaattgcataactccccattcttttctgatctgtcatatcacttggataacagtactgctgatgggttcttcttttcatccttttttttttccaggaatttgagggatctttgtcttggaggg

SEQ ID NO: 79499 - DNA, 440 bp, Citrus sinensis
  Intron number 1 from transcript orange1.1g046641m (locus o range1.1g046641m.g) derived from phytozome v7.0 (chr-ID sc affold00051; pos 115055 to 115494 reverse strand)
ggttgtgattggaaaggtaaactttgccccttcgtttatcacttcatttgtcttactcttgttttttcaatgtttttgtatttgtcatttctttgttggggaaattcttttgaaaatattttgatgggctcttctacagttatttatttgtcttttttgattgtttctatcttttgttcgacggacttgagttctcatctttgtcatttattgtgattagttggccatggaacttctaatattacaattatgtatacttgaatggttgttttctggctaagttctaaccacttgagtgttgtctagtcatctcgactttgtcgtgccccttcttccaatttcactgtctttgctatagtcatttttgcctataactaattgtctgctggctacaattattcacagggttcagggtattcagatattgtgaagtccaacag

SEQ ID NO: 79500 - DNA, 178 bp, Citrus sinensis
  Intron number 4 from transcript orange1.1g014726m (locus o range1.1g006206m.g) derived from phytozome v7.0 (chr-ID sc affold00051; pos 519651 to 519828 reverse strand)
caatatctgtaatgccaacaaacttgcacgatgctttgattatagagatttcaaattcttgaattaatgcatttaaaattttttccatgttgagttattcacaataatttttttttcttctctatatttgagcaattgaacagtagcctgggcataaacaatttcactggtcgagtgc

SEQ ID NO: 79501 - DNA, 584 bp, Citrus sinensis
  Intron number 2 from transcript orange1.1g028045m (locus o range1.1g028045m.g) derived from phytozome v7.0 (chr-ID sc affold00004; pos 4035047 to 4035630 reverse strand)
ctagaaggggttggggatttcgtggtgtgcataaggtatttgacgttgaaattttacttagaaacagttagcttctttttggatattccccggattgtgtcttgtatagcactggataggaccaatgttttgatatcacacatggccattgtcggaaactcattagaactaatgattgtgtgggttgattattgggtagtgtgatttagtgatgaatttttatatttcccgtgataatctgcattacaaaataaggaacttgtagattcttagcattttcttgccctgctgcactgttttagaatttatttctgcagtatttgtttctgaatttaggaaacaaaagattctgttgaatttatttcaacctttttgctgttagttttgttgaatctgaggctctcctgatttggaaactagtagagggagaaaaaaaaaacttatctttagttttcatggcaattttgaagtgttgattattatattacattgtcaaggtgttttttttttcctccaaatgaaaatttaacctgtcataatttttttcaggcaattatttgtggaaaagttaaagacacccccgt

SEQ ID NO: 79502 - DNA, 769 bp, Citrus sinensis
  Intron number 2 from transcript orange1.1g031013m (locus o range1.1g029591m.g) derived from phytozome v7.0 (chr-ID sc affold00117; pos 346520 to 347288)
cagagtacaaccctaaggtatgtaaaaatttgacagtaatatttattctaatataatgctaggtatggaggagtttgattgcccacccaatcattgggtctgttggtcgtggcacccggcataacgcatctctctcacttgtgtttgtttatttttgtcatgtagaatgtattggttagttgcttaagcatcatgtcattgttattatgagtttatgcctaatatttcttttgaatattacaacagcgttttgctgctgttataatgaggataagggaacccaaaactacagccttgatttttgcttcgggcaagatggtcagtcttcttgtactgtcctaaatcatggttctgaatactgataattttgttttcctgttattatactcttataagcagtggattctattttttaaacaaggttaagtagtgtgtttaatttctcttgctctctcattttgctttctttttcatttcctccacttctactagttgacgtttctgttatgaaaatagtttccaaatgtgttagaattgataaattagttctctcacacgctgcaggacatatcaagctgttgttttatgttttttattgtaggattatggataatcattttcatagctgtagttgaatatgccatctgtgtatggtgggtgctgcttcatatccgaagtgatttaatgtttcagctttgccttttttactgaaagagatacttctctcgttacaggtttgcactggtgccaagagtgaacagcaatcaaa

SEQ ID NO: 79503 - DNA, 610 bp, Citrus sinensis
  Intron number 1 from transcript orange1.1g032136m (locus o range1.1g026289m.g) derived from phytozome v7.0 (chr-ID sc affold00070; pos 168888 to 169497)
gaattttttgattgaggctgggttgatatccacgggtaagaagcagaattacattttccccccttgctctgcgtctgtggaattgagttgcatgagtgtgagtctatgcttaatttatttgatcttccacaagtattcatgtatatatgaaacagataaacacattacttcatactagcacatgcatcaaattgaatcgtcaatgttatggcaagttaatgcataatcattttcttgatgtaatcgaagatttagatagtgattctgattcacagaacacttcctatgccttctaccctcatttggatgtactttgtatttacttgtgctaactttaagtgtttgtacaaggtcttaagaatagagataatacacttcaagagaatttaggtatgttgtggttcacaatttggagacctcccttctttttttcttattttggttgttgtggagtagaactctggttctagcttcaaaataagatgtatagatttaatagcgtcactgacttcgtcacgggagaattattttgtttgtacgtgttttatttgtttgtccaaggcaaccctgacattggctttctgtgcttcttgtagagtccctcaaggtc

SEQ ID NO: 79504 - DNA, 587 bp, Citrus sinensis
  Intron number 1 from transcript orange1.1g005723m (locus o range1.1g005723m.g) derived from phytozome v7.0 (chr-ID sc affold00004; pos 1560785 to 1561371)
tggtgctactcagctcttcttcaaccatttatgtcggctttccttcctttgactttcttttgatcattttaatttattcctttgcagtcagataatggatcatgtgggttgacttttgtgttgttaattttcctttctcattttttttttccgggcttcttttgggttcatttgttttgtagtttgttttctttttggatggcatgattatgttttacttgaatatttgtgtgagcggtatcttcttatagattggataagtctttcctgttcctttatcaattgccggggaattgttctgttattgcttactaatagagatcatttgtttttggtaatggcgcttatataattttggaatttattcccttccaattgttatagtcacacctcaattgttctgatcgaacttttattgatctggtcttattattcagttcatttgagtatgttttatttgattaggtattgaattttaggaaatatgtcccatatgaaatgttggactccttgtaaacaatgaaaacaattttgcattcaactgtttttcagaccccctgtcgctggttcgggatcaccgagctaag

SEQ ID NO: 79505 - DNA, 627 bp, Citrus sinensis
  Intron number 1 from transcript orange1.1g008646m (locus o range1.1g008646m.g) derived from phytozome v7.0 (chr-ID sc affold00007; pos 1079547 to 1080173)
aggtgactgtttctcagattttcaatcttctttttttttttttttttatatcgtctgttggcttggtgagctaaaattgttgtctgggtatgcttaaatcttattgctttattgaaaattttctggttgctggcatgctggcttccttgcaatttgttttttccaatgctttaatttgatgatttgttggggatgtgtgacatttattagcttagtaagaccagaattctgttttcctgatttctgctcttcagctgctttcacgtttagaaacatccatttatttattataggaatctgaataatttcatactagttggattaacaaactgcattttgtgaatattggtttctcccggctaagttttggcgatgtcttaaaattgaagctattaggctttttgggtaattgcaacgttattatagctcctgtcataagttcgattgaagtgaaagagttaatgttctagattgaatggaatgtccatgttgtcaatagtttctgtacattagaaaatcacgtctgaatcaatgttttggcatgagtttcttgattgcgatgaacgaatcttgtttcttgttaaactgtgaacttttaatggaggcctttgatgcttgaaattccag

SEQ ID NO: 79506 - DNA, 762 bp, Citrus sinensis
  Intron number 4 from transcript orange1.1g016739m (locus o range1.1g013736m.g) derived from phytozome v7.0 (chr-ID sc affold00060; pos 383467 to 384228 reverse strand)
tttgaagaacggaatcaaatcaggcaacaaaggaggtaatgtcttctgctaaatggggactcatccagtaggtgtaataaatcttttaaaacaatttggggaagaaaatgaatgctctgtgatatacttgggttttctcttgactcttatctgagctttggaaattgattatgatcagacagtctgattgatggagacatttattttcctggatcaaatattttgataaaatttttgacatgcataataataacatagtaaaaatattatgttgcattagatcattgattggtttttcatgagaaacgttttctactgggtttctcacacacacacacaatggggcatggatatagttatacataaaattttcatgcatgtatattctttttcagtcatcatgctgaaccatttcatccataaattatttgcctttttcctgttcagcctttggttataagtttgtgagcaaattcctgaaatgacgaatagtggctttacatgttcccagtatgtccttgttttgattttatgctagtgatagcaagtttctcctttgctatttcttttccttctttactgaacatagaggcttaatatcttacaccaatcattttaggcagcagtatgcggcatggaaaactgaatgtcaaaacatagttcccattattggtagtgggaagttcattacagcagctattgtaactgatgatggtcaatcattacaagattcgaacagagattcgctagatcagggctggc

SEQ ID NO: 79507 - DNA, 579 bp, Citrus sinensis
  Intron number 2 from transcript orange1.1g014216m (locus o range1.1g014216m.g) derived from phytozome v7.0 (chr-ID sc affold00067; pos 416779 to 417357)
aacaccagtcccttgctcaggtttctttatattttgataagcttgatcattagcgattaatgtaaagtcataatttttttctataaacattcgtggacttagtaccactgttttttgtgtactattactaaaagtacaagcatttctatctggtgcattttttggttcgttattgttagtgtttgtggttagttgctctttaacattactgcaatgtttgggttggacctgatatttaaatcttagtagatagctttaacagacagaatatttcggttctaaaagtactggtaactatagatttttactgcaattatgaagatatagtgaaagccaaataatgcacctctatgatggacaaacatggtgccaccatcagttctgggccattagagtctgatacatattcattcttctgaaattaataatattggatgttgctgctgtacattaaggttttacagacatgacttttgtctcttgaacaaaaggtttcctatgttgtcattattgatgtatttactaaattgtttttgtgggttgagatgacttaaagatgtttgattgctctgtaggaat

SEQ ID NO: 79508 - DNA, 600 bp, Citrus sinensis
  Intron number 1 from transcript orange1.1g027830m (locus o range1.1g022923m.g) derived from phytozome v7.0 (chr-ID sc affold03554; pos 7358 to 7957 reverse strand)
gaggaagctcatccaagttctccattagtgcacaggttggtataaaaaatatcattttttttttcagtttatgaatctagagagtttttgtttttgccgttatgcctttttaaggtattattttgtaacttatttgctctgtttcttggatgataaggtatatctattgtggttcatgattgatttattattttaattgtatgagcttcagtgactagtttgaaacgtgtttggaaacctagttatgattgaaatttaactttggtggtagctttgcctttgaggatcttacagagatctatgtttgagctggatttttgttgattataaatagaaaaacgttattagtaatagaccattttgctaaatcagtgagaaataatatgattgtgaagattgtattttgtgtattttgtggccttttaattattcttcatgattgaagttcttctgacttatgtttattctccttagtatttagtttttgatggttatgttttattttgattttaaatagtcgaggtgaattaatacctatatttttcttctttgatggggacaatagactggccttagaattgggaaggcacaaaggtggtg

SEQ ID NO: 79509 - DNA, 524 bp, Citrus sinensis
  Intron number 1 from transcript orange1.1g002316m (locus o range1.1g002316m.g) derived from phytozome v7.0 (chr-ID sc affold00361; pos 44630 to 45153)
agatattggaggttcgcttcttgtgaacttctgttactttgattttgtgttgttgttttggtttctctaaaaatttatatttctttgtttatgattggtgattaaatttcataattaattagaagtaatggactatgaatgaaaccacttcaatgcactaaagtgtaaactgaaacatgtcagttggatttcatacctttgtaatggaaggatgttgaaggcctttgtcaagatttcttcaaaattaacctcttcttttgggagtaaatttttaatccatattcatgtttagcacaagcggtattcatatatgcatgattctcagtgctacgctgcagttcatgcaataatattgcatccatttttcaattgtcatccatacagagaaaaacactaacacatgtgcttcaagttaaataatttctgacatttttcattgtaatcaatcaattgattgaacttcctcctttgtttgtcttcattctttagagaaaaactggtggattggtgatttggagatctgg

SEQ ID NO: 79510 - DNA, 518 bp, Citrus sinensis
  Intron number 1 from transcript orange1.1g021109m (locus o range1.1g014047m.g) derived from phytozome v7.0 (chr-ID sc affold00164; pos 158955 to 159472 reverse strand)
ttaggtcattactcttatgctcttacttaagaagcattaaactgggtagaaaatgcaaatgttttcttgttttgtttgaaaagttccaaaccacagttgaagtttttgtgtcagcatacatgacatgatttcaccttgctaaaatttaaagttcttatactgtgcagtttacatggattctttcaccttctttgtttttgctctcaccgagtcctgttgccttttatttagtatctaaaaaccttaggaagtgcatcctggcaataattttcttaatttttgaaagatgattgtggtttcttgacaattttttgaattctgtcttcaaaacaaaattccaaccatatttttgtttgatgtgatactatgggactgttggaagatcttctacaatttcatttggaattatcataattgcagatcaaaagcaattcctcggacagtttggattacgtgcacgcatattatgatgatcttgacattcctcctgtatgcatcagctctcagtggtaccctct

SEQ ID NO: 79511 - DNA, 1064 bp, Citrus sinensis
  Intron number 1 from transcript orange1.1g015767m (locus o range1.1g015767m.g) derived from phytozome v7.0 (chr-ID sc affold00016; pos 1345866 to 1346929 reverse strand)
actcagtttcctctgaaatctcctgttttgaatcggtaattaattttcatttttcttgaaaagttttgagtttttgcacatgggtatcgttgattttagttttttatgaagtttcttgatttatttgttattgagtatttgggaattgtatgctagggaaattgattgatagtggttcccccccccccttttttttttaactaggttagggttatgtgtgtaaaattcaatctttgtgactgtatttttttttttttttggcttgagcttttttaatgacttagggattttgtcgcttgtgaatttttgtatttttattttctacctattatttactgggcacgagatttaaaatattgtatatgttaatttacttgcatagacctcctaccttttgtgggttttaagaacttgacaagctgttttattagttcaaaacttggtagtttatacggtttcttctatgaagcaatcaattgaagcatagttgttagtctgaaaatatttgtgtgtaactgcctcttatttgattcaagtggcatctagctccattaggattgaaatgatactcttattactgtagatagtctcattcttttctaactttggttaagttgtgttatcattgatgctggcaacattagaaagagaatcctttatatctgagatggctgagaagctaccgtttgaacttgggaaaggaatcacagaaattgtggacgtcacatgacgaagttatcttcttgaacatagttttttgaaaggaaaattctctgctaaagtatcttttttcatcctaacaaatcatgtgatgctagaatgactgagaaatgatgtgttatggttgatcatattaaattgtaatgtgttggtcaagcaattggagtttgcaatttcacgagtctttgtattcttccttgtttacagcgcagcttgttggtccttttttttttttttcaagccttgataattaagtggttttgagaaccttgagatattgactaatccctcttcctttctggtttataggtggtcagttgttcagagaccgttaaaagtactgt

SEQ ID NO: 79512 - DNA, 854 bp, Citrus sinensis
  Intron number 1 from transcript orange1.1g030633m (locus o range1.1g028014m.g) derived from phytozome v7.0 (chr-ID sc affold01275; pos 8272 to 9125)
agtctcttcggcctcggaaggtgaaaataaataactgaaaattaatattttattttcactaattaattcaattaattttctcgttaattgaaattcaattttgcattttgttgtagcgcgagcagatctgtatattctcatgtgatcaaccgatgctttggctaattttctttttctttttttacttttcctaatttgtgcgatcgtattcaatttactttttggatgcggtgcaaaatgagaaaatatcttgataatttgattgtaatatgaaaaatcttaaaatttagattttatttagtcgctgctcttgatttgttgttgaaatgcaattattattttgtgtttttatttgaatttcttgtttattattggaattgactttttctaagactaattttttttttcccgttaatgtgccaataggaatgtgatttctgagcttgatcatgtatgtaagccttaaagcaaaccgatgatagtgtaatatatgtaacttttcagagatctttctatagcctctgttgttaaataacgttgtaattatgatatagaatgtctatcttatgtgtaagagcttgtaggatttagcaattatgtaaatacagtgtaaaataaatggtcttcgcgttaaatttaaatttaattcttgcatatggatgtgggggagagtgtgaaggcatgtacaatttggagaaagtgaagttaaatatgagtccccatggtaacactatctgtttattattgatgccttgtagaactttgtcttttatctttttcagtttatgaatcttgctttataattttttgctgaaacagaaatcagagaacatttcgcccaaaaaagagtgcac

SEQ ID NO: 79513 - DNA, 946 bp, Citrus sinensis
  Intron number 2 from transcript orange1.1g030633m (locus o range1.1g028014m.g) derived from phytozome v7.0 (chr-ID sc affold01275; pos 9105 to 10050)
ttcgcccaaaaaagagtgcaccctcggggagtaaggtttgtactcttcatgccactattgcttttcttgctgattcctttcttgttggaaaatgatataatacgtgctagccactgattggtattgctctttttattttgttttgtttgctcaacatattgaattttactaaatttgttgagaatctggttgtttgactcgtggatggaataaatacttggttcaactttctttgttttcagtaatatttagttattagttaaattatttagggccagtgtcatccttggaattgaaccgtcctgcttgaaaaaagggcttctgtagtatttaatctgcaagcagccgaccaatacattcaaaacaaaaggtggtttcattatgaaacatgttactgttgaactgagcagatatgatttacacaaggcataaaagctgtaagttttgatggtgtttggataatatgctggtttcttatttcataaggatattcaagggtactctgtatatttggtgaaacagaaaattctgctagaagggttataatgttgagggattgagcaactaaaagaaattgaaacattgttttagtttggcatgtaagccctcttgttgctcatgaaacttattaatcatcagaatttagccttcggaaggtgcaaactaaaatataatcataggaaatggacatctaaacttcctgaatttggaaagattggcaactgttttagttttatgttttcttttcattttggagatgggagttgtaactttttggttatgatcttaatttagcatttgtcacatggtgctgctatatttgaaagtttcctttatattcgacttctaagtttttggcatttgtatctctattggctttttaattttgaatttttaattagtcttgaacttctgatgcagggtgcacagcttagaaaacacattg

SEQ ID NO: 79514 - DNA, 718 bp, Citrus sinensis
  Intron number 1 from transcript orange1.1g037506m (locus o range1.1g037506m.g) derived from phytozome v7.0 (chr-ID sc affold03852; pos 190 to 907)
aggaatttcagggtattggcgtcaccattattgaggttacttcattactcaattatctcgatctcctttggttttgttttcttattggaattgcgcatcggtgtttgtctcataccatttatattcatatcatatttttcttctttttaatctctttttaaattgagtgatgatacagccacaaactcttgtacaaacttatcttgtacaaactgacgtggcattaattcattggttgaatgaaaatataaaataataaaaacaaatcatgtgggccaagtgatatttaattcaactaatcttatcatgccacattagtttgtacaaaagtttgtggctatatcattactcttttaaattttattgtattcgtaaaattttctttacacagaaaacagaaaattttactaataaagggttcatctcacttagcaccctatttgttacgcaagttgtttcaatattattttgttaatgagtttgaaagcattcaaattcaattgtttcaatttttttatttcattttataaaatgcattgatgaaatttgagatcattttagtaattggggttcattggacataaggccgtacttttgataaaagtactgaaattttattactagttgataaagtgaccaaattaaatatggataattgcactaaagccttatttaggggtgtcaaaaatatccgtgcaactggacttggacagaactt

SEQ ID NO: 79515 - DNA, 765 bp, Citrus sinensis
  Intron number 1 from transcript orange1.1g041225m (locus o range1.1g041225m.g) derived from phytozome v7.0 (chr-ID sc affold00036; pos 123315 to 124079 reverse strand)
gaactccttgctattggcccaacaggtctctgcaggtatgacaaagtacccattttatcatttgatagttttcctttcttaataacagagaccgtttgactgtatactttatttaattaaggccaccttctattgtctcatgtgctgtaactgattgagcgcaatcttctcattttattaccatttgttagctagaaccttcaaatggcttgtgtattttatatcttttaaaagattaacataatttgctggaattcagaaacatttaataaatgaggaagcaaacaagttatttgcagctgcaatttttggccgtctgtgggttgacagtgatgggcttgaaaatttgtaaagttcctacggtttattttggcttgtaattgtgcattgtttcctttcaaattaggggtctctgaggtatttgacagtctataatgtgaaaatggtgtcttctcagggactgctcatctcttaattgcatttaatcattaagaaagcaaaagtattctccaattgctcttgaagaaatttttttcttagtatctatattagatctgcattattttctcaaggtaatgaatgccttttggaaagagagaatatgaaagctgtcgccagtaatagaattcattttttttttgggggttttctatcaatgaacttaaataatttgatgattctataagatttatttaatgtgttagtatttatcatgtgtaatttctctcttttttgatcttttgctctaacagctgctgttaggag

SEQ ID NO: 79516 - DNA, 554 bp, Citrus sinensis
  Intron number 2 from transcript orange1.1g017054m (locus o range1.1g013191m.g) derived from phytozome v7.0 (chr-ID sc affold00035; pos 543539 to 544092)
atcactgcccttgggttggacagtgcataggattagtaagttttctgtcttacttgaaattgtcctgagctctgctctagggaaacctgaattcgctgtttcatctggttcttagttttattttcacagacaccttcttggtggagtgtttcactttttatgagattatctaaaacaagatacctcatccaaagatgaagcggaagaaaaacaaaagccaccttttacacttgtaactgcaactgcaatcaatccaggaaaatgttatgttagtccatatttaggtaattggcaggctatccatcgtatctctaaggataatagtattgctgataatgaaatgttcagtataataattgtaaaatattttagggatgcacataattagtacttaactgccaaatattcttcgtttgttatccagctattacttgcacttgatcaatcacaagcatttgttaccactattgaaatttgagtatacacgccggatagatgtctgactagaaattttcttctgattatgtttgcagcgcaattacagattcttcttt

SEQ ID NO: 79517 - DNA, 610 bp, Citrus sinensis
  Intron number 2 from transcript orange1.1g006293m (locus o range1.1g005436m.g) derived from phytozome v7.0 (chr-ID sc affold00007; pos 459111 to 459720)
agactggtagcggcaaaaccactcagattcctcaggtctttcttttcttaattaatttcttatttaatttgtttatttatatattttttctctttttgatggatgtggctgggaacatttaaacgaattgcttttctgcagttggttttagtgtctttatactaattgttaattggattatttttgttaattcattcaagctttgtgtgtctggaaactgtgctgtttatatttggtttctgaacaaattaggggaaatgaaaaacaagtgaacattccagcttcattgacaaccaaacagaactttgtgtgcattttgttgtccctcagagataggtttatgtttatccagcttttcattaatgatccatgacattgccgttgttcaacttcatacaaagcagaattgacgattacctaataactgggccaagttggctgtgatctattttcgagcttcttgctttggaggtgtcatctatatatgcattgttgtttttggaagtgtttgttattgtggatgttggccatgacttcttgagattgttcaaactgaatggtaaatgttgtctgctaaaattacagtaccttaaagaagcaggttgggcag

SEQ ID NO: 79518 - DNA, 809 bp, Citrus sinensis
  Intron number 1 from transcript orange1.1g026027m (locus o range1.1g026027m.g) derived from phytozome v7.0 (chr-ID sc affold00772; pos 57630 to 58438 reverse strand)
ctacggccaggggacacgacacttaaactctgtgagtcgactcagatttcattagcccttaagcttccattttcattctaatcgatatatgctgcccttcgtagattttcagcctttgatcttgttcaaactttctgctttgttgttatttttgtgatcatgttgcttttttgccgttttatccatctgggcatttttttcgtttgttgaaatatactgatctttttttttcaattttgttatgtattatgcttttggttggtgagaatatgtaaagaggaaagtaaaagaaagaagaaaagcctattacaattaattcatttcattgagcttgaatcaaaatctgtatcattaataattaatctgaagaaggctcaatttatgtcttttgtttttttttttctgaaagaagagttttgagggcaaatttttaactatgattgagatggaagtgatgattatttccccagatgatcgacaatgattataatgtgcgatttttctctttttgagaatccaagccagtattctgatccatctccatgtcattttaactaactattccactttcattaatattggtcaaaatttttacttttaggttattatattttgtaatgtaggtttctgaatattagagaagatacaagtagcttcaatgttgttagggatgtttaatgttgctatgataaaaatgtctatttgggactgttataggattcgagtatgttttgattttatggcatgcacgtttattgttttactaagctagaccttattctgaatgtgggtttgttattattatagag

SEQ ID NO: 79519 - DNA, 742 bp, Citrus sinensis
  Intron number 1 from transcript orange1.1g025976m (locus o range1.1g022827m.g) derived from phytozome v7.0 (chr-ID sc affold00197; pos 54289 to 55030)
gcgttgagccgacgcttttctcctttttttttcaggtacttatcttctgtttttaattacagatcagaaatattaattgtgatttttacgctcgtgttttgtacaattttttaattatttattttatgattagaattgcagagagtgacgaatttcaggaatgaatgtttgatatgactctgtcgaatttgtttattctttttgttttcgtttggaatttcaaaattgtagatctgcatgtttggtttggttcctagttcttaaaaatagtcattattaaaaaaatattgtgagttgccttgcatggcaggttagaataatttgcatttaattaattactactctcatgttaaaaataataattactactttttgtctattttatacaaaatcaattttcctattttggtcttcttttggatattactttgtggactgagtacttcatcttctgcgaaaataatcgcataatcgtggtttggttgtacttcagattgaaattaaatcacgtttgttgtttgagatatgtttttcattttcgaaacatgcataattgttgatcgtttttgtgataatgtttggtgatatacttattccatctttctttcctgatttacaggtttacttgctattctcttctctagaagaattgcaaattcaatggctacgcatgttgacatgtctcttgatgacattataaagagcaggaaaaagagtgagagagaaagaggacagggcaggg

SEQ ID NO: 79520 - DNA, 928 bp, Citrus sinensis
  Intron number 2 from transcript orange1.1g025976m (locus o range1.1g022827m.g) derived from phytozome v7.0 (chr-ID sc affold00197; pos 55124 to 56051)
ctcgaccatcatcatataccattgccaaggcaagctcaaaactgtcgatgttttaagcgtatgatgagaatttaataagattaagaaacccatttacgggaggatctctaacagtgttttagattttcaaagaggatttctaacgttactttgacaatcaagaggcttgtttggctccgacactatagaattatcgcaacctgttgcttttgtatcactatcttcatgatttctttctacttgtgggttagggttatattatgggattttggcaatcagatctcatgtatgtatgcagaagttctctgatgccctattaagttattatgctacttcatagcattttatgtgaaggagcttcattagatgaaattttgaaatggtgctcacctacagcataacatcacataagaattagtgcggacgagttctctgtacccgttcataatgcatattatgtagtttcaatctcaatagtgattgatggctggtggtttagacatgaagcttatgatggatcctcttcctatgttcggactttcttcggggcgagatttctgttactgttctagttcatggcctgtttgcaaaggagcttccttcgcttaacttcagaactggagctctcacccatagcatagcaacaatctataagcagtgggttaaatcttttactcccatctaccaaccattaactcagtttggtggtaattgggcttgcttgagctttatgcctaactggattctactctacttgataccagtttctttcacattttctgggaattctgatatctgatttgattttgaaaatggtgaattattttgttttcttgtcataagctgacttctttttctaaggctcggttctcttttcccgcttcttttatcagtcttttcgcagaaccaggaactttccctggcagca

SEQ ID NO: 79521 - DNA, 756 bp, Citrus sinensis
  Intron number 3 from transcript orange1.1g029630m (locus o range1.1g029630m.g) derived from phytozome v7.0 (chr-ID sc affold00117; pos 245464 to 246219 reverse strand)
tgcagaagatcgaactgagaatatacgtagggttggtaagtgtgtttttgtagataaattaacctttggttggagtttaggttaggtgaattcaaaagtttaattgtataaagtgattatttatcaccaacatggcataaaactgatttgaacttgtatgaagaacatatgtgtctgtttgcttgtgtatagaggatggaaacttatatggatgactccaatcacctgattgattttgttgcttgcagattcatatgatttactgttcccaatgattatgtttaagtctttgacactgatttgggaagtctattgattttaattttgttcactattagacttatagtacttcttgcatgtcataattttctatttcattttcttttttcgttttccctgtaatttaatcaattttaaatgcactagatgccacatgctttgtctgcatatttgtctctgggcatagtctgaaggtacttttgccaacacaaaggcacaaagttgatttagggaatgcccatggagcgcgcttctaagtgcatgcttttccatatatcacaaaattttaacatatcaaaacttaatgatttccaaaacaaatgcagaagaacagtgagagtgagactagagttttgggctatcttttcgagagcattaggtgtgccttctacattgtttgtgtgcaacttatttagtttcagttgattcttaattattagttttctgttataggggaagtagcaaagctttttgcgg

SEQ ID NO: 79522 - DNA, 481 bp, Citrus sinensis
  Intron number 1 from transcript orange1.1g029630m (locus o range1.1g029630m.g) derived from phytozome v7.0 (chr-ID sc affold00117; pos 246724 to 247204 reverse strand)
ctctggcagttgcaaacaacccaggaagctctaaggtattggatttctttctgtgaatgtgagtgttttttatcccaaattgtggtttccttttgatgttatttttgtgatttaacaacagataatctttcgaaatgcgcattttttgctgattattgtggaaccattgttcccatttcaagcgtatataattcactgttcgacctttagattagatcatggtatattctggaaaaagcattgatttttgcatcaggctatgtaaagcacttggagggtaatctttattttggcatataatgattctgcattgttatctttagtgtttcggttgattctttggtgaattgatgtgtgggttgttctgtgagaatattttcttctttgatgaagagatcttgatgggttgaaaccattgaatgaattgaatgtttgtgtgcctgtagaagaagggggaagtgaagatataacatttttgtga

SEQ ID NO: 79523 - DNA, 957 bp, Citrus sinensis
  Intron number 2 from transcript orange1.1g011357m (locus o range1.1g008692m.g) derived from phytozome v7.0 (chr-ID sc affold00004; pos 2885652 to 2886608 reverse strand)
gttgcaggttgcattgctccctactttgtggagaggttagtatgtatgtctattcactttgccgttcatgttcttctgagagaaaatatcttctcttttaagaaatcttatcacattttccaatttaatttatgatttgctcaaggcattgtaaaatcgataggagataactgaaataggaagtggatgtgtttttgttgtgtggtaatcagcctaaggcggtatgataatgtttgattgttttgatgcatttataacctttaataaaatccaataaacaacccagcaaaaaatttatactgtaataaactccaagacacagaaatctcaaccagtgagtgtattctcggtcattactaaaagtgtaatgatagaccaaatttcatctcaaatgatgtggcatgtgatgtgtcattcattaagtgattgataatttttcagaagtttcaagtgaactaattacattatcacatccacttgatgaatgacacatcatttgggatgaaattttgggatgtctggcaatgctcttactaaaatggctcaacatcttccgtgctccaagcaatttccagatttcttatggctgtggatcatgattttgtgacaaaaaaatttggtaaattttgagtctaacataaaatgaaatggtgttacatgagtgtctgtgtgctttgatactagttgtcctactaatgtctaggttcatatttattggctttagtcatatctatatgtggtatcttccatcccaaatacgttaattgttcaatttattggctttagtcatatctatatgtgatatcttccatcccaaatacgttaattgttcaatttattggctttagtcatatctatatgtgacatcttctgtcccaaatatgttaattggtggactgaacattcattaacgcccttgcaggtttcatttcaataagaattgtttggttgttcagt

SEQ ID NO: 79524 - DNA, 293 bp, Citrus sinensis
  Intron number 2 from transcript orange1.1g023539m (locus o range1.1g010132m.g) derived from phytozome v7.0 (chr-ID sc affold00656; pos 87776 to 88068 reverse strand)
agacttttcctgctctcttcaatctttatcggcaggtttgatcagatcattctctctttaggtttcatataatttgttatcatttaataatgaaagtgttgatgatatccatttgagttgctttctggactggcttaattcagcttatttttcaatatatatgcctgacctaggaaaattagttttaactgtgtgattatctatggtttgttatggtaaagtttctgttttgtcttctctgggtgtgtttattttgggatggtgttggcatgtgcaggggtttttacagtcaa

SEQ ID NO: 79525 - DNA, 849 bp, Citrus sinensis
  Intron number 2 from transcript orange1.1g011162m (locus o range1.1g011168m.g) derived from phytozome v7.0 (chr-ID sc affold00036; pos 772794 to 773642 reverse strand)
tggtctctttgtggaagagcattttccttcacaaggtgtctgtttatttatttgtaaccatttctatctttattcataaactagggaggcaaaagaaaaagtaatcaacttagtgtttgttaacgccacttgtttggcttgtttcaattagtcaaaactcatgcagtgggagatgtgaccaacagttaagttactagagtttcaaatttgtgtgttaaaccggaggtgctttttctttttttaaaaaaatgctgcgtttggctttggaattactcaattttataattagaattggaattggtgtatcaagacaatttatctgaatcttccaatgagtttttataaaatattatgaagttttcttaccagaagaaactttagcttaagttctcttcaataaatattaggttaataatttgatctatcatgaaggcaatattttggctttgggaaaacattgataggttcatttctgttttcatgggttaaacatggtgaaatcctatctgtcccagcaaatatctttgacaacatctttcttttggagtcctattaatgtttgccagagtccaccatataaatttattgcttatacattagattgtatctttaaaagtgtctaataattgcattgaatacttgtgtatatgttttatgattatgttatgtatttatgatgtctcaaagtaaactttcaggttgtatttagaaggttagtcacttcttctcttgttacctctctatcctgtctgattattctgaagtggaccatcattctgaagtgaaccatcaactcacttttatctttatgcaggagtcaacctgcgttacccgagaaactcttcttct

SEQ ID NO: 79526 - DNA, 453 bp, Citrus sinensis
  Intron number 1 from transcript orange1.1g011162m (locus o range1.1g011168m.g) derived from phytozome v7.0 (chr-ID sc affold00036; pos 773764 to 774216 reverse strand)
acgtccaaagtccaaacccctcttctttttcctctgtaagttcctcgttcttgttaacgttttctgtaccgtcttatcttttggcaaaggatatacacgtgtcagtctttggtggataaatgatgtaatatttttgctttttatcttgttcatgcttgttttggttggggtactaaggtttgtgatgtgggttccttggtttttgatcattggtttatagtttaatgacaaacttgtgtgaatgcattagttaagtttgctttcttctttttttttttttttataatgataaattaacaattagagaaaaatttgtagctgattagtgatcatgatatggatacaatctcaatatgccatcttgctattattgctgaaacgtttgtaacagcatctgcagtattatctatatacacagagtttggaaggcaagatttagttgagcgccggact

SEQ ID NO: 79527 - DNA, 879 bp, Citrus sinensis
  Intron number 2 from transcript orange1.1g028938m (locus o range1.1g023412m.g) derived from phytozome v7.0 (chr-ID sc affold00004; pos 1572381 to 1573259)
cttcgtactcgaaggtgagttttttttttttgggttgattctttgctgattttctttctgtttttcctttttaaagctaggtaattgactttggggctacagttggtattattttggagggatatatatattgtgatactcaattttagtagggttttgagaattctcattggttttgaattcagttgttggattcaagtgagaattgatcccatttatgtcttttgcatgttgaggtaatttgatcatcattctttgtggtgcgtgctgagtttaatttttgggctggaggtggggttaactaggttatattgatcttatggtggttaagatttgggttatttgataagtttgatctgctttgaggtttttaactacttgtgtgctgtgttcttggagatactgaagctcggtgcacactttattgaaatttaaaatgttatctttgtcatcgtaatcatagtttagcttaaccttgtttgcaatgttaagtgaaccaacagcatactttttgctaataagcttctctgtttggtcttaatatagggagttaagtgaataatggatttgctctgaagtaggaagatttaaattcttctattgaccgtttcttaaccagtctaccatgttctgaaatttgctagaaaaatccagtcattaagaaataaagagatgcggagttaaattcatttctttgtatgcttggggtgttatatttgatattacttttccatgtgcacaatgttattgcagctgtctgatgcaggtggttaaaattgaaattactttttctcccctcttctagactatgttaaatatttttattcatatttctgccatatagcttgtgggaggacgctcgtcatctactggtaaggg

SEQ ID NO: 79528 - DNA, 547 bp, Citrus sinensis
  Intron number 1 from transcript orange1.1g003538m (locus o range1.1g003534m.g) derived from phytozome v7.0 (chr-ID sc affold00344; pos 73182 to 73728 reverse strand)
tgacttttgaccattcacccactgcatttgaacttgtaagtaccttacactgttttcaattttctgaatgctaaggttttgttttgtgctattataattgtttcgtttagtgttctattagatttgggattgtgttatattttttaataatgtttttcttttactgctctagtaattttcacttactgaagtgcttttgatttaggggtttgaattttgtgcttgcttgttgcgccgtttttatttttatgtttattattttcaacgtgagaagagagaagaaaatgtaatttcattccattgcttttacgatttttgcgtgcttgcatgtggctttctgaaattgcaatttgagcttttattctaatagataatgttcattttatctgttttcttttttcttcggaaccaccatcaatgtatgatcatttcatgtttgatattgttaattttgtgtgtccttggcttagaattttgatttattttattttgattttggtgattttgttcagggtcactggaattatcgggtttggtccaaattctt

SEQ ID NO: 79529 - DNA, 875 bp, Citrus sinensis
  Intron number 1 from transcript orange1.1g033729m (locus o range1.1g033729m.g) derived from phytozome v7.0 (chr-ID sc affold00115; pos 199231 to 200105)
ggactgagggtgtgccggagtgcctggtgttggctgtttgacgcacagttggccggtgggcggctggtgtttgtttaatttgttttgtttaacactttaagtctttaacttattgactgcgtgggagtgtggtgaggtagttggacagttaaatttcagctactggtgagatagttggatagttgggtagttaaatttcagctactaaaatttttggtaatatttgtagttgaattttggtagtttagtaaattttttttctcaatttttactccacagctgtagcttttactccataacagttacagtttaaaagttacaacacttcactccgaaatacaagggttattgcttaatgggctaaggagaacggcccttgatttttattttttttgttttcttttccattttttttaattttaattggtttatacatatacatacatacatacatatatatgtatgtgggtatatataataaagccgggctctttttacacgaggccataactaggcctataacatacgggccttgaaattttgaatctatatccttaaaaataacatgtggactggatttaaagccctcatgagcgggccgggttggcccaggcttgggcaagcctaagcttttttccaagcctaattttgttgcacaaaccgactcaaatcgagtaagttcaattcaatttgaaaaaaatcgaaccaaatgtctaggcttaacttttcagttttcacttgtattaacaagactttatagctttagaaatttactgttttcgactatagtaaccacacgaatagtatatatatatatatatctatatatgtgggttcaaggtagaggtggcaaaaaccactcgggcagtagcccg

SEQ ID NO: 79530 - DNA, 517 bp, Citrus sinensis
  Intron number 1 from transcript orange1.1g023935m (locus o range1.1g017410m.g) derived from phytozome v7.0 (chr-ID sc affold00123; pos 268636 to 269152)
caggctcttcatattgctttggaaactgatccacggtttgttttttaagatacccggcttggtttttgtgtttttattttttattttttattcttgtatactttcaatctttgtggagttttagttgtcttttgagcttggtttggatttgtaggccttaatgaattgtcttcatatttgtatatctgatcagtgatttgagattttggatttgggttagtattattttcattgactattcagttcgttgaagaaaaatggaaacttggagaggatgatacatgaaggcattaccatggattggtgtaggattagctgtcgattgcctggcttagcagtctcgcatgcgttttcatttcgatgaatttgttgttaatcttttcagctcaaattttctcaaatcctgtgaaatatgtagtcttcttttctattttacatcgttagagcctctttgtactttcgcaagttctgtgacggtgagtcttctcatggatggttatatcttgtcgcagtgctt

SEQ ID NO: 79531 - DNA, 862 bp, Citrus sinensis
  Intron number 2 from transcript orange1.1g020541m (locus o range1.1g012823m.g) derived from phytozome v7.0 (chr-ID sc affold00004; pos 3049857 to 3050718 reverse strand)
cgtcttccttcctctcatttcattcaggcgcgttggtaaactctcttattggttatcctaatttttgctggaataatttaaattttgaaaaagaccctcaatcccgcccccccccccccggcctttttttttttaaatgatatccaaccctgaatgtccatttctggaacagtgaagatctagtggtcaattgtggaagaccattggcgcaaactttggaggtcttcattgtcatctttctatttgaataaccttgagtgcacgggttcaagtcccagcaatagctgggactccactcctctcttaagtagaggtttatcggtctcgtcacatttggagtacaataactttctctccagtattaaagtgaaggtagatcttcctttgatattaagtgaagatcaaccttcggactgtgtcataataagattattaagaagagtcccgagcgatttttgattgtaaacattagtaatatatcagtatatatatattaaaaaaaaaaaacagagtacatgatagaattgtgttccacatttagctattaaaaaggagtcgcttggggtttataaataagataagtcccttcattcaatagttagtcttttagattaaatatttaaataattatcaatgaaaaatataactctatatgcttaatttaatttttttaaaagatatattcttaatttattgacttagctctactatattttttgttttttgattgattgtaaagccatctttttactgattttagtttctatacgaggttgtatagtgatgttgagcaacagtgattgatgtctgtgcttttattgtgctagattcattgaggtacacatcggcattgtcagtcggt

SEQ ID NO: 79532 - DNA, 980 bp, Citrus sinensis
  Intron number 1 from transcript orange1.1g017409m (locus o range1.1g017348m.g) derived from phytozome v7.0 (chr-ID sc affold00004; pos 2465973 to 2466952)
tgttccctgctgttactcctgaaaaggtactatgtttctttatttcttgaaattttggtttattatcttcatgtttttgttggcacaactggaaggttcttaagttagtgttgagctgttgttaagtgtagatggtaggttctttgagtgtgaccaattgctgctgatttggcatgagcagttgtttcaagagttattttattgaagtataaatggatagttgttttttcccctgtttttggatatgccttatttgtttatttatttttgctgatgaaccggtacttttctaacatagtttgtcagtgaagtctaggtgcaattttattagggtgtggtcagtttgatggtttttcgtttggggttttgggttttggagatggttcttgcgttttctagtccttggaatctattttggttcatgaaatattgacttcgttgaattttggagacctatggtgattgtagtaattgttaatattactttctgttggaccttgatttgtttttctttttacatttatgtaaagtatttggccttaaggttatgtgtttcttgttattactgaaggtaaattccttcgcttttgttatgtctgagtaatgaatttagctttagtttgttcattttactggagatgaaacataaccgtcaatgaagtgctccaatccaggaagccataggacctgccctcatttgcttgatattattattttatttatactttttagttccattgctcggaaggacatttcatttgttactcgaaaatacattttatacctttttgtgtcttccattttgtgaaatgagattctttgctttggtgccatgtccattattccagaatccagatagatgtgataagtagttggattattgtagttaaatttgaacaattgatgtatttggaggtttcatcgattttttggattttaaaataggtgcaagctgtgctcttgcttttgggaggacgtga

SEQ ID NO: 79533 - DNA, 608 bp, Citrus sinensis
  Intron number 2 from transcript orange1.1g013268m (locus o range1.1g011425m.g) derived from phytozome v7.0 (chr-ID sc affold00007; pos 2637773 to 2638380)
gaccagttcatcaattttgttattcgccctcccaggtttcttgctctttaactactatgcttcattaattcactcttatcaacaaagtcaatattgttcatatatcatgctatgatgttgttaccagtttaaaacattactaaacgtgcctttcacatttgccttcattactaattttaggtactgataattgttttgtggttcacttctgatggtctttccaattatcttgctttcctgctgttaaaaaaaaaaaaattcttcctccttgtagtttggcagttcaggatatgtatgcttttaattcatggctcttttgggttgaaactactagctattaagtatgaatatctgggtgttaaaaacaatagttttcctaaaaaattaaaaacaaaaaaggtgtttaccaaacactttagtggttgtgttggtcaaaattaagcaaaaaagctgcaacaatgacaaacgtactcttctttgaattaatgaaatatttttccatctttcgttggtctagtcctgtatcatttgtatattatttggtcactaatcttggtgcttgtgttgtgctgggcatacagggcggagtataacccagatcagtattt

SEQ ID NO: 79534 - DNA, 674 bp, Citrus sinensis
  Intron number 1 from transcript orange1.1g011561m (locus o range1.1g007535m.g) derived from phytozome v7.0 (chr-ID sc affold00036; pos 275350 to 276023)
tgtcaaccatcaatcaggatcgttggtttctggtaagttttgatttttttttttaatttttaattcttaacgcgacttttggaactgggtattgaacccaatttcaatttaattggatgggtctatgataaggtcttatcttgctgttgaatgttttagggtttgaattgggattgattttggatttttgagcattttgctttttcttcattcattgatggtaaatcaaatgtgggattttaatttatttatctaaaataaaaaatgttactttcatttctctctggtgttttttcaattgggttatggattttgatgactcttaatctcattaattaagttgtttgaggttcttgcagtgatgtttttaattcaatacgagcaaataggaacccgattttgggtggattaattataatttaaaggattaattataatttaaagagttatattgataattttctgataattagctcaggaaagcattttgtgtttacttcagataatgctcaattgcattattatcttgaaaatctaatagctttctaagattgcttcttcgaacctggttataattctgtctacaacttcaggttttcagtgtaattgacccttgattaatattgtcaatttgagctctttgcttatcaaagttgcattttggattgttgcag

SEQ ID NO: 79535 - DNA, 640 bp, Citrus sinensis
  Intron number 2 from transcript orange1.1g012843m (locus o range1.1g012524m.g) derived from phytozome v7.0 (chr-ID sc affold00630; pos 9575 to 10214)
atcttcctggttttgctttccacaaagcactcaaggtacaatttcttatttctattacgtaataccatatatatgaaatttatatcagtagagtaatgatttggtgcgagctgagaaagcacacagcacggttgtttctcatatgttttgaaacatgcataatcgtgcaccggaacaaaatcctatgtttgtgtatagataatttgctaaatatcattgagacatattttaggattcaaaatttatttacagaaaattgaattatcattaaatcaaaactaaggataaggataaggataaggacccttttataaactgatcatatctgaactttaaaagattttttaacacatatttacttttattatgtatggtcaaaatttactaaattttttacataagaaaagtataaactttactgtttcatcaaaagagtgcgtgtgtaattatattttaaaagcgagccaatggccattgtgtcggcagtgaagattataggcaaaaaacaaccaaaaaaagaaaaaaatatgaatctgtccgttagattaaaaaaaaaaaaagaaatgtggatgctcccattttatatctgcccctatatatgttaaaaaagaattttttttaaaaaaatcaggcacgaaaa

SEQ ID NO: 79536 - DNA, 469 bp, Citrus sinensis
  Intron number 1 from transcript orange1.1g013109m (locus o range1.1g008623m.g) derived from phytozome v7.0 (chr-ID sc affold00026; pos 419058 to 419526 reverse strand)
catttggatacattgcataacttgccaagattcaggtatcaatttttctttttcagtttatttattcatttatttatttttcctgggttgctgtagtactgtgtgttttgctttgcctctgcaacagaattattgttgtgaggatttgaatcggttcttgtgtgaatgagtcaaagtaatttattatttttttttggtttctgaacttgggtcgtcttaaactctctaatgattcagttcttcgttgtacgttttctaggaagcacttaatcattactttcttgagtctgaaaatcaactgggttaattttgcgcagctggatttctaatggattttgttttgcaaatgagcttaaatttgctagtgatagatagtcgtgtgttccgtggcatgattctttataagatacttttgtgcacaatgtttaccgcagataggcacatctgtttttgaatagatctctacaaa

SEQ ID NO: 79537 - DNA, 782 bp, Citrus sinensis
  Intron number 2 from transcript orange1.1g020081m (locus o range1.1g020081m.g) derived from phytozome v7.0 (chr-ID sc affold00010; pos 2103192 to 2103973)
ctgtttcagctgtgcctttctttgtcttcttcaaggttctttttctaaattttattgtttattttttagcttaattgaggtattggtttgcttggttgttattcttgtttatgttttatagggtatatgagatgaagtataattatatcttgtttacttgaatctctaaggtattattctctgtttggttttacagatacggcttgaatcgttcaagtgggagggtttttgtggttgtttgaaactaatgctcattagcagtttagccaagggtagaaattagtgttgttggttttacttttaggcttttcactttatctttattttggtgattgtggcatatagttcctgttgtggtctgtagtgtttgattaaattttgttaggctttttttttcttttttctttttttcttttttcgggttgggtttatagttagatattctacttgaactaggtgtggatcattttgtaatccttccttagatacattagcaattattacaagccactgattctttcgaattgggtctagaggatatctctgtgtttatgcatctcaaggaaaacagccaaccagtcaattgtatgtgcaaatactttttgtagtcgataagctttcttctctgtctaggttttggtttctttcaccgatgacaatcttttaggtattctatttgtgtttaaatgtgttcgctcagtaattgaataattgtttaatgtagttgcttcactcacctattgctttttaactgaatatctcatatgaatttgcttgatagg

SEQ ID NO: 79538 - DNA, 382 bp, Citrus sinensis
  Intron number 1 from transcript orange1.1g037669m (locus o range1.1g037669m.g) derived from phytozome v7.0 (chr-ID sc affold00060; pos 321649 to 322030)
tgtattggagtgccaaagatcgactgcctcctcgggtaccttctgcttctcatttaataatttcccctgattctttaattttttttcattacatgtagtcatttgtaactttgtacctagaaatattttgactctgtgtgaagttgcagtcgaatggtatgcttttgctgtcttctgttgaagggtcaaatgtatagaacctgaccctctgtttgattgtaaagggtcaaatgtatatttccttggcaaccaatacaggagcctgcttggaaggatcttggatttcctcagattgatttctcttgtgtaatactgatcgtgacagtcttcaaatttctttgtaacaggcagttaagatagacatcaatattgagagagattt

SEQ ID NO: 79539 - DNA, 606 bp, Citrus sinensis
  Intron number 2 from transcript orange1.1g025250m (locus o range1.1g019727m.g) derived from phytozome v7.0 (chr-ID sc affold00238; pos 203826 to 204431)
agaaatctctgtcgcctgaagagcagcaagccaaagtatgcatcaaaatattgattaagatgttgttactgacatttttttttttttttggttagttatttggtggagattcattcttttccaatgaatttttctatctatttttagttgtaatttcgtgttagttttgcgcatttgcatcttcattatgggttttccatctaaataatttgatatagcctgtttgcttggatgcccagagagttctttgtttctaaaatctgaaaaaaggtaaatacgcagggaaatgtgtctggttaagagtttacagtaataatagttttcaagtgtgaccctgaactaagtaaatatcagagaaaaataaatagttggttttgttgttttctaagatattataaccagattatatgtttgaaaatatctgaactgtattctacgttttaaagaattgtattggcctcatgaatgaaatagtctggcgattatttggttgaggattcttgccctcattagagtttgaagggaaatttttattttagtctgtggagtcaaatgtaaaaaactctttaggggatcaactgattgaatttgatttccttcagataa

SEQ ID NO: 79540 - DNA, 962 bp, Citrus sinensis
  Intron number 2 from transcript orange1.1g032740m (locus o range1.1g026120m.g) derived from phytozome v7.0 (chr-ID sc affold00123; pos 103997 to 104958 reverse strand)
ggacgtgtttggcaaggctggtgcataccttcaaggttgatacatataagactcagcattatgcagctgtgctctctttaatgttaattatgctgtgatgtgaaaaattttcagatttgtatataaagatatgcgtgcacatacgtcacttcaagaacaccccttccccaatgacactctctatttcctagtaagcaactgatgatataaagttattttcggaaataattactccaggttaatggatggttcttcactcaagttttgtcactggtgccactactaattgccccacatgcactaccagatcatcaccatcaacagccccgttattgccatcctcatcatttcacccatgcccatcctaatactataaatgtgatgatcctcctgccacatctaccaccatcctataataatgttgttacctacgaaatgcataagcactggttagccgaagctaccatcctcaagttccttagctttctgctagtgattctgggtttgaattttaaaaccagccagttcatttgtgggagtgattcttggcttccagttccagtaggtctgacgagggggcaggctccggctcagggaccggaggttggttatacatgaaggttcatgtgggtagccactctggaaaagcaatgcatttcctttcttttctataaaaaatcatgaattcctttaaaactttttcatctctatctctaatttatattatatcgattggaagttcagtttctccaatcgagagtcactatcaagataattttccgtcattaaattactcctacattttgatggttgttctttttattttgtagtaatagggcttcttgtcactgcttctagtataagtattttgtttagttcttatgctgatgggtagctctctttgctattattaagcatcaactggcttatttagttgtgattttttgttgtgagcagaagga

SEQ ID NO: 79541 - DNA, 1013 bp, Citrus sinensis
  Intron number 1 from transcript orange1.1g044232m (locus o range1.1g044232m.g) derived from phytozome v7.0 (chr-ID sc affold00272; pos 30326 to 31338)
tatcttacatctgcccttttgttgcaccacctaaggtgaggagagtctctgctttttcctacttactgcgttttgtttggttggcaagaaagttctaactgaattctgggtcatatactttcttatgtgttatgtgtttcgtttaattgagttttgtgtgtgtgtgctttttttatttttatttttattttttgggttatttgttgtgagtgtgaagaattagttgttttggtagtttgatcatattaagtgcaagtttaatggtaatcccatataagaattaattcttttaaataataataataatcatcatcatcaatgtttctttataatctgtatggaatccttctgcaacttgttctttttcagaattaatttgggaactgtgtgattagaggctggttgcttcttgttttctgagttgagtaattataaaactttcctctgattttttcattataaattactaaacatttttcttcccctttcgatatatatgtttttgtatttatttctttactcgatctgatttagaagctggtcaaacaatgaagttcatatataaattccagtataaatttaatagtaataaaggcgaactgcttatctgagcctgcctagacagactctggaaattgtaaaaccaaaatagaattgaacagttttcctcttgttaagacttaagcatggatgtatatgggatacacatgtcaagtagtttgtggttatgcgcataaattttatgtttgctttctttcttcttcttttcttttctccttttaacggagaaactagcagatgtggatggtattaaactattgatgacactggcattgttttttggtgaatatactcttattggtcaaatgatgaagtagtctttgatttatggtttgtacagggcagagcatttatttgggttgaagcattggctcacagaaagcaactcctcatgacttgtttccatttatttttcagaaggaagagagcttcctcggctactcacagagtag

SEQ ID NO: 79542 - DNA, 868 bp, Citrus sinensis
  Intron number 1 from transcript orange1.1g007370m (locus o range1.1g006091m.g) derived from phytozome v7.0 (chr-ID sc affold00127; pos 102202 to 103069 reverse strand)
tttggttatcggttttcactttattcctccttcgggtatgttcattttgctttgttttcaattttgcaatctttgaactctttgtttttttttttttttcaatggcttgctttttagtgtttttcgaatttcttgttcttcagttttggaatctgctttgatttgctaatcattttgtaatattcaaacggttgctttttcacttatttcgtcttacttttctgattatgttctccttatttgactaattgactttacttattagcagacaaaattttgcttttttggagtcattttcaaatctgaagttcctgtaccagaatcttaaattttgataatggacaatatatccagtaattgaagcctagcacttattatccatggagcaagttactccgactagcttactgagcctcatctttatttcatatttagaattgaaattcattgggcaattgcctaatgctgtgggcccaagtgtagccccacaggaagattcaagaggccaacaaagggactgatcagtcgataattgggagaaaattaactacaacttcatggaaaaatcagaaattcttttaagatgttattgaattattttgagttgttgaaatttttgctttacagaacttgataggtatagatattcagagacttgtttgggaaatacaagattttgtattggaaggttgcacccaacatatacagtgaacttggtgtaactttctggtgaattttggcagcttccagtccttctgagtttgaatttcctcttgaatataccgatctgcattttattgacgtttgttgcggaaactaaagaactggaaattctgattgcaaatataaacttgacctacaggagacc

SEQ ID NO: 79543 - DNA, 995 bp, Citrus sinensis
  Intron number 2 from transcript orange1.1g008699m (locus o range1.1g006329m.g) derived from phytozome v7.0 (chr-ID sc affold00323; pos 52560 to 53554 reverse strand)
ttcggaatttcattcttcatacacttcagttgcaggtaatacagttatttcataatgctaatcatttaaccctgccaataattatttaatatctttttgtgtcaaattcttgttttcctttactgatttctgtcaaaataatgccaatgatgcatcattcttctcatttcatgtactgtgcttttttcttcttgctggagcatcctgagagattgtgttctttgtactccatcaaatgtgtatgtaatattttatataatgtttattcagctgatgtttggtatattgatcgcttatttttgttataacttcacgaaaagctgcaaataatgtactcttatcaaattacatttatgttcttttcatgtgacagcccccactctccacctccctcttttcatattatccttcttactttttgattaccattaaaattatgctgattgatgcagttaatgcttgtttcatgtgttatgctttttactctcaataaattcttctgatagcatgtgatctttgggtgccatcaaatgtgtttggaacatcttatcattgtttttattttgcttatacaatggtacttatgtaactgttccatgcatggagaaaagtttatgttttactatcactggttggatatgtttacatgtctgcgtgttgctcttcttttaaaatcatgtgctatagtgcttggccaactttttttggtactataataatgcaatccatcatgactgtgatcagaatatcattttcaccacatgcatgtgaactaatgaattttaacatgtgcaaatgcatgcttctgtatgcacttgtctcatttatcaaagtgtgtcatactcatacacgtccatgcttcctttggttacaagtctattttacaatgtggcacacaatgtgaatggtctaattatatcaattgctcggtatactcaatgttttagatttacagattttaaatgattcttacatcgcagagctgggagaaaaca

SEQ ID NO: 79544 - DNA, 555 bp, Citrus sinensis
  Intron number 1 from transcript orange1.1g008699m (locus o range1.1g006329m.g) derived from phytozome v7.0 (chr-ID sc affold00323; pos 54278 to 54832 reverse strand)
aaacccacttcagattttcacctctttgatatcaggtgaacgctttcttacattacgttgcttatatatttttctgggtttcctttttcttttaaattttgtttatatttttccataaaatgaatgtaaatgtgtaaagtttgcacttttatgttattgatcatgtagaattacgtgcgttgtttgctttcgttttaaagttgaatatttttgtttgaattgggttttgaagtgaagaattattcactttttggctttgaaactgtacgttgtgaaatgatgatgcttagtcttcgttttaaaactttattggcatttgtagaattccagttttatgattttgattctttagttacttggtggagatactgaaacaatttgctccattcagttctgtgatgggtttattctctatttcttgaatgatttcagaagatatagaagcacttgagatgattttttagtatgagcattttcttgttaacctttctgatttcagttgtgttctttgagaccttaggtcgttgaattcaatcagagttcttggatttgtct

SEQ ID NO: 79545 - DNA, 731 bp, Citrus sinensis
  Intron number 1 from transcript orange1.1g033217m (locus o range1.1g032116m.g) derived from phytozome v7.0 (chr-ID sc affold00729; pos 430 to 1160 reverse strand)
acaaaccactttgctgtcctgccaggagaaggtatgtatacataaatatttcctcttaattttgaattcagcaactcttgttttgttaatgtgatctgttaattatttgatatatgctgtcgaattagtgtggtcaaagttttgactttacccatttaagaggatgcttagttattatacacatgttagccaggtgtgcttaattgaaatatttcttttgaattcagtgtcgttgttgcagctatgtaattgatccattagcaatttagtaggcatagtatgtaagttttaattttctgctgggatatgcttgttagaatgtacttaatctggatatgctgtttcaaattggcttcaaagtagtaactaatatttgattcctgtgtttgatagtgcagcatatctttgacaagtacttaactgtgataaaggctgtaatctttgcttattttcctgttttcgtgctaaaaatgtttgtatagactaaccatgtttctctcgtagtcacataattatgtcaatatttgtttgatttttggatgtatatttcctcttgtacttttttcagattctcatcttcagcaactagaataattcctcgagcctcctcagctacagctgtggaggtatgaattgatttttctctattgattagtgtttgtacaatttaagcagttaatgtttccgttctctttttggttgttggacgtggttatggaattgtaaacagg

SEQ ID NO: 79546 - DNA, 1014 bp, Citrus sinensis
  Intron number 1 from transcript orange1.1g015958m (locus o range1.1g015958m.g) derived from phytozome v7.0 (chr-ID sc affold00272; pos 96779 to 97792 reverse strand)
ccagttcttcattactcgtaagctgttccattctctcttccaccgcatacatactcaaattcttgtctttcttgtttactttgaagtcttaattctctccctcttttatactttactgcatacgagtagcttacttttgttatactgtcccattaaagcaaataataaaatgaataaaaatcaattttgagcaaaccaaatagtttaacaaggtgtaattcaaatgcaattttcctgggtttagcttgaagttgggtttttctttttcttttttttttaatactctttttgttgtttaaagtttcatgcttacacatgatgcgttgaataagaaattgatataatctcatggttttgtggttagttctgaacttgggttgtagactgtagcattctttaagttgctactaaaatattacatattttcattgaagtttgatcaaaactctccctgttactacgtgcatttggttgagttcagattatcaaattataagctggggctcatcttttaatgcattagcaatcttctagttagattctgtgttcttcttgaaaaatgggctgattgtgtagctattgttggttacctttgtatttgctgctgagtattggtttgtttgattatccaccgagtcttcatatgaaaaaaaaaaacatgctgagttattttcactgtttttattaattggacagattcatatgaaagaaaacttccaacttgttcctttatgtaaattatctactgattttgtagtactgacatcccgaaaaggttctaaaacacagaaaacagacacttcgcattcatgtgaattactgatatgcgcagctgcataaataaacccaaatgtgcattgatgtgtacaaactgaattatgggtgacaattgtgatcacatgattaaatgatctcaactaatttcacttgggatagttacactgagtttataaccaatgtttctcttctaacaattcgctaggagattgtctgttccacatccatcttccggta

SEQ ID NO: 79547 - DNA, 455 bp, Citrus sinensis
  Intron number 1 from transcript orange1.1g045533m (locus o range1.1g045533m.g) derived from phytozome v7.0 (chr-ID sc affold00228; pos 252780 to 253234 reverse strand)
tggtatgtaatctcactcaagctattacaattgtgagtaatgcgacagtcacaaacactttttattgtatttgtctctagagatttggacgactgattttcaagtagttttctttagctaaccacttgagtttgaatattgtaagctaggccggggctaaaatatcaatttagattttaccctcaccctacttttttattttcatgtaagagtattgattgattaataaaaataataatgaaaataagtcatgtggtatttttatctaaccaaaattatgatgcgacttcatgagtttgtaatggtattttatctaaccaaaattatgatgcgacttcatgagtttgtaatgtatgaagaatttgtggctctaacattattgaaattacaaaatcattgaataattattaatcatgtaagccttcagtaatttactttttgaatgtgataatcag

SEQ ID NO: 79548 - DNA, 595 bp, Citrus sinensis
  Intron number 1 from transcript orange1.1g025533m (locus o range1.1g020938m.g) derived from phytozome v7.0 (chr-ID sc affold00036; pos 864437 to 865031)
ggccacgctcgctcccttgaacaagccaagaaatcgtgagtatttttcgcctttcaatttatcattaattattattttattcaaaaaaaattattttattgcgtttcacttttgttcttcagttactttttattttattcatgtgccttttttttttgatctagtgttataagaagcgaaacaaagcatctcttatagaaattaactttttcccgttttgtccttagtttgatctgtgtatgtttccgtgtactgcttcttttgcgtttattttgttgaatatattaattattttttttcatttgtgttcgtattttggtgattctattagttatgtgattcatttttctggtttcattcgttttgatgtgctatatcgtttcgtaaggatttgtgttacaaaaatagtgattacattggtaatgattaatgtgtgagtgaaaaattatttctgtttaggaggaatcctgttttgaattttgttcaaagtgttatttttatttgtttacattctatttgtgttcaaagtgttatttatttatttatttatttttggcattgtatttaggtttccaaacacctacctccttgtcgg

SEQ ID NO: 79549 - DNA, 247 bp, Citrus sinensis
  Intron number 2 from transcript orange1.1g009930m (locus o range1.1g009925m.g) derived from phytozome v7.0 (chr-ID sc affold00016; pos 109543 to 109789)
ggcctttaaagaaaccagaggaagaacaggtagaggtgagctcttttggcttgacgtagtttaaaatctgatatgccagttgatttgttggtttttgctttttctattcaaagaactttaacccctttggaataatgttgaagctgtctcttctgaaatgctatgtgctcccttgttttctgttattgaaactgtcattaattgattttcaggaattacctcgcgaaccttttatccctcttacaaa

SEQ ID NO: 79550 - DNA, 766 bp, Citrus sinensis
  Intron number 2 from transcript orange1.1g008612m (locus o range1.1g008612m.g) derived from phytozome v7.0 (chr-ID sc affold00035; pos 415132 to 415897 reverse strand)
agtatagcaaggtatattaataacagtttacaaatgtttgattttttattctacttagcttacaatgtaatcatagtggtcgccttgttggttgtctctcgtggtatttacttgatgtacttaaaatttgtgctactaacggttgtttcttgtagcaagttatgcatctgattagttatattaattgatggctactgatggcattaaattttccacaaatatttatgaccattaaaatttctatatatgaatgtccaatcgttgattttagttttaatggggttggatatctcacatttatttggggactgatgatgctatacatatttaggtgcttctgtgaaatacacacacacacacacacacacacacacacaaggtgtctgcgctgaacccatgggtggagtaactttgattaccaggttaagagtcattcatgtggtttacttggtcatggtggtcctctgaaactggatatgcagcttatagtatttgaacttgaattttgctatacaaaattactataatcagttttgtataattttgagagttgaaacatctgatacaacagcctcgatggaagtatctgtttatatttagtcctagacgtgggatatgtggaattttttcataaagacccactgaagttatgtaaaagtgtttctgttcacttttcacattttttttcttgatagcttttgattcctttttaattatgtttttcttatcagcagggtagttttgtaatctgtgaaaagtgcttcaa

SEQ ID NO: 79551 - DNA, 599 bp, Citrus sinensis
  Intron number 1 from transcript orange1.1g011418m (locus o range1.1g011418m.g) derived from phytozome v7.0 (chr-ID sc affold01144; pos 33806 to 34404 reverse strand)
aaggagaagttgaaaccaatcattgattcgtttcggtaatccatctatctacagcctgcatatttgtataaatatatctgctcttgctttggctaattctgtggtgcaaatttatttattttattcgtttaattcattcgagatgaattgttttgatttgatcgaatcatcaaaccacgagtaatttattaaattattgtaatatttttagatcttagattttatattatcttagttttatatgtaatttattatttggttaattcaatatttatgtgtttatgtgatttgtgtaattcatccaattctttagcttctacagaaatcttaaggaacacagaactagctgaagtctgtagagataaccatttagagctgtgagcttttagagtttcggatattatcttagaggtgaatagcattagggaaggaagagaggtgaactaattctttggtctttgaaacaatcaggctaaaaaagctgcttaattgtaagccactaatttgatgaggtttttctttttgtcattttgaagtttatattttattgctttggtatgctagggattgaggcttcttggattcggcaacttctctgg

SEQ ID NO: 79552 - DNA, 756 bp, Citrus sinensis
  Intron number 2 from transcript orange1.1g031179m (locus o range1.1g026293m.g) derived from phytozome v7.0 (chr-ID sc affold00007; pos 579177 to 579932)
catatcttccaattccattccagcatttaggagaggtgcatctttgttgagatttctaatgattttttttttcaataatgtgtacaaataaacgcatgctttgagtttcattagatatctaatatgataatggaagaatgtggtatttttgtgctttgctggaacggagaaagaaagaattttgacacaagtagttgagacaagggatctgcagctgttctcactttgtttgattacttttgctttctttagtttgtagaatttcacgtctagtccttagttgtttccctaggaatggttcttctgcaagagcaacaatattgatctcttgcatagaaatttctggacttcttattagcagtatatttccagagaagaggcttcttaattttgtgagtgcaggtattctttggattttggtacaactgcattctgaaggtctcaggctgttgtttctttgaatttaaaagcctaaacaatatccatcctcaatccccagtaaaacagttaaatgagactagataacaaaccaaacctcatatattctcttattacctgagactatttcattgtgaaccttttttcattagctatcatgatgttgaacatctaaattttgtgattcttcataccgtccaaacttttggaagatttctacttatgtcggtctttcttaaagttttgtatttagtggtgtttatagtatgcatttagtgccttaattgtgattattgtttcattagcaataattagctg

SEQ ID NO: 79553 - DNA, 677 bp, Citrus sinensis
  Intron number 1 from transcript orange1.1g006411m (locus o range1.1g006411m.g) derived from phytozome v7.0 (chr-ID sc affold00038; pos 839515 to 840191 reverse strand)
gaggctcggcgcgctcttgttccggactccgatcggtacaaatacgtttattattttgtagttctgtaaagattgttttggtcattagatcttgattgatataaggctgcgtatctatttgtgtatctttacttcaattatattaattttagtactataatttaagatattgggctctaatgttctgaattttacttggagttgcatgattgaaattggagctgaagctggatttttttttctagaatttaaaatctgaaaagtctttttattaattgaattttggcaattaaccgtgattttcttttctggtatgtttgttgttagaaccccattaatgatgaagtaacaaaatgagggttagtcacttttacctatttaacggtgaacaatagatggcttggcattccatggagcttatgtccattgtctctgtacatgaagctagatgttgaccgtgaagaattcctggagttaatagagttctggttaagcatttgaactttgaatttattttatttagttaattttgatttgggtctattgactaggactatgcattttatgtcaaatttctcttttcacttgctgagatatactctctgattttcaattttgataatttgttcaatgcactcttaggcgagcatttgaacaggcaggcagagctcctggct

SEQ ID NO: 79554 - DNA, 514 bp, Citrus sinensis
  Intron number 1 from transcript orange1.1g021897m (locus o range1.1g014823m.g) derived from phytozome v7.0 (chr-ID sc affold00025; pos 96601 to 97114 reverse strand)
ctatttctccatcagcttcaatctcagcacgattagtacgtatttctttttaatttcaatatcctgatcagcaatttttttaacttttttcggccttttttagctcggcatttgatattactttcgatcactagtttttaccacttttttggtgtcttatgtaattttctttgatttttctgtctgcaaagctttataatcatctgatctatgtatggatttgttttttgaaatcaattttatgggattatcaatttaatatgtacacgaatttgcaatactttttttttcttaaaaaaaatagagagataaccctttttgggcctttgcaaatttgatcatagtatgtgctaggtcatttatagagttatcttcttttcgattcttattaaaagttttaggtaaatttttcatctttttgtcgctgagaaattaattttttttttgttttagttttttctttttatagatttcttgattacaggtatagttggtgaagaaacactagcttgcg

SEQ ID NO: 79555 - DNA, 938 bp, Citrus sinensis
  Intron number 1 from transcript orange1.1g008801m (locus o range1.1g005783m.g) derived from phytozome v7.0 (chr-ID sc affold00004; pos 3613770 to 3614707)
tcaggaatttcctccttcatactttgcaattgcaggtaataattagttattcaatttattgctttcattttatttcagttttttattttgtgttctggcttgagtactaaatgtgcaccaattatcttgtacatgacttgtgtttgattgtgaatttttaatgttagcttatactgaatttctcattaaatatgctagttaggattgaataatgtctttgtgcaagattaagtattatattcacttaggagatgaaaaatatacaatctttacagacaatatcattttcagatgacagttttatgattttggtgatggctaatatttgatgcaaagtcgcttaaaagttactgaagagagatactcaactctgtttttatctagtttctaattgcctcataagtaaatgatttctgttcccaaaaatgaagcctgcttttgatcgatgattgagtattaaatgcaagtttcttccctccttggaatttagaatattttagtgataatattttggtgtttaattgatgtggttgcatggtcactgtcttttcattatgtttatttaggaaagtatcttcatttccatcagcaatgaaatatcatgagcttttctggcattgtgattggggttttgtgtatggagtgggtggggatgagtggtcactagttgaaataatttactatttcttcttagcaggggaggtggagggtgttgttgtcactataataactgttcctattattattttgccattttattaactttcttgcttctctgctccctggagttgattatctatttgctatgttggttatccatttgtattgattgcatgttaccgaactgtagccatatagttttcttatggtagatttgaacttacaatcagtttctcatggtagagctgggagaaaacagtggactgctatagcccagg

SEQ ID NO: 79556 - DNA, 433 bp, Citrus sinensis
  Intron number 2 from transcript orange1.1g033846m (locus o range1.1g032874m.g) derived from phytozome v7.0 (chr-ID sc affold00007; pos 114794 to 115226 reverse strand)
actggtaagtacgtgcgtgtgtcctcactcactcgctcgctcgctcactcgctcttcactagcatagatgctgcatgcttgttctaacttattattctttctttagacccttatcagttgaacgcaaaggcaacttgtactctatctatatatgtttaatcatgttcggttgctgataaatatatatatttatttattaatttgttctctttttctccccccttttttaaaactgaattaattccccgatcagaaaaaaaaccgcagcttattatattcatgtgtgcgtgtgtgtgttttttaaaaagaaaaatgatgaaaccaaatcgatggagcatcaactcaaacatctctgtttttgttttgttttttttgtcgttcttactggcttctctcagcaaccaaataaaggctaagaggaaggaggaaaacg

SEQ ID NO: 79557 - DNA, 764 bp, Citrus sinensis
  Intron number 1 from transcript orange1.1g045419m (locus o range1.1g045419m.g) derived from phytozome v7.0 (chr-ID sc affold04343; pos 5824 to 6587 reverse strand)
ccactttgagaaactactcatctgcaactaaacaagtaattgtgccttttataacctattacttgcaatgcactgattttagctgtatggtgcttgtattttactttttctaagttcataatagttttttcttttgagagagttaatgatatgagaaattacaaatttaatatttattcaaggttgcaatttcatgtttagggcatatgtattactttcgtcttatatggtgtgtgattattgtcttaaaagtaaattatagtgcttgattttgatatagtcctaaaataatttatgaagttttttgtgaacattgaccttgtgaaacctcaaaacagaaaatttagtagaatgttcatgtgtgctctgttaaacatgagatttgactaactgagattgtaatccagttagtcatatgatcttgtgctgatgagtttagcccataagtctcataaccatacaagtaatgtcaattataatagaaggacctctctgtaatcaacttcagtcattggctaattgtggaattcattgtgctagtgttcaatttcaccatttgtttatgattgttaacaaattttcttcacccgctttttcttgcttacaataaacaaaagggatgaaatgacttttatcttgttataatttttgcagctcaagttttgaacttttatttattttggctggtagttagtagttgatttgtgtttgtgattgctttctttgtagggaaagttggcatctgttgaggagttggaaccatt

SEQ ID NO: 79558 - DNA, 804 bp, Citrus sinensis
  Intron number 2 from transcript orange1.1g006180m (locus o range1.1g006180m.g) derived from phytozome v7.0 (chr-ID sc affold00117; pos 153126 to 153929 reverse strand)
caaatcctaggaccaactatcctggtaatgagttttcttcaaactgctattcatttaattgaaacctttgttctatttatttattttttattgtacttttcttcaactcttttctaattttatctgaggtgggatttgaaatagctatagtctgatagaataatggatttttcttcttgagaggtggcatctaattatgctgttaattttaagctaaatggtcgtatagatagatatgttaagctagatgtgttattgacctgtgtatttatgtgaagagcattttgagtaaatttttgttatctataattgttgtttcgttaaatttaagaatggccttgcctatgactgcaacagaactttgtaaatctttatgcatttatctatatttgttgtctttcctatgtttgagctatcttcaaagttgaagtctaaaatgtaataaattaaatagctgttgtcttgtcttgaaaacgatgaatgtgattctgataggagtttataatttcatactcacacgtgaatttatttttattcagaaggtatggcttgtaacagttgctcatttagcttctatgggcagaagggtccatgcaaattgagtttatgacatttagattaaaattcactttgcattttaagggatcatcttatgttgttgatttctgtatcatatggtgaatttggtgagcaaaacaactttacaagaaccagaacatttttatattgattattatttgatttttaattaaaagagttattcaactcaacatactcatcccgggttattttatacagctccaa

SEQ ID NO: 79559 - DNA, 537 bp, Citrus sinensis
  Intron number 2 from transcript orange1.1g031042m (locus o range1.1g031042m.g) derived from phytozome v7.0 (chr-ID sc affold00067; pos 91551 to 92087 reverse strand)
gaaacgacgaggtaatttttttttttaatgcttagtttatgaaattaatcaggggccgtgtgatattttcaatttgatgggaaagttgtgtgcttcaatttttttattgttgcattattgattgcaattacgaaattatgtgagtaattagtgtaattgttgatagttctgaggtcagttgagttttatgtagaggggctcacaatccaatagtttgcctcttttgatcagtggtggattagcagctttgattttatttttgtaggatgtagtggtaggctggtaactttgagtttattacttttctgtacaaagaagcaaaaattgataaataagaatattaatgattttgacttatgaatattagttgttattgatctatataatattatcctgatgtattcatgatttcttcctctatgtgtgcttttgtggtataagtttgctggattctacaatattcttgacttcattataaggaagtgcttttcattgtatgtaggtcagcctaacattgaatataacagctgatttgca

SEQ ID NO: 79560 - DNA, 581 bp, Citrus sinensis
  Intron number 1 from transcript orange1.1g021034m (locus o range1.1g015066m.g) derived from phytozome v7.0 (chr-ID sc affold00016; pos 1315969 to 1316549 reverse strand)
acttcaattctgaattaggtactaaagtaagtgaaattttgttcctttctttttctttttcaattttggtgtttagtctttttttaaagatttgatatgataatgtgggttatgatagtgtatctgttcatgcgtatgaggctaaattgggaattatttaggttttgttcttaaagtttgatttttatcttttattttttattttttattttttgtttaaaggacaaaacttttgatatttatgttggtaaatgagcttgaattgggaataatgatgtgaattgtgcggaattaggtattgggtaagtttgttgattcattgctctttagggacattggggtgtttcgcttttatcttttatccaatggtgaatgcaacttgagccattttcttgggatattgataatactttggttttccaaattttgaacttacaaggaagacgggctgtcataaaatggttgatagtactgagatctttatctaatcataattcgctaaaatgcataacctttacctgattgttttttatattattatttcaggtaaagggaacagttttttgtacagataaccgtgg

SEQ ID NO: 79561 - DNA, 925 bp, Citrus sinensis
  Intron number 1 from transcript orange1.1g001363m (locus o range1.1g001310m.g) derived from phytozome v7.0 (chr-ID sc affold00051; pos 735590 to 736514 reverse strand)
catagttagctcgctctctttgtttactttttcaggtgagccttttctccgttacttttaatgtttttttaagaaaaagaaagaaataaatttattgataatttttggtttcatctatgctaacttaagctgtaagtacaggtttctcccttggccaaaatcaagtattatgattttttttaatcttttaagctcgaatttctgtactttttcaattctttattttatttgtgaaatgtctaatcttggtgtagctgctttctcgtgattctttcttgatctgtgcgattatctttgacggtggcttgtttctgtttgcgttgttgaagacggctgtctaattttgttgttttgaggcgttttcttgtttgtttgtttaggattccttttgatggatcaaagccctaaccctttattttgtttagttgccgagaatatggaggaaacaaggaagtgaaattttttcctcaggtttcaaattcatgaattattgttttaattagaggaatggatttacaactgtcagagctgcttgattgtggttattttgtgtctgtgtgtgtttctggttgtgtttggttgctgagaaaatgtacggaaagaaaagatttttgtctatagtttcttgtcaatatcccagagttgcttctatattttaagtattttgaagaaaacagcagaaactaagtgcagtttttatgaaaaaattgagaggagaaatgcaaatttagattttgctgtgttatgttactcttttgagaaagaaaaaagtaatgatttgcctgaccaattgagcctcagagttatattgggcttcatttttttttttgttttttttgttttaggtataagttattttgtttatcggtttcccaaatttggtttcatttataggtgttggagactagaaaggactaccgtggag

SEQ ID NO: 79562 - DNA, 875 bp, Citrus sinensis
  Intron number 2 from transcript orange1.1g031200m (locus o range1.1g031200m.g) derived from phytozome v7.0 (chr-ID sc affold09257; pos 326 to 1200)
acaggtaagccgttttatacctactatgtatgtgtgtgcatgcacccacacacagagcattttagttctgattctgggttaagtaacattgaaacaacttggtgaaatttttggattgtaagaatatgttctagtcatatccatttttcttaccctttttaataaaacgaacttttgctgcctaattggtcatttgagctctcttgtttaataaactgccataactctgcaaaacatttggatgtggatgaattatgttttctggattataaagtctacttacagttcaaaattttcaattgagctatctcaaactattttgtgactattgtttccttttgcgggtttgaaaactcagcagaaattgtcatttaaatttgggttttgtttcagttgtgaaatctgacaggatttattattctgctccggttaattggattattaatttattttttaatttgtggattccctcattcaagtcggtatagtgtcttcagtttctactaggtgtcaggcagttggactgttttgaggtttaatttgattcagcctgatttggagtacagcgaaatagatgtgatcgtggtagctgttaaatatcaattgtgggaaacaaacgtgtggttttagcggatgcgttggagtattggcatgatgctaacgctcctgatctagagtagagatagcttgaatttattagccttttacttaaaataaaaatattgtgcattattaattctttttgtagtgtgtttctgtgggtgtagttcttaagcttaaggtataataagccttattttccagtcagtaaccatgctataatctttaggacatggttgttgagaattctttctacagctttgcaggtactttca

SEQ ID NO: 79563 - DNA, 571 bp, Citrus sinensis
  Intron number 1 from transcript orange1.1g025097m (locus o range1.1g025097m.g) derived from phytozome v7.0 (chr-ID sc affold00025; pos 998370 to 998940 reverse strand)
gattctcacaactctcctaaagaaaaggtcagcgggttttggttttctctctttattattatttatttttttttcttgcttcatttttacgtatgttaaggtacccactacccaaaatgatcacgtctcctcaattcttgctttcaaggtggatctagaggctttcaaaaaagaaaaaaagtgaaaaatgagtttcttgtgtctctttttgatcatgtaaaataaataaatcatggatgttcacgactctactaaagaaagggttttccttttcttcaattaatttttacatttttgcatgtgttgaagtacccaaaaagatcatgagttgtatgaaagagatatctcaggagtggggctctactttgtgcctcacgctatctggggtttttatgaaatgatttcctcgtatgatctcatgatgatcatttgatgctcaaatatagtgatagtttgaagctttgatcatagctgagaagaaattatgtgtgtgtgagtgtgtggatgtgatttgatggtataataatactattttacgggataaattgttgtataaatgatgattcttcag

SEQ ID NO: 79564 - DNA, 878 bp, Citrus sinensis
  Intron number 1 from transcript orange1.1g005819m (locus o range1.1g002570m.g) derived from phytozome v7.0 (chr-ID sc affold00010; pos 2196894 to 2197771 reverse strand)
tttctggaaccagggatttgcagaggctacaagtacagttctttcttctgctgtttgttaccttttgatatgtgtgtgtgtgtgtgtgtgtgtgtgtgtagtaatgtaattagtggagccggtgaatatttgtctaattattgtgttagctttctttcattttttgttttgttttgttttgttttgataatcttttatgactgtttattgtggcctgcaataattggagtaactctttgttaacttttggtgggttttgagttttgttaggaagcataagtttggtgtttaagcttttgaggttgttgaaattctttgaaattgaagttgtatgtgaaagttccaacagaaatagataaagaatgtactttgaatctttgttgtactgtataattctggtctctcacaatgttttaatcagaaatttcaattacggacaaaaatttaacacgcttccaatttggttgctcatagttatgatgcctttctacttgaatttaatatgtttgctagaatgaactttaagaaaattcaagttttatttagttgtcctccggaggctacttatataatagtaatgatttgtcaaattcctaatagaaaattcataattttttcttttgtgaagattgaatttatgtttggtgccttttttcatctgcaggaaaatctacaaaataagttttagatgtgaaagtaattgcttgttttaataagaatatgactttcagaagagaggctgctgttccttttttcaaattaaaattctcatatttttcactttctaaatctgttgatattgaaaagtctctgaacaatattaagatgttatttttggtgcaggttgagatattgcacaggtcaaaggagctcaattg

SEQ ID NO: 79565 - DNA, 700 bp, Citrus sinensis
  Intron number 4 from transcript orange1.1g023775m (locus o range1.1g014714m.g) derived from phytozome v7.0 (chr-ID sc affold00319; pos 103867 to 104566)
atcttgttattattattgctgtggtatgtacttatgatcttgttattgttattgcttttagtgctgtaatttatttatcttttctaaaatacgaacagccatagcattttttaagtggttttaggttgttctgttcccctcttcaaattgcattttttgattgcattctgaagtgtttacttgattcactggtagaaagcttttgaatttattatgtggatcatccagcgatagctgtactttattttcttagaaactgagacacagtgaactttaatggacccctaaatgtaggttatgttgatcctaatgtgttggaccaacactgcaactgaccatgattcaagttagatatgtgcagtcaatttattattgctattctgtcttgttttgacctattgatttgatgaggttgctaagtgtttgctgcaagaacagcttcaaatacaatatttttacaaaatatttaatgttgtaattcgtaataatgctattgatttgatgaggttgctaagtgtttgctgcaactacagcttcaaatataatatttttacaaaatatttaatgttataattcgtaataatcagttcatgtggaaccttttctgttatggttcttctgtgcccctttaactttgtgctcttattttatttttttcgtttaaggtgagttcacggcagaaggaaacaagtagcaccac

SEQ ID NO: 79566 - DNA, 371 bp, Citrus sinensis
  Intron number 2 from transcript orange1.1g011453m (locus o range1.1g011471m.g) derived from phytozome v7.0 (chr-ID sc affold00007; pos 333087 to 333457)
agccctctcccgcatcttccttgcaacaagtatacttatttatctaattttaatgtacctccttagaatgtgtatgtatgcatcttcctgcatcttcccacattttaaatgaacttgtatgtattgttgttggtgccattttagtacttgaatgttaatttgtatatagatatctatgtttatggttatagagtggtgagctctgatgattttctgtttgctgcctattattcccctgttgagtacctgccttaaactaaattaattattaaataaatcatgtactcatgacttgtgctttttacaggtagtatactatatatcattagttgtgattgttagtttttgatttattaatggttgatggcagg

SEQ ID NO: 79567 - DNA, 555 bp, Citrus sinensis
  Intron number 1 from transcript orange1.1g045760m (locus o range1.1g045760m.g) derived from phytozome v7.0 (chr-ID sc affold00070; pos 484223 to 484777 reverse strand)
tctttcttcgtgagctcatcagcaactcctccgatgtatgtatctttcttatagaacccttgaattttttttctacttcgtttttatggatttgatttttgtatttatgctaagaatgatcattatcttttagttgtctgttttaattaatattctgttgtgtggttcaatgtagtttgtggatctgtgtttctgtttataatttgattaattctctcaaagttgattcctggttaaaagtagcaacaaagcagcgtccttttttcaggattttttttagtgttgaacaaagtagcttaagcatgaccaagcttgatattgggcggataaaattttgctggttgttttgaattgagattttgagtgttatatagaagaaacctgggcaaacattttaggttttctcttttttttttttcggttgtttatgcttttgttttggttgaacttacgtgtatttatttggactctgtgtttacgggctgctaattaattttgctggcctaaatataatgaacaggcattggataagatcagatttgaaagcttgacaga

SEQ ID NO: 79568 - DNA, 728 bp, Citrus sinensis
  Intron number 2 from transcript orange1.1g018264m (locus o range1.1g018301m.g) derived from phytozome v7.0 (chr-ID sc affold00010; pos 180113 to 180840)
tatcacggcttatataagctctcagagagtcagaggtctaaattactccctcattacactttctcgggctcatcttcattaattatgtttatttcttaatcacggagtaaattatttggttgttgggataattgaggaaatgaaaagaaaattaaaagtagagtcctttatattttatcagcatttggttacctaaatattgttaataccacgtgtggttacacgatgatagtaatgaaggcaatggtgattattatcatagtgaattcactgtcaccatcaccatgtcatgtgtcaatgaattgataatctattgcctcttagaattttttttgaatatttaaaaaggtctaagagggaaatgaatgagtgaattaagtgatacttttcaaattaagagatgaattctagtgaatttgttaaagggtctgctaaccattttcagcccttaacacggttattcttatggtagcaactaattgaaacactagtgaatacctatagccataaggcaatgagctttcttgcccctgagattttattcttatggtggcaactaattgaaacacttttattgaagattatagttacttaattttccttcctatactcagaagtcattatcaggcttttctgcttgattgaagtttgagatttttaatgctgactgacctgctcatcatacttccacagtattccttcaagatttataaagacggaaggcgatc

SEQ ID NO: 79569 - DNA, 859 bp, Citrus sinensis
  Intron number 3 from transcript orange1.1g018264m (locus o range1.1g018301m.g) derived from phytozome v7.0 (chr-ID sc affold00010; pos 181231 to 182089)
ttctttcctctgttttcaaggttagttgctgtttgcttttagtaatctattttacatatgtcattcttccaacgttattagtttgcttcaaaaaactgctggaaacttccatttatgacacatgacaaccacccctcccctcttttaggattattggaatattatgtgtgtaagcatgggtattaggaatttctttctaaaatttattgtaccatttttgtgtaatggaataaaatgtattacatttggatttgattccatagattgtgatggacatactagttaatttcgttattatttccttttttttattattttaaacgatgcgttgtccctgttaatagtttttgggtgagcactcactgaggacaatataagtgccctattttgattttaattatgaattaaattatttaaaatatggtattcagccccttaaagaaactgggcttatattgtactcagtgtagcatcgcagtctatcaatttcatttttcttttagctacaaagggaattatccaaagcagctgtaaccaagacatctgactgagattattgacaattaatgacctgcaatataagttttcttttatataaatgtattgtctaatatgactttgctctgctcaattagtaatgaggtgaggggctatggaccttgtggttgttgatcttaggtaaattttttacatatcatgtctgttttatttgcatcttttgtatatgaacttgttctaccaaagtttgaatggtgagtgattgaactcaggaagcaaacaatctttccttgttaatgttttgactatccgaaaaatttgggcaggtgtgaaaacccttaattactgcttgggtaaccaa

SEQ ID NO: 79570 - DNA, 481 bp, Citrus sinensis
  Intron number 3 from transcript orange1.1g010280m (locus o range1.1g009448m.g) derived from phytozome v7.0 (chr-ID sc affold00010; pos 549035 to 549515)
aatcaggtaaagttgttacctgaataaatttgcatgattcttgattattgccctggattagcttcaaattcactcgatgggaatcaacaatgttgattcttttcacaaattatctttgcactcctttcgatttgaatatcaaaacattttccttattttttctttttggggggggggggggggagggggaagagggatccaaagtgctctgtatttatgttttttgaatatgtctagcagggccgggcaaggatagatttaaattgttaccagaaatttagaatacattgaatatatgtctgatcactttccttccgcaaactgttcttgcagtatgggcactctgtaatgtattggtgtaaatcctatttgtttgtattggtttagcaacaaagtagcatttttatattttctaatgcaattaatttttctgaatgtacgatttgattttgcagttgttcctgccataagatcagtgtgt

SEQ ID NO: 79571 - DNA, 789 bp, Citrus sinensis
  Intron number 1 from transcript orange1.1g007276m (locus o range1.1g007073m.g) derived from phytozome v7.0 (chr-ID sc affold00528; pos 85268 to 86056)
attccactctgaaaaggtacttgtgcaaatttttaatctttttcggttctcatcttgatttgttctttgccaattcttacactccacatgatcttgctttctgtgtcggttgatttcttgtttgtttaaggttctgagttttgtttgatttatgagaaaatgatgaaaaaacaaatgaaccttttgatttctggatgatgcccagtaaagcaaatacagattttgctttaaaaggtgggcaatattgattttttttttcttttaatttttggatgattcccatagaagcaaatacaagctggtgaagacttagtttagtttacttttccaagaattatgctcaatttcttagtatttaagtttgaatttctgctttatcagctttcgggaccccatgtgcctgggtgtttctaacatttgtggcaagagaagcttgggcgacggtatatatagtcttgtaatttgatattgttcactgctaaatccgttataaccaattttgcaattacctaaatgatggtagttgatggttgtttctttaatttgtcttttaactgtcaagttatttctattaagaatacgctcacctattatgccccttgtaaattgcataatgacagctaaagactggtcaaactcttgtgatgagtgaattgtacgagagataaacctctatgagattgatacatatgctaatgctgctattcaggtgcttgtttgtcatcattattcaggagtcttgttgtttttccaaatatggatctcaattatgtgtttgttgcagatcac

SEQ ID NO: 79572 - DNA, 585 bp, Citrus sinensis
  Intron number 2 from transcript orange1.1g007276m (locus o range1.1g007073m.g) derived from phytozome v7.0 (chr-ID sc affold00528; pos 86129 to 86713)
ttgcttgcattatttggcgctgtctgattatcaaggtattattcatttctcatttagaaatcatggatcccaacagcatatagatatgtcaagtatggttactgtgatcttgacattatcgaggtatgattcatgtctcatttgtttgcttactgtgatcttgacattttccaggtgaggtatttttgtttgtttttgaaaatgatatgatgtttcatataacaatgtagtcttaaaaagagtgatagaaggacaagaagtgctaaattttgctgtataattatttgcttttaaaggttacgtttagtctacaattagttcttagcaattgatacttttgacctactggaagaactttcatttcactagattgaacaagaagatagcttagatttgagctgagatattgttctttgggcaaattgaaatgcctgttaggtcagtatggcaggcagttcactgttcctaaagagatgctcctgatagatcttcttctttattgtttgaaatgtttcaggttttttgataattttgatcctgatttacataatggttggctaacattcttatgttctctttcaggag

SEQ ID NO: 79573 - DNA, 746 bp, Citrus sinensis
  Intron number 4 from transcript orange1.1g007276m (locus o range1.1g007073m.g) derived from phytozome v7.0 (chr-ID sc affold00528; pos 87018 to 87763)
ccaagaataggagttctgaggactctttcaacactgtacgtatggattatattggagcaatcagtgtataatttgagttatagtatatagttcacttgcttcattcattttcctgaagtggttattttcagtttccaagttgtgaaaactcttattttgttatgatgctatgccatcattatggctttaaatgatctctgtttttgtttgctgcattttgtctatttcggaggtgactgcatatattccacaggagtcagaacatgttggtgtagccttggaattctttcagaattatgggaatatgtgatctttactgtgccatgaaactagactttagaaaatgtggcgtgtttgttcctctgatggacgctaacatgtgttataaaggtctctgatgctctcttatcattgcaacttcagcaataaaactgatgaatagttctaaattctagatttctttagcaacaacagaatatgattgaaatatagtaattagaaagaggtatgccttaattgctaagatcactgacgaacaaattagattgctaatggggaggaaaatataaaccttatctgtttttattatttatgggagagaaaccttttgagactcagttatggctttgtatgagaaaagaatgaccagaggagatgtgtgtctgtgtgtatttgcaaccaagatgtttttgaatgtattcctaacatatataagaggcatttgtattgcagcacattaaaaggaa

SEQ ID NO: 79574 - DNA, 872 bp, Citrus sinensis
  Intron number 4 from transcript orange1.1g002060m (locus o range1.1g002067m.g) derived from phytozome v7.0 (chr-ID sc affold00025; pos 891190 to 892061 reverse strand)
gggtgtctgttccaaagaagggaagtaggtaaatgaatgcttttaattaaccgtgctgcagtgctaatgctcttttgatgaggcatcattaataagaaaattacatggtgatatcttcggatgtagccttctcttgcttaggttctgagagtaagaaacttggtgagaagtttattgtatgacattcattttacttgaaggaattaggttccctggaacccaattttaatgatgataaattggataaattaaattattattcttctggggcagaggattcttggtcttgtcactttagaagttgcccctttctgtgctttttatgtcttcttttcatgatcttttatcattgcacttgtgtatgtgtcattttcattagcattaaagttggaggttctggaacttgcggtctacccttttttttttggcaagccctccattgtgattgcaaagagaacactgatgagatataaaaaaagatttgttcaatagcaagcaaattattttcaatgtatttagagatgtttttcatggtcaaaatttcaaaaaaggaattatatgttattgacatttatgatgccaagcacatttgctgccgtttaagcaaaggcaattatgtgaaaaatgctttgatttcataaatatttgatgcacagtttatctgcaagtttgcccatctactagttctcttgacaaagacagatttgaacatatttgcttgtactcgcgacaatttttatgtagtaaattatcatagaggatatactaaacaaagatatagtgaggcattgttggaatatttcttgaacattaaaacacactaggagtgttgtgaaaacatggaagtttatcgaaatatgatttctgcaggt

SEQ ID NO: 79575 - DNA, 521 bp, Citrus sinensis
  Intron number 1 from transcript orange1.1g002060m (locus o range1.1g002067m.g) derived from phytozome v7.0 (chr-ID sc affold00025; pos 892760 to 893280 reverse strand)
cttcagtgattccaatcgcttgtttcggactttcggtttgttttcttcaacttattattgaaattaaaattagaatcattacttaatgcgaacttgatttcctcgacaaaatataatacgctcgtgaataagagttaacagattacaaaatattataaaatctatgtatcttcttagttgagctctaaacgacataatttcattgtcaaatccctctaaactctttttttgtgagcgtaaaagctgacatattaagatcataaagaagatttaattttttgccttcttgtatcgtttccttttgaaaccctagattcatattctgtctttcattttatttttggttgatttttttgggttattgggtataagaaattgatcgattaggttggctatagaaataagttaatcaaagcttttgcctttttcttttttttttttccaagagtttctgtatgttttgaattttaatgtaatttctggcagaattgattgcaggaagtcgacgaagacgaaaaaaa

SEQ ID NO: 79576 - DNA, 797 bp, Citrus sinensis
  Intron number 1 from transcript orange1.1g038316m (locus o range1.1g038316m.g) derived from phytozome v7.0 (chr-ID sc affold01601; pos 1418 to 2214 reverse strand)
gttccgcctcttcacacccaccacaatccccaaaggtatatgtttatagaatctcgtttaattttctaattaagatttgcatttagaatcttatttaagttgtatttaatttgtttgaaaatttcatagtaattaataattttatcagtttatcttcagtcttcaataaatttaagagcgcatcactctttttgcaagttgtttattttgtagtcttttgttgtactttcttgcatgcattattgcaatttatttttctagagctcccatagagatctatttagttttctatttatttcaaaaaaatttagaattgttcctatttctatacatagttcatattcggcctccaaaacttacatatatttgataaaatctataaaatcgtctttgattatagccccagcggttggcttctcaattttaaaattttttatgtaaatagcgctttcaagtttataatttcgctattacgactcctattgagccaatcttgttaatgcctctgttcctcaggaaagtttaaaacaaaagagtctatatcactagtgtcagataactgaatttatacaaagaaaatgttaattaaagtgataaaagaactgacaaaatgcttacaagataacgataactggtgccgatttattgtcgatattctgagatcaataatttttttacttttaaaaattcttgtcatgagaatttattgttgagatttacacatgacaattttaaattttgatattcttcttaattatgtgaatttattctttgcgtttcacgcttgttaggtggct

SEQ ID NO: 79577 - DNA, 783 bp, Citrus sinensis
  Intron number 1 from transcript orange1.1g008684m (locus o range1.1g008677m.g) derived from phytozome v7.0 (chr-ID sc affold00025; pos 406962 to 407744 reverse strand)
ttctcctttttcttttggtttcgttcataataaaggtaatatgctttattttaatttctttgatttattttgtttaatttttagttgaattgggttttatagggtgatcttttgttagatgtttgttattcaatttgacacattttgttctggtttcttcattcataccagcgtatgaaatttttcaattcaagttgttcaatggaactttaaactaagagagagatgctaaattcgtgctcctggtattggtgccttcgtcttgtagctttagatgaaagctagcataagaaatttattcattttatcctcatatcattatcgtaattttgtgcatatgtatgtttgcatgtatgcttatgatgtcatgaaaactgcagtgaatacactgatagtattgaatattgtggttggtcattaaacaatctcttgagaagctattaaaaaattctccttacaaaaatttgatgttataaattaaaaaaattgatgttataaattaatattcaagagagaactattgggatttaggtatgaaagtaattttttgggctataacttctgcaaatatagcatattgtagagtaggaaaagggtagaacctcagaaatggactctaattttatgtttgttaggatgtgtcatttcttcagtttgaaagaacaaacattttcctttcaatgtgaggcttatcacacagcagaaagcttcagacttccataatctgaattatatgtattatatattattcttgtttcagtttaaggggttcttagtggatac

SEQ ID NO: 79578 - DNA, 860 bp, Citrus sinensis
  Intron number 1 from transcript orange1.1g032432m (locus o range1.1g032432m.g) derived from phytozome v7.0 (chr-ID sc affold00361; pos 72599 to 73458)
cctttactttggttttgactatcaaggttggataaggggagtgaagtttttggagcaaacctagttatccacaagcttcccagaggatcacttccacgaacaaaatcatgtgttttcttcactttggaaggcggttctgaatcaatgttctcggtactgctcaccttatgtttatccagagaggaattagagtctgttcctccttccccctgatcagctgccagcgccacattgcatgaatttttgttctctgaagagttagccttgcagttttcctgactggaaccaaaattggcagatgaaatcttaggctgggttgctgtacctgctccatctcctgatgtcgactcgttgaatttctcatttgatagaagaaattgtttgtgaaagttagcactgtcagcatgacaagccagtggagtagcactaatgtcacatagtccattaaacacctcaagttctgattgataattatcatcagatattctttcctgacccttcatcttcggacgatataaggactggaaaatagattgaaacccgacatttctgcactcagaatcttggttttttttatatgtgataaatttctgatcagaacatttatgtccataatttgtacacgcaagggtgagatcaactgaaggtgaattgtctagatttgattttggaaaccccttcatcatgttcaatatccaattcatgaaggagctatcttgtttgacacatgatgcagaaccagtagtctcccggatttgctttttaacttttttacttccaacgatcaactgctgctcaaagctccatctctttttgcatgttgaaaataatccagtgctgttacaactttcaacactctc

SEQ ID NO: 79579 - DNA, 258 bp, Citrus sinensis
  Intron number 1 from transcript orange1.1g012642m (locus o range1.1g005934m.g) derived from phytozome v7.0 (chr-ID sc affold00026; pos 1145115 to 1145372 reverse strand)
gtcccttatccttctggtcttggcattttaacactgtaagtgaatggttaagcccattagtcaatatctcgctgcctttaattttatattttattcgtattcttctatttatcattggtgcatacgtgtgcgtgcatggatttgtttgcacatattcatagctttgacttttcatttcccagagtttagctttggttggtcaataatttgtactgcgtgtgtttctaagactctactaagtcactgagcatactgatc

SEQ ID NO: 79580 - DNA, 543 bp, Citrus sinensis
  Intron number 1 from transcript orange1.1g022391m (locus o range1.1g010450m.g) derived from phytozome v7.0 (chr-ID sc affold00238; pos 143932 to 144474 reverse strand)
atcactctttgaagcccttcaaaaagttaaagaaggtctctccccttttaaccccttttcagttttttttcttattattattccatgatatagtatttgaagttcgaagtatgtcaccatctttgtcccgtctgcattttttgtttttttacatttcctcaggatgatttattatggtcaatgttgtttgcttctttgtatgtttttaatttaatttaagtttttttttcttttgggggggggggggggttatctggtttttgagtttagtaggtattccactaaaaaaaaaaagagcaaataaaaaaacttcccatcatgatactgtgttatgtatataggcaggtatgcgtttatgtgaataagaagatgtgtaaattaaaaaagggatttgtttttggttcacagattttgatgtgtatttgtgagtgtgaaaaaaaaaagaatccgttttttcttatatttttttgtgaaaatgtttgtgtgtgggaattctttcgaaatttgatttattggaagtttggaattgtgatggcagagttg

SEQ ID NO: 79581 - DNA, 564 bp, Citrus sinensis
  Intron number 3 from transcript orange1.1g031303m (locus o range1.1g031303m.g) derived from phytozome v7.0 (chr-ID sc affold11795; pos 541 to 1104)
gttaaagacatcaagttggaggacatcaagtacaagtaagaactaacaatgtgttatcaaaatttgttgattaaatagaatcaaagagcctaataatttgcattgacaattgacatggaagtcatcatagaggaagaaaccccatattcgatttgtgaatttcttaaatgctttcacttcacaaccagtcttcttctttttcatttagcaagatattgacttctttcaatatttttaaaagataaatttattttttcaaccaagttcagacagaccattgttcaaaacctttttggtttccaaggcaaacttgcagcaaaattagctgaatttcttttgcctcttttttcagtattgaaaggaaaatgatgggaaaccttatgatttttgtataagaatcatccaacatcacattcctcttatcatttatgctttttcacatatgcagcattgatggaattaatttttattttttatttttaagatctgtgtacgcctgtgaccatagctgataactatattaaatcagggataaatcacgtgagaaacaaaggaagaagaatt

SEQ ID NO: 79582 - DNA, 706 bp, Citrus sinensis
  Intron number 2 from transcript orange1.1g012193m (locus o range1.1g010453m.g) derived from phytozome v7.0 (chr-ID sc affold00060; pos 462661 to 463366)
gtgagtgtagcctttgccttcaatttgattagaaagtaaatgattgtatttgcttttaactattgtatacttttatatattttgaatttctaataggagaagtgtcctacaaaccttagttccaagatctgtgaggatcttggcacaaaatcagagtatccacttccttctttggttctttgattattggagaggaactatttgtaaagagagaaatgtttacaagataatatgcgcaaaaactgtttgtaaagagagcaactttagcaggataataagggcaaacattgtataagttaccaaatgctgtgttggaaataacttgtatagaaataacttcagatggaaatctttgggaaacagaggagaaataattggggtggaggattttggtttggatcaaagaattagctttggaggaaagttgtttaaagaatagaatgtccttatcatgttcctatagtatgatgatatgaaattccacatttaggtctttttccccttcttttctttctgtatgcagactgtgctgcccttccctgcatagagtatatgtgttatttagtttgactactagaaactccctaccagaaatttctcagttctctttccaaaaatcatgatttttctttggtagaaaattttgaattcattgttggatattccattctgtagaaatcttttctaatttaatttcttattgtag

SEQ ID NO: 79583 - DNA, 712 bp, Citrus sinensis
  Intron number 1 from transcript orange1.1g018286m (locus o range1.1g018267m.g) derived from phytozome v7.0 (chr-ID sc affold00349; pos 13706 to 14417 reverse strand)
tttcagggtagcgctgtttcattttggtgcacaaagtaaggttttttttttattttttaataataatgcttaggaaagattaatttaatggtgatatgttgttgaatatgtttcttttttatttgttacaaaagttctgaaatttactttattgagttagaaaaaaaaaatgcttaccgttcatagaattatgaaactttcattggtttgactgaattttttctctttcgttatggttatgttataggttgaatgtgcctatgattaatcttttggatgttctgttcagtggacagattatagttttataacttcaggcatattttatagcccattacctcttgttatgcttgaagttttgggttctcaacttaaggatagagtttgagtctgaaagtatcaattttatgtgaatatcaaagggtagcactccaacttcatttatgtttcctcttctgggacctgcttaggagggacgtgtactgtgaaattatcctttttttaggtttactttgggacctctggggacacttcttggcttctctgtcattaatttctgagattttgttactataaattccttcacgtggtgaatatctgtatatacgaagacgtgaatgtttatttatatgtttggtattttaatgcatcgattaagacaagtttttgtgttgcagattttggaattttattggaagaactatctaaggaa

SEQ ID NO: 79584 - DNA, 871 bp, Citrus sinensis
  Intron number 1 from transcript orange1.1g002811m (locus o range1.1g002385m.g) derived from phytozome v7.0 (chr-ID sc affold01438; pos 16257 to 17127 reverse strand)
aagttattaatctacttgatgtaaaaatcccaccttttgtttttgttctttattatctcttcatgtatttgtttctaatttttctgtgttttgaattttattacttgttgtttggtcaaatgggttttttgttgtttgtcgattaatttcttataaaggtgtaatcttctggtgtttttgttttttttttatgggtctttcaattagtccaatggaatgtgaaataaggagctataatttggacagggtttatcattgtttgtaggtttaatggtttcatgttcttgttataatttgtttgtttagatcacccatttgcatgttgaatgatagataatatagacttttcaggttgattttctgtttgtgttatgagcatagtgagtgtcgatgattgttagttttatgtgggcttttctttataaattcatggtgcaatgtttggtacttcgaatgtgtttatatagcctgcattttgttgttttcatgggttgataattgttaattttatgtctttcctttttgcaactgataattgacaggttttggtactttcatctgataaatgtttgtttgtttgataaaatgatgcgaatgttagcattgttaatattcaaagtatttttgggctctatgttcatataattgtttatagtttaggttttggcacatttgatgaattgattgtgttttaaatcaacttttatgtttgagtcatagcttctgtatttcttctaatgcatatcttgactgttttgttctgaaatcattaccctttttgcccaattcttaccagttcattatgtgccttcatataatgttaaatccttttggttctgtctctgttagaaagttgagcacttgcttgcaa

SEQ ID NO: 79585 - DNA, 792 bp, Citrus sinensis
  Intron number 3 from transcript orange1.1g016155m (locus o range1.1g015160m.g) derived from phytozome v7.0 (chr-ID sc affold00036; pos 717335 to 718126 reverse strand)
gcaatgtaatgtctattgttcatcttaacaatattttagtatcttttctctaaaattttgatttatgttggatgctgtacttccctctccaaccctctgtcaccctcctaaaaaaagaatcaccctgttatatattaaagtctttgaattttgtatctgtttgcttttggggatgactcgacacaattgtgggattgctcaagttgagcttaataaagttatattgcttgagcctaaaacttaaatttatgatccttgtaaggagtgcctaattaaatggtattgcattttatctggtgaatgtaaaaaagtagattaactgcttgcattgacttttcacagagaggaaatgagtactgtgaagaatgaattatggcaactttgtgctacagtcttggaaactagccatttgtatggcttttctgtcagagattacaggctattacccttctatctagatcatataggcagggatatgtgattatagaacctatttacaagaacttttcctttagttggtatgatccatagatactcaaatgtctatacagcattgccttgttgctgcgctatattaaacaaatagatttgttttgttaccttcacttccacctttcttttccttcagatgcaactagaaagttatttgtttattctgttctctctctcgcttgctttctcctttcgtttcactttgtaatttaaattgttcagttgcatcatagtaaaactatttttttgctggccattaattcaggcatcttcaccggcttgtgactggttggatccgtc

SEQ ID NO: 79586 - DNA, 629 bp, Citrus sinensis
  Intron number 3 from transcript orange1.1g024586m (locus o range1.1g021663m.g) derived from phytozome v7.0 (chr-ID sc affold00036; pos 573043 to 573671 reverse strand)
aagaaaaaagacattcaggtgtgtaaccttttatccttcgagaattcatttttggaagtttcatttgcctgaatgtgagggtcaccttgttaaactgatttaacacgctgtttctagtagtaagtttttactgttctgatgaatgcttagatggggttgcaactctgaaattgttcggtctattacatggtatagaatgtgatcgcatacttgtaggatgtccttgctattgcggacagcttgttcactgttttagaatctttgtcattattaatgcaaacatttccattttgagggaaaactgaaaagctggtaattttagtaggcaacatagttgctcttgtaaatctgttatctgatgtcacctcttcacacttattgggcttcttcaattactactatggctcaagtggtgttaaacttttcttgctaatcaatatcttatgataaagatgaattagtaaattgattttactggcatcggcatcaaatttttaattttgtttgatgtatatattaaactttattgtgcattttcttttctcttctccccctcatttctgaattccattactttgcctttgtttctcctagggttcatttgtacctgttgtcttggttgagaacag

SEQ ID NO: 79587 - DNA, 429 bp, Citrus sinensis
  Intron number 1 from transcript orange1.1g022831m (locus o range1.1g022818m.g) derived from phytozome v7.0 (chr-ID sc affold00007; pos 1855715 to 1856143 reverse strand)
atttctcacacttgcggcttcactccgactttctggtaagctctcttttcttcctcttgttatggtccttttgatttccgacctttcataaactaggatcggctccaatgcgactgatatttgtgtcttcttgttagtttttatgttcatttttgctatgaccgaggctgaggcttacgttacgttactgaattatgctggagacttttatttgatacgtttctattctatcggatcaagaagtttgggttactgttatctcaagtctacacatccgtaattgtgtcatgaaatgaatgcttgtgtgttgctgtatacatttctaaagagaatagtacgattatttttttattagactgatgatttgtatttgtcttattattcatatttacattgttgtgaatggaaacagagtgattccatatcaaa

SEQ ID NO: 79588 - DNA, 893 bp, Citrus sinensis
  Intron number 2 from transcript orange1.1g030929m (locus o range1.1g027852m.g) derived from phytozome v7.0 (chr-ID sc affold00010; pos 352485 to 353377 reverse strand)
tatatcagcatgtaattgtttcattaatttttctgttttaatttagtcgacttaaattttgccaggctgtgattacctaggttttagtttatgtttcgtttaggcagaggtatacattgacttgagttgttatgaaaaatggaaactcagtgaagtcattacaatatcaattcatcaattatcaaactcaatttggatttgtgatctaagtaaccatgaagcctcatttgtagcagttgacacaataaacaagcaaggtttggatctactaaatcgtggcttcaagttgtataattatcttaatttagtatggacggaggatatggggtgtgagcatctaggaaaggagcttaggattaaacatcttggaaaggttgagactattcccttgtttcatttgctggaaacaaatattttttgagctcatccagacaaaaccattcgaaaggcacttctgtctgaactgaattaactttcaatgtcaacttgaatgtattttaggagatggctatgacagatctgattgcatttcctgttattggaacttagtgctatgtttgacgtgtcttgtttgtcatctgtaatctcatttatcctgtaactgaaataatatggaggagttgaatatttgatgtgctttcctagatgttattaacctttaaaatcttttatcctattggttgtttaataaccaaataaactcttaataaagtatcaagatttagatgtctaatatctctgcaggacctaaagttcaagcatattgtaatttgatgtgatagtggtaataggtggttaagattgcagaataattaatcccttttaaccttttcttttctctaaaatttcttatggcaggggaaattccttaaaggatccagcatccaaggctt

SEQ ID NO: 79589 - DNA, 731 bp, Citrus sinensis
  Intron number 2 from transcript orange1.1g003782m (locus o range1.1g002363m.g) derived from phytozome v7.0 (chr-ID sc affold00036; pos 742982 to 743712 reverse strand)
gcaagactgtgtctgtgaatcagtttcaggtgagttgtttaaattccataatttatgaagttatttatgctgatgtgttaattttgagtaataatgctatttttaatgtttctgctgcggatgaagcttgattcagttcaggatttgatttgttcgatggggaaggtccattggataattttggtttgctcccaatgacatgttggaataatgaaccattagcttaatatttcacagaatcactaagagttatgactgtgatggtagctttgaaatgcattcttcttatgggtaaatgacttagttactagtccttggatttattaccagtaaaaggatatcatttctaagatattcaatttatagactttgctttcgaatttccctgcttgttttgtgtagcttccttgaaatgaatgtaaaatgttccgttttagttaccttattcgttttctacacttgatataaattgttttgtgatataggtgtgcatatactcttggtattgttttggctttatcatacatgttgctgtttttatttctctgtcaaccttcattgtacatggtattatgtgaaaatgagtatgactgctcattattcccatagcattatctttttcccactccatcggtgctctatatacaatatttctgtgccacttgttatgttcctgcatatctaattagttcttaatgctagttgatatttgacaattttgcaggttaagg

SEQ ID NO: 79590 - DNA, 608 bp, Citrus sinensis
  Intron number 1 from transcript orange1.1g007738m (locus o range1.1g005158m.g) derived from phytozome v7.0 (chr-ID sc affold00123; pos 262959 to 263566)
gctactactgttgctcctgctgtagaaagtatcctttcacaaaatagcgatctgggtattgtttaattcccttgtttctcgtctggatcgaatttggtttctgttaatttttggttcttaatttcgtagatccgtgtcaaaatttaggtttttacgcgtttaaattacggttttcatggtgacttgttcgtttgtgaagaagttgttttcttgggaagtttgtgttgttcagaattattgtaatttgtttgtcgctacgtggtcttgtttatttttggtttcttctaaatgaattgatgagtgtttgtttttattctagttgggattagggttgttggttgctcgtgtggactacagtatggtagttatattgttttcaacagggatcttgattttactgttcaaacattgaattcaaaattatatgcttgttattggactgtagtttaagcattgcgatttataagttgaggttgtttgtaaatggaattttgtaaattgaagcatgtatgattgtcttgatattggcttttggctagcaaatttgtttcctttacttttttcttccaatagaagcatcagatttgctgcagaaattgtctttagat

SEQ ID NO: 79591 - DNA, 948 bp, Citrus sinensis
  Intron number 5 from transcript orange1.1g030412m (locus o range1.1g021099m.g) derived from phytozome v7.0 (chr-ID sc affold00007; pos 2531144 to 2532091 reverse strand)
gaaagagggaggtatattattgaattttagcactccggattcttactttctctctgctgtgaagttgaggacattgcaagtaaataggaagctcttatgcacgtataatgatcgtccccttcattttcgtagtcttgggattttcttctccctttatttggtccaatttttgggctatacaaggggatagtgctttccactcgcttacatgttttaacaggtctgatagcctccttgcagctgcaagaaggcatatgccgctaggactcaatgatgttgctccgtttctgtgtaatttaattatgtttggtttcacatctccactttcctgtttttcacagctctgcttccctcggtgctgtgaatttcacttgtaacactagtgatacagtctagttattaatgttgcttagtctggcaccaatgggtttctaactgaaacagatttaatcaacctgttgatcatttcaagtgtccaaatttgttcctgaacctgcgttgattttatgcatggcttatggcagtagtaggaaatgagacaaatcctgtatatttagctggtcacttgggtttgaatcttgagggagttaaggggctaaaaaatgaatttcggctctacccactcccttgccttttttttcctccctcaaaaaccaaaaaaaaaagaattctccttagtttatgaattgcacatttgtgttcttctaaaacctttcttcttgatggcatttttaatttgaacgagcacccttttggtttaaactcataaaagaatactttctatcgcatgctctttcggaggggaactgaattcaatctaaacagttgtgctggaggtctctcaatacatttgattttcacagtggcttcattcatttcttaaaaaatcttggtttgcatatttcgatggtaggtgcttgtagtccaagaaaatagtgggagattccg

SEQ ID NO: 79592 - DNA, 840 bp, Citrus sinensis
  Intron number 1 from transcript orange1.1g007927m (locus o range1.1g007928m.g) derived from phytozome v7.0 (chr-ID sc affold00344; pos 47900 to 48739 reverse strand)
aattttcctctctctcatcggattgcatctcttaggtattaagttgtgccttacgtatgtatgtgtttttatttttgtagtttcttattctgtggtgttaattcttttttgctaaattgtgattgcttgatcagaaattggattgtgtcatgagattttgtactgaactggattatttgttaatttaatttttcaatattatgcgaaactgaaacaatgtaaaagcatgagcttgctggaaatttttgttagaagttatggttttattggcttcctgtgtaagagtaaagcaatggccgaattttgggataagctttcatagtagctgcagttgggacttaataaattgggtgggatgttttagatggtactgaagggcttgtagttggagccgagttctgagcttagtgcgtaatttaatggttctagatgcttaagagtccctgaaatattattttgatgtattaaaattggcgccacatagtagaattcagcggcaaattgatttagatggttgatgaagattattgaagtctatttatttggcctagaggtaaaggtattgaagacacatgtttaatgactataactgtctgaaattactctcttcgcattttttttcccgtgaaaaaatatgcttaataagttatgggggagaagaataaaaaaggattagaatagtggattgtaattggtctgtagttgtcccattatttgccaagatgtaatatggcgtgttcaaaacttaggtgacatgtattgcaacgataccattagctgaagtcttgtttagtgtcttttttagtcattcatatagtactcactaaattggaacccgag

SEQ ID NO: 79593 - DNA, 968 bp, Citrus sinensis
  Intron number 1 from transcript orange1.1g030673m (locus o range1.1g028849m.g) derived from phytozome v7.0 (chr-ID sc affold00303; pos 84204 to 85171)
gctaattctttcatttctgcttcatattttgatcggtacatttatttactcaaagctaaactcacttcttaaatgaattatcttcgttttaggatcaatcaatactaccctttataaataatttgaacactaattatcttgttacaattattccgtaatttattgattattattttgaattaagcttttttgttttccgtgaatggtttaaaaaaaaagaaagaaagaaagaaagagctatagtattgaattcttttaagagcaaatgaagcggttgtgaaactctagagagaattaatgaccaatatattgaatcaattttctctgtttctttgcttgataactgagagttgttgacaactatgtgtatttgccactccattgtgtttactagtttcttcgctttagggttctatttgtaaattagaagcctgtaacagtcgatgcagagatgattcaggctaatatgacattgcttcagtaagtttgcttattgagattttaaaatcttgtatctgatattggcgtggtgtgaaagtactgatgaattttcttgattagtttcttgacatttgggatgcaagttttgtcgtctgtttatctttgttaaagcaaaatgtcacaaaagatatgtttcggatggtttcccagtattttactttcatgatcgtattgttttattagataactttcttgatgctatgttcttattcgcataacagattttcttatggatgatgtcaattactgtatacttggtgaagatttcttctgcgatgtgatgtgtgctggagtatgtgtttttattttccttgtctctggagaatgccccatatagtctattttgacaggatattatctaatacctatcggcattattaagcatcaatctgttgaattatctggttgaaagagtatgaactatttttcttacatcttcaaatctttgactcttctctccaggcttt

SEQ ID NO: 79594 - DNA, 807 bp, Citrus sinensis
  Intron number 2 from transcript orange1.1g013674m (locus o range1.1g013629m.g) derived from phytozome v7.0 (chr-ID sc affold00254; pos 187350 to 188156)
gacgttgtctttcattgccgaattgattttgacaggtttgttgttttggcctaattatgattttattttaggtgatatgttaatgcatgaccggcttaatgatgcttctcatttaccaattgaatttaatgatgtggaaaagttgttttattttctatgctgagttctattgttactaaatctcctcctgatagaattcgtaattggtttctttaatattgttaaattggagggcagttcctcgtgctactattccatagagatgtagtttttaagagagtgaagcttatcatggaaaagtttgaccatcttaagagagagagagagagaaggctgaggctcaattaaccaggtagcccagcaatgcaaatgttatcgattctgtagttcaattatgcagcatctcaaaattgtgaaatgtatatttaaacttgagcgtcaaacttaattcatggatcacaatcgaccaatagcttcaattgctcatatgcttgcaccaacgaaatatattcatggaggggtagacttgggcatgtagatagcggtttagtggtaaggtactgtactgttgaagatttctttttatgttagttttcaccaaggacttcttatgtgttcttattagattgataggaaattatcttgaagcataattttctatgttcttgcccattcccccgacccctccttctcaaccatgcttcttcagtttctagttagatttatattcaatgagctttgttttgatttttcataggctattctcttgcagttctgtttctactggagctattttggcttgcagca

SEQ ID NO: 79595 - DNA, 647 bp, Citrus sinensis
  Intron number 1 from transcript orange1.1g045705m (locus o range1.1g045705m.g) derived from phytozome v7.0 (chr-ID sc affold00716; pos 48728 to 49374 reverse strand)
caggtatgaatactcaaataaccttaaaggtgctgtggtgatatatgttttctacttctcccttaatttgggctgtcttctctttctatccttttcaaatacatctcaaaactttgtggatgtttgttggataaaacatattggtaattatgggctgcttaactcaaaagacagattcagtcatcctggaaaagagaacttgctcatgaattatttgataaaaactcctttattatttagtcaagtttgatgcccgaaaccatatgtgtgtattatgggacaaagtttgtttttaacttcttgtgggtttttttcattgtataatttcagaatatattttcttttcattcttagtgatttgtaggtgttatattttcatttttgtcattgtaatgagtggactggtgctgcacactgtatttttttccttggttcttccctaatcaataagattaattaatccttattttttatattgaaaatgatggcctacaagttcacagctaaagtcattgcattaaatttggtagaacttcgggatatattcttttattttaatttttctatgtaatatatttttcttgtttcatttcaaggctacaagatttttcatggctttgcttccaggctaggttaaagcaacacag

SEQ ID NO: 79596 - DNA, 838 bp, Citrus sinensis
  Intron number 1 from transcript orange1.1g018538m (locus o range1.1g011530m.g) derived from phytozome v7.0 (chr-ID sc affold00010; pos 936526 to 937363)
ggtattctcgaaatccctttttttttcccatttttgccacttggctgtctctctaagttaagctcgtgctcgttgaaaataaggcggctactgggacaaataaaaattttgtaaactttttaacttgttctttgtttggttgctgagaaagttagggaaaaggaaggaaaaaaagttggaatttaatgcctactccttaagttttgtctgctgttgttttcaaatgggtgcagatgatttcagcttttgttttttgtcttattctgaaagattttttttttcttttgatttggtctcccacattttgttggtgggtgctgaataaattataaatacacggcaatactttttagggtgtctgaatgtaatttttatggatttttccccctaaaactctggttttcaatttgaacttcaagctaaagtatggcagattgagcttgcacttttgttggaagctccaataattgaggaagcgaaagtgaaagagaataaatccttgaatctcagtcttttactaaaagaaaattccagtttgtgggtgctgtaaaattgaaaattggtgcgcttatttttctggttgttcttttaaattttagtttcatggaacttataatgttgtaaattttaattctgtgcagcattttatcttgttggatgcagggaatattaacctattaagctttgtttttctatttctgatctgttatcattattcctgctaagtgggcagctcttcttccctatgtttcttttatttaatgacacctaatcatcaagcttcgtgacttttggtatttttatatttcagctatcctgaatatcatcgcttgcttcc

SEQ ID NO: 79597 - DNA, 529 bp, Citrus sinensis
  Intron number 2 from transcript orange1.1g030992m (locus o range1.1g027253m.g) derived from phytozome v7.0 (chr-ID sc affold00007; pos 1377389 to 1377917 reverse strand)
aagctcgtgtgttcgaggattcattgctgcacaaagtaggttgcttgatttgactgtttctaaattttgtttatttatttattgattttcttcttgttcctgttatttgttcactgttttcaggttcttccaagtatttctaatcattgtagttgaattcactgttaaatttggtcttgattaaatacatgtagcaacttactctttgaggatcgagagatttgttgttagtctagccgaagtagttgatctctcaagatggaaatcttttgcaaaatgcaaactatttagagatgatttatttgtagaattttgcctaacgtttactgttaaatgttggaatgaagaagaaacttgtttacagatttttttcatatgtgttgcattactttactttcctcctgatataattattcatttaatcttaatggtttctccaatttttttttttcaactcacttttcttgaaggttactcactaaattggttgttactgcagaaagtgatcaaggggtcctctgctcagttc

SEQ ID NO: 79598 - DNA, 864 bp, Citrus sinensis
  Intron number 1 from transcript orange1.1g009006m (locus o range1.1g004795m.g) derived from phytozome v7.0 (chr-ID sc affold00010; pos 594257 to 595120)
agcactggttagcgtttttgtctctttaagtttgttctcttcttttattctctctgtgtgatttcgttttagaggcttctgtttcttagctcattattgttttttttttttatttggagtcattttaagttcaagttttgttttggttttatacagattatttaagtaatttttagtttatcacctttttttgaaagtagaattagtttatgtctcacttttcatgaatttgatgttgcttctctgaatctccctgtaaacttttcaattttttaaatagaagttttgaactttaatggtatctactttgttacttcagtctaatttacttagtaattttaatttattaattgatagtgaaattgcaggaaaatcgtttttttttttttttctattttgttttctgcctacaagcttaataaactgctatgaaatataagtgagaaatctatccgttttggatgtttttaatagtgtacgttggttgtacttgtatagcctcacattgtggggttaatttgggtaagattttgtggcaattgttgtcctcaaacataaacgacatggtaagttagtagcaaaatacatttttcattgtcaaggtttaacaaaagtccatcaccattgattgatctcacattgatgataaattattagtttgacaagaaatttcctatcgttgttccaaattttaggatggaattagatcttgatatatgtatcatgattctttgcttctggaaaagcttttgtttaaatttgtagaattacaaagatatatgatttttggtgaagatcagcattttaattttcgtaattggtatatcagttttgggaatattcgccttgtctggcattattctg

SEQ ID NO: 79599 - DNA, 523 bp, Citrus sinensis
  Intron number 1 from transcript orange1.1g003407m (locus o range1.1g003396m.g) derived from phytozome v7.0 (chr-ID sc affold00004; pos 4042790 to 4043312 reverse strand)
tctctgcaggtgggtctctctcagtgtctctgcaggtgggtctctctcgctatggtttcctctctctgtctatagtcgcagctctgtcgtgtatttttttggttaaataaaggatcataaatttacgttttcttaaaaaaaaatttttttttttgaaccattacgtttttgcgattgttttatcgacgtaatttgaagagttcttaacactagagctttttagatctgggtttcgttcattattaatgtaaagtttgatttttttttctattcatcgtactgcgagtaaattggcgagttgtgtgttagatttagcgctgcgggtttttagaagatttaaattgattgaatagaagatcgttttacctttttatattatatttctctggagaattaggttttgcttctcaagttgcattgtggtctgctgatggcaaatatcttttttggtttaattattattttgctttgtctgtaatattgcttaggtttcgattgagacatttagatttctctgttggtt

SEQ ID NO: 79600 - DNA, 739 bp, Citrus sinensis
  Intron number 2 from transcript orange1.1g010947m (locus o range1.1g008812m.g) derived from phytozome v7.0 (chr-ID sc affold00060; pos 440319 to 441057 reverse strand)
aagaatcttcaggagagaagggagaggtgggtgtatggtggttacttctcatcaccatgatgggatctttgactgactaacttttgacctcgactttaccttctcttgttgctacctctagatggttgtacattttaaagtgtttggtttggaccttagatgatccctaagtatttggtcattctatatccatcattaagaacgtctgtgtgaatgtgttatgggtttcgattctcgtcttggaaatgacatgtttaagaacatgagttgcttatgaaattctgtgtatgatggaataatgtttcttctattacatagaattttagcaattgctgtcaaaatattgctgactttgactgggaatgattaagttggtagagtttgtttttgctaaagtagtttgatcaagttctgggagttattggtaactgctttttattgaatttacttttttgtttatttattgaatctttgtttccccccattagacgtctctggccattgaactctttgtccttgtctaggaaatttaccatttttgctttcaaagccagatgatatgtttggacggtgttttcctaatttcctttgttcagtgacaaatgggtttgtttccttcaattgggctgaaccgtattttctcatgcatagagtttttcatttttcctcaaatattaggctgagaaatttcaaatttttattttgaataggcgaaatatactggaaaaaaagttggctg

SEQ ID NO: 79601 - DNA, 940 bp, Citrus sinensis
  Intron number 1 from transcript orange1.1g013067m (locus o range1.1g005783m.g) derived from phytozome v7.0 (chr-ID sc affold00004; pos 3613770 to 3614709)
tcaggaatttcctccttcatactttgcaattgcaggtaataattagttattcaatttattgctttcattttatttcagttttttattttgtgttctggcttgagtactaaatgtgcaccaattatcttgtacatgacttgtgtttgattgtgaatttttaatgttagcttatactgaatttctcattaaatatgctagttaggattgaataatgtctttgtgcaagattaagtattatattcacttaggagatgaaaaatatacaatctttacagacaatatcattttcagatgacagttttatgattttggtgatggctaatatttgatgcaaagtcgcttaaaagttactgaagagagatactcaactctgtttttatctagtttctaattgcctcataagtaaatgatttctgttcccaaaaatgaagcctgcttttgatcgatgattgagtattaaatgcaagtttcttccctccttggaatttagaatattttagtgataatattttggtgtttaattgatgtggttgcatggtcactgtcttttcattatgtttatttaggaaagtatcttcatttccatcagcaatgaaatatcatgagcttttctggcattgtgattggggttttgtgtatggagtgggtggggatgagtggtcactagttgaaataatttactatttcttcttagcaggggaggtggagggtgttgttgtcactataataactgttcctattattattttgccattttattaactttcttgcttctctgctccctggagttgattatctatttgctatgttggttatccatttgtattgattgcatgttaccgaactgtagccatatagttttcttatggtagatttgaacttacaatcagtttctcatggtagagctgggagaaaacagtggactgctatagcccagggc

SEQ ID NO: 79602 - DNA, 751 bp, Citrus sinensis
  Intron number 1 from transcript orange1.1g009921m (locus o range1.1g009938m.g) derived from phytozome v7.0 (chr-ID sc affold00010; pos 748135 to 748885)
ctctccctcttaacccactctcacttatttcttctgtaagtctcaacttgtttcttgcaaattctttgtgttttgatgctacctagttatctcatcttcagttgtagtagctgaagaataacgacaaaggtttttttttttttttttttttaatccaaaggtactggataagataattcaatgagaagtagaagaagaagaagaagaagaaaacgagggaaagaaacaaaattttcgattaatttttataggctaactctaaacaactttttttttctccccaaaaaaaatcttcttttgtttaaatttttgctttgtaaaaaatttctccttttgcttatacaaacaattaaaagtttcgatcttttttaatttctctttgcttcacataactgccgatattgtaatgtttttcaaaatttttctttgatgtcttttttagctcaataaatcagttctgatctgggaaagtttgtattttttttcacaatgaactataaattaataagagcaaaggtcaaatattgataataataatttatacttctttgtactaccaaactacaagctgtgctacaagtttagttttaaaatgatagctaatagtacagttaattagacattgattgtgaaagttaaatggataagagagtgaaaaaaagaagaagaagaatttcgtctgatttattgttgtgtttttttttcctccttaacaggaatcgactccgtgaagctttaatcttcttcaacg

SEQ ID NO: 79603 - DNA, 713 bp, Citrus sinensis
  Intron number 2 from transcript orange1.1g009921m (locus o range1.1g009938m.g) derived from phytozome v7.0 (chr-ID sc affold00010; pos 749046 to 749758)
cacctggtacaacattatccaccattttgttcagagtaagctaagcagctagccctaagatgaaattaattatttaataatatttattccttgttggtaaattagaaacactcgtttttactgacgattttgttttttggttttgtcatttattagcttcttaatagctagctgtgtgttattgtctacttgctaaattttttttttagggtaccagaagaagagagctttaaattcccaaaaaaaaaaaaaaagaaaacaaaatggtcggctcagatcggcgagtagtatgcaaattactgctgcttatttagcttaaccaggtcaaaagttttatgtatagccttagcctgttatatatatatatattttttttcttttaaacaacttttgttaaagcctatcgtctttaacaactttcgttaggtttaagtgcaatgctcaagagtgcagagactaaagaagattaaagcttctgtcttagctatgaccgtatgtgtatccataatagcaataacaagagtcaaactcagatctcagctagcaacatcagatgcttttgctattatgtctagttttttactttctctctcatttatttaatttttttttttatatttgaaatttttttttcttttcgagtaattactttggcgggttgttttgtttatgcagcagaagcgcaggcagagaggctgcaggatttcaggctt

SEQ ID NO: 79604 - DNA, 574 bp, Citrus sinensis
  Intron number 1 from transcript orange1.1g000199m (locus o range1.1g000199m.g) derived from phytozome v7.0 (chr-ID sc affold00004; pos 1180673 to 1181246)
caagtgggcatttcaagttctttacgagttttaaggtacgtgctttcattagcttgattttgtcccaaaatttggtttttttcaattcatttttttccttcccacattactctctgtttgtttactgagaaataggagggaagaaaagttttggatcttgtatttgtttctgtggaaaattgcaagtcaaactgatttgactaattagttgaattttccttagtttataagattcaaatttttatgacagcttcaatcaggtccgttgtggtctaccctgagatccgagtatgacgaatatgcattttaagttttacaatttgggtcaatttgttatttcattaagttgaaaatttgtgctaattttgcataattatgttactctatttgtgcataatgtgattagtattagtagaattctccaaagaatgtacagggatgtccatttgtttgatctttgttctattaatcagagaaatgttatgatcctgttcccattaattcgataatgagttttgtctaagacagtggaactttaatgttatgcagctaatgatacattgatcttccagaa

SEQ ID NO: 79605 - DNA, 477 bp, Citrus sinensis
  Intron number 1 from transcript orange1.1g026130m (locus o range1.1g025511m.g) derived from phytozome v7.0 (chr-ID sc affold00152; pos 272705 to 273181)
tagcacatcatcagctggagctgcagaagtagaaggttattggtgttctgttttgcatttactattattattatattattattttttttcactctcttgctcttgtgttttcaagctattgtggtatatatatttttttggattggtttctgccaaatatgggttacattaaaatgcaaagaagcgtttctaataactgttagggtaatttggaaagcttttggaagcaagtatagtggatgatatttttgccttttggtttgttttggaattgttctgagatcctgtatttgaaatgtttttggatttttagctttgtaaattttgagtgaatagtgaacatatgctatcataagccttgtcatgatggaataataatgtattacatttgagtaatctgaaaaatcttgaaaactggttatattgaatgtactaattgttgtacacatctgaacacagaaactattgaaggaagcg

SEQ ID NO: 79606 - DNA, 409 bp, Citrus sinensis
  Intron number 2 from transcript orange1.1g026130m (locus o range1.1g025511m.g) derived from phytozome v7.0 (chr-ID sc affold00152; pos 273236 to 273644)
agaaaagacggcaagagcgggaagcagcacagcaggtacattttctatcttttcttatttttcatgcttttttccccccttttctgtcttgagtaaggccacctttcaatgaatgtcatttgaagttaaatgaaattctaaacaaaattatttagaacttttgaagaaaacttttcttcttcctttagatgtaatggtgaaagtttcatttaaatgggcattttcagtaacagagtcattctcaaaacatatatcttcgatatccatagagtattagaaggttatgaatcttcgactaggaaagatactagagcaaactctttgctgcttattttggtctgtctatgcacatcgtttctgtttcttctttctttttcattgctttttgatatgtttgatttgaaggcgg

SEQ ID NO: 79607 - DNA, 931 bp, Citrus sinensis
  Intron number 2 from transcript orange1.1g000262m (locus o range1.1g000262m.g) derived from phytozome v7.0 (chr-ID sc affold00026; pos 1218396 to 1219326 reverse strand)
cgcgacagaatgtaagtcaaatcattctttctttcttttctgtggttttagcttcaaataaaaatataaacctaactggacaagatgagcaagtaggtttatatttgtattaatctattcaacttgtccattcaattgctgtaggagttaatggtacaaggtcatgataacctaatattatcaaaattaattctgtaaattaccttattcaaaactagggagaaccttcttttttctttttctttttttttttgggaaccttgacagtgtgagcaaaatttattaattaacactagagagaacttgattacattaccaattgaaaaactcagaggagaaacaataataggagatgaatgcaatacaagaatttgttagactaggcaattgatggcgtagcctttcatacacactattttttttcttaatgcgcttcaattattgaatgtttgattggagtttatatttataaatgttgacgaatataaatgccttcagtattttttgtattaaaaaaaaaaagttacccaaaaaaagaggagattgatatcaagtttacaatttctctaatgcaagaggagctgcagtatagatactatgcaaaatcaacatataatattattgtagaacagcctcctgattctccaagatgaaaataaagacgtttcctaaattctctagtcatgaatatgatcctgtggttactcgatggtcacatcttaggtcttctgcaactaggacttgaattttcacatgttatatcataatattatttttcagattgttgaattagtaatttttatttagaagttacttttggttgggtagtcttagacagtttggtgcttttataaaggaacctcatattcttaccaggaaatttgtttatgttatgactaagtaattttatttcatcctttccagctttgga

SEQ ID NO: 79608 - DNA, 871 bp, Citrus sinensis; identical to SEQ ID NO: 79584
  Intron number 1 from transcript orange1.1g004863m (locus o range1.1g002385m.g) derived from phytozome v7.0 (chr-ID sc affold01438; pos 16257 to 17127 reverse strand)

SEQ ID NO: 79609 - DNA, 455 bp, Citrus sinensis
  Intron number 1 from transcript orange1.1g014047m (locus o range1.1g014047m.g) derived from phytozome v7.0 (chr-ID sc affold00164; pos 159018 to 159472 reverse strand)
ttaggtcattactcttatgctcttacttaagaagcattaaactgggtagaaaatgcaaatgttttcttgttttgtttgaaaagttccaaaccacagttgaagtttttgtgtcagcatacatgacatgatttcaccttgctaaaatttaaagttcttatactgtgcagtttacatggattctttcaccttctttgtttttgctctcaccgagtcctgttgccttttatttagtatctaaaaaccttaggaagtgcatcctggcaataattttcttaatttttgaaagatgattgtggtttcttgacaattttttgaattctgtcttcaaaacaaaattccaaccatatttttgtttgatgtgatactatgggactgttggaagatcttctacaatttcatttggaattatcataattgcagatcaaaagcaattcctcggacagtttggattacgt

SEQ ID NO: 79610 - DNA, 421 bp, Citrus sinensis
  Intron number 1 from transcript orange1.1g029293m (locus o range1.1g029293m.g) derived from phytozome v7.0 (chr-ID sc affold00296; pos 172004 to 172424)
attcaaagaagcctcagaagtaattatttactcccaaatatcttttttctctctatatttcatttaattatcaataaatcttgtaagggttttagagtttcttaatctcattctttgcttttcctctttttattgcaatgatttgaatagtaatccaagttcccgaagatatatgagggtttttcgaactttttttttcttttaaacatttgagtacttttaaatttttaccagggtttgtagttttaagattttggatttagggttcgcagcatttctcagtgagttaatggatatttttgggttctgtattcttgcctggttgaattagaaatgaaaatcatttgttgaatttttttttttttgccttttcttcttccgactagatcctacggtgaaattcttgaggcagcatttggag

SEQ ID NO: 79611 - DNA, 502 bp, Citrus sinensis
  Intron number 2 from transcript orange1.1g029293m (locus o range1.1g029293m.g) derived from phytozome v7.0 (chr-ID sc affold00296; pos 172498 to 172999)
ttcgcggtgaaggggtattttatatatatatatatatatttatgttaccttcttagtcttcaggattgcttttgatttatattgccgtgtagcaacttattttcgtgtattgaagttttaacgcataaaaaaagtttattcttttatggagttgacttttaaatttgtttaccgggttgaggcttagcttgaggtcaggattggctttgattctcttggttggtttgtaattgtagagcataaacatatttagtattccatgtagatcaaagcttctttatagttgataaatcaattagattcttttgctttttcttttttcttttttgtggatttcttcgatctatgcatgatataaactttaatttaacctctgttgtgtaacaaacaagtgacctgcatttattatcctttcttaacagacgagttaatgatagtctaatgctctgtgtacattttaatttgtgtgcttgtgatttagattttggtttgtagtaatcac

SEQ ID NO: 79612 - DNA, 537 bp, Citrus sinensis
  Intron number 1 from transcript orange1.1g010628m (locus o range1.1g004125m.g) derived from phytozome v7.0 (chr-ID sc affold00007; pos 2022198 to 2022734 reverse strand)
cgctgtgaagatagatacataatttcgcatagaaggtatgaacttttctttttttttttggagcagcggctggttttatttttggtttgtcctcctttattattgttatttttttctatttattattgttcgtatgattgaagcttagtaagcaaaagactagttttgagaatattaagtggtatttcaggaaacaaaaaaaatttggaaattgctttagttatagtgtaacacaagtctctggtagaggatttgtgctgtttttattcaaaactttctacttttagttatttttcagccgatttaagtttaagttttgcgccctaaagataaatctgtcttattcttaatttgattaagattgtattggttaatatagtcgaggtttttatttttagtaaattttttttttcagtttgattttgaatactacttgtaattttcatttggttcagattttgcttctttctcttaaaggatatgtttcttcttgatcaatttttcagggagaaagcaattgttgtcggagatttataa

SEQ ID NO: 79613 - DNA, 881 bp, Citrus sinensis
  Intron number 1 from transcript orange1.1g031635m (locus o range1.1g031065m.g) derived from phytozome v7.0 (chr-ID sc affold00079; pos 526459 to 527339)
gcaaatttgctgacaattctgaacaagctcaccaggtagctttcttgattttgattcataagaatttattgtattcttttttaggaatatgtaattgccagttctaatctctcttcgtgtccccggtggtggtgtagaagtaggataatttcaaacatttctggtttatggagcatctttgtcggaactgttcgtgattcttggagtctcttaagttttgactttggacagtggaattgattctgctactaataatggagcagattagctgtttcaatgagaaatcttccaaaattgcttatttatttagttttgtgaatatcaaataagaagttactgaatgatataattatggcaagtgcaaaaagagcaaattgattcattcaatatcttgaaggattttaaaacttagccaagcctgtattctgttggaattagcagtagcttgtatactctccttactaggcttttataagacataaattactgcctgaggtgcagctcctcattacaattgaggcttagactggggtagcactgctgtttgtagaaggagaactcattcgttcccagcattgtgaaaaggttccattgaaatttgaagcagttgacaatgcggatgccttattctgatctctcctatgtcacctcttttgcattacactgtggcaccaactccattcttgacgcatttatgaattcaaagtgcatacacatctccatgctggtttcagctactctctgctttaaaattccttaatttaattgctaagtataactatataacattctgttcattttttttttctggtgtcttaggtgatttattgtgcttgtgcttttattgatggtatggatattgtaggtcatagaaagtgaca

SEQ ID NO: 79614 - DNA, 887 bp, Citrus sinensis
  Intron number 2 from transcript orange1.1g023630m (locus o range1.1g012045m.g) derived from phytozome v7.0 (chr-ID sc affold00004; pos 822057 to 822943 reverse strand)
gaagcattctataccttgaccttccttctaatgtatttctttctctctctctctctctctctctcacccacacacacacacaaacacagagaactggagaaacatactcattgaggttacacttgctcttgtctgcaaatttgacattcctgcctcctgtttccttccaatttcagtaattttaaaccttctatgtcccataattttgctaaaagagactttaggactgattaatgcaatgctgtatgcatgtttgaagatcaagaagttctgattcggatgagggacaccatgaaacctcatgtgatccaatcttgtaaataataaaggacgaatgcttttggaattaaagacccgtttggggcagctacgcggtggcagcgcagctgccccaaacgggtaataaaggtgttttgattcattctttttctaaaaagaaaatgagtgctcattcatgagttagaaaatgacatcagttgcactatttgaaaattaagcaaagcttaggtactttttaaatatcgattaaatttgtttccggaagttgggacttctgggcatttggatttcaccccagctaaattagcgttgtggtggatttgaagtcataggctttggatctacctaccactcaagaggctttctgcttttcagatagtaagcatattaggtgagccttcacaatttgtttcttgccacaccaacgcaactggttattgtaccagtttgcttaaagtaataatcggaattttttagtatgcctggaataggcttttgatgctttataaattgcccttttttattttattttgttgtttataatcttgttgaaaagttttcttctgatgctaattaattcatatgcctttcaggttggttctttcttg

SEQ ID NO: 79615 - DNA, 507 bp, Citrus sinensis
  Intron number 1 from transcript orange1.1g014732m (locus o range1.1g014596m.g) derived from phytozome v7.0 (chr-ID sc affold00081; pos 528764 to 529270)
tcgttctttgcaccactctctctctcttgttacaggcaattttactctttgcaaatttgattttagtcaattttctttagtttttaaacttatatatcgaaaaattatgactgcgttatgaattggctagggttttattttatatagaagcatgtgtcataataattttagatttttgcctcagtttgcgttattaatcttctacgaacggctgcatttggatttttttattttttatttttttgtagctgtaaaatgttgatttattgaatcactcttgtaattggtgttactgctgcagctattgttttcattgtttgttttgttgttactgctactagcttttgtgccttatcggtaaatgaatttggcatttttcatttttctttgggtaagattgcagatattatgctttctacataaatgcattttggggtcctttgctgacccgctgatggtcatacaattgcaggataaaaaggcactgaattcgactgaacgtttggt

SEQ ID NO: 79616 - DNA, 900 bp, Citrus sinensis
  Intron number 2 from transcript orange1.1g014732m (locus o range1.1g014596m.g) derived from phytozome v7.0 (chr-ID sc affold00081; pos 529312 to 530211)
cttctgcaaatccattcatatctttaataataaatgtaagtatatttggtattcttgtagtaagtataagcaagtttgtctttctttggtttgtaattgtgactgatcaacagactactagtgtttgtttacaaagaattcaagtcccagtttgtttgttcttgtgagatttgatttttttttttttttttttttttttgaggtctgaaatttccatgatttgagattgttaagtttagaatcacaactgcctaaatcattagcttttgtttgtaggatggctgttgaaatttgaatgcatctcatccaactcaatgctaacattgcttaagaatataaggtcatgcagacataaatataatcgttttgttgcatatatatttgttgaaactgtgtacattttagctcttcatctaaactaaatggctaaacggaagcttttctggtgtttatgcagacataagtaacaatgttgatgttttgtccgagattttttatcttgaagaatcttattatcgatgtttttactatttatgtaatattaatattctttttatcattattataaagaattgatttttttgtagctaaagagagatttcataccgtaaaagaaataaaatatattatttttcataaatttttttcttttttgtatgtcttacctgattaatttgcattgcatcaaagaaatattactcatcttgttaaatttgagatgtcatgatattttgtttgatgtctctctttcagtgtttcttttttgttttttatggtaaatgtctccaattatctgtgttatgtaacaatgtggcacatttgttgattttctggtagggatgacgttccattaatggggtttatttattattttctttttttaatcatgttgcagtctgc

SEQ ID NO: 79617 - DNA, 962 bp, Citrus sinensis
  Intron number 6 from transcript orange1.1g026574m (locus o range1.1g020729m.g) derived from phytozome v7.0 (chr-ID sc affold00047; pos 262836 to 263797)
ttgctagggaaaagattggagatattatcttacaggtattatctaattttatttcgaggattcatttcagttttctatagtatttgacaaatgtggcttgtatggtagtggaaatcagcttctccttgaaaagacagttttcgttcctgaaaaacaatatctttactgacgtggttcaaatgacatgtatattcattagaataaaggctttctctgttccggatgcttgcaatacactttgtgaggtgtgagccgcttgcttctatcatgttcatttggagtcatccaacttgctgtgtacccttatctggaacttggccaaacattagaagatggattacctttcttcagacataaataagtttgtaaggatgtcattacactatcatgacatccttgtgaatgacaatatgataacaattctgcattaatgttcttgtttcccaaagaatccgtaatatcatttcagaaaccttctaagctaacatgaaactattctgtgtccatcaattgactattctttgttatgttacctagtatttggtgtcacagatcatggaaccacttatcatgacagcaatgtcggattaatcatttgatacgtcatggttctaaactgggagagagctccttgtgtgtccaacaaaagggaatggaacccctgaattcctgtttaggagccaacaagtcattgcactgtcagggcctgcactttattttacttctaagagctctctgcatgatgtaattatgttggttatgcattaaccgaattcataagttggagataaaaattttcagagtattctttctgcttcttctttaaagcataatatatcatgcggtgtttagttccagccagctcagaaagtgggagaacttagttggattgagctaatatcttttcctattttgatgtctgtccagggagaaaagggggctcaattcctagttgttcctga

SEQ ID NO: 79618 - DNA, 960 bp, Citrus sinensis
  Intron number 2 from transcript orange1.1g041698m (locus o range1.1g041698m.g) derived from phytozome v7.0 (chr-ID sc affold00010; pos 1545138 to 1546097 reverse strand)
ttttgctcggtttcggcatcggtttcgctaaccaggtaacttttcatttgattctgattattcctttttgtttggatcgagagattggtatgttttttagatttttttggttgtctctgtttttgttattgttattcacaagttctgtgaacaggacaagaaaatgtgctgtccgagccaaataagaatctctataattccctccgtgaattatttcacttgttgtctcatgtgtttgtccataaaacatgtccttttgtgttattattattacttttattgttttggggttgtattgtgctcttcagatctgttttccaatggtttccttcccttagatatcacacagtttcttgcctgcaaaacgacaacaatttgtttttaaacataaacttgtctttgcttttacccacttctgatcattaattttctagatattcagttccgagtttctttcaaaatcagtgttattgatctgtttggttgatgagaaaacgtaggaaaataaatggagataatatagagtaattgattacaagttgggacttggtttatgttaaatattactttttcaaagtcgtccatggcttatttttcttcgcaaatgacatgttgtgtggaatctttttccgtgagtgtttacttcttgctgcaacgtcgttgagtacaaaatcgaaagttgatagcttgctcttattattatattaattatgcaagctgtattcttcttgttttatctgggcttaatttgcgtgttcaacagttacgctctgtctttattggtgaaaacagggcatgttgacataacttgtggggtctcctaggaagacctttttgttatttatttataatttaattattttatgattaattgattaagacacagtaatttggagttttaactaattgattatgtggttctgattgtaattacagtccgtgccactctacctctctgag

SEQ ID NO: 79619 - DNA, 714 bp, Citrus sinensis
  Intron number 1 from transcript orange1.1g003576m (locus o range1.1g003576m.g) derived from phytozome v7.0 (chr-ID sc affold00394; pos 110642 to 111355 reverse strand)
gctcgtgtgctagtggggcactgcactctgtttctttgatatcctctctgcttctttcatacccaaccaaatagtccttgaactttcagttagacttagacgaacatacaaaaaaaaaaaaaaaaaattcaacttgtagagtggctttatagatattgagatatgggtttttcttctttttttaattcagtcatttgagttttgatgagtttttgtcaactgaaaaaactggtatgcttttgctttctgtttttcgtttttcaagttttgctttctgggttcttgtggttttgtgtttcctttttgtttctgtttgtgaagtttgagtttttcatttacatttgttttttttttttctcattcatttggattctgcagaaataaatatggtaaaagaaataaatgcataatctgccattatttacttatcaaatgtttaacattttcctaccttacatcatttaattaccagcaaattatttcgttggtgatgagataaaattatctggggtattacttggttatttatttatttgattctctagtattgtctgcaaagcaagaaccttttttttcccttttcgttttaggtggtttcacaaatttggacaaattgagaatcaaatcattgtttatgatcctatggtgaattcaaatttttctaatttgttatggtgtttttggtgtggtgatgcagagcatcctgcaggttac

SEQ ID NO: 79620 - DNA, 740 bp, Citrus sinensis
  Intron number 1 from transcript orange1.1g006220m (locus o range1.1g005277m.g) derived from phytozome v7.0 (chr-ID sc affold00025; pos 1051653 to 1052392)
cccgaactctccaagttctttcgcaccttctccgagtacacgcctctcttctctttctctctgctaatgagtttttttattttttattttttgggactgaattttgtttattactgaattttgttaattattgaagttacattaattgtatgggttttaggttttaggaattttaggaccgaaatagttttgaatttttaagctacgggagattttttttattgtataggttttaattatctgaaactaattgctactgagcatttatgaagccctaaattttacttgtgaaagtttgcaacttcagtctgcttttggttgtattgaggcttgtttctattagctgagctagtatctctatgaataagctgaactgatgtcatagaaatgggaaccacaaaaagaattcccccccccccccctcccacttttttggctttttcttaaccacaagcctctttccttcattgatcgacttgattctagtgttaaagtctcttgattttggattaagggatattgccaactttctgtttggttagtttgaaaaagtatgtttttttctaagagagtgagagagtgcattcaccttagttggttgatatggaaatacattgtgaaatcacttaactttcttcctaaaaaagaggattgaaagttacttttggtttacttgtattgttgttgttagagtatttaattttgttcttaatgaattgtcttgttttccagatcagaag

SEQ ID NO: 79621 - DNA, 750 bp, Citrus sinensis
  Intron number 1 from transcript orange1.1g047989m (locus o range1.1g047989m.g) derived from phytozome v7.0 (chr-ID sc affold01089; pos 34084 to 34833)
gctctttatccacattctccatctgcttgcctcaagtaaatcttctaagtttattttattttttttcgtattttaaatatttataggcggtggtggttatttataggaaccgaaaattgtaagcttaagctgtattttgagttaggagagcgaaaaaagaaactggattatttggaacttttatatgatttatttatttctcttgctgaaacaatagagcttaaccaagttaggattgtgtaaaataagacaaaattatgaaaattattacatctatgacctaggctctatttgctattgaggtgctgtggaaagaaaagttgtaattgtaaaagttaatactgtgcggtaaatctgtgaaagaaaagttgtaactataaaatcaaagttaacggtgtgcggtaaatataactcttaaagaacaatttgacaaaaatagtgaagatattataggtttttcatcatacaagtggtggatcaaatcaacttagcttccacgttgtagtcgctagtgtttattgaatattttgtgctgtactcttaagctacagctacccaaccttagtaccaaatagggtcttatagagcactataaaatctgaattcgttccatactgcttataagcttcttgtgataacttaataatgtatactatagaggcagagtttaaatcagaccatatttattaacattataggtacttaacaaatttgctaattgtgcacattacaggtggaagaatcgttcag

SEQ ID NO: 79622 - DNA, 1034 bp, Citrus sinensis
  Intron number 4 from transcript orange1.1g012457m (locus o range1.1g011958m.g) derived from phytozome v7.0 (chr-ID sc affold00060; pos 585396 to 586429)
gaggctgaatctacggtaaaaaaggtccgattagatacttttacagtttaagtgtataaatatgctctcttcatttttcgctctcggatacacaatctgtgggaaaggtccaggctgaccttggcatggaactgaatctggctaattcatgaacttttgctatcatgcccatggccacgatctcagactggggactgaacttatttattcttttatttgtttaaatgttgaagggtagaacctaaattaatttttttttccttccttctcttccagtcgtattggaggtcttcaatgagctattgcgataatttttaacaaaactctttctgactttggaaaccaatttgtattctctacccttcgcttagtcattgcgtttgcatagtttttggtttatcagagatttagagatattgaattgaaattctgttcaacagcaaaggtttaagttatataagtatgtgatttcatgtatccaatagtaataatagatgtaaaatcaatgtaatattagcatccattatgggtacgaggaatggatttgatatcagtagtcagattgacgaaaaatagatctactaatgagaagtgcattgggttgcataaacttagaaagttttagacttagtgcaatttgatcttgctactattctcttctctcatacactacgacatacgcaaccttgatcaatatttgatgcttgcacccgtaacattttctatgattgccccattcatatttcaccctctgactgcagtcccaccttcatgatagaatagctggtagaggaggttctgcccattgtagtttttgtcttgatttctctgtatttttcttggttttaggatgagtatgcatgcattataagttcattattgcatagtccttaagagcagtcatatttcaagtttataggagtaggtactttcatgtattgagtgttagatgccgcttttgctgagggcctttgttttgtatcaaaagaaatagaattgatgtcagtccatattgtttataggtttctgccagc

SEQ ID NO: 79623 - DNA, 632 bp, Citrus sinensis
  Intron number 1 from transcript orange1.1g018575m (locus o range1.1g018524m.g) derived from phytozome v7.0 (chr-ID sc affold00004; pos 3863682 to 3864313)
ctcggccgagtcaaaatcaggccgactcagtgaaggtccgtaactgcttgttaagttttctgtgtttttatttcatgcactgaagaaagatttgtttttgggtccttttgtttacgcaagattagtactttcgcagatttggaaaagttctgtcgctgataagacttgcgctctaatggccattgtgaacgtgaacttatgttttattgataatgtatgcagcagagattttgcatctgtactttttatattagtattttaaaaatttgattcgcaaaatttttagttttgggaccactgcaaagtttctgcaacaaatttgaagtatgctcctgtaatttttgtgtaaatcctagctgaatgtatgataatttctgtgacgcgtctgcttggttatggtctgctataggaagccattaattagttctgacttcggaattgagtttttcttaaagcaccttaatggtatattattttcgagtctgcatacttccctgagatcctgtgatggaccaacataacaatgacttactattttatacagttcgatcgcattttttgttgatgttgcattgtgttaaaagctttgaatttcagggaccaaactcaaccttctggagctccatctagcc

SEQ ID NO: 79624 - DNA, 704 bp, Citrus sinensis
  Intron number 2 from transcript orange1.1g013353m (locus o range1.1g007775m.g) derived from phytozome v7.0 (chr-ID sc affold00060; pos 300454 to 301157 reverse strand)
aggttggtttcctggagctctctaccatttagtgtttacttgtcttctttgcatgatccatttgtctttctttcatcaagtctgtgatcaatccatttttctccttttgtttctgagttataactcttgaaatttaggaaaggaatttaatcacttcttttaaaccagtttgaggtctcgattaatgatcggaaaactttgaataaggaagtatatggtgagaaagattcttatccgttattagttttaagatcgtagaattatataattaaagttggattctaatttgtcaatttgccataataagagtgatcacgtcttttgcctggagtttatctgtatagttgttatgcagttgaacgtgagtctgaggtgcctataacttgaattagttcaccttactatgaaagtacaaattaattgtctcatggacgctctagaactttcccacattgttgaagatctgtgcatatgttctattgtttattgtttttccattcattgcttgccttatcaatcttgatattctgttatcgattattaatttgcatacatgtttctgcatttgatattttgaaataagtggcaggaacaggcatattgaacttgggaatggttttcatgattttatatcctgctttgcatggctaagatgttggcattttgcaggaagctagggctttgttaggaaggattgaatatca

SEQ ID NO: 79625 - DNA, 629 bp, Citrus sinensis
  Intron number 2 from transcript orange1.1g021893m (locus o range1.1g012138m.g) derived from phytozome v7.0 (chr-ID sc affold00010; pos 775044 to 775672 reverse strand)
gatttctttttgaaccaattcaaggagaggctggggtatgcaattaattttttaccgtgattatgtaatatgctattggcactagaagaacatttagtgttgatagtagtactagatccggttagtcatgaccaaatagttcttttgttttttaaattatcttactgagcactgagcagcatgttcaacagaaagcacgagagaaatttttatgaaaccatccagtctagcaattcttattcattgcacatctgtaagtctgatgaatgcaattgataaaaaaacatattcaaattgtatcactcatgccctgatcgtatacgttgcgtcccaaacaattgctttacccaatttaaatgacatttataaaaaatgtgctgaaaaaagatccttgaatttattctgaacatagagccaaaaattttaaccgattgtcttacacatattttcaatagttagcattatcatcatttcctccccccccctcccccaagaaaaaaattctattttcaattttctcctcttttatttagtttcttttctttcaaagaccatgcattttctcgtatttttttagattgatagaagactttttttctttttttttggctaggttataattcctccag

SEQ ID NO: 79626 - DNA, 912 bp, Citrus sinensis
  Intron number 1 from transcript orange1.1g004739m (locus o range1.1g004293m.g) derived from phytozome v7.0 (chr-ID sc affold00004; pos 2089776 to 2090687 reverse strand)
cttgacaccagacacaccgacactcgccccgtaattttcattttctctgatcattgttcttatttttagttttaattcaaaatttaatttatttttattattattactttaacttaatttatacctttttttgtatgccttctggttagattttgcttaaatttgttcaggcttctaatttgaggattgttcaatcaagtctttataggttagttaagtgaagatgaatttgatgctggtccttgaaatgaacagttatgattggcttatattgatggttggcgaagtgcaaatcaaacttaaacatccgattgcgaaccttaattttgttgataatcagttcgaaaccagaaaattggtggcatgtgaaatgaagtagagatcatccaagctggaaccattctatgaatgaaatgataaattggataaggtgtttgaataatacatgaaagctaggatttggtgctttgctaactctgatgacagtcttgttagttgttacagaagaaatattctgcatatgatagagttgagagtgcaatttcccagctgttacctttgtaattccattaacactgtgtcatgttaggcggttgcattatgttttcttattatgaatcttttagtagatttttatacgaaatgtgctttgcaagtagaataaataagcttagaaagagaaagaagcatgaaaaggtaaatgatatcttcatgcctgaggaatgttggtttggtgctggagatacctttgaactgaatctataaatccatccatcttttatctgcctgcagattttctcgctccgttgtcttctattatgcttttgttttttgctttttcttttaatggtgaacttattatgaattgcatgcttcttatcaaacatgatgtgtttggctaggcaaaagata

SEQ ID NO: 79627 - DNA, 228 bp, Citrus sinensis
  Intron number 6 from transcript orange1.1g026230m (locus o range1.1g022534m.g) derived from phytozome v7.0 (chr-ID sc affold00798; pos 16021 to 16248 reverse strand)
tcatctcccctccctggactatttcagcagctaaggttttcttctcaccttagatcataagtataaaagtcatgggtgattaagcttgggggtaagaggaaatctagcaactgatgaagtcatgattgtttatttgattttgtgtttccttagatattttcattttcatttatctattttctgtatatttttccagaatcccacttcttggtgaatttactgctcaga

SEQ ID NO: 79628 - DNA, 302 bp, Citrus sinensis
  Intron number 3 from transcript orange1.1g026230m (locus o range1.1g022534m.g) derived from phytozome v7.0 (chr-ID sc affold00798; pos 16790 to 17091 reverse strand)
tcccaggttgtttacttgatgttttcaagttatgaaatgccttcaattttaacgtcactgatataaatttacttcacttgatatccatttgtcacttcttttctgtttcatcatggaactaataatagaagacagatttgttgaagctaaatgagctcttttatcttttccccccttttctgagaaacaatgaaagaaatttacaaaatcatccataataggattctaaatatcatgctttctttttgttgctgcggcatttattcattgatttttttttctttttgaattgccattagtag

SEQ ID NO: 79629 - DNA, 377 bp, Citrus sinensis
  Intron number 1 from transcript orange1.1g032119m (locus o range1.1g029223m.g) derived from phytozome v7.0 (chr-ID sc affold00117; pos 266298 to 266674 reverse strand)
gttccgtgacgaaggacctcctgccgaagttgttggttcgtgtttctttctttcttgtgctgtcttttcttgtttggttgctgagaaaatagaggaaaaatgtttgctttattgtgcttgttagtatgtttgggatattgttagtttgtccaacggaagagaatttttaaaaaaaaagtgatgggtgaagagtaaaaggttataaaaagacttcattttggtcagtgagttggaagtaatttaatttttttgaaaagcaaaaacctgatgaatttttttctcgtaatgttatcgctttgaaaatgattggataatgtgtttgattattttgttataactatttttcttgttatttgtagaggtatcgtcgtttcttc

SEQ ID NO: 79630 - DNA, 601 bp, Citrus sinensis
  Intron number 1 from transcript orange1.1g015308m (locus o range1.1g015308m.g) derived from phytozome v7.0 (chr-ID sc affold00007; pos 1917123 to 1917723)
cttgtttctgagataaagaagaaaaccccatctctgtaagtgttctctcggtcttataactcaatttaacatatctgtcaatgaattgagcatctcagcctctcaatggcgttttttgtgcttaattttttcattgtcagttaataatgatcttagtcagtggctagcagaaacatctttttgcatctttttctcaatgagtttatggtgtttttcttaaattttctaaaaaaagagtgatgtttaaggatcttcccattgatttatattgctgattttgtttataatgtcaccagttgtttttattcatacgaatctgggtttattcactctcattggaaattgtccgcttgacatctacacaaagctgcaggctgcagcctcggtgtgttatgttgatatgctatttcctttgagttgattcattcttcttgttaatatttgaaagaggaatgcattgtacgcttaatgcaaattatattttgttcttttgttaagcttttggatagttaaacaacattcagcaatcgtatctgaagtttatttgtcatcatttaaagattcatttagttcttttgatcagatatttatatcgaataaa

SEQ ID NO: 79631 - DNA, 720 bp, Citrus sinensis
  Intron number 1 from transcript orange1.1g025414m (locus o range1.1g018814m.g) derived from phytozome v7.0 (chr-ID sc affold00051; pos 538824 to 539543)
gcctgtgctggtattaatttcatttcattttttattattcaatttctttctctattactgtttcgattttgaaattatgcatcttggattttatttgctgaacttaggtttaactgaagaaatttttaatttggcagcctgttaatttcccgaacttttggttgaattgaactgtttatgtgactaagggtgcgtttggtattgaggttaaacagctgtagcttaaaagtttcagtactaaagtgtttgttaaacactagttgatgtagcttaaaagctatattgatatgatttttcacttgtataatgaaaaatttattatatccttaataattttgtcaaaatattatttaaaatttatatttactgcatattattaatttttatttatggttacagattttttttcacaccagttataacttaaaaattacaataccttcatcccaaacaggacctaagttgagaacttttgtctctattaatattagtcataatttatattatatatcgcactcgtcaaatgctcggttccaatttttagttattgtagtaagaagatactagtacaagaacagaacttagtttgtactatttgtagctgaatcatgtttcttagtatgccttttttggagctagacgtttgatgtttctttgtttctccaataatgtgttcaattgattaggtgttttctgtctatttttgcagtgcttctcgta

SEQ ID NO: 79632 - DNA, 297 bp, Citrus sinensis
  Intron number 5 from transcript orange1.1g023922m (locus o range1.1g023922m.g) derived from phytozome v7.0 (chr-ID sc affold00060; pos 472097 to 472393)
gtgttggacacgaagagcttgtgagtggttccgatgtaattctgctggtgttgcttgttcacttttctgatcttttgatagtttgtttagtatgttactaacccataatcatcacttggatgctatatattgtcatatataacttcttttctttttctttttttactgtgtattttaattctcttttgatgttatcttttcactttgattatttatatagcttttagaacgattcttacaatttttattctcttttctgcagtgttcactcttatcaattgtggggaaagtgaagga

SEQ ID NO: 79633 - DNA, 653 bp, Citrus sinensis
  Intron number 1 from transcript orange1.1g010975m (locus o range1.1g010888m.g) derived from phytozome v7.0 (chr-ID sc affold00007; pos 1624581 to 1625233)
gatataagagcactcacaaagtgtctgaaagaagggttatcttgacataagcctgcttagtagagatctaaaaacaagttaacaaatactatcaatatctattggaggggctgcaataaaagtgatatagaaggtttaattgtcaaaattgaatttttagatccgtagatttattaacatcaagttctttaactatttaagttttaggttttcatatttctatttttattatcattattatgtacctttatctttagatgtttaagaagaggatgacttaatccggaatatgaaccataaaaaaagttagctattaaaatttagaaatgagaataataaaaagatgttgggtggttagtgtcataaaattttgtgcattcaaaagttgttattaaaaataaaaaacttatgtttgattaaaaatagatatgaattagagggtttcataagaaaagcagattttttatgacactatttttggggtttgcaccaaatagtcgcacccaacccaagtcgttagaaccagcccaccaaagcacccttttatagaaaagaagaaaccatctcctcatttaaaaaagtactaaaaaatgttaggacagcacgtacactgtagaggatcataacttcacggtttataatttccaaattta

SEQ ID NO: 79634 - DNA, 994 bp, Citrus sinensis
  Intron number 2 from transcript orange1.1g042522m (locus o range1.1g042522m.g) derived from phytozome v7.0 (chr-ID sc affold00571; pos 20697 to 21690 reverse strand)
ctctctatctctttcacgttctaagacgaaaaccggtaagcttaggctatctatcttttcatcattcctaaaacgctgtcgtttttgcttcattctcactcactcttttatctttcgaatgattcaatgatttaattaatctgaacacgatcacgcgcataacacatagtttctagcgatttcgagatcgtgacgttgtcgttttcgtgttatttatttttgtatttgtttgttatttaatatttttgaaagaaacgagttagaatctgcgttagtgttgagttcgtttggttggatatttgaatagtaaaaacagaggagctgcttcttcctgagtgattgcactcgagactgcaaaattggaaacgacgtcgtttcgttttgtttgcgttttcatttttatttttttgattcgactggtactctatgatccgagcggaaaagtgagtcggaattcgatttcgttgactatttttcgttgctgttttgttgaacgaacgatctgagttgagaacgagttggtattaagttttattatggttggttttttttcctcattatgttgactggttccgtttcgttgactgttgtataatttttatttttttttaatttccggttctgtgattccggcttcgtcattgtttcgtcgatcatttttaacgtatacgaatgagtttggtgttcaccttgatttaacttgacgcgtgttctcagttcgttgaagcttctatgcgaattatgatcactgtttgctcgggaactcgtttttattttaatttttactatcataactgagtcaaaacgagtcaaaaatagaatcagatgtctgaattcaattttttaaaattaagtcagcataagtattgcatttttcatttctattttgcattaggcaatctgtgaattggatataattttgtggattgttggctaaagtgctaatttatttgattacgcaggggaagagatttggatctgtaattggctgtag

SEQ ID NO: 79635 - DNA, 647 bp, Citrus sinensis
  Intron number 1 from transcript orange1.1g026730m (locus o range1.1g019659m.g) derived from phytozome v7.0 (chr-ID sc affold00004; pos 508951 to 509597)
agctgcttttcgaggtattactgttacatgttatacaagtttattgaaatttagttatggaattattttttcaaagagataaaatgagctattttgattgaatttattttgatatgtagttgtagcagaattttttttttttttagtttcattgatgagaagttgtatgctcggatgaatagaaaccgaggctgaagtatctgttccatatatttgatttgtagtgtccgaaactgaatatttttggcattgtaatgcaaattgagtgcttttggcatcccccttagtgctttcaaaccgtgaaaagctcttttggagatatgtagaagcacttggagagctttttgaagaagcatatgataggtgcttttctagcagacacatcacacattttggacgaggaaagaatatctggtgaagcgcttgataggtgttttctgatggagttctgatggagttcttaaagtgattttaccgaaaactcatttactcaaaaggaattttcatagaagtccttccatgcttaatctgacttgcttcttttactcctattatgttttctttatttgatggctagggtgaaatttttttggttatcttaagttaatatataacaataatatattcatgtgcaggtctttgcgcga

SEQ ID NO: 79636 - DNA, 575 bp, Citrus sinensis
  Intron number 3 from transcript orange1.1g026730m (locus o range1.1g019659m.g) derived from phytozome v7.0 (chr-ID sc affold00004; pos 510062 to 510636)
ttgctgagtggaagattaccaaccctgtccacatagtatgtttttctattctgtattgataaacatgtacttctctccaaaaacaatttgaattactttcactgtaaagtgtggtctctttggtatatttttctaagcattacaaaactaagtttagaaaggcataatacatgaaaggtttaatctcaagggggaagcaaaatctatccaagtttttgtttaatagcattctattctatattgaactgttcatttaagatcaaagcccaatttggcttcttgcaattttcgttaacgttatttgttgggtaggttatgtaaatagtaatgtgctactgtatgaatgtcaaaacaatgaactataaaacacatgagatgtgcaggtaatatgtcataactaaatgtgaaatgtttgtgaaggaatggccgtaaaagatttgcagggataatggcctcagatagttctctgattaaagtggtgctagaagaaattaaattattgagagaaaagagtaaatttctgtgcattatttacttttttgtcaatgccttttcaggtctgctactaccgatac

SEQ ID NO: 79637 - DNA, 793 bp, Citrus sinensis
  Intron number 1 from transcript orange1.1g001284m (locus o range1.1g001284m.g) derived from phytozome v7.0 (chr-ID sc affold00175; pos 167310 to 168102 reverse strand)
cgttcgttaacttgtctagctccccgactcaccaggttctagttcgttacttcttaatcaattactctgcttttattattttcatttacttttcaattcttgtaacttgatcttgcattagtttcgttgagaaggtattgcggcattaaaaaatcagaacttggaccaaaattttgtaaatttttgttaatttccagcacacccggctcggttttgggggttaagtttctgtttctgttctgagagatgttttaaaaatttgtacggaagagccgaacatgaaccggcattactaaattgtttattaagtgaattattaattgattgatcgagtccttgatcttttttttttttttccaatttttaacttgttgcaatggggatggcaccgtcggaagtgctttcaaattgccaaaagttcctctggcactgtttattgtctttggttcggatagagaaaagcgcttagattgattcttatgagaagcagtttgataggtgccttgagaaaacaatttgggtgagaggcaattgaagagcatttggatagtacctgaaaggtgcttgttcagaaaatgctttcgagtgcttctgcaaaaagtcaaacctgaaagtgctttctagactagcactctcagatgcactgaaattgtgtaattagagttatcattttgcacatgcatgtaaaggaccagatattaaacctgaaattatgtatttattgttaattcacgtgaattcatgtgtaatatattacttatcaatcagagtcaactgcaggctgcaagcttgg

SEQ ID NO: 79638 - DNA, 973 bp, Citrus sinensis
  Intron number 3 from transcript orange1.1g022592m (locus o range1.1g022592m.g) derived from phytozome v7.0 (chr-ID sc affold02287; pos 5346 to 6318 reverse strand)
aaaacccggctttgtttgatgtaactttttcatattcctgttccttttttttgggtttttttttttttgtgtgtatggttgtgtctctctgcaagaatatacacccaatgtcatcttttctatgtgtaaaacgtaagttggaaaatggtatggcaagaacctttaggttagatggtagttcttatgttaacagacaatacttagaaatagcatatgcattgtgcatcgtaggccagacaaccttgatcctgatatctagaagttatacgtagtacttatttatcttcttgctttgcagcatctcgcatcttgaactttagcatcaaagcttattagacaatccatggagtatacatagtactcctttacattccataaaatatgatttcagtgtcatatagatacaatggtatgaaaagcacatcatatatttacaatgaaactaagtatctggtgcatcccaatgatcaaaaactgtatgaaaggatgggattgtttaccatggtattgtatcttgattcttgattcttgattccaaagtctatcaaggtttaaagttcccagtgctagataattgagacatgttgaagtctttggatttgggcctgtagtattggctactgtgcgtgctttggggatatttgagtctacacctggaatattgcctacttaggacatttatttaatctaatgtttcatccaatttcttaaaattcctgctatgtctacagcatgacttctactgcattctgttttttcacatcaatatactcacagcttaattatgaattctgtcatatgtaattgcctcaattcttctgtcttttttgtcattttttcttttttggtctaccaaagaaatggcttcaagcagtgttttatggtattattatatgttatctgttgtatttggagcaatgtccgaacttaatttacacgtacctgccagtatcattcaggatatcaggagcaa

SEQ ID NO: 79639 - DNA, 316 bp, Citrus sinensis
  Intron number 2 from transcript orange1.1g005005m (locus o range1.1g002589m.g) derived from phytozome v7.0 (chr-ID sc affold00007; pos 1382095 to 1382410)
gcagtgtatttgtgcctgagcttaaggaatctctggtatttcttttttctgtagatttgaattttatagctgactgttatttcttaatccagcaattgagtatgcgacatgttccacgcaagtactttatcattcagataactgactggaaatgatgacttattattttattttgatttgtactttgcaatgcaacttgtagttggtatttgtagtttaatttgacaatgaacattggtaaaactaaggaagtttaatttgacaatgaacattggtaaaactaaggaagtttctttcttccaggtcttaaattgcg

SEQ ID NO: 79640 - DNA, 778 bp, Citrus sinensis
  Intron number 1 from transcript orange1.1g048404m (locus o range1.1g048404m.g) derived from phytozome v7.0 (chr-ID sc affold00036; pos 209216 to 209993 reverse strand)
tttgcagaaggatcctcccacgtcttgcagcgccggtataaatttttgttacttgagaatttggatcatattttagttgatttatatttaaattaatcgaaatttgctgcttgtgtttgtttctatcactatttggctcgtggttattaagattggttgtgattggccaccggtatattccatgtgggtgtattcttaaactcttagctgggctaattgtattggtggctggttgttgttttcaaactttcaatggaaatcaggatttttatggtcaaatcacccccccccccaacccacaacaaacatttaaatgaattaaatatacattgtattacactctctaacatataatttgatactgaaggcttttgtattcttcagccatagaactatagtgtcatcaatcaataaagtacttgttaactttattatatttcactagtgatatgtcattagcacctctcaatgagtggcacttcatattctacatcaagtgggtgcaaacattgtatcccagtcatgtatgtgcagctttaatctttttccgaatcatttgtgttaactaaatatgtatgttttggtaattgtttcaaagcttgtttaactatttaacggtgtatgctgtatcagttgggtacaattgttgtattgcgaatttatatagttgttttactctttttttttaatcactttatatcatctaaactaaatttgttattttttggtgattgtttctatcttctttaattgtttaacaggtccggtggctgaagac

SEQ ID NO: 79641 - DNA, 521 bp, Citrus sinensis
  Intron number 1 from transcript orange1.1g041021m (locus o range1.1g041021m.g) derived from phytozome v7.0 (chr-ID sc affold00827; pos 43133 to 43653 reverse strand)
tgaaggagaatcgcattgctttcagcaaattaaaagttttgatacttgattatttaccaaggcttaccagcttttgtttggagaattacactattgaattccacaccaaagctgcacaaagtgcaagtgacttgtaaaggaagagggtgaattgtaccatcgggtaggcaatcttaattccactatacaaaagtgttacaaagaaatggtatgtgtgaatcgattcatcaaaattgctcatgcatctcccttgcactcgcacatttaaacatatgttacaaaaagatggtatgtgttaatcgattcacccaaattgttcatgcatctcctttgcacttgcacatttaaacatatacacctgccttgtatatatagttttagaagttaaaacacaaaacatgtaagtttaatgtctatatatatctaatgcctttcaaaaagaaaaaaaattgtatatatccagtgcaattgttttggtttgtgcagattggatttcgtgacataaagtatttgcaactctc

SEQ ID NO: 79642 - DNA, 618 bp, Citrus sinensis
  Intron number 3 from transcript orange1.1g020424m (locus o range1.1g020397m.g) derived from phytozome v7.0 (chr-ID sc affold00010; pos 534982 to 535599)
gagaggtacttatttctgtattggggttgacttgcttattgttcttctcctgtaagtttttctgaagcatgtaattcacctgcttgtgctattgttgcgaaggttataattgtagtgtgtgcagtaatcgcaacagtcccaatgatcaatgggctgacttgctttctcgcccttttactctctagcctcatgttttcttatccctagacagctttgcgaacctttttgggtaatagacagaaacctatttgcctttcgtgattcacaggaagatacctaaactcttcttagatttatatccaattatttatacaatatgtagatacttgcacagccaatatccccagtttgctactctaagatctaaatatttcaggaacttggctggttttttaatggtatgagcatagttatgagcagaacatggaatttaagttttggacattacagcatggagaattgtttttgattaactaatgtagcttgatatttggcattttgggcaatgactcatttattttaaatgatgacccatgaagtacttaatgtttatcagtttgtttgtgttggatctttgaaacagtatctcaacaaaattcccatacctggttcagaaga

SEQ ID NO: 79643 - DNA, 824 bp, Citrus sinensis
  Intron number 1 from transcript orange1.1g010665m (locus o range1.1g005920m.g) derived from phytozome v7.0 (chr-ID sc affold00343; pos 175711 to 176534 reverse strand)
tgtaactgcccttttgagaaaatctagttacagaggtttgtttcttcttcttcgtgcttggattgtttcattgctctggtttttatttatttcttggttgttgtaattgatcagttttgaagcggtggattttgaagcttatagatagtttttgcatgtttgattctaaaaaatttattcaactatgtgtgtatttgaatatctggattcatctgtatctgggaatggaatggagagtatggttttagtagcagatacttttgagcttcaagttcatgccttatatacaacttatttgtgactttgtaaatttcactttttgttatttggactagttcgtggtttctgttttcaaatttaggatacatatcttgtttgaatacgaaaaggaaaatcaaaatctgctttttctagaagagttcaattttctctttacttctacagttcacttccttaatataagttggccgtttatttggtctcaccattcaaattcatgttttcaagactataattgaacttcagtatgttcttggttaaacctggattttcttttaaattttttaatggttttcatgtcttcctggagataagagtgtcgaatcatccattaaggtcttaaaatatgtgcaatcaaatgaataaaggacacaaaaattaaaaaaagaaaagagttatggagaaattataatagcttttcaaactcttttctgaaccaattatggattctctcattttccttgttctgacatgtgttacgtgccctgttattactgaaatgtttattagtattgattccaactcgggcaacagataccagaatt

SEQ ID NO: 79644 - DNA, 341 bp, Citrus sinensis
  Intron number 1 from transcript orange1.1g016756m (locus o range1.1g016756m.g) derived from phytozome v7.0 (chr-ID sc affold00051; pos 654814 to 655154)
ttctcttgcctcgcttggctttacgttgccggaaggtttgttattcgatctccatttagccatttttattcttctgttcgtttcccgagaaaatgtcggaaaataattctaattctggaaaaaaaaactcatttacactatattttaaagctttaaaccaatagtccgcagtatcactagactttgtgaattatttcattttcatctgtacaccgtttggctaattgagttggacctgaattcataatttggattattccagcggtggaattggattcagattctcgatttgattgatcaatcttttttttttttttgggtcacaatcaggctgtggcaag

SEQ ID NO: 79645 - DNA, 901 bp, Citrus sinensis
  Intron number 5 from transcript orange1.1g022655m (locus o range1.1g015598m.g) derived from phytozome v7.0 (chr-ID sc affold00127; pos 87429 to 88329)
ctttctgctgtaaaagaaagacaattaaaggtattattaatacggtcaataaatgagatgtttgtttactatttattgtttctcctgaggtttgcatttctcagacctgttggttttcactgctctttcttaactgattactctgaagcacatccattagaagaaataataatattgaattttttaatttttgtaatctgaaaaaaagtactggaagattcgaaatttacaatgtctatatccattgttgtatgttaatctgaatgtatttattgataattttatagattaatccccagtttttccgtgacatccacttggtaaattgagatttccttaaacttcaattattaataagcatttgctcgttgtcctttatgttcccatcttttatcttctcaatacagcctgtgctaatcttaaattgactgttaggaaactcttattggcggtttaatacagtgaacgtttaatggctcatcccttttgcgaattcattgctatttagagatttgtgattggtctcttttttggcattgtaccataaaatgcatagaaatttttttggaggacagtaattttttaatatgccatgtctttggtccggtgtgctaattttaatatcaatttgcaagatattcgttacttccgagtggtaagctactttattggtatagaaatgtgctttgaattatcttgccatttggctcatgtggaatttgataaaggtggattaaaattgtagtcaagcatgtgaagttcacagttgaaatggttacttttgttgtgccccataattgactgtgctctgtgcatgtcaattactaagaatataaattgagtgatctgtttccttgtcttttcagggaggtgaggaggaattttctgaggttgtccttga

SEQ ID NO: 79646 - DNA, 344 bp, Citrus sinensis
  Intron number 1 from transcript orange1.1g017208m (locus o range1.1g017208m.g) derived from phytozome v7.0 (chr-ID sc affold00123; pos 308971 to 309314 reverse strand)
agttgagtggtgccgtttttctttctgggtttctggtaagactatgaaattctccgtctttttcattatttaattgaaattattattattattggattatatgataaattcttcctcgttgctttgtgggaattgttttttttcttttttgtgtatctgggtttgtttctttgatcatggatttggcttctttcagctagatctgtgaaatcttggctaaaaagttgaaatcttgatcatcctgctgtgaaatgttgacttgggatatggtggttgtattagatttttgatgatgcgattgctttttatttgtgacagataaggtatagataaagaagaagata

SEQ ID NO: 79647 - DNA, 611 bp, Citrus sinensis
  Intron number 1 from transcript orange1.1g005184m (locus o range1.1g005158m.g) derived from phytozome v7.0 (chr-ID sc affold00123; pos 262959 to 263569)
gctactactgttgctcctgctgtagaaagtatcctttcacaaaatagcgatctgggtattgtttaattcccttgtttctcgtctggatcgaatttggtttctgttaatttttggttcttaatttcgtagatccgtgtcaaaatttaggtttttacgcgtttaaattacggttttcatggtgacttgttcgtttgtgaagaagttgttttcttgggaagtttgtgttgttcagaattattgtaatttgtttgtcgctacgtggtcttgtttatttttggtttcttctaaatgaattgatgagtgtttgtttttattctagttgggattagggttgttggttgctcgtgtggactacagtatggtagttatattgttttcaacagggatcttgattttactgttcaaacattgaattcaaaattatatgcttgttattggactgtagtttaagcattgcgatttataagttgaggttgtttgtaaatggaattttgtaaattgaagcatgtatgattgtcttgatattggcttttggctagcaaatttgtttcctttacttttttcttccaatagaagcatcagatttgctgcagaaattgtctttagattcg

SEQ ID NO: 79648 - DNA, 576 bp, Citrus sinensis
  Intron number 1 from transcript orange1.1g021843m (locus o range1.1g021587m.g) derived from phytozome v7.0 (chr-ID sc affold00007; pos 2593819 to 2594394)
tgtcttcccacaagtcaaattcgttccttctccacgtaagctaattactccttaaacctgacctctccaactccctccccagaaaatatctctgtctttctcttctttcgtcttaattttccgattattatgattattattattattattattttggtaggacttactggctagatattagaaattaaagagttattggttggttggtcaaaaatggcgctttgactgacaatcttgcagcgcccgtgatttcactctggtcgataaaacaaacaacaaagtcaagccttaattgatgatcattttttttctttgatgcatatgtaatgcgttttcacataaaacttgcatgactctcggaagttattgtcttgtttgcctggagaaagcaccgccggtgctttcgagtctttaattggtagcaagtacatatgtctgtgcatgtcgacgtactagtgtggttaagcccatttgatttgataaattgatattatgagactgagcccctcctattttgtgtgggtgataatgctgtatgcagttggcaagctaccaaggaatcaagtgaatccagag

SEQ ID NO: 79649 - DNA, 438 bp, Citrus sinensis
  Intron number 1 from transcript orange1.1g011272m (locus o range1.1g005599m.g) derived from phytozome v7.0 (chr-ID sc affold00010; pos 1359692 to 1360129 reverse strand)
agacttatttgtacgtgctgacgcggctgaattaggtaaagtgtctattctcacccaatttctttttgttttattaggcctcgatgcttgattaaccacctcggaagatggacactataatttgttcatagtcataagaagaagattctaaaattcttgttgaaagcttactcctcaagaaataactttaaaaaaaaaattcgattcagtcatctaattgattggagaatgggttcaatgttagactgagattctcagtaaaccaattgaaaattatttactgggaaacttgttcatcccaatttcttgttttgtttattcgtagctacctaggctgaactttgaccgttggttaatgcatggctgaacctatcatgtctgaatgacaagtctatttttgcagctgcagaggcacagaaaaactcaaaaagcaatcga

SEQ ID NO: 79650 - DNA, 813 bp, Citrus sinensis
  Intron number 2 from transcript orange1.1g005378m (locus o range1.1g005259m.g) derived from phytozome v7.0 (chr-ID sc affold00027; pos 609393 to 610205)
agcaatctgatttccagacaccaggtatcaataatatatttctaggacatttttttaaacatactttttgatggaaaataatggtttggtatctagactttgaattgaactccaacttttaattcatggttgcatcaattcggtgtatgttgacttggagtactgaacaggagcagcactaacagtctgttgttgcagacttgcagtctgccatagagaacttgtaatgaagatctcaattgtggttgttcacttaggtgtaaaaatgattctcaagagcttcaactgcttgagacttagaagtgatggagatcgttgttcttttgatgtccatttgactttttaggttacttcttagatttgaataaatatccatgggtcggatgagaccagtttagcaaagttatatatggtcgtttcacatctgtatggttaagttatgtttaatttcctgaaaaaatttcaaatttttcaataaggccaagttaatgctgtctttcgaagttaaaataataataattgatccttccagtggaggtgagaaagtataattataatgtttggaaggggtgggaacttagatcctaggaattttatttagtgactaagtgaaaactgggattctgcgtttgaatatgaagtctgagataaacaatggaccttgtctgtctttcttattgtggaattagatcatcaacgtagaaaagtttttatttctgtatcacccaaaaacgaatttccttgaatttcttcaccgaatataaattgtgttaatgtgaactccttttttcctttttaattgataagcttcca

SEQ ID NO: 79651 - DNA, 691 bp, Citrus sinensis
  Intron number 1 from transcript orange1.1g029359m (locus o range1.1g019444m.g) derived from phytozome v7.0 (chr-ID sc affold00004; pos 2692965 to 2693655 reverse strand)
gacattcacggtctagattgactcggtaccggtttgatctcttccatgttaattttttaaaatgttgcgattgaggactgtttggtattagcgtatccatattgtagttgggtaactataacttttaaactacaacaaatatttgataaaatttcatttaaattatatttatatttgtggtaatagtactaccaaaaagccaagccattgtcaaggaagttggattatgaattatgggaaaaaaataccaagtaattcattcgtggatgtattccattccgaataagaaatttctggtgatacaattttttgtgcaagcaaataaatacgataacatgattgattgatgataagaatatagtaaataagtaaattttagacaaaaatgtatatgcgtcaagagatcatttaaatctaccaaccttttacctttgatggcatacttgtatacatggtaaattctttttggaaaaatttacaatgacattcatggatcaccctatatattatttatgggaacttgtaaaacacagattagaagcgtatatatgctgcatcattgagtacgatatatgctgtaaattacctctagctagtaattccattttgtatttgcctaattacttagttgcatgcgatactcttgtactctccttgcattgtttctcagttgtatcatttgcagctctgg

SEQ ID NO: 79652 - DNA, 956 bp, Citrus sinensis
  Intron number 2 from transcript orange1.1g005234m (locus o range1.1g001111m.g) derived from phytozome v7.0 (chr-ID sc affold00035; pos 622318 to 623273)
gggtccaatttcttccgaaaagtaagggttctagcagcttcgttgctttaatcatgactatcttgaggaacaagaaactaaaatcccccttctggtgtttgtgccttttttatttttcatcaatttatttgttatattttctctttaacatttatcctaagaagtcttgcaaaaagtggttttttagttgacagtggcattttaggtttaccagccaagagggttatggaactattagtttctttagctgtttcgcttgatcatgttcaagcattttcttttttgtcccattcgttagcttgcatttcccgatctataactttttaattatttatcttcattttctgtttgctttggttggtacaagctgtgtataaatactataatggttcagtattgtatacacactgctttaataataatatttggttggaagaagttagcatgtgtcgcagaattataagtttctatgtccaaaatgaattttctccttttctataaattgcttgcttatattttaatttgtagatatggatgatattctctaatgattagctttgaattccaaatctttttttttgggtgtaaaatatgtgcaagcgtatgtagtcagcttttgccggctatcatgataaactaatggaagtgaaatacgaagatattagtaacttttctttatattgtttcatttgggttgaagccttttgagtaagaataattatctaaacctaagaaaatttagatcgcctttagttatttttgtattaatatcaactgttaggtagtccattcccttttcctaattttattcatgcttgatatatggaggtttataccattaatgattgggtgttccgtagaatagggaagagagtttttgtccaaggatagtctttgattcttgttttctgataaatgcagattttgcagaatatcatttctcgggctcagggtgc

SEQ ID NO: 79653 - DNA, 872 bp, Citrus sinensis
  Intron number 1 from transcript orange1.1g034341m (locus o range1.1g034332m.g) derived from phytozome v7.0 (chr-ID sc affold00016; pos 196275 to 197146)
gcatctcgctctccattggcaggtctgtttacagaactcttttctctctctctctttggatcttctttgaaatgataattttatcttgtttcttgttctacgttgtgtcacttgatctcatcatcattgaatccttagctgtttatatttgtttcttgatcaatctaaacatttctagtgacattttagaagagatcaagtcatctcccaaatgtttttctttcttttttttttcttcataacttaacaaacaaacgaattcggaaaaaaaaaaaaaaaaaacaaacgtagcctttctgtaaactcgccatgtgattttgattgactttcgtatgtgaaaaataaaaaattttaaaaaagatcggattcatcgagggttataacataaaaatcatgaatacgaggggccaaaaggtaaactaacattgggacggtctgaattgggctaaatattattttgtacccttatctttccttaatattatacgggaccttgcatatttgttcctccgcaaatactttggaaaggcgaaatcgcttaattttgttttaaacgcattcttgagacgcattaattcaataacctcaagcacttgcagattgattattagcgcttttagtaaattagtaacacctcggtttgcagaaacttgcaactttttgtatgcccaatgaacctttgcgtcacttgtcgtgcaagctagctagatcatatgattctgtttcaccatgtgaattataaaaactctttaaagtaatctttttctttgttatataattctcatttctttcacatatgattaatgatttctttctttctttcttttaataataagaataattaataatttcttaaatggacaggagaggat

SEQ ID NO: 79654 - DNA, 890 bp, Citrus sinensis
  Intron number 1 from transcript orange1.1g019084m (locus o range1.1g014818m.g) derived from phytozome v7.0 (chr-ID sc affold00007; pos 2237616 to 2238505 reverse strand)
tctctctcactaccaccgaaactaaaagcacacaggtttcaatcttcctcttcgactactttctttcttccgttttcattcattttatgtattaactgtttatttatcattttcatttacattatcgatctttcgataaggtctgctctgattgagattcgagtgtgagcgttgtttggattctgtttgggtttgaattttggagtgttttatgatttactttttaattatgatgtagaaagttcttttctttttcttcttatttttatttttatgtgttttttttttcgttgtatttcgatttagttttgttcgttttgatgtctgtaaagtgtatctaaagctgctaaacttaagctggcaattacttatgaaaaatttgtcaggacttcagtgtcattagagctttgaatctgattacaagcagagtagcttatgagattttgtgtggtctaatcagtagtaacctgtttagtcattagtgtttcttttgctgaaaaatggggttcagtttttgggtgaatactgaatagttggtaagcttgaactttggtggttcaagaggatatgtggctggacgaggaccttgccttttaatttcccctcacattttcaaattttaagtatatcgaggagggaaattcccaccctaatgctggatttcgttcttagctttgacaagtaatcatcatggcgacttggctttcctcgccctcagaattttttttttttttttgggaataatgtcgagaatgattatgaatatttagttatccatttgttttggttatattttgtttattgttctcaaatattttatgagatgccacatagaacattaatgccctgtggtatgatgtgctaggtactgatttttctgctccacctat

SEQ ID NO: 79655 - DNA, 614 bp, Citrus sinensis
  Intron number 1 from transcript orange1.1g007404m (locus o range1.1g007404m.g) derived from phytozome v7.0 (chr-ID sc affold00238; pos 98817 to 99430)
tctccacaatcaccagcatcattcttctcacccctgtgagtctctctctgtttttggccccgtggtaattcttttatttggttatgtgcattatgaatgccgctcgaatgggtttgtttctattgggatttctaaggattgtgttgtgtttttattttgtggattttgagtgacattcagttacatatgacttcatttgaatcagaactgaaatgggtgtgtttgtttttgtgcaaatagaagagcatttactcagtagtgccctgtcttcaattagaattcaattgggtttgtttgttctgtgatttttttttttccacatgcccgcaagctgtgttgttctctcaatgtctacatctctgttattgcataacggaattcattacctgaaattcaatttgtttttcaaattttaaatataatgctttttcttaggaaatgtcccaaaattagtggcaaagggatcaaatttgttcaagggaaaataaaccaagatttatttttactgatgttttgtatggaatcacgagttttatataaattaatttctttttctggatcttttatcgaattttgtagcaaaaagtaaagagcctatctgtttccgtacacat

SEQ ID NO: 79656 - DNA, 649 bp, Citrus sinensis
  Intron number 2 from transcript orange1.1g007404m (locus o range1.1g007404m.g) derived from phytozome v7.0 (chr-ID sc affold00238; pos 99552 to 100200)
ggacatattttggagcagttggtccatccacagaggtgagacttgtgccatttgtcaataaacttactcatgaaattttgtcttatgtggtgatttttctggaaaccattcttataagcatgttgctacattttcaaggagataaatttttgtgatttaccaaaagatggtctgattatttttgttaggaatactgcaaaattttaatgtctcaagtgataattaactgttaacttgctctcttttttaattagtttgtatattttgggttgcttttgttgtgagatcaagggtgtttttttcttaaagtgcatgcactagtgtacatactgatgatgcatagcttaagatactcccttctggtttgatttctttttcttctcttgacatcgtctgtgctcttgaattttctttgttttttatcacgtattttctgtcttgtataaatgaaggataaaatttcctttttgaggttatcctgtaatctgaggtagaaaatattgtgtggacgtgaacagtcataaaaagctgcagacattgatgcttgctataagttttgttgatttgatgtatgcaagttttttatttatatcatctttgttatccgtctgcaggaaaacttaggaacaagtttagctacagaaactct

SEQ ID NO: 79657 - DNA, 601 bp, Citrus sinensis
  Intron number 1 from transcript orange1.1g011963m (locus o range1.1g008235m.g) derived from phytozome v7.0 (chr-ID sc affold01048; pos 34977 to 35577 reverse strand)
agcgtcgcaagtccggaaaacgtcgccagtgtcaggtgctgtacttttctttttgcttttatatatatatatatataaagagatatatagagcaatgctagttcatagaacccattttgattcttgtccttttttgttgtttttatgattgtttttccgttttcagagaatctagtaaatggatttttagcaaaatagcttcagcttcaagaaaatgcttatcttgtatgaagaaatatgtttttggagcaagacgaaggcgttgtgtcttggattattgctgagtgctgattgtggaatttattttgtttttaattttttgtgaaacttggattgctttactttttatttatctattttacttaaaatgctttagaaagagactagtagtgtatgctctcaaacttgatagtaatttagtatacatattgaagctgccactttgtagtttgtagtttgctgattgaatgctacactgcttgctctgctaactgatttttcatctgcatttttgttacttgagtttgggaaatgtgtgttgcatgatgaaatttctcaattaatattatgtatatatgacattatcgttttgtttcagggg

SEQ ID NO: 79658 - DNA, 827 bp, Citrus sinensis
  Intron number 1 from transcript orange1.1g022165m (locus o range1.1g022165m.g) derived from phytozome v7.0 (chr-ID sc affold00010; pos 1727084 to 1727910)
taggatcgcacaggtaatgctaattttaattttcagatgaaagttaaaaatggttttaaaaaaatgtagatagatatcaacttcttttagcatttgatgtgttttttagtcattttattttattttttttgttatcttcaattaaaccgtatgtttattataagataaatgcaataaaaccctttgaggatgcttaagcgctctctttgtctaagttaattttttattttgtgatccagtcattttgttttgaatgattttttttttttcgttctatctttttcttcctatacttttaaaaaagagaggagccatatttgcagtttgttcaataggatgataggggcccttgcagtcgacgaaaagttaacatgtaactaaatgatcatctaattgaaggagtttgggggatttagatgcaaatcatgccccagaaattatgcttaaagtcacgatatataatttctttttttttaaaaaaaaaaagttccttcaaagaaagtgagaaacattatcacgatcaagatatttgctagttgctactctgaatctttcttgggtttgaagcaacgcaaatacgatataactgcaacaaaatgaaattgtttaccattttacatctgaaatttctgttaggatccatctgtgcacacaatatagcttccgaaatgtgaaatatgcagccaaagttttaaaaatctaaatcttgaaattctgtatttcaaggccacactatttcctaatgtagctgcgtaattttgtacttttaatgatctactcttccttacttttgaatttacagagtcttctagagcccgacgcagctc

SEQ ID NO: 79659 - DNA, 510 bp, Citrus sinensis
  Intron number 1 from transcript orange1.1g006943m (locus o range1.1g006943m.g) derived from phytozome v7.0 (chr-ID sc affold00010; pos 784886 to 785395 reverse strand)
aggagcctactctagggtttgtttctcattcgcaggtaggtaccattcagattcttatctttagttttcggcttttgcatttttttcccccgccaagcaacgtctttttttttttttcccctttgagttgtattgttgttgcatgttcttaattcttgattcttaaaattactcaatgcaaagtttgcttttttttttttttaagaattatcagtgttgaaattattgggtttcatacaactatttgtatttttcaaaatccttatcaaaaaggaaaatagaaatagttctaatagtttgataggttttcatttctactgttttcttgttggtgtttgggaaatttttttaaaaattttttttgtaagtaagcggcatcgtataagctttcagtcttagcgctctgttgattcttttcaattagttgcccgtaacgaaaagtgtttaattcattatttttccatgtattccttgcataatgacctttttgtgtgctatcagccagtaaaa

SEQ ID NO: 79660 - DNA, 461 bp, Citrus sinensis
  Intron number 4 from transcript orange1.1g008665m (locus o range1.1g005042m.g) derived from phytozome v7.0 (chr-ID sc affold00465; pos 97884 to 98344 reverse strand)
catactatctgctttgctacatcgtttgcagtcatgtaagtgattatgacagacctgaaaaacacaacttagttccctttaaatattctcaacagaactttgtatctataagaatattttttcactttattcacttttactgtaaaatcaagtcaacttataattttctaacataagaaacatatatgtatactaacattttcttatccacaaattaccagataaaagttaataatcatgtttgtcacttaatatgaagtcatattaccatcaccgtatggaactttacagatagtaggggctttctggtatttattagccgtagagcgtaatttcacttgctggcagcaagcctgcaatcaaactgggagatgcagccattcattcttgtactgccataacactaattttggtggttttgatgattggaagcaaacaagagaacatattattgatcacaa

SEQ ID NO: 79661 - DNA, 569 bp, Citrus sinensis
  Intron number 2 from transcript orange1.1g021321m (locus o range1.1g021321m.g) derived from phytozome v7.0 (chr-ID sc affold00010; pos 790517 to 791085 reverse strand)
gttctggctttgtttgggataaatttggtcacatcgtaggtacccctttcctttcttctttgttaactttgttttaattgcattttgcagcaagtatatgcatgatagttcatttggttttctaataattcattctgtcagtaatcttatgactttacttattcagtccgagaagtaatttataggagaaaagctacttaactgagcggaaggggatgtgcattttattttatgcttttctttagcgagtgcataagtgggtttcatcaaagttgcgcgacatctttaggtaatcatcacgttcaaacccatttatgcactcgctaaagaaaagcagatatgttaaaggctttgatctatgtgaaaaagtgaaaaacatactaataaagtaattctcataacaatgttccaacgatcattatttcttactggtgtaaaggtacctgcctctatatacgttataatatatatttgcggaagatggtggttaatgcctattcgagtgcattatcagattagaactgatgtacgaggttccttttcttgtgtatgacaggtcactaattatc

SEQ ID NO: 79662 - DNA, 712 bp, Citrus sinensis
  Intron number 1 from transcript orange1.1g022460m (locus o range1.1g021254m.g) derived from phytozome v7.0 (chr-ID sc affold00016; pos 1064447 to 1065158 reverse strand)
tcactccgggcacaactcagacgaactcctttcaggtatgctacgtcgtttttgttgaattcttgtttcatgtcttcataattcatgctcatatttatgtccatggagctagaaacagcagcaagattcttttctactcttaaagcactgtcatttttctggggtcaaattataattctggtaaagttacaagagtctgatgaaactgcaatttttcattaatagtgtctaaagatatgaacatttttggagaaaaaaaatcatttttatcaggaaaaatcggtttttgtgttccttttttattttttattttattgttgattactttcagaaactgaaaaggggataacttgagctagtaagacacattatagcaacaggtttctgtacaagagaaaagcggtttttttttttttaattttatattctttgaccgtggatgtttattttatgacttgaattgtgaagttgggtatatgaatcttcaagaaaaggcatgagatgtagtttgatatgctttcattatgtgttctttgcattttcatttataatttagggtcgcatttctgacgtttaatttatgatgaatctatcttggaatgtatgcttacccttctatatgttcagtaaaatgtggtgtagtaaacttaaacatttgtctcaataattgaagtaagtgttcctctccaaatggtggaaaaacagatatcaa

SEQ ID NO: 79663 - DNA, 921 bp, Citrus sinensis
  Intron number 1 from transcript orange1.1g033456m (locus o range1.1g032837m.g) derived from phytozome v7.0 (chr-ID sc affold00046; pos 204828 to 205748 reverse strand)
gaaaaactcttactttgctatagttattgagactggtaactttcgttttttttttttttggtcttcttttttgactttttttatttagcttctttttgcgttgagctttctttctgcagatccagggtggtaactttgttagagagtctttcagttttgatctttattgaagttctttactaatgtgtgcgtgtgagagttaaaaaatttttcctgtggaaaattgttgcttgatttggcaatccaatagttggatgagaaacaagcaaatgaatgcttggcaacttcgcatcaagactatgttttcaaccatataaactgaaaagagatcctttataatctatggtgatatttttgcttctcttgggaggttttagtttatgtccccgctttatgtttttcattgattgatttatattacaggtggtcgtccggcttaacctcaccatcttggtgttttgaaaaaagaaaaagagaaatctatgggtttgagaaaaattatgattaaggtcaagtatgcacataaaaatagatttaagtgattcatcagtaaatgagtgaaattgtgaacattagaggtcagaaattttgatatattgactaattttttgtttcttttctttttttttgggttgtctttctttcttttgatgcaataatgtaagatttttgatttagtgctgagttttatgctgttgttacagtttgcgcgtaaaagtagatttcagtgattcataagtaaatgagtgaaattttgaacattagaggtcagaaaatttgatattttggctaatttttttgtttcacaatttttttctttttggctgtctttcttcttttggtgcaataatgcaagaatttcgatttcgtgctgagttttatgctgttgatacagtttgcgcagctgtactgactgtggtc

SEQ ID NO: 79664 - DNA, 975 bp, Citrus sinensis
  Intron number 1 from transcript orange1.1g015419m (locus o range1.1g015419m.g) derived from phytozome v7.0 (chr-ID sc affold00046; pos 698211 to 699185)
ctcttctctgacaggtgatttttctcgtttctttgctcttatttgttctttcttttctggtaaattctgattcaatttgttttggattggttttcattagcttgttatgttgtttaaattttggttttattttttctggaaaaagattgtttttcatgataaattttcgatgatgagtgtggcaaatattatgaaaatgactcatttttcttcgaagtacgtgattggctgtccaatttggatgttgaatacaggggatctgcaattatgttgtgggtttaaattttctcagaacttgaatttgatttctcaattgtaattttggttcctaatttcagatatcaaagttttagatgacagtcaattccagttttgacagatattaactccatagtcggctgctacagttctatttttgtgagcaaaaaaaatgatagaacttgtcgagtgaagcttttaagagtctaagagtgatggtaacacaatgctaagctcatctgctggtgcttttgaaggtgcttttgtggatgttctgtttctggtttcgcagctcaattttaatccaactaacctgctgattagattttcgccttgacttgggattcaggatctgtttgatgctatgatatgaacccagtaaagaccccagcattgctggattgagccctttgttttggcggttcgaaacactttctattgcagcatagtcttgtatattaaggttttatgaaatttaactggaatctttagtcatgatcaacaaataatttattcatggattatgggctgcatttgcctctacagttctaattaaacttgcttgtacttgctccaacttcttcttgtgtgcttcctagttcaattgttgaatttgatatgagctgacttctactgttagaagtgcaaatcgactcaaatgccgatatcctttactctatatccctgctgtactgactgctatatgttggatgtaga

SEQ ID NO: 79665 - DNA, 751 bp, Citrus sinensis
  Intron number 3 from transcript orange1.1g014593m (locus o range1.1g008527m.g) derived from phytozome v7.0 (chr-ID sc affold00296; pos 144842 to 145592 reverse strand)
attggaatcaagaaggtattggatttttggtttctttgtctatatttgcatatgtccctcatttgttgtatttcttcaataacctatgtgctctgcatgttaaaacaaacctacatgttaaaataaaccacatagggtgaatgtaacagcatctcggattgtatctaaaggaaccttatggatggccattatgtttccaggtagtaaatattaagataattttgtcagttacatgagaaatgtttctaagttgcaggctaaactgttgcttgtagtgtttcttcttattttaaaagttcatataagttttatgttctggcatgatgatatctgcagcacagagggttggggataagaaatatagattgtcgatttcttgataagctttatggcattgtttcttcttattatcccccctcgccattaatatctttctatgttgcagattatgataagcttgctgcattttatttttctgttattattttgcttgtcttcacccaaacttcaataggaaatgagttaacactttgggccccattattttcaattttttggatgagaaacaaatacttgatttaaagttgaccatttcttatgttgtaaggcattatgtttttcttttgttttaagtttttataaccttattctctttaatattcttgtttgtaagattgttattggccggaaataatgttttgaatctagtctgacaggaaattggttgtttctacaggttccaggtggtacc

SEQ ID NO: 79666 - DNA, 861 bp, Citrus sinensis
  Intron number 3 from transcript orange1.1g048739m (locus o range1.1g048739m.g) derived from phytozome v7.0 (chr-ID sc affold00314; pos 7921 to 8781 reverse strand)
tttgaagaagaaatacctgtttagtgcattggtaaggttcaattcgactatctagtttatattatcaatatagttctaatgtttccggattttttttttccaactagtcatgcggacatgtaattttcattatttctctcctcaatctgtctatcttgtggtatctcctattgaaacactagtaggggaaacttgaaacaacttaattggaaaacctttgcttgacaacctcaggtacatctcaatgttctggtcctttctttagcaaccattgaagcctcatcatcaactgattttcaactctgttggagacttttttttttttttggtgatgccataaaggttcacttgtcgttttggattcccaaaagttgtagtgatacttcatcagtcatcaccatatttgcatcttgctaaggtatatcatgaaatggttaaaaacactcaacagttgttttattattttgttttatgacaagttgacatcaaaacgtaaatgctacttttcctttcaagcaaaattccaaaaaaccagaagtgtttgatttcttaagttgctttttggacagtaagcaataaaatattaagaacacttaagtgagactgttgatgagcaatcaccaatcaagggatttccagaatgggaaagtttgtttctaggtgataagacaaatatgttgtttgttcagttagctgtgaacagaagagtgtgttgcttaaagcttctagagtctatgaatgattactctaacaaattggggagagaatgtgattgtcttattcttttgatatgcaagcgttgaattgtcttctggtttctaatcagcttggcgcgttcgcagttctcattcgtcaaacaaa

SEQ ID NO: 79667 - DNA, 953 bp, Citrus sinensis
  Intron number 2 from transcript orange1.1g004017m (locus o range1.1g002446m.g) derived from phytozome v7.0 (chr-ID sc affold00152; pos 58470 to 59422 reverse strand)
gcttctaaggaaagtgtagttctggctgaaagtaggtaaaccttagttttttggttatgaacaagtgccagctgtgtaattcttattctgcttatattgacatgtccaagttgattttggcctttaatttgaatgcaactgtcaagtttagatgatttgtgggttgtatatatcttttttaaaaagttttgaaccgatgtaattttgtatttatgagtggatacataaaaaaattccatatgcccatgcagagattattattggatatttagattttgggatgtggaataagcaggagttctctttccagttttccaagtgggtattctgactttggggtggatttcgatggacagttataatgtggcatgcttattttaaattatctattagttgaatttgcgggtggatgtttatactttagtttatttttggtatatagcaatgtgtgtatgcggtaatctgttttattattttgggctgagtggttggtggtggcattttgatgcaatctatcgagttgacaagagtttcggtatgtttatcattttgtcatctaagttttatgattgcggaattagttcacttgtggtacctggtaaaacaattgtggctcgtggggtgatcttttaccaaaggagttgaggatttgagcttgttcattgacttttgcgatatggtatgagttgaatctctggaaacttgtttttctgtttattttgaaatttgttttgaaattttttgaaaagaacgctggcttttattaactttttcttttgtgctcagtatggatggctatgctgctgtctttcctgttgatgttattcttatggcacgattcttgctaatttgagtacttgaaattatgatctgagagttgaaatggctcataccaaatttcatttttatgatataaaggtgctttgggctgggtttgacaaattagagagtga

SEQ ID NO: 79668 - DNA, 635 bp, Citrus sinensis
  Intron number 1 from transcript orange1.1g024867m (locus o range1.1g024875m.g) derived from phytozome v7.0 (chr-ID sc affold00314; pos 133575 to 134209)
tcgtctgaaacatctcgagaaaagtgatcggcgtggtaatcttagttaacatttgctttttttgtttttgtttttatttcccctatttcttttttccttttcatctttgaatttgtctcggccttcttttcccaatttctccgtgatctcgtcgtccgtacgatattttgaggttcgattgactccgaaacgttgacttttttggagcatttttgttggctttgacatcttagaaggtatgtgatttttttaaattattttgagctgtttaattttataattcatatttttgtttttatttcaattttttgtttattcttgatctggattgttggttagattatgttacgttgtttgatttaaatttgtaatttaaaattattatgcatgttattattttttggagattattctggatgcacattttctaatcttattgcaaaatatgattaaaaaaaataaagattttgcattttatagtcccaaacctagataatgtttttattatttgaagtttgaatctatgtcttgtgacgagaagatgatattggtgctatttgtgtctcgtgtattttactctcttgaatccttggttggcagttctgatttgaaattgtagccctcctattgtaatc

SEQ ID NO: 79669 - DNA, 698 bp, Citrus sinensis
  Intron number 1 from transcript orange1.1g023607m (locus o range1.1g023607m.g) derived from phytozome v7.0 (chr-ID sc affold00007; pos 2519617 to 2520314 reverse strand)
ttcactcctcaggtttgttttttctcaaattcacattactatctctttttaatgttttaattggaacgggtatttgtttttttccttcggttgaaaggatttagatttcttatgctggctttatgatcaagtttgtattgtcatgtgtatttgattgacggttattggaacgggtattttatgatctatatatatatatatatatatattttctaccggtatcagtttgtttgaggagttctattgaatcccctgttttagaattcccgagacgctatcaaatttgatactgtttgtgctttgtgctgccacttttatttcttgttatgctcaactgttgtttgatctaatttctggtagatttcctaagaattttttatgcccaacagcctgagtcagaggaaccttttcttcactggttactttgtgttattaacattaccgaggctgtcaatttgggtttggatctatgaactggtgcgtgatcactatgtatcgtgatggtcagaggctcatatgatatgaaacgaggcctttttgtgtcaatttggaagaaagttctgaacttttgatttttctgaatgtaagaaagaacatgcttgctagctggagtgctaaggagaacgaatgctcatgttgatgcttggcttgtttctgtaactaattccaggtcccagtggttccattgcaaagacctg

SEQ ID NO: 79670 - DNA, 224 bp, Citrus sinensis
  Intron number 1 from transcript orange1.1g028757m (locus o range1.1g028757m.g) derived from phytozome v7.0 (chr-ID sc affold00224; pos 113376 to 113599 reverse strand)
ggtacgcatttctcatctcttctctttcgctttcgcatttctgattattaaataatatgtaaattaagatctgaaaacattaagtagcgtatgtttgtttctcgcgaatttttccttctgatttcagtattacttttgttttgattttatttatttttattttttgggttttttttaaaattacaaattaaaaaaaaaggtgcatacaagtacgtgtcggagct

SEQ ID NO: 79671 - DNA, 463 bp, Citrus sinensis
  Intron number 1 from transcript orange1.1g040731m (locus o range1.1g040731m.g) derived from phytozome v7.0 (chr-ID sc affold09142; pos 666 to 1128 reverse strand)
acaaaaagggaagcagctcttattcttggcgttaggtaaccataacagttttcttaaacttttcaacatagattttacggtaaaagaatcagatgacccccttatgtttggagcaattggacagtaaccacatttttgtgggacgtacactatcagtaatatacaaaattgaaatattacctagtgatgtggaataaactaagacgaagtttgccaaagttctggactctagttgaatcatgttaataataaatagttgtccctagcatttctggctgccccagccttatttgacaaattgaagtaaataagttggcttatctgaaacctattagtttattttacgagaaccataatccaattctaccttgcttgattttcttgtccttttttttcggtcttcctctatcagcagtagtttaatatttctcctgtcattatgtcatttgatctaacagggaaa

SEQ ID NO: 79672 - DNA, 568 bp, Citrus sinensis
  Intron number 2 from transcript orange1.1g025178m (locus o range1.1g025178m.g) derived from phytozome v7.0 (chr-ID sc affold00004; pos 3030196 to 3030763)
agctccggaagactgttgactgggtctattctcaggtagaaataatatgtttccatcaaccttaaagtgggaagcctgttttactacactattacttggatgttgctgattgtttattagtgttcactggaaatcctttcaaacagatgttcaaggttctgcatttgttctgctgcattgaaggttttaatttgtgttcttgttatttggaatgtgcgtgcacatccccatgcataccagcgagtttcaattcttaagcaagattgttttctaacaacaaaatttgggtccgtagcttttgaaatttgaagactgagatctcttttcgttaagtttagtaaactcgatcctatgtttgaatttgattcttatagtaatggatggattgagtattttgtgtctctagcacggtaagttgatgaatatgatttatttatttattattgtttggtttatgttccagaaaatatcatttttcttttttaaatatcattggctgatggagctgattatgttgtaaatgcaccataaagttaagcaggccacagtcatcgtggaaaggagcaag

SEQ ID NO: 79673 - DNA, 730 bp, Citrus sinensis
  Intron number 3 from transcript orange1.1g003014m (locus o range1.1g002026m.g) derived from phytozome v7.0 (chr-ID sc affold00151; pos 217531 to 218260 reverse strand)
gttactctcctaaccagcagttccaacctaatgtgcgagttgattcctcttaaaaccttttttgtttctctagtaaatgtttacacgaggagatgacaattacaacctgaaattatactggtactgtacgatctttaaaggacattttgttggaaagactttattatcacgactaacaaaaccacaattttaattcatcttgatgtctggatgtcctagatggcacccactaacagataagttatattcctcagtttattttgacgatccttgtatatataactaaattattacatggcaccttatactgtgttttcaaactctgtcttcatattaaatctattctggtgcttttttcttccgtttcaccatcttttaaagaacttaagttatttgtctgggactcatttttaagaagggtcggaagcttttgttatttatggttctgtagtgtgtggacaactggacctcaggaaattatttaattatgcatgattttgtctttttcatgacgcaaattgcttgtatgagttttgagattcagtttatgaaggagtggttgctctagattatatattgtgatatctagttaccgcttacaaacatgttgactgtatttgacattggataatgagcaattaaagcttatgaataaatggagtaaaattgagatcattttttatttttgatttgctttgcttattttagaataaacttgaagctgttgaag

SEQ ID NO: 79674 - DNA, 576 bp, Citrus sinensis
  Intron number 1 from transcript orange1.1g003014m (locus o range1.1g002026m.g) derived from phytozome v7.0 (chr-ID sc affold00151; pos 218695 to 219270 reverse strand)
aattcatcaggcggagtctccattcattcggtctggttagtatttttcttgactgcattcctgtttgtttcccgagagaaaaatgaaaaagagtgacctgtttgtttacttctctattcgctcgtattcctctccactctaaaagttattgttaggtttttcgtttttccttttgaaatacaaattacatggctaatgtcgctagggtttctttctttctctagttatgatttgtagtttgtttttttaatttgtactgaagcatgatacaaatgtttcctaagttgaaaacatacataaaaattcttaaagaagaagaagaaggcattggctctctgtttagaacagctctggcatgacattaagaattgccattgaaatttttccttctaagcctataatcattcaagaaatgttaccttttgattttgaatgaatctaactgtttagaatcatctttagtatgcgcacagtggcttagccaggaatttattattattattattattttcaatcttgagtgctaattatgtattttggaccttatgttaatattatcttgtggcagatcaaata

SEQ ID NO: 79675 - DNA, 736 bp, Citrus sinensis
  Intron number 1 from transcript orange1.1g019514m (locus o range1.1g019514m.g) derived from phytozome v7.0 (chr-ID sc affold00004; pos 636358 to 637093)
tcactgttattatcaccaacaagtggatctttcaggtctgttttcaaaatttttcctgtttctttgtttttttaacttcgtttattatgtttttcaccagcttcattttgattgtgtcattaatgttgttaatttggtgatcttgatttgttcattggatcagctctgtatgttattttatttattttaatcattttaataggctgtaattgatctaaggttttgtttggcagcatggagatttgttctcagaattcttaattccacttaattatgattttaatggtttggttaagtactgccaagcgtagctaaagggattcttttttttgttaatttttttggggtttgctttttgtttctttctattgttacttaaagaaaagagtaatgtgttgattagtaacggttgctgtgagacacggaacaattttgacctaaaaaatgccaaatttggtgaatatggtgagcctatccatgatttatcaattgatctgtttctaatatgtgatttattacatgtctctattactgcatgcagaagaaaattgcttctaagcaatttggtttaaaaacttgggtttttttgagaactgagttacagatctaaaagtatcaatttgctgcaagcctgcaaccattaaaaaattaatgtggaattagataatgatttctcttttccttttcattttgtctttttacagaaattagatttcaagtttcctctgtcggtgtc

SEQ ID NO: 79676 - DNA, 582 bp, Citrus sinensis
  Intron number 3 from transcript orange1.1g018878m (locus o range1.1g009985m.g) derived from phytozome v7.0 (chr-ID sc affold00224; pos 109873 to 110454 reverse strand)
aggtatgtgctttaattggactaaaagtcttcaatcaagatgttagatgttgcaatctgcctaattgccctgatccagactctgcatcttgatacctttttaatgctttcatttactggctattgttcaatttttccctatttctcagatgctattttgatttgactccatttttctatatgcccttgatatagctgtacctttagttgttggcatgatgctaatttattaggttctaccttcggatgcacctctcttgaactaatattgctacacatgatatgtaaacatgaccctctttttctggcacgtcttgtgttggttggcaatattaatgattgacgatgtatcttttcatctgtcaaaaaagttctaaaccttttatgagcatggtctgcttggagacaccctagaatttatgtttgtggagatccttccctctggtttattgtaatttgtgtgggacatctacaatgttttctatgctaagtttgataatttgcatgacatggctgctcattgtcagtaatttacttaacttttacaggagaaggggattgtctttgcattatcacaagttgc

SEQ ID NO: 79677 - DNA, 992 bp, Citrus sinensis
  Intron number 3 from transcript orange1.1g038626m (locus o range1.1g038626m.g) derived from phytozome v7.0 (chr-ID sc affold11872; pos 878 to 1869)
ttgcagaactagacagcaaactgaaagagaaagaggtaattaattgcttctttacatttatgaaatttgtagctttatgggaactctggagtcagattctactaatgcatgtccaacaagtaagtagtaagggttgattttatcgtctttactacatgacaaattagccttgcgaatggatacttaagccttgagatacgataaaatattacagggaaggcaagagatgttgatgccaaattttggcttcaacaagcagatttatatttttcggaaactggtactctgctaattgatgactctgatctcgttttgctactgcagaaactgtcggggccccaacattattgcaatcagaaaacctctgacgcttgtatcggattaaagggctttaatattaatttcaaacaataaagtataataagatgttcttaattccactcacagattaatggtgcagttgaataaatcctcgtttgcttcattaactgtccatctctgtttggagtctttccctttatgaattacttcgccctcaattttaggtagtattggagccattgaatacttgaactaacagaacatttcattaactatcttttggtggaattttgtttccatatccctttgatatcatgggatattaaatggttatttgattgcagcgaagttttccataccccctagaaggtgggagcaatagggagggggtgcgggtaaaatcccgttagtaaatgttagtctctagcaaatgtattgaatccaaataagaactattactagattcattagttctgctctgtaatggaccaagttactgacatatttcatattgttccaccaattgtaaaataaattcatgtttaggaagatagttactagctccctgtgtcaaatttgatgtttgtttattttagttttatttttttaacccagtgtaagaaaatggtattttaggttggaaagctatcgaacaggttgttttacttatc

SEQ ID NO: 79678 - DNA, 550 bp, Citrus sinensis
  Intron number 1 from transcript orange1.1g041043m (locus o range1.1g041043m.g) derived from phytozome v7.0 (chr-ID sc affold00430; pos 1416 to 1965)
tcaaggtaaatttcttaataaaattaagttgtaacttaattaactaagcttggaatcttttacatggcttgggctccttaagtatattttggtataaaatgttatcaatgatactagagccagattgtgaccggtttggatgctttaagcaggcttagtttttgtcaattaaggctcacgttggtgtttttgctttcaagccatgattgttgtgaaataaaagtcatatctataaaataaaaggctacattattagaaaattaaatatgaattttaaatgatatttttaacaaaattagtaaaattaatataagtttttcattgacaggtaaaaacatcttaacatgaaactagagttgcaagtgttaattaatcaaatgttgtactttagagttgtgccagaaagcaatattaaatgatgccaataacatttcttgttaggtgtatagatatttacctattgtcatttgggtcttctttttcgtgacagatattgatgagtgtagggatggaactgccaattgcagtggagatctgcgttgtgaaaact

SEQ ID NO: 79679 - DNA, 662 bp, Citrus sinensis
  Intron number 1 from transcript orange1.1g008616m (locus o range1.1g005446m.g) derived from phytozome v7.0 (chr-ID sc affold00025; pos 324339 to 325000)
tttgcgtgccgtttcgcaagtacacgcctgaaacagtacgattagatttagtgtcctgtaattatttttatttatttatcttttcgtgttcttgatattcgatgttcgccttctgtaaacttggctgttagtttcgttacgagttatgaaaaatttggcttacgtagtcaagttttctgttgacaactgggcttcatatcaagagcttctcataaagcacttcattcaagtgctttcttcaccacataagctttttgtggtttgtactgtaattgcatattttttgacctgtgctgacatattctttgtcgaggattaaagtgtcgggatacagatatatgatattctgtgtgtgttggggagtgctttctgtaaaaagaattgcttcatagttaagcactttctgaaaaagcagatatctatagcttcttcaacagcacttgactgacttcaccatatctttctggaaaatcaacggcaaaatgtttcactctatacatgtcattataaacactttccttcaaactgtactccacagcataaaaagaacattttactatttaaaagtgctttcagcacaatcttgcattttggcttgaatttgattgtgttgttgttgataattaggtgaggaacaaggtattggaatctagaggggctgt

SEQ ID NO: 79680 - DNA, 544 bp, Citrus sinensis
  Intron number 1 from transcript orange1.1g026427m (locus o range1.1g026411m.g) derived from phytozome v7.0 (chr-ID sc affold00004; pos 2164178 to 2164721 reverse strand)
aggtaccgaacgaagcttcttcttcttttttgtgtgttaattttgcgctagttgtttggattctggaaaattgttcaatttagctggtgaacacaactggacgtgattttgaaagcttaattttgctttaatttttgctgtttgtgttcacttaagctttcaatcggtttgattttgatataaacattattccgctcgttatggtgatgctattgcttgtggttatgttgtggatgttttgtctgctgaattgtcttagctaagtaattgttttttttggcatgtggctggataactgataagcccttgccagcctaccatgaggacttagtttctgatgatatatgataagtgatatgaataaaatccaaagttatttgatctaagctttccaaattttaaatttgataacatatattggatttgactttgtaagatggcatatgtttaactttataagcttttgaaaatataatcatattttttgtgttgtctccactttttccttgatgcagctttgcgatcttctgagatctagagttga

SEQ ID NO: 79681 - DNA, 901 bp, Citrus sinensis
  Intron number 1 from transcript orange1.1g001349m (locus o range1.1g001349m.g) derived from phytozome v7.0 (chr-ID sc affold00027; pos 15672 to 16572 reverse strand)
atcagtagttttaaggaagattgagaaagttggcggtgctgatcaattgcatcagaaacaagatgaaaatatcaaatcggaggaactccaattggaaaacggacggtataatgtaatgctttagtgttttttttttaaacaaattatttaacccttttttcctcccatgattttcttattaagataaatttgtaatttcaatatctaaatattcatttttggcattaaattttagtatttttctattgcgcattcctcaattttcactaaagttaatttgaacctgttaacttttttttcatattaaaaataattaaataattatttgagttgatgtgattaatccttttttggactttttgactagtgggttccttagagctctttggcttttagttccaacaagtgtcgtattcgttaacgccagaaaataaatttgcacgaaaaatgcgattggattctctcctccaacttgcatgattttataatgaatatattataagcaataggctaatgacacaagaagtcaatgaggtcaaactaaacgcctgtatttcaccttgaacataattattgtgtcaattacattctttgaatcattcaaactccacgtgaaaataattgctccaaaagtcttcgttcttacttgacacaaacgtttgacgtggtggtgtctctgaattcaatggtgcagccaatatggtctgaaagagaaaagtcatcagttcagttcacgttcaacggtggcagcatcaaatccaagtctcactctcattcattttatccacaaagagtgcctctaaatagcagccacgcagagtcccataatactgctgcagctgctgaggaattgaaaacatcgccaggtttacattttgattctgaaattgagtcttcattg

SEQ ID NO: 79682 - DNA, 768 bp, Citrus sinensis
  Intron number 1 from transcript orange1.1g009564m (locus o range1.1g007797m.g) derived from phytozome v7.0 (chr-ID sc affold00415; pos 70671 to 71438)
agcagaagaacaagtcttaaattttttaacttttggtcagctctgcttcattcaaatacattttgtatttctgggtttgttttaaaaagttctgtttttgtaatctatctgtctggtttatttttttaaaaaagaataaacttttctctctttttttttttactctctttattttctttccttgataaaaattctgatttgatgtcttcagctgccctatatatacatatatattcttgaaatttagttggtcactactagcaatggtgtcacgaggttcatatggctgctttttttttgtttaattttgaaaaattctgctggaattgttaatcatttttctttccttcttttgggagaagagttttgaagattgttgcttttcatttacttcaaaaaaatttctttcccaaataaataatgaaggtttaatgattgtaagttatgaacaaaatctagtcttttactacttaaggcataatttaaggagagctttcctaaattgataattaagttgtttccacttatgatataggcatttattttattttattttattaattgactatcatatgcttttgttctcttttttcagttagtcaactaacacatgaaataattaaataatttatgtgaaattagtggctgtaaacattctcggactgtgttaagtctaaacacagagaattaaattatgatttttaaattcaattaatatattgatctgttctgtcttgctgtatgcagcaaatatttgtctcctcagcc

SEQ ID NO: 79683 - DNA, 607 bp, Citrus sinensis
  Intron number 1 from transcript orange1.1g024770m (locus o range1.1g024770m.g) derived from phytozome v7.0 (chr-ID sc affold00010; pos 1536143 to 1536749)
caagcttgatcctgccaataagctctactttccctgtaagtgctataatttttttcatttttcgaaaaatggtcacgtttaattcctcaaatgaactgctagaaaacgcaactgctactgctagtagagcagtaccgaaataattagaattttactctatatcatttacagttgaaaaacaaatcaaattagaaattagatagcatgaaaaagatagaaagcaagacaaatatttttagttaatgacaagaatttcacgtcactaatgagagaaatttagtaagcccagctagatttgaacaagtttagttagtggaatatgaaaataacttttcaggtgcgggtgctatctagtcgaaatggtaaaatttgttgtgtcgaaaataagagctctgggaagtccaacccgcttatgtgggtgtggaagtgattgggttgctatttggctaaatcataataaaagagaccctcatttatttatttttattagttgcatgcttatttagcaagtttgatgtagcatttcaaatttcggtttatttgactattgtgattctaatttaattctgaattttttcatgatttatgtcgcctattttctttcaag

SEQ ID NO: 79684 - DNA, 876 bp, Citrus sinensis
  Intron number 4 from transcript orange1.1g020582m (locus o range1.1g020582m.g) derived from phytozome v7.0 (chr-ID sc affold01513; pos 18018 to 18893)
tcaggcaaaaatagagcctggttttacagaacttggtaattgatcaattctatctgatcttggatctgacctccattttgatgtgatttaaaattaatgctatgatatattaacatagttatcagctttaatgtatgggttcagccctgaacttgtttaaaatttgtttctgttttggttgttgctgatctgatgaactaacgtgaatgaaacattagcttttcataatctgttcatggttggatttagtattgatgttgaagataccgctgtaccaatgttttccttattatttctcattgcattgggtgattagcttgtgtggacatttggtttttggttttaacattttttgtctttaggtagcatgccattgcaatcacttttcgttgtaatgaagagggttctgttactaggaaaagctcagaaggaagttacttaattctctagtcatagaatgtcacctgttgcttaaaacatacaaatctctcaagtttgctttcatttgcagttggatgatcttttaagttactgtcgagccagaagcaagaaatggcttaaagtatcttagggtgttagttgaaacctgaaagtatttgttacggcattgagggagttcttgcatgattgcatccttattctgtggatgctgcaaacatggacatcctgcatcatcagttaatgctttttgcaatggatttgtacatataatttgtgatgctgaggctgatttcatttttgtgctgcagttaaaaaagttctgtctaaattttgtgtttatcggatgttttatatttcttcttcttttcacatgtttgaatttttttttattactttccagtttggcaaaaactcgaagaagagaatcaagacttc

SEQ ID NO: 79685 - DNA, 1014 bp, Citrus sinensis; identical to SEQ ID NO: 79546
  Intron number 1 from transcript orange1.1g016406m (locus o range1.1g015958m.g) derived from phytozome v7.0 (chr-ID sc affold00272; pos 96779 to 97792 reverse strand)

SEQ ID NO: 79686 - DNA, 647 bp, Citrus sinensis
  Intron number 1 from transcript orange1.1g015096m (locus o range1.1g015096m.g) derived from phytozome v7.0 (chr-ID sc affold00349; pos 39966 to 40612 reverse strand)
cctcaagcagaggcgttcgaagaactcattccaaggtagaattctttaatgggtttgctcagctttttctctgtctttgttattgaattgggtctgctctattttattcttgtgagttattttcgtattagtacagtactagtgggtgtaattttgatgggtcctcttagggctcagttgcagaatttgatagtgggtaaaaaaaagaaaaaaagttttggtttcttcatgtagtcttaatggcaattgaggtttggtagttgtgagctgaatgtatatgtataaataattgatggtccatatagtcaagtgaaattgtggtgaagtagtgttacgaaagacaggagaaaaacaaagtgaatttatttaggcctttttgcttatatgaaacttgatcttttattttatgtattattttcctaattcctagttccatgcaaatgaatattattgttcggctgagagtttaattgggaattttccattctaattatttaaaattgtataatactcagctgtttaagaaattccttcatagaatagtatttgagactatctgttttatttctttgagtgtgcaataactatgttgcatctactatttcatggcagtaagagcagttgctgctccttcggaagctgtatct

SEQ ID NO: 79687 - DNA, 480 bp, Citrus sinensis
  Intron number 4 from transcript orange1.1g024992m (locus o range1.1g018021m.g) derived from phytozome v7.0 (chr-ID sc affold00025; pos 925307 to 925786)
taggaacttccgttcagaaagcttttttcaggtaatttgattaactgcttatgtcttaccctcttttcctctcttaaaatgtttatattgtttttgctgataacaaataaatataatgctttcgagtgtggtgtcattgaatgggagccaatgtttgcatgattaataactgtacttcgtgatgcgaacattcattatgctataaaatgtttttcatcattattatatctgcaggtatgtatgtgtgtacatgaatacagttgtaccattgttgttctcttggtttttgttacatgcatacgatgtcggtgctcagtggagcaactagcatcctaaatgcattgtgaagaatttggtacaaaataaaagggaactcttattgtgattaatgctgctacctttatcccttcattttgatgatagaaactcgcttgtggccagtattgtgtttgttttcagcaagtttgccttgcttgcagg

SEQ ID NO: 79688 - DNA, 742 bp, Citrus sinensis
  Intron number 2 from transcript orange1.1g009908m (locus o range1.1g009938m.g) derived from phytozome v7.0 (chr-ID sc affold00010; pos 749017 to 749758)
ttgccttctttgccaatctgcgagcttgacacctggtacaacattatccaccattttgttcagagtaagctaagcagctagccctaagatgaaattaattatttaataatatttattccttgttggtaaattagaaacactcgtttttactgacgattttgttttttggttttgtcatttattagcttcttaatagctagctgtgtgttattgtctacttgctaaattttttttttagggtaccagaagaagagagctttaaattcccaaaaaaaaaaaaaaagaaaacaaaatggtcggctcagatcggcgagtagtatgcaaattactgctgcttatttagcttaaccaggtcaaaagttttatgtatagccttagcctgttatatatatatatattttttttcttttaaacaacttttgttaaagcctatcgtctttaacaactttcgttaggtttaagtgcaatgctcaagagtgcagagactaaagaagattaaagcttctgtcttagctatgaccgtatgtgtatccataatagcaataacaagagtcaaactcagatctcagctagcaacatcagatgcttttgctattatgtctagttttttactttctctctcatttatttaatttttttttttatatttgaaatttttttttcttttcgagtaattactttggcgggttgttttgtttatgcagcagaagcgcaggcagagaggctgcaggatttcaggctt

SEQ ID NO: 79689 - DNA, 496 bp, Citrus sinensis
  Intron number 2 from transcript orange1.1g026865m (locus o range1.1g021282m.g) derived from phytozome v7.0 (chr-ID sc affold00010; pos 1970684 to 1971179)
tcctcgccattttggatcatctcggactagctaaggttactatatatctttcccagctagcctctatgttcaatattaggatatgtttcattactaatttcaatagtttatacgtttgatttaaaagtgaaaacagtagtttagttggttcaactggcaattgctcttggagcgttacaaaagaaaggtctgaggttctaatctccttcacattggggtagtaattttcatattttgtagtttattcatttccatgtgtcctttggtaaaaactatatagctactatagaagagggagagggagagggagagggagatatatatatacatatgcctacctttgtggtagaaccatatattgatgcttcaggcctaatgtatttagcaaaagagatggctttatatatttaagattatttagcggttgttaatgattttggctctctacatatattgtataggtttttcttgttgcaaaagattttggagctctgac

SEQ ID NO: 79690 - DNA, 490 bp, Citrus sinensis
  Intron number 1 from transcript orange1.1g035476m (locus o range1.1g035476m.g) derived from phytozome v7.0 (chr-ID sc affold00382; pos 151908 to 152397 reverse strand)
tagagcttttgacaaattcttgcagcagattcacagtaaatcctctctcttcgttccttattttcacaaataattgcatgtttatataagtttttaaatttctttttatctaattggataaatttgggatgaaatttcagttaaatgtcactgatttttttaaattcaaagtgttttacacagctggtttctttgattgattccttcagttacttgtttacaccaccaagttgagctagtttatatgcctttagatcacaaactagcataccacatgatttggtctttgatcctaaaaccttggatggggtctggattttgtttaattgtcaatgtttcttgaattgtgatttcctagagtctggcttttcaaactgcgagactgaaaagttattttagttcttaaaaaattaaaaaaataataataatctaagccctaatctttccttccatattctttcgttgcttagggtctgtgagtcatcagaat

SEQ ID NO: 79691 - DNA, 940 bp, Citrus sinensis
  Intron number 1 from transcript orange1.1g017767m (locus o range1.1g017767m.g) derived from phytozome v7.0 (chr-ID sc affold00051; pos 85166 to 86105)
cacttgccaccacatcgccttctccattacagacggtaagcaaaacattttcaatacgtacacatgcatatataatatatattgcgcacacacacacattagtttcgcacgtttcatatatttaccttcttcgtggggagggaaaaaaacccatgacaatagtagcatctatcctcgattttgatgtttttaaacttttggccttgttccttgtctttcggctagtttaatgattttggttcattaggggtcaaacgaaaaacaaacaaactgggaagggttctatcaaaaatttataaatctgaggagcaaaacgtaagatttacagaggaatggactaactttcatttgaatcctttatcttttctgtatcttactggggcaaagattgtttttttttttttcttccttaagttagtgtatagaaagggaaagtagaggacctaaagggagcgagtattgaaagtttgatgtggttaaaatgaccaaaacgaccttgtggggatagagtttcatttgatgtttggtttcttagctaagttgagaccagaaagggcacgagatgacttgattgccgtactcggtggtagttagctcagctaccaaagtttttttccaaccaatgggaatcagtaattctctgctgtcaacttgtcatcattcatgaactgtcagagagttttaaaattcaaattctctttcgagggtaaatgtgtcattttaatcctctaccaaacagaaatacagaattacatcatatgtgcaaattactcatcatcttgttggtggatatacatcgcctttcatagtcggataaggattgttatgagtcatgtcatcatgttggcacttgtattaatgaataatgaaagaatgatactaattttgatggctaatttggtcatttgatgatataataatactgcagggctgttgccaa

SEQ ID NO: 79692 - DNA, 848 bp, Citrus sinensis
  Intron number 1 from transcript orange1.1g018092m (locus o range1.1g018092m.g) derived from phytozome v7.0 (chr-ID sc affold00557; pos 66812 to 67659)
gtgtgaaggtaagttactctagcgacttgcgttggctttagatttgccagttttgttgtctgcgagttgcggggttcgttggaagagaaccttggtaaggtgaacagctatttattatggccaatgccagtctgtgcggcccatttgaccatcaattagaataggaattccaaatgcctactttctcatgcatgctcttcttccgcgtgtgaagaaaaaatagtaatcttcttttatttcagcaccatatcaaagttttgggggtttgttcttttatacttcctgctgcacatagtgtaattatttatgcttgtaaggttacatatatgcatactcccacacaaaaaatgcatgtgcaaattgtcaaatttggttgcttgaggctaaagtgaaagccactgcaatctgaagtatgtagtctggttgataaatgaacatttcctgtttccttcctttcttgttaggtactctgtaatgggattttaaatagataaatttaaatgccatttgaagaggagtcatttattctctgctaatattgactagctttcttgttagattaagagttctccacagcagcggtctaaacttttgattctccatgaagcagaaataaatttttgaaaattgacatttaactggtacatttttgaagctatatatatatattggaagtataggaattcccttactcgctttaaattatttttcatcccttatatgctcggtgatgttacttaattaatattctgccctgatactgtcatgctagtcattattataagaaatctaataaatgataatctacttcagattcgtgcctctgctgtatttattccggagttggc

SEQ ID NO: 79693 - DNA, 252 bp, Citrus sinensis
  Intron number 1 from transcript orange1.1g029964m (locus o range1.1g026587m.g) derived from phytozome v7.0 (chr-ID sc affold00025; pos 144324 to 144575)
cgttgtcctcggcgccgattctcgtactagcaccggtatttgtcttcgattcaatttcattatttgagtttctcgattcagtaacttgctgatcgttttctttttcattttttttattttaataggttattgtttctatttaaaaataatagtaaataaataaagagcagagatttcgtgttaatttcttgattaaaaaaaaaaaaaaactgacaaattttggtcgctgttgtgatgtgatggtaggggtgt

SEQ ID NO: 79694 - DNA, 227 bp, Citrus sinensis
  Intron number 3 from transcript orange1.1g029964m (locus o range1.1g026587m.g) derived from phytozome v7.0 (chr-ID sc affold00025; pos 145391 to 145617)
ccaatcttgtcaggctgctatcctacaataacaaggtttgattttactgttctggcttgcttaatctgctttcttgttttttgaaaactgctaagttgaagaaaaagaaaactttgcttgcctgttagatatttttcccctttgaatgcttatcagtaaatcagactctttttatgcttgacttactgagagttatctggacttgacagaactttttgcaaactgga

SEQ ID NO: 79695 - DNA, 866 bp, Citrus sinensis
  Intron number 1 from transcript orange1.1g009756m (locus o range1.1g008342m.g) derived from phytozome v7.0 (chr-ID sc affold00016; pos 779397 to 780262 reverse strand)
cgcctctgctctttccaagctctccatcggacttggtaccactgtacgcatacatacacagtagacacccacacacacgcacacatatgtatttaatgaagagattgacatacatcttagagtccaaaaatttacgattaagtttgttttttttttccggccaatttctcaggaaccaatttttttgtttacaaaactttgccacataattaatatgctaagtttttttttttcgaaaaactctttgtatgaaaaatgtgaaggtccactttcacatattatatttattagttgtttgtcaggggtaattttgtttgttgcaacaatttgctccatacacgagtctttccttatctaaatatattttttaaagaaaaataaataaaaagtaaaaaaaaaaatgatttcaatagacagtgagtaaattggatatgtttttaagtaaattacgaagttttttttttttttgaaaagtgattggcttataatcttaatttaaaacaccttatcaagttgtttccagagttgattattaactattaatgtaataattgattctttagcatggccttatcttatcatcttacaagtagataatgattgaactttgaattgtattaaggctacgaggctgttatttcttaattaatatatgtcatgatcaaccttaacctgctatgtagtttgacaaaaaatgtgatacaaatttgtatacacgtgacggatgacacagtattaaaaataatgtataagttcgtaaattggaatacattatttgccaatcctttataaatgcagagcatatgatcaattcgttaggttattttacattttcatataccggcaggtatcggtgattgcaccaa

SEQ ID NO: 79696 - DNA, 308 bp, Citrus sinensis
  Intron number 2 from transcript orange1.1g027945m (locus o range1.1g027945m.g) derived from phytozome v7.0 (chr-ID sc affold00027; pos 152291 to 152598)
ctttacactgtatccctcttcaaaacttttgacttatgttattttctattcatcatttgcttatctgggtcagtgcataattattagttagttgtgttagtaatctgtttctaatactgacttgctactccatggatttatttaactgtaaaagttagatattttgtaagtcttagtttttgagtgaaatgcaaccagtcatgatcgttgtaataatgatttttatgctccaatactggatatgggcatctgtgattagataatgaaatgttttgtgggttatgagcaggcggaaaattcatttggtg

SEQ ID NO: 79697 - DNA, 371 bp, Citrus sinensis
  Intron number 1 from transcript orange1.1g015742m (locus o range1.1g015750m.g) derived from phytozome v7.0 (chr-ID sc affold00271; pos 15001 to 15371)
ttgggttggcttaatccctagattttcacttaatttttgtcttgcttttttttttttccccaaatcttttttcggactctccaaagtaaaattttaacccaaatcccaaaacaagagaaagaaattttttttaaaaaaaaaacttagtaaactctgttactctgtgtatactactcatacatatttattgatcccttaaattattatttatttgttttttcttgtcatggttgtattcactcttttgaatacattcttgttctttcaaatataagctgaaaaagatcctttttttttgttgcttcactcgttttcctctaaatattccgaactttaattggtgtatgtgcgagttatatagagagtgaaaa

SEQ ID NO: 79698 - DNA, 700 bp, Citrus sinensis
  Intron number 2 from transcript orange1.1g026120m (locus o range1.1g026120m.g) derived from phytozome v7.0 (chr-ID sc affold00123; pos 106718 to 107417 reverse strand)
ttattgaaaaatcaggttagttcttaagcagtgcagtgatggtgagttcggaagtgcttttatgaaaagcgctctctttaagtaatagctttttttttttttttgttctttcctttctcttctgcataagcaatccaaattccaaggagtgtttttttgtaaaatcaactgttgaattttgaactttgggagtgtttttggcaccaatggaataccttctaaaaggccaaaggtgccttggtgtttattttgaattgcttggttgagatcaaaaagcatttgggaagctttctggagaagcacttgattcactttgttcttttatgaataaagcttttgaagtattttctcaaagaagcaattgctatgtgatttcccaaaatgcctttctagtgattttacagaaggtgcttttatttataagtatatttatcaaaagcacttacaaacacacccaaagcattttgttggaaagcaattagttctttccttatcttactgaagtaccgcaattgattcttgaaaaatacatagaagtgcctgtttattaattaatttaaagtgctgtcaaaagctttcccagtttcagcataagtgaattagttttactagtttgaatttggtttactgtgatgcactatgtattgacaaagttgcctttggtctataattttggtggatgacactcactacaggaaag

SEQ ID NO: 79699 - DNA, 572 bp, Citrus sinensis
  Intron number 1 from transcript orange1.1g016680m (locus o range1.1g016680m.g) derived from phytozome v7.0 (chr-ID sc affold00370; pos 145408 to 145979 reverse strand)
ccgaggtcaaggtcagagaacctaatctataataattttgtagtttattacatgatctaatctgattaattggactataggacattttcaactaaaccatgtgtttttctctaactactatgttgagggtacttgcaaattaatttgtgatcagtccagtgcaaatcagcacccgggaacttgcattttgtccttgagatatttggtttcaatttattttgatttttctcatcctgtgtatgcaaactctgatccattcatattactaagctctattatgtcgagctaaattacacatggcatttttcaagatcattgtcataatagtaatgtggtagtatgtgtggctgttagttattgtactatagtctcaaagcaaattgatgtaatcctattgtcagtggcaggaaaacttctattatcatttcttttcatgagttggaaaacattttcagaacatatggttgttacttgaactgttagaaacttgcatatcccaaatttttgtagttgtgtgaataatatatggtgaattctgttttcctattttaatgacaaataggggtttagaa

SEQ ID NO: 79700 - DNA, 393 bp, Citrus sinensis
  Intron number 3 from transcript orange1.1g047219m (locus o range1.1g047219m.g) derived from phytozome v7.0 (chr-ID sc affold00007; pos 2095413 to 2095805)
gtcccacgtttactgttgctgtcaagggccagaaggttagtgcccatgtttttcttggcttcacaccctcattcttctcattattgaagacaatatttttattctctgctagaagttattaatcagtgtatatcttagtatgcgaaagctacctaatttttttgtgttccaatggattacgcactgtatggacattcttaaattctcagtgtggaaatcctatgaagctcattgcctttattggcatgctgccatctatttccttgatgtttctgtctattattgttgtgtctgcttcagtctgtggtgtaattcgattataatactgcaaatgtaactctaattgaggtgttttgatctgaaggtcaccattaagtttcaagtacctcctgc

SEQ ID NO: 79701 - DNA, 720 bp, Citrus sinensis
  Intron number 1 from transcript orange1.1g019286m (locus o range1.1g010893m.g) derived from phytozome v7.0 (chr-ID sc affold00016; pos 1591687 to 1592406 reverse strand)
tgctgaaggagttgactcaatccaaatcgaatcaggtttgtgttctatttccagtttgttgcagttgtttttgggatttattggggtcccttaacactgaaagttttgatctttatttgctgtttgtttgattatgtcaaaatgatatgtgaattgtatgtgtgtgtcgggtgtgctggtattgaaaaatgcaacgtgcttttcccttttaattatgattttttttttatcatttttttaaaagtttggtagtcggtggagttgattaatggagaattatgagcttctttagcatcttcctctttggattttgagaagttaaatgtggttctaattttgcttttcttatttttctagttctctgttttctctctccatacttgttttggcacctgtaccacagtcagctttttatttcagcttccccccccctttttttttctgtctgcttatgttgattcctttaggatataaatcaaatagtatgcgatgttatccaactttggatgtgggttttgtgtgaaacttgttgatgaagggcatccatattttgtttagaattcaggtttgtgttattgtctgtttaaaggaacctttgaaagagcatttaagcttaatcccaaacccaagtgttgaacccaccaaaatacttgtggttcataccatgtttgccgcttacatttcatttttgatattgcaggtgtattggcatatatagaa

SEQ ID NO: 79702 - DNA, 827 bp, Citrus sinensis
  Intron number 2 from transcript orange1.1g010001m (locus o range1.1g010001m.g) derived from phytozome v7.0 (chr-ID sc affold00415; pos 109218 to 110044 reverse strand)
cctcatttaaggtctaaaaaattattatttaaacttttttctttttaaaatcaatttttattagttatttatatattatatggaacataacgtatttactaggaaaacccaaggggagtgagtttgaatagttgaaccttggtttacatacaagagggagagaggttcgggtccttggcagttggcgcctcacttgggttttagacttttttaggtgcaaacacaagtgaggttacggaatttcggtagtgcaaggacaaggtcattgtgtttgttgaattggtaaaatttacatgctaaagggagctgaatttttggtattgaatatttgaccagattactattaagccatcttaaattttaggtagggaaatgtactgtttgaactactgcataaatcatcagaagaaaatggttttctttaataaacagaaaataaagaactgggattgaaaaagcctgacttggtggtgctaggaattttgtagttagcctggtttttgaggcaattcttttgttctttccacctcaactattgcgcatacactttaatgaatgaaaaatctttacttgcttagtttacttaaatttacttgtatcttaatctcttgatttgaaggatgcttaccatcatccatagatatgccctttcatgccattctgttcgtggcttttgtgcaatgggtgtcatgtgctattgtcaaagagtcccaaagtcatcgtgatatggactaataagcttttgctttctttggttttgtttctaaaattgattcaattttgcatgttcaggtggtccttctggaatctcgggatagagttggtgg

SEQ ID NO: 79703 - DNA, 873 bp, Citrus sinensis
  Intron number 1 from transcript orange1.1g024015m (locus o range1.1g016430m.g) derived from phytozome v7.0 (chr-ID sc affold00174; pos 258975 to 259847 reverse strand)
gtggcagacttcaggtactatattcaatctaaaaattccccttttcttttcctgttaatattagtctttgattagtttggttgctggaatggtccaaatgtaaaattttaatcttgagaagctggtaattttttaagtgttaattctgaaaattgataatggtttcgtttctatgtggtataaaggtgctcagtaggcattggtgtaacatgaactgttctttattaattgtgtttgtgaaagaaatgaactattagatgcttgatactgatttggttttataatggctattgactgtttaatatgcaaattagttgaatttataaaatatgttaaggtaattttaattaggataattctactgaggaatttttttcagatatgtgggtgttggtcttaccagttattcagtaatcatttcatcattttcttgagtttatatgtacagaagtatgtgtcatcaaatgtgggcagcagctagtttagttactaaaatctcaagttaaaataagaggtctaaggtttgatcccctctcacatgtgttgcaaagggattaggctgtcatccggctaaaaaaggaaataggtatgtgtcatcaaatgcagttgtggtaactttccgctgttttgtaaacaagactattttaaaccttaggtgcagatgcaacttcttgctcatacaggaactgtatattttgctttctatttatggttttgtgtgactgactagtttttatttcaactgcttgtggttcatgtggtgggaaaatgttttttttttcacccatcagtgcttgctcataatacgtatttatttatcctctactgcatatttcagggggatttcaagattctagaggataagaaacatag

SEQ ID NO: 79704 - DNA, 902 bp, Citrus sinensis
  Intron number 1 from transcript orange1.1g040326m (locus o range1.1g040326m.g) derived from phytozome v7.0 (chr-ID sc affold00038; pos 887235 to 888136 reverse strand)
gcggctttaagaaaaataaagtctccagattgtatcatcgtactgttgatcatgctcatcatattcttgctttcatacaactcttgtaacccaacaacagagactgtcgacacaggggcactcaagtctcaacctccagtaagatatttttttttttttcaaatcttcatgattgattcatattactctttctcttggatttgtcgactatttgcttttcataaatatcttttatagttgattcacatgtatcatgatctcatatggccccagagattaaaggaaaaagaagtttcacatttgatttttcacatttgattcacgtgtatcacagtctgtccccagagggaaaagaaaaaggaaattaatgattgttagtagcatcaggaattttagaaggtttattccctccaaggtctttcaattttatttttttaataattattgattatgtttctttctagattagagctttaaagtatgaaatgattagcccagccctaaaggctgaactgaatttttattgctggccaccctagttcgcttgccacccaaatttaaattttaaatgtatgagttaaaaaaacatctgggctttgtccacacccatcttgaaaaaaaatgaaataattgattaattgttggcccaaactcttacacaatgttatctaggcactgatggtatactaaacatctgaagcaaacatggtatcattaatacccaaagggaagagagttaatttgcactaaattcttttggagcttcatgaattatatggagaactagtacgtaaacaagggtccaattttctcttttcatttgttgtgtgcacatgtgcaggctgataaaattgtagctgactccagaatcaataattcgttgctgcaattgttaagaagga

SEQ ID NO: 79705 - DNA, 518 bp, Citrus sinensis
  Intron number 1 from transcript orange1.1g005279m (locus o range1.1g005279m.g) derived from phytozome v7.0 (chr-ID sc affold00271; pos 50945 to 51462)
agtaccgcccacattctcatcttctctttcttacgtatagttttctgattttgtttttcttctttttctttttcttttttttttattttttattttttccaaaaagtcatatttcttttgtgaatgtctctgtgcgtacataagatttcagaaaagaagaaaatgacctgttgtgccaatcctgtttattttaattaaagaaactaataaaagttaaaacctttagtttggaacatttaattgtgtcaaaaaaacgtaagcataagagctcgtgttacgtgtttgacttgttcgattatttaaagtcgtgttcgtcgaagcaaaaatttgcatgatcattggaacttggaaggaccttttcttttcgtccgtgatgtgacaaccaaataattgtgggcttattctttcaatgcgcattaacacctcaatcttatctctgtactgacttttgtttcattttgatgctatgattatgacgctttaacgctggattgtggatggttctgctctagatccta

SEQ ID NO: 79706 - DNA, 824 bp, Citrus sinensis
  Intron number 2 from transcript orange1.1g005279m (locus o range1.1g005279m.g) derived from phytozome v7.0 (chr-ID sc affold00271; pos 51448 to 52271)
gttctgctctagatcctagtaagtcctctcctctttctttttgtttacttatatttattttattttcttcttctgaactctttatctttattggctgcctgctaccgtatgtcaactttggttcatccgattaactttccaagaaacttgcccgtagttggactaattccaattggatacaacgagctttaagcctacttaatttcctaatcttcataagtgtcccaatcctttacttaattgtttaaaagggtcatctgcttaatgaatgaaacgtgtaggccgagaatctggaacagccggattgagtacaaacatgtattgtaagaattttgaactttgtacattaatttattcattataactcgcgcacttgtcgctgaacttgaccatatgctagggaacgtgactggtcggctggtacaaatcatccagacaatcaatctagtaagcaatgcttaaaattttttgaaagattgctggttttcgagatctacagcacaacaaatgccaaatttaaaaaaaaagaaaaaaaaaaggaggttaaatgattggcaacaaaatcaactataagttttctttattaaatatcaggacagttggcaaaaattgaagattttgtctagatcctccaagctaattggcttgtgacaggtgaccacttggtgtttcataccgcaacagcattccaaacattaattagcaggaattgtattgtcaagtgatttggttaactcatttgcaatctcaacaaagtgtgaaaaaaagaaaaactttaacctcattaacctgcaaaatgttacaggtccagtgttttacaaagg

SEQ ID NO: 79707 - DNA, 440 bp, Citrus sinensis
  Intron number 2 from transcript orange1.1g024018m (locus o range1.1g021890m.g) derived from phytozome v7.0 (chr-ID sc affold00004; pos 1905596 to 1906035 reverse strand)
aggctactgctgctctcaataatctcgaatcgtatgtaagcatataaaagtttaattctttaatgagtttttcatgtgttcgtaaaaattttgatgattatattggaaatgcattgaagtggagtaatgattagatggctttagtaatttgggacaactccctgttaatgtagtttaaaataactatgtagcttatttatttgtttgttttatggttttcaattaaattttgttggcttatttacagtgaggaagttagtaaagggaatgaatatgatcgatggaaaataaatttgatcttctttattttcttaccgactatgcctaggcttaatttttctgtgtttcatgccattttttcaacttggaaatgttcttcctatgattagttttatttttattttttaaggaatttgagggtcgtactttaaaggtcaatt

SEQ ID NO: 79708 - DNA, 602 bp, Citrus sinensis
  Intron number 1 from transcript orange1.1g014966m (locus o range1.1g014966m.g) derived from phytozome v7.0 (chr-ID sc affold00373; pos 162704 to 163305)
attaagagagaccactttgattctatcactgtaagtaactctattaatgttacttcaattgcctttgcattagttcactgcttctaatctgctttctagtttgcactttttatttgtaaagttctgatttaagtttcttttgaaatgtttatatctgtgtttgtgtttttcttttatcttaaggtgtagcttgtttgatctgttttgatattgtgtgaaagatcttcgaggctttgtattttgtagcataaaaatttgatttttaattttcttttctgtagctaatgttgatttaagggggaaaatggaaccatttttctacacagtattgggttttttgttttggctgtgctgaaatggaggaatggaatagaaatttgtattccgttctcaagataacagaacaaaattgttaaatttattgttattttgctgtctttgtaattgaatttgtgtgtctatagatatgatttgacaattttctcttgtaataacaaatctttaactgtcctggagctgcttcttttcttactttgtgcgatcaattaacgctttatatattttttgttaatattgtgtaaaaaaggaaaaacttccagggg

SEQ ID NO: 79709 - DNA, 904 bp, Citrus sinensis
  Intron number 2 from transcript orange1.1g025644m (locus o range1.1g018291m.g) derived from phytozome v7.0 (chr-ID sc affold00046; pos 644760 to 645663)
aacagcttttttgaagaacctccaattcaattcaagtaagtctctctctccccccctttctatgtgaaacttttttgaaggttacagatttaatttatttgtttatttatctattaattacgattaaatgtatctattaactatttatacgataatgggtctgcgaatttaattttgggtatcaagttgattttagatagcttacatattaattttggcatgttagtgccagataatttctgtttggttgttgaaaaagtagtgaaaaatgactttgaggaaggaagattatggcatgtatctcttgacgttttgattgttgttagaaacaatgacattgagcttaattgaagttcttagcttctgtgatagaagtatagaacttcggaaggaccaatactttaattgggtgatgtggttaaaaataccgttagttgtaagatgttggtggagttgtaactttgtgagcttatttattaaggttttctgataacaggactacctcatgagaagtcaaagcctccaagcttagtcagcttgtgtcttggaattgttgggaagcatttggaggacatcattggtgatttggatgagattgcaatcaactttcctgtggatattaaggttgtctaatgattttctttttctttttctcttttactttgttttccagtaacttgaagagagattgaggactttgattggtacaacataaagtgctatagactaatctgagttttatgcaacgtatgaggcagttatattattagagtgttttaattgttgctccattggaagttttgcatctacacttttatttgagacaatttatttgtattgcctaatgtttgaatatcattgagtgacagatagcaatagcatcaattgcccggagaagaaagtt

SEQ ID NO: 79710 - DNA, 773 bp, Citrus sinensis
  Intron number 1 from transcript orange1.1g009291m (locus o range1.1g005247m.g) derived from phytozome v7.0 (chr-ID sc affold00355; pos 47788 to 48560)
ttctgctgagaccgtctctcatcgattttgggtatgtgttttttctttttcttttgctttttttgaattccttcccctttttgcttggtgagtaccttttcttttttgtatgttgggtttgtttggttgctgagaaaatgagaaaatttagattggattggacacaagaattaaatttacttagtaggatttgttcaaaatttgtcctttttttaagttgtgttggagttcaagacgtttatgatgctagtagtgttcattggtgttgacacatggaaaccaagtacctgcataattttgaagtcttaagacaactgagctttgaaagaactgtgtttttcagttgttctagatataagggtacagttgaaagttgcatttgatacacaggatggttaaaatttagactttcaaaacattcctgttttggatttcagaaactacccggttgatcgtcatccaaatggttcgtgttgtctatgattttgaaatatttacacctagactcaaacttaacagaacaaaccgaggccttttctttttgtaaatctcatttgttggcaatttgaagtgaagaaagatatactattttaaagcacaattgttattgggtagaatgttatatacatccatttatggtataattcaccaatcatgaaagacaaaggaccatgaacttcataaatagcactaattaattttctttagaagttgtaatgtttgcaatagatttttctgcttaaagtcctctaattttcacttgcaccaggtga

SEQ ID NO: 79711 - DNA, 731 bp, Citrus sinensis
  Intron number 5 from transcript orange1.1g009291m (locus o range1.1g005247m.g) derived from phytozome v7.0 (chr-ID sc affold00355; pos 49437 to 50167)
gcttcatcctgcctggtgcaaattggtcctgataggtatatcatgttgactatagttgattggacttttttctatacttttattttcattttagggaatgttcatgcatcttcaagtggttgaaaaagtcatagcttattataagtctaagtttttgaaggtaacaatccataagcaattaataaagaattgcacaatttagagttagagagggtggaaaagatgagaacatgagttcaataggtttgattatgtttcttatctacccagacatattagatgatttagctcggtctgttgacttgtacagtaccggagtgtgaatggttgataaataagggaagatgaagcacttcgtcacccatacatgagcgcaagagtaaagttgatgatgcatcttggactgtaaaatttgtactaggaaaatttggaaagagtttatttaagtaaagattgatgatgtgaaacaagtgtgtcaaaatatacatgtgctatatgcattggtttttttttccccccccacttccacacagaattttgttagctttgggaacaagcatatagctggttgagatcatttctcacacttgaaattatttttgaaagctagatgtctactattatgttgtagttatatttaattgtaatcaaaacattgtctcttagtggtagtagattaatgtgtattatttccagggagtatttggttgatttgcttgaggatcctggag

SEQ ID NO: 79712 - DNA, 810 bp, Citrus sinensis
  Intron number 1 from transcript orange1.1g008279m (locus o range1.1g007313m.g) derived from phytozome v7.0 (chr-ID sc affold00123; pos 229815 to 230624 reverse strand)
aaccctaaaactctcgcactttccgccgtctcacagtgagttcaacaaaacccttgaagcttttttcatttcattttgtattttgttcaaagttctttcctttttatttgctctgggtttgtttgttgtgttgggaaatgagaaagatgaggttttgggttgaaaatggataatgggtataatgatatgcatgcaagtttgatttttctgctgctttttgtttaatgttttctgtatgctgtgtggggttttgtgctctatttttcttttcagataaataatagtagtttgaatttgtgagtctaatcgtgattgttcattttgcttcaatgactttgtagaattagaggctttcgaattttgaataaagaggagtatttattttaattgaacgttggtgatgtttgctgggattttttttttaaattttttcccttctagttggttatttttgttgttattgtgaaaattgataccgtgtttgatcaaatgcaatatacagtttagttgtctttggtttttatattcttgagtatatgtgaaagttgttgaattaaggattgaagttattgatagtttgtgaggctaacttggtgaaaataagattgtgggtgtacaaatgcttttgtatctaaatgaagattcccttatttactttgatttcttttctgtaataccatgggtggaagagaatctcatgtttgcagatttttatattcacaatgaatcttctgctttgtgagtgggtaatcttatcagcatactttggctgagcttactttgtcaatgatggcaggtttaaacgaataa

SEQ ID NO: 79713 - DNA, 854 bp, Citrus sinensis
  Intron number 2 from transcript orange1.1g018998m (locus o range1.1g018998m.g) derived from phytozome v7.0 (chr-ID sc affold00287; pos 195302 to 196155)
atcgcattgacactcaaactcccattgaagtcactgtaatttccctctccttattgccctcttttgttaagcttaaatgcagcattttgtattgtggggttgtggctttggttgcgaaacaaatgttattactgttcactaatatagattttttcatctatcaactgtgagtataaagttttacttgtttagtttgttgtcgtattgtatagttagtgatttttgtttcatcaaaacattgtctcaattgttgaatgcgtgtgaacatatccatgtgtaatgcatatcgcagacccttttggaatgtatttttgttgaagaaaaggggttggcaggaagaatgcatgttagatgtgtgggggtaaggagagggaaggtttttatttttcatgttaactaacactacagacactgtgaagacatggtctgttatatgtggaccgtgactcatcgaaggaagacgagatattatcatatttaattattcttaacacgaaagtgcaatttgtcttgttgtatacttgactgagagactttctgcatccatgttttgaattaccatgctgaaatctgtgtgaaaactcaaaaaacaacgttggatcaatgttaatgacctacacatattgttgtatttgtcaggtaatgagcatttatcctttttttttaagccgcatctttctttgaaacttaacgatctgatagggttatgaagtttgatttctcacaatgtttccttctcccatcaagtttcttagttggactttgaaactggctttatattgaacatgaagtaattcttttttttcgctcttttgaaagattggagaactcaagaaactagttgaagagggcaa

SEQ ID NO: 79714 - DNA, 509 bp, Citrus sinensis
  Intron number 3 from transcript orange1.1g022163m (locus o range1.1g020053m.g) derived from phytozome v7.0 (chr-ID sc affold00016; pos 909649 to 910157)
tcatcatccggagcactggcaaccatcttggagtggtatgtttcattcttgtatacacaccaagtaggtttggcaaatggcaatttttctcaggcttctgcaattagtagtgttcctatttgcccagtcagtcaatgaagcctaagctctgtgatcataatattatctagctggattgccttttgttagtgtgggcagtgggcatgaagatctagagtagaattatgagttctgagatcactagggtatattaagtgatgagatagtccctccattgtattgcttttatttttttttctgtaaatttagctgcaactggggtttgattcttcattatctctctgctggatatattccaccagtgctggatgatggtacttaagcgttacagaatctgatctatacatagctgaacaatttttaactgctaattaatttatttgtcaacttttgcttgactaatgcacttgcttgcagtgaggactgctcttgtagcactaattgctttc

SEQ ID NO: 79715 - DNA, 425 bp, Citrus sinensis
  Intron number 1 from transcript orange1.1g010275m (locus o range1.1g010233m.g) derived from phytozome v7.0 (chr-ID sc affold00007; pos 1951886 to 1952310 reverse strand)
ttccggcgagcttctctccataaacggccaatcaagttgtttattgcatattacgtttcattttttttgtccggttttctctgctttgaaacgagcaggttttaaaaaaaaaaaatcaatttttgattgttttgtatgtgtagttaatttctgaactgcttagctaaaacttgtactgttcaaatatttttttctgatggaatcagtatattttcttttattgctttatcttaaaaaaaaaatcaaatttttatcatttttgttctgagggtattgagtaatgaatgctgaataaagaatggttgtgaattagaattattctgcattgtgaaaagcattttcatctaatttgaatgtaaatgttagtcgtttatattgtcttcactgaagttgaattttgaatgatgtgcactttttaggcgatc

SEQ ID NO: 79716 - DNA, 844 bp, Citrus sinensis
  Intron number 1 from transcript orange1.1g034315m (locus o range1.1g032874m.g) derived from phytozome v7.0 (chr-ID sc affold00007; pos 114383 to 115226 reverse strand)
actggtaagtacgtgcgtgtgtcctcactcactcgctcgctcgctcactcgctcttcactagcatagatgctgcatgcttgttctaacttattattctttctttagacccttatcagttgaacgcaaaggcaacttgtactctatctatatatgtttaatcatgttcggttgctgataaatatatatatttatttattaatttgttctctttttctccccccttttttaaaactgaattaattccccgatcagaaaaaaaaccgcagcttattatattcatgtgtgcgtgtgtgtgttttttaaaaagaaaaatgatgaaaccaaatcgatggagcatcaactcaaacatctctgtttttgttttgttttttttgtcgttcttactggcttctctcagcaaccaaataaaggctaagaggaaggaggaaaacgtggcactctgtctcatgggcgcgttgaaatagatctttgtcttattcagtaatgatcactcaattcacactcttttgtgaatccctgccagttcttccttagttaaagccaaatgatgtaataaataatatattttgtattatgtagtgatcatggataagattagatcgtactatagctagggctgttggatctgtttattttgcggtggatgattaaagtagtaatttaactatattgattatccttaattattattattattattattattattattattattattattagatggatctgatccgtgatcggggcgtcgtgtttttggatcgggagttgatgttgctctgaattggtttttgtgattttgcaggctttacagtggggagactaggagcaagcatcatc

SEQ ID NO: 79717 - DNA, 956 bp, Citrus sinensis
  Intron number 1 from transcript orange1.1g038564m (locus o range1.1g038564m.g) derived from phytozome v7.0 (chr-ID sc affold00026; pos 609009 to 609964)
ttggtttgcctaaatttgattcaagggtcttgcaggtttgtcaagccaatattttttttttttggggttaatttagatactgttggatttgtgttttctgttgtgtgggaaacatagttatgttggatgaagctatagctaataggaacatggattgagctttaactatagatttggactgttaaacttaacttcaataagcttgctatcacaatttcctattagtacttgataaatcaccccttcaataatgtgttgcagaagtttgcatagttttgtgtaactgaactttggtttattataacctaacatggaagatagtagatgtcttaattggtagttggagtttttgatctggtataagtattatgatagtttaagcgatatactgatggaatacaggtagtttcttgccaaatattcacaacaaactgttgggtggctttgtaaactactactcgtgtagaggttgttaatagacaacaagattagataatgttggctatctatgtgtgcatgttcatgggtagctaagtgtcaattggtaacatataacatatgttgatgtgggaataagtatattataaacttctcatgtctttgctcttaatatgctggtcttgtgaaaatgtcgagggtcgcttcttggcatgtttggtccgcatgcatgtttttctcaactttgagaaattatgatttatgggttgttttgtatcttgaacacctcatggaggtcaaaggatttgattccttttgggtttgcaaaaacttttcattgtaaattggttgagtacttcatgaatggcttctgttgggggtagttcatgtagccaattactgagtgctttctttacataatgcagctgtagatttacactatcaaaatctgctatgtgctatatcttcagaaacataatgtgtactcatttctactttcttctttcagagagtcaagg

SEQ ID NO: 79718 - DNA, 303 bp, Citrus sinensis
  Intron number 2 from transcript orange1.1g014845m (locus o range1.1g013320m.g) derived from phytozome v7.0 (chr-ID sc affold00007; pos 2672243 to 2672545 reverse strand)
gaattcaaatccatctcaaaggggtaaagttcttcctctttttctttttctttttcttcttttgattaattgattttactgtcaaagattataacgttaattctgagaaatgtataaatacttacacaaatgatgccagtcaccaactaatgtttaactttccagacttttaatttactgaacactactaatatttgcaaaaaatttaaaaaaaaaaaaacacttgttatgtagactatttattgacataatactaaatatgttttggtgttgctttaattcgcagttggtcagaaaggacct

SEQ ID NO: 79719 - DNA, 675 bp, Citrus sinensis
  Intron number 2 from transcript orange1.1g003186m (locus o range1.1g003196m.g) derived from phytozome v7.0 (chr-ID sc affold00026; pos 397520 to 398194 reverse strand)
ccacggcggagagtgtccgcgatcgtcttattcaagtaaaatttctaagctatcgtgtttgtgaagtttcatcctttattcttcttatatatatatatatatataatattgataatgacttgaaatttagttacagtttgcttcctttacttccttctctctgtgtgtgtataagtagatatttttttatttttttatgtggttagatctgtttggttatgtcatgattcttttttgatatgttatttttatttgaaataatgggagagaatagaaaatgctttttcattgttttagtgaaatcatgtcatgtcgctttgtatggatgagtttgtgtagttaatttgtacgtgtagtagtactcattttctttataaccttaatgacacgacttagagtttgcgttatcgtagaaatagaaactcatgaaatatacagcagctccgttattacttttgctttttagctggatagactataaggaaatgatccatgaatcattgcatggttgactgtaatgcatgcatgatatgacgatttgtgatctgagataaacaaagctgtaattacttcatgatatgattagtttgatgataatttctaaaattttaaatcatgatttacaaataggttaaatgtttttgttttgtttatcatttgattgttttgacagca

SEQ ID NO: 79720 - DNA, 799 bp, Citrus sinensis
  Intron number 1 from transcript orange1.1g004493m (locus o range1.1g002166m.g) derived from phytozome v7.0 (chr-ID sc affold00010; pos 1990466 to 1991264)
atcttttgcactcctcctgtatcagagagaacaaggtatattaatatcaacccaaaattgacaaaaatagaattaaaaatttgtttaaaaatgagaacttgaagctgcaaactgaaccttctggaccaaaacgtatgaaatttggcagagcacagatgttgaatgaaataacttcactgaatttttgacaatttcaggggacccatctggcaattttgttgtaagtagtgtgaagctcaattgtgccagttttctcctaagtttatgataactatttgaacttgatagttttgctcagaaatagaaattattaacagattgtatggaagtttgaactcactggtttaagcctgcttttaggacttgctaaatttggacaatttcatagaacttgtctgatcttgacaacatgcttgccttatgatttaatggcagttgtattggcttcatcttgtcaatagatctatacttttacttgattatgatcatgctaatgttaaatgtcttggcacaagtttaattattgtctttggctttagctgaattaatggatatttaaaggagaagtagaagacttttgataacaagttttcaggtctttgtggcttcatttcattgtgcaaaatgtttatttattataattcttctgggggaattttgcatttattacatttgtttatgttcatgcaaatctgcttatttaaattacctttaattgtgaaaagtcacatgtttagattttgatatgattcttgaacatagatggtgattactgttttggtgcctacagactgcagtg

SEQ ID NO: 79721 - DNA, 974 bp, Citrus sinensis
  Intron number 1 from transcript orange1.1g019678m (locus o range1.1g019678m.g) derived from phytozome v7.0 (chr-ID sc affold00004; pos 1329497 to 1330470 reverse strand)
gttttctgttgaggatccaattctctgtcattcaggtaacctgctcactgtttgttttgaagcgttggaaaaatattttatttaatctgttattactagttaatcactgacttccgtgttttaaagaggttctgttttgatcaggtgaagtatgttgggtttgtcaaattgaagcctgtgattgattttactcactgttgttgataacatccacttgtagattttgactgtttgaatgtcgggaaaaatgataattttaattccttgattgactagcagtataatacatcgatcttaactaattgtcttagtttgactttcaggaaaaaaaaaaaaggatcactaagcctatgctttgctttggctgaatgatcaagcattgtcaatgtgtattcattctcagtcttaagttcgaactaacagtactggggtgcctaaatgcagttcagatcttggcacttttgctttcgcttgattagttacctttgactcacaggagagtgatcattgagtataggaattgttttagttgtactctatgcaggcgtaaggaattctgagtttctggtgtggagatgatattgaattgaataacaattacttatcatgatggacttgtgaacataaacaaactgaattccaataaatatataaaagatggacagagagagagagagagagagaaagaagaagctaaagtttgtgttcctttatctaattaaaaaataaagaagtagagggcacggcttatgtatttgtataatttttgcaagtttaactataaattgctttatccttaacgttcacgttgtaggttacttgtatgctaaaagtcgaattatgttgacatcagtttaacagatctattgcaagtttcttatatgtatttttgttgcaagacaattgtgtgtgtttctcataattattgtattttgcttaaatgatgatggatttagttgttttcttttttaagc

SEQ ID NO: 79722 - DNA, 407 bp, Citrus sinensis
  Intron number 1 from transcript orange1.1g008811m (locus o range1.1g008791m.g) derived from phytozome v7.0 (chr-ID sc affold00067; pos 102222 to 102628 reverse strand)
aaattacaggtaactccccccatctcaccctctctatctgtctgtccatctacatgctgtaacatcacgtctctgtagtacccttttcattttttcatcttcttttgaagtttttttttatttttggtataatatggtcttgtttatttctgttcttgacttactcgagtaggagttgtttttttgtacttattttgaaaatttccctcgctctttgcaactttaagttttgagttagttttatccctaacaaggtttattttctttgagattatatcgttctcatgtaatttagaagctatatgtttgttcaattctttcttggatttttttttaagttacatcaattaacacaactttgtcttcttaatggttgcttttgtagcagtcttgtgttctcagagtta

SEQ ID NO: 79723 - DNA, 776 bp, Citrus sinensis
  Intron number 3 from transcript orange1.1g024303m (locus o range1.1g024303m.g) derived from phytozome v7.0 (chr-ID sc affold00224; pos 219049 to 219824 reverse strand)
cacggtaaaattgtaattaattaattttaaaacgtcgatctctttaggccaatgtaaaaaagagtagtatatactacactttctaagaggtaccttaacgttcgtaattcgagtaaagtgatagtacatagaatgaagtaataagtaaattagcaagttatgaaattgactatctataatagatgagtcctatgtatattataatattaacccttgctctgggtatattaagaaattatttgaaaaattgagtgttattataaaagaagaagaaaagagaaaacgcttgagtatgaggtcattttcttactatttattgttaaagatacaaataacaaaatatcctcgagtcattttcgagtccaacactgatttggaatattattgagtcttatgttaagtaatcttattttttaaatacaaattgagcataacctatacccattttttaaaattttataaaattaacgggggaaacagcgtattagcatcatgccaaaaacgccctgctagcaaactcaaacttttacgaaattgtttcaactagacacgaccaaaaaggcaaaagaaactaaaggtgtttgtttgaatacgcatgcatgctgaagcaattatatttggtcacggcattgttagtcctctaattaatttgacttaaaagtcaaattactgattacttatacaagcacattttttaatttaacatatataaatattttattttttgctatatgcgcatagggttgcttgtgattactccggaaggaacatagcct

SEQ ID NO: 79724 - DNA, 629 bp, Citrus sinensis
  Intron number 1 from transcript orange1.1g022156m (locus o range1.1g012786m.g) derived from phytozome v7.0 (chr-ID sc affold00007; pos 2253845 to 2254473)
gcccgatcctcaaggactctgattgctttctccaggttcttcttgacacatttttgctgattaccaaaaagtgaaaataaggcaaagaacgttgtcgttcgtagtacttgagtttgaattttccgtttaaagtaagtttagtgtttttatagatgatcggctgccaggattttttgagaatcaaccacttatcctcttttttgctactgagaaaccgccagttaaataaactaaatggatgattaacttatggattgattattgtttaaatgtttagtttatatcaatttttttccggattattagttgatgattgatacttatgctgttgaagtatgaaaatgtattttatattctcatttattgcatggattttttttctttttttgttttcactcttttcaatcatatatgatgactagtcagtttgaatggatagtttgtatgtgaagtattacttatttgttaattgttatgggtattagtttgtataaaatcgatccttgctcataaaagcagaagataagtgcagtttgtgtctgtgtttctcagttaagtaattgcttgttatgtgatgcaatgatttcgtggcagcctaatctgaacaagttcttgtctttggggaggcc

SEQ ID NO: 79725 - DNA, 734 bp, Citrus sinensis
  Intron number 4 from transcript orange1.1g022156m (locus o range1.1g012786m.g) derived from phytozome v7.0 (chr-ID sc affold00007; pos 2255109 to 2255842)
gttgtcatatctggaacagacattgtccggccaaggttggagaaataattttcattaatttctttatgtctattctgtttatatattttctttgttgcaaacaacagctggtcttattaaaaataaataaaaacataaataaaataagaagcaaacaacggctggtataatatcatggatggcttcaatttgaagcactataagcactcacgaactacctaattatttgtgatagtaacagcagctcccttgactgtgcacatagtgacatatcttggtattgtcgtttagatgaatgtatcaagtgtctatctttgggcccgcaagcccatggaacttttctatcacttccattagctgaaccacttgctgcttagagatcagcgcaatagttaaaaataatgagatatcactttgaaataatatttagatatttatctatatatggacaactgtacgtgtttggttttgtagagttcaaagctttctgttgcattggtgtttgtgtctctccaagccagttgacatgctacttaggttccctgctggatctggtgcttcatggcatgttattcatctaattttgttgctttggatcttaatttcatcttttcacgactgattctgctgctgagccagtatcaaagctataataactttggacttcacaaacttacattttttcttttgctcttctagaggtcaatttgctccatctggaaactctccaccac

SEQ ID NO: 79726 - DNA, 563 bp, Citrus sinensis
  Intron number 2 from transcript orange1.1g022157m (locus o range1.1g016226m.g) derived from phytozome v7.0 (chr-ID sc affold00038; pos 824605 to 825167)
gagaggttggtatacttgccttcgagcaattttgtgcttgtgtaggttaaatattttaaccctaaataccccaagtacccacattttgaaaataaaaatggattgggagctggtgctagtatttctgttggtagaaaatacttatttagtcacatttcttcatattcttcgactgacagaaactcatgtttcccacaatgtgcatccctgctcctgcaggctcagtattctgttgttgctttgtttcttgtggtttgggccacctcttgcttgaatcctgttgagttaacctcttggttgacattgaattcaaatgcttacaggtcaatgaagctaatgcatttccatgcagacttaaatggcatccaatgcatgtgattgcttggatgataaacacatttcgctcaaataatctctcttgttaatgcattagctaatctgagtatattatttttgttttttctagggtaaaagcatctttgagaaacataacattttacagttttgttctaacagtaagctttttctttcgattataatgccaaagcctcttaatagagatc

SEQ ID NO: 79727 - DNA, 914 bp, Citrus sinensis
  Intron number 2 from transcript orange1.1g008299m (locus o range1.1g006022m.g) derived from phytozome v7.0 (chr-ID sc affold00067; pos 486687 to 487600)
ctagcttaagtttgcaggaagtgtctattattgaggtatgttgttgaaacatgataatttactagaatacttgagggatcaaagtatggatggcagaaatctccacatggatgggcccctgagggattttctccattcggggaaggtacgaggataattttatacccaatttcttatttgggaaaagtacgaatgcaatataatacccaatatcttattcagggaggggtcggggattcggtgaaatctccattccctccccatttgtccatttctatttttgatttttaattttaattttatttcttctaaaatttttattaaatacatttaaaatttaaattgtaattgtatggatgtaatgtaaataacaaatatcataatatttataaaaataatataaataacaactaatattagcactttaggattgacagagataattttattgataatttataccatgtgacttttatggatgtgttcaattttgaagctttactttttcttaatttcatagattaacttgtaattttgatgacattgacttggtttgatagaaataattttaattactttggtttattttgatgtttctatgttggtaatacgattttatatttgtactttaatatgattaaaccaagtttagaaaataaaattatcacttattttgggattgggtacctcggggatccccatcccctacctcaagcaattttgaaggggacaaggaggatacaaggatatacacagagtattgggatgtcgatcccctccccattgccatcctaagatcaaaccatgtcgtgcttgttcttttgtcactttttaagtattctgaaaaatctttaagtatactgatggggtcaaagatttactggttttttctaatttaggggaagtccatcaga

SEQ ID NO: 79728 - DNA, 410 bp, Citrus sinensis
  Intron number 1 from transcript orange1.1g008116m (locus o range1.1g005298m.g) derived from phytozome v7.0 (chr-ID sc affold00047; pos 539722 to 540131)
cgtcatcatcatcatcgaactaacaaacaaaacaggtaaaacgaaaacattccacagacgcacacaaatctctcatttgatgtttgaagcccacgtgtgtgttacggtttcgctatcattactgcttaaattgaattgaaaattctgttgggttgtcactttagcaaatcccaactcttcacctaaccaaaatatttgaaaaagaaagaaaacaagtccaattttaatatcttatgtgcttttgctttgagtgtaaaatatctatgcgcaatgtgagatttattttaggtttttccaactctatttagatcctctgaattgtttctgatttgggttttgtttatcttgttgaattgtgtgtatgtttttctcttttgacgtagtgtgcgtattgtgaattttgtgacagg

SEQ ID NO: 79729 - DNA, 702 bp, Citrus sinensis
  Intron number 3 from transcript orange1.1g033534m (locus o range1.1g033522m.g) derived from phytozome v7.0 (chr-ID sc affold00004; pos 1190887 to 1191588 reverse strand)
tgttctgcgtccttctttacctgacaaaaagggcggtaatactcataaccatctgatctaaaacttcatataaatgtatcttaatttcaattgtgtttgtacctctgtaggcatctatctttctcgatcttgtgaacaaacggttctatagattttgcttttagatgaactttagaccatctttcatcgccagaatgttactgccaaaccatagcattgtatgcttgttcggacactagcatcttccttatgatgtggcaaaacttgtaacaattaattgagtattagctgctgtttctgtaagaaagatgtcatagtccctcatccaacaaaagcaggtttttgaattttataaaattttcgtttgccatcttgctatctagtcctctttctcatttggccatgcaactcttgttcttattgcttcttattttggtctgtatactgctacacttccctataaattggatgcttcaggtagctattttctttctcatatgaaaaaaatctcaagcatggagaaacttgggtggatcaacaatgtgattcatttcctcttacttattgacaattgtttatggtagttcatggatatgaaagaataatgtaagcaatgaaataaattgcagattagtttaagaactaacatctgatgcatctttttcagaaaaactgctgagtgattcttccaagtccaggtgt

SEQ ID NO: 79730 - DNA, 403 bp, Citrus sinensis
  Intron number 2 from transcript orange1.1g033534m (locus o range1.1g033522m.g) derived from phytozome v7.0 (chr-ID sc affold00004; pos 1191716 to 1192118 reverse strand)
gccaaaaggttgtacatataaatcttttcaactcaatttaattacttagttcaatcttgaattgtatgtgttttttttttttccaatcttgattcattgtcttttaacaacataagttggtgtttcttgtagtgactttgttttcttgattagacgtgttatatgggatatttgcttaatctgtttacatatggatatactattctgtatggatggcttaaacgtgtaatcttgtcaacgatttacaaataatgtatttattttcattcctattaattcttatgtgttgatacctttcttctgcatattttgcttgttgaccccaaagtctgtctctctgttggtaagtggaattgactcaaattcttcatgaatttccatatctatttggcagaaaaagaaa

SEQ ID NO: 79731 - DNA, 939 bp, Citrus sinensis
  Intron number 1 from transcript orange1.1g022531m (locus o range1.1g015370m.g) derived from phytozome v7.0 (chr-ID sc affold00627; pos 85791 to 86729 reverse strand)
gctgctcgctcatttttcctcggtctaagacggtaagaacattcgactctccttatgtttcccatttttaagctatattgagctgattttagtatctttcatgtctaaacagtcactatttgactatatttctttctttctttttgtcaaacacttaaacatggcagagcaagcaacacaaaaatcaagaaccgccctaattccgattacgagtgtttcttttattcaagatttctctcttctggatcttcgcaaaacgaatgcctcgacgaagagacttcgaattcggatggaaaggatgatctcaaatccagaatcttcagaattagtctgccaaaacgtagcgcaactaacgttattcagaggtgggtcagcgaagggaaccaagctaccgtttctgagcttcgacacatcttgaaagaactcagaaagtctcagcgttacaagcatgccctcgaggtttgattgtcttttcattttctttttcgtattttatggttctttaagcttagaaatagtttaaacaggatttgaatctgattggatcttggttactagtaaaatttgtaccttgaaattcattgagtaattctaagtattcggcctttgaaactgatgtgatgtagcagcttactgcccactaggttagttattaatgtttaatgaacttaccgataaactgccacatagttggggttcaagttgagagtcagtgtagttactgatatactaccgcgttagttgaactcaagttaagactcaaatgctcaaatgctgagttccctagttttatttaattatattttgtagaaaatgagttcacatttatctcgcttgtaaaaatgcttagcctttgcttgctcttgttgctttcatatcctttgaatttgtaaacaattcggttgtgtaactgatacaaggtcgcagatatctgaatgg

SEQ ID NO: 79732 - DNA, 900 bp, Citrus sinensis
  Intron number 2 from transcript orange1.1g005213m (locus o range1.1g002868m.g) derived from phytozome v7.0 (chr-ID sc affold00016; pos 1571830 to 1572729 reverse strand)
cactgtaagtatctaatctgctgattcttacttttctgcttcactaagatgacagaaataggttgcgtagatggtatcactgctattgtgttattctgcacttatgattacatatgaaattattgaggactgctagcacatggtttgccaagttacaccccattacccttgtgtcagaagatgctgtatgagtttttgactgattctcatgtgcagaaatttagagaaggctactgttttaattaggttatacaaaatcttaaaatgactataatggttaaactttggaattcataaatttatcatagaaatcttacatattcaaggaccataaatccactatggtacttggtttgtagatagacacttaaaattctagtcaccatgcaatatgtagtcttctgtcaggatcgcatcttttgttttgttgatggcagtttattgaagattgtggcctagtcttaggaatattctaaattatttgcttcctgatgtggattgttcattttgttgatcttcctcaatcaataataacttccatagatcagccaacttctctgtaatctgatagtgcaccgtttcctcccatgattattatcttaatctttaggcaaatctataccatatgatctaggacggttggaagggtaattcatattataaattcctgtaatcatgtaatagtgctaacatttaatctcattttacctttttgtctgttcatcaatgtgtaccttttcctcaaacactttccgcttcagctgtcattggtagcatatatattttgactgcgcagatttttccttctatgaattgcagcaaataattctgatcaaacaaaggatcaggatctcctttctcatctgttcaggaacctagctggtgtagttggtaccagca

SEQ ID NO: 79733 - DNA, 616 bp, Citrus sinensis
  Intron number 2 from transcript orange1.1g007385m (locus o range1.1g007385m.g) derived from phytozome v7.0 (chr-ID sc affold00457; pos 92815 to 93430 reverse strand)
ttctctccttccagcaggtaattttgaattggcttacatacttaccaattcattcctatagctgtcaatactatgattttttctttttgcttgttaaagaagtccactgttgccttatttcaatcatgaatactttcaatggatgataggttgtgtaagtattacggttgtggcttaccacaggagcatgcacgtgtgtgtgtaaaattcaaactgaaactccacttaacctgcttggagctcatagtattagactgttagtacagaaattcttgtcagtttttagacattagtgatggtaatgctatcttatcaatcattcttagtagaagatcctatctgtgaataaatttctgattttttttaaaccctggggactacagtggggttgagtttaagatttgaccttactgagacagaagcttttgcactcctgaggattgttgggttgctcggagtgaattacattgggttgtttgtgtgacatgtttatcagtatatgagtgattaactgaatgtttattgatcaatatcataataatagagtagactgcaaaagattaattttgggtgtctttaacgtcattcctcttttttcttttcctgttttccacag

SEQ ID NO: 79734 - DNA, 701 bp, Citrus sinensis
  Intron number 1 from transcript orange1.1g009998m (locus o range1.1g009998m.g) derived from phytozome v7.0 (chr-ID sc affold00047; pos 245214 to 245914)
catttgtctttgcctgtcacaccaccagagaagaggtctcatctcgccccattttccattcttttattttcaattttttttttcattagcaatcaatttgagcactcgagggccctttgtcaaaagggtcttcttttcgttttctctttcgctttcgctttcttgtttcttcttcttcttcttcttcttctggtaaaaaattccgccttttatgtgcttttaattttggttttgttgatggatctcatctgggtttgattcgtttctatctgtttttgatgtttctcaattgggttgaattcagattgtgatttgcatcttagttacacgttgactttgttgttcttggatttgtgtttgcatgttggatgcgtaaaggcctgatcttttggctttgatgtgataaaataaatattgctaccatatttttaatatgattttgcagatgggattccagactagatgatctgtgtagaaaagtctagatctttgatttgtgtttaatatttttaatcgaactgtatgcttattgatgcttttaatctgattattaggtaaccttacaaaatcaataggttttgatctaatctttgttctcatatatattttttgtgttttgttttggcaatatgatcttatgatgtgtatgtaattgtttcgttttatttgtagattacctgaggcctgttctttgttgaata

SEQ ID NO: 79735 - DNA, 646 bp, Citrus sinensis
  Intron number 2 from transcript orange1.1g009998m (locus o range1.1g009998m.g) derived from phytozome v7.0 (chr-ID sc affold00047; pos 246254 to 246899)
gacgaactaagagcaaagagggtgagtggagttatgtattatcaaatgcagcatcattgcatcatatcaacatatcattgtttttaggattttgtaataagtaatcagtatttaaatgattcaagaacccataatattaatgagtgtcatacatcagcttgaaagttgtagctaccaaattaatatttaatgagagtcatgcatcagcttgaaagttatagctaccaaaatgcatgtgtataagaaatgtgatctttgaatctgattgcttattaatctaaagataaatgaatatgccactctattttttcgttaaaggtaatttttagatcgtttatatttggtttttattacaagagataagatttggttttctttttgtgtgaaaatatgaattgtagtgaagagtttcctcaaattgcgaagctgatggacaacttcttccaattattatgttgaataatttttctgcttaattacatttcattgctccagtgttattagcaaaaactccaaaaatctgcccaatatagaaaaaataatctctgtttgtggacctgttaaagattaattttgttattgagtttttctttcttctctcatgcagggagttagaggggatttagctgctcagctgaggtctctg

SEQ ID NO: 79736 - DNA, 726 bp, Citrus sinensis
  Intron number 1 from transcript orange1.1g002511m (locus o range1.1g002496m.g) derived from phytozome v7.0 (chr-ID sc affold00258; pos 192253 to 192978 reverse strand)
tgatctcgatttcgcaaatcagaaaatcgaaagtgagtcgtctgatccgtttgatcatatcgtaacgcttagatctgatcactagattcttcgatttcatttcaacgtttctggtttcgtacacgacggtatgaattttagccacttgtttagtaattgaacgccacacttcgtcagttttaagtttctaaaccaaaacgcggtgtttaattgagggttaagatctggtgtctgttttgatctgtgtgatgtttgtctgtgtttggctgccgagaaaatggaggcaagtaaaggagaaagtgtttgaatatttaaacttgattttaggcttcaggtggtatatgtcatcgcattgtttctcattcgtgttaaattgtttgagtttttagccgcttattaagtaattgaacactgttttgtacgtttggttaaccgttactgttagttagcaacaaagggggtttgaattgagctaagatctggtgtgggattggatccaattggaccatggttttgtggtcaagaaaattgagaaataaagaactagtggaatatgtcatctagttttaggcttcacttgttgttttaactttaagcaattgactggagcattagtggtttggattagttaatgatctgttgtttgatattttactaattatttttgtttgtttttgttgtgtgttaacagcctctcagactcgaaatcaaggtactgaaatttac

SEQ ID NO: 79737 - DNA, 492 bp, Citrus sinensis
  Intron number 1 from transcript orange1.1g037097m (locus o range1.1g037097m.g) derived from phytozome v7.0 (chr-ID sc affold00007; pos 503682 to 504173)
taaccactgtatccttgaagcggaaaaagacagaggtattttaaattccaaagtactaattgctttaataattaatatagatttttatgagctatgtcattgctatggatgttttgaagcctcaaattctgtcctgtgatttcctgaaattattgtgacattccactaatgtttattttgagctattgcacaggaatcaaatgcagaattaatgtcattgaaatcccttaaacgtctttctgagtcaccaaaggaaagcaggtcacatagtactttttgactgtatcatcatctaactgtaagtttttggttttggttgtgtgctggaattatgtgtttctctaaaacctacagatattttaaagaatcttcgggaagagttattgaaggaaaggtatcttactcaagaaagcttgtagttcaacacatctatggatattgctgaaagaatattattttacttaccttgatgttttggccaggtctgcaatc

SEQ ID NO: 79738 - DNA, 616 bp, Citrus sinensis
  Intron number 1 from transcript orange1.1g003025m (locus o range1.1g003025m.g) derived from phytozome v7.0 (chr-ID sc affold00007; pos 941436 to 942051)
agccaaaaattcagcactgccagctggcgttactggttatcctactggccgaccttatcctcttcattttttttcatctcttttctacattattctatctgttatctttttattatcctaaaaaaaaaaaaaaatttaaatatttacaatgaaagaaccaattgttttgtgtttagagaaagaaaagaagagagagaaattgtaaatgtggctcttgaaatagaagagaagaccaagccaaaccaaaccctagatttctttcgtgctactaaggggaattttgttttgttttgttttttctttttctcagcccatctttgcgttaaagattcaaacttttgttctgaaagtgggttaaggtttgtttttttttttttttcactggttcaagattgttatttggattatgtaacagtgagttccaatgtagttttgtgtatgcttgaatatttttcgtgtttggatctcatttggtgataatatgaatgattgtaaatgtttaattacgtgtatttattcattttgcgtggtttttgatttgcgtataggtgatgatgttaatttcttgataacgtttacagatcctgccgagttacagagatttcacgaaaggacc

SEQ ID NO: 79739 - DNA, 613 bp, Citrus sinensis
  Intron number 1 from transcript orange1.1g026541m (locus o range1.1g026541m.g) derived from phytozome v7.0 (chr-ID sc affold03054; pos 6733 to 7345 reverse strand)
attacctgactcttaaggtaacttcgatgtaaaatcggatctactatttttttcttcacattctttacactgtataattaatgcacaattatgagttcattttagttcacgatcaatattcagtcatcaatttgatccgctgtgagtttatttccacttccatggttctgctttgcttcgtaattttgaagtgattcgccacgcccaagctctttgaactgatcttatgatatgtacaaaacataaagctcttttgagctgaacttatgcacaattattcgctttgttttgatttggttaatctcttcctgttcatttaaatttcgttttgagtttcctctgaaaaacattttatgtatagggatttagaatctgaatggctgtttgcttttgtctatcagggatctagtttgtctctttcttgtccttatgtttgactgaataaattatgtttttggtgattgtatcaggtaggaagcttgaaaaccaaatacactgcagaaaggtttgctgctggagttcgagaaacagtctgataggctatacataaatcaggtcataggctagctcctgttggagacttattgtgatagcgttattgcaaattctgagc

SEQ ID NO: 79740 - DNA, 898 bp, Citrus sinensis
  Intron number 1 from transcript orange1.1g006063m (locus o range1.1g006063m.g) derived from phytozome v7.0 (chr-ID sc affold01047; pos 27719 to 28616)
tgatcagtaagttctcttttttatatctttttataatattattttcataaagttatttctttgtttattttattttatttttgtttgctcatcttttgatgcataaatgaaatgggatgaaattgttgtgcaaactaagctaaaggttattttttattctttttttatttatctgggttttcgtttgttaagtgttttgttgaaggaaatttgctagttttggttaggattatttcattttcatttgtacttttagcatgcttattctttaaatatttgccacaaataataataataataatacttttattattatttttttttttaattttaaatttatcgcttttttcttacttcagagtttgctgttactttttgctttggatggtaaagttgacaaaattatggatgttatgatttatgttagaagagtgtaaagttgaagctaactgagtttaagtgggatctgtttttgaatcatggaattattttaacttcaatttcagttttttcgatcctaacctgtttctagagaattcttttgcaccctattttttgtgttgtatatatttatgagtcatttgttagagatcaagttcagtaattttttttagctgaaatttaggcttaattgaagatgattacaggaaattgaatctcaagttaaataataaaatgaaaattctttatttatagttagttgtagcatcagaatgcatgatggtattacttattcttttttcagttattttggaattttgtcttatttacccctcttgatgaaattgtttgtatgttcattttgtttgtcgtgactacttataagctattgttatgttgataagtatggcttattaataattttctttgattattgatagagtttctgaggcaaaag

SEQ ID NO: 79741 - DNA, 705 bp, Citrus sinensis
  Intron number 1 from transcript orange1.1g032231m (locus o range1.1g030448m.g) derived from phytozome v7.0 (chr-ID sc affold00007; pos 1318906 to 1319610 reverse strand)
tgcagacgaccaagtttaatcgaacaacaagcgtaagtttcttcgaattctctatttgtagtgttaaaattctcaagggtttattcttttcttataaattttatgagatctcgttggctatgcttcgttttcgatgtcgacgatgcagatccgacttgtttacttcaaatatgaattgggcttacttttgattcttgtttaatgttctgtaataactttaaggatggtcccaggtttttgtttgccacactttgtagatcttatatattctataaatgacctgggttttattggttctactgaagttgtgtattatttagattgatcttagtttttgatgtattatcaactcatggaaattggtaaagtaaaatgatctaagtttggagataattggtagtcttgtgcagttgaacttctgaattgctaactgtgattagatctcgattgtgactggatgctataatgttatgtttgagctgttattgccacaacaaagatgtcaaatgcaaaatttctaactgatcagttttaagagtgttgttagaattaataggccatagttacatggtcaaggttgggtggttgcttctttttatttgtaaatgaggagtagaaaggttgatgtgaagtgattcgcattgaatggtggtctgaatatcttttgtaggatacttgtccgtccataaagaatatccttctcct

SEQ ID NO: 79742 - DNA, 521 bp, Citrus sinensis
  Intron number 1 from transcript orange1.1g008491m (locus o range1.1g008491m.g) derived from phytozome v7.0 (chr-ID sc affold00010; pos 214864 to 215384 reverse strand)
tccggtgacatcgttgccatctctgcccttaacaggtccactttctgtattcaacttcgctttgtttacgaaatggtcgaaacttctgatttttgatgtttgaactaaagaaaagtatgaatgcagaatctttttttttttttttcagttttagaaaacaaaacgcgtcgttttagttgaacgagtccgagtattgtttaactgaattactgtgctaattgagcatatatattattacattgaagtttgaatagaagccatcgttcttttcttgcttaattaaataagttttcaaatgtagaaatagaaaatttagtcaatttaatttcttgaaatcgagtaaaggctaagttcataagtacttttgcattagagcactttcatactgaatcaatgatggttttttttatctttacatgccttttttgtgagctccatgcttcatatttgtttgtagttattagctttgaccattacttgtaagctagacgctaacgagcacacggactgtgttgcagtga

SEQ ID NO: 79743 - DNA, 561 bp, Citrus sinensis
  Intron number 7 from transcript orange1.1g020247m (locus o range1.1g013058m.g) derived from phytozome v7.0 (chr-ID sc affold00010; pos 2067399 to 2067959 reverse strand)
ggtacatcgttagagaatatatctccaattcccaggtgtggcttctgatattcttttcagtgatttctctgcatcaaaattctgcacgtccctgtctttgattcacgggtatagaatctctttgtaaaaactgaactgagtgaagtatcaggaggacaaaagaatggattgacttatctttaaatctcattaggatacccaattgttcattttagaactttgatttttatattatgtacatggttatgtgattaaagagttcatatttagaagtatgtatatcttttttcttttagaatattaactgccttctttgatttgtgttctgtttctcaatagatctctatagtaactgctaatacaaagtagaactaaaatttttttttcttcagtatttcattagtctatgtaatagagataaaagttcactggtgttctaagtatatgtgggacagcacgactctatgcttgcttatggtctataataccaataatatattacataacttttctcattttcttgcaggaacgaggcataaatcaagcagatctgatttcttt

SEQ ID NO: 79744 - DNA, 427 bp, Citrus sinensis
  Intron number 1 from transcript orange1.1g020247m (locus o range1.1g013058m.g) derived from phytozome v7.0 (chr-ID sc affold00010; pos 2069512 to 2069938 reverse strand)
tacgagaatcccttcatttgcgaagccattctcaggtaataaacatttattattttctaatttcattttttttgtcaatttaattaccgtaactaaagtaattgtttgttaaattgctactagattattcgttgaggcaacagcttgctgaactcaaacttgcaaaaagaaaaaaagagaaatgaaaattatgttttcatcaataacttgaaacagattcttttataggggaatgcaaaaactttgtgtatttcgtttgcaaattttcatcatatttttggatgagcatacttgtaatcaaaacgtcagattttttgtattttaagtgccgattttttcttgcgagagttatgatacagtgatgctttttttttcttttcttttcttttttgggttctcaggtcactgccaccactagcaaagaagt

SEQ ID NO: 79745 - DNA, 469 bp, Citrus sinensis
  Intron number 1 from transcript orange1.1g011177m (locus o range1.1g006037m.g) derived from phytozome v7.0 (chr-ID sc affold00035; pos 687058 to 687526)
tttttatttttttatttgtgggttcttcagtttaggtaagattgctggtaccattttgtagatcttcttcattttgttgttttcttttctttttttttttttctgtaaaaagcttgtttggtttctgggaaaatgaggaataagaaaggaaaatgaagtgaaagtgtaggatattgagtcagttatgtattttgtattggtttctaagattctttgcaataaagaaatgaaattgaactaagctagatagtcgtacagcactcaacagcactcagtttagcttaaaggtgaattttgatatctaaaatctgaaattaaaccagtggatcattgatgttgtttcattatgctattttaattagttgttaattattttgaaatcaatgtattttctgggttctttttgttagagtttaacttgaagtttttaacaggagaaaaatatatcagtggagattgagtgggaaaa

SEQ ID NO: 79746 - DNA, 764 bp, Citrus sinensis
  Intron number 3 from transcript orange1.1g029633m (locus o range1.1g029633m.g) derived from phytozome v7.0 (chr-ID sc affold00004; pos 684349 to 685112 reverse strand)
tcaccaaaaaagaagataaagaagttgcggtgacggtatgtgcattaagttaattactggaattgctttgttgaattagtaagatcctttttgtcacaaccttttcccattgaattaccagcactttcctccatcattttagtgctcaatatttgtaactcatgattcattatttaatcgttccttggtattgaaatatttatggtctttggttaacttagcagcaaagaataaccgtaatgacatattgccaccaaatcaactaagcctaggccttttcagctatttatctgataaactttaaatcataaatcttgcttttatttgaagtcctaatttgactaaatattcttgcctactattgttccaagatgaaatattcattttctgggtaaaactggacaactaatgtcttagtaaacctttgtcttaccatatatttcacattggatcagttccagaagtaccttgtcgtgagtatgatggtgaaatcatcttgttagaggcacaagaaatcaattgttagttatcaaatccataattaattagaacttataagcttgcatagtacctgtccttctcaaattctgaggtctacctgatgtgttgcagctataatctgattggtccttctgaaatatctttttttttggggttttggtttttaactctgtgcttgtatctgcttgtttacactgttaataagtctctatcgtttttgtttttctatggcttgcagtatttagaagtgagggagaaacaat

SEQ ID NO: 79747 - DNA, 651 bp, Citrus sinensis
  Intron number 2 from transcript orange1.1g029633m (locus o range1.1g029633m.g) derived from phytozome v7.0 (chr-ID sc affold00004; pos 685097 to 685747 reverse strand)
cagtgacattggagcctgctgagggcgaagtttgtgtatgttttcatctgttgcccccttttcttttctattcagttaatgattttaatgtcaaagtttattggagcaatggagcatctttaaatcccctttaatgatgctccaaagccgtgggaagcgggaactttgatttattgtcagcgtcactctgtaatttactctatatatgtttccactagtggagattaaaaaaagtattggtcattctccgatttttttttttaatggttaaattgacttacgggtttaaggtgcattactgcaatgatttttgtgagaaccgaggtctctgaggttattctagttcacttcttttaatttataggtcaaaactatgctatttattggttctcacacgttgacaacgaaacaaacaattgattttgatagttcaatgaatatgaacttggatccatagagtgtattaggcaagcttatcatttatatgtgaatgacaggctatattgtgtcctctatttgctttagatttttaatgagtcgtgttctttgttataaccataagattatcaagtgagatcattttgtaaaacaaattctttggtttgcgagttcatagtggggagctgcatacaagatcaccaaaaaagaaga

SEQ ID NO: 79748 - DNA, 426 bp, Citrus sinensis
  Intron number 2 from transcript orange1.1g025157m (locus o range1.1g008695m.g) derived from phytozome v7.0 (chr-ID sc affold00474; pos 39021 to 39446)
cttcaaatttggttgccacatcgcttaccaatcgggttagttttcaaatatctcagagttttttgtgcttgtgcatcactattatcaaatgttattttgacagtaaatgcagttgttttttttttcctgaactaatatcagatgttcaataaatggcattacaactcggggaaattattgatatgcatgctttgcttagggactatgaattactttaggcataatttaggaaatgttgacatggcatgaattacattcattatttatactaacattatatactgcaccattcttgccttttccattttctattttgtgtagaaaccatccatcttctattttatgttttctatagtgataataccattttatgattggccttttatattgcatagtttgacattgcagtatttttgcaggataaaa

SEQ ID NO: 79749 - DNA, 834 bp, Citrus sinensis
  Intron number 1 from transcript orange1.1g023418m (locus o range1.1g023418m.g) derived from phytozome v7.0 (chr-ID sc affold00047; pos 509765 to 510598 reverse strand)
aaggtatctttttatctttcattacaattcttattatcataggtacccacttgtcgcatgaagttgagattgacatggcaccattgtttttcatgtttttgactgtatgggtagcaactgggttcttgtaatttaaccttctggatgcaaaagattcattttttttaagaatgcccttaatgttaaaatttggttcagctgagagctggagaagtcagagtttcagaatttgaccgctagtatacaaaattgaattaaatattaagatggattcaggttcatgcttagcaatgaagaggaggattgaggaaaatggaaaagttctgtctgtgtaaggtggcggttatcttgattacttagtttatcctttcagacaacttattttaggccacacttttatcctagtcgaggggatgcactcgcgatgcatcaaggccaattccatccgtggcttcccaccccagtttgtccaaattaaggaatcccctcagaaatgtgtgtgagaggagtagaacccttgatctcttgcttccaatccaaggctaaaccaatggggctgtgatgtagggactttttttaatttataaggtggatagattatgcactaacatggttgtattgttgaataagttttttaatttcatctttattattgatttaagaaggaacaagttgtatgtatcaaccaccgttaccttgtcttacttcaaaaacaaagtagtggatggttaatattttatagtgtcaacacttttcttccctttgtctttttcaactatggagctctttgtgattgcaggagaaagtattgggctcatctcctgattctggaaa

SEQ ID NO: 79750 - DNA, 909 bp, Citrus sinensis
  Intron number 2 from transcript orange1.1g024873m (locus o range1.1g024887m.g) derived from phytozome v7.0 (chr-ID sc affold00225; pos 133840 to 134748)
gcaccatacaggagagggtctcgtcggggttacaggttttctaattttgatcataaacttgttttttctttctctttattggggtggggggtgaaggagactgttatgtctttggtggaggttgtttttgtagctgaccgttattctagttatggttgatgattctacatgattatgtcttcgaggatcttcagaattgtttttagcatttctgcttatgattgttctcatgctaattacttggttaactacttttaaactgtctcggagtttcatacaatagcatcagtttactcaagtgtgttattcagttatttacctaacgccatcatggttgtggagatacttctttccctgccttctgtgtggtgttttatgataaaactatactggaaatttggttttgtgttttgagttgttctgtggcaagttatgtcttgaattccttgtcactgaattgcattcaagagttaatattttcttgaaagtaatatttatttttactgtgtgttatagctgtttttgtattatgtcctggattcttcttattaatgcttttgtcggtcatttattatattggctacttaactcttttgaggatacccttctcttttatttggaaagccccaaaaaaccaaagagtaagattcttcattattcattaggatgaaaagttcttaaggtttcatgtttttctaacaccaaacgaagaaaaaagggctcttttattttttctattttcaatttaccattgttcaaaatcaatttaaaaatggggtcctcactgttttagactaaaataattctagatttactttgtaccatgcatttctttttctgctcaggaattaatcttctttgcattttttgtcagccaaagtaatctttgcaagaattgcaaacggccag

SEQ ID NO: 79751 - DNA, 735 bp, Citrus sinensis
  Intron number 1 from transcript orange1.1g027914m (locus o range1.1g022174m.g) derived from phytozome v7.0 (chr-ID sc affold00082; pos 380987 to 381721)
tctctactaatcttgccaccgctgaaaggtcctacttcttagttattgtcctttttccttgttttcgtttcgttgaatcttcagtttgttcgagatatcattatgtacttgaagtgattgaagaatttgctcttgattttgatccataaccagactccgagatatcatttttttttaaccatgtcttataagttcatacggtctcactaacaataacctttctgtattgagtagccaaaaagattgtttttggactgataatccatgtttttcaagtttatcttgcacattgtacactgaagctgctagtctgttgactaaagagtttgatgttggcagtttagtgagctgctgcactcagtaagttagcaaaagtggataattttgatccaatagcagtagtgtaccagaaagagtatgaaagtatgcagcttaccatttgaatgctatttgcttttcgtatttgctattgtaaggcctgagttttttggaagttttgttttctttgatcactcaaactttcatctattgaatcatcctatgtgtgcgtgtgcatacgccttccagtgcatgatcttgtgtgattatataggtgtatattggttgagtctttcaaagtactacttcagacaatagaattctctttaaatttctgtttgccaccaattagcttccccatgatgtttttgcatttaacattccatgatatcttatgcaggctggtcagagctgctc

SEQ ID NO: 79752 - DNA, 425 bp, Citrus sinensis
  Intron number 1 from transcript orange1.1g015359m (locus o range1.1g015359m.g) derived from phytozome v7.0 (chr-ID sc affold00370; pos 165823 to 166247 reverse strand)
gttgtgatcttgaagagtgtcctatttgcttcttggtttgtgtttttctatcattgtctttcttattagttgttggtcatttggttatttgatattggccttcgttgacctcctctgcttgttggaaaattgaggatgaaattatgatttaggtctgtcaaccaataaaaattttcaatttcaccgagtgggcatgaagtgcaatctcaaccctgttttctgctaggggtctgttctaggaaaaaatatgaagaatttttttatttttgatttgatgtctgttcctcaatgtaccaaccagaggagaatatcagagccaattgatatagattagtttgatggccttttaagtgtttaatctaactaaaccaatttggcctttcttgcttctttctgtagtattatccaagtctcaacagatcaag

SEQ ID NO: 79753 - DNA, 625 bp, Citrus sinensis
  Intron number 1 from transcript orange1.1g044590m (locus o range1.1g044590m.g) derived from phytozome v7.0 (chr-ID sc affold00070; pos 26082 to 26706 reverse strand)
ctgatcttgagcgtcaaggtgacttcctttttttttctttttttttaagatttttagtccatccttgtgtattgtgttgtgattgtttggttggtgggagaatgaaaatggaaaagaagaaattgatatggggttgtctatgtactatgtttctggctggaacgagatttgtagctctgttcattaattagaaaacccatagattgttgataagctgcagagtaaaccagagataaattttaatgatttaggccagaagaagatgaattattggctaaagaaccaagcttattatatttgccaggcttagctggttttgtggaaaaagggttatgctaaaatttcttacataggcaaggcagttatttgtcttggaagttttgattttatttgttggtgacacgcacgcacgcagagggtatatctggctttgttttaaattcgagacaattgaattgcatcctattgaatctgcttggaaaaagtcatgaagaggaacaaaacaaagtatgttctcatgtttatcctccaaataggccaggaaagattcaagcttataaaattttgaacactttttttcttcatcgcagggggtctggagggggggaaaagcagtcaccattct

SEQ ID NO: 79754 - DNA, 933 bp, Citrus sinensis
  Intron number 2 from transcript orange1.1g027852m (locus o range1.1g027852m.g) derived from phytozome v7.0 (chr-ID sc affold00010; pos 352485 to 353417 reverse strand)
gttcgggttcttttcgagcaaattctggctgcagagtatgtatatcagcatgtaattgtttcattaatttttctgttttaatttagtcgacttaaattttgccaggctgtgattacctaggttttagtttatgtttcgtttaggcagaggtatacattgacttgagttgttatgaaaaatggaaactcagtgaagtcattacaatatcaattcatcaattatcaaactcaatttggatttgtgatctaagtaaccatgaagcctcatttgtagcagttgacacaataaacaagcaaggtttggatctactaaatcgtggcttcaagttgtataattatcttaatttagtatggacggaggatatggggtgtgagcatctaggaaaggagcttaggattaaacatcttggaaaggttgagactattcccttgtttcatttgctggaaacaaatattttttgagctcatccagacaaaaccattcgaaaggcacttctgtctgaactgaattaactttcaatgtcaacttgaatgtattttaggagatggctatgacagatctgattgcatttcctgttattggaacttagtgctatgtttgacgtgtcttgtttgtcatctgtaatctcatttatcctgtaactgaaataatatggaggagttgaatatttgatgtgctttcctagatgttattaacctttaaaatcttttatcctattggttgtttaataaccaaataaactcttaataaagtatcaagatttagatgtctaatatctctgcaggacctaaagttcaagcatattgtaatttgatgtgatagtggtaataggtggttaagattgcagaataattaatcccttttaaccttttcttttctctaaaatttcttatggcaggggaaattccttaaaggatccagcatccaaggctt

SEQ ID NO: 79755 - DNA, 783 bp, Citrus sinensis
  Intron number 2 from transcript orange1.1g018532m (locus o range1.1g018532m.g) derived from phytozome v7.0 (chr-ID sc affold00027; pos 1133288 to 1134070 reverse strand)
aatcccgtgtaagattttcactatcttacttcatttatagtttggtttgttttcaacttctaatttgcttggattacaaaaatcttttaccatttgctggatttggcatgtattagcactttattatgtgataatatcgatagatttagagtcagttatgtagaggtaagaaatcaatgtaggtgctggattttgagatatctctgcttttgtatatgattttgatgtatttactgatgtttgcttcttctgtgatggttaccggcacaaaaagactttgataacgattgtactagaagttaggatttttctaaaaaaattccctctgtcggcaatttgaattttgattctccaaatgttcattctggggtttatcttgcttctttcgctggtcagacgtatgtcttcagtcttcagaatgcctaattaaagactattggaagcttaagaatattttctaactgctacattggtttccttaacttacctaccaaagtactagaccatttgtatgcatactgcaagcctctgatgaattgatcttctcatccttttgcctgtgatcttaatgtcttaaactcttgtcatttgaaatttcatatcctatgcttaagcgctgctcactttactttgttgcaatgtgcatttcttcgcattgcatatcagaggtttatcctcatttctaggacgattccctcaaatttgtgcctgtaagctcataattttgtttttcttgtaatttgaacagccttctgattataaggagtttgattttgaattctc

SEQ ID NO: 79756 - DNA, 808 bp, Citrus sinensis
  Intron number 4 from transcript orange1.1g023165m (locus o range1.1g018031m.g) derived from phytozome v7.0 (chr-ID sc affold00007; pos 554754 to 555561)
ccacccgtgtatgttacgcgaatcttcaatctcttttggaaccttttctaaacacacaagagatttcgaaataaaaaaggtcatttttgtcatactatcagccactgaattaacggatctaagagcatagaccaactatgttggttttccttgtccaccaaagttttaactttactaatcatccaatctattagagataattttgagaataaaattcacaacgttcattgaatttctttgaagtaagataaatcaacttgctatgcgagtaacaacatttaaatcctcatattaattacatttagaatactgatatagtttatctatttacagtgaatgaattcctaggaagtaggaataaatgaaataccccttttggattcacttgtgatgtgagatttctaattttaaatatcattgtcattttcacatgtttattatgaatgatcaacatttaactagagtttatatttttatctgttaacaatcacctatgaattttattatgaagaatggctttgattatatgagaatcttaagtactttcatatatatctgctcaaaattacatataatggtaattttgatcattccgatcatagttgggttaagggcttatatgattattattttcttttttttaattaaaaaaaagcgcctaattactcaggcttgcgcagtttcatgtagataattgacatggttaattgattaccctaatattagtttggttaattcttaattatcattttggtcgcaatattatgtgatagttgttgatagaggaaggtgcggtggagctggtggt

SEQ ID NO: 79757 - DNA, 1026 bp, Citrus sinensis
  Intron number 1 from transcript orange1.1g030050m (locus o range1.1g030050m.g) derived from phytozome v7.0 (chr-ID sc affold00038; pos 626836 to 627861)
ggtcagaaagctgttaaggacaacaaattccccaggtacgtaattagttaaatgaattacaacttcttgatttcatagattttgagttggtttttgatattgttaccttcatgcctagtataatatattcaagtacatcttagccttattactgctttaaggattctccaaaaagtgagatttcatttgataaagaaatcaatttatcttggttgcggggataagagcttagtgcaattgttcttttcagattagggttagctccggatccatgtaagatatatgcaggagcccttgcttggttgccacataagtaaaggaattagattttaattagttctaatttagttctagggtttctcactctcccccgaatttcctttctatacgaatcgttttggaagagaagaacttagacaggcaagagttctagatcacagtttcaactctctgtttcttttttgtacaacaaattagggcatattaggttttctcaaaatgtactctaaagactgtagtaaaaggtgtaatcaaattaatacactgactttcttagatgtccaaataagaaaatctgctaattagatcttgggtttctatgacactgcaatatcaatacacacacaagcacatatacgcagagagaagccccaggaatttgatttagatatccgaaaataaaaaatgaatcaactgaatttatcaatatagatctcacagttatttccatgtaacctaatctaatttgatatccacgttcagataggtaggttcagaatgaaacatacgactctctttccagtaaattcctccactctccatttccattttgatgcatctagaaattgaggtgccgagaattatattaagcacatacagctgttgtaattataaacatacaatacagatcatttaattatgtcatgatcagttaatgatagtttttagtgagagtaatgaaattcataatacgattattaaatttggtatgcagaagctactaccgttgtacacacgaagggtgca

SEQ ID NO: 79758 - DNA, 288 bp, Citrus sinensis
  Intron number 3 from transcript orange1.1g013085m (locus o range1.1g008797m.g) derived from phytozome v7.0 (chr-ID sc affold00007; pos 438660 to 438947)
cgcatctcgatttgatcgaggaagaagagcttggagtcagtatttattttttgaatttgtagtttgtaattatatctgaaatttccgttcaatattttatattacatttttttttaatttatgtgatttgttcattattttcttcttctttttcacttgatttgtgaattagtcaatggaacataacttcttaggtgtcatgttgtgagtatgaagtgaattaactaaatgaaatatgaaactgattttgcaggttcgagtgcaagcaattaggggactccctctttt

SEQ ID NO: 79759 - DNA, 917 bp, Citrus sinensis
  Intron number 2 from transcript orange1.1g000351m (locus o range1.1g000351m.g) derived from phytozome v7.0 (chr-ID sc affold00010; pos 457980 to 458896 reverse strand)
gacagtctggtctggctccatttgaggtagattctcgggtttataatagttaattacttgttgtgatatcagtttttactttctttaatgtcatatcttgtctccctatttattatcatgtttgatatgcctccctgtcaacttgaatggggaacagtgttgcgtatatgggtatatctcttatgtacaatggagagaaaccaaagggctccaatatttctttcaaatagaatttacttgtcagtctgaaaaaaatagcatctactctcgtccttcctcatctctttggtgaatgaattttgcttagttttaattttagtcgttctacctagttgcttgaaattttttgaaagatggatttgcacttcaaatgtgtattttttttatagtttttcatttaaattgaattttcagcatcaatcccatgtcatatttacttaccagcatttaaacatcattcaaatatatcactagcatgctttccggatgatctctctgtttccgtttctgaagtaaaagatgcatatccaaccaagcaggaaagaatgagttgttttgggtgtataaaatcaattagtccttgtattttgatatttattaggcagtatctctgtctttggattgacagtatttgcaaaatagtgttgaaccttgcagggaaaattgggacagataaaactgattatatgaatttcatagtgtttatacttgcactaatgcttgccctgagtgaggaagctacctgcattctattgttcctcaattaaaattttgtctgtcgatctgtttgtttgttatcaattgttttactttgcagtcatgattatttgaagactgcgatgtccatttccagaatttcttaatttctttgttttacggcagattttgtccctgattattgaggctctttgttggtg

SEQ ID NO: 79760 - DNA, 575 bp, Citrus sinensis
  Intron number 1 from transcript orange1.1g019024m (locus o range1.1g019046m.g) derived from phytozome v7.0 (chr-ID sc affold00533; pos 99327 to 99901 reverse strand)
tcagctaaccctgatcgccctttcttcattttaaggtactatttttgcttttgcttttttatttttccaactttttagcttgtggtgataagttgttctaatggatgatttttacccttctacttcttgtttgattgactgtagttttactgggttctgttattattagtattattattattttttcttatgtttaagttagatgaatattttatgtttcgaagaaactgattatctgggtaattttattgttttacacgggagtaataatttactacctagcacctagtaggctagtacctactagcataggcatgtcagagagtgaataatttccaaatggtatttaaatcatgaatttctttcaaattttttggttttaatttatgttcctattagcagctcatgataactttcatggtccctatcagaatttcttcctatgcatttgttatctactagaattatttgcataatattaaacttcagttacatcttgctgcaaaatcattcatttatcacttttggtcatttttttaggtgtgttaattgctgaattggcacagtggataaag

SEQ ID NO: 79761 - DNA, 324 bp, Citrus sinensis
  Intron number 1 from transcript orange1.1g017732m (locus o range1.1g017732m.g) derived from phytozome v7.0 (chr-ID sc affold00415; pos 66695 to 67018)
gggtatgttctaacctatatggttccattcattcttgtgtctcttctgcatatacactctttgatttttttttttcattttaattttttcttttctggttaacctctctggtgttctgttgtaaatttgaaagtagttttgaacttttagctatgaacaaaaagtgtgctaggtgatatggtttcttagctcaaattggtatcgcaaaataaaagttcaaatcattagataaatatgaaatttgaataataattttgataagtaaaatcgccttaatgtccaaatcatatgcgctgtgtgtgtttgatgatggcagacaggaag

SEQ ID NO: 79762 - DNA, 896 bp, Citrus sinensis
  Intron number 1 from transcript orange1.1g019201m (locus o range1.1g019193m.g) derived from phytozome v7.0 (chr-ID sc affold00269; pos 94202 to 95097 reverse strand)
attccaaggtgtgtttttcttttcccttggaaaatttacttattttgttcattttgtgatctttttcgttcaaagttttgttgaaagatttgaaactcctgatgggtttgctgtcggtatatggatttgatcagtgttttggtttctgagagttgaaattttctctgattttgagtcggccacttgggggaaatgatgcatatgtcgattttttgtactggtttgttgttgttattgttccgtttgtatatggttatttgggttctgggattgtgttcttgataggggaatattttgccctttttcttgaaaatttgggattgttttgtttttggttttgatttcctgtcataggatgctatggctggttttaagactctgggttgcctaaagtttagattttgccccattgcttctacttttcttctctttttatgctgaagttgaaaagtcaccagttccgcttccagtttaaagctgttttcagtaggtttttgatagattttgaagattatttgagggtcttattaaaaaccaaagaaaaaaaaaggattattggagggtttgcttatgagtttcttttactattgttatcatcgttatcactttttatttatttattttttttggggggatttgatcaatttaatttggagggcacctttgatttgcatttttggttagagccttgacttttgcttctgtcccttccatattggcatctgctccttgattttctgctatgtaattaaagtgtgtgattgttcatatctggggtttctatagctcttctcttttatattgttttcagtttcttaacttctgtttggatagctacaaatcttggtaatatgttggcatgaagttgaagtctgatcctgtgattttctgtctag

SEQ ID NO: 79763 - DNA, 700 bp, Citrus sinensis
  Intron number 1 from transcript orange1.1g038314m (locus o range1.1g038314m.g) derived from phytozome v7.0 (chr-ID sc affold00046; pos 349127 to 349826)
aatcttctatactgcttctgttgaaaaggattgttagtttttctatttgtttatttattttgaagttggagctttagctgccatctttggcgttagtttgtgaatttattgaaatgtttctgggatttttttgtaacgggaaataatatctgggtttggatgtttatgaggaattatatctgggttttggatttagtgcttagtagtgttgatctttctttgtaagctttagctcacatatttgacactagtttaagaatttcttcattttttttggaaattgaattgggtttggaaatttgtgaggtttctataggtagcgtttatcttactatgacttgttaggatcaagtttgattctgatctaataaaatggtgattgttttgatgctgtgtatgtttctttttcaaaatggttggtttggttgcatagaaagggtaggactagaaaggaaacaaagaatttcgtggttgtacattaggttatttttcttatcatgactatcacaattgagaagttttcacttttctttttctggaatttaaaatgataaaaatgtaggatttacttttggtgacaggcctgtgtgttgagagtaatacttctcactaactattcatttcaattctctatagaagagagtgatttttattcatttggctgatttttggtttaggtattgttttgaagaaagcaaaa

SEQ ID NO: 79764 - DNA, 699 bp, Citrus sinensis
  Intron number 1 from transcript orange1.1g010724m (locus o range1.1g010724m.g) derived from phytozome v7.0 (chr-ID sc affold00067; pos 508059 to 508757 reverse strand)
gaatcgcttctgttcaggtagtttattttgtttaatgttgagttcttataacattttatgcaaataagatttatttatttattttttgaaagtaagtttcttgctatactttatgtgtaactggtgatgttggtagacaaatgttactaaaatagtctgcaattactaatggggtgtatagatttgcatctcggaatgctgttttatcgagttatatcgagttatgagtccggtttgtaggttttgtgctttaagtgtagctagtgatttggcttttacatgttttattgaaattagagaaaggacttcatagaaaatgggtattgaaaatgtctgtctttgcatactatgtgattgattttcaatcattaaaggattttttttttttttttttttggctacataatttttgtgtttcatttgtaattggtactgttggtgatttttgctgccattgtgatacagggcactgagacaattttggaattaatttctgtttttacaattttactggcttgtggctgtagaggttttccttagatatgcttttatagtggtgtaattttagattattaaggttgttgctagtcttagaggcgatgctttatcattgttgtttgattatcctctgtattctttttgtcttcaaaagaaaaagggaaatttgatgtagtgctgcttctggttaaggttgaaggc

SEQ ID NO: 79765 - DNA, 933 bp, Citrus sinensis
  Intron number 1 from transcript orange1.1g030368m (locus o range1.1g030368m.g) derived from phytozome v7.0 (chr-ID sc affold00271; pos 211520 to 212452)
tactgcttcgccgcattgcctgcttcggtagtaaagtgagtatcagtcattttttgtgggtttggctgtaactttttatttgtttgttgatttgatttgttataggaattttgaaattttattactggtttgattcaagttcatgcctagtctttgagttatccgtcgtctcatttaatttgatggaaatgattctggggtttcttaattacattctactttgtgacttgtagttgatatttagggttgtaatctcgaaacataaaatcttgttagtgggttgaattttgggcgtcagtagctttctcattttacatgtttgcaatgcaaatgaataattattcacctttcgatcagtatctaatcttcatcatatgatagattaacaaacctagaattgatgctgcagccaatattatttaatgttcttgcatacacatagtcaatgattgtggtgccacaattttttttggggcacaatgcctatgttctggatgcttaggagttttctacagtttgaacattctaattttttggccaataagattatctgcggccaatattatttaatgttctaggaagagcttctgtctgtctgtgtacgtatttttttgttggctgccatttattgatgtgtcttttgtgcttgattaaatgggaaatactagctattaatatcaagtcactatttgagcatatggattcattaaaggaaggctagactatgtctaaaaattgtaatgaaattctatcatttggctgttaaatcaattgcctagtttagcatttaaacccttggtggagatgtgaagaaagttttgatgtctatcattggtatcaagagtgggaagaaattctacatttttatttctgattagaaagataacttatgtggatctcttcaggtatattttgcctgggggttgcagtata

SEQ ID NO: 79766 - DNA, 814 bp, Citrus sinensis
  Intron number 1 from transcript orange1.1g026653m (locus o range1.1g022823m.g) derived from phytozome v7.0 (chr-ID sc affold00243; pos 15115 to 15928 reverse strand)
cagttgggatcgccggtatgtttctctccttgtttcttaagccgttcaaatattgcttttgtctctatgtgttgtgagaaacttgttaattttttttggaaaattagatgaccctttgctagatttcttgtttacttgagaaagagggtgacccctcgattccattcttgaaaaaactgatgcccatgaatttctctcttttttttctctctctctctctttttctgtagtagtgtttttggttcctggatttagctggaagatgaaacaagagcttgagagttggttaaaagagcataaggctttggatatacttatcaggcagcgttaattgtacttaatctctgatgattgtagcttaatgtacagcaatctgttgtcgattgactttttatggggccactttgaggggctattatagaagaactataaaattacagttgaattttgtgccaattctttttcaaccaattggtatccgtttggttgattgctgcacttttgcatgctttgattctcgtgaatgattattatttgaggcaaaatggacttagatgcttgtaatggcatttggcaagtttggtctttggaattgttttctgtgtaaatttcagaaattagcaatttgttgggaaaatgatctgatttaccaagaatgactagggggataataaaaccaatttatattaaattagaaaactatatatgcattttcctaaatatttgttaatatcaaatgcaattttggttgctattaaattttttcttgcttgttgcagggaacatctttgcttttgggctgtttgtctcacct

SEQ ID NO: 79767 - DNA, 766 bp, Citrus sinensis
  Intron number 1 from transcript orange1.1g034101m (locus o range1.1g033628m.g) derived from phytozome v7.0 (chr-ID sc affold00115; pos 322423 to 323188 reverse strand)
acgaggagggaagcggctctgatacttggagtcaggtacggttgatatctgcttgtcaaatgatatatgtatctttaatagcattagttgaaaattttacttgattcgatgttgtgatgttaatgtcatggaggtccttactcttatttgggtcttgtgtgggaagataactggtaacgattaatgtttcatttcattttgcgcttggctttcagttagtttgagctgctttgctagttccgaaatggacctcatttcaaattaaagccttatttgattacctaataatccagaaatcctctggggccttttatcatttgactttaagctgttgatgattgtttagttctgttaatttagagccagatgaagttgtaggtcgatgtgtaagtgtgaatatgaacccttgtttctcattcaaatttcgaaatcttactgtagctacatcggcaatgagttcttcattttagatttaggacaatgaataattttgtggtgaagatgcaagttaaactcccattttcttggtttgcttcgaattgtaaagccgctgttgtttaccctctaatattgtcattgacacaatgatacaaaaccaatgcttcttttcctgttcatactattttgtcccttctgcttgtgttcaatataattatgcaaattctgctgttaaaagtgtttcttttgaatctgagccttaatttctctctttaacttcttttcttcgtcagagaaagtactccaacagagaaggtcaaagaagctc

SEQ ID NO: 79768 - DNA, 665 bp, Citrus sinensis
  Intron number 1 from transcript orange1.1g027809m (locus o range1.1g022444m.g) derived from phytozome v7.0 (chr-ID sc affold00004; pos 2677917 to 2678581 reverse strand)
gccgatcaggtttctcttctcttctttctcccctttttcttcttaattttcttgcattatttttaagttaataaaagtttgcatttttggccttggttttggtgctaaataatgttcattaccgagtaagttaagtgttagatataaaattaatatttaataataataatgatagtactttggtatattaactaaaggggcatctctgtggagcgagcgagttgttctttttagctatatatttggcaaatttttatccaagttttggagattttgggattaaattgtagatttggtacacagcaaagaattggccttacttagatgtcttctttgctaaaatttaggtttagttcttggtgggcggttgcaaaattttgaattggttgatccgtaagtgtaagacattggcttaactcttgaggactttctgtgcttaagcacactacttagagtttctgggttgtgattgctggccatttgtcataattttgacattcattatgaaagagtgaaagcaagtgttacctttaatatgattgaaattagtgtgattaggtttttatataatttcatttttcatttgtttgcagctttctttccaagtttgcctttctcaaaacgaattgtcttttgtttcacagatcaagagagagatatctata

SEQ ID NO: 79769 - DNA, 634 bp, Citrus sinensis
  Intron number 1 from transcript orange1.1g019397m (locus o range1.1g012776m.g) derived from phytozome v7.0 (chr-ID sc affold00189; pos 191094 to 191727)
agtaaatcggtcaacgggtatatattcatattccgattccgatttgatatctatcagctgatttgattttgactttcagtgcttcagcttctaattttagcatgttagagttgtatatataaattgtacgttgattttgcttcatgagattcgtatttcggctttatttgctccaattagttgcttgatcttgtgattgatgctgtaactaatgttattattattataacaatagtcattttgccttgtgctcgaagtacgcccatagatcgaccttatttagggtaaatttgagattaagttgctgtgaaatgaaatcactatagctgttgtgctttggaagttaagcacaagcacaattgctccaaatatacatgcttagtttgaattaatcatgtaactcgattagctgtaactattacttctgctaaaatagacagttgtggtatagcacttgttcttttgaattattgagttggtgaagaaattaggtcaatcatttacttttacatattatccttatcatcttatgattttctttagtgtaggatacctatcatttggtctttctgtcacttctttctcaaatgatgacttgatgatatggtgtttctgttctttagtttattgggct

SEQ ID NO: 79770 - DNA, 757 bp, Citrus sinensis
  Intron number 1 from transcript orange1.1g010898m (locus o range1.1g009684m.g) derived from phytozome v7.0 (chr-ID sc affold00026; pos 1174897 to 1175653)
aagtaagctgtcctttttttttttaaatcctttgactaatctcatttttctaaatctgtgtggacgaacattttcattctgagctcacaaaattatccttttgtattgatactcaacttgtcgaaattatttttgggttcaaacctcttaagatgtgtacaacagttccctctgcgaacatgtaatcctgtattatttgatattaaattagaacaattgagtgccaaactttgttagtttgttgcaccatgcaatagataatgtttacttgggctagcgtacacattttgcaggtctgttacttgcttgaatgtctttgcaaaattgttaagggtaattttgcatgttttgctgattgacattccaagcagtgctcctgaaattcaagttctcccatcttattctgacgtttctaattgttccactctatacaattcattacaatgtgtccagcttacatgcaaactgcatcaaagtagagtataaaggttgactaaaagatgaacaaagtaaacagaaatttagtttaaaaaatcattgggtaagaatctaaagctttgcctaatatactatggccatggtaacatcaaaacaagtactcagattaacttagtttcctaatatggtttgtgaatatcatattgaattatggacaaggcttttactaggtttgttaccattgtaaattgttgtaaaatctttttcttctcatacttgtttaggcacaggagcttttgtctaatattgctctactgga

SEQ ID NO: 79771 - DNA, 831 bp, Citrus sinensis
  Intron number 2 from transcript orange1.1g021879m (locus o range1.1g021878m.g) derived from phytozome v7.0 (chr-ID sc affold02287; pos 12132 to 12962 reverse strand)
ttattttgactgagccaactgggtcatctgctgaggtctgtttcaccattataattatttattcattttttttaaatattattatggatttgttcttatttgttttgtggttgattttatgatttggattcgaggggtcatatgaattttatgattggaagtatttagttgtctttgatttggtttttacttgtagatggtgctgtttgaattttgagaagaaagaaaaaagagaaagggtttgtgattggaggtgaatggattgttgaaatggttttaatggattctggtacatccagcataaaaaaagattaaagaggtgtttaaactaaaaggatgtgtggtagttggtgaagagaagcccctttaatttataacgaagaaaataaagtcatcttgttatgattaaatttgagaatttgaagacgactaatgctcagagcctcagatgcttagataaaagaacaggggtgtcgaagataataaaataagcttttttaaaattaactttttctgtccctattttggcttgatactgattattgattttgagctgtaagtcttgctgtcggatcttcctaatacaaaatccatggaatattaaaggttaagttgaatccaatttctgcgttattgagttgttaatacgatagtaaattgactgaagattcagtggtttattaattagggtttgacataagtgtttcaattttcaacatgatacgttgtccccttgtggtttaagtggctatatgcatcgaaatgatgaaagcagaaaccttgcctgtttaccaaccaactacatgacctaaaattgtcaggtgcttctct

SEQ ID NO: 79772 - DNA, 345 bp, Citrus sinensis
  Intron number 3 from transcript orange1.1g016511m (locus o range1.1g011349m.g) derived from phytozome v7.0 (chr-ID sc affold00026; pos 289368 to 289712)
agactctctctaaacatcttttccattgtaattaatcttcacccttttttttaatttacgcagcattctagtttatttacttgcttgctaggttgttgagtcaatttcaacacagtattttctgggtaaaattctgtgtgttaaagtctgtttgaaagctcctgctgaggaagtataagaaaaagaaaatggaattctgagtgtcagttttggatttgagtttgaagtcaaaaacttatgtcagttggataacgcagtcaatttcttacatatttttataatgttttggcttttttgggtgattctgtacttaaatgttgaaatggttcaggggaaaaccaaccc

SEQ ID NO: 79773 - DNA, 768 bp, Citrus sinensis
  Intron number 1 from transcript orange1.1g001482m (locus o range1.1g001482m.g) derived from phytozome v7.0 (chr-ID sc affold00007; pos 269553 to 270320 reverse strand)
gagctcgccaaggcaaaagctttatcttgaatcaggtaaatttttgtttctttcggctattttgtttatgaaattcgcaaacttctgctttttgtgttttttttttgttttcccttggtggttttactgcaaagctgtgaagtctagggtttttgtgattttgggatttggattgttgtaattagagtgtcggaagtgattttgctgcttctagcaacctaaaataccgtgattcttgctgaaattctgtcaaggcgatgcctttttcacagtggtaaaagttttgtagcttttggtcagtgtgaattgaaagatgtgaaaattttgacctagcgaagttgtggagtctagggtttgttattctagatagagttgtgcaattttgatgtgcttttgctgatgctggaaaggagaaatgtgttgaaggaatcctttttttaatttaattttatttatttttgttgttttgtatgccaagtttgcatcttcgttcttttaggaaattggaaattaaaatgtggttgctgttccttcaactttgctagggaagacctttgcattaaatttttttggcatttgtgctcttggttattagaaatgagtttgcaagtatcttggttgggacttcatgtttgtttttctatttttccttgtatctattgagcataaaaatgcatttattataagtgcagatttgtaaataagagcgaagcttaccattaatgttttacagcttcttgggagaagcagtggatttcaagtagcatc

SEQ ID NO: 79774 - DNA, 779 bp, Citrus sinensis
  Intron number 1 from transcript orange1.1g020972m (locus o range1.1g017527m.g) derived from phytozome v7.0 (chr-ID sc affold00415; pos 98708 to 99486 reverse strand)
agctgccggctgctccaatcacaacagcgttggcggtaatcatcaattcgttttttttaattttggttgcttttgagatgtaggattttcttgattgtgttggtaagcatttcggtcctagttcatttgtaattgtgttactgctgctatatgcattgatgatacatgtaatatatgtcattgtgcttgattttcggtgctagttgcctagttctgtgatacattagccaaaagatgctgggacaagttaattttgtaggctgcccgcaaggacttgggcgagtggttttcaagcagctttgtttggctggccacctgagttcgaattttggggaagataaggggccaaaaaattgattttggctcgtccgcttccctactttttgttttaagttaattttgtaagcacagaaatataggagttgcattggagaggtgtgaaatttacacatttttattgagtttctgagaactttcattatcttacttatttatttattttcttttttagggctatcattgtcaacgaactgttgtagttgttctttcctttatcctctaagttttaattatcctcaattttaaatcgttgttttagtttttggtacttctttttatcttttcgatgcacttgatttgatgtatttcgacaaggtttctgctaataaaggtatagaaatctcatttatgttgcattatgatggctgaaatataaaaagagcgtgtattatgaatcaatttcttctcatgaccatcaattgttttgtattttacagaag

SEQ ID NO: 79775 - DNA, 390 bp, Citrus sinensis
  Intron number 2 from transcript orange1.1g013546m (locus o range1.1g013546m.g) derived from phytozome v7.0 (chr-ID sc affold00010; pos 1733918 to 1734307)
aagtaagtgaattatcaaacacttccatgctattaacgtagataatatatacccataccgttttgtttgattattgttacatggttatgaaacataacatcgccaattatttgcattaggaaatacagatgcccattgttgcatgcattttgtaaatttgatatgtaattgatagtgatttctatcttgttcatcctcaatgtccaatgaagcgcttcaaaatgccttcgaaacaccgatatattgattaacatatgattagaagaaaaagatattctgttctgtggacgtcactttatgggatcaatgtattctcttagttatttagattcttaagtcaagaaacttaatcgtttgttttcatgtaggtttattgtgagacagtcaaca

SEQ ID NO: 79776 - DNA, 724 bp, Citrus sinensis
  Intron number 2 from transcript orange1.1g030263m (locus o range1.1g028661m.g) derived from phytozome v7.0 (chr-ID sc affold00046; pos 442539 to 443262 reverse strand)
gacctagctctgaaacttgtcaaggagcagcaaaggtagtattctaggtcatagaggtatcatttcctgtgataaatgatatttttgaactctaagaaagatgagcatattcaagcacacaagtgttttccagctatttatcgggtggaaacactttttttttttaacatgttaatggactattttcaagcttctttaacctgctgtttaattgaccaatttattattcagattcatttggtcattactgcacagtgagactcatgtctagatattagttatgttaagaggacatttaatttaggttaccgaatccctgccttctttgacacggttttttgttccaatatatgtgcatttacatgcatatgaggaattgcgttttcaaggaccaagatgaggctgacttaatttccagaaaattgagttacccgatgaaagtgcatcttgattccacacgaatactgtagaagtattacaataaagtctcagcaaagatattagcaaatcaagatatattcttgggataatcccatattttgtcgaaagatactatagttattatcaatttggaggcaatttatttgactttactttttatcctgtgatgaattattttctttcattatggaatattgatgttcactatttatacattatcaagttttgatttctttgctattctttaggaaaaagacctatacggacacggccaacttcactt

SEQ ID NO: 79777 - DNA, 590 bp, Citrus sinensis
  Intron number 1 from transcript orange1.1g032190m (locus o range1.1g032195m.g) derived from phytozome v7.0 (chr-ID sc affold00067; pos 514900 to 515489)
ctttttaactctccgactccacctctcccccaaaggtatgctcgttcctcctcttttcaatttaatttccttttttcttcctgattagtattcgaaatcgactaagttcgtttacggggtaaatttgttgttttttttttaatcagtttgttttaggatcattatctgtatcgctttgttctacgatccgtttaggtttaactgttctttttaactagagctgaaaatccttgttttccaattttattaaattgatcagttgcgattgagctgcctaatcagttattagaattacgttttgttaattttctgattaatcatgctttccaatttaatcattaatcttatttaacttgaagatcgaaaaagtatatcttgtttgtttgctatttctgatgaaaccctagtcattgagcaaagtttgcatctgggttgtatgtggtactcttcagaattaatccaaaatttaatttaaactatagcggtgctgctttgtaaattttgaatgtataggctgcgttagatttcttttttctttttatttaaatcttaaataaccaatatttatattggtagtagaattagaaacc

SEQ ID NO: 79778 - DNA, 1010 bp, Citrus sinensis
  Intron number 1 from transcript orange1.1g002352m (locus o range1.1g002352m.g) derived from phytozome v7.0 (chr-ID sc affold00025; pos 608374 to 609383 reverse strand)
tcgttgctgcagctgccgcaggtacccactcattattcgccatctctcgcttcttcttagttgcgatttatcttaccatatttctatttattaagcactaccaatgtccaaaaacgtgtatttactcgagttaaaattctcatagggaaagatcagcaaatttaacctcgttgtcgtaaaaaatttgtgtaaactttggacattttcatatcttttcctcttttatttctagaaattcttattgatcaatgatgatgaattttgaaatatgagaggggaaacgatattactgaactaataaggattttttattgttttcaaagtaccaatttaattaattcatagataataaataaaaataaattttatgtaaatcataaataaaaaattaattaattaatatttggtgtaataaagtctcatgaatggacaatttttttctttaaatcttatcccatctaaacccatatgtaaatcaatattattagtcctgtgattttaggaataaattcaaatttagtccccttaatctagtccaattaagcttgccaaacatgagataaatatttaatctgaaaattaatccaatcctatacttaatcctatcatccaaacatggcagagttttatctgaaagttcaagttcgtagcttttaatttgtctgtacacgaggatttcttattcaagatggaggccaaattataagttttgacaaatgtggaatgtttctctttcgagcaaaagcacagagatttataatataactgaacaaaaattgtccttaatataataatgttaggtgtacagagtttgtatttcgaatgatgtagcatatggctttaacaaaaatatcaaactgtgtaaaataatgttttgtaagggagaaggaatttgaaaggaattttacatatctttctttctagatttatttttattttaattttttttgcggattgaaagtgaatcacaattttctttggtcaattcacagctctggacttgctaaaca

SEQ ID NO: 79779 - DNA, 839 bp, Citrus sinensis
  Intron number 3 from transcript orange1.1g026485m (locus o range1.1g026485m.g) derived from phytozome v7.0 (chr-ID sc affold00476; pos 69648 to 70486 reverse strand)
gttcttggtacgttttcactataaaaaggtcgtgattattttaaggtgtatggtatgttttgttttgttttttttttttaattttaaattttttaatggtttgataacaaaattttcttctatcgttcgagcctcaactcaagcccatgtttttaaacgaggcccaaatccttaaaaagcttgcccgaagttggataggacgggtcttttttaaatgatgccttatttttagtctcttagttttagtatttgattttattgttttaattaactaaaataattcatttatttcttttaagaaaaaattaagggttaggccaagcctacgcttttgttctacgactagatccaagtccgatactaaacagactttaaaaacagaatgttaaagtcttgtgagttgaggtaggttagcagggacagactgaccatcctttttgcccatctaattctctccctatctttctaattcaactatttaactaatacattgtctaattagatagcttaatttatctatttttcaccagttgaatgtcaaatttgtatgagttttaagttatattagactgtagaaatattcttttacccttaaaaaattagtttcaacgaataaaacagtagtgatatggtgtcttaggggcggttagcttgataattgactcaaatgtctaaaggagtatttaccaagactaattaataatttcttttaaactttcaatggtcatcaaaactcataaaataatcaaaattcgtttgcacaattattcgattttttccaagattttaagcagagcctagaaaattgtttataaaaaattaattatgctttgacaggt

SEQ ID NO: 79780 - DNA, 336 bp, Citrus sinensis
  Intron number 1 from transcript orange1.1g039807m (locus o range1.1g039807m.g) derived from phytozome v7.0 (chr-ID sc affold00183; pos 224790 to 225125 reverse strand)
cggagcccatagcagagcaacattccctgaaaacggtaagtttaaagaatgaagtccggaaactcttgattcgcttttcattgtgtttacattgtgaaatgatcttctatccttttgtttcagaatagtttattaagagttaacgttttagagtcttaaagcgtaaatgtttcaagtttttgcttccgttttcagatttaatccttgctctgctttgttttgatcgttgaagctttcagtattgtttttgtctttcatgtttcttataaggtttttgatttcgtttcgtgcgtttttggaacttgtttttaatttttttcgcgctgttagaattag

SEQ ID NO: 79781 - DNA, 539 bp, Citrus sinensis
  Intron number 2 from transcript orange1.1g042044m (locus o range1.1g042044m.g) derived from phytozome v7.0 (chr-ID sc affold00004; pos 157567 to 158105 reverse strand)
aggtatggtgtttgttttgttttgtctgaactgaaatgatgtatctgaagtagttacatgcacggtccaatgatcaaatgatagggttctgtttcctaaaaacgtgtaaagagacatgaaactgttgattctatgaacagatctataaatgggatgtgttgtggcttcatatatctttctctttattctcttttttgtgcatattttattgaaaaagaaacataaaaccataagagatgtaacatctatgaacagatctggtaataccatgtgttctcttccttccttttccttgctaaaatataacgataattattatagggaatttaaaccctccaaaggcattcgtaatatataggtcaactctagagtattcttttcattagagcacagtataaccagcagatattacatgtttatgaaaacagatctgtcaacaaactgctcctttttttttttcatttttgtctcatgaagtaataactaatatgcattatatatctactatactttattgtaaatcacacagaacctctaca

SEQ ID NO: 79782 - DNA, 588 bp, Citrus sinensis
  Intron number 1 from transcript orange1.1g024470m (locus o range1.1g024495m.g) derived from phytozome v7.0 (chr-ID sc affold00004; pos 126972 to 127559)
ttctccacaagaactttccagtttttagcatccgggtatgtttagttaactttctttattatatattcatatttcctgcatgcttcttttaggctttttacctggtgggtctattgagttttcttttatcttgctttaaaaatttctgtattgtggttcatatattttagttttgtctgcgcaaaagtttagacctttgagctgttacgatatttctgcatgttaaggtttattacgaattgggggactggaagagcttctgttttctgttatagtaataaaacatgtcttgaaggatgtttttgtgaagtttgttcgtttatttatttttattattgagttttagggataagaatctggtgtgcaaaattcaagtatgatgatgcctttaataatttatttgttctttttgaattgtcaacttagcgtttctggcactgagagcaatgacgtaatggattaataatgatcaatgtagaatttattcatataacagagaaactctcttagcttctgatgaatttgctctttcggttgtaattattttagctttttagttgcagactttgatttactctctcctcttga

SEQ ID NO: 79783 - DNA, 1015 bp, Citrus sinensis
  Intron number 4 from transcript orange1.1g029197m (locus o range1.1g029197m.g) derived from phytozome v7.0 (chr-ID sc affold00457; pos 98519 to 99533)
attgcttttcctgccatatcgtgtggcttatattggtaagttgacaggtaatagaaaggaaccagtttcgatttgtacgttttcttcttttagatccatgtaaactttgcatctgcttgtcgaggaaaaaaattaacattattgatttctttgcgcatatctcattataatacagtgaaaccttgacttcctagatggagtgaattacattgctgctttttatgctttatttgaagacgagctgtttatagaaaggtttatctgtttgtgatgctggcttactcgtgcaaattcttgacctccttaggcacagaaacttgttccaggaagtattaggtgttaagttagtgtattctaattcatctgataaatctttaaatttggggcagaatctactgatgacttaagcaatgaattttaatgagtttaaaggctctgagtttcatgtggttggagtgtaaaaaatgcctgacaagttcatttttcttttgcttttaataatttatcagttatcctcatgaggaagccgccacaatagctatatctacagtcaaagaatttgctaatgactttaaagaggtatcatataatagtattttgcttcatgatactccttgcttcctgcactttcaaagtctattcaaacagttttacattattaggtccatttttacttcatcttatagcactatttcctgttgatatgttgatctacatgaggaccacgatcttctaggtaaatttattctataaaaatgggaatcatttcattacttgaatatgaaactgaagacctggtaacaaattcagaactcaaagtggttaataacatcaaatgttacaacgtaggatgtcatacttgtcgaattcaacaataagcggcttacataacagaatgtgaattgttacaaaaacatatttttctgtaaattatagcacatactttgtaatttttactggtcgtttctgcagtaaaacgattgttctttgcaggtgcactttgttctgtttacag

SEQ ID NO: 79784 - DNA, 656 bp, Citrus sinensis
  Intron number 3 from transcript orange1.1g027872m (locus o range1.1g026846m.g) derived from phytozome v7.0 (chr-ID sc affold05291; pos 1348 to 2003 reverse strand)
agttaaagaatcatattgcatctcaccacgaaaaggttggtgctatttccttgctgttactattttgcagtgccaacgcctttttagtatttttctttgctattttagatatttttcctgctttttttgttgcattttaagttaattcctttcatagaacatatcttatgtagtttatgacgtgtaaagcaacatgacttcggtttcatctcagattatattagtcatctgtcaaaaggaattttacttatttcttttctaaagatatccttcaagtctgttaacaatggcaacatatgaatgtttgtgttctagtggaattgtattcatttcacctttagtatggtcatagtacaaatggttattattatcactgaaagatgtagtacagaaaccatctgctatttttcttaaaactcttaagatcatcccatgtgtcgctggttgacttcactgtagatctagaatggttatcataattatgttctttttatttttttaattttatttgatatacataggacatcaaaataccattctgccaacatgaatttcagaaattgattgccatgaagcaaagatcgtctgtatatattttttctctcaaaactcgtatatcatatctgattcttagtttcgagatttgatttctcaga

SEQ ID NO: 79785 - DNA, 816 bp, Citrus sinensis
  Intron number 2 from transcript orange1.1g027872m (locus o range1.1g026846m.g) derived from phytozome v7.0 (chr-ID sc affold05291; pos 2078 to 2893 reverse strand)
aaggctgtggtaaggtgaagaatctatccatcctaaagcattttgtcaaaactttgccgaggctaccttatctttttcttttttcttattgctgacattatcataagatatgagaaatattatacatttgttttctgcctgaaacatttctatttgatgattgattccattgtcttatggtcccttgcccacaattttaaaattttaggtcatttggtaaataatattaataccttggatgtttaataatattttgaaaagagaagtacagtttgttgtaccctgtgattgctgaggacatcatgggttttagtaagcaagattctgtgagacgctttgattgccatacaatattaagtgtcatgtatccaatccagggggacccaatgatgttgaagtctcaggctggcaagtggaggatcatggagttcagtcttgagaattgccactatgcaaaagccacttaggggtattagtgtatttggaatccccctataaccttgttttatttggaccgactctctgtgaagacctctcccattattattgagaatgaatgttcggtacttaatatcagggttggttgtattgtaacttggatggatcaaatatgagagactcatgttttttcatcatcttgtaaagggcatagtgctaatcttaccttgaggttgccgttttggcttaagatgttactttattgtacatttctgtatgtgcacacacttgtacttgtacccagcatttgtggtgttcctaattacaaatatgaaatatgcaggcattctctttggacttcaacctgagatcacacat

SEQ ID NO: 79786 - DNA, 554 bp, Citrus sinensis
  Intron number 6 from transcript orange1.1g027467m (locus o range1.1g022174m.g) derived from phytozome v7.0 (chr-ID sc affold00082; pos 383424 to 383977)
tagtaagttacacggactgctagactggcagctttatttattgtgagattaatccagttgattctaggttagtttgtgcaaccttgtcctaatactcatgtgcttttggaaggagtttataacaatcgtagtctcacctcatatgactaaatgatctacatcttttcccattaaacaacaataacttgttttttgcaaagaaagtttattctatattgtgctcccgttatccccaaaaaattgaccctcttccacattttctttttctttttttttctaatgcatcccattgtgttcctcgctttctcgtgtgatcagccactgccatgatttttgttgataatttcttttcttttcctttttataacattctggacataacacgtgtaagatctgtaataatcaaaatagactttggtgtatcgggtgctggtccctgttgtggcaccaagaatgcaagtttattttgagagaagcctatgtttgcataggggattaacctactcttgactaactcaggtacctttagtcgcttcaaatcgcattggaaaaga

SEQ ID NO: 79787 - DNA, 484 bp, Citrus sinensis
  Intron number 1 from transcript orange1.1g031855m (locus o range1.1g030941m.g) derived from phytozome v7.0 (chr-ID sc affold00016; pos 134824 to 135307 reverse strand)
ttggtctatcaagatctcctcaccggtaactcttcttctcataaccttttctgttactttttaattcgcctgctctgactgttttgactcgattttgacttgaattagtatcgttcttctgctgtataggctggtaatttgatcagatctgtgatggtattgattatttttgttattatgttgtaaattagcgcttgctttgagatccgaattagatctataattgattaaactactcgtgtttgttatttaatttgtttataatatttatgcttttgtaattagacgggagatctagatagttcagtaaccgattcgttgaattgttggttgattaattttgtgtatcagataccgatctcatagccttgtcattactttaacttgatatgattgatatatgagatatatctattgaatggaattctgtacatgtttgaataaagagcacgttgttaacttatgtcgatgggttgtttaggtg

SEQ ID NO: 79788 - DNA, 985 bp, Citrus sinensis
  Intron number 1 from transcript orange1.1g009517m (locus o range1.1g009517m.g) derived from phytozome v7.0 (chr-ID sc affold00136; pos 303616 to 304600)
ctcctgctatcacggtcgattcccttaaccccaaggtatcaactttcgatcatctgccgtttatttgagctgtttctgcatctgggtttctttcttttttaagtccattcaattaatgtttcgttaatttggggtgtttctgcatctgggtttattttctttttgcatttttttgttctgtttgatttaacttgcagcaactgttttggttcactgttttattactttatgtttttattttcacatcttattcattttttatgtgtttataattttgggtatgtatgtctcatgtctcttaagagtttactgttcgaataggtgatctgctgttttaccatcaaaaattactttttcgatgtgaattttttgtttaattaccttttaccttctcaggttttataccttctgctttctgatgcatctttttattttattttagattcccttttatagctttagtttaaaccgtaatacatgtttgtaaattgtagggtatttttctttgtttgtttattctttgttaacctgagctcaatgctttaattctgctgcttgtatgctgtgtatatgtgcttgattctgtttatctctattgacatgcgactttaaatggaccgtatttgatatgtcttcagctatcagtttaaccattttgttgcaggatgcataaacctggtagttcttctgacttcatttgtctgtggaattagactgctgagttactttaagagattttttgaacttaacgataaactaagttttgactgaaattgtaggatagttgttttaagttattttatcgtaagttctactgaattttgtttagtgagtcattgtgattatagagtactaatgaaagacagtgcgtctcccttttgttctgattctcattgttaagttttcttgattgtgtggttcttgtaagttttttctgttcctgttttgatccctcacgaagtttctctttcctgcaggttctaaa

SEQ ID NO: 79789 - DNA, 709 bp, Citrus sinensis
  Intron number 4 from transcript orange1.1g009110m (locus o range1.1g009063m.g) derived from phytozome v7.0 (chr-ID sc affold00004; pos 2309389 to 2310097 reverse strand)
gttttgaaatctgctgctgctgcagttttgacaaggtatgtatttctctttacctactttttgtttttcgttttcatagttgtactcaactttgtaagcacatttagaaggctggatcaaccataaacctgtaaagttaacagctcacactcaatgcttaaatgttttctgagatattgcaccttgaattatgttcttagccatagtattgcatttgagtttcttctcaactctttactcttacttgacagattcttactctcttatatttcagtaaaggtgcctgaagcgattagttttatcctagtttaatagattctagcactgtagaatttaacgtattcagtgttgataaccagattatacaagctctagcttccttgtatgctttaggccttcaatcttcatggtaagagatgaactaccagtttaagagatatgtcatccttaaaatgcttagaccccacgtttagctactttttactggttgttcactatggataaagtcatgcaagtagattcttttgcaccttattgcagcatttcacccatgtacataaaagcatatgcacacgtgtatttctttgttctcatctaatcgaaagaaatctctctttcttgccttttatttttgtgtggctatgtacatataccatatcttattgaatgcatgattagtattaaatctctctttcaaatttcaggtcat

SEQ ID NO: 79790 - DNA, 554 bp, Citrus sinensis
  Intron number 1 from transcript orange1.1g009110m (locus o range1.1g009063m.g) derived from phytozome v7.0 (chr-ID sc affold00004; pos 2310658 to 2311211 reverse strand)
cctctagagccaacaattcctcgtttcgctttagagtaagtaactcctttcaggctcagcggcttcgttctttcaacactttcagcaaaatttcactgaaagtattttcatttcaggtttctaaagaacttgtacttgtctagtttgttcttttgtatgactaataatgataatttgtgtgcctggagtttttattttaggtccgtttatataattgctcacttagattgatgaatgactaggactagaagaaatattggaaaatttgtgtttaatcactgttctattgtcggtacaatcaaagaattttttaaactaataaagtttttattgcaatattttagcttaaaattttggttcgtgaatcatgatcttcatttaaaatttaaaaaaaaagttaagcaccactgatttttttatttttttgacagggagctctatttgttttgatagttgaaatctatctgatacatctgcttcgtttattatcaagaccatattcttgggcttccttgctagattgcgttgcgatattttgctgctggtggtatctg

SEQ ID NO: 79791 - DNA, 884 bp, Citrus sinensis
  Intron number 1 from transcript orange1.1g002076m (locus o range1.1g001688m.g) derived from phytozome v7.0 (chr-ID sc affold00016; pos 1295637 to 1296520)
ccgccatcaagatacaggtcgggttcatcgaatttgaatttgaatttaatagtcattgctacattgctgcattgcatgtgtatgtgatgctatttgcatttgcccaaggtgcaatgatcgttctagtgtatgtagattacttgttctattcactattttacgttggtattttttttggatttattttatgatgaaatgtgatgtgaataaagttaatgtgtgttaattattagaaaaagaatgttagttgatctcaccaagaataatttataagaagcaaaatgaatatgtggaaggttttgtattttagtgatgcgatggtctaattttagtacggccaatttttcatatcgagtgatgaacagagtcttcgcgattggcactggaggtgactaattatgtttgtcgttttactgtctctatctattttaaagttatatttggaaagacatttattttcgtaaggttgaagctacgcaattaggtttagtcaagtgaaccgaacattgaaaaccttgtgaaagttttgcagatgctggtagttttctagcaatggacaagtttagtgaagtgtaatttcactttcttgtggataagctttatagattagtagtttgacataaattttctgtgaaattttggctcaatcatttacttcagaattctccaagttgtgattgctatctatgtgtatgtgcatgtctgtaatttattcatatcacgattataatttttatcttataattgtgggtgtcacaaggacacgcttgctcagtgtatggtaacttatataaactagttgagtgaatcttttctttggatgggcaattcaaatctttgtaatgtaatttttgccaagtgttaactaaatactatctacagaa

SEQ ID NO: 79792 - DNA, 549 bp, Citrus sinensis
  Intron number 1 from transcript orange1.1g003396m (locus o range1.1g003396m.g) derived from phytozome v7.0 (chr-ID sc affold00004; pos 4042790 to 4043338 reverse strand)
tgcgagcagccacgctcatctctctctctctgcaggtgggtctctctcagtgtctctgcaggtgggtctctctcgctatggtttcctctctctgtctatagtcgcagctctgtcgtgtatttttttggttaaataaaggatcataaatttacgttttcttaaaaaaaaatttttttttttgaaccattacgtttttgcgattgttttatcgacgtaatttgaagagttcttaacactagagctttttagatctgggtttcgttcattattaatgtaaagtttgatttttttttctattcatcgtactgcgagtaaattggcgagttgtgtgttagatttagcgctgcgggtttttagaagatttaaattgattgaatagaagatcgttttacctttttatattatatttctctggagaattaggttttgcttctcaagttgcattgtggtctgctgatggcaaatatcttttttggtttaattattattttgctttgtctgtaatattgcttaggtttcgattgagacatttagatttctctgttggtt

SEQ ID NO: 79793 - DNA, 634 bp, Citrus sinensis
  Intron number 2 from transcript orange1.1g002226m (locus o range1.1g002218m.g) derived from phytozome v7.0 (chr-ID sc affold00010; pos 156488 to 157121 reverse strand)
aggttggttacatttttctcaaatgaactgtgattggcctatggatatggttatgtaggttgatgagagagagagagagagagagagaagaagcatactccactcaatattctgaaacttaagtccacaattttaatgtataacttccattcgatattatagtaatttgttatggtttgtaggatagttactttaacttccatgatgagttattgactcggcatgtatataatgcagtaattcctgtatcttgtacttatatcatttgttaaatctcccccctaccacccaactattttttcaagtgtgtggtagaaagtactttaattttgtttatatttactggaacactcatttattaagtctggtgagagcatgccctttcttgctttgtcttttcagtcatttgtgaagctcatatattcattttagttttttgattgttgaaacatggctgtttaggcaaatattgccatattttgtcagaacaataaaacttatggattttgtgatgctcttaatgtcttaattaattatgagtaagcttaacttttctgaccttttccttttgtccatcatcttttttgtcactgttaaagtttctttcatctcaaagtcccctgcgtggccactt

SEQ ID NO: 79794 - DNA, 561 bp, Citrus sinensis
  Intron number 3 from transcript orange1.1g030133m (locus o range1.1g030156m.g) derived from phytozome v7.0 (chr-ID sc affold00025; pos 693318 to 693878)
gtacaacaacatcaagttccaagtttgggatttaggtaagtcaattattttctttcataaccttttactacaattcatcggttaaactgatcgatagcaaccatgcgagaagaccctttgattatgctactgagtagttgagtgaatcttatttattttatgtttgtaactgttgcgcttctacttaccttttgaatatgtactaactatccacacacttgttcttgacaatcagcaatttcattccacagcgactttggattaataatcaaaacctctcaatacccttagtccatatcttagttaaacccattgggattttgctttaatagcataagtaaggtcaatttgagttaactgagctgtcataagtttccatagtggtttacactctcaactgttctcgtgttgggtttaaggttcttgaaagaggttcagttgttacatttaagtcattacgtttttatgcagctgaagtgttcatgtttgtttcatagttgaattgactagtggtttattgcaacaggtgggcaaacaagcataaggtaatccatttgtact

SEQ ID NO: 79795 - DNA, 374 bp, Citrus sinensis
  Intron number 1 from transcript orange1.1g004420m (locus o range1.1g004420m.g) derived from phytozome v7.0 (chr-ID sc affold00016; pos 698301 to 698674 reverse strand)
cagtctttttcctggtcattgaaggtaatgagcttattggttctaaaggaaccgtattaatattgtcacttgttatgcttcaattgcttgcattcttgataggtctgagaaacaccattttgatggtaccaatgccctactttgcattttacatgaatgaagataaaatcctgagaaggagattatgcgtttttctgtttagaatttgtagtcttcctgcttttccttttcactggtgatacaaacttttgtgctgattgacctcattgcattatcttagccaactaagattttggttttttgtatcttttattgccaactttttaaatttatatttcttatattttaatgttatgcagacgttgttgggcttt

SEQ ID NO: 79796 - DNA, 1027 bp, Citrus sinensis
  Intron number 1 from transcript orange1.1g025206m (locus o range1.1g018314m.g) derived from phytozome v7.0 (chr-ID sc affold00272; pos 192479 to 193505)
tcggccacatcaacaccagatctgaggtcttttttactttactttcgatttcaattatgattttcctttacacatatatatatatgagagaaataatttttgagtcagtctttgaaaaaaaagttattttttaggaaggaaataagcagtttcgactacttttatgagaaaaattgatgaagagtttttaatttatcagaatgtgattttgcatgatattgttacaggttaattcatactgtttataatccgatacagtaatgaatagataaatggataactgttctgtagaatgaaaaaaattgttatggaaacagttttctgagaacaaaaacagtggaagtgcatcttgtgttagtaatttaaggaaataggacagatttgtgtgttcttagaaatctgtttgttcgaagacactcgaatatttgtgtatcgttctcagctcatgtgttttgaaggaatctgtgaatgcattttgaccatttgtatggaaaatgggttttgaaaacaagacaaaatcgctccttcattttcctctgtctgtctacattcaattatagttcattactatatattatgtattatatctcttgggtttgtgctactttcaagtaaatgtagtctcacttgagctagttttgtttgtttttaaatttatcattcttcctattccaacaggccctgacatgagaatttcaatagggggctttcttagtttttgttaaaagtcgctacttttatatttgagttctatactattcagtactttgttaagttgtcatttccttcttcaaattcttttacccctctaggatttgtatagttgtgtatctgtttttttgtcttccctactatttgatgatgtttactctttttctgcctctttgaaattttaatcaggaacttatattagtttatctctgtgttgcctgtgtgtaatcttcatttatcttatattcaaaccttcttttgtaatcttataatttatccctttttgtccctggattttttctaggttgctgggtac

SEQ ID NO: 79797 - DNA, 472 bp, Citrus sinensis
  Intron number 1 from transcript orange1.1g002526m (locus o range1.1g002043m.g) derived from phytozome v7.0 (chr-ID sc affold00004; pos 1748270 to 1748741)
cctcgcgacgtcggtcgtctcgcctgcgttagcaggttttattttattttgtttatttctgtttctgtaattacttctaacagtttataaaaaacaaaaataaaaaaattatttctaacagcctaatcttgattacttctaattggtcattgtcatttttttttcttgatttcacgttgattaatttgtctattgtggaaaagttagagcgagttaaagtatgaataatcggttagcttatgaaatcttaatttcatattatttaatcaacatttgaattcagtgtaatggattttcaatggtcagtctttgttgaaatttttatgattcttctttttagttaatgttttcactactacttcatagaatcagtttcaaaggagctttaattggtcttttcttcattgttctgagatttattttgttcttttaagttgtgttatttttttttcccggttctatgtgcagtgtg

SEQ ID NO: 79798 - DNA, 705 bp, Citrus sinensis
  Intron number 1 from transcript orange1.1g006334m (locus o range1.1g006334m.g) derived from phytozome v7.0 (chr-ID sc affold00004; pos 3720115 to 3720819 reverse strand)
gggctgtttatatctttggggtatgcatgatttccaaaacgatcaacttttgaattatatgtttcataatttagttgttgctttcttgatgttgtatgcttatttatttatttattgttcatttattattctatggttatttttggttaaggacacacaaactttcttagttagttctagtatttttccatttttttattcttcttcttctgcttcttgtctggagtttgttcttgtttagtttctttaattagtgtcacagttgtttggaagggcggaaagtgctactaagctttcttgatatagaaatgtttttctgtccctgttttcattattatccttgcaatgttttaatgtgttgtacaagtaatatgagaccataagaaaaattttaaaatattgatgtcagtgaaaaagcttttctattttctttctgatgttcatggtttttggatcttcatcttctatattttagagaaaataaaagttgcaaattgcactgtctggccgtagaaacgttattaaggaaaagaataatagttaactttccataacgttatgttctacatgtactgtaaaatctttttattggtgtgaaagaaaataaaaaatgctataaattagtttgccgatgaatgtgaacgtgttgtgaaattctgtttgaatattctaattgatcaatttcctcgttctgttttttcaggg

SEQ ID NO: 79799 - DNA, 689 bp, Citrus sinensis
  Intron number 1 from transcript orange1.1g003714m (locus o range1.1g001074m.g) derived from phytozome v7.0 (chr-ID sc affold00026; pos 967144 to 967832)
cagggtcttggtgccgaaattggtaggattttttttctttctttttatcataataattgtattagatttttgtaattttcacatgtatttaggttttgacttatggaatgctgctgcggtgatattcccaatggtttttttttttttttttaaatctttgatatggtaaccttcatacaaaattgggctgaaaatgatgaggtctagtctttacatgatattttttagaatcttcacaacttttggtgctggaattagaatttttcgggttgagtatgatttcctgtgggatttcttcagtccaaatattgtttttcaagcttgtaattgtttcttctggcctgtggaaaaactttagaatgcattggccatgttaaacttgtctttggtggtttcttcattggaaatttacttggagaaattgaggtctattcagtatctgtcatggattgtccgttgctttgcatgtgggattgaaaatttctttgggctagatttatttttatgcctttcttctagttgctgctgttgcttgagaattagaaggatgttataactggcatcattaatttgacttcaactgcctttgagctaatactaagcctttgattcttcattccttttcaatactactgttggcttcttgcagcaaagaatctgattcttgcgggtgtcaagtctgtgacctt

SEQ ID NO: 79800 - DNA, 509 bp, Citrus sinensis
  Intron number 2 from transcript orange1.1g003714m (locus o range1.1g001074m.g) derived from phytozome v7.0 (chr-ID sc affold00026; pos 967976 to 968484)
cgaaattgaccaaagaacaactttctgattttcaggtacttccctccattattctcccttcgttgattgtactgcttgctcactagcaatgtttgagttatgaataaaaccattaggacatgtttgtttttgcttcaatttgttttatgtgaaattttcaatcaaattggtcatgaattacaaactgtttttattagcaaatacgaaactgaatttggccgctagttcattgaccttttcaagctaattcatgcaagtagaaatttaagacgattatagcaaatatgaagacaagtcagataaagacgaacaatcactggactcattgtccaaataagtttcatatctggaatttgatataagcttagaagaaataccgcttgcgtgttcatcaatttaaatgaatcttgtttccttgtttctgcagtctgtgttttctgttgtttcattgtttatgactttcttgtggtgcaggctgttgtcttcactgacattagtcttgataaagc

SEQ ID NO: 79801 - DNA, 714 bp, Citrus sinensis
  Intron number 5 from transcript orange1.1g000400m (locus o range1.1g000366m.g) derived from phytozome v7.0 (chr-ID sc affold00127; pos 246238 to 246951)
agcggagactcattaggtatgacattgttttgattatagtactttgtgtgaattgctctgtttttatcttacttactctattcctgttttcctctattcctgttttcctaattatttttactttatttttcaatggaacttattgtttttcaaatattatgaactttttgattggcttggtttcaaaatgacctgctgacatttagattaagcactgatgggaatttgtatgattagatgtgctccgttaacttttcagtgtaccattgtttatgatttgtcattcactctgaaggttgttagcgctggcctttgtttgctagttgtaacggaattgcttttgaagattcttcatggtttattaatttgccaaacgccatactttctatcattaaacatctggatgttactggtttagaaagaatacagcaatggactacatactacccctagaatttggccattctgttttctattgaactgagggtctctgggttgagctctagattcattggctgttatttctgctataaactagatcttctttctattttatttgttacccatggattttgatacatacatacaagtcaattgcccattagttgacattgtttgttcaactgtcctcatagatttcaatgattcgtaagggatgctttttttaatatctttacagtgtgaatattgctgaggataagatttcagtttttg

SEQ ID NO: 79802 - DNA, 520 bp, Citrus sinensis
  Intron number 1 from transcript orange1.1g002067m (locus o range1.1g002067m.g) derived from phytozome v7.0 (chr-ID sc affold00025; pos 892761 to 893280 reverse strand)
cttcagtgattccaatcgcttgtttcggactttcggtttgttttcttcaacttattattgaaattaaaattagaatcattacttaatgcgaacttgatttcctcgacaaaatataatacgctcgtgaataagagttaacagattacaaaatattataaaatctatgtatcttcttagttgagctctaaacgacataatttcattgtcaaatccctctaaactctttttttgtgagcgtaaaagctgacatattaagatcataaagaagatttaattttttgccttcttgtatcgtttccttttgaaaccctagattcatattctgtctttcattttatttttggttgatttttttgggttattgggtataagaaattgatcgattaggttggctatagaaataagttaatcaaagcttttgcctttttcttttttttttttccaagagtttctgtatgttttgaattttaatgtaatttctggcagaattgattgcaggaagtcgacgaagacgaaaaaa

SEQ ID NO: 79803 - DNA, 599 bp, Citrus sinensis
  Intron number 1 from transcript orange1.1g015776m (locus o range1.1g005474m.g) derived from phytozome v7.0 (chr-ID sc affold00007; pos 2483504 to 2484102 reverse strand)
atacgaggtacaattctcttgttaaacttgccgcagatttggattcttgtagtgcgactgaagatgatgtttttagtgttttgcgttgcttgggtgatgatttcttagagcaagattgtgtcattattcttaataacatgaccaacccagatactgcagcgcttgctttgacatattttacaaataaattgaaagctagtaaagaagtgattctttacaacgtgactatgaaagtgtttagaaagtgtagagatttggataaagccgagaggttgtttgatgacatgcttgaccgaggtgttaagccagataatgttaccttttcgactttgattagttgtgctaggatgaataatttgcctaacaaggctgttgagtggtttgagaggatgcctagttttggatgtgatcctgatgcacttacttattcgtctatgattgatgcatatggtagggctggtaatgtggaaatggcttttggtttgtatgatagggcaaggaatgagaaatggcgtattgatcctaatgctttttctactttgattaagctatatgggacagcgggtaattttgatgggtgcttgaatgtttatgaagaa

SEQ ID NO: 79804 - DNA, 822 bp, Citrus sinensis
  Intron number 2 from transcript orange1.1g033773m (locus o range1.1g033773m.g) derived from phytozome v7.0 (chr-ID sc affold00004; pos 2122338 to 2123159)
tgtgaatcgagtgccaggcatgtgacttttttcttttaatttatacaatgacaatgcaattttcttgtttttatgtcgacaagcgaaatattggtttgctaaaatatagttgttgatgttgttgtcacgttgaagcttggaacttggtgtactacgatcattgtataatgaattgactttggctggcgagtttagtatctctaaagaaaatctaattttctatctatctgtaaaacttatcaacttattgtctttgctttctctttttcatccctactataaagtttgaagctttatgtagttggtttctaggaattcgcaaactcaaatcgctttgtaatatgttctcaagattaataacgaatagacggtgcattgtgatttttgcaaacattaacaattttataattatatttctaattccactcaatttcattttcgaggctctactttttgctgccaaacgaggcatgatttgaaatggtatggcttttgaaattagctcaaaagtagaaaagttgttgcttttttaacaattgtttaatcaaggtgtgggcacttttgatgccacgatttgcaaaagatttctgttgtttgtggactaatagaaatcctctcccttcttctcttattacatgccttaacagtcttactctgcatgaatgtgtttttagtttgtagctgaatcaagaaattgcttctttatattcttatgagtatgtgtgtgtttgtgtgttttttcttttcaaatcaatttttattaattacaccagtattgtgaacgcaggtattgaatctgtttacgagtggaagggagaggta

SEQ ID NO: 79805 - DNA, 421 bp, Citrus sinensis
  Intron number 1 from transcript orange1.1g018590m (locus o range1.1g018590m.g) derived from phytozome v7.0 (chr-ID sc affold00067; pos 434482 to 434902 reverse strand)
tacttgtaagtgtagagccaatattaattacactgttgcttcatacaaatatttaggtactggccaactatcatagccaatttgtacacattgatcttcatagtcttctatcttcgttaggtttctatttttctcttttctcttttgggcttgttccatatgtgaagctttttaatattcgtttaaatttgttcgcgcaagggctaattgcttttagatcaaacgtccaatattatcaataacttttaaatttgttattaatgatttgcattgtgtctggttaattcacagctttaatacagaataggtgcaattattgatcggcgatattgctcactgaacaattttttattttcggataatagctgtaaattaaagtgattttcctgtcttattttttggcttgtaggctgtgatacct

SEQ ID NO: 79806 - DNA, 548 bp, Citrus sinensis
  Intron number 2 from transcript orange1.1g003395m (locus o range1.1g000969m.g) derived from phytozome v7.0 (chr-ID sc affold00152; pos 72179 to 72726)
tgaccacagcaaaacttggaaaattagaaataattgtcagtattgctttttaattgttcttatatttctaacatttgattcgttttttgacgttgaattaaaatatatcgttttcctttttgttaaatcgttaatgtcattagtgtttgtcagatcagattatatggtaatgattggtttagcgtagaattgaatccattgctgttagttgtttcatttctggaaattcagaaactgtgtctatttagggtaataaatggtgttgtctaaatcgaactgatgattatttggttagggaagctagttttttctcaaatttcaattcttgttttagtgtctgttttgataatattagaaattggagaaatggtaatcttaagacctcagagattctacactcaggattagcttacagtaaatgattttattttgagtttctggcaatttatctgcttttgtctcattttatgctttctcttctgtggttggttgtctgacgcacctttaatcacctactatctacgaatagctgccctcctctgtaagta

SEQ ID NO: 79807 - DNA, 649 bp, Citrus sinensis
  Intron number 2 from transcript orange1.1g028058m (locus o range1.1g022580m.g) derived from phytozome v7.0 (chr-ID sc affold00036; pos 137870 to 138518 reverse strand)
aaccagagaggcttcttcttgaggatatttgccaggtattcttctttatctgtgttgtttactttccagtgcatgatatggtttgcaaagattgaagctttattcattttagagaacggataaggtttagtttggcaattgtttcactgctgacatttttttcttttaatttgagggtcagtatttttatatacattcatccattttattgtcatgcttatggcttggtttcttgaatcacagaagggcagggtgagttatgagttaaacccagttcttgttactattttctttttttcacttaaataccttcccctttttcggttcaatgaatttttgactcctttcagatttttagttaatgtttaatagcttcataaataataagaacaaccgccatttggtttcatggtatattttctgcttggttcattttgtggtccaaggttcatctgactatgcaaagatacccagccaggcagccagtgtatctattgatttttttttttttaatggggaggattatgccatatacagtatgaccgggctttaacccgtttattcctgttgtttgttttctttgcacatagatcagctcatttttgttctgaacatattgttctatttgtaaattattaacaggttggtg

SEQ ID NO: 79808 - DNA, 653 bp, Citrus sinensis
  Intron number 1 from transcript orange1.1g033657m (locus o range1.1g033657m.g) derived from phytozome v7.0 (chr-ID sc affold00232; pos 17388 to 18040 reverse strand)
ccatcaacgctgctactgaagaactcatatttgtaatttcgttttagttttcttggcatttaatttgtatcttcatagttttatcggcattttcttttggaatttcatttctatgtcgcgatgttctgatggtgattccaaattaaacctaggtaataactctcttcttcattaatgtctgagatactttgtttttgagtcgcatatcgttattgttttattccagtccacaggtagctgatggactggaatcactcgctgtcaattgggtgtttgtcaaatattttcgtagttatgcttttaaactgaaaccgaaactcatattgaggcttttactgtagttacaaacataccctcagtttgttctttgttgggtctggattgattagggagcaggttggattaatttagtttatggccaaccttcttatatcatcgttaaaagggtcacgattacttttgtctcacagtataggttttccattccacggaatcttgtcagtcagtgtgtgtagttgtatcttgcttgctgcatcgctagaccgggaattcgcttaagaagaattgcttatctccttgttaattcaggccattttatgctgctgttcgtagttatactgaatattaatgcgtaatctaattgcaaaacagag

SEQ ID NO: 79809 - DNA, 447 bp, Citrus sinensis
  Intron number 1 from transcript orange1.1g022631m (locus o range1.1g022634m.g) derived from phytozome v7.0 (chr-ID sc affold00007; pos 2222420 to 2222866)
tggagacgtcgtcgttttggtcactaataaacccggtaaattacgtttaaattgtcctcacacgttttcgttttaggtgcttagcctctcctttgtattttgaatttgtaattatggacttcattatgagataattctgctttgtttatttaatacgagttcccacgtttacagattgtgtttgtcttctgactctgatcaaaagagtggcttccatccattcaatgtgtgtgtgcttgctgagcagcaatgctataaatatttaaacttgcttgagaagcataatagattgttaaaattaactcatcggtgccctttctatctttttcttctaagttaaaattagctcctctttcccaaaaaggaaaagaaaaaaaaggttgaaatttgcattattattaatttatactatgttcctctgtgtaacagattgtggaggtgcagagt

SEQ ID NO: 79810 - DNA, 351 bp, Citrus sinensis
  Intron number 1 from transcript orange1.1g000702m (locus o range1.1g000702m.g) derived from phytozome v7.0 (chr-ID sc affold00060; pos 91939 to 92289)
gtcgccaccgaaacggttttcaaggacaaacccaggtcagtttttgttattttctcaaatgggtttccttcactttctttgatttttagcttccatgacccctctgtctctctctctgtctctctccctctctcaatatttgtctccatgcctaagtgaaatatgaaaacaaaataaagaaaaatattttttttctatttaaaaagtgttttttcttctatatcgatttctgtttttggttattaatatctgtgtggattttttgtttctatatgcaatgtgttcgtagattctatctccagataacactttctttttatatgttgtttggtttctgcttctcatgtacag

SEQ ID NO: 79811 - DNA, 768 bp, Citrus sinensis
  Intron number 4 from transcript orange1.1g012085m (locus o range1.1g004202m.g) derived from phytozome v7.0 (chr-ID sc affold00025; pos 330552 to 331319)
tcgtacacctttggttaataacaataggaaaacaggtatttgtcaatgaccttgtactctcgtagtttctatttatccaaactcggactagtaattatagtaaagattgaacgtcatttccttatcctcatccctttagaaaaattaagaaatattcatgttagtcatggttgtgggcatcagctcttatgttttgctttattttcttttaacatcatcaactagtcagcttgcatttttttaaggttatgtcatcttttttaggggacttgttatacaattttgctttctagttggttgttcctttatatagagtagatctgtttcatgcagctggcggcatatgcaaagattctggagcatccgtaatggccaagtctctttttgcatcattgccgccacggacgccgaaaaaggctgtagtaattcaacggcagaatgatggttctttgatggaagagggcaataactgccacaagcttgggaataccaaaggaaaatttcatgaattccatgaggcttttagttcccatagccattccaaatttaatataggtctgcacatgttctaggatagggcgtagatctgtaatttattgaaatttaatgtcaattttggttttagtatcatgcttggagtagtgctacatttttgtgtttcatgtttggagaattttatttgcttcttgaaactggttgtagatttaaatatatgtattctaatttcaagctttacatatcttgatggtgcagcccctttcaagtttg

SEQ ID NO: 79812 - DNA, 1040 bp, Citrus sinensis
  Intron number 1 from transcript orange1.1g019606m (locus o range1.1g019606m.g) derived from phytozome v7.0 (chr-ID sc affold00010; pos 468030 to 469069)
tagtagcatacccacgtgatctattgatctttgaggtagaaataatcagcgccagtttctattttttttcttgtagaaaaaaatataatttctgtattaattttgaatatatatatatacatacatattaatgtgattataaagttgcaattattcgtttccttgtttatttattttgggcaaagttacaatttgcttgtttatttcttttctcattgattaggaagcatctctgcatatgcgtcgatttttaaattgcattacatgcttataatttaacagaataagaaagctttgctggcataatctttctagctaaatcattctaaaagtattatttatggtttattatgttgtattaaaagtattttgtatgttggataatcatgtattgcataatcatttataatttaagttttttttccctaagtttatagttttattaaaaatttatataaaaaaacatataaaaaaactcgaaggatctcaaattcagacttcatagtcttattgggatggttatcttgcttgaccacaaaaagaggggaccgaatatctgtttgtttctagagaaaattaggtgaaatgattcttctatgggttttaggaatcggaaatttgtttatttgctcagatatttgaggtttcttgttgattttaaagaatatttacttgatgaattagaagctgttagctacaacttgttggtaatgtttgcatgtagatatattatgaacttatattgatttttttgtttgtttatgatattcctaatttaacacccaattcttgtattctagatttcttgcatatgttttgtattattattgctaattagcgatagcatctgttaaaagtttataggcacggtctgaaaaaacaagtattgtgctttttattgattgttgttactgagctagtacgataaataacaagtgatattgtatgttatcttgctcggttctgtgatacttatgacaatgtgctctgcttgttgtaaaccagataatagaaggagtttcagtgctttaatacattga

SEQ ID NO: 79813 - DNA, 683 bp, Citrus sinensis
  Intron number 1 from transcript orange1.1g021956m (locus o range1.1g010300m.g) derived from phytozome v7.0 (chr-ID sc affold00016; pos 276174 to 276856)
cgtcgtcgtttcgctccgtttataaaattagcagcgtgagttttggtaactcttaaaattgattgagttcagttatttgagtttattattgtttcgcgcctattattttgttactcaatgatctaatttccgcttaatgtttgatttattttcttcttaattatagttgtagtctgtagttactgttagattgttagttgatggagaatacatatatataaaaaaattcgtcaaccccaatgctttgagagagagctgcacaaatatttgttttgtagttactttatgaacaaagggttgttggttctaattttaaccaagaaggccaaattcaaattttggctctatgtaagaaatgtcatctgtcaatacattccaattgatgaaattctcacaaaacggtaagaaaagtataagaaggagataatttagctttttatgtattattggacttgtgtcatgcatttagtgaagtgaatgattcggtggtttttcattgggtttatgctcctgaatcaaaatataactgcatgtgtatgtagcgtctatgtggttgtttggcgaaatagtgtagaatttctgttctgggacaatatttttatagttgtgaaaattttgttctcgtatatattattttcaaatctctcctgtccttttattttttgtgtatcttttagttggaa

SEQ ID NO: 79814 - DNA, 599 bp, Citrus sinensis
  Intron number 2 from transcript orange1.1g021956m (locus o range1.1g010300m.g) derived from phytozome v7.0 (chr-ID sc affold00016; pos 276985 to 277583)
gtttgtaaaagaggtgggtgagagatgctaattgtctcttgcatgtatttttttattgccatgtttctgaaaaaagcttagttaactttgtgaattgttttttttattattattatcttgtccatactattgatgctttatctttcccttattcagattaaaaatatcttgcttagatgttcattttaggatgctgattgatgttcaattttgtgctgtttgctgtaattctgaaggtttattcatgaaaatttctatggttcttagacaagaggcaaagttttgtatataaaatttgtaaaacagataaaactccagaaagttttgttgtggtttttgttctaagtgttgtactcttccttggttgggtttgaatatcatccactgtttactaggattcaaggactctttgtcttcagtgaatgaaatcttgtaatgatcaactactggatgacttttgcttgagtatgaatggtctgccatagacatagtgtatctttgtttggttgtgcaacttttatgcctatattttgatttccatgatgagcttattttggaaggtcgttgtaaatattcatgtaatctacattggcaggggg

SEQ ID NO: 79815 - DNA, 854 bp, Citrus sinensis
  Intron number 2 from transcript orange1.1g019268m (locus o range1.1g019268m.g) derived from phytozome v7.0 (chr-ID sc affold00010; pos 1754531 to 1755384 reverse strand)
aagaggaagtgaatcctttctccgtaagttccttcttttcaagttcggttgctgattttgtgtggtttattgacattctgaaagtctagggatttattttagttgattgatgaagttagtgaaagtaatttggtttgatttaattcgctagatccgctctgtttttgtggctttgtgtgcaaaagtcaactctatactgaatgtgaaactgatgcttttacattctggttttgagcttctttagttttgttccttgattatggttgttaaggttttaaattttcagctggatctgttaatttctttgtacttaagtttctccactttgattttaatatatttttgagagatcttttcttttccctagttatgaataggtgcctctcaatttcattgttagttcttgatggttttgttgtttaattactggtgcacttttatattatggccggaatttttttttggttttttggtttatctagtttattgtttttgagctctttgtttctaaccttgaccttatcatcacgatatatggacactgcattaccagtggtgtaccttagttaacaattgcgagtacattgcttgacatgggccaaattacattatcaggttcacttgcaacttaaacaaaatgagagttcatgtgatgatgtttttgacttttcgaatagtaatgttgtaaagttatatgcttgactatattgattttttttttttcaattttatattttggttcttagtgttcaatagtgcttaatgcaatctgacaaataactgattaaaatgctctttgatttcacgtttcaataacaggacccagctgttagggggaaaagctcgggccaatc

SEQ ID NO: 79816 - DNA, 927 bp, Citrus sinensis
  Intron number 2 from transcript orange1.1g029079m (locus o range1.1g029079m.g) derived from phytozome v7.0 (chr-ID sc affold00010; pos 1649078 to 1650004 reverse strand)
cgcaaaggcgtaagcgtcttgaagaacgcaagaaggttcgatttttatttctcttgtttccctttgaatgtctcccgtttatttcgacgcagtgatactaagtttgtggttgaagctaacactctcttaactcataacaacggtttcggaccaacaaatggaccatttgttccaagtaatatgttttcttatttctgtcttttttactctgcagtctgcatatagtaggagtaagagggaagtagttagtttgcatgatgttgcaatttgcaaaattcaatggatcgttttggtttcaattgatatcctgtgatctattggtgtgtctttatttgatgttgccttgatttgagtttgaaggttgttgagtattggttacttgctggtatcataccaagctactcttcccccaccccgccgcaccccccccccccccacgtgatgtgtcactggacatccagcccccgaaatggatctacacactggaatatacaatataggctgcctatgctagtggcttgagataaaaattgaacttatgataacttatgttgactgtggtctgagcttctcccgtgacctcaattgaacttcgttctatattcctaagtttgtgtttctttgcaaatagcctaaacatgtcttggcccgggttagacctgagacagcaataagggtttggtttaaatagtgtaaattttgcaaataaccaatatatctgtacatttcttgttaaaacatccttaagtcaactaaacttgtcctttaaccttaggactaaatgctggtggacatcaaaagcaattacatatctatattggattcatgtgtagtttgacaaacatttccaaggtatgattgccttaattattaacagctttgtctcatctttgtggcagaggagattggagagagagattgtgctat

SEQ ID NO: 79817 - DNA, 323 bp, Citrus sinensis
  Intron number 2 from transcript orange1.1g007049m (locus o range1.1g004693m.g) derived from phytozome v7.0 (chr-ID sc affold00016; pos 1411914 to 1412236 reverse strand)
gccaaatatcttctctgtgttcacattgtttgaaggtaaaaaaaaaatcttcaacgcaagttaaaagcttatcttttttttttggggggggggggggtgtttgtttgtagtttaattattaaaggcttctagatttatagtgtaatgctaattttgactctgggtagtgatttgtagattaactttctttctggtttgtcatgcactattccttctttttttttttttaacttcttgtttgttccactgctggtgttgatttttctatattggtttattttgtaacagattttagattgattatttctccaagcctatagtac

SEQ ID NO: 79818 - DNA, 448 bp, Citrus sinensis
  Intron number 2 from transcript orange1.1g040028m (locus o range1.1g040028m.g) derived from phytozome v7.0 (chr-ID sc affold00894; pos 54145 to 54592 reverse strand)
cttactcattggcttttcaactccttcacttggtaagtagtagctagactcttcacggtttcagcttgtatcttctcttcaatttgatttttttttaaaaaaattctgttggtgtatggaaattaattgggtgcagaaattgattggatatgcatagaaattgaataaatttgttgtagaaatcgcatgaagaaattgattgtgttttaatttgggtagctaaatgcaaatgcatatggattttgattttttttttcctctcaggttgattacaagttattatatacatgattttaggtcatttgtcgatttatggctgattttgtgtttttttgtcttaaaccatgaaggcttgaattattttctgcatctagatgtaattttaggcaaagataagttttgtaataaaatggtgatccagaattatgcttagcaaatgtttgacaga

SEQ ID NO: 79819 - DNA, 555 bp, Citrus sinensis
  Intron number 1 from transcript orange1.1g004061m (locus o range1.1g002960m.g) derived from phytozome v7.0 (chr-ID sc affold03170; pos 2438 to 2992)
acaagcttggcgtcaaaacggtgagcattttcattaagtttgtttgctacttatttattatgtaattttctaagttaagaacaaatcaaccaaagattattattaaaatactagtaatgtggactggcattaatttaattgtaatgcttatttttttgttccttatccaattaaattaagaatattaggcatcatatggactaatattctatacaactgcttttttttatttgatttgatttgatttttgggtgtgttagtggtgtctttgttacttgtttgatttgctagggctatgtttgggattgagattttgtagattagaagactgctgtgaaattgaatcactaagctgtcaagtacaagtggataactagtaagtaagctttagccacccagtaaaagtgggtgttgaaccaacacttgcttgttgttttttgacaattaagcatacaaacattagccaagtcattgaattttttcttttaaaccgctaattacttatgtgtttggagcaataatttgaggtgggattgggtggtgcagccaggagtg

SEQ ID NO: 79820 - DNA, 596 bp, Citrus sinensis
  Intron number 2 from transcript orange1.1g002878m (locus o range1.1g002878m.g) derived from phytozome v7.0 (chr-ID sc affold00004; pos 1521998 to 1522593 reverse strand)
gcggtaatatgaatgcctccgtatctgtttatctttatgtacgaaaatccatgtctattaggatatagagggaaatgtgtaattgtgtcagctaataaaggctctaatttgttcttgtttgagtgaagtttgtgtatttacttgatttttatgcttattaggatacagaaggaaatgtgtaattttgtcagctaataaaggcatctaagttgttcttgcttgagtgaagtttgtgtatttacatgatctttacgcttttttcttttctaatgtacttacaagagtattaggatttgttatttacttggatgattattggaacaaaattgcatcaattctttaaggcatttacacagttacgtgttttagaaggtttgttacatgattattaggtttgatttccacatttcaatgagatttttgctatgccaacatgagattgtgtgtgtaacatgaaagttattggatcaatgaataaaggcaataatttcattatttaaggtaaaatgttggtacttccaaaattactgtttgattgaatggccaacttgatagacacaatttaacaaatgtagaattctaagctcaagaaatca

SEQ ID NO: 79821 - DNA, 577 bp, Citrus sinensis
  Intron number 1 from transcript orange1.1g029957m (locus o range1.1g029447m.g) derived from phytozome v7.0 (chr-ID sc affold00501; pos 99376 to 99952)
cagccccattgccaattggaagatctctagtcctggtgagtttttgaaatcacctatacatttcatgattctatttgttggttgtacagaattgtattgactcaattagtctgagatcaagcgtaacatattcttttagaaatgataaattgtttcaatcatactttttaattgctcaaaagagcttttttttttggttaaatcctgatatattgtgacactgccactaaggccttggcctagtcaccatgggagctcaaacatttcctctcccacaaatgtgtgtatgggtagatatcttcccctatattaggaggtgcagatttctgagctgatcttggtagacgtctgggctataataagtgtatttatttagttttgagtagactttagattgtaatatttgtagattgtgaccaattctttaaaaaatgcataatattgtgtttgatgtattggattgattatgattttaaaatgtattcaattggttgtagttgtgatttaaatgagcatagagaatgttttgtaatcttttgttgtctttcatttacttgtttaggcgatcatccggaag

SEQ ID NO: 79822 - DNA, 341 bp, Citrus sinensis
  Intron number 1 from transcript orange1.1g041340m (locus o range1.1g041340m.g) derived from phytozome v7.0 (chr-ID sc affold00010; pos 92254 to 92594 reverse strand)
tcactgtcgatttaaacaaaccccttgtcttccaggtagagttgcattgtgatgttccgaacatttgtgggttttttctcttcttttttctttttctttttctttttctttttatatattcttacttatctaatgtacaatcaattatgaaaggaccaatatgtgaagctctcttgcagttcagtgttacacattgaaactgcttgttctttttgtttgatttcgtagctcttgattagattaattacaagttcatttcaatggtatttcgatttgtgttgtttcttttaacctttggagaatttgacacaggtcggtcatcttggagaagcttatcagga

SEQ ID NO: 79823 - DNA, 518 bp, Citrus sinensis
  Intron number 1 from transcript orange1.1g031178m (locus o range1.1g029885m.g) derived from phytozome v7.0 (chr-ID sc affold00007; pos 2567855 to 2568372)
ctccttattctccaaatccacacggcagtaacaaggttttctctctctcgcaatgtgaaaattatattttattatgtgtttgagctgatgtgtttgcggtgttctcgaaatttgagaatacatcttgcttgtaaattctgtgggtatgattgatacctgatgcgttattgttcttcatttctttcctttctgtggtaaaacaattcgttataaaaaattcttcctttataaagaaatgcttcattttgcatattcgattgcttcaattagcacgttctttcgccaattggctaatttttccccttttttaaaaaaaaaaattatttattttgaacgtggacaaactttcatgatactagttttttcctaatttctaatgtctttgtttcttagtcccttttttttttttttttttgcccaattaaaaacttgagattgatttctgatatattccctttgaatgttttgttcttttctttgcagtgagtgccaagttcttaaggcgatccatcttagaa

SEQ ID NO: 79824 - DNA, 887 bp, Citrus sinensis
  Intron number 1 from transcript orange1.1g033096m (locus o range1.1g033096m.g) derived from phytozome v7.0 (chr-ID sc affold00010; pos 2152600 to 2153486 reverse strand)
cattcctccgccgttaccggtgccttcaccttccggtcagttaccatacccattatgtagttctgtttatgtgcgtatttatgtgaactggtgagatttatatataatttgtattttatttttaaataccccgaagaaaaatgtttttattgaatcatcagccggaagccgttaacatttaggtatagtgttgtttactttcatttgaggttctggcttgtttaaagggttttggcttttgtttctgagcaattatcaaatgaattatttcataaattattatcaaattgtcaactgaagaaaaggaaaaaatgaacttatggttaaatattgcaaaaaatattctcatggaaatattaattaactaatttatccaatgatacataggttgtcaatacaggtgtgaataagatatgtgttttaagttgaactttgatttgcttttctattgcaagaattcaaggtatttggtgcatattttcatgtttgccctgtgtggtacaacttgagggttcaattggcatgccaacattcctttctccgtgacttcaattatatctcctatcacattgagtatgatcaccagtgaaagttttaatccttacacgcatttaaagtgctgttgtttgtcacattggtatagtagttgccaaatgacgacaacatggtggagtgtagctagagtgaattctctgtctcaagagtcattttggctgaccttaacctgttaccatcaaggttttactggatctatatgacttattgatttattttccattcaatgtgatttttcctattatttgtcgtgcttgcaagcataatctcacagcattatttggtttgctaaacttccgacaactttgcctgttctgtaattttggacagaa

SEQ ID NO: 79825 - DNA, 730 bp, Citrus sinensis
  Intron number 4 from transcript orange1.1g032735m (locus o range1.1g029600m.g) derived from phytozome v7.0 (chr-ID sc affold00117; pos 437553 to 438282)
gtcttgcttcgtcacaaataagaagaaaaaactgtgtaagcattttgcccccccctcccaccaaaaaaaaaagaaaaagtcacacacatgtgaccttgcattttatatctggtgggccatgattttaggtgcaaatagtgttcagcttgttggtagtggtgataaatgtaaatatggagtttgaggaaattaataaactattaaaaaattcaaacagtaatgttttaaaagattagtttatctgatgaaaatgaggagctgacatttgtaagttaaatgttcgacaatgtgtttaaaagcattaaaagtttttttttttaatggagttttctgattcatatctttgattgtgttttaatttaacacaaagtatgaatttcttgtcttctttttgtacttgaaatattgagaacagcatttagaaagtatactggcaaagaaacatgacctgatcaatttaataaaggtttgcaaccgaactagtacctacaagccgctaggacttggttcttttcctaaagaagtaacattatttcttcttgacactgtgcatctttttatttttatatcttttggtggtggttcttataactgatggattggtgatgagttaattgggatgacatggttttgccttaaagatgtaactctggatcatcttcaatgttaatgaactactggtttcattttgtcaggttttcagtcatccacatatctatttctttacgga

SEQ ID NO: 79826 - DNA, 554 bp, Citrus sinensis
  Intron number 1 from transcript orange1.1g045773m (locus o range1.1g045773m.g) derived from phytozome v7.0 (chr-ID sc affold02725; pos 9505 to 10058)
gaacagtgcccctcagcatgtaaacttttcaacagtagcacagctcttattccagaggctgcacagaagagcgacctgaatcctcttcaaaactttcaaatttttatcaagtgaagctttcaaaatttctcaacaaattgattatttggtgtggctgctacattttgtgcaactgctattcatcttcaagtacaaattacttgccttctaagttagggaagacagatgtgaagcaaacagggaaacagaacaaacagggcaaaaattaaaataacagaacagcaatggtggcaatcaacaaactaatagcaatattacgtttgattctttagctcaattgttccttctctcagcattcttcaaaagttttgaaaactagatgtgaagcaaacaaaataaaacaaatttagacaacagaagccctgtattcagcacgatatatgctagaaatttcacatctaaaatgctagaaatttcaaacagtaccagcaatagaatttcttattgataaaaaaattagaaatttgtctaattttgcagcttacggaacatct

SEQ ID NO: 79827 - DNA, 360 bp, Citrus sinensis
  Intron number 1 from transcript orange1.1g030763m (locus o range1.1g030763m.g) derived from phytozome v7.0 (chr-ID sc affold00070; pos 463857 to 464216)
tcagtttcttttaaatcattcctgcactgcttgaggtgaaaaagctagggtttttgtttttttcagttgcacataatcatgtttgtttatacgaagaataattacagttatttgaggaaataaaggatctgatgaagatgggtatttttgttttcatttatttttctcatttcagctaaaaagttataaattcaaatagtagactttctgcgggaagaatacgttaatttgggtttatttgattgacaatttatgattgaaggaattagtttttgtctgataaaccaataacattggttttgaaattaagttctaatacaagcagctacgtttgcaggtgattttctcctcacagtcaag

SEQ ID NO: 79828 - DNA, 865 bp, Citrus sinensis
  Intron number 2 from transcript orange1.1g030763m (locus o range1.1g030763m.g) derived from phytozome v7.0 (chr-ID sc affold00070; pos 464234 to 465098)
aattggtatttctacatcgcctgtgttgataccaggtatgaatatattcctataattagttcgtgggaagacatatatataattgtgttcgttggtatatctgtatacaaaattttttcaattgttgctcttgcaaattagattctgccttctaaatcagtggataacttttagaggaaatgtgtacaagttagttagctttcttagagtcattaagtattaacacatatgagcctggggtttgttgacaaataaacatgtgtgaggttcatttatttggtgtattatgtcacggttacttgtttgattctctttctattaacatgatatagcaagcactgttaaaaagggaaattatggaagcattcatgatttttaataaagtcttaataacacttgaggagtaaatccatgcaaccttgctcagattggtgtccacgattgaatgtgaccaagtatcataaaaccaagtcaactactgctgataactccagctttatgcaaccttttgtcttgaagtgtattttcaaagctttttgttccccctgctttctgcgtcacaaaaatattaatttaggatgagagatatcaagaagacaaaaaagatcatgttttggaccttgatttgatttgggactactatgtttatatattacctttttgtggtatgccaacgatggaagacaggagcatctccatgaggtgttaaaataagttttcatttgagtgcggcgtatgttatagtaaattattgttcttgctggacaagattttatttttttctttttaatgttagaattaccattaacttatgatacacttgaatacagcaaaaacaagaaactggtgcaaggagcaaaatagg

SEQ ID NO: 79829 - DNA, 908 bp, Citrus sinensis
  Intron number 2 from transcript orange1.1g023367m (locus o range1.1g020838m.g) derived from phytozome v7.0 (chr-ID sc affold00475; pos 9975 to 10882 reverse strand)
gcaggtcattttccaagtaagtttttcacttctcaccatctaatattagttgcatggacattaaagataattgcagaattctgtgttgaagtctgtactttggaaaatttcgtagaaggaattgaagtttggattatttttcatttcccaaaagtgtcattatgatattcatgatgccaaaagttgggtaataagcatattcaattatttaccaatgtcaaacttgtggtacagagacttaaccccttaaggttctgctttaagattcgactaccaactactctggctgtcaataaattagtatattagctcaaattaaacattggaaaaactgataactaaaactgtgcagctcattagctgaaagcttatttaccaagtgctactttgttggggcttgcaggttgattgcaatcaatctcaataaccccatttcatctttgctaatttggcggacatgtttattatatcaatcctagctggcccatttctagtcttacaaagccattaagatatgtgataagtaacataactacataagaccaatgcatccaaaagattgaagttgcttcccacacgtgattattcattatttcatcaatctttagtttaattgtatgggtaaactgtttctgtcacattcaagtaactgttccataatatttgatgttaattattcaataaaatctctaacatgctaatcctagttccttgctgcaatagttgagcatcagtttgttactagaaatgcatatataagcatgtaatatgaaattttcttgttatatttaacattgaattggattaaatgatttctttcttcactccctttatccttagtatctgattcaattctagtccttcaaataacaggtttttataaaggactccaagtttcaaggtgcaaa

SEQ ID NO: 79830 - DNA, 527 bp, Citrus sinensis
  Intron number 1 from transcript orange1.1g023367m (locus o range1.1g020838m.g) derived from phytozome v7.0 (chr-ID sc affold00475; pos 10886 to 11412 reverse strand)
gggttctctcccagttctgcttttagtttcctctggtaagattagttttttttaccttcattttgactcttgttatctggatttttttttaaaaaaaaaatttgtttattgaacatcttggttattttatgttggttacaagtcaacgcaggaaatctgtgattttattttattttatttaaatgttgcagaaatcaatatatgaaatcatgaaaaaaattttacaagcttaggggagtaatttagagttttattttcttttttgggatcacggtgttgggcctattacattacctgcaaaacaaaatgtgctaaaagtaagcagtagcatgacagtctcaaatatctaccatttagattttatcttgtgccatagggtacaatttcaagtcttattctttctggtttttgggtgtggtctgttcttcggaaagtgttaaattaatgctcatgtacatttttatatgtttcacctcatgcatggcaaaatttacgaaggtagtagttgttggaggaataaagattta

SEQ ID NO: 79831 - DNA, 517 bp, Citrus sinensis
  Intron number 1 from transcript orange1.1g000511m (locus o range1.1g000497m.g) derived from phytozome v7.0 (chr-ID sc affold00465; pos 50730 to 51246 reverse strand)
gattttatttgcccaaattctccttttgtaagaacttggtttcttcttcctttttcccttctaattattctccttcatatcaatttatttattttcatttcttaattgtatccaatttaaaatttcttatttattatttagtaatgctgtttaaagcttatctaaaagttgagtaactgactaatagactctgcctgtatacaattttaactcttaacgcttattttgtttgcacagaaaagcaaaaggaattcaaagctctgtttgtttgctcacaactgcttctttagaatcttggactttctgttaattatacttgagaatttgattatatttggtttaaactaaaaggggtttgcggaaaactttatttgttttggttattgaatagaatgttacatgattagtgtattgtgaaagaaagaaaatttggattttcgttaatatgattctctgtggttgatatggtgattatcctttccttttttcttttttttttcctcctggattgtcaggt

SEQ ID NO: 79832 - DNA, 844 bp, Citrus sinensis; identical to SEQ ID NO: 79716
  Intron number 2 from transcript orange1.1g033838m (locus o range1.1g032874m.g) derived from phytozome v7.0 (chr-ID sc affold00007; pos 114383 to 115226 reverse strand)

SEQ ID NO: 79833 - DNA, 572 bp, Citrus sinensis
  Intron number 1 from transcript orange1.1g042951m (locus o range1.1g042951m.g) derived from phytozome v7.0 (chr-ID sc affold00004; pos 3224773 to 3225344)
gctcgagccaaggctgctgaggccgcccaaaatcggtattcctttctttcccctcttttacttacaacaacaataataataatttgattcttgtttttcgtttagccgtttaacttcattaactgttattgaattgcatgatatatgtatcgatcatgtattatgatggaaacagttcccgttataggcacatcgaagttgaattgaataaacctctgttttataacaaaaaataaactaatctctgtttgacaagctatatctaaatcaagattttcactttttctactacttaatgggtgtcaggttttgaaagtcaggttttgaaatttacttgccgatgctctttcaaatttactattttttctcccttcttatgtagcgcaaagaataaatgaaccttgtacttctatgtcgaagtatcatctaaaatcttactgagaagctttctcgatgaatcagaacaagtcatctacatagttgcatagaggtttctctatagatcaatccgtacttatgttttggcaattattgcaggcaagagcagtttgaaaagtctgccgccggaagag

SEQ ID NO: 79834 - DNA, 376 bp, Citrus sinensis
  Intron number 1 from transcript orange1.1g014332m (locus o range1.1g014332m.g) derived from phytozome v7.0 (chr-ID sc affold00136; pos 224968 to 225343 reverse strand)
aagacgatattgctctcctcaaaacctatgtaccgtctattttctttcgaaggctttttttttgtctgtctttgatctagttgtgaaattagcgtttttgtcttcatttggaagctaattatagtagattttgcttgtgttggtgttctattgcgatggggtttcggtaattgggtgttaatttttgtgggtttgttgaaaagattgaagtttggacctaatgagattgttttgagtgtggggatgtaatgtaattgataaatttgtacttggaattaatatttgattatagattagctgaggctttgtttcgtaatgcggaagtttgtatttttatgcagggtttaggaccttattctactagcattaagaaagc

SEQ ID NO: 79835 - DNA, 344 bp, Citrus sinensis
  Intron number 1 from transcript orange1.1g002217m (locus o range1.1g002217m.g) derived from phytozome v7.0 (chr-ID sc affold00007; pos 2000105 to 2000448 reverse strand)
ttcccttatcccaggtccccctctttctcttctcttcttttgtatttgttgaagaatgaatatagccaattaagacttctgaaatggcaattcccatttatggttgcttttttatatcatgcaaatgcagtcactgatgagtttcttcttctatattagtatatcctcagtatgctaaaatactgaggtaatggttattgttgctgagttgttttgttgtatttattctggaatgataagtttcagtgacgacttttgaattttcagtagtctgattttcacaacccactaaacttcctttgtttgagtggattttttgggttgttgcagcggagccggtttac

SEQ ID NO: 79836 - DNA, 685 bp, Citrus sinensis
  Intron number 1 from transcript orange1.1g000092m (locus o range1.1g000086m.g) derived from phytozome v7.0 (chr-ID sc affold00004; pos 1279394 to 1280078 reverse strand)
atcccagctttctgaattttgcatcttctttccaggtttctcacttttacattctgctctcccttggggtgtgattctgaattggttttgaacctctgtttgattaaacttttctttgactttgatctttttgtttataccctttgtacttttacgtagttaatggggtttcaagtgtttgactttcttttcaaagtggtgtcttttggtgtaaatcaatttttattttcatttttttatgatcctgcatcttaggtaccatacttcactaaggctgcttttggttgcttggaagtggaattggacgctttagtagttggtgtcaatggatttggaatatagttgtgattgtgtgtgtacaaagtgtccatcagcaagttcgatgggtgcaacaggctaatttatatcactgaatccaaattccatttctaaatgcaactaatcagtcttattgcaatgccttgaatttttctcgttcaagttcagctttgtttatgaactttgcttgattttgattggttgattctcagtgccatttcttgatcaagttctaagaacttgatcctttttattttagattaaatgccatatgtttcaatgatcaaaccgaatgagaacaactcgattctacggtgtaactctctacccgcagtggtgttgactgtaccatttttctccttgcagc

SEQ ID NO: 79837 - DNA, 627 bp, Citrus sinensis
  Intron number 4 from transcript orange1.1g014498m (locus o range1.1g013736m.g) derived from phytozome v7.0 (chr-ID sc affold00060; pos 383602 to 384228 reverse strand)
tttgaagaacggaatcaaatcaggcaacaaaggaggtaatgtcttctgctaaatggggactcatccagtaggtgtaataaatcttttaaaacaatttggggaagaaaatgaatgctctgtgatatacttgggttttctcttgactcttatctgagctttggaaattgattatgatcagacagtctgattgatggagacatttattttcctggatcaaatattttgataaaatttttgacatgcataataataacatagtaaaaatattatgttgcattagatcattgattggtttttcatgagaaacgttttctactgggtttctcacacacacacacaatggggcatggatatagttatacataaaattttcatgcatgtatattctttttcagtcatcatgctgaaccatttcatccataaattatttgcctttttcctgttcagcctttggttataagtttgtgagcaaattcctgaaatgacgaatagtggctttacatgttcccagtatgtccttgttttgattttatgctagtgatagcaagtttctcctttgctatttcttttccttctttactgaacatagaggcttaatatcttacaccaatcattttaggcagcagt

SEQ ID NO: 79838 - DNA, 665 bp, Citrus sinensis
  Intron number 2 from transcript orange1.1g000041m (locus o range1.1g000041m.g) derived from phytozome v7.0 (chr-ID sc affold00025; pos 497377 to 498041)
ctcgccgctggccgtaaaaaggtttttgttttttgctttaattttcttttattcttggattataagtgtttagttgacgagaacccgcttcattgcctatgtttagctcataaataaatgaaatcactttctatattagttgcattattatatatatattagatttgcaatttccaagcctcgtttattatgctaatctcttgtattcaatttgctttctcagcaaaaaaactaatgcatttctgatggttagttgataaaataaatgaaaaactaggtttattagttgcgtagctttttggaattgctttactaggtttcgagtttgcgcgtctactgattagatttgtgttttcttaatcttgctttgtgaaagtgaaccctgaactcttttcttatgctaatcttatgatttttctgatcactagcttagaaataaacgaagaacttggattaagttctatgatttgtgtaaattacagtgataggattttctagtttgttcagtgcatttgctgattagatttgtgaaagtaaacagttgatctcgtttatgctaatcttttatgttgataccatatagagagggaaggcttttgttgtacattttgatatttaatttttatttatgttttatcagcttcaacaattccgacagaagaagg

SEQ ID NO: 79839 - DNA, 834 bp, Citrus sinensis
  Intron number 1 from transcript orange1.1g035597m (locus o range1.1g035597m.g) derived from phytozome v7.0 (chr-ID sc affold00209; pos 196411 to 197244 reverse strand)
cgcacgtgcggtgtaagtaattgatgttattaatttatttttaaaatctttttttggcatttataaacccgttttgtttataatttattttaaaattagaaacaagaaattcgctagagagaattacaagcaaagtgcgtttcattttctgatgcctgaaatcgaaatcaagataaaattatatgcttttgggtacacaacctctgtagtgactgtgcttccttgttgctaagctgcgcctgagagatcttgggtatcaaaatcttattgtaaatcttgttgcggtgtgacacgtaaggctgacattgacaacgtgtgctttttgatcattttgcttgatgggtttctgaagatttgatctttatttgctggctctcccttaattttgtatttgtacagaacatactgtataaatgtttcattctttgattttgtatttgtacagaaacatactgtataaatgtttcatttgtgtgtgtatgttttgcgatgacaacatttttctttggtatgctttttgggtatgagttgttccttgggattttgggagtgattatcaacagtttaataataaaagattggttaggtgtaagcatacgagttataaacatacttaaagattgtcatgcttgaagaaataattggatcttataaagtatcagtagagcttttattggttgatgcaaaattgactgaaaagtagtacatcttcttaatgttgatcttgtatgtgttgaacagtcaccaagattcaccgacaaatgtttttctatgtttgattatttctttcctgttccagaataagcttgctattttgaagttcatatacttgtt

SEQ ID NO: 79840 - DNA, 792 bp, Citrus sinensis
  Intron number 1 from transcript orange1.1g019046m (locus o range1.1g019046m.g) derived from phytozome v7.0 (chr-ID sc affold00533; pos 99110 to 99901 reverse strand)
tcagctaaccctgatcgccctttcttcattttaaggtactatttttgcttttgcttttttatttttccaactttttagcttgtggtgataagttgttctaatggatgatttttacccttctacttcttgtttgattgactgtagttttactgggttctgttattattagtattattattattttttcttatgtttaagttagatgaatattttatgtttcgaagaaactgattatctgggtaattttattgttttacacgggagtaataatttactacctagcacctagtaggctagtacctactagcataggcatgtcagagagtgaataatttccaaatggtatttaaatcatgaatttctttcaaattttttggttttaatttatgttcctattagcagctcatgataactttcatggtccctatcagaatttcttcctatgcatttgttatctactagaattatttgcataatattaaacttcagttacatcttgctgcaaaatcattcatttatcacttttggtcatttttttaggtgtgttaattgctgaattggcacagtggataaaggcagtgtagtattcagactttcaggttgatcttgtaattagcttttgggctgcattagtgagttggagtttgaacaagtgctcttgtacatatatctttatgcgagatgcgaagttaatttgcctatgctatcaaatcaacacctcagcaaagttggtagcttgaatgtttcatggattaattgttgatatgttttccacaactttcagtgctatta

SEQ ID NO: 79841 - DNA, 399 bp, Citrus sinensis
  Intron number 1 from transcript orange1.1g018378m (locus o range1.1g016805m.g) derived from phytozome v7.0 (chr-ID sc affold00070; pos 363571 to 363969 reverse strand)
ctcctattcatgtaataattctcctccgcccttttcgtttttttttttggaactttccaaggttcaagttttgtatgtttccatgtgcatttcttattgacctatttacgtgcctcttcatgtttctgaacaacagagtaaattctgttagtttttgagctattgcaaagtttgaaactttcaagctcgatgcaacatgaatgcttttgttgatgtatttatcacttacactagttttttaactcgtataaccttcaaatggtttgtttcataatgccggtttctgtttctcttaatttcttcttcatttgttaccattaagagtaaggttcaggcttttgtgtttaattcgtttcttaaattgtttgaatttatgatcttcatttttgtagacagaga

SEQ ID NO: 79842 - DNA, 312 bp, Citrus sinensis
  Intron number 5 from transcript orange1.1g029368m (locus o range1.1g023922m.g) derived from phytozome v7.0 (chr-ID sc affold00060; pos 472082 to 472393)
ccaagctggaacctagtgttggacacgaagagcttgtgagtggttccgatgtaattctgctggtgttgcttgttcacttttctgatcttttgatagtttgtttagtatgttactaacccataatcatcacttggatgctatatattgtcatatataacttcttttctttttctttttttactgtgtattttaattctcttttgatgttatcttttcactttgattatttatatagcttttagaacgattcttacaatttttattctcttttctgcagtgttcactcttatcaattgtggggaaagtgaagga

SEQ ID NO: 79843 - DNA, 767 bp, Citrus sinensis
  Intron number 1 from transcript orange1.1g006519m (locus o range1.1g005158m.g) derived from phytozome v7.0 (chr-ID sc affold00123; pos 262979 to 263745)
tgtagaaagtatcctttcacaaaatagcgatctgggtattgtttaattcccttgtttctcgtctggatcgaatttggtttctgttaatttttggttcttaatttcgtagatccgtgtcaaaatttaggtttttacgcgtttaaattacggttttcatggtgacttgttcgtttgtgaagaagttgttttcttgggaagtttgtgttgttcagaattattgtaatttgtttgtcgctacgtggtcttgtttatttttggtttcttctaaatgaattgatgagtgtttgtttttattctagttgggattagggttgttggttgctcgtgtggactacagtatggtagttatattgttttcaacagggatcttgattttactgttcaaacattgaattcaaaattatatgcttgttattggactgtagtttaagcattgcgatttataagttgaggttgtttgtaaatggaattttgtaaattgaagcatgtatgattgtcttgatattggcttttggctagcaaatttgtttcctttacttttttcttccaatagaagcatcagatttgctgcagaaattgtctttagattcgcagaccaagtctcttgaaatttctgagcataccaagaaggtatgttcacacattgagttggtgctaattttggctattgttcacttttttgggactgtctttaatctttatgatggatggaaactaatatgtttatgtttgattgaatttgttcatacagccctcagctaatcagt

SEQ ID NO: 79844 - DNA, 319 bp, Citrus sinensis
  Intron number 1 from transcript orange1.1g021959m (locus o range1.1g017884m.g) derived from phytozome v7.0 (chr-ID sc affold00004; pos 395493 to 395811 reverse strand)
tgacgtggccgctcatcgtgacattgttgataccagtaattttttttttaaactctattatctattttctagggtttacattccctgactgtttcttctaatttcctgtttgtttctggagatattgcaagaaaataaaatccagatacggaaaatattgcacggtttgagttttaacacattgttggatgcaatggttttcgtatccaatggctggtagcaatcgaatgaagaatcacatttttctgatacactttttgtttgtttttaatgcggttaaatagttgataggttgactagcgagaacagactgccccat

SEQ ID NO: 79845 - DNA, 553 bp, Citrus sinensis
  Intron number 1 from transcript orange1.1g029245m (locus o range1.1g029245m.g) derived from phytozome v7.0 (chr-ID sc affold00475; pos 61911 to 62463 reverse strand)
tcttcaaccaggtaagcatcagtcttatgttggtaccatttggttggtgggtcctataagcatatctcgaccaataaaagaacaagtctgaggtgattctgttctcatcacaccattatatgatcatatgatcatatgatcatacagtaacatactaatacttattgtcgtgcatacacaaaatgtatttgtattagagtgatttaataataagagagtctcaagttgacacgcgggatgatctcacctaaaacttttctcaaagaaagttatcgagcggagagtagaaagggtggtgatgaaaccaaagctgtaaacactccactttccttatacaaatcctcttctctttcgagctttgatcttccctaatcccttaacaaaccatacatcacttcacaaacacctaggctaactccttttgtcctttacttgaacggtttccattgccttgagaactaaaataattaattattactcttttgctatctcggtcttaagtgttgcctctctcttttaactatcttgtttcttgaaacagtgcccgaagaag

SEQ ID NO: 79846 - DNA, 751 bp, Citrus sinensis
  Intron number 2 from transcript orange1.1g003508m (locus o range1.1g002314m.g) derived from phytozome v7.0 (chr-ID sc affold00243; pos 78602 to 79352 reverse strand)
ctacttcgtgcagttctagctgctgatttggttgggtgagtttttgtcctattctgcctgaaactgttgcatgtcatcctactgccgggttttagtcagtaactaaatttgcatgccttgggtgtttctttttgactgttagttattaactggataagccttacatcagatgaatggtatactttaataatgtaaacatccacaggaataactattttactcccaattttggtgcatagtgtgattgtttgtgttaggtctaacaatttaagcaaatctagtggatgcagaaaaaggcagtgttttccttctctgggttctcgtatgttataaattctgctttaatctgtttatttattcataaccctctgataacttgaaagttatggtgcttcccatgctttttccaactgaggtctagtgttaaattaggacttttacttagacattttccttgacttagggtgctgtatgatttgaatagaagatcatgctggtctcaaaatggtattttgaaagaattctttgtgatttacataaaataaagggaaaggagctgactcttatgttggaatagcagctaaaattagattgactttactttcatgctttggcaacttggcttttatagaacaaattttaatattcccttatgccaaattcattctcatggtagtgatttgatcaatttgcattattttgtcactcgtgaatatgtttttcccccttttgtcctgcagttttcatacct

SEQ ID NO: 79847 - DNA, 855 bp, Citrus sinensis
  Intron number 1 from transcript orange1.1g010165m (locus o range1.1g010171m.g) derived from phytozome v7.0 (chr-ID sc affold00016; pos 43323 to 44177 reverse strand)
tgagtggtcttgttctggatttaaagcattaaaaggtcagtcgggttttcagtttcaactccgtttgttttgttttgttctgttttatatgtgtgtatgggtatattgcttcatttcgcatctgtttgattgatttgtttattattgtgggttagcttaatttatactcgttcaaaatatgtatatacctgtgtcacactgaccagacaattctcttatcttatgtccaacctacgtctgtgttcctatttacattctcttgcataaggctcactgttctgttaaagagaaatttggtttgagagagaaggtatcacttctgtgttcgtaatggaaaacatgtcttagctatcaaattctgatgaagcatatgatcattgaaatttgaatgtcacaaggtacagtttgtggtattgttgtaacataaacaaggctcaatttacgtccttctattttgcttggaatctataactttttttttcaaatatctcaacactaaataaggctctttaaaggatctgacttccgtaggagtcaagaatattatgattgctaatgctttcatcagtctttcttatattttcttgatgtaagcttcatatccttagaccattcttttgtatgatttctgtgtatattgtttgtcatcctttactctgattttattgaaagattcattcagatctaaaatatgttgttgaatagaatatggttggatgatgaatgttcaattgtggagctaagaattcgattgatgatcttcatttgtctatcctatttgggaacttgactctaaatggattctcttggtgttctatagacgtgctttgagaaaacaactgaggagctacgaat

SEQ ID NO: 79848 - DNA, 896 bp, Citrus sinensis
  Intron number 1 from transcript orange1.1g009046m (locus o range1.1g009039m.g) derived from phytozome v7.0 (chr-ID sc affold00004; pos 3770752 to 3771647)
ggactttggggattttttcgccacaacccagaaaggtaaaaaattcatttttttgtgtctttggtaatttggtaagattttatgatgtgggtatttcgatttttgatggttatttggtgcttgtataaaactttgcttaaaagaaaaattctcaattagggatttttgtgttgaaacaatcgaaggtaaagttccttcttttggactccgtgtatttcttgggtgatttggtgggatattaattcgattattgctggtttatttgatgctactatatgtgtttgcttcaattttaaccattaaccttagtagctatggctgatgatctttcgttttgacttttgagatttttctgttgtttctaatttacatggatattctgttctgtgtttccttatagcttgtattcaaggtattttgcatctgctatgttttgattctctgttatattggtgaatgattcaatgaagaattatattcaatctttataactttaataaaaataatcccatgttcttctatggttattgttattgttcaattttgtttacttaatttgattttgttcatatcacagggctcatacgttgatttagctatcttaagtttctatatctcttatttttatgaaaaggctaatcttaactgtaccaatttgctgctaaaatactgccagaagcaagtatggagataatgtttttgccaatgcacaagtttttctttgtatatccaaacattgtatatacttgtgcacctttatttgagaaatatttggattagggaagaggtatattggcaataagcatgctgtttatgtgcatctattgactcacatggccttcttgtttggataatgaacagcagcacttggcttgtgctttgacaagtttgataat

SEQ ID NO: 79849 - DNA, 902 bp, Citrus sinensis
  Intron number 1 from transcript orange1.1g006261m (locus o range1.1g006252m.g) derived from phytozome v7.0 (chr-ID sc affold00016; pos 1244214 to 1245115 reverse strand)
tcgacggttagtgaatgaacttctttttagcatttttggtattatcttcggacctttatattgcaaaacgatgtcgtaatagcctgattaattttagattaagcattataggcttaaacttcctcaggcaccaatcaatgaatttccataactgatgctaaacgatgtcgtaatagcttgattaattttaggttaagcattataggcttaaacttccttaggcaccaatcaatgagtttccatatgtgatgctaagtgatgtcgtaatagcttgattaattttagattatagacttaaacttccttaggcaccaatcaattaatttccatgtgtgatgtatcagtaattattggctttattattgcttaaaacgagagatcctttcaaactgtttgtaaagtgattacttgtcttaacatctcatggacttatattagagcctagtgtggaatttgcatccaaactttacatgtataacattttctcatagttggaatgcaactatcatcaatgatgtcataataaagttgataatcactaatacatgatatttgttgactagtgctgcatgggttgtgacttggacaacaattaattatcactgtacaatgctgtctatagtgctcaacccgactctctattgaaaaaacttaagctgcccccacattttcattcttatcccacaacttattacgtattatgtaataatcaaaacacttatcttaatgtgtcaacaacagaaaacttggggtataatggaaagtttgaggttttcaacaggcagtggtagggtgctcagaatgttgcatgtcttcttgttttgaaagtggctaagtattttcagtttctgttaatcaaaattttgtttttcttgtcttttgtgacgcagcggaaggggaag

SEQ ID NO: 79850 - DNA, 809 bp, Citrus sinensis
  Intron number 1 from transcript orange1.1g009497m (locus o range1.1g009497m.g) derived from phytozome v7.0 (chr-ID sc affold00225; pos 253146 to 253954 reverse strand)
gctaaagaagttcttcaggtttcctatacgaacccccttaagttggaaagatatattgattaaatttttcactatctcattttttgagttcttatttagattgattcattacaatagaatataataattcatgaccttgatatcaaaattttatttgtaaaattgtcccaactagaaaacacttttcccaaaaagttaattaatatatatgaaattaaagtaaatttatttttaagttgggtcagttgcccatattctcttgaatataaatccccacccttaagcgaagatgtaatatatgtgtaatggaaattaaattcttttctattgaccagatgggcggattcaaaaataatcaggcctctcttgtacttatcggagtatatattttaaactttttacctacaaaatcttatatttctttttactactaatttaacaataaaatacttttctaaattattcatccaaaaattatagtttctatcttaacttagtatttctcaataactattttgaaaaaaaggctatgacccccgaatgaattgatgaaatagttatggaaaccactttattttgaagaaacaattatatatatcctttttaggacaacaatactcttcgattacccaactgcgcacgattgttagaaaaatattctaagtaagagggtaacaaaggcacatgctttgttttttggttaggcagactactttttttaagttattcgctcaaaaaatttataaactaaatttctggttacatcctgaacaggctcaagatctcgtcttcgcaaaccggccagcaaa

SEQ ID NO: 79851 - DNA, 680 bp, Citrus sinensis
  Intron number 2 from transcript orange1.1g001905m (locus o range1.1g001111m.g) derived from phytozome v7.0 (chr-ID sc affold00035; pos 615348 to 616027)
agaataagttggattcctctgctgaacctaagcaggttactgttgctaagctatctacattcatgttgtttatgaattatttgttttgttggccagcgttcaatctatgttttgtggattgtgcaaatagcccatgagagccattgcatgttgtgaatttctgagcttagtgtaaacatatttttagtggaagttcataagggtatgttttcaactcttcggctgaactttaaaaacagggattcctagcatttgcccagttatacttgaccgagttcttagttgatttatttacagagtctatcttaaataactacaaagtgtctatctgatacatggaaatcccctaggattccacttgcttgtactcttaagtttgaaactagggattattgcccgtacagtctttaatggttaacccataagatatgatatcttctgttggttttgaggaacctcaaaactcttggttggaaacttgaccttggattatacagaaggtgcacatttgtaaaagcaatttcattagtgctagctgtaagcaattggtttgcacatatactggtagttctgggttcaaattggctatttgtttgtggtttcttagcatgctctctagatttatagtgatgaggttcacacttctgtggtttctcatgtaggttaatgttgggtgcaga

SEQ ID NO: 79852 - DNA, 390 bp, Citrus sinensis
  Intron number 2 from transcript orange1.1g002722m (locus o range1.1g002306m.g) derived from phytozome v7.0 (chr-ID sc affold00035; pos 664418 to 664807)
gagggtttctctcattctacaaaaccctaccaaatgtaagctcgcttttttccatttctctcacatggacatgggtgtgtctttattttgattacaaatgttaattttgtcttcttaaaccttgttgtctgtttgtttgctgagaaaatgaaatataacggaaaggaaaaaaagaaaaaaaaaactgtgatttgtgggttttcttgtcttgacaagatatttgttttctcgtaatttttcgtttactgtgtgttgctaacaggaggattaatgtgggaaatggaaagagtcgttctatttattttttattcaaatatttttttaaaattactaaatttgtccttttatgctgcaggacacaagggctgttcggttcttcgatcgcagggt

SEQ ID NO: 79853 - DNA, 664 bp, Citrus sinensis
  Intron number 3 from transcript orange1.1g002722m (locus o range1.1g002306m.g) derived from phytozome v7.0 (chr-ID sc affold00035; pos 664771 to 665434)
aggacacaagggctgttcggttcttcgatcgcagggtcagttcatgctataagttaaattggttgttattattggttttatagattgacgattgtaaatttgttctatatagtgtgtgcgtgtgttccaactaatgcttgtaatttttgtgacgttgctctatttttaaaagaaattaatctgggaggtttcttatgatatgaattttttgcattctttctcaaaagttgtccatttggaaaatggatgtcctttcttgccattttcattcacagaatttctattttaccaactgaaacactaagaacaagtttttctaaaagaaaccaaagaagaccttgatgttaagaattgcttaatcattagattgttgaataagatgtttgccattttaattggtttatctcttgaaggattttggtaatactaatttatgttatgcataatatttaattggagtaatgctgcatattgctcatcttcactttacatttcttttatcaactgtattttgaatttcatctcatggtttataagcattcttcttagtctgacagagttttgttgttttatttttctttcttttccacgtataattttctaagttatcatgtttaatggtgtttctctattttcttaaatatgcaggactactatactgctc

SEQ ID NO: 79854 - DNA, 555 bp, Citrus sinensis; identical to SEQ ID NO: 79819
  Intron number 1 from transcript orange1.1g009207m (locus o range1.1g002960m.g) derived from phytozome v7.0 (chr-ID sc affold03170; pos 2438 to 2992)

SEQ ID NO: 79855 - DNA, 797 bp, Citrus sinensis
  Intron number 3 from transcript orange1.1g029244m (locus o range1.1g026219m.g) derived from phytozome v7.0 (chr-ID sc affold00238; pos 88598 to 89394 reverse strand)
gtggatattggaagtggtaactcctcagaataattattctcttgcataattgcttattatcttaatgatcatcgtttcttaattgcaattcttcagctacattgaacatgccaatattcaagcagaagttacgtcctctttgtttctttgtataaatactaatagttttgcttatgaaatcatcaatatatacaccaaataataaaggatgttatataggcaataattttgatagaaatgaaaacttttaaattggcgaggctttgttgggttgagctatggcatgttggtttgaattaaccgatgtgcatgggtgaaatacttattctcttgctaacttgtcaacatttaattttccttcctccaaaaattgtttaattgccgaatcttgattgttattgtgtctttctctatacttttcttggctgaatggctaaagccactgagagtgccttttcaacttaacctcaggcacttctgtgcccttccacttggcagatggcagtcctaaattattaaccctttcaacgaacaatgtgagggaaaattttgtagatacatatggttattttgctcagttgatgagatttgtccttaaactttcctttaaatgttagtcctgattactgaatgtgcttcagcgggttggatgtttggttgtcatataaattttattcctctggtagttgtattatcatgtacattgtcaccagtgttattggagataggaatgtatatctcatgttgacctacatatctaattttgaaaagcccccaggtagtggcagatttctcat

SEQ ID NO: 79856 - DNA, 642 bp, Citrus sinensis
  Intron number 2 from transcript orange1.1g010016m (locus o range1.1g009998m.g) derived from phytozome v7.0 (chr-ID sc affold00047; pos 246254 to 246895)
gacgaactaagagcaaagagggtgagtggagttatgtattatcaaatgcagcatcattgcatcatatcaacatatcattgtttttaggattttgtaataagtaatcagtatttaaatgattcaagaacccataatattaatgagtgtcatacatcagcttgaaagttgtagctaccaaattaatatttaatgagagtcatgcatcagcttgaaagttatagctaccaaaatgcatgtgtataagaaatgtgatctttgaatctgattgcttattaatctaaagataaatgaatatgccactctattttttcgttaaaggtaatttttagatcgtttatatttggtttttattacaagagataagatttggttttctttttgtgtgaaaatatgaattgtagtgaagagtttcctcaaattgcgaagctgatggacaacttcttccaattattatgttgaataatttttctgcttaattacatttcattgctccagtgttattagcaaaaactccaaaaatctgcccaatatagaaaaaataatctctgtttgtggacctgttaaagattaattttgttattgagtttttctttcttctctcatgcagggagttagaggggatttagctgctcagctgaggtc

SEQ ID NO: 79857 - DNA, 745 bp, Citrus sinensis
  Intron number 1 from transcript orange1.1g025503m (locus o range1.1g025437m.g) derived from phytozome v7.0 (chr-ID sc affold00004; pos 1584677 to 1585421 reverse strand)
ggccagacttgctgagcaagccgagagatacgacggtagcgtttcagtttttttttttttttttttttgtgtgttcaatttgtttggtgcatggcaaattaatttgcatatgttcatagatttatggattagtagttataattactctgattatgttagtttctgtgctttaattagttgtttgattcatgcaattgatgagcttcaccaagtactgttgctgtgttggtgtcagctactcgttactttcagcgttatttgttttacgctttaagggagtttatgctgctagaagagactattttttgggcttgttcctcaatttggtcgctgatctagaagatctatgtagtgcattcaagaaatgagtataatttcattgttaatttgtgttcttttgtaaatttactgctatgaagctagtgtaaaatgatgaatgaggaagtggctggactcttagctaaggttgaacctgatcacttgcccagagtgtcgtgtagaaacattgatttgttgtcttgtgtgatatttctaatatggtatatgtatatgaagtgcagtatacacaaagtaaacgttgatatgacagtccccccccccccccccaagtctgattaagaaacctttaaatgtagtaggttccatatttgaaagatgaaattgaactttttgttagtgggaccattttcagtattttctacttgagtttttctcatttattgttatttttttccttatattagag

SEQ ID NO: 79858 - DNA, 891 bp, Citrus sinensis
  Intron number 4 from transcript orange1.1g001121m (locus o range1.1g000392m.g) derived from phytozome v7.0 (chr-ID sc affold00349; pos 56909 to 57799 reverse strand)
tcatttatttcaaggtgagtttgtatcctacatgcacgctttataattgatatgttcctaagttgagtaaatattgattgaaattataattgatatgttcctaagttgagtaaatattgagtgaaattatcacattttcatagcttcagcgacttgctctataaagttttgtacattcgtaattttcattattgtcctttatcgaatgtaatgaatggttaccagcctacccctatacctgatgaattgctaaaactcttttttaaaaaaaaaaaaaaatgggatttggttgtgtgttgggtccagaatgtctttcaaatgatttctggcttggcaggctgagaaggaagttatggctgatttagaaagaacaatctttatagacgaatagtaatcagatcctgattcacgctcacgaagacttctttctgtgcataaatagcttagtccatatgtattgcctgtgcctatgtaattgttgactttatttttcttttttggggctatttggctattcattgctttaatctttatgtatcttttattcttaaattactttagttacatggtttcaattgtaattgagttaaattattttgagttactgtagactgcactgatcttcctttgaaagaaattgcaatttatgttgaactgcactagagctcaatggatctagttctgttgagagtgttttctacaatacaggacgttatggattctgagaagtttgctctctgaattagtcaaatcattctgtggttgtgcccttcttattgtgtctataaagatataattggacacatcttattaattgtttctcatttttcttgtactgtatttgttctgatggcagggtgccaagatccttattgccaggtgctaggagtt

SEQ ID NO: 79859 - DNA, 843 bp, Citrus sinensis
  Intron number 3 from transcript orange1.1g001121m (locus o range1.1g000392m.g) derived from phytozome v7.0 (chr-ID sc affold00349; pos 57902 to 58744 reverse strand)
gcaattggtatatggtcaaatggtttgttaatacaagcaaattggaatatacaaatcttagaatatttgggttgatgcatggtttgttgaatgtcaatatatgttccaaaaaaaaaaagacgtgaagggtttagctcaaatgttcagtctttacatggttgtaaactaagattggtaagattccagtccttttcgtaggaacctaaatcattaactatatacgtgaggagtttgtataaataagattttgtttgtggccgttaccacatccatgtgtcagctatatgggtgctgaaaaagtagtctgaaagtttttcactctttacctcggagtacatagtgttatagcacaaatttcaaagttggcatttcacaagttgatcatacgagaacaatattgttaaactttaatttcatcagaagaagtaaaatagagtagcaatattaagtagacaatagtcctgactgaaagagctgctggcttctgattttatttatttaagaattgcatgcaagtttaaatttcaacgagaggttatgttctcatctactaataatactgtaaacgtttacatgattaggtgatgttgattttacatgttcatttagagaataaaattgttgtcgcttccacaactgtcattaaattaatctttatcctgcccttagaattttttgaattgaatgtattgttgctgagatgctttccatacgctgcagcaggaaggattttcctgaagtttacatttcactctttctacatcattaattttttcaaggattacatagctttctttctccaacctaggttttaattgtggggaagctgctaactttggaact

SEQ ID NO: 79860 - DNA, 1023 bp, Citrus sinensis
  Intron number 2 from transcript orange1.1g048268m (locus o range1.1g048268m.g) derived from phytozome v7.0 (chr-ID sc affold00312; pos 63336 to 64358)
atccccaaggagcggaaactgctgttctcctttcggtgtgccttcatcttcttgctttcagttctattacttttactagattaaaagttcgccaattacctactgtgtgtgatttctggaatttttggcttatattagaagagacagggtttggttctgaaaaaggctaaaaataatcatgttgtgcttgccatgctttaaccttaagtttttatggattgtgggtacttagagaaacagacgtggtcaaaggttttcataaaaagtccattggtcatgatatatgttttgttgctcttaacaacagcttcagctttgaagttaagtaaacttcttcactaaactcaggcgggccccttggatattttgatccagtattgagctttaaaatatccaaaatgcttaccagtgagatgagattgatgtttatcttaaagtgaaggtcatcgctcatcaaggaggttgaacttgtatctaaattggaagatgcatggtcatgaattaagtactgtactttaagcacttgatttagaaacttttgaagtgcatgtcattgtcttagtactagctactgcatcttttaaattcatgccattatttgcatcctcttcaaagttatggagcttaatgccaaaaaccttcctgttggattatatttgtatttgaaaaccttttgaattcaattttcttgtacagtttactgtcttttttgtgtcaagttataatgacatctcatgaccctgaaagatggacactggatcagaatttcaccatcaccactcactgttggagtcaatctagacttgttatttatctgctctactgtatctcccagtgcatctcatttgtgttgtttaaaaaaagatcacctctgtttgtattaatgcagatatgtttcttctttgaaagaagctctgattgtgtagggttagaattgccaaactgacattttaccatatacgtttcatgtggttattgttttcttcagggagcaacaattgttgaccagtctgttaccataga

SEQ ID NO: 79861 - DNA, 1019 bp, Citrus sinensis
  Intron number 1 from transcript orange1.1g001517m (locus o range1.1g001517m.g) derived from phytozome v7.0 (chr-ID sc affold00127; pos 274602 to 275620)
aaatttgcaaccaatcagaaaactcagagtcaatcgtgagttcttccacattcatcatttctcatatgccattgtgcggcttgttaatattcacttatcactgctaaaacatttagaggctaggtcaattagtgctgtcggtgaattaacttcttaaactaatgaattgggaaaaatgtactcagtaaaccttatgttttggcattcctagtaagttaatgctcaataacacgatactgctccttgatttgtcaatcatacaatgtaaatatctaaaaattttcatgcaacaattctctgacaactgaatactttatatacctgatagaacattttctattggtgtgactaatcattcaggtagtgcgtttgtgggtagttttcaccaactaagctcaaagaaactcataacctagccaatgtcaactcaccctagagcagagattacagcctatatatcaaatttaaggcagttatgatgtgaattaatcatgttcaatcgcgccagcttgaatgatcatgttttcttatgttccccccctcctttctgtctttgtttattgtgatcattgtttcacatgcttttaaatggctttgttgtgggaacagatattggcattgttttctggttgatcctgtaagccattcagctggaattttccaataagtgtatgtgatcatagaagtaaccagacatctttattgctatcactgcccctttgtgatagtctgatgtcatgagtggaactgaacctttttcttgccagaagcatgagagattgtttaaataatggttaaattggtggaaattggattttgtatgctaggagtgctatttgcacgcagaagtggggaaagaacagaattataattctatcttttctaattgcagattgaagaattatcttctatctacttttactgtagttcttattggcatatctgttgattctccatgtcaatgccacgcccttccaatttttatttgtaatttactgtgactgggtttctgtattagg

SEQ ID NO: 79862 - DNA, 958 bp, Citrus sinensis
  Intron number 1 from transcript orange1.1g021907m (locus o range1.1g021907m.g) derived from phytozome v7.0 (chr-ID sc affold00026; pos 137770 to 138727 reverse strand)
tcttcttgagcttgctgcccccatcaagatctgcggtcagtttttgtacttttagcttttattgaatttttgtgatgtgggttttgattgtgatgagaaattagtttgaaagttcgtggcttttttagggaaaattttgttttttttttggtgggttattttgagtatgcgttgaattgggttttattgatttggctctttcttgggatggtatattcctatggctttctagtaataatcgtatcaaaaatcttaaattcaataagcggagataatgggttagttagaagatatgaaaaccaggctatgtgaagagcattttggatcgttgttattggccgatgtgttcatttggaatggttcaatggctattgttaaagttagctctgtattaagtttgtttattggtattggtgtttctgttatttcgcatattgttgtctgttaatttgaattctgtcacttggtcatctatatatggtaaatatattattataacttacagcattatttatgtgtgttgagttattcccctgatgttgaacttggtttgtttaagctactgacctttttgctttttaaatatttccattgtctcgttttagtcagtctgaagcatgcgctcttacggttctcattaagtatccgatcggatagatttagattgctttgggaggcagggatggacttgtcattttatttagtgaatctgatgtatgttagtatcgttacaaggtggaacttggatcttcagattgtcaaattgaagtagtttaaattaatgagttctgaggttactgttgtttttaaaggatactattgtggttcccaaaatgttgtccagaaagtattgtggtcagtggttgggataagttaattatttggctatcagataaagttcagtatcattaatctttgtgtttccgttttgtattttgtggatttccaggtgacattc

SEQ ID NO: 79863 - DNA, 391 bp, Citrus sinensis
  Intron number 2 from transcript orange1.1g025775m (locus o range1.1g018352m.g) derived from phytozome v7.0 (chr-ID sc affold00114; pos 400047 to 400437)
tcattgctgaattctttgaagctgacccgtgtgctgtaagcttcttttatttatggatataatgaattccaacattaagaatttatttattgttatacaaaactctttttatgcaaactgatgtatcagttatatggttcttattatcttatttactttgagctttgtgcttttcactcttccgcctttactttcatgtcatgtcggtttgtacaagatgagtttgtgcatctaatatttttcattattattgttatatatattatatattttgtttttacttatgtttgagttgagattttgttgctttaaattgaattttgcataatgtttcttcttgctttctgttgatgatgctgtattggtttgacaggaaaattttgaaactcag

SEQ ID NO: 79864 - DNA, 1026 bp, Citrus sinensis
  Intron number 3 from transcript orange1.1g033931m (locus o range1.1g033931m.g) derived from phytozome v7.0 (chr-ID sc affold00082; pos 371563 to 372588 reverse strand)
ttattactccttcaatcctatctgacagactgagggtacactcatatattatccctcccccccctcttttggatttggatttatttactggttattattcaatttataaaatttagaaggttaatgccttgtatagtagataaacagcatgcagttttaagcttgaaataaacttgtgcttctaaaattattcccctggtgatctttgtcctttttataactttgggaatggaaaaatgaatttttgtagtgtctggtttacatgtgcatgtggattccccattagttccttgtgcactataagcaaggtgcactaatatggtaatttatgttccgaaatattattggttgtggtatgtacagagttttgtaaaaacactctgattgttggatctttatagtatgtattcttgtttgcagttgtttctacggatagtttcattgttttctaacttactctgcaccgtttaaacttatttaaatatttgttccatgattgagtttttctcttttgttaggtgcttaattccatagattctgtttcttttttaagagtcaaattttgcccgatgatggataaatcaacagaattgaatggttgcttggttttttattcatcacactcttacataccaccaatcatgcctctctctctctctctctctctctctctctctctctattctctctctgtctctccacactctgtgtgtgtgtgtgtgtgtgtgtatgtatatgtttctgtatgtgtttccatatgtgtttggtggtgtgtgaatgttttgaagaaggccatgcattatgccatatatgatgcttcataagctatgagatctgagggcaattttttttttaaccaagctgtttttttcctcctcttacgctttccagctccagtcggtaccatatgttttgttttaaaaaatctgttgcagttgtgatgtacctgtaattacttctcacttctatgttattcaatgagttgattataaatgttgttttattctcctatctgctatcagataa

SEQ ID NO: 79865 - DNA, 556 bp, Citrus sinensis
  Intron number 1 from transcript orange1.1g013359m (locus o range1.1g012833m.g) derived from phytozome v7.0 (chr-ID sc affold00025; pos 237056 to 237611)
attggaccaactcaagtctaagatccgttctcttggtttgcattttttcttttccttttatctttacttctatttgactccaaatcatgcgtgaaaaggaagaaatataaatatcgaaaacttttttaggttttagtcagattttgggagtatcgacgattgactttctacttcggtctcagtctcagtctcagatagcgtgactacgaattttattgaaattcaaattgagcattatatagcaccaattagtctgactgatttcatcattcatttgttggctgttatacgtttgcttaaaattacattactatctaaatctaaaaattagagctgaatgtttgtgctgtttctattcgagtccatagttatatcagtgtttcgtgggaggaaaactaactgggaaaattagtataattgagcattgtttggttgttttgagtttatttcatacccttcgtctctcttttcaataggaatcttcaaagttctgctgttgtatgtgagcatttgttttgatgttgtttacttttttgttctaaagaatcccatattg

SEQ ID NO: 79866 - DNA, 312 bp, Citrus sinensis
  Intron number 1 from transcript orange1.1g007288m (locus o range1.1g007288m.g) derived from phytozome v7.0 (chr-ID sc affold00004; pos 3618374 to 3618685)
ctattggtaagtaattgaatcagttaaattaatgcttttttaatacattttcggttttttaagacaaataataaatatagtagaaaaggatatgattggttagtctaaagaaagatattgctctaaatagaagagttaagtttgtagcccacagcaaaatttgcttttttgaacagaaatagcatgttcagtattgtgaaataaaagctaattgtaacaaacttgtttaccttaaattatttgatttttaatgtgtgccctagacctagtacatataatgttgtgttttatggcaaacaggagggagttgaa

SEQ ID NO: 79867 - DNA, 709 bp, Citrus sinensis
  Intron number 1 from transcript orange1.1g005855m (locus o range1.1g002314m.g) derived from phytozome v7.0 (chr-ID sc affold00243; pos 80584 to 81292 reverse strand)
gggtcttgtgctcttctcttgagtgcttcttggaggtgggtttcgtatatatgctttgttttttgagttatcatgcctttttctcttgcttgtggatcttgaaccatacaaatgatgtttttcaagttgaactcactcactgaactttctgtaattttcttttcctgcaatgtgtatgctttttctctaattaaatgaatcttggactaacagataaagcagagacctctgtttttttatctcagaaacaactcggccatctatctgtctgcattttctctaacttttttagatactagtgttactaatgcgtctccaaatccaagattgtgaatgtgggttggcagttttggcttatgcaaccaggattctatggtataccatgttttgttgcctcatgcaaatctgtggatctcattctcttcattatctttttagttgtgacctcttgtcatttttgtttgtattatgttcggcgcacatactttagataatttattcgttttcattttagagatgtcaagaattttcaattagagtagaaatgtgattactatttgtttcaaagcaaatggtgtgaaaatttgtgctggtaatgtctaatctgcagcatccggagttttttgttgctcactttaattgctgaagacttaatttatgttgaacatatgtaggacacagaattgttttgagaactcataaatttggt

SEQ ID NO: 79868 - DNA, 924 bp, Citrus sinensis
  Intron number 4 from transcript orange1.1g026722m (locus o range1.1g026722m.g) derived from phytozome v7.0 (chr-ID sc affold00016; pos 214483 to 215406 reverse strand)
catcgcctctatccgccgtaattaattatctgcttaattcctaatctaaaatttgctcttaattaattagtttttcttggttaattaatttctcacaggataagatctacaatattattgttcttgttaatttcttttgcttttttcttccaaaacaagaagcctttctatattcggtattctcatgccgtaaccagatcactaattatatatttctctataagctacagatactcttcttcatcttcttcatcttcttcatcttcttcatctttcctaataaataataatttatagagttaagagtcaaaactctccatgcattctttaatgcgaacttgtcatgacaactcttcatctactcttcttcttcctcctaataaaataataatgtatgtctttaatataacaaggcatggaagtgattaatgacgtgattgatggcgttaatcacttcccagatcctctcacttgtgtattcaacttcaaaatatctaatgacgcatataaatatatataaatggttaagatttaattatttggcacattacggcaagacccctgtcttcattaatagggtggcaaaatctgacctttaaaaatgtattgaaaaaagaaagaaagaaagaaaaagaaaggtggcaaaatctataccatactcgccatggcaaaatatttcaagacagctagccaccgacattggttgggccgttgaggggcatggggatcgagtggccctcagctagccgtcaagacttttcttaccattattattattattattattatttcttctgtttggtcattcaatatgttttttttttctttccttttttaatgacataataataatactgcatataattgatggttcatgtttgatccacagaaaacagtggtgacaacaaagagtgtggagttcat

SEQ ID NO: 79869 - DNA, 903 bp, Citrus sinensis
  Intron number 1 from transcript orange1.1g044009m (locus o range1.1g044009m.g) derived from phytozome v7.0 (chr-ID sc affold01572; pos 6783 to 7685 reverse strand)
ctgttcagcagaatctggcattactgggaaaccaggtactcttaaagaaacgatatctggtcaatgcatattattgggtgacggctgattttgtttgtaaagtgtgccttttcatacctatgaatgcatatgttagtgttgtgttctcctttccataaatatgaatgcatatgttggtgttcttttctgagatggatgcaataaaggctttttcttctaaatttagttgaagaaatggcaaggaatgtgagattctatctcattaaattaacaaaaacccaaaacagtgaaaacccatattatgtggatgaattggcgacatttggcttgtttcctgaacgtgaattagcaagcaatagagactaaaaaaatggagtgataataacaagtcattgtcatttgatgaatgcatttttaagcaaaaataggtttgtaactgaataaatttgtctggcatgccaatatcaaaaaattaaattatgtggttatgagctgtaatgaagggggattgtaggtgcaatcagatcgatccaagaaagttcaacaaagttctggtttggtgtagtgaaattggtttgtgcaacttgagtctttcagatgaacaatgacgagttttcatttaaaaatgttataaatctgccatgcatagtattctagtagaatcatctataaattcaagttattgaaattgtctatttgtccagtttgagttaaggacgcatgtaatatgaaaaattgttgtcgaatattgtaggttagctaatatttgatcaatcctatagggagggctttaagatgtctaacaacatgtagaatgcctctgcttcccccacaatttttatcttatacaatttttatctataaacagtatttgccagaccttaaccgttcagattccccttc

SEQ ID NO: 79870 - DNA, 860 bp, Citrus sinensis
  Intron number 1 from transcript orange1.1g008469m (locus o range1.1g008469m.g) derived from phytozome v7.0 (chr-ID sc affold00232; pos 77463 to 78322)
tcttctccttcaacttcagctctctcttctcctccgtaagaaaaaattctcttcaattttgaatgttctttgtagtatatatgtgtgtatataatcaatggcttacaatcaatttaataattctatttctagttatgatgcttttattttatttattttttaattgaggtcccgaggagattctttttcttttaatttttaaataagttgattagatccaacatgctaatggatgttgagattttgtattgaaatttactttgttcgtaaaacaagacaagaaaagttgatttttttttccagctgctttaaggctttgttttagtttatgctattgtaagggatttaacaagtgataaagaagggattgcagctttataattgtgattagatatgtgtaacaaaacttttccttacggcattatgagatctgctataattattcatatagaagttgaatcaaggagcttctgtttctcatcttcattgtttaaaactgttggaaaatcccaattttcgtatggtctaagaaaggattatgtccaagaaggacctcaatagggattcactgaatagatgctttccccaacgatttctgtacacaaggaaaatgtttgtagtatattatcaattgaactctttaccagggaattttgaaaatttggtactttttatgctcagaaaaatggagttattttggtaatctgttgatattcattttaaaagttctccatatgcaaacctcaactaaaaatgcagtgatctgtactatgttggctagtgttctcaactttatttttctgttttctctgttggacagtgttaaatttaattttgttacattaaattttttgcagagc

SEQ ID NO: 79871 - DNA, 992 bp, Citrus sinensis
  Intron number 2 from transcript orange1.1g013081m (locus o range1.1g011868m.g) derived from phytozome v7.0 (chr-ID sc affold00016; pos 1634039 to 1635030 reverse strand)
aggtaatttccattttttaaaatttatgtttctgttaattttcctctgaagtgtgagcattagtttattattattattactaataagatgatttgcaaaattgtgggagttgatatgaccttatcccctttttatttccccttctgatgaacttgcaaagctgttttggattcctttcccttaatcatggcctccccccaaccccaagaacagattccagattcaaagcaaactctagcactgctgcgctgtctctcaacctttctctctcttttttttttttggatctattcttaatttcttctttcaatttgattctatctacaatttttcattggatcaatggaatcgcccaaatgggattctttccaaccattggatcattggacttgttcacaaaagtctgctgagtgaacaataaataattcacattcgttggttcacgtgacatggaccagtgatttctcttgaatggattctatgcagaaattaactccaaatacccaacggccaatgattctctgacacccacccaatattaaaaaccaaagaaattggttctggttggcgtggttggaataacgccggtgattactgaattgaatatgaaccccacctccaattatctttcgttgtgggatccactgtgcattctttggtttatgcatcgagtcagacaagaaatttatgttgcatcaattctgactcacaattttatttttatttttatcaattcttgtgaacgcttgctttgtgtgggtggggaatggaaatggatggtgatctgtaatgaatttctgagtaggttttgatcacctgagccgtcagtttgcattgcgtgtatggcactttgtttgactaattttagccaataattaaaatgacctttatgtgtgtatgacaaacaattagtggtatgcaatgaaattgatatttttttcgatttgctgccaaaaaaattgcaggtcttggctagcaaaagcaagatttac

SEQ ID NO: 79872 - DNA, 655 bp, Citrus sinensis
  Intron number 1 from transcript orange1.1g013081m (locus o range1.1g011868m.g) derived from phytozome v7.0 (chr-ID sc affold00016; pos 1635057 to 1635711 reverse strand)
agaacaggatcatccacctcaagatcactgatcaggtttttccttcctttatccttttgttttattgttttccttttttttcttcttcttttttttcaaaaaaaaaaaaactacaacaacgacaacaattcttttaattctcttctcattctcatgggttctttctctgggttgtttattcatatcatatggcttatgcctgcctgctgcctgctgcctgctgcctgctgcctgctgcctgcaaataatgataataatatcaatagattctgctttcttcttcatctgggtatcgttttattcgctattcacatgggtttttttttttttccaagtcaactttggctgcaacctaacttggttgttactgaatcttgattcattcatgattctgtaatgttttcggttctgttttgcctgcaaagttaagtatttgattttttttcaacaacgggaggtggacgtgcagtggattgagtgtcaaaatggctaatgattttgctttgtctcttcttaaatcaactttcaaggaggccaacgttctgactccattcttattcgtccattatcttctcatctcttacacttttctctgcttaattatttgttaattttgccagattaagagagagatcgccaccttgaagcttctcaa

SEQ ID NO: 79873 - DNA, 662 bp, Citrus sinensis
  Intron number 2 from transcript orange1.1g034902m (locus o range1.1g034902m.g) derived from phytozome v7.0 (chr-ID sc affold00361; pos 37446 to 38107 reverse strand)
caacaagagaggctcacctggagaaggttgttttcttgctttagaactttcttttatagaacattccagtttaatagattcatatgttctttatttgatgtgcatatttgcatcaattagtttgttttcttcatctttttcaagctatttagtagcaattcaaataagtgcaaccttggcttgtggactgcattctacaaattgtcgcttaatgatggcagcactctgaattatgattgcgcatttgagttccactatctaaatgttatgctattggttttcgctgcctgctactcagcgccactgccaacttgtttccctatgtgctctgttgcttaaagaaaacaaatttctcattttcaattatatattttgtggttttctttcgaacaaatctgccaaatcctgtcaagtgtcaacaaatattgatgatttcatcagacatggaaagacagagtctgtgaaaactttaggaatcgaaacttggaatagattattatttatctcactcattggtatttggtttatgattacatgtggaacccaatgtttgtcaaagtgaagttgccctggaatgttgtagaccctgctgaaaatctggtcactattgttatctgtttgttggatgactttgctggcagaaagtccaccaaagatcttgg

SEQ ID NO: 79874 - DNA, 703 bp, Citrus sinensis
  Intron number 1 from transcript orange1.1g034902m (locus o range1.1g034902m.g) derived from phytozome v7.0 (chr-ID sc affold00361; pos 38223 to 38925 reverse strand)
tgagtcagaaagtgcttcatcacttttactgctgggtaaggttttaatcattaagctctaattgtcatttcattttattttttaaaaaaaattctttcctagatacccaaatgctttgtttttttttttcctgaaattttcttgttgggacactttgatgatcgaatgaaatgattgttattgactgtttgttttgtacatttagcatttaaaatgtatttcatttcttggtaatacgtcgagtcttttatatatctctcttttatttttatttttttggaggggtttggtgattttgattttttgatatggtttgctttgaattagtttgaagataaagggacatccagggaaaaaaaagctaaaaatgtatgactttcagatgctaaaaatgtatggctttcagagacaatgtgctagttatagaaattgggttttcatgtggcaaaatggatgtacagattatagtgtatgaatgaaatgctagatacaaatcatgatgatccttgcttagtgaaatgctagatacggatcatgatgatccttgtttaggccttaagtagcttttgattttcgatggtgagattatgaggtgcaaaatttcagatttttgactcttatgcttttttacactcttgagaatggagcaatgttaataaaaattatgttaaattcattgtttttcgtagatttggaaaaattt

SEQ ID NO: 79875 - DNA, 791 bp, Citrus sinensis
  Intron number 1 from transcript orange1.1g016950m (locus o range1.1g016950m.g) derived from phytozome v7.0 (chr-ID sc affold00007; pos 820116 to 820906)
gccgacgataaggtatactgttttttttttttttgactttttttttccgctgaaagaacaaccgatggaaacaaaattttttattatttttattatttttattatttgaagcttggtttttgtggaaaagaaagtgattgtgtagagtttaggttttctttttcttttattttttagtgaagcaaatgtaaatgtggcacaaactgttgttatttttgtatattttgagttgagacgggtggaattttggaagatttacgtttttcttcagtttattatacactcgtgaaaatttggttttttacgtgaaatttgtagcttctgcgttggcgatctggctttgttagcttaccggacaacttccttattagttttttctttttcttttttctttagtttgtctagatctcagatcttttttgttgtatggatttgcagataattttttccccttttcttgagtttaattatggtaattagttaatcactctgtttacccgatccgtgctttgagctccgttcaacttgtttttcaaatgatttttttttgtttctggtgcttgtatggatcaaacttgccttacttgcttctattaaattacttttggatttaatatgttcgatatacctgttactcgtgaatgatcgtcgacttttatttcatctgccttctaattttggtagtgtaaactaatatgagacatcaaagtaaatgatttttatttcctactagttgtcttctcagttgagtacatgatatgaaattgcccttgtaaaatgttttgcaggag

SEQ ID NO: 79876 - DNA, 735 bp, Citrus sinensis
  Intron number 1 from transcript orange1.1g030863m (locus o range1.1g028706m.g) derived from phytozome v7.0 (chr-ID sc affold00312; pos 25514 to 26248 reverse strand)
actagttccgagcaactgacagcaacttcttcgtaatcaattaatcccgacgcatgacaacttcccacgatttgtgttggaaactttgaattttgtacttggcttacatgcgtatacgagttgtttgtaaataggagcatatcagcttgttttattttctctttcttttaatggttatttagttttcattaattatagatttcatcattttttgtgagaattgtcaaaaaggtccaaaatccgaattcgaaatataatctgaatctgaaatataatccgaaatctaaactcatccgatccgattcgaatatgaagttatccaaaatatttgttaattcggatcggattcggatcgaatttaaagtcggattgaaattgaatagattttttaccaatccgaattatcagaatccgatccgtatccgaaattacccacccagtctaacagaggtaaccctttcaactgtgcagagcacgtacctaattgggcaaaaaacatgtatgaactgcaaaaccctaaaccctcaactacctcttcaacctgtgagttcgtttgctttcctgtttctgtactttcaattcatttatatatttacaagacaagattatcaattgtggggtcctgttagtaagttgcttatggctattcttttttcttaatttccgattaacattgattaagtttctgagttttttactctgatcgattatttgttgatgtttatgatagtgcag

SEQ ID NO: 79877 - DNA, 904 bp, Citrus sinensis
  Intron number 1 from transcript orange1.1g001742m (locus o range1.1g001743m.g) derived from phytozome v7.0 (chr-ID sc affold00004; pos 3274202 to 3275105)
gatttgaagcggaagccatccgtcgttctaatcaggtctcatttctgtgaatttgacattttagtattactattattattatttttttcaaaaaaagtcagaacaaaaatccgacatccaacgtaattaattttactgttttgataacctttagctgtgtaagtttcagacaacagttactaatcgatatacagatccaatcggtagttttatttccgctacctggaacttggtcgtgttgatttacacacgtcttccgtttgctcgattgtttgtgcttcaaaaccccctgaggatacagttttgctttcacttaaatcatgcaaaactcgtgctgtcaatttattttttcagcttgaaaggctaaatgaacctgaaaattttcaattattagcacactgaaggatcgactgaagtaaatttttaataaccggacgccctactagcaggctcactgctactagcttgtgaattagaagttaggtttggggggggggggggaactattggtcctattcttctcaagttaattatattatttttggaggcagctagtttctgttgactgtttcaaagtgatgctttggtactgtgtcctggtgatgctcattaatgcttcctatgaatatatttgtccatttttccggttcacttattcaaacttttgagtgcatatatttaaccaaaatttcttctattaacaaatcttctccgaacatataatcaattggttacatggaatttattaattggaaaagcaacatccatcattccatatcatatatgatagcagcttttgttggacagctagaattttcattttattattcttgctttttgatgtcctttcccaacttttgacattttaggagaagtttagagtagcagttttggtttcgcaagc

SEQ ID NO: 79878 - DNA, 631 bp, Citrus sinensis
  Intron number 1 from transcript orange1.1g027966m (locus o range1.1g026045m.g) derived from phytozome v7.0 (chr-ID sc affold00010; pos 869776 to 870406)
ccgctatcgtcaccaccgtcggctgctctctcgatgtatgtcatcttctttctctcatgcttgtatttggtttagcaattaggggttttatgtatagattattatggtttttttttttgtgtagggttttctaattagatggtgtaatttattgtgatattgcttctgggcgattgggttttatttatttattttttgtacgatttcatctgggtttgtctcaattttacaaatttctggttctttcaattgattttcattttgcaatgtgggttttttaaaatttcgtcctttccttagttttcaattgttttatgtattttgattgaattggtttgcaatgattgggattccattgctcatgtcgttttgtcctctatttgcccaacataattctgataagtagtgagtgacatctgaattctagcgattcagatttcagtttcggacctgagggtatccaaatgtgttgtgatggtaaaagtgggcattgatagaaaaccctacacataattctgataaggtttatgtatttcgattcagtgacatcatttgttattctcataatttcccttctttatgttaaaattttgcagataatatctccttttaatctgtgcttgcacccaac

SEQ ID NO: 79879 - DNA, 522 bp, Citrus sinensis
  Intron number 1 from transcript orange1.1g006518m (locus o range1.1g005417m.g) derived from phytozome v7.0 (chr-ID sc affold00004; pos 1620923 to 1621444 reverse strand)
gtacttattaatcctcacttgtgttgccacttgaggtagtgttcacttctataattgatacttctactttctcaaatgatacgttatgtttcattgttatgctttttgcagtccttaaagttgactgtgtactgatctgaaatgggtgtttatttcttatgggctaggtttagattttagtggtgggtactgatttgaagtgaatttaactgggaaaatggacttgtaacttactgaaactgattttttgtatttgactaagcttcagcactgtgtttgttttatgtgcttactcttatattttcttactgctctgatatgttaatggatctcatatcgtaaactacctactgatcttatgctgtgattaaaagttccaactattttgggattacatatattcgtttgattgaaagtgtatctgggtttagctctttcagtgtttaaagtgaagttggatcagtgatttgatttgttcacttcttataaaattaatcttctgggggtttcggattgtagaaa

SEQ ID NO: 79880 - DNA, 907 bp, Citrus sinensis
  Intron number 1 from transcript orange1.1g026502m (locus o range1.1g020131m.g) derived from phytozome v7.0 (chr-ID sc affold00035; pos 609165 to 610071 reverse strand)
cctttttaccttcaaataaatagttgagtttttattcatttttcaaagcatttatcaattgtgggcgaataaaacacagctgtgcattatacacattatgcttgtggattttaataatgggggcaagctttgaacaattttatagagaatagttatttgtcttgtggttaatcaccttttggttgtgtttttgtgcccttttcactttggacatgaagtagtgtgccagatgtcttgcagcaatgaaatattgggttaaaatgacaagaaactcatagtttaaaaactttccagtgatttttcaatatctttccctctgagtcgcttgtaggtttcttttgaatgccatttactccttgtgaaataagacagctccgaaaggtgttggcctctgaatttgcataggagatgtgatgaaggaactttaattatggcatggattcttgatttgctctagcatgcttatgcctgaacattttagtgctcttgaactcacatacttttatcgttaacccacaaaaggagataaagacctgcagaaatcaggtggtgtgggatatgggtgtggtctgcccctaaacacaagcacattcaagttttgagtgaaatgaacacctgatcacccttctttaagcagatgtgttttccatatatatgtttatatttgtctacaagtgcagcttgaatccccccttttccctaatatttgtttattttatatcatctatctgatgtttctggtcacacagtattcactttaataatgattgcttcaagtttttcaactttggctggccattttttcttgcagacccaaatatttgctacttattgacctttttatgaatgctttatatatcattattttgaattggtaaattgactgcaggttcatctgaagccattg

SEQ ID NO: 79881 - DNA, 475 bp, Citrus sinensis
  Intron number 2 from transcript orange1.1g007917m (locus o range1.1g007800m.g) derived from phytozome v7.0 (chr-ID sc affold00007; pos 539010 to 539484)
gctagggaccccgtccccttctttcttgctcctaagtatgaaccaacactctctcctttgcatatccttttgctctctattactcatacacatattttagttaattagcatctgtagaaaatgaaagttatttgacattctactctgtttcatattttgattttgtttgcccatcttttggttcggggcggtagattaagttgtcattattatatccaatctcccacaaaatgaaatttcatctagtgaatcatagaacaaaaactctttttttaacatgtttgttgaattgattttcagttagctcttcttaatcatattagtgggagcatttatctgtggtgtactcttttcaagtagaatttcttttctaacatagcattcgtttttttttttttaatacttacttgtagagatttcattctttacatctgatgtagggtaagcaatcaattaggattagaagcagccgtgg

SEQ ID NO: 79882 - DNA, 966 bp, Citrus sinensis
  Intron number 2 from transcript orange1.1g032759m (locus o range1.1g032745m.g) derived from phytozome v7.0 (chr-ID sc affold01033; pos 21189 to 22154 reverse strand)
aaactaaggattgctggcttattatttctggcaaggtcaaccctccatctctcttgattcatatttcatatttgttcattggtttagcaaatttctaaaatcttagaaggtgggttattcgatgaatttgtgagatatgaggggcgaagaacgcattcgatataatttaggaatctgaaagatcacttttcttttgtggccccacttaaatttcatggggatcaatgtatttatgtataacttggtcaatggaagagagtgaagtgtgatctcttcagtcctatcgtatgattacatcatatactacttgcataaagatttaatgaagagcacataatctggtttgtatgatggagtaggtatgccatggcatttgataatttcaattatttatggcctcaaaagatgaggtcctaaagtgttgatgtgtaggtgttcaagaaagaaacatgaatagacttcttatgaagttttgggatactttctcattgaagaaggcaaaagtgactgtcttttttttcctgtttacagattatagactagtttgtagcactgtatttgcaaatggttttaaaatacactacaatgcaacaaatttttctttagattttcattttcttatgttttcaataataaaatacttgttctgattgtaatccaaatgagcctagtacacataatatgaagatttaggtccaaccatgaatttcagcatctaggaaaatctaatcaccctttgtttataatagtgaggtttttgaaacctaaataggaggtaacatgggattgttccaggtgtaaacagagggtaaaaatagatgctctactgattcactgtccttatatatttgagaaagaacttgaagcaattgctccggtatgattatctttgtcatgagatgctactgattcactgccattttgctcttgtactggaaaaaaacaaatggttttacatgcaggtgt

SEQ ID NO: 79883 - DNA, 565 bp, Citrus sinensis
  Intron number 1 from transcript orange1.1g030047m (locus o range1.1g030047m.g) derived from phytozome v7.0 (chr-ID sc affold00007; pos 2244835 to 2245399)
cgccggcagagtcttcagggctggtgacaaaatctgttaagttctctctttgctatgcttggaagtttctacttcttttatcagaaactaatttaacaggtagaatttgtaagcggtatttattattttctttcatttcctttttttgcaaccgaatggagaataaatttgaaatacaaaacaatatttttattataatttatttttctttgatattggaggatcctattcctagctttcttagtgagcatacgactgtcaatttttcttcaagcaactacgacaatgacttgtgattagtgggttttaacataaaaattctaattcccttctgtttatgactttattctgattttcttggttcccctccaattaaataaacgtgacgtgactcatggagtcatggtttcaactttcaatggtatttttgtttttaattttttttttaatagaaaataaatgggatttttttttaatttcactttcgcatgatattcgtgggatgctgtgttgtgggtgtctggggccagtgctcgcctactccccggcgcaggaaagcattgct

SEQ ID NO: 79884 - DNA, 399 bp, Citrus sinensis
  Intron number 2 from transcript orange1.1g019134m (locus o range1.1g019134m.g) derived from phytozome v7.0 (chr-ID sc affold00007; pos 1613870 to 1614268)
ccttgcaggtaaattaattttgcaatacttcccttttcttctctctctcttctccccttttttattatttttttaaaaaaattttgagttaatggactttttgatctccttagatactgtcttttatgggcctctttttatgtttttcttctatatctctccaaaagctaaaaggtttattacttattagccacctagacgtttttagaaattataaaatattttgagtggtaaagttacttctctaatttctatgatggcaatatttttaatgaattttattattattattattattattattattattattaatgaattttattattattactactttgttttaaggattgtgatttattattactgatgtgggcatgggcttgattgatgcaggta

SEQ ID NO: 79885 - DNA, 575 bp, Citrus sinensis
  Intron number 2 from transcript orange1.1g038377m (locus o range1.1g038377m.g) derived from phytozome v7.0 (chr-ID sc affold00010; pos 1492784 to 1493358)
aaactgtttttctgcgtggactgtgtgaaagagtggtatgtatttttagtttttatatttttttgaaagtttttcatggagttcattattcatgctacctatacatgactttacttttgtgcaagtagttttcttcgaaatgtagtagtaaatgcagaattactaacttggcaaggagttaggactcaatatttgaagtagtacattaaatctaattctgaaaagataatattaccaatggtgcaagtattaatttatgacacataaagaagctacgatttacctgtcgtagaaacatatttacatactcacatttgggtagttcagaaaataatggttttgggaagttacacatccagcaggagaaattggtgtgtgttttcgtacaaaagcaggtcatgtaacaatgcattctcttcttctagtcgtgcactaaatggttggtgacatttatgaagctttttactctttgatttatcttggcttttgctttgccaatcatagttagaagaaaagttgtggtattgaaaactcttgacatctaaatgaatataggtattttgatacgcaagaag

SEQ ID NO: 79886 - DNA, 508 bp, Citrus sinensis
  Intron number 1 from transcript orange1.1g002070m (locus o range1.1g001256m.g) derived from phytozome v7.0 (chr-ID sc affold00004; pos 796746 to 797253 reverse strand)
ccgatctaatcgccgatccaataagaactcttcaggtacttactatctttttttatttaatttttattttatgaaaattactattcgatttggatttttatttatatttcttttaccgtgagtttcgtaaaattcgcgggttgcatgatgtctgttgtcgttttctgatttggcttttgtcagtacgttataatataggtctgtttggctgctgcgtggttcataactttagaagcactggaatctttgaaaaaaaaaaactattctctttctgcatatggcaaccgagtttaatgtgttcgttatatattaattacactgggatgcaagtgatgttcttgatttttgaattgtttgataaatgtgacaaaatttaagtttagtgtaagcttaattctgttgtatgatatatggatgtttttggtcatgcattaaggcgattattctttgcctctgacttcagtttggttatgttaaatgattgatcgtgcattttgtaattcagtaa

SEQ ID NO: 79887 - DNA, 959 bp, Citrus sinensis
  Intron number 2 from transcript orange1.1g002695m (locus o range1.1g002678m.g) derived from phytozome v7.0 (chr-ID sc affold00117; pos 388944 to 389902 reverse strand)
gattcagtcaagtgagatcaaggacaagaaggttagtctcagtctttttcatcatgctttcctccagtcttccatttgcgtgactgcatagttctgagatcaagagatgtgctattgtctgggaattattaattttaattgttttggcttggttaaattctgctcatgcatgctcaagtaccgtaaccgcattattttaattagtctagtacttttgaactttagctgtgctgccattttttgtttttgtctttgactagtattttaactataaaattgtgtagcttagatgtgtttttggtacatcaaacttgaaacattcctcaaaactaaggaaaacatcatgtgttacttatacagttttgcctcacatgtctttgtacgacagttgatttatgcttctagggaaatagacaacaggattggtcatgaaagtagtttagtaagggaaagctattaaagatatgtcttatgattctaccacagttgttgatgacttaattttacattgttgaaatcaatatatttgctttcatgtattggtctaaggctttaataatttatcattgtgttgtgtgcaactccttgttgcatagctttatgaggttaatagttgagtgaactgggtagtttgacctgtgctttaatattatgtttctataaacaacatatacacactcgaagagtgaatggtgcatccatctacataggctttatgatgccaaggatttttagtgttttcatttttttccctatttattttgtaccttggcatgattcattttaagatcgactaaagagaataaatgtttgtgtcacatctggtatccgatgtctgctatagatttttcaatttctttaatagttgtattgatttagcatattagctattttatggagttggggtcggcagttaatctttttcttttggtatatgttgacataggtcagtgcctctt

SEQ ID NO: 79888 - DNA, 831 bp, Citrus sinensis
  Intron number 3 from transcript orange1.1g033932m (locus o range1.1g033932m.g) derived from phytozome v7.0 (chr-ID sc affold00661; pos 20520 to 21350)
ttatcactccttccattctctccgatcgtctaagggtattttactatgtgctatttttttccctatattacatgtgtattagaccgcatatttgattgtagttttgggtgatttttttattttatttttaacttttgtgatatgagtatgtggatttttaagttacagtctcatatcatagaaagctattgctcggttagctattgtttggttattgaacttagaatgtaacatgtaggttatgtgttacctgatggctcagctattttaataataaatttgcataacatgtaattgtatgtttctaagtaggctgtagaagggtgatcctttgagcttattcgagcaatttgacaatcattgtatatgagtattaggctccatttggtattgttgtctatttgttgtggctttcaagctacaaatctaagtgtttggcaaacatttgtattttccaccttgctttcttatgctattttcttatagtaaatgtataaatgactgcttatttgatggtagttttgagtgctctttttttttggttgttggggggggggggggatatggatatgtggatgtcgaagttaccattatatgatagcatttggactacatgttaccttagcaaagtactttaagattggatttgcattacatataatggtagcctatgatattttgtttcttgggcttacttgagttatttggttatcattgtgtaattgtttaggctgtttaattttctttattctcctattggttttatgcacaagtaatatgccctgcaccgctgaattgtcttatttggttttgtgatcttcttgcagatta

SEQ ID NO: 79889 - DNA, 879 bp, Citrus sinensis
  Intron number 1 from transcript orange1.1g022282m (locus o range1.1g018267m.g) derived from phytozome v7.0 (chr-ID sc affold00349; pos 13706 to 14584 reverse strand)
ctttcgcacaagatttttataattgaaattgacaggtaattttatatttatttgcaattaattattggtagtatgtagttgttacgtaaagtttaaaacctttcgactggtattcgttgttgggttatgaattttcatttcggcaattagggttttggggtttcttgtttcagggtagcgctgtttcattttggtgcacaaagtaaggttttttttttattttttaataataatgcttaggaaagattaatttaatggtgatatgttgttgaatatgtttcttttttatttgttacaaaagttctgaaatttactttattgagttagaaaaaaaaaatgcttaccgttcatagaattatgaaactttcattggtttgactgaattttttctctttcgttatggttatgttataggttgaatgtgcctatgattaatcttttggatgttctgttcagtggacagattatagttttataacttcaggcatattttatagcccattacctcttgttatgcttgaagttttgggttctcaacttaaggatagagtttgagtctgaaagtatcaattttatgtgaatatcaaagggtagcactccaacttcatttatgtttcctcttctgggacctgcttaggagggacgtgtactgtgaaattatcctttttttaggtttactttgggacctctggggacacttcttggcttctctgtcattaatttctgagattttgttactataaattccttcacgtggtgaatatctgtatatacgaagacgtgaatgtttatttatatgtttggtattttaatgcatcgattaagacaagtttttgtgttgcagattttggaattttattggaagaactatctaaggaa

SEQ ID NO: 79890 - DNA, 322 bp, Citrus sinensis
  Intron number 1 from transcript orange1.1g009381m (locus o range1.1g005441m.g) derived from phytozome v7.0 (chr-ID sc affold00016; pos 1430327 to 1430648 reverse strand)
gcctaatctgatccgtctcttttcagtggtatagtttttacttgggagtttagtgatggatgtttccataattgatactgaaattttgtgaattttttttttcagttgtgttgtctagttattttggatttttaagtttgatgtttaagagttacccgctgcttattaatttattaagcttgattttactccaattaattttgtagcctatttaagaataactattattattcagatatttgtgcttttgtgcactttaaaacattcaaagcttgttttttagtagttttttcttctctgcagaggtggtggcagtccttga

SEQ ID NO: 79891 - DNA, 785 bp, Citrus sinensis
  Intron number 4 from transcript orange1.1g036360m (locus o range1.1g036360m.g) derived from phytozome v7.0 (chr-ID sc affold00027; pos 957125 to 957909 reverse strand)
ggtatgcatctgttagctgactcctgaaaatgtttttttgcttattcacatgggtcatttgacagtaataggcaattctttgaacttttcgtgtgtccacaagtgtttgttaatagaaaatgtcttgttgattatttatgtgatatatagttaccgtgctttaagtttgcatctccttgctttttccttttgctaatgcatgacattggaccgtgtgaaaactaagtcttaagcacctgctaaaagttgactgatagtggtttgatattgatttatacttgctgtatccttaattaaattctcctcatatccaggcttggatctgcctacttataatttatacggctgactgacattagaagttagttaaattacattaaagtttattatagcagtacagaggcctaagttgaattcctgtctcaaaattcttgatttctcttagtcctgcagtgcaaaatatttgtatattgtgggcctgtcgagggaatctgggttatcaaaaaatatgaaaaaaaaaattataatctattcattagatgactctcattggcaattcacttgttcttgtgcttcatttatgcaaagttacactatttcttcatgtttccaactttgtgacaaacacgtcattcctattattgtgacgcataacaagatcacaaacagaattttcatttcttacggatatttaatctgaagttatattttctttctttctccatcatcttacctgatgatattctttagtttaatctgtttatattaatctcacaggccacagc

SEQ ID NO: 79892 - DNA, 822 bp, Citrus sinensis
  Intron number 2 from transcript orange1.1g029268m (locus o range1.1g029268m.g) derived from phytozome v7.0 (chr-ID sc affold00216; pos 158366 to 159187 reverse strand)
gcttccaaacaaggtatttttttttcacttttttaattattagaataaataaattatgtgatgggtatttgctattgggctaaatgtgaccttagaaaaatttattggctacatttgatttattatcattcaataatgtctcttgttagttcttttttaatcatccagagatgtctttaaaatatagatattgtttaaaataataataatgataataatcgtgaaggtttttgtggggtttccttaacatattaagctgaatggggaatctagttggtttttaaaagattttgctaagagagtcggtagcttatataccaatggagatacataattttatcagtccagcttttacttgattttaaatgatatttagatggcccgtgtgcatggtaaagtattttcgatgaatctctgcaaggcaggcttgttcttgaactttttatggggaatgaaacaatgaaataaatctaaattatatttaattcctgtgtttcttttgacgttgtgggagtagtagctccacaaaaaaatttgcttgataattaacttgtgagtttgcaatgcattcatgataatagagtaagattctgactgctaacagatgataatcatttctttgatccttctatttgttcttcttgtttcagcaactgtttaatgcatcttcttctctggcatattgatgaattagtttgataactaggataatactaataatcatatctagtttgctctataatctttctttattctatgtgagatgttggatttcatttgccaatagatcctgctgctggaggttcctctctggcaaatcga

SEQ ID NO: 79893 - DNA, 628 bp, Citrus sinensis
  Intron number 1 from transcript orange1.1g006192m (locus o range1.1g006045m.g) derived from phytozome v7.0 (chr-ID sc affold00007; pos 732036 to 732663)
cgacaatcgctcccgctcacgctcacaggtataactcctcttctcttcttttctttaaaccactgatcgtttcaagaaacctgtcgtccatgttcttttctcggtaagtccttcttcttggcaatgccacttttttaatctatcggatgcttcatttaatggatttgtaattgcactgcacattgtattcacttccatttctactttctctttttaataatttaattccgatttcattattattgaaattttgttacataattaattttggatctatattttgatctaatttaaaatatctagtgtgttaaaatattttccatagcaaccgacaatgcttgattctgttaatccgctgtcagattccccccccccccccccccccaatcatgagcaagagcaaccaagaatttggaaacagttgttattatgttgccgtacaagttgttatacaattgcttgcttttttttttttttggttgtttgctctttaattgctttaatgtcatttctggctgatgtactgtatttccagtttggattgataagttgttgagattatgaaaatttttcatttcgtggactttgaatagaggctgtgcggagaatttgctctgttgttgaacga

SEQ ID NO: 79894 - DNA, 574 bp, Citrus sinensis
  Intron number 2 from transcript orange1.1g028052m (locus o range1.1g021901m.g) derived from phytozome v7.0 (chr-ID sc affold00182; pos 184440 to 185013 reverse strand)
gggcagacccagttgagcttatccacttctttcaagtgagtgccaattaagattttttctttctgtttgatttctgctttcatggggagaaatatttgtactgatacgagcttttgagctggcaattgttgtgtattcatttgattttccttatgttgtttgcttttgttgctagcttgttaaattaaataaaaaatgttcattggtcaacgtatgtttgtggtaactgtattttatgttgaacatcaacctcttttaatctaagaaaagctttgacattttgcaatttctctgcctttatgatcttattgatgtggaagctgaaatcagatacttagttcggtttagttgcataattaaatagcaatttaatgtgtataaaggaagagttgccaatcttttatttgaataatactttgttccttgggtgtgaatgcaccgggttctcttcttataaatgatggcactttattgagttttctagcaatctaagattacttttgtaaacttctcttggtaatgtttcagtgatttatttataggacaagttctgcatattaggacactgactgcc

SEQ ID NO: 79895 - DNA, 602 bp, Citrus sinensis
  Intron number 1 from transcript orange1.1g027677m (locus o range1.1g027677m.g) derived from phytozome v7.0 (chr-ID sc affold00051; pos 584000 to 584601)
ataccgccggaagtatgcccctattcttcgatctccttttttgtttttctttttttttttaatttgattgacacttcttcattttttttccttttttgagattgttcgttgattgctttgcttaattttggtgatttgattttcgttttgaaggtttagtttttaatatgagagtcagctgtccgtctgttattacactaattaaatgcaatcagctttgaagatcttagctgtgtgaatgcgtggacataaaaatcttttctaagtcctgtgaatttaatattgtaatttaaaaagtgaacggcatttttttaacttctctctgtagataagttggaggaagaagtgttgtagatatttttgaatggcgttaaggttatgtttggtttgcaacattagctgcccagtgaaaaagtgtgcgtttagctgatgtgctttcagagttgcaaaatattcccttagtcaagttgtctacgaatgttctcggaatttatggcattaaaagaattctttatcctactgctgcttcattttagcatttcgtctgtttttgtgtgttatgtccagggcgaattccttttgcatttctggaagacattcat

SEQ ID NO: 79896 - DNA, 665 bp, Citrus sinensis
  Intron number 4 from transcript orange1.1g044152m (locus o range1.1g044152m.g) derived from phytozome v7.0 (chr-ID sc affold00115; pos 378121 to 378785 reverse strand)
aagtttgcattagagcataaataaatggcaagggagtttgtgtcatctccacaaccagatattttcttactagacgatactaactctgacaggtattttgacatggctactgagcaagaagcatgattaaattgcttcgaaggtgtaagctggttcatataggattgaaaagtatttattctaacaataactagataacgtctatttgggttgtgcctaatcgtaacttttagtgatattttgaaattttagctcttaagcatcttctgttaccattgtgattttatgacctctttgtgtatgttcgtggatcttatggtgggttgccagatcaaatctgtcaatgcacatatgctgatcaatcgtccattgaacaactgattccttctttgattttggataatcatatgaagactttacgttttctaggaaatgagaaacaatcaggttatgtggctagatgttctttctgtgggacaaaatcacttattgctaatgcataccatgattgatgtgtgcttattgtacttgtatgcaatactccatgcctttataagcataatattttttttggctggacatgatgaatttgacagttggtttgcaaataataacagttaattttattaatatatttgacttttagcattttcttccaagtctaa

SEQ ID NO: 79897 - DNA, 414 bp, Citrus sinensis
  Intron number 2 from transcript orange1.1g011000m (locus o range1.1g009941m.g) derived from phytozome v7.0 (chr-ID sc affold00659; pos 44125 to 44538)
tcttgtttggttgctttcgctgttggacaaaagtaattaagatgctttaaagtgttttttatgtgaaagctctgaaagtgcttccttgaaaagtgctttctaactagcatttagaatgattacgttatccattgtgtctccagaaagtactcgtccatgtgatatattttttattttgattaagcacttctttagttcttttttgtgatatagtacgcgagagatgctatcttcaaaagcgctttctaatgcttttacgtaaactgctttcaagtttttttttataggacatgttttgaagtgatttataccaaagcactcccaaacacactttgaatctgtttttcactgtgggtaagtgtttatatgttttaatggtactttctcttcttttgtgcaggtatagtgtcggta

SEQ ID NO: 79898 - DNA, 730 bp, Citrus sinensis
  Intron number 1 from transcript orange1.1g028849m (locus o range1.1g028849m.g) derived from phytozome v7.0 (chr-ID sc affold00303; pos 84204 to 84933)
gctaattctttcatttctgcttcatattttgatcggtacatttatttactcaaagctaaactcacttcttaaatgaattatcttcgttttaggatcaatcaatactaccctttataaataatttgaacactaattatcttgttacaattattccgtaatttattgattattattttgaattaagcttttttgttttccgtgaatggtttaaaaaaaaagaaagaaagaaagaaagagctatagtattgaattcttttaagagcaaatgaagcggttgtgaaactctagagagaattaatgaccaatatattgaatcaattttctctgtttctttgcttgataactgagagttgttgacaactatgtgtatttgccactccattgtgtttactagtttcttcgctttagggttctatttgtaaattagaagcctgtaacagtcgatgcagagatgattcaggctaatatgacattgcttcagtaagtttgcttattgagattttaaaatcttgtatctgatattggcgtggtgtgaaagtactgatgaattttcttgattagtttcttgacatttgggatgcaagttttgtcgtctgtttatctttgttaaagcaaaatgtcacaaaagatatgtttcggatggtttcccagtattttactttcatgatcgtattgttttattagataactttcttgatgctatgttcttattcgcataacagattttctt

SEQ ID NO: 79899 - DNA, 544 bp, Citrus sinensis
  Intron number 1 from transcript orange1.1g047089m (locus o range1.1g047089m.g) derived from phytozome v7.0 (chr-ID sc affold01917; pos 8748 to 9291 reverse strand)
tcactggcttcactccactcgtaatttgtttttcttaatttttaccattaaaatgcccttctatctctggctttacttttgattctcttttcctttctttactttagcttgactttcatgggtgatcatagcaatcaatttgataaaatagtaagggtataacaaaggtttttcatcaaacaaacagttttatatacgtatttagcttaaaagctatagctgctaggaagcaataccaaaaggagtcttaataattcgccataccatttcactcaccagagcaaataatattttcatgttctgcttgagtctgaacaagaattatattctaactaaccattttggtgtgctactgtacttaaccagatttgcgagaattgcttatatatttcttcattatttcaatatgttaagattagcctgcaacatgatatcttagtatttgtgtttctgaatcaggtacaaacttgtcaaatacatgtataatgttgacgttaactttaaattttgaacagtttggttttgcctgtgcattagagactct

SEQ ID NO: 79900 - DNA, 571 bp, Citrus sinensis
  Intron number 4 from transcript orange1.1g015003m (locus o range1.1g015003m.g) derived from phytozome v7.0 (chr-ID sc affold00007; pos 2578063 to 2578633)
cgcccaagtatctagcagaagcaaggttggcatcatcctatctcggttgaacatagtctctttatttaatctttttgaagtttgaaaaaaaaaaaattaaaaattgtctatttgaagctgagtgtgtttattgaatgagcaattgaagggtttttgcttagattttgtgtcagtcaattctaagttgggaacacaaaatgcttccaccagtttctttgtctgaagtttggcttagctgcgggcagtggctaaactaatttgatttagttgagtctcccctttttcttataaaactgctatatactcagatgatgcatcttttaaaaattatattatactctgtttctctggggctgttcatacattcattatgcagctagatgtttatctcaaagagaagaaaagggaattttgtttggttactgtctcatctatttgtgtggttgcttgctaagaaaatgtctctgaacttgatgttttagccttttccgttgtcccttctgtaaaaacttgaggaaatagatcagtagatgattcttttttgctagcagaaagggatctcgactgggac

SEQ ID NO: 79901 - DNA, 801 bp, Citrus sinensis
  Intron number 1 from transcript orange1.1g011993m (locus o range1.1g003977m.g) derived from phytozome v7.0 (chr-ID sc affold00004; pos 1883401 to 1884201)
agtttcaaaggcgccgtaaccctagagatcacgtaaagtatcaaaatccctaatgagcattaaagctggaaagtgcttcatctagtaaagccttctgttacctaataaacttttcaccacataaaatttcttttgttgctttgctttttttaaaactgtttcttcttgcagttatgttggatgacttttccttgggttctcccttcttaaatttctcttcttttattattttttaatgatttgcttgacttgatatttcctttccgcagagcactgtactgcatattcaatcattgaagttgtagaactcttgtgtgaaactcattttacctttcaattctttaattgaaaatataatattctgtccatattccaagttactagactgataatttgacagctaactagcacaaatcccaacttgtaatatatatacatctcacagtgatgatcaaattgggaagtctgagaaggtttgcagtggagtgaatattttgaacagaagaattgacaatttgagtctaataactaagcataaatgagttacgagttgtgttctgtgtgcgacaactaaaatcaaatcaatgcttgaaggacatgctagttgctttcctttgcatgcataatatggtatcctttaaaaaaaaagtctgaagttctttataccatggtgaaataacagtttgacagatttcttcccttctgatgtgtttactgtttccattggacaccattgatgattattatgtttcattttctatggaaggtcaatacttggggctactcaacgataaatttctt

SEQ ID NO: 79902 - DNA, 836 bp, Citrus sinensis
  Intron number 3 from transcript orange1.1g031612m (locus o range1.1g031612m.g) derived from phytozome v7.0 (chr-ID sc affold00025; pos 838934 to 839769)
cttcatttgctaacttcaagcaggtattatgttaatattcctattgctagtgagtctgaagatgctcatttgctaacttcaagcagttattatgttaatattgtgaatttctcttggggaactcctggttgttgcttatgtattatctggatctattgctttctacttttactttatgtcttattatttgagactataagttaaacataagaggaactgtactgtttaagagttgtgaatgtatcactgggacaaacacccatggataaagtcagcatttcatgattactgtagcaaacttaatatgtatgattacttgagaagataatggggtgatttggattgctctattctttcttaattgaagagacgactacatatcctcagttattttggcacactttaacgtctttgcttcatatggagtccaagaagataaaatgttgtctatttgtttcatatgtatgaaaaccaaacaatgcatcatcgtgtttaaattttcaaaacgaacattttccaggtggtgtttatggtgctaatttacaaggttgcctattttccaagtggtgtctaaagtgtttgcaccatttgccagcaagcaaccaagattaagctatccagggcctttgcttgcaagaaaatagccatgcagagatttcttttttttcttcccctttttctttctgggtagctcttgtttggctaacagctagcaaagcctacagatatttatcgtttacttttgtgctcacttcttaactcttacattttcttgcatgcatatagggtttagaagacaactttgtcactcttttcatttttaatgcaggtaattg

SEQ ID NO: 79903 - DNA, 602 bp, Citrus sinensis
  Intron number 1 from transcript orange1.1g012949m (locus o range1.1g012949m.g) derived from phytozome v7.0 (chr-ID sc affold00016; pos 541580 to 542181 reverse strand)
ttttctattctcagaaaccctaattttgacttcaggtctgttctctctctcctcttttttaatttatcattattttttaattctcattttttattgactcgctctgttcggttaccgagaaactgaaacaaattgaaatgaaattagacccgcttaattagctcaactatttttttcttttttcttttttataaatttacaaaagaaacagtatttctcttttgattggttttctcatcaaccaaaccgaggttttgaaggtggtttttgttgttttaagcttcaatttcttttgaattctttagttcattataatttcagttcgtagtacatcttcttagacattgatcagatgcgctctttttgtaatcttgttaaaatatttcgttggattatgcaaatgcatcgggaagaattgctgttctgacacgttgtttaattcaatttctttcatattgttttattggatcatttgcttatttgaatcgatgctggtgtgattcaagatgtcaacttctataatattagcttttaggcattggctactccctcgttgctgatacttgagttttgtttgaaactgcagcgtatctttcaccatc

SEQ ID NO: 79904 - DNA, 915 bp, Citrus sinensis
  Intron number 1 from transcript orange1.1g022407m (locus o range1.1g022434m.g) derived from phytozome v7.0 (chr-ID sc affold00047; pos 476018 to 476932 reverse strand)
aaagtttgtctccaaaggccaactctcccaggcaagctctctctgttttgttcttgttactttcaattttgatgagttttatttaatgatgtttgcaaaaatattacaaaactcatgctttctaggagcttaccgatgttttgattgatcaatatagtgttatgatttttgtccaactcataatttcaatcactaacaaataagtgaggttagctgcttaggcttgagtcgtatatttggacttctcaggagtataattatcttatctaattgttccttatgattggctgtaaccggaaagttcatttggaaatttattgtttcattgcttctgttgtcgaattaatgcgaaattacttcgtgcttttcatatacaagaacaagatgggcttgctatgttttttctttcttttgtgtttaattttgggggagaaaatccttggcccttgtaaatgttaaatgctacatagatacgaatgatacctacatagttagaaattcctttaatcttcttgtgattttaacaacgatggctttgcccgtaggacatgcttaatttgatgttttttttttaactttttgtcggggaccgcggaatttattgtttgttagtataatgtcattcggttggttgcggctgtcgccaaatttattagttgaaatcttgctttctgagagtctgatttgcattcctcaaatggtaaaaacagtttcagggattgcttggaaatttttgcaaggatttggttggaccatttgtttatatttttatgagtatgcttaaacgttatcatcctctgaatgttgggtaattaagaatttagctggtgctcctagcctgcaccactggcgaccttgttgatttattagattgaaaaagtttgtcatctttaattagccaggcagtgggtactg

SEQ ID NO: 79905 - DNA, 878 bp, Citrus sinensis
  Intron number 2 from transcript orange1.1g009137m (locus o range1.1g009137m.g) derived from phytozome v7.0 (chr-ID sc affold03743; pos 727 to 1604)
gtcgctgctggtaagttcatttgctcgtttagttcaattttcaggatttttgggtttttttttaaattcttttaatttaatccctatattattcttaaaataaatcttgcaagccatattaccaactgggtatgttctggattgaagtaattggcttttaatcggcagttatcataaaatggaatcgctagcagttaggtttaagttgtttctaaaatcaagcactttagctaccgctgtgcttttaagattaatcagttattggatgttgtaattactgatcctgaacgttcatgtttttaatttattcgtgtaatcaatatccgttagtttatttatttggtcaaatttgcttaaggtcggactgcactcttggaataattggtgctgtggaaaatgacttttaacttatctctttcgtttctttacgttctttattataaagtgtttctcatatcacagctgagagattttttccatgttataagtttatgttgctgtttgatttattattaaacctttagctttaaatactaatcagatgctaatgttggagtccttgactgttaaacaattggttcgagtaattaacaagaaagcagaactaggtcttgtgttccgtctggtttcattgaaccattagctactagctttaaggctttaagttttaagatcaagccatcgggtaaacttaacttaggatcattaatatatttataatctcaactgttggaatttcttagcatgctcttgttagttgttaattgaagtgcatattgcttgtagatgaatatcatgtagatcttggagtttccagcatcacttgtaatcttatagctgttaattacactagactttccttccatttttcaggatta

SEQ ID NO: 79906 - DNA, 811 bp, Citrus sinensis
  Intron number 1 from transcript orange1.1g026702m (locus o range1.1g026702m.g) derived from phytozome v7.0 (chr-ID sc affold00010; pos 1219799 to 1220609 reverse strand)
ctttggtcttcttccacctcaaatcctcctctcaggtatccatgcatgcggtgttattatgcgtttaaagtttgttccatgttgcttgtcaattttatgcgcatgcactggctagtcctaaaatttagctatttcattgttagttacttttagcaacaatgccggatgagtatgtaaggtctttgttttaatttttaggcgtttactttacttgtaatggtcggcaaggttaaatctttttattggaccagtactagaaaatttgatcatgttactgctatttcagttaactttgattgatataagtaaaatctatgttatatcattgtttcaaacaaagtgttaagcttgagaaaggcagaggaaattaaagaaaataaatgatgatcatttttttctattgatgtatttaagcggatgtgaaaaggatatttaatattaatatcatacgtgtagttagctaatctaatatgaaagagaagaaactgttcagaaccattatactatttcacttcttaaattcctattagtatgataattttgatttttttttaatttttatcatcgtctgacatgtttgatcacttgattatgcatttgtgttgacactcctatgtggtgtctctattcagttttttgaaagaaaacttaaatgcactaccatcttatcttgttttgctttatacttattttgaggggctagaaaacttccacttgtttttgttgggattatgtgctctctagggcataataatttatgctttaaagacatacttatgtatttcttatcattttaacagtgcggaattca

SEQ ID NO: 79907 - DNA, 492 bp, Citrus sinensis
  Intron number 1 from transcript orange1.1g015715m (locus o range1.1g015555m.g) derived from phytozome v7.0 (chr-ID sc affold00010; pos 1763011 to 1763502 reverse strand)
tccagttttttttcggttcttttcttttctggaaggtatctgttttcggagattgtattaacttatggcgtgattgtgtttgtgttgttgccgtgacagctttgaagttttgtcggttcagatttacaacttaactagtccttgttaaccgttattatttgtgttttctttttaaataaaaaaaaatgagttacagatctaacgcaatggactagagattttcttcttctccttttttggcatgtttttttttcttacaactgttatttccttttttgcatttttttataaataatatggaacttcttcagtacataaaaaaaaaaaaaatcaaagctgtcgctgaagatctgaaatgtctattttaaagtgtaaataagctgtttgtttgttaatagagcggaaaaaattaatccttcaatggtttagatggagttagctgttgctaagcattgctttgggttaatgttatttgctctcatgcagcttgtt

SEQ ID NO: 79908 - DNA, 759 bp, Citrus sinensis
  Intron number 1 from transcript orange1.1g028455m (locus o range1.1g028455m.g) derived from phytozome v7.0 (chr-ID sc affold00046; pos 474981 to 475739 reverse strand)
atattaccttaacaagaacagaagcacatacagtgagttttcctagaaattcttcttcacttctgaactgtcataagtacccagaacactttacgtgtaatttgcttgtaataaaacataattataaaatacgtgtttctatacgtttcttgaattgtgggtccttttcaatctttctttttcttatcttgttcctttcttttatgtaaagttatgttcgctgtgttgttatagatctataaatctctttttttctgtttcatttttcattatatttacttcttggcatccttgaattcttctttttattgcttttattttgtttgtttgtttgctgggccgtttttgaaggtgggttggttgatttttgtttgtttaattttcatattgtgtcaaagctgagtttttgtgggtgtttaatgcatagtaaggtgccttatataggtaaaagatgtgatttttattttctttaattgaattttattatgtttatgtaattttatagggcaatgctatttaattttttacccccttttttttcatgtcttttgccttccatactcaatatatctgagagaccaacaagtttcagtaaaattggtttcttgcttgattgattctcatacaatcaaaaggatttctttgtgatgattttctttactggttttttattttgtttatgcttctgcttcagaaatttaaagtagttgatataattgtgattttttgattggtttcaggtcagtattgctatataag

SEQ ID NO: 79909 - DNA, 955 bp, Citrus sinensis
  Intron number 3 from transcript orange1.1g023715m (locus o range1.1g023715m.g) derived from phytozome v7.0 (chr-ID sc affold00004; pos 3076883 to 3077837 reverse strand)
ggctgctggggttccagtaagtttaacaccactaaccaacccacctctacacacacccccccccctccccccaacccaaaactttggtcttctctctatgtcatggtgtgtacatacaagtatctgcatttgtgctagtaagttatgctgcttttgattctttgtcactacaattgttgatgtcaattatgtacctttaatgattcatttatagtaaattgaattgatagttctctttctgcttgctataagatacacgttaacgctcaaactcactaagcagacttttcgattgcttgatcccagtctctgggtatggatgtagtcacattgatgcaaccattttggatcattttttgcagatcaataagggaatgaagtatcaggaacattttgaatgttcaaatttgtgctttatgtgttactaaaatgactattctctcttgcttccgtggacaaaggctatatttcctaacgatgttgaaacctcacattctttatcttgtgtgtttcctgtttgattaaatattaatataatataaactataaccatttggtggttattgtcattgattctgcattcacgcacaacaagtttgccctgtcactctttgaactccctcccccccccccccccaccaaccaaaaaaaaaattcaaacgctttattattctctattgggtttgcatttttgttgtctcacagttgtttcactttgctaatttgtgggctgcattttctgaaagacagttattatcaaagctcatttcactttgctttcagcgtaaatgctgtttggttggtcagcatgtttcaattactggatactttgtagctacattttctctggttgcattttcatatactgtagcagaaagatgcttgctcaaattccatttgtttccttttctttttggcagctagggttaattataagggcagtaacatctggcca

SEQ ID NO: 79910 - DNA, 926 bp, Citrus sinensis
  Intron number 1 from transcript orange1.1g034369m (locus o range1.1g034369m.g) derived from phytozome v7.0 (chr-ID sc affold00519; pos 44447 to 45372 reverse strand)
attcgtcgcttcagccagccgttgccgtcgcgtgggtgagttaattaattatgggagtagatatgatagcaataatcgaagaattatggaatattgatgtatttatggaataagttgtaaacttcattttatatttaaggggctgtggccatatggatggtattgaataattgtaattcgccaatgtctgtagaaaaattccttttaaaattccgtacttcttccctattcatatcaaattactagattaatttttgtagcagctattagattgtttgtgagctgttagttgtgaaattctatcgttattgtatttggggaaaattgcaaaacctttacaaataaatatatttatgttttttttgggggggggggggcagctttgaacttgttattgaaagaattgtgatgctgttattggcttagaaatgggatttattgtattggcaaatattttatataatttgtatttttttctgtgtctgagagttttgttgggtgttttgaatgaatcaagattacttaacttttttttttttggtttaatccctttcagatgtcatcgaaaccgccattaccaaaaaagaaatagcttaaagatcagtagagtggcagcagttcactagaattccagatgatagtgacaagtgcaaatgcaatgtccaaatcgaaaagatttgaaaaaatggagatgatatgataagcaaaagaaaagataaaaagggattggtaaccgtaaactgccacaaaacaatcgccgacagcccgccgctaagtttctcagcgactttctcacagacaggtactagacgtgtctccattttacactacaaaagtcagaagcaatcccaaatctcaacaaagataaaagcaaactagtttctcagttctttgttttccttgtagaataattttgttttgtttta

SEQ ID NO: 79911 - DNA, 766 bp, Citrus sinensis
  Intron number 2 from transcript orange1.1g005293m (locus o range1.1g004755m.g) derived from phytozome v7.0 (chr-ID sc affold00036; pos 820555 to 821320 reverse strand)
ctttgtttgctacttattcaccagtggtatgtgagttccctttaaattactattttaatatgttcaagattattattgtatacttgtgaaatggcataaaagttgcaccagtcgcaagtctcaaaccagagcaacaccgggaggtttctggattatcaaacagaaaaatcaaaaagatcaatgtctactgtgtaaacttaaaatgaggattggtagttgggactgttcattccatgtatgacaacaaggttctattcttattaaggcatcctctctctctctctctctctctctctctctctctctctcacacacacacacacacacgagaaaaaggctggcagtctaacctggataaactgttcctaatggaaatttgtggttcacccagtttcctcccgttccttgataaaagaacaaattgaggaccagccggcgcatatgggtttgataactatggtctatgatagtgctttttcagcttatacattttacacgacttttctagatgaatagtggatgatgatcatcagatgtgaaactgtcttgtgtttgaagcgcaaaatacacaaatatagttgatcaatgtgaaaatatatttttttgtttctgcccaaatgaagaaaaatggacttatttcaggagctttttcagtagcatgatcatagacatatgttttcttttctgcacaaagaaacctggccttcatttattatcccctgtattgttggtgtggcattgcaggcactccttgtattcattcttt

SEQ ID NO: 79912 - DNA, 882 bp, Citrus sinensis
  Intron number 3 from transcript orange1.1g029151m (locus o range1.1g029151m.g) derived from phytozome v7.0 (chr-ID sc affold00010; pos 1083982 to 1084863 reverse strand)
ccactcttgctgcatcctcccccagaggtaacattttcatcaattagacataccaaattcaacccctggaaaataatccgatgaaggatttgggctaacagagtattcaccaaaagagagagaatgttactctttgctggaaggtggaatttcaaatttgtatgaaagagagcgttaaagaaactttagccgtagaccgttcgattacattgatcaacttagcttggctggttgccgaatagtttgtttgatctcttactggtccccgatttgccagggagatgcaaatcgctagaaaccaatacttggaataaaattaagatttggccaaatatgatatatgtttgtcgtatatatgctaaattacaaatattttatctccaagactccaacctgtactggtctctcattgagctgggtgaccccaatcgtctaatgccacgtcccccgatcctccacatgcttcttcttcttcttcttcttcttcttgttgttgctattattattattagaactaccatggatgaattagtcggactgttacaatttggttgttgtaatcttagtcttctgaatttaagtgttgtatggggtcaaagaagttggtgatcctacggttgagaaagtgaaatgttaccaaactgctggttcgactacaggtgggtcatgaaacttaaattgggttttgacaactagtttggtgcaagtttggttgaagaatatcatagttttgcgtgctgctttacatgattgggaatttggtggtgaaatgttagctagctagcaaagtggtacactcttaagtgcaaatttggtctcaatttactaagtgcaactgttcatgcagggcctagcacgcctgaaaagccagcgggggctgcc

SEQ ID NO: 79913 - DNA, 582 bp, Citrus sinensis
  Intron number 1 from transcript orange1.1g033089m (locus o range1.1g033089m.g) derived from phytozome v7.0 (chr-ID sc affold00004; pos 2261251 to 2261832)
tcgccgagatcattaagccccgtctcccactgaaggtaaatcctccgttgtactcacttccgctaatcttttctttaagccgtcgtccaaaacacaccctggtacttaataacaaatgggcagtcattaatttgctcaagaatatatcagattgtcgtaaagcgtgaaaaatgttttgaattaacttttttgcccaatttgggtataaatgacttggcgttgaccgatgattcaagggttttgaattagaaggaagataagcatgtgggttagagaaaaaaatgattttttctttttaatttaatccattcctgttcaattacctattacattgtataaattctgtgtgtgtgtgcgcgcgcgtgtagttccaccttagatttttgtttagacgttcatcaaacaaaaggcggcttatcatccgaagtgattttttgttgaattggaattcatattaagaagcccgttgcatgcttcaagtgttttagattttgcttctgggcattcctcaactgagcttgtacttcaataggtgaaagagtataggtttattttacgttcaagtttttgtttttaacagtc

SEQ ID NO: 79914 - DNA, 854 bp, Citrus sinensis
  Intron number 3 from transcript orange1.1g002922m (locus o range1.1g002868m.g) derived from phytozome v7.0 (chr-ID sc affold00016; pos 1571876 to 1572729 reverse strand)
cactgtaagtatctaatctgctgattcttacttttctgcttcactaagatgacagaaataggttgcgtagatggtatcactgctattgtgttattctgcacttatgattacatatgaaattattgaggactgctagcacatggtttgccaagttacaccccattacccttgtgtcagaagatgctgtatgagtttttgactgattctcatgtgcagaaatttagagaaggctactgttttaattaggttatacaaaatcttaaaatgactataatggttaaactttggaattcataaatttatcatagaaatcttacatattcaaggaccataaatccactatggtacttggtttgtagatagacacttaaaattctagtcaccatgcaatatgtagtcttctgtcaggatcgcatcttttgttttgttgatggcagtttattgaagattgtggcctagtcttaggaatattctaaattatttgcttcctgatgtggattgttcattttgttgatcttcctcaatcaataataacttccatagatcagccaacttctctgtaatctgatagtgcaccgtttcctcccatgattattatcttaatctttaggcaaatctataccatatgatctaggacggttggaagggtaattcatattataaattcctgtaatcatgtaatagtgctaacatttaatctcattttacctttttgtctgttcatcaatgtgtaccttttcctcaaacactttccgcttcagctgtcattggtagcatatatattttgactgcgcagatttttccttctatgaattgcagcaaataattctgatcaaacaaaggatcaggatctc

SEQ ID NO: 79915 - DNA, 627 bp, Citrus sinensis
  Intron number 2 from transcript orange1.1g018905m (locus o range1.1g011989m.g) derived from phytozome v7.0 (chr-ID sc affold00067; pos 497089 to 497715)
aggactcgtggcttaattctaaagtaacctcctttctgcaatgcttgtcttatttcagttggatagcatacagtgattgcttcttttatatgtgtttctgattaaaccggtgaatgatatttgatggaattggaatatttggtatttgtttgtgtcaaggtcttaagtaaggggttagttaagtggttattgtgtggggctccagtatcaggctggagtttgttgagtggattcaaggaatttacaagctgttttgaaaaaataaatgttaacagagtttagatgaattttgatttgaatgttttgaattagattgagagaaacctagttgagattgttttggggtaccttattaggagctaaatagttcgtgtaatggtttgatggcaaaatgttgatagaagagagctattaattgattacaatcagtgggtggagcagcatggctgggatttttggctatcgtgagtgctagaagcattagtctctgctacaagcttttgttttactggttcgtcatatatgatggagtttcagctgcttttctgtactccttttgagtacttttacatcatatagttactttttacctttaggatcacaggtcgatagcaagatttatagcct

SEQ ID NO: 79916 - DNA, 224 bp, Citrus sinensis
  Intron number 1 from transcript orange1.1g010740m (locus o range1.1g010740m.g) derived from phytozome v7.0 (chr-ID sc affold00016; pos 1564404 to 1564627)
ttctcaagaaacagtggtttcaagccctccaggttagcaatttcaattcaattcttttttctttttttcatatttcgtttctgggtttttgatttgctaaataaatgctccaacaaatgactcttgaagagttacaaatctttctcactgtagcgttttagtgatacttaaaacaacaataattgagtggtgctgtcattattggtatggattaggtgtttgag

SEQ ID NO: 79917 - DNA, 419 bp, Citrus sinensis
  Intron number 4 from transcript orange1.1g032143m (locus o range1.1g030260m.g) derived from phytozome v7.0 (chr-ID sc affold00117; pos 205002 to 205420)
caggagttgctgaggtttcaattgctgacagggtaaatggattaataaacaaaaacttccgcagtgtgcactgtcggctgtatgaaattagattggttttattttttcaccaaatcatttagaggcatgacttacaactatatttatgttatctgctattttgagtggtagttgacctcgttttactttcgaatattcttcatgagccttgcatattgtgcagcggactcttcttaaatatcctgctaaattttcagtataatttacaaatgctatacagataagaatgcaattgttttgttttctttgatgtgagctgccatagaaattcttctctcagctagttgcttgtttttccttgtattccctctcttgcaattgtagattcctctgagcgggcaacactcaatattggggag

SEQ ID NO: 79918 - DNA, 433 bp, Citrus sinensis; identical to SEQ ID NO: 79556
  Intron number 2 from transcript orange1.1g032879m (locus o range1.1g032874m.g) derived from phytozome v7.0 (chr-ID sc affold00007; pos 114794 to 115226 reverse strand)

SEQ ID NO: 79919 - DNA, 627 bp, Citrus sinensis
  Intron number 3 from transcript orange1.1g017851m (locus o range1.1g017102m.g) derived from phytozome v7.0 (chr-ID sc affold00314; pos 26184 to 26810 reverse strand)
ccagtggtcgtactactggtaagttgtttaattaatttgtacaaatattttagttcatttaatttagcattttggacttgagttcactttcaaaatcacctgatctttcaaaaaatatggttttttcatgaagaagctaagtcgtcaattaggaaactttcttcttccttttctttttatttgattgttagtcatcatatgaaagcttaattgcttctgaattggattcttatttctttttctatccaccttttccctgttagtagttagtagttttaattgtcttcaatgccttcactgaactttgccttctttaccttaaatattagatattagtagaatggcattttgcagttgttttgcagagattttgtgatacctagagaaaaaatttgagttatgaaataagtgtgctttaagaagaaagaaaccactgttttccttttggattattcaatatattatgccaaatttatacatgattttttaaagtaatttgggatgttttgcttgtttatgacattaaattatattttaattattctctgatcttgagtaatttctatggaaatgatgacaatctgtgttcaatgctcaattctgcaggtattgtgcttgactctggag

SEQ ID NO: 79920 - DNA, 898 bp, Citrus sinensis
  Intron number 1 from transcript orange1.1g017851m (locus o range1.1g017102m.g) derived from phytozome v7.0 (chr-ID sc affold00314; pos 27399 to 28296 reverse strand)
atctcagagaacgtgaattctagtgtttcgataaggtatattctttgttctctcattatctgctccgattttcaaattttatgcgttttttaattttgtttttgttccttttttttttcaattgatgctggtgcattgtggaattgcttccatttatgtttttttaaattaatttttttgcctgcttgcacagtgatttgaagtgattcttttcgggattgatggtattaattatttcttaaatttaatttgttttcgtttcctctggcactgttagccattttgccagaaatttatggaaatggatggtttagatttgagttgctttgtttttggtccttcgggttaattgtttaccaccgttatttttgctgaggttaatctttttagaggtcaacaagattttttgattgaacgcctcgtatgcatatatgaaaattctatcccatatcgatagtcagtttgatttgcaaaccgatctaaattgggaagtggtaatttaatacttaatgtacaatcttcgtttgcattacaattgcaagatgcggcgtgggagaagttctatttaagtgtatctttccaagttatgccgtagattttgcacctacatagaatttgaattgtaattgctgataaaatggtcgagctctctttgtgtttttgttgttatacattttcgttgaggtgtgtaatatgttatagctgtccatagttttcctgtggaatgattggtggcattgctagatattagctcgttaaaaaactagttctatgatagttaatgacagaaggctgctttcagtcattgctgtgaatgttattgatccgtttatatgtttttcataaataaaatttaattccatatggttacagtgtattctctagcagtcactagaag

SEQ ID NO: 79921 - DNA, 821 bp, Citrus sinensis
  Intron number 1 from transcript orange1.1g028564m (locus o range1.1g028564m.g) derived from phytozome v7.0 (chr-ID sc affold00025; pos 295356 to 296176)
gagtccaaggaaagaaccgttgtgattgagcactggtaattcttttattattattattattattattattattgttaggtctggttggctgccgtggaagtggagtagaaagaaaggttttgtttgtgttattcgttcctttgatataaaaattaaggcatagtaaatgttcatgtgttaattttctgttttgttgcctagaaaatgaaacaaaagagcatatttgagtatctgtggttttagattaataatctggactcctgttggttgtagttttttgagtctctgttacgcatcgggattcaatagttgtttgtatattaattgtcttatacttctgtttcgttgctataatagaagacatgagtttttagggcttctaatccgcaagaaaacgagactcaatatttttctgtgtaatgctcttgagaatattgttgtttacaggcaggggcggatctcaggagaaaatttaaggggggccaaacttaattgtacagggatcagtgtgtaaattattcatattttattcaaaaatctcaaaatattttaaaacccagggggggccatggcaccctttagtcttacatggcgtccgcccctgtttacagggtatagttgttgacaatgtacaataatgatgtttggtgttaaaaatttgtcaaatcatcatagattttctgtatagctacttttaagaaattgtcatggtgttgtacatagtcttctgggtgctgtttgatcttttgtgtcatgaaatgttgttcttaactgtgataattattttttcttaagtaattttttgttgaatttagcaaaca

SEQ ID NO: 79922 - DNA, 620 bp, Citrus sinensis
  Intron number 1 from transcript orange1.1g010739m (locus o range1.1g010739m.g) derived from phytozome v7.0 (chr-ID sc affold00026; pos 881245 to 881864)
gtggcccaactgggtatcttgcctggaaggtaagagtttttctcattttttatatatagtatcctggcaattgtgttttgtttttaacaattagaaatatgattctagctctctatgatatgattaaatctagactgaatgaaatttggcaattgctttgcactgcttgccatatttagatgcagtgttctttgtctaaagggcagttctttcttgatcatatcatcgtgctaaaattttattggtggagttgtttgaattacttcttgctgttagttgaagtttgttttcatgatgtgcttttgatgcctgtatgttgaaatttgtggcggaacttcatgactaagtttacaatcaggaggtgcatcattgagccagcagcatggcaaaatttacttggtagtggattctgtctagaaattgtgaatcaacttgaccgatgttataaaataagtaaagcaatgctgatagctctatttgaagaatagtttgtagttaacaattggaatagctcagcttgtttgtacgaattgttttgtatctgtttcaaatatccggtgattcgttgaaatttgtgaataaaaatactttaattctcttttgttaggttgagggtaaat

SEQ ID NO: 79923 - DNA, 549 bp, Citrus sinensis
  Intron number 1 from transcript orange1.1g048621m (locus o range1.1g048621m.g) derived from phytozome v7.0 (chr-ID sc affold00016; pos 1145118 to 1145666)
tgtacgctcgatccccaggtgaatgatttttgtttttttctcttgtttggttaccgagaaaaacaaaactaacgattagaaaattttccgaattttcttttttgcaactagtcgacgattttgagtctgaaataatttctacggagtgttctgatttttttttttaattatatgacggtggatggagaaaatggacggttgaggattgattttgtgtgagcacggagagttgattgtgaaggatactttagtcctgtgtgtatctgtttgggtactgagaaattgagagaaaaaaagacaagaaaatcttcctgacatttctgttagcattactattgttattgttatttggtgattgatgattcattttatctaaacagggtgagttaactcaaaaggaactttctgcttggttaaactctaaatgaattttattttatttttccttttgtgtgtattatttatggagaaaatagacagtggatgattgatctgtgattttgtgtgagagcagggagagtgaacttgattggggagcatattgattat

SEQ ID NO: 79924 - DNA, 672 bp, Citrus sinensis
  Intron number 3 from transcript orange1.1g036458m (locus o range1.1g036458m.g) derived from phytozome v7.0 (chr-ID sc affold00182; pos 250188 to 250859)
atacctaaggtgtgtttgtatacatatattcatcattttattgttaaatcaatggcatctattggaactcctgcaagctatacaagatttgctttagactcttaaatctattcaattttgcgaatagatggtttcaagttacgcatagctccaaaaacattctttaagtggcgttaaatgagtgactctgtataggttgagttcattaaccacagggcttcatataattgattgaattgagttaagtatatatgcacagattcaattctgaatgcggcggatatcaagaattgacactttggttgattttggattgttggtctaatgtgtttgcttcaacttgaagcttcttgctataggctgatgcatttgcttcagtttttatttatttattttttttgcttagtggcatgtttctacttatatgtctttcaattgctatatcgcataagctttggcgatcctcacatcaagattggatgcaatcacatttgcccagaacactcaaatctttggcaatggatgttgctttgatggttttctttgagctacctaccatattaccatagattcaaccttggaaatggacttccaaattggataagccatcttaatcttctacattatttcttatgatggaagcactaatgaattaatttgtttttgcagttc

SEQ ID NO: 79925 - DNA, 280 bp, Citrus sinensis
  Intron number 1 from transcript orange1.1g029016m (locus o range1.1g029016m.g) derived from phytozome v7.0 (chr-ID sc affold00072; pos 541355 to 541634 reverse strand)
gcaactcagtacgtatatatttgatcaagtatcttacttaattaaattcgttaattattattattatatttttggtatcttctatgcatgcatccatatgtatacatttattaagaaaaataccaaatagacgaagtgctatcagaacgctaacttgtttctatgagcagtcaatcaaatttttctgtccgaatattattactcgtttataaaacatgattctgtgtgtcaatatacatatgtaggtaaagctcttgctgaaggtaaccagtggtacttc

SEQ ID NO: 79926 - DNA, 1016 bp, Citrus sinensis
  Intron number 2 from transcript orange1.1g030147m (locus o range1.1g030147m.g) derived from phytozome v7.0 (chr-ID sc affold00007; pos 1927870 to 1928885)
agaaacttcagctgaggaggctacttcttaaagtggtcagcctctttcccttttcacctctttcctgcttgattttctgaattgattgaagatgtattatacagccatagcattagcatgtggtttttataattttttttttgtcttcatgtttttgtgttcactggaactttagcagtttagcttttagcctcttccgtttgattcatgggatgcttctaattcactttgttattactactgttgagtttgtttaattttctgtgtttgatttgttgtgggctgttataatgttctctatgattacaaattggaactggggaattttgtttgtttggtgcttgttttgtatattgtgaaatcagtccgtacacaatttccaaagtttatgcccatttaagctttaacttctctctcaccttcaaaatttgttcagttatctgcgcactgtaacaaaattcaaatgcttactctgccaaaaatctattcttcctttttgtttttggttcaataacctattattgttatttctaactgcatttatgtgctgcttcatgttcactgaacaatttagtgctcttgctaatagcttttaaattatattagtaattggattttattgtttctggcaaggtttatttgaaagaacaattgtttataaatgctacaagatgagaatttggggtatgggtaattgagttcttatacccaaatccaatgcagaataagcatggcccttttgtgatatgcaggattttgtcaggaatcatcattgaagttgaaccataactaattcgtactcacatttttcttgttacctactttctgtatattatttaatttgatatcatctgttattccaaaaataaaataaaaaggtcaacatcatccggaaattaattgtttagaaaaattttacaacttattttattttctcttttggtccatactgtagcacccttttttcagagcttactatttcaaacttataaatggcacaatatgcagctttttgg

SEQ ID NO: 79927 - DNA, 518 bp, Citrus sinensis
  Intron number 2 from transcript orange1.1g029606m (locus o range1.1g028991m.g) derived from phytozome v7.0 (chr-ID sc affold00846; pos 36668 to 37185)
ccaaggaggtttggaacttgttggcatgttcttattcatcatatgcttcttgaaaactagctgagccaagcactgtgttatggctgatatatggttcttgtatggtgtatcatctaaccacagaaattttgtttttgtccattctacgtagcttttatgacagtacgtaattggcatgaaagaaaccaaatttttactgccttatgtatgggatgcaaatggtgaaaatatgatacaacttttgacagaagcttaaatatagtcctgaatttctatcttctatattactgctatatattacaaatcctcgcttggtttttcaccattttgtggttatcatcaagagtcaaagccaggacttcgacgcgaaagtgtcattctattatgattaggctggcatttcactatggttggtgtaattagtattcatgctgtgtgattggatgtgaaagatcttagcatttgcatctctactctttttaggcaaggagggttacctgctgcagataccagggaaa

SEQ ID NO: 79928 - DNA, 602 bp, Citrus sinensis
  Intron number 2 from transcript orange1.1g006539m (locus o range1.1g006466m.g) derived from phytozome v7.0 (chr-ID sc affold00557; pos 86078 to 86679 reverse strand)
gaaacaggaagaggtgtgtgctatctgcctactatagttcttgtatttttttttttttcactacttttaatattataatcttgctcaataatacatatgttaattgatgttgtaatagtgggaaagattgatgaagctcccttcttgcgaatgttatttaagtttcttatgtgagaaaagtttaacactattttgggttcgtcatatttgattcagttaaaaactattttgatctgattctgtcatatacttgttagattatgatggtaaagcaactgtacaaatgaatgatagggattatatagcttttgtaaattttgttatggctaacttcttgttagatcttttttgacatagttttcatgctttaaactcaaagtagtgtacatagattgtccaatctttcatgctttgaacatgacagccataaattgctccaatagttataatacaaggactagcagatggtcacttggtgcgtgacttataaacaagcaaaaatgaataatctactaccacttacatctttgtaatcaaaacacgtgttctttgcgagcttttttgcaggctcctataagggtccctgtttcttcagacaaatt

SEQ ID NO: 79929 - DNA, 552 bp, Citrus sinensis
  Intron number 1 from transcript orange1.1g000211m (locus o range1.1g000199m.g) derived from phytozome v7.0 (chr-ID sc affold00004; pos 1180673 to 1181224)
caagtgggcatttcaagttctttacgagttttaaggtacgtgctttcattagcttgattttgtcccaaaatttggtttttttcaattcatttttttccttcccacattactctctgtttgtttactgagaaataggagggaagaaaagttttggatcttgtatttgtttctgtggaaaattgcaagtcaaactgatttgactaattagttgaattttccttagtttataagattcaaatttttatgacagcttcaatcaggtccgttgtggtctaccctgagatccgagtatgacgaatatgcattttaagttttacaatttgggtcaatttgttatttcattaagttgaaaatttgtgctaattttgcataattatgttactctatttgtgcataatgtgattagtattagtagaattctccaaagaatgtacagggatgtccatttgtttgatctttgttctattaatcagagaaatgttatgatcctgttcccattaattcgataatgagttttgtctaagacagtggaactttaatgttatgcagcta

SEQ ID NO: 79930 - DNA, 654 bp, Citrus sinensis
  Intron number 1 from transcript orange1.1g022894m (locus o range1.1g022827m.g) derived from phytozome v7.0 (chr-ID sc affold00197; pos 54289 to 54942)
gcgttgagccgacgcttttctcctttttttttcaggtacttatcttctgtttttaattacagatcagaaatattaattgtgatttttacgctcgtgttttgtacaattttttaattatttattttatgattagaattgcagagagtgacgaatttcaggaatgaatgtttgatatgactctgtcgaatttgtttattctttttgttttcgtttggaatttcaaaattgtagatctgcatgtttggtttggttcctagttcttaaaaatagtcattattaaaaaaatattgtgagttgccttgcatggcaggttagaataatttgcatttaattaattactactctcatgttaaaaataataattactactttttgtctattttatacaaaatcaattttcctattttggtcttcttttggatattactttgtggactgagtacttcatcttctgcgaaaataatcgcataatcgtggtttggttgtacttcagattgaaattaaatcacgtttgttgtttgagatatgtttttcattttcgaaacatgcataattgttgatcgtttttgtgataatgtttggtgatatacttattccatctttctttcctgatttacaggtttacttgctattctcttctctagaagaattgca

SEQ ID NO: 79931 - DNA, 504 bp, Citrus sinensis
  Intron number 2 from transcript orange1.1g025637m (locus o range1.1g025631m.g) derived from phytozome v7.0 (chr-ID sc affold00004; pos 163049 to 163552 reverse strand)
ccgcagaaggtacccgctgttgtaattcttgttgcttttacagtagttatctcttttgtgatgttgtttggtttattcctttatatgttgctttaaaataattgtgtacaatctcctaccgtttattcttctgcaaagtgtttaatcacatgcatgctggcatgttgaattggcagttcatatttataatcatacaggtattgttgcaaaagttgatgaacatcttgataaattaattagatgcttcaggtgaaacttttagggttcctaaggtaatgctactgccacctccttcttagaggattttgcacatattctgttgtgttattcattaaagtgttacatcactgttgcatagatacattggtagtttttgagacttgtatttttctccttttgttcatttgcattatgtgaagtaatttattaatcatatgagtaatttcttaaattttttgatagtaatgggtactttttcgttgttgtcaaaatgtagtatattcg

SEQ ID NO: 79932 - DNA, 706 bp, Citrus sinensis
  Intron number 2 from transcript orange1.1g024980m (locus o range1.1g024980m.g) derived from phytozome v7.0 (chr-ID sc affold00117; pos 324254 to 324959 reverse strand)
aacggtcccactgtaaggcccctttcaaaagatttcacctttacatttttgtgtatggatgcatgcatgcacgagttattacattttagatattttagttcatttttgtagagttattgtttgacatggaaacatgtttataaacttgtgtaaaatttggtgaaaatagaagcatatataataacacattgatacatattgttgtgttttgtgaaagtgttgtgggttttttaattttaagtttctgtacttttttttttgttcggatatttctaatatactggcaagttatactgctctgcacaattgtatttttccctaattttcttatcaagtgatttgataattgatcttagactgttttatggatggcaagatgaattggatatggtattgccaaattaaatgtcatgttacttgggattaatttttttgcgtacaaggcaaaatggtattactcatactgtatatgtatatttgaatgcgtgttttgaaatgttggtgatctgttgaaaggggggaaaaaaaaacagtaagcagaacactaggtgtgggcatatgattattgatgtccatatattttattatatgtacacattgatttgtttacatattgacattagggttcctttaattttatttttaatttttaatttttttaatatggtgttaatttgttggttggttggactttgggatggaagca

SEQ ID NO: 79933 - DNA, 1017 bp, Citrus sinensis
  Intron number 2 from transcript orange1.1g032774m (locus o range1.1g032779m.g) derived from phytozome v7.0 (chr-ID sc affold01313; pos 16463 to 17479 reverse strand)
accagtgcggtatgctggcaactctctcttaaatcttaatatacgcgcttaatataaacgtgtcacaattttatctaatattttaatttgtttacattttacccttcaaaataatatttctttcttctatgaggacttttacaccaacgattaagtgagataagtggatgatgattctaacttctaagccgtgttgttcttttatctcccacactgtcttaactctctctcagtcagactcagtcagtcatctatgtcttttccttttatctcttccagggttcaatttctatgttgaaaataattattgtaacataacctgttttgttgttgaagaaagaatagaagaatgttgtttttgcttggaaataaaaaagattaaaaaataagtgtttgttggttcttttcatgacataaataagtcattgtcctggttttaggattatttaaaatgtagataattactgtacttttttgtttcaagaattattaattctagaaaaatgtcatatttagctcgtcgttggtatggatttattcctctaatggtatattgagtgtcttatgatgttattttgttccattattagtattaggagaagtatttagtgcttctatgggtttctaatttcttcttcagccgtattttctctgtctaaaggtcctgtatttcacgtgttgattgtttggtgtggattacttttggtagcaattcaatgaggttccaaagattgtatgcgttaaataacccaatttatttaaatgcacccgtggattgtattttgagtagattaactgaaagccttggtagaatttaggcaattaagtaattctgtcagaaatttaaaattgggttgggaatcagttgtcaactaaataaatgcttgcagatacatgcattgattctcaattatgttattgattttgggatgctccaaattctggtagctatttgctaatggaaaatgttttttgcttttggggaaggatagaaacctaaggtcctctggcagtgtg

SEQ ID NO: 79934 - DNA, 687 bp, Citrus sinensis
  Intron number 3 from transcript orange1.1g020340m (locus o range1.1g020340m.g) derived from phytozome v7.0 (chr-ID sc affold00370; pos 141693 to 142379)
gaggtatgtcatggtcaatccctcttcccccccccccccggcacctctctcttctgattcatgtatgctatctgcagtcaaaatgcatggattttaaatagattgatggtaaccaacctagaggaaacagttttataaatgtgtcatcacccgtggtcagcattctgctggcactgtttataccttgacgaagtatgtcccgcccctccgacgaacagagtttttggtttctaaaagaatgataatggaaataaattttttaactgtgatgttgatataatgctgtagtgttgagataatatacccaattgaatgatattttgtgctgattgttttgttagtttatgcttaaaaatctaccatcctgtctgattattcttgtaagtatttttgtagtggtataggcattttctgttattaaatcgagaatattttgctgtttaccctttaaagcatgaaagtaaatatggacaaaacagtaggtcagtagctgttagtgttttggtattggtgtatttacacacagcatcttgtgcctgtatgattttgtatgaattatttcaatcaatgaattgtgtattgcatcattatggaatttgagcttgtgcctaaagcatactgacagatttcatgtttgttttgttgtcaacagaaaatccaacagtttcaaaaactgaaagtgatacc

SEQ ID NO: 79935 - DNA, 648 bp, Citrus sinensis
  Intron number 1 from transcript orange1.1g018257m (locus o range1.1g015962m.g) derived from phytozome v7.0 (chr-ID sc affold00007; pos 1822479 to 1823126)
tctttcactaacaggtaattttttttttgtttactttgattttttattttcatgtttgggttacttccgtggtttctttgactaaagtatgcattttgccctggtgggtatctgtgcaacatgggtttggtaagaagaattggaaagaaaatgtttgattagcggccctttactatttacagctatgaatttctgttctttacttcattctctcttcaattatgtggtctattgtgtttattggattgtggttaccgcaagtgaccacgcatacatccctttggcagataaataatgcgttggccatgaagactccaaaattgagtggagatgtatttagcatttccagtttgatgaatataggcagttaatataaacatgcatatctttctgttgtattagtattattatcgcactaactgaagaagcttcagcatcgttgctttagcctttatgtatgtttcttttccattgctttcagatcgtattaaaaatgttatgctacgtattcttatgtcagttttcataaacatttgttattcaatgatttttaagcttcaccttttttcttttttttttaacattggttgctatggggcgggatatgttctagttacttgtcaaagtggcttgttcttcagtatagtg

SEQ ID NO: 79936 - DNA, 816 bp, Citrus sinensis
  Intron number 1 from transcript orange1.1g033840m (locus o range1.1g029637m.g) derived from phytozome v7.0 (chr-ID sc affold00457; pos 100581 to 101396)
caattgtcagttatctccctctctttctttcttttctttttctttttttttttcgtttttttgtttatttattcttaagtctttttgttatatgtatatgtgatctataattttggtgaaaattagtaaattttttttatttagttaagatttagaaaaatgctaaagaatcagagagaaacaatgataaatctgtgccaattttccttgttttccaataagtgagtaaaccgacgccgatttatcactgtttctgttagccttctgtttaatatttctgtctgaatatgattcttcttaaggtcatactttaaaatgaaattcaaggggcaaatcataaaatatttattttggcttttggaagccatgtagctctgttccttattataaatttgagatgcaaaacttatttcctaatcggtgcagttctcgactttaccatgcaattgttgtctctgttatgttaatatgtgtaattaagtagctgcgtcgtgtcatcttttcaactccgtaatgtgtagctttactctattgaggcaacctatttgttttatgctttctgtagaaagcgtctgaaagatttgattagtaagagagatcgccactagttcggcgaaatttgagatgtaagaattactgttatggactcttgaacctagcaataacttgctatagctctgttggtagttttaaatcttttgatattctttaatagggtcacctttcaatagaattgtaacttcaaatttggagccatgggatttttatggattatctagttattgaatgtctgttttctgcaggtgagtccaacca

SEQ ID NO: 79937 - DNA, 873 bp, Citrus sinensis
  Intron number 3 from transcript orange1.1g033840m (locus o range1.1g029637m.g) derived from phytozome v7.0 (chr-ID sc affold00457; pos 101960 to 102832)
tggtgtatcccagtaagttaacacttaacgggaaggattcatttcaatttttatatctagataatttgagtgatctatactatgtgccatctaattacaagtgattctaaaaaatagaaaagtatcaaacactctcctgctattggtaaagctctgttaaaattaatgttacaggatcatgactcatgccattaaattgcaaaccaattgtggttttcttgagtcattctgggtggagcttagtgcaaaagtcactacctatgatatggatttgatagaaacagctctttaaactgcaatgatatgttggcagtttcatcatcattgagagattatgtaaaataaactctcatgtgtttattcttatggagaagggtaagagagtaagaatcgagaagggtaagagagtaattcttatttgtcaaacccagtctgcagggaagtcaactggattttcaacttttcacctgcatgtcagggacaaatatatgagctactatgaactgtattgtgaatacttattgaaaatatgttaaaattcgacctttcaggcgaatggactacattatagatgttttgcttttcgaagataagtagattgtagaatgtcttttgtatttattactctggctgggtcagcaactttggtcctataggcacacatgctattacggaagaattacataatactctaatttatcctgatacatttttaagaccattatatgttgatgtagttaactgatgattttaatttaaaccatgaatctcaatggattggaattctgaattttactccaatctctgcctagaaaaagttccaacattttttttttccttttttggttgaataattcatcaggtatcctccag

SEQ ID NO: 79938 - DNA, 777 bp, Citrus sinensis
  Intron number 1 from transcript orange1.1g009275m (locus o range1.1g005247m.g) derived from phytozome v7.0 (chr-ID sc affold00355; pos 47784 to 48560)
ctgattctgctgagaccgtctctcatcgattttgggtatgtgttttttctttttcttttgctttttttgaattccttcccctttttgcttggtgagtaccttttcttttttgtatgttgggtttgtttggttgctgagaaaatgagaaaatttagattggattggacacaagaattaaatttacttagtaggatttgttcaaaatttgtcctttttttaagttgtgttggagttcaagacgtttatgatgctagtagtgttcattggtgttgacacatggaaaccaagtacctgcataattttgaagtcttaagacaactgagctttgaaagaactgtgtttttcagttgttctagatataagggtacagttgaaagttgcatttgatacacaggatggttaaaatttagactttcaaaacattcctgttttggatttcagaaactacccggttgatcgtcatccaaatggttcgtgttgtctatgattttgaaatatttacacctagactcaaacttaacagaacaaaccgaggccttttctttttgtaaatctcatttgttggcaatttgaagtgaagaaagatatactattttaaagcacaattgttattgggtagaatgttatatacatccatttatggtataattcaccaatcatgaaagacaaaggaccatgaacttcataaatagcactaattaattttctttagaagttgtaatgtttgcaatagatttttctgcttaaagtcctctaattttcacttgcaccaggtga

SEQ ID NO: 79939 - DNA, 509 bp, Citrus sinensis
  Intron number 2 from transcript orange1.1g021032m (locus o range1.1g014452m.g) derived from phytozome v7.0 (chr-ID sc affold00772; pos 1149 to 1657)
gggtaataagggagcttttatgtttgaaatttggaattctggaagttatattggttaatttactgagaatgtttttccttgtgtcagaataataagtccactaaattgactcgttgtgactgttcttgctttgttgaacacctcaatagttgcccctttggtgctgctctgtttacagggttagtaataaaataaacatgccattgaattatatgtggtaggatgggaccagaagatgtggagctatcatccaacagatcacacctacatttctttttaatgagttctagatagtgtttatatgcattgtgtcctcggagcatgtctcctcttctttatttgaagttacaagggaaaagaaagaatccaataccttctcatatattacaatgtcaataggaaaagtcgtcattgaaattttataggatttataccttaagtaatttgatttgaatctatgctttcctttaacattttcaatttggtttgacccactgcagaattcagag

SEQ ID NO: 79940 - DNA, 577 bp, Citrus sinensis
  Intron number 2 from transcript orange1.1g000733m (locus o range1.1g000229m.g) derived from phytozome v7.0 (chr-ID sc affold00123; pos 332007 to 332583 reverse strand)
ttcatttcttttccgttcattccctactcaataaggtaccctttttcttctttctaggggtttagggtttataagactagcactaccttgtgtaggaaatgtgtcaagattataagccattttttttgtggcggtcaattcaatgcaatcatttgctgttttgtagttacttttaatcgtgggaatgaaatcactaattatcaaataaaagtagtccatctttaccatacacattagctggttcattttgaaattaagcagacgcacaactatttcaaacttataatgaagttaattgttaggagggacatcgggctgcaagtgacattagttgagatgtgaaaaagaacaaaagttgtgatatttccagcccttcatgaaagttgtcttttcttaattttaaccaccagaattctgtttcttggagagaaagtgaatgtggattattataccatttgattggatttatgttcaaatttttgttgcttgagacttgctcatgaattgtcagtttgtctcatttttggttgtaatgttgttgtgcaggaaattaaaccatctttctcctgttctctca

SEQ ID NO: 79941 - DNA, 776 bp, Citrus sinensis
  Intron number 1 from transcript orange1.1g010828m (locus o range1.1g010828m.g) derived from phytozome v7.0 (chr-ID sc affold00051; pos 677895 to 678670 reverse strand)
aagcccaggtactaataataattctcaattttcttttttaattttacatgcacgcatgatatatttgacaattcgtttttagttttattggaaccaataatttcattattattttgaatgtatatatattttatatttttgatgtagttgttaattacattaagttcaaattaattcaattggttttcattagatttctttatattgcatgtttagaaaagcctttatatggagaaattttataatacctctgatgtattacaaccaattgatgtatgcatgccatatatagttgaatttaatataattataaattgcatgatagtttttcaaactaaatgcacacatgtcataacatcatttacttattgtataactgatatgatacctctgatgtattttagaatttcttctttatatgatacacaattaaagagagttcgtgggctgctagtttgttaacagtttgaactcaactcatccggttactgaaactactaattaaatgatgaggtctcatgtgaaaagatttgaattccctcacatatgatggagagaaatacacttactctcaagagtcattttgttaaaaaagagatcttttaattgctacagaaacgtgcaacaataaggaacaacgttttgttgtaccgaactagaaaaaacaattaattattgtacccatctaaaatgttttatttaccagaattataatattcttttttttgaaaaaaaaaaaaggtgcaagaggcaaattgggagctatacaagaaaca

SEQ ID NO: 79942 - DNA, 806 bp, Citrus sinensis
  Intron number 1 from transcript orange1.1g045337m (locus o range1.1g045337m.g) derived from phytozome v7.0 (chr-ID sc affold00528; pos 28878 to 29683 reverse strand)
aaaacagaaagatcacttgtggtaagtgattatgctgccatttctactgttttcagttgtatgtttacatattaacatttcacaattggcaactttaatcaccgtgcatacagtttgaaaattgagaactttgcaaatcccttacggaaactgcaaatttgaagtcagttgtaagcgtggctttcatatcagttgtttttttcactggtactgcattactgacaaacaaaagattatacaaatgtaacaacaaaagactgaagcctatagttgctgtcactatttgttaggatcttacacttcagttatgaacccaacctctttactccttcactcaaattccaaggtttggattgattgttgactaggttgagattatcagcttacttcattcctgtgtgtaaaattgtttatatttgcacttcatattgcttcactagtttttgggttgatagcaaggaacactgaaccaaatcctggcgtgggtttgtgaggtgaaaaaaaaaaccattaaattgaggtcgcttagagtacaaattgtccccatcttctatgaaagaaattgccttctccgtattttttccttaataggaaaaacagcttcttgctaccatattttacttaaatgttctctccatcgactggattgaattttttttaaattttttaatttttttatgcatctagactcaaatttttgtgtgattaatctatttttcatattcactgtcctttctgggcatcacatattgcaatattgttaaatggatatatattcttttcctttccttttcacagaccctgag

SEQ ID NO: 79943 - DNA, 324 bp, Citrus sinensis
  Intron number 1 from transcript orange1.1g005745m (locus o range1.1g005071m.g) derived from phytozome v7.0 (chr-ID sc affold00007; pos 622135 to 622458 reverse strand)
gctcggtatcgacgagtctcccattcccatcaccggtactttttcttcatcgataattatcactattgactgcgttatttgatcatgatccgttttattatataagaaattaatgaattttctttttttggttttttgtcttattctcaattcagtccaactcatgatagtaatatattctttcggtccttgtttgacaacttctgccataactgaatgtgaatcttgcgagccttttgtttccagatttagtgaaaaattattgtaatgcaaggttttgaagttttttaactaaagttataactgataatgttgcagggttct

SEQ ID NO: 79944 - DNA, 822 bp, Citrus sinensis
  Intron number 1 from transcript orange1.1g039491m (locus o range1.1g039491m.g) derived from phytozome v7.0 (chr-ID sc affold00026; pos 377001 to 377822 reverse strand)
ctgatcccataaaatctctccccgattttatccttgtaattttcattttgcttttttaagttcatcatttacatgacaataagcatttggactcgattgtgtttgtagttgtttgattctttacttcgtagtgaagttaaaagtggtgtcatttttttcaccttttagggtttggctgacaagtgcttgaattgggtgattgtgcttaacctagccttcattttcgtcttccatcatttactagttagtttctcttttcaatcattttaatgtttgcaatgtcttaaaatggttaatgaattcagcttgtgtggcttttaatccacagctgctacataatgcaatcactagctgtgaactgtgaagtataagtgggtgggtagttagtaaatgttacatgcaaagtaaagttggttattaatcactttcaaaatttagcagaaacaaaagatatgtaataatatgggattgcaactattgaaactgaactttgacttacataaaaacgaatcatgaagtgataaatgggtattattaatcataatgcttttcaacctgaatgaaatttgttttgctgattaggtgggggatataaatcaagaatatttggattttttttttcagttgactctgttgttaaataagctattagtatagtgccaactttcatgaattcctatgcgtgcttcattttttttaagtggcagagtagaggaggttataatttcttgtaccctatgagttggattctttctactctactaacttatgtctttacatatcttagccacctgcgtttcctagggagacggctgaatcaat

SEQ ID NO: 79945 - DNA, 585 bp, Citrus sinensis
  Intron number 2 from transcript orange1.1g027976m (locus o range1.1g017679m.g) derived from phytozome v7.0 (chr-ID sc affold00036; pos 449529 to 450113 reverse strand)
cttgtcaaattataatcaggattcatcaattagtattcttgtccagcttcctctaccacaagtaatttctacagccataacgtgatccaatttttgcttttactgatctgaaagagaagagcacgtgtcttgattttgaagccttttcaattcaaattagccctagaactgagaatgctggccaatctcaatcttagctcacctctatagagcaatattagaatttgcccctggacagaccccatcttgcaaaagtttagacaagtcatagcatgtgattattgccaagtttccttgccaaatggaaaatcaatcttaatcgcccaaaattatcgctctataccactgcttcctggtgattaaggggtatccgttagtaaaattttgtctacaatttcctgatttagaattgtttttttttttctccttttcctctcaaaaggcctactacacggtgatcattttgtttatgtgttaactgtttatattcatcagaaagaaaagagaggaagagatatctcttagatattctgaaataaacttaatgttttgacacaagcctattgatttgtgtgcagcatttgg

SEQ ID NO: 79946 - DNA, 495 bp, Citrus sinensis
  Intron number 1 from transcript orange1.1g027976m (locus o range1.1g017679m.g) derived from phytozome v7.0 (chr-ID sc affold00036; pos 450399 to 450893 reverse strand)
ccgtgactgtaatcctctcccacaacgaaattgctgtaagcatctctccttcctcatccatttgattttgatgcatgcagcaacacctggcctggctcttagtataatggaactgtttgtttggtgaccatgattgaaagacttaacttctattcgttgaatatagatagatatttgatatccacatgctggttgtctggccggcttaatcgtttttgagttttcaattgcaatcaaaaacttggattttccaatttaaaatttaaacttcaataattttgattcttattagtcgaaagaggctcgggtttgattatcctattttactttgtatttatgttgaatcgatgagtcactaggtatatcaagagagagattatcttcttcttgctgaaaatactgttaaattactttctctactgttatcatcatcatcctgagttgtcttttcattttaatcattttgttttccttttatgcctcctttaagatcct

SEQ ID NO: 79947 - DNA, 915 bp, Citrus sinensis
  Intron number 1 from transcript orange1.1g006879m (locus o range1.1g006875m.g) derived from phytozome v7.0 (chr-ID sc affold00010; pos 1645151 to 1646065 reverse strand)
ggccagccggacaggaaacgacctgctttggccaggtaattattattattatttttccttaataaataatttttttattcatttttattaactttggttggttaatttattagtcggttagcgagtagaattcgtttgagtttgttcgttgaatcttgacttggatataagtaacttttaatttggttgaaaatatgcaagtttgaaagagaatattcttaatttaattacagagagaaccgaaagctaggaactgattttggcttctaacggacaagaagtaatagtatgagcattttttttttcaagttcgtattcagattagatgtattctgaaacttgatcctgtagagacagaaaggtaaatttgagtaattggttgactctggtgtcagtcatattgattctgtgatgaaatgacctaggacctttgcatttgtttggcataactaggaataactgaggagcttttaagaatgtttttgttgctaatcttgttgttgtggtgatggttgcacttgcagtggttgtcgctgtattcagtgcaaaatggctgactaggtaatttaacataatttaagcatgaaaaggccaacaacttcttatcttaaggtgcatgcttttcttaaaattagttatttaacaaaaaggctttctgattttgttatgttttacttttggtaaaaccacttgttttagggtgttactgtgtaggtcccaaatttattatttctagttgccaagttaaagagaatatatttgaacgtaaaatttgaattgtgaatatttctgctccattctttagttctttagttactgaatttcaacttaatttacttagtggttttgatggctaagtcagacattgtttaatatgcagcgtaattgttgaggctcttaaggtggatagtttac

SEQ ID NO: 79948 - DNA, 689 bp, Citrus sinensis
  Intron number 2 from transcript orange1.1g040417m (locus o range1.1g040417m.g) derived from phytozome v7.0 (chr-ID sc affold00036; pos 562942 to 563630)
accgtcgaacactacggacaaagtataatctgccggtactactcttaacaagtgtttggcaaagatagttttatcatgtgaagaacttttttatccctccatttcttttgcttgtagttcatcggtctttgattgtcctataaacctgtgttcttatgaaggattaacaaacaagttggtgatctaggatttagatgtgtagtttcagaaattttgagattgaaatttacttactaggacttcttatgataattatttgattatgaaacaaactgtatcataaagtgattctgtgagtagtatattgcatatcctcacaaactcactatcaaaacatgtcttcttttccgtgttcctagataatgcttgagaaaatcataaaaattatttcattggcagaatactagtaaaaatatatagaaagggagaggagaaatccaagagttaaagttattgtggattgaattgaaattagtttaatatcatagtgatgatgatagctgccaaagaatttgttaggcatgcgatttcgtctttttccccaaaaagttggccaaaactcagttgggtttcatgtcagccaattcatccctctacccttgcaatttctctatggctttgttatgaaattgtcactgttagacttagctgtggtttaccagttcttgatgtctaatgcaggaagcacc

SEQ ID NO: 79949 - DNA, 382 bp, Citrus sinensis
  Intron number 4 from transcript orange1.1g031182m (locus o range1.1g031182m.g) derived from phytozome v7.0 (chr-ID sc affold01021; pos 22448 to 22829 reverse strand)
gggttcgtatcgcaatagatagagaggtgttaatataagctaaagttagaaataatatcacacttacttcagtagttttactggattatgatatctttttctcctaacttttgattttgaacatgatcttcatctaaatacaaaatggtagtaggtgctgaagtggatgaaagcaacttcctaatcaacaaaaaacccataaggattttcttttagaagttatgtattagatctatctttattaggagttctggaacttctgaattagctggcaactgtagtttcaagttttctttctttcaaatttttattgttctctgtgtaattatagtaaaagttccattatcctggcctttaaatctgtatttctttatgcagttgc

SEQ ID NO: 79950 - DNA, 828 bp, Citrus sinensis
  Intron number 1 from transcript orange1.1g031182m (locus o range1.1g031182m.g) derived from phytozome v7.0 (chr-ID sc affold01021; pos 23389 to 24216 reverse strand)
tctcaagcatctcgtcaccgtcttcatcactgcaggtaacgatctggccattttaagagaacagtaatgatggaatctcaagcccattctttacttttgtcattcgacatttccatctttatatatattaaatccctagcccttcgtttactgttttcagttgatatatcattaaaagattgtgacgtctgaccccattaaaaaagttctcgttgatttgaacacaataaaccatcgcggttggttggtttgtgggtgcatgggatgattgcttttgctatttattttttagttggattttgcattgattagctctgcatttattgtaaattcatttgatttgtggatatttatgattaatggtaagctcttcaatgtgattcatcagattttgtttagttttattattattattattattattattgtttttgttgttgtttttaatgatgtttctcatgatctgttgttgggtgatttttgtgtaaaccgattctgtcatttataagtggataatgaaactatcaataattattaataatgtaaaactggttgttatatactggctttgcttgtaaaatttggagctatgttgtaagttatatcagtagaactttttgtttttgcgttatcagctttaaacatcctttgctatgatcatttttgtatcaatgagcctctggttactgggatgatgttcgaaaagtaaaattttcagttgaggtctttgttaaactgtaatctgtactctgtagatgtattcttccttggaatttcgcagactctaacgtatgaaatatttgatttcttgcattctttagctggctg

SEQ ID NO: 79951 - DNA, 1006 bp, Citrus sinensis
  Intron number 2 from transcript orange1.1g026247m (locus o range1.1g026247m.g) derived from phytozome v7.0 (chr-ID sc affold00004; pos 469586 to 470591 reverse strand)
cttctccttcaaccctttcaacaaagaaagaggtaggattcttttattttatccccacacaacacatactttcatttaaagttgatgacatgcttcttgaaaataaactccatttttcatggatatttatttatttatagccgttttgcatatatttaaaagaaaaaaaaaatctttcaggaagaaattatagagaatcaagctcacacaaaattgttctatttgtaaattaataagatggattattttagtttttatatcaacttgaagccggtatgtttagcttaatggggactgagtgttcatgttaagtagatgtatcaaagtttattaaaatgcaagcttttagtaattttttttctttaatataataataaaccaacaggaaaagtatagaaaaggctcctaccaacccataatcaacgggatgccggtgaaaattaatgtgataggcaaggatatattacgagagtcaattaaggacccatttttccatgattgaagaaactcaaacatatgactagaatcgtcattatagactgtgcatggagagattacaaagccatgaaaaggactcagttatcagttaattaaccatggtatatattaaacctctactaattattatattatatacggctagtaattacttataattttaattaattattctatgcgtcttcttggaacatgacgattcaaagcatctacgcagtcataaattcagctcaaacccttcgagttctcttcccttttgttttccaagtaaattggcgaaaaaacaagaaatatgtacacaatgccatgttaatcaacgagagagaattattaattggctgggagaaccaatgggttacacacattgaatggggtctcctcttctgataatattaatgatatagcttgcgattgcctaaatttgatgtttagtgatttattttagttaaattgaaaatcttattttgagatgtataagtgggcgcaggaatcgagagtcaacttgatc

SEQ ID NO: 79952 - DNA, 596 bp, Citrus sinensis
  Intron number 2 from transcript orange1.1g006780m (locus o range1.1g006056m.g) derived from phytozome v7.0 (chr-ID sc affold00123; pos 291918 to 292513)
agccaggtttccattcatctcttatatgcttatatgtttgcaatggcatttacagtttctacttttctttttctttttttatgaaaattagttcttgatttgtaaattcggctactttgctgggattctaaactaattgaagtggggattaattttagtttcttagtgatatgttttgtagtatggctgttacttcatagggaacctattcttcgttttaaactgttttgcaatcattgttatttaagtagtgtttatccaattgtcaggttattgggttgtgtttttttgagttatttccttacttggatcagcatttgaaatgtgggttataggtacatcggcatgcccgaatggaaaattctattgtcagaatgcaggacattcccctcttatgatattttcttccaaagtgaatgatggcatttgtggtaaatgttctttgtgacttcaattacctacttgcagctttgcttaacttcttattctgtgtgttgtttctcactcttgacacaaataaagtattatatttcaagttcttggtctatgcatttgttttagcggcttgtgatgtgcagattgctgtgacgggagtg

SEQ ID NO: 79953 - DNA, 778 bp, Citrus sinensis
  Intron number 5 from transcript orange1.1g020379m (locus o range1.1g017326m.g) derived from phytozome v7.0 (chr-ID sc affold00394; pos 133205 to 133982 reverse strand)
tctttcccctttgcagggagttgcaagcactggtaagtattgtcaaacttttcttgctaactttttatttttatatttggggaatgttcttttcttttcatcccaccaccttttcaagtattttataaattagttttaggtttttctactttcacctttatatggtggataattaagtgaattgcatttgcttggctgcagataacagtctattattgggaattgatgttcatgcgtagaccaaatcagtttatagaatctgatcttattctcttatctttttgcgatccttgtacttattagaagtattcaatgcagtgtagttgcatttaattgtttcatagtatttttgctgagggataaatgcttggagttctgtataatgaatgtcaatgcccagcgcaaaccagccattactgtatctgaaagtagtttgtactggtcaggcaaagaagctagtagttcagcaaatctactgtgtagtttgatctacaagttgccgctagttctcctaatcatttttacaccactaattttatcattctgtatcatatatgtcatcaataattttcttgcagtatttagtcctaagtatttttatgttgatttctgcactttttgaatttcgctcattttctttctcattatgcctgggctaagttgtgataagaaagttacataatgtctaatatgcttttttattggttcatctctctaatgctcttaattacttttatcctcagtatttggagtcccaattgaggttactgtacaacga

SEQ ID NO: 79954 - DNA, 503 bp, Citrus sinensis
  Intron number 1 from transcript orange1.1g020379m (locus o range1.1g017326m.g) derived from phytozome v7.0 (chr-ID sc affold00394; pos 134858 to 135360 reverse strand)
cgatttctcttcagctaatacaacatacgacgaaggtaaatgctaataattgaattttattcattttttccaatcactgactctgctgatttttaaataccgagtgtttttctttttctttttgaattaatttgttgttgttttatcttttattcttgttgatttttcagtttattcgatgcaccaaattatttattgctgatcgtatataattttttaatttattttacttatttattttttatttggttgtgcttaaattttgagttagaaattgtgtttaaatttgatcacgtgttctttctgtgtgtttgattgcttcaaaaataaaatgatcaagtgctaccgaattaactgaagccttgtaacaattttatattatcagtttagttatcgagtttggaagcctacttatggtggcttttgaagaatattattctgtgtacttttattgactcgtttcttgtatttgaagcttggttttggtgtttgttgtcggatca

SEQ ID NO: 79955 - DNA, 510 bp, Citrus sinensis
  Intron number 1 from transcript orange1.1g028195m (locus o range1.1g028195m.g) derived from phytozome v7.0 (chr-ID sc affold00070; pos 250838 to 251347 reverse strand)
agaggttttaagattttgttcaacttcaatcgaaggtacaattgttttttgcttatttatttgttcatttatcgaaatttttcctttttaatggtttgatttaacagtcaaagggggaaaaaaaaacatcgtttcttgtagtgcatcattttcatttctagactctacaacgattgaaaaaaatgtaagatcgaagtctcatttgcctttcttctctttcttggcgactgaacagaaaatcaaatcatacccatcttttaatttgattgcatttacatctgaaattgttatttcacttaaaaaaaagaaaaggcaataggtttcaaaatttctctggaatatcctttgattttcatttggaagctaccgtggggaaattatggacgtgggttttatttatttatttatttatttggggtgggggagtagcaattctttctaacaataagtagagacttttatgtttgatccaagctcataatctgcaaattttgcttctttgatttacag

SEQ ID NO: 79956 - DNA, 629 bp, Citrus sinensis
  Intron number 1 from transcript orange1.1g007325m (locus o range1.1g004038m.g) derived from phytozome v7.0 (chr-ID sc affold00271; pos 140814 to 141442 reverse strand)
gccgctgaaggttcctctctttcccttaagtcggtgttaattattgcttcgttagatcaatttcctttatttggattaatttcggaataccctttatttaattcttcaagtttcagcgcaaaatttctttctctcttttttttttgtacactatcgtaatggtattgaagacgcgttttttaatttattttggaaaatttggctgtaatatattcattggtctaaaaaataataatgttactcagagtttaaacaatataaaaactgtagtaagtagaaggtggtattcagaattacgttttgtgatactgggaaattattgcaatgaatagttgtaacacaagtaatatgcattcatcttactttggagtactggattcttttgttgatattatatggccgtatctatcatggaaaagcaaaggcgtcattatggtattgaaatttttgatctttattcttctgcaacagtgttatttttggattcttactttaatgtttgcttgtaagaggatgagtttttattttgatggttgttttggtttctgggtttaggctaacagcagaagtggatttcatttatcttttttgcagagtcaaaacgtgtgatccccttgaaagattatcgg

SEQ ID NO: 79957 - DNA, 315 bp, Citrus sinensis
  Intron number 2 from transcript orange1.1g009406m (locus o range1.1g009233m.g) derived from phytozome v7.0 (chr-ID sc affold00004; pos 529890 to 530204 reverse strand)
aaaaggtctcagtagtttctggactcttcaattattaagaataactaattgaaatcatatagctatacaagcatttatgtttatgcttatgcttaatggcgtggtattttgtccctgaatcctaaatcattcagaaaaacaaaagatgccaaaacaaaatgtctataaatgagttaaaagagatgatctgatttgattttatcttagaactagaataaaaagatttaagatttttattgcttcatttggataattctcacatttataggtattggtgtaggttgtggaagttttaaatcctttagcacgtgatta

SEQ ID NO: 79958 - DNA, 700 bp, Citrus sinensis
  Intron number 1 from transcript orange1.1g009406m (locus o range1.1g009233m.g) derived from phytozome v7.0 (chr-ID sc affold00004; pos 530402 to 531101 reverse strand)
cactgtacagaccagcgaagattaatactaaaaaggttttattttttatttattggaacttttaaatgatttattttgtctgggtagtttctaaatttggtgggaaagtcagtttagttagttaatgctttagtttaatatttagcgtatgtttgtgctgctgaagcctgaaagctcattattcatgtatttataaatgtttctttgttaagtttacgtgggcagttgctaaactgatctttttataatgcgtgtttgatttgatttttagctgaattcatctaggcgtttacttaacatggagcgaagttaaactcagtaattggttccatagcgacaaaataatgatagaacatatgatacatttgtaattaaaccctgtgctgttattctgatcctgctccctactaacaagaggaatatttttttttaaatctttaaatttggatgcctcttattggttgagcagcttgaaaatctaattgtttctcttcttaaattttatctgtttactaaagtggctttttttttttcttggaaacgacttatatattcatttatcccaaggagataagagcagttgttaggttatgttccactgtgataagggaaaatttatctgtggtaatgtttaatcaggatactaattggtgagtggttttcagagtgttcgaggaggatttagggtgtttgctctatt

SEQ ID NO: 79959 - DNA, 726 bp, Citrus sinensis
  Intron number 1 from transcript orange1.1g004615m (locus o range1.1g004038m.g) derived from phytozome v7.0 (chr-ID sc affold00271; pos 140717 to 141442 reverse strand)
gccgctgaaggttcctctctttcccttaagtcggtgttaattattgcttcgttagatcaatttcctttatttggattaatttcggaataccctttatttaattcttcaagtttcagcgcaaaatttctttctctcttttttttttgtacactatcgtaatggtattgaagacgcgttttttaatttattttggaaaatttggctgtaatatattcattggtctaaaaaataataatgttactcagagtttaaacaatataaaaactgtagtaagtagaaggtggtattcagaattacgttttgtgatactgggaaattattgcaatgaatagttgtaacacaagtaatatgcattcatcttactttggagtactggattcttttgttgatattatatggccgtatctatcatggaaaagcaaaggcgtcattatggtattgaaatttttgatctttattcttctgcaacagtgttatttttggattcttactttaatgtttgcttgtaagaggatgagtttttattttgatggttgttttggtttctgggtttaggctaacagcagaagtggatttcatttatcttttttgcagagtcaaaacgtgtgatccccttgaaagattatcggaatattggtataatggctcacatagatgcagggaagactactacaactgaacgagtcctattttatacaggaagaaactataaaattggggaggtac

SEQ ID NO: 79960 - DNA, 601 bp, Citrus sinensis
  Intron number 1 from transcript orange1.1g044089m (locus o range1.1g044089m.g) derived from phytozome v7.0 (chr-ID sc affold00163; pos 14327 to 14927 reverse strand)
atcgacatacaacccacttggccccagagctaccggtatgtctatatttctgttatcagccttgtcagtgatctataatggtatgttttaggaacctgttactgaatcatttgattgctcaattagtcacatcccacatcactatcgaaggaaggcccttgggttctcttaactatgtagaacacaaacttgcgagggatgttacatatggcatcaaggtggcttgaccctaacattttgctattggaattgtaaaacaaaggggtgaaattgaagtttctgccattggtgaactgaatccatggtcacggagtggccttttggttttctcggctttattgtgcctagtcatatgaaatgcatcttcaattggtcaaaggtctcatgggtctcaggtgctctagtgaatgctagcaggcttaaacatcactcatcaggacttatgtttctattgcactgatggcagaatttccttaataactgataatcatagcagtgaatcaaatgtagtttgtcaaagattggtatagaagaagaataaatagaataagttactattcgcttgacctctgtctgttgaatgtatgtatgcaggcaatca

SEQ ID NO: 79961 - DNA, 997 bp, Citrus sinensis
  Intron number 1 from transcript orange1.1g013443m (locus o range1.1g013443m.g) derived from phytozome v7.0 (chr-ID sc affold00038; pos 175850 to 176846 reverse strand)
atttacgggtttatcagacttggaaaggaagcaatgtaagtgttttgtttccccttttttaatttttttttgttctacgtaattaatgtttctaagtttggttaagtaggttatttttccattttttgtttattggattttatttttgtttttgggcattatgagttgtaattatctaattttatcggtctaggttttattgttatttttagtcttttacgtatgtgtaagtgagttttgcggggaattaaagataatgaagaagaatttgagctgaactctgtctctgtcagcttaaaaatggaaactttgatgtgcccctccattacttgagtgtgacactttttagaggagcttcagtagagctgcatattattgtgtttgtgtacatgattataaataaatttatctaaaaattgaaaatttaagaaatatgtgtatgacagctaagattgagggattattagaatcccaaaacactagttggtctaaatttgagttttttcttttcttttttcttttttcttttttcccccttattctaattaaattcatgttgtggtttggtgtgtttctttaattttcttgcatctgaacattgaattaaatctcttaggcaagcaattctcgttgaatcctctttatgattcttgaaagtgcagtatgtgagagttcaatggtagagttctctttagacaatcgtccactaaaaatatatttgaagttgttgaattaaagatacttaactgtggttgtttcagttgattgaatgtcaaaggccaataaattaggtgattaattgatggagcaactccattcaaagaaccaaagtgcagtgttaagccttcagtcgtgcctagactttaatttggcatagatattcccatcttttgtgtatgggggatttgagtgtttgtgcatgttccttcaaatgcattaatcagttctatttgttgccgcagatattttttcttcaagggaggcttatatttggacc

SEQ ID NO: 79962 - DNA, 1008 bp, Citrus sinensis
  Intron number 1 from transcript orange1.1g033736m (locus o range1.1g030029m.g) derived from phytozome v7.0 (chr-ID sc affold00476; pos 112058 to 113065 reverse strand)
catcggacggacggaaccagaactactgaaaacaggtcgcgatctgttttcttttctatttattttttaatttgaggtaacttaatttctgtgattttttccgcaaaataaatgttaatgatgaatttacttcagctgaattttttaggttgattttttaattaatttacatgaatttttgtgcctatagtgtgctttgcatagtaattattaattgatttttcgcactattatacttatattgtattattattatgattgttataattatttcattgtacttgtgtgttaattacttttgtttttttgctgattttgaattcattaattcatgggtacgatgttaatattttggagaaaaaaaagtgaaaaatgatataaaaaataaaaatcatgatcttaaacactcaaaagttgcctccctatcatcatttgtgccaccaagctcagtcgctcactagccaggcggccaacaaaattcccccacaagtcgtgattacactgtgaatttggttgttgtagtaatatagggttttagtggaaagatatgatatgaccgatggtttctcttgttatatgctgtgtaaatttgattcgaatttgggaattaatatttagtgatttgtgtttagggttcgtgtggacctgttgaatttgggatttgttttttattgattttgatgggatcgtagaaaccactggtattggatcaggacaaatttttgtccctgataaaataacgggataggatcgggtttcatttacttcccgactagatattgccaaaaataatttgtagtactcattttttttttgacgaaacgttgaatttggaatttgctatttagtgtaaaaagtgaatgattaggaaatatatgagccttttgaaaatttataggcatgtatcctttgttggacttgtagtgtagtcacatatgtggactaatgaattctaatcagatagtttctgcaggattggtagcaatttaggaactgtttctggatagg

SEQ ID NO: 79963 - DNA, 854 bp, Citrus sinensis
  Intron number 3 from transcript orange1.1g033797m (locus o range1.1g033797m.g) derived from phytozome v7.0 (chr-ID sc affold00038; pos 765892 to 766745 reverse strand)
aaagcactttgcaggttttagctacttcatttagctattaattatttattctttacatgacttttgtttgtatcaagtctaatgattgccctggtttcttgtttgttggcaactcttaggctggtttgtggggtgttttaatacgaaaatgtaaatggaaaatttgatagttttaaaggagtagtgtccaagataaggcgtggttgattggtgggaagtgataatggtagttagtgtagccaatgagagtggatgatttgaataagatgtgttagaagcctatgcaattctaatacatcttaggaggagaaaaaattttgggacaccaagtcaaattcaaccaaaaacgcacagtataatacatatttggttcaggcatggattaggattaagatgcaagtgagggagccacatggggatgaggactgctaggatgcagtgaaggatgatgtgtaatgaatgatagtgaatttccattaatgcagtgtcttcgattgctcaatgcaaaaagtttaaatccaatgttgtgaaaacatatgctttatgtggtagctctcgaatcatgcttaggatttaggaaggtgttaattgtggttgatcatttgccttttcttaagacagtttagaactaccagttttgttgactataatacttcccacaaacatggacatttttctccttattgtgtccacgagatatgacttgctgaaaagaaacagccaatagcattttcttgtcctataagtttattagatgaagctttgcatgattctgattctagtgtgttttgtttcaacatttgaaaatctcttttgactcattagggcatatataaagaagaaaggtacaaata

SEQ ID NO: 79964 - DNA, 499 bp, Citrus sinensis
  Intron number 1 from transcript orange1.1g045478m (locus o range1.1g045478m.g) derived from phytozome v7.0 (chr-ID sc affold00498; pos 5509 to 6007)
ataatttatttataaagacggtaatctcttgatatctcattgaatgttgcaagcaatttgtaccaaaaaaatttaataactttatgcaagtgtttctctgatctgatacatgcacaaaaacatatggatacttggattcctttaggatgtttcttttttcgtgggaagaaattcaaatggtataaggcgattgtttaagcaaatgagtaatttcttctctctgtgtgtaaagttctgatgtgatctccttgaggccgcaaggtaatcttcctttaataagaaaccagagataagctacttcaattatatttaaaggtcaatggattgcatttttctatgttgagggcatcaattacagagcaaattctttcctgtattattttgtcatgttaatggtttggatctgatactatcaaccttagaatgacagattctctcttgatctggaactaagatttataaatttgatcaatgataggcttgaatgcaggaaggtgtc

SEQ ID NO: 79965 - DNA, 407 bp, Citrus sinensis; identical to SEQ ID NO: 79722
  Intron number 1 from transcript orange1.1g008791m (locus o range1.1g008791m.g) derived from phytozome v7.0 (chr-ID sc affold00067; pos 102222 to 102628 reverse strand)

SEQ ID NO: 79966 - DNA, 896 bp, Citrus sinensis
  Intron number 2 from transcript orange1.1g023068m (locus o range1.1g023068m.g) derived from phytozome v7.0 (chr-ID sc affold00036; pos 291708 to 292603 reverse strand)
cagccgactgttaactcaaggttgcttcttaagtctttgagttctggatctaggtttttctggaattcaatggcaccctttttttgctttttgtatgtttcggtctgcacaactacattacttgacttgccactgtgcttgttttgagtgttcagatcgtcccagttgttcttctttgcgtcaactctatgcatccgtgtttgttttcattttgagattgtgtttatggtcttggcttgatcacatagatacacttgtttcttcagttcctgtgatcattttaccgtgtatcagatggtgcccccggtacctatatttagtttgtccaattgcatcaatggctgaatgtatctcagacattcagcacaatgtggaatttatgaaagaaaaaacttttgactgttacatttggtttctctgcttgcaccaagtacaaagctagcaattgccacgaaggtgtgattctcgacaatctgtaggcttcatgcctgctccagtgagcatgaaatattgctcttttgtggttgaaatctgagtgcatgatggagtttggtacaaatcaacttcccagtgttagcttgaataagataagtggtctgttactgaaataaacattgaagatgtgatattgtctcaacattcctgatttgtggctggagatagtattttcttagccttaaatcctcttcaattctttctggagatgtctagtttttcttcacaatgcattctctttcatagtttgtccttgttgcaattcttttcttcttgttgtgccttttgcttggtttttgagtggatttcttctgtcttattttaatacgtttatcatgatttcagatcatagtctcatataaaatgttcttttacaagcagagatatttcgggtttctggg

SEQ ID NO: 79967 - DNA, 529 bp, Citrus sinensis
  Intron number 3 from transcript orange1.1g031134m (locus o range1.1g027225m.g) derived from phytozome v7.0 (chr-ID sc affold08413; pos 1422 to 1950 reverse strand)
caaatcttttggttgacaaaaaatatacagtgaaggtaaggcaatgaatttctcatttgtatcggataaaccaattattaacatttatcaaccaatcaatcaattgtcatgcttatttttgtctgacacgaaacctgtgaatggaacaaccctgttactttgttagcttcaattgattgttttatttgtcttgtatattatgtgaatagcataatatattccaattgtcccatagaccaatttggatgtaatttgaaaccagcaactgcgaaaggctaaaattagattcttattgtattttcagctgaaagttatcagtgtcttctctttagtacttaccatgcatttttcctcctccttttggtttcggtgttgctcgtttagattgacatcttctgatgaagtacatgcatgtttactgggattccaatttttgtttcattttatgaaactgatttaattccttatttttactatcaactctgttcatccaggtttgcgatttcggtctttctcgcttgaaggcaaa

SEQ ID NO: 79968 - DNA, 431 bp, Citrus sinensis
  Intron number 2 from transcript orange1.1g001462m (locus o range1.1g001462m.g) derived from phytozome v7.0 (chr-ID sc affold00010; pos 1786835 to 1787265 reverse strand)
atctttgggccattggaaagcccactgccttagttagtttcttttcttcttattaaccactttgcttgtattttaattattgccagtttctgttatttagcatttgaattctgctttagatgtacaatgtgttgtcagtttttcttttcccttttttctttttaaaattatctaatggagagatggcgatttgctttccttttatttatttattaccattagtaaatcaatgcagtttctggaggaaattttgaactcaatagtttccttttaattttacttacattttcaagcattatgctgttttacatatttgcataattttccgcaacccgccattgtggtgatgttgctgtatgcgaaaaattaagtgtgtccactggtgttaatatgcagagcctgtgtggtctttcaagtccagttgattcagt

SEQ ID NO: 79969 - DNA, 484 bp, Citrus sinensis
  Intron number 1 from transcript orange1.1g001462m (locus o range1.1g001462m.g) derived from phytozome v7.0 (chr-ID sc affold00010; pos 1787341 to 1787824 reverse strand)
gccaagcgtggatacaagctgcgtatcctgtccctcatttttgttagctttaaatttttttaatgccgagcttgaatttgttgtttcattcagttattttgctgagctttgtgtgatgatttagtgttgaatttttggtctatctatttacatatgtatatatatttgttgactacaacttgaatttagtgatggtgtgaggagcaagatattcaattccagctgcagttttttttttttcttccctgtttgaattgtttggaagctgagaaaatggaggaatagttgaatgaatttaaaagtttcagtgtttgtgatacttgtcttgtttgagttttcagatgatgcgaaattaagcttaagcttaacttagaagaaaacttggaaatcttaagtccaatatgttgaaattaaataatgttatagaaaatgtgaattttcttgactgaaatcaatgtagaggaatttgtggcgcactcagcaa

SEQ ID NO: 79970 - DNA, 678 bp, Citrus sinensis
  Intron number 1 from transcript orange1.1g026503m (locus o range1.1g026503m.g) derived from phytozome v7.0 (chr-ID sc affold00349; pos 51006 to 51683 reverse strand)
ggtcaaaagcaggacatcaattctaaaacaatgtcttcctcttgtcctttgacatttttcaaatgatttccttcgtgttttgttgacaaaattgaatatataagcaccctttatccacaagtcctaaatgtcttttcttgaatttaccgtatttgtgataaagcaatagataagaattgtgaaaagtccagaactctcttctagttttcgagtgattctttgcttactttcttgtgcaagcttgttgaatatatgaattttctttctaaattatccacaacgagcttaaagcaatctaacttcgaagcattcacctttcatccatattgattcgtaactgaaagcatatgagaagcaaaaatttcaaccattggatagatagagggtggtgttaaacaaatctttgaattactttgttaaacacatggcggtttatggtaatgccacgttatcacatgtttttcattttacttatctttactataataattaaagtcatgataatatttatttattactgaaggaaaaacaaaaaaaaacaaaaaatggcacgtgtgcaataattatgatttataaaacccagctcattcattcatgcaaaagcaaaaccacaatacaaatacaatcagtcatttctctctctctctctctctctctagaaaaaaaagtgaacaagag

SEQ ID NO: 79971 - DNA, 570 bp, Citrus sinensis
  Intron number 1 from transcript orange1.1g047914m (locus o range1.1g047914m.g) derived from phytozome v7.0 (chr-ID sc affold00007; pos 657885 to 658454)
gcaagtgggtttatcctccaattaagtatgtgcttctcgtttaaagttttgatttttttttttctattttcctttttgggggtcaatttgaaatatttgttaattccttgcttttatgactcttctccattcatgtttgttttgcaattgggaattttagttgtgagtccacattgtgacttctggtggaaaatatattttctcttacggaccttttttcttatcaaaaattctttcttgctctgctggatgaagaaactggaggctactttattttcaagaagattctatcttgtgaggggtagtttagttttctgcgttgggttctctctttcttgttatgttagtggcaattaagttcttcaggcaacttagttgggggttatacataggcgagcttgcattttgaatacagtagttggattcaaaggtcttataattactgctggcttaaagtcattaatttgagtggtttgtgtttgttcccatagagtttggggctcagttcctcaggtcacttatgttgaaaagccactactttctaccaaatatttgaaggttattcagtga

SEQ ID NO: 79972 - DNA, 847 bp, Citrus sinensis
  Intron number 1 from transcript orange1.1g024527m (locus o range1.1g024527m.g) derived from phytozome v7.0 (chr-ID sc affold00026; pos 341188 to 342034 reverse strand)
tttgaaagtcccagtaagttcgcttttttattttggtttttttttttcgtttttgtgaggtgatattattataattatttgttgttattattattattattatttgtatattcattagagtttagttttgccttcttggtgtcaaattgaggtttttttttttgtcttattgatttgcgtcctgggtgacttcaattttggcgagtatctgcttttataaggaattttcttattcctctgtttgaacttgagcctttgatgtataaataaatgtccttgcaatttcttgactcatgttagttatttcaagagttggggatgcaaaagtggtcgattatataactttttttgtaatattttcgctgtttccacttacttccactataaatgaaagatgaagagtataatggtgttcatttgctttactattacttgtttgtaaaagggacgtcaatcaattcaaatttgattctgttgctctagtgattaaaattctgttaatgctgttacaaatctctagttttgatttgtatgaattgctgagtgaagtaaagctttgatcaaggggtgtggtttgaggaagtaagctggctgctgagtctcaaattcacctctgtttttagctgttctttgtgaatctttctctgttcaagattgaatgtaatttgttactttgttaatagtcgatgtgtccaaagcataacagatcaaatgaagcaagatttcttttttgttttagtgttgtgagcatttcgtgttaggtcaaactgacatgtttgtttgccaatcatttggcaatggatggatggattgaattgtagctcaagataagattgctgattttgag

SEQ ID NO: 79973 - DNA, 671 bp, Citrus sinensis
  Intron number 3 from transcript orange1.1g013137m (locus o range1.1g008790m.g) derived from phytozome v7.0 (chr-ID sc affold00035; pos 137555 to 138225 reverse strand)
ccattccattacttcggcggaaagaggtatgggttggcgggaaccatttggacatgtttggggctatacaacacaaacttatttggtcaatatactcgagaacctctattaaaagaatactttggtggtcatcattttttctataaatgaatataatggaaatttatgaattgagcttttcttagaagcaataactcaatgttacatttgatttagatttagaagatagtttcagttatttagtcaaaatactgatcatttagaatcagaacagataaatgcctagatatgacacgtggaagccgtgagcaaaaaaatgtagttattgttattatttttccttttagcgtaggcgcgtgcggccagtgactcattctggcctcagctcgtaacgccaaaagaaaaaaattcgaagtgaaactgctaaccattcaacgtgaggttaactcgtagttacgtggattttgtgtaactaatgcagtgacacctagctaaagccacaagatatatttgttttttgaaactccataacggcttttcttattgtcaaattggatatgtagaatggaaaaatgtgtcattatagataatctgaaacttgcaatgtttggtatatttacatgatcaaatgggctgactggagttatatcagattgtgcaggttccagttg

SEQ ID NO: 79974 - DNA, 625 bp, Citrus sinensis
  Intron number 5 from transcript orange1.1g034059m (locus o range1.1g031638m.g) derived from phytozome v7.0 (chr-ID sc affold00079; pos 368756 to 369380)
aagttgaacttcagagacttgcagggaactgtcaggcatgtcttccaaactcctacttttatccaatctttttattgccatgagataatgactgcccaaaaaaattgttctgatggatgatatagaaccatctgagtttgtaatgctttcacggtttttgtttgctttaactatgtagtttgtactcaaaatcatgtatcatttaggaagggaatgattgcagtgtttgtagcaaaactcgaatcaaaatagaagattataatgcttgttcaagatgcttttctttcctttttttttttttgacataaaaggaagtcttctaaataataggtttgtaaacaatcccaaactgttcttgataagcaatacaggatgaatatggatcgatttattagaatagctctctgatttagcgtaaaatgtgtctaattttagagggtccaatcttgccgctttattgtataatacttcatttcttgtttagaggacattaaacaacaatttaatagaaaaagcataaaacaaacactgataaacatgaaaaactctagtaacattttcttacagggcatccaaatctatcgacgcagccatccaagaaataacagtatttgtacctccatct

SEQ ID NO: 79975 - DNA, 504 bp, Citrus sinensis
  Intron number 2 from transcript orange1.1g045940m (locus o range1.1g045940m.g) derived from phytozome v7.0 (chr-ID sc affold00123; pos 35659 to 36162 reverse strand)
ttcttgggtaagttaaaaatatttatatattattgaagtttcttaatcttttatactattatgaattgaggtgcggtaatttttaatttttagttgttgtgtaatagaatgattaatagtcaaatatgtaggtgtctaaatactataaaattctcgattgtcgatattcaattattgttgttgatattaactgtcgcagatatcatcttttatgatcatgagttcgacaatcttatagtcatttgataaatcacaagtatttatatatttctaagtcttttgtgttatgaatctctcgtcaaaaatataaatttgtagataataagttagtaacgaaatacttgtgattattaaaacataaaaacggttgtaaggtactttcaccgtgcttatgttgtttgttgatgtatacccaattgttttcttcatcattgttgttgattctaatgcaatttttcttcttgactagggtcataccaaaagctctagttccaatcgaggtaa

SEQ ID NO: 79976 - DNA, 539 bp, Citrus sinensis
  Intron number 1 from transcript orange1.1g028783m (locus o range1.1g028783m.g) derived from phytozome v7.0 (chr-ID sc affold00016; pos 478691 to 479229)
gccaactccagtacgtcttgcttttaatttctctttgcaatttcatcattctatttatcgtttttgggtagtttatatgttctttcatagacttgattatgtgaatctaagttattgtgaaccctagatctggtagctgaaaggttttgtgagggctatattacaaattaatttatcgataatagagaaaagctattgttaccttagtggtttttttcatcaagtgtgatggcttatatgagtatttaatcttcttcttcttttttcaccttagggtttaattatgtggtgatggacttgatatatcaaagtttaggtggcagtttaattgttatacaagtttaagaaatgagcttctagtgagattttttgttattgattatttcagcgtaggatattaacttggagcatatttttggtgagcaaagcaatgattatttttggaaataacaaaagtagaaaaaaattattgtgactggcttgtgcttctgcttaattttgaagcataggatcttctcatctgtgtgtgaaagccacat

SEQ ID NO: 79977 - DNA, 681 bp, Citrus sinensis
  Intron number 1 from transcript orange1.1g024278m (locus o range1.1g015962m.g) derived from phytozome v7.0 (chr-ID sc affold00007; pos 1822479 to 1823159)
tctttcactaacaggtaattttttttttgtttactttgattttttattttcatgtttgggttacttccgtggtttctttgactaaagtatgcattttgccctggtgggtatctgtgcaacatgggtttggtaagaagaattggaaagaaaatgtttgattagcggccctttactatttacagctatgaatttctgttctttacttcattctctcttcaattatgtggtctattgtgtttattggattgtggttaccgcaagtgaccacgcatacatccctttggcagataaataatgcgttggccatgaagactccaaaattgagtggagatgtatttagcatttccagtttgatgaatataggcagttaatataaacatgcatatctttctgttgtattagtattattatcgcactaactgaagaagcttcagcatcgttgctttagcctttatgtatgtttcttttccattgctttcagatcgtattaaaaatgttatgctacgtattcttatgtcagttttcataaacatttgttattcaatgatttttaagcttcaccttttttcttttttttttaacattggttgctatggggcgggatatgttctagttacttgtcaaagtggcttgttcttcagtatagtgcatgctgtgtaaatcaagaaatgttgtgtcagg

SEQ ID NO: 79978 - DNA, 711 bp, Citrus sinensis
  Intron number 2 from transcript orange1.1g002142m (locus o range1.1g002139m.g) derived from phytozome v7.0 (chr-ID sc affold00225; pos 60722 to 61432 reverse strand)
ttaacggtttcttgacgaggacacagcgtttgaaggtaaataaataatctacgcgagtttattttatggatttttgtttttgtttttgtttttttgcttggctttcaagcatggttgttggtcgccactgtgataactgataagttttcttttctgacaatgtaactgatagcttctgaagaaaagaaaaatttttaatttttcaatttttttggattgagaaagcttaggactaaagattaaccaaggacaattaatttttaactacctcattgagccttaattttgtttctatcgttggttttaggtggttggttgatactaataacttgcttttggccccagctgttaactttgttagcattccaatttttttttttaattagaatttattaaagtgacccattttggggggttggttggttaaaagctgatgattggtttgttgttgatgatgtaacctgttattagtctcttgttagtatggttcattatactagggttgcttcttgcttgggtaacagtattatgtccatgattagcgttgcaattatcttggtggtgaaaggttgaggatgatatatattttgcaactgcagcagccttgctgttaaccatattttaattttcttgtattttgggaaagcaggattgactgtgagtgtttgactaattgagtttgattattttgtatttgaagagttgtaagtt

SEQ ID NO: 79979 - DNA, 654 bp, Citrus sinensis
  Intron number 1 from transcript orange1.1g004340m (locus o range1.1g004340m.g) derived from phytozome v7.0 (chr-ID sc affold00027; pos 529625 to 530278)
tctgcgaacgtctctgcgctgagttcccctctgaggtactaataatttcccctaaacacctctctctcttttttttttgaaatttaaattgtgctttgtcggtgataatgaggagaaaaaaacaaaaagaatcttttttgagcttaaactatacattactcttaagtttcatgcccttgttgaacattataattaattgtataacattgatactctgatttgtgaaattatatatattttttcgctaaatttcgattttcggagcttttactgattaggtttagtttttaaatttataattggaattatcaagtttcagtttcttgccgattccgatgtatatttcagtgaatttgaactcatcacagtgtattctgcattcataatgtaagctttaaatgaaacttgtagttattgttcatttttaaaatgatcatttcgggagttcgtagttatgaatttgaacaagctttttgccaatttagagattttgttacttttcttgatttggttcatacagactcaattttagtgaagaatactactttcatttttatttttttttggagtgttttgcttttttttgggggggatgattgctgctttcttttgtttgcaggtgaatttgcaattgttagctacctgctacttgca

SEQ ID NO: 79980 - DNA, 665 bp, Citrus sinensis
  Intron number 3 from transcript orange1.1g020638m (locus o range1.1g020554m.g) derived from phytozome v7.0 (chr-ID sc affold00224; pos 126602 to 127266 reverse strand)
aagctgaagcccagcgactcttgcgccaattcaatgtactcaaaatcttttcctttttctttgaaattttttatctccttaatcgttgtcttttattaaagtcaagaatttgtttttttaatatgaattagtaataaaatcttaaaaataagggcgtgtttgggttcatgtttttaagagttcccaagcttctttacacgtcacaagaagtcaaaaattctattttatttcatgctataattagggaataagagaaaggaaccacgtccacgtgtccctcacatctttttatcaaaatgttaaagataattatcatagaaacgtgggctcaaggtgtgtccaaggaatcattgcttaatgtccaccgactcgtttgtttcgctttgttgctccattatttaaaaaaaatcatcataaaattattggaatttcagtttgttatgtgttcttacaaatcatgacgtgtgtatatattgggatgaattgttaaatagtgtgactagtgccaataggtggcttataagattgtgaagaatatgacaataaattggatgatctgcattttacttcagatattgttgatttgttgtatgttgttttgtcctcacttttcaaattcgtgaagtgataattgatttttatgtcaccgtaattgcaggaagcaa

SEQ ID NO: 79981 - DNA, 942 bp, Citrus sinensis
  Intron number 1 from transcript orange1.1g013891m (locus o range1.1g013891m.g) derived from phytozome v7.0 (chr-ID sc affold00117; pos 20772 to 21713)
accatcctctactcctgccgcttcctcttctaacggtaattttaatattgccaattcagattattattattattattttctgttaggtgcgttcttaatttgcatttattttgcatgcttttagtttaagaattgcaatttgcaagtgttggttaaaataaaagaagaactgtttgccttaaataacattcctccgattttaatttcattctgataaccatgtgggattatggtggattatcaaataatcactcttttgagaatctactccaaaacttttttgatttgccattttttttttcaaatcaaacattagttgattgagttgttcttttaagactcaataaaccagcgatcatcacataagggcttatcaaacatattctcgtagtatattctcaatttggaatcaactgcaatcccagacatgcaaataaatgaaatcatggctgcttcattgcattttttaaacaggggtttgttttgtacttttattctatgactgctattgaatggaattgctacccgccaagtatcagtcagtggatgggcttttatcaaacaacagtttaggctttagcttccgcgctttcaaaattaacttgaaagtacaacagttggaaacatacctatgttggtttcgttaactgtgtggtgttcttgaatgaaatggtaaatggtaggtattatctaattttatatttatactggactggattttctctgcttttatgttctggataaattacttctagtttttgcaagcactagtcttaaatgagggtgggggatgtatgataggtttgaaacggattttgaagttaccattttcctacagaaaactttactttaccatgttcgtgcggaaaactttacttcttctttacactgggttataaataatttttgtaggttcttcgagtgaaagtgcagtgcaagtaa

SEQ ID NO: 79982 - DNA, 860 bp, Citrus sinensis
  Intron number 1 from transcript orange1.1g048425m (locus o range1.1g048425m.g) derived from phytozome v7.0 (chr-ID sc affold00060; pos 30577 to 31436)
tcacttcgtcctgagctttatttccgcttgtttaggtatcatccgttttttttttttcggttggctaagttttgcggaaaagaaattaaagtaaaagttttgattttttaatgtattgttttgtcttttatcaaaaaagcaagcgtgactcagctggcgttctgtacggttgaactcaaataagttggattcaggtgtttctttattctctaggatattgtttcattaatgcgaatcggtgacccagtgttatgggcagaaattgggatgaactgggaaccagatatcttgtgtttgaataacaccgggcgcgaaaacactgtggtttgcttgatatgcgtgactgcagcctgcaggtgttattggtaacctagtaaagcttagtttagacttctagcatggataagtagtgtggctttgttatggcaaggcttttggaggtttctagatgtttaggctatgggatgcatgttttagccaatgaactgattgtgggcttgaaacacattctcaaaactatgaatccccgatttcttctttgtcattttctatctgagtggggaaacctttggtgtagtgttgagtccctaagtattcagtccggtcatctgcacattaatttaattttcttttctgatacatgagctgcaaagcaaagagtcattgaaacgcttttaaattgccttcacaagaattttgtttgatttccatgcactcattatgtggctcatttttaatgtaagatgcatggtctcgtctattataatgtttcctaaaaatgatgcatttaaggaaactaacttatatatttggtttgttttttagggcatccactattccatttaaacttgtctccttct

SEQ ID NO: 79983 - DNA, 513 bp, Citrus sinensis
  Intron number 2 from transcript orange1.1g048425m (locus o range1.1g048425m.g) derived from phytozome v7.0 (chr-ID sc affold00060; pos 31451 to 31963)
gctgttatcaaccagagaagttttagtcgagcacggtaaggttgcgaattattacaaattactgagtgagtacaagtttacttttattgtatgtttcctacgtctattgcatttctgatattggaatttttagttcctaatcaaacattttggaatgcaaaacaatacactttgaataaaactttctgaagtgccatgtttcacctgatcaaatctttcttcaacttaatcatattcgtaatagagataagtgatgccctctgatgatcaaatcttttgatgttgttgtcatattacagacatatggaaaagggaattagacaatttgaagtttccaaataaatgtggaattcatttttcttagacgaaagaagattatagcattcaaattgttcatcttcactgtagtctttcattgagtttctctcaacttcttttggtaacttggcttaataatttcacctatggataactgacatggttgttgtcctggtggcagcaaaggcaatttcc

SEQ ID NO: 79984 - DNA, 770 bp, Citrus sinensis
  Intron number 2 from transcript orange1.1g045949m (locus o range1.1g045949m.g) derived from phytozome v7.0 (chr-ID sc affold01667; pos 8806 to 9575 reverse strand)
ttaaggtagcatcatactttgtggtaaatattatttaactcatcaaatttaattattaatgttatttttccctttaaatgcagcaacaatttaatgttgatggaagtaatagaagatatataatgagtgcaatgggtaagagctggaggaattacaaatcagttttaacacataaaatcagagcattggttaaaagcaatgatgtaataagaaagcttgaggcattgaaaggcttaaaccaaggaacataaaatctgagcaacaatggcaaatgtttattaaagagagagtttctactgagtttaaagttattttctttcccaattaatgtacaagtatagtttcttattaatgtacaagaatagtttcattaatctaacatatattctttctatagttgaagagtaagaggtttaaaaaaaatgagatcaaaacaaactaacatccataggacaagtcgaaaaaggatgactcgtttaagacattgaatggttagaaaaatcatatcattaagtttatttattattaaacaaaaaattagatgagtaatcaaatgttctccactacatattttagatgcaagagagaccaaactcactgataactaaagttgatgtgtggattcatgcacatactaagaaagatgggactgtaattaatgaggatgttgctgaaaaacttgtgataacttcatttatgattttttagttctttattctatttttttgctattaacaatcaaaattctccatgaattcagaaaaaaatta

SEQ ID NO: 79985 - DNA, 683 bp, Citrus sinensis
  Intron number 1 from transcript orange1.1g010268m (locus o range1.1g010268m.g) derived from phytozome v7.0 (chr-ID sc affold00026; pos 1155392 to 1156074 reverse strand)
gggcattgtttcagataattttggaagaaggtgggccctttatcaaattcagcatttgctattcttaatctttattcagtgttttctggaaattttttggtgttcattctctgctaccattcttatttaaggggggtgcatatttatctgtctactagaagtgaaactagtaagaatcttatagtcatttcaagagttactctgcttcgaatgcttgaaggtgattttgcattttagttttgattaactcatccttcatcttctcccatgaaggagaaatatcttcctgattcctgccttcttgacctggaaaatctgacctctcatactgaaagcacattgtagcttaaaatcacccatatatgtcttgacagacaatgtctattgaaatagaaacaaagagagatcctcaaatgggttcactggctagttgaatctgcatattattatgaaaaacgatatgaaaatggatactgtgtcaccatgttctgttttactgatttgctttgctatgatcttttgtgatattgcatttgatgttccagaactttcttggaatactactacacttctcaatctgcatttctctgagtctgatcaatcttctttttctttttccctgtttgggcgtttacttctatccttcaggaaaggattcctcatcacagcaatagtcacttctg

SEQ ID NO: 79986 - DNA, 695 bp, Citrus sinensis
  Intron number 3 from transcript orange1.1g023701m (locus o range1.1g019592m.g) derived from phytozome v7.0 (chr-ID sc affold00070; pos 526770 to 527464)
atcaacgtgttgtacttgttaaccaggtaatggccttcttgataccaaatggactttggcatagtggtgataagtattattcaaactaaatcacagcttgcttagaatttgacattttctggattttttagagtgttgttagctacttactgtctgatatcttcctgactaccgataattctttgcttctctccatctgccattaaaagaaaaagtcagataatggtaacagatttgttagttttgaaccacattaaaaggaaaacactctatgtttttgaacaccagcaaatcatgttaggctgaatatgagcaattcatccatttatttggtttaatatttagatatttataattttggtgcttcttttggttcacatatataaaactttgggaactttgttttaaaatgtgattattgttttcagtgttggactgttttggctggttatctctggattcttccactgtgtctttactctttactatagtaataataaatctaaaaacctttctgtggaactcttttttttttctctcaattttaatgctggtaatgcagtaatatatcagatactcatcatatgatcttgtggtattttacgtgagatgagcatttttccttcagaaataaatattttaataggaaaactgtggcaggattccttttatcacaatcttacagaacaggaact

SEQ ID NO: 79987 - DNA, 419 bp, Citrus sinensis
  Intron number 2 from transcript orange1.1g019744m (locus o range1.1g019726m.g) derived from phytozome v7.0 (chr-ID sc affold00010; pos 229660 to 230078 reverse strand)
aaccaaacaaatagttcccctacttccttttttgggtatgttttcttccgagctgagggacatcagatgcaatttgctgttatattgataattttgattactccaatgatctcatacacccacttgcagttttgaaacgtttttcacgttggaattgccacgtttcactggtgtctttttcatttttgctggtatagatagtatttgttaattttattcatgtgcaaggtttgtagatattattaggattaatcctgttgatatttgtgcactttctcttctgtttttttttatatcagagtttacatcgaggtgtaaatggtttagtccttagaattacttttgctgagctgagttgcttttctttttctttgtggatgatattttccaggcttctctgtgaatatagtcctttttga

SEQ ID NO: 79988 - DNA, 744 bp, Citrus sinensis
  Intron number 1 from transcript orange1.1g017080m (locus o range1.1g016157m.g) derived from phytozome v7.0 (chr-ID sc affold00004; pos 1160981 to 1161724 reverse strand)
tgaactgaatcaggtaaaactcttaccatgtttattaatgtatgcgttgttgcttttgagaattcaaaaccctagatttggttaatggcaatcccttgatttaaaaaaaaaaaaaaaaatctctggcttagaagtgaattgttttgctacttgttagcgacaagctaaagtaagcaggaactttgtattggttttgttgtgcctggatagagtgaataatagaggaaatagcagacactattgatctgaaatgaaggtgtactcgtgttcttaattttgctttaatttcctaagccaaggcctaaatactatgatgtcatattttgttgtagcatacaatgtggagattaactgaaagttgattgaaacagtttgactgcttgattatgaagtatgggaagttagccacattttgatgtgtttatgctaaattatgaaaatgaaggaaaatggggaacttattttctttacttaggtaatgaaaccaatggatttgctcaggcagaaatagcatgtggtggtttttgtgtcttctaattgatttgctatcactaataattgccgattcatacatttgatttgtatcatataaagtgaaagccatattcaggaggtaacaatcatcttctatcgttgaaacagtttattatatgttctaaattgaatttctaggaagttctgttagtgagaaattctttatttattatcttttatcgtctgcagtgccacgcctgagttggttct

SEQ ID NO: 79989 - DNA, 1023 bp, Citrus sinensis
  Intron number 3 from transcript orange1.1g028101m (locus o range1.1g024580m.g) derived from phytozome v7.0 (chr-ID sc affold00026; pos 662378 to 663400 reverse strand)
acttacgaacctaaggtatgcaaagtgcagtgcatgtgagaatgttgtccgtctcacctgttaattgcttgttctgagttattattgctgtttatttgtgtttcttcccatgaaaaactcgtgtatgtaatttaccactttagtggagtcaatagatccgtgatgtttaatgcaatttgtttactgggtaaaaaatagtaaaaaatacacttgccagattgcttttcagatgtttaaggaggttcttggcttcctgaatgcatgttgtaaaaaagcgaagcaaaatcttatcacttatttagaatgaatgatgatttctgcagtttagatgcagatataaggcaataaatgaaaggaaattaagtaatcttggaggttttttatttctggcagtcgggaaatatatagaaagctcttcccatactacattgaacttttagctagtatgcttgaattgtgtttctgatttttggatgaaaagagaactgaaaagctgtcaacataaggttcagtccttgtaaatgctgaagtggaatgatattgatttttcagtatattatcacattgattggattcaatggaaagatggacttgagaatcttgtgcatgaatgttttaacattggtgatgattcctttatttgttttgccttcttctgaatacctttattgtttaatgttttgatcattggtatcaatgttacccaagcatatctaaacttgcatgtgtccaggctacaaagtgaatgcatgaatctattatataaaaggatgccaaactctttgtaggcagttatttcatcatcatttctgctaaatggattccctaatgccaattcttatgattaacactttgaatgacaatatttttgtttgtgtcctctgaaaaataaacgaaggcttcaatacttttaaactctgccagtattacttctggtattatgcctttttttttgggccatgcttgagtaatatatgtctttctgcaggatcttgatcttacaaagccaggagtacgtaaaac

SEQ ID NO: 79990 - DNA, 895 bp, Citrus sinensis
  Intron number 2 from transcript orange1.1g024645m (locus o range1.1g024645m.g) derived from phytozome v7.0 (chr-ID sc affold00123; pos 314228 to 315122 reverse strand)
ttgaagattcccaagacaacaagtgtttgctcttggtatgttcactctattctttttacgtacattctctttgttggttactttgtgcattcattattttgtttaatttgtgtgtttttttttcataatttcagtaaaatttgctgttatagctgtttacttgatctataatttggatcagtttttattgtgacaattaccagtatgtactttttattgtgacaattactagtatgtactcagtactaaccttggggtcagttgatggcctggcctatgagtagattgtaacttggtcgacgaaaatgatacaatgtggataaattgtgctagagcactgtatggtttggttgttgtttttaatcttttcccatttgcaatccaaatgctgcaatcacgtgtttgtccaatttatatactgctagttagggctctgttgatctccatttgtgttgaagtaatgggcttgtacttgtttagcttctcatgggttgtgccctaggtgataaaggtgaatgctataaatccatatattgattattaaaaacatcatatgaagactgaaaatttgtacactccaaactttttaaggttggctgcactgtatgagtcctttgtcttcttataacgtacattgtggttttcaagctaaaataatgaaagatcttggaagctgtgtgattaccaagctattctaaaatgtctaatttttgttcaagacatggagttgaaatttgtataaggatttgccatcagtcaaatgtgtagcatttgtaaataaactctactttgacttctctttctttatgacagcttatattttgtggaaccaatggctgtatactgtaatatcaatttgtttccactattttatttgctttgtagggtcaaagtg

SEQ ID NO: 79991 - DNA, 939 bp, Citrus sinensis
  Intron number 1 from transcript orange1.1g041673m (locus o range1.1g041673m.g) derived from phytozome v7.0 (chr-ID sc affold00004; pos 3178189 to 3179127 reverse strand)
aacggttggtaacttttaagaacaaattgcttccattcatgttatctagctattaaaatgtggtatgaatcgagtcgtactggacccatcaattaatatggattttggaaattatctatcaagcattattgatgtatagttgtaaaatccaataagtttgcaaactcaactgtgatctgtccatttcaatagttcaatttttttgtggtgacggaatattatgaaagctgtttttagtcttctcggtaaaaaaaaaaaaaaagccaagaaattcaaaaaacaaaagaaaagacgaaatctgatacatgcataaaatttgttttctgattttagtcttatgctcattatgtagttaaaaggatgacctgggattaacaatgaaacatgtttgttttgttgaaaggaagacagaccatgaaaatttaattaaggggtttattttttattatatgtaaaatattgtcaactaccaagagtcaaaagatgtgatacaagtgaaaaatacgttgaaaatttacactgaaagtgaaaggacacgagtagtggcagccccattctagtagaaagatcaaagctgaagataactactgttaccataccaatttctactgtttcctttctctttctcacgctcacacagccacacaaagccaactggcaattttggttgatccactgagttaaaaaataagatggagcaaaggaaaaaactagtctaggatttgagtgtgatgtcatttggtttatttttattttctcttgctcttctacttaaatagacaaagaacttgaatgagagcgtgagtgtttgcactttcattttctttaagaaggcattggttgaagagagtgtcttaagtgtaatagtaataatgaatctatccgcttcacaatgtaaatgtagtagcagtggcagtgggtgtgagtctgggtggactt

SEQ ID NO: 79992 - DNA, 641 bp, Citrus sinensis
  Intron number 2 from transcript orange1.1g028547m (locus o range1.1g026558m.g) derived from phytozome v7.0 (chr-ID sc affold00016; pos 1498411 to 1499051 reverse strand)
aagaagtactctaatcgtccgcaattgaaatgtatccttatatttttatggacatgcgatgaacatttttgttaaaaaaaaaagcttttagaatagagatgctttctggggaaatcactgagaagcacacttattatcgattgcttctttagaaagcattttaaaaaaaaaaagaaaaaaaaactggaaaattgctatcaaaatatggcttgagattgaattttgtaataaatgctccagaataaaagtgctttctgtgaaagcacctaagatcacatttgttatcaagtgcttctctagaaggcagcttttaactagaaaagtagctattaagtatatgtttggtattaaggtgcggtggttttaaatccatagctattgcgcaataaaattactaattgtcaagtacaagagagtgtgatgcattctgttatattttagctacgacactttcaaaattaagcagaagcatgacaagtatagtatacctgagtattagtaattggagcttatatatgactcatagttgttgggttttgttttcttttcaagaagacagtagataagtttttgaaaaatatgctgtaataagactttcatgttgttgcgttagtttcctcaatgatttattagatattaaa

SEQ ID NO: 79993 - DNA, 425 bp, Citrus sinensis
  Intron number 2 from transcript orange1.1g023716m (locus o range1.1g023716m.g) derived from phytozome v7.0 (chr-ID sc affold00611; pos 90373 to 90797 reverse strand)
cgattgttgaaaaagttttcaaggtaattcattaaatgctactttaaaaaaacactgctcatttgattaaaaagctaattcgaaagtatttgaagttgctttctctggaaacaaaaactgctaatgaattagttattaaaagcacttttatgccttgcctttttgtaatatttaaagaactggttttgaaaatgtattcagtgcttttctggaagcatatgaaatattcacaaacagatcatgagttccaaagcactttgattgtattatatcttaggcttacatttctccattttcatttgcttcaagcaaacgaatattaattttcgtgcattgtggatttcattccgttaaatcttatcaactaactattagttttataattctttttcttttcggtttcttgcagaaaattctagaaaaga

SEQ ID NO: 79994 - DNA, 981 bp, Citrus sinensis
  Intron number 1 from transcript orange1.1g014947m (locus o range1.1g014947m.g) derived from phytozome v7.0 (chr-ID sc affold00463; pos 50259 to 51239 reverse strand)
attttgacataataacttcagctgaacttaaagaggttactctcagtttctacttactgcaatgctagggagatggtgatgttatagtttgtatcaaattgttatgtttctttaaatattattagcgccattttttttttggctactaattagacatacaattcattaaccaaatgtattttctttgaattgcctgcctggcaatatcgattttcatcaaaatgtaggaattttgagactattttttctggactattcaagtaatgcttttgttgtatgcacagttttggtggattctgtatactagtcaagacaataaatttagtaaaaaaagggataagtgaagcatgctaatcgtaattaaagaaggaaaaagagaggaaagggataagtgaagctcctcttggtccaatttggatggtttatgttatgcaaagcactatgagcagtttttcttatatctagatatgttagagtttcttttttttttttttgactgtcaatttctgagatggaacattttaaataaaggtagatagattatgacattttgaagttttctatctgtcacaaaatgtttatggaagagttattgaacttgattaatagctgtgtaagtcggcgatgcttctaacaaacaaaatgagagaggtattttccagacaccatgatgttgggtagaactgcgatcaaagatgatggtgtattaatttgattgtgtatttattctacccgacatcatggtgtctggaaagatcctctctcattttgttattattataacttgtacgtgcatattaatttgaagaagtttttcttttgaactgtcaatacttttatttctgctccgtcataaaaggacatcccattttcactccttttctttttcagataaatctcattttcactgcttagataccataataatttcctactggatttgcaggtggtgagggtgttttcgcagtgtgaaatagttgg

SEQ ID NO: 79995 - DNA, 599 bp, Citrus sinensis
  Intron number 1 from transcript orange1.1g004678m (locus o range1.1g003973m.g) derived from phytozome v7.0 (chr-ID sc affold00027; pos 471630 to 472228 reverse strand)
tcggagttctcgctttctcgatccgtctcttctctgtaagatctccgatcatggcattttttagatccgatccgaacaaacgtaatttaatttctttattgtcttttgctgctcagaaatgaaggaataatatttgaagaaattgatcgtgttaatggaaatttacgtttttgtttttcaaattcaatgttcatttctttaatttatcgagaaaacgtaaaataaaacgaaatttgttagtttagattgtaaattttgaattagattttaaattttcaacattttaattttctgtttttgatatattacttgatgcattttctcagaaaaattttgtccgaagtcaatttacgttggaaactggagagaaaagaattttttttttaaaaaaaaaagtatagaatttaaagtatgaaaatttaatttttcgtttttgttctattccatactagagttactatattttcaaagctactaaagttaggttgcataactatttgtaccggctcactttttgaataagcagttcaactactatttatattgttataatgttaatagtctcatggatttgcctattgatttgcaggttataaagt

SEQ ID NO: 79996 - DNA, 554 bp, Citrus sinensis
  Intron number 1 from transcript orange1.1g004489m (locus o range1.1g004106m.g) derived from phytozome v7.0 (chr-ID sc affold00007; pos 292751 to 293304 reverse strand)
tcaagctccatgtaagttttaacttattgttattattatataactaactaactaccctatttctaacataaaccactacatgtgtgttatatattgtcaatttttaagttgcgcttctggagtattttttagacagactaatgagtgttgtttggtttttgtaacttttggtgtcagcttcagggcatttgaagtttgaatttttctttttccttcgagggcctttcattattgttgcaaattcccaaaaaaaaaacactatattttgttctctttaggtgtcttgatttcggtcttgttttcttggcaagataattgggggggaaatgatttttgaagtactgtgtttctgtgatgtaaatataaattagaagacaattggagctaattctgctatgaaaatgtctaaacttttaagttccattagtaagtgatggcaagtgctagttagtttcaatatttttcctctttctttttcctttcggtatttactcgtcatctgatgctttgttctcttgtttctgtgtactttttgcaggcagaggcggcaagtg

SEQ ID NO: 79997 - DNA, 490 bp, Citrus sinensis
  Intron number 3 from transcript orange1.1g017259m (locus o range1.1g012138m.g) derived from phytozome v7.0 (chr-ID sc affold00010; pos 776010 to 776499 reverse strand)
aggtacaatgcttccataatgtgcttgttgtgagaagttacaattttagcttgttttctaattatttcttaatggtcatattgaatcccatttgcttgactgttggcagttgacattgttttttgtatgtcttgtccattgtacttcctgtcaattgtgtttgtgtagttgtatgctttttgcgatgagtgtccatttagtcatttttaatgtaaattttcaccttttagttgttaactttaactatttgatatcagtgcatatgattatagcacaacttttcttgcttgtatagatttgatatagaactccactggctatttaaatattaatcttcacactgtacttctctgttctggtaagtctttaaactagacccctctgctctgatacctatcatgttatttatcccttttagtgtattgcgtcagtccttttcttaaactaaaccttatgcaggctatcattgtttcttgttgtggctgcttcc

SEQ ID NO: 79998 - DNA, 446 bp, Citrus sinensis
  Intron number 2 from transcript orange1.1g033210m (locus o range1.1g032874m.g) derived from phytozome v7.0 (chr-ID sc affold00007; pos 114781 to 115226 reverse strand)
actggtaagtacgtgcgtgtgtcctcactcactcgctcgctcgctcactcgctcttcactagcatagatgctgcatgcttgttctaacttattattctttctttagacccttatcagttgaacgcaaaggcaacttgtactctatctatatatgtttaatcatgttcggttgctgataaatatatatatttatttattaatttgttctctttttctccccccttttttaaaactgaattaattccccgatcagaaaaaaaaccgcagcttattatattcatgtgtgcgtgtgtgtgttttttaaaaagaaaaatgatgaaaccaaatcgatggagcatcaactcaaacatctctgtttttgttttgttttttttgtcgttcttactggcttctctcagcaaccaaataaaggctaagaggaaggaggaaaacgtggcactctgtct

SEQ ID NO: 79999 - DNA, 557 bp, Citrus sinensis
  Intron number 1 from transcript orange1.1g003087m (locus o range1.1g003087m.g) derived from phytozome v7.0 (chr-ID sc affold00229; pos 88552 to 89108)
tgcaagatctgattctgtgaaaattgctgctcttggtaatttcttttttttttttaactttttaaacaatttagtttgagaaatagagtagataaaacaaaagaaagaaaaatgaacttaaaatgaagagacatgattaaacaatatctttttgtgcatggtgcaacaagctattatttatatgatgataggaaagtgtttggtaaaatgccgacggtacatatatagtattgattgattattgctagctatttttgataatgtgagttttgagtttgacttcattgagttacataacgagtcaagcagtagactcgttagaagctatttactttgtgtaatttacactattgccattatggtaaaggttttgataattcatcatcttgtctgttgtccttgttagtaaaaacatatgggttatgagttatttggctcttttatcaagggaggattgtgaattttttataattattctgccaaattattattttgtccaactgaccaaacggcatgtttcagctctcactgtttctgagagtggagattttagaaga

SEQ ID NO: 80000 - DNA, 684 bp, Citrus sinensis
  Intron number 2 from transcript orange1.1g001331m (locus o range1.1g001074m.g) derived from phytozome v7.0 (chr-ID sc affold00026; pos 967144 to 967827)
cagggtcttggtgccgaaattggtaggattttttttctttctttttatcataataattgtattagatttttgtaattttcacatgtatttaggttttgacttatggaatgctgctgcggtgatattcccaatggtttttttttttttttttaaatctttgatatggtaaccttcatacaaaattgggctgaaaatgatgaggtctagtctttacatgatattttttagaatcttcacaacttttggtgctggaattagaatttttcgggttgagtatgatttcctgtgggatttcttcagtccaaatattgtttttcaagcttgtaattgtttcttctggcctgtggaaaaactttagaatgcattggccatgttaaacttgtctttggtggtttcttcattggaaatttacttggagaaattgaggtctattcagtatctgtcatggattgtccgttgctttgcatgtgggattgaaaatttctttgggctagatttatttttatgcctttcttctagttgctgctgttgcttgagaattagaaggatgttataactggcatcattaatttgacttcaactgcctttgagctaatactaagcctttgattcttcattccttttcaatactactgttggcttcttgcagcaaagaatctgattcttgcgggtgtcaagtctgtg

SEQ ID NO: 80001 - DNA, 847 bp, Citrus sinensis
  Intron number 1 from transcript orange1.1g011881m (locus o range1.1g011881m.g) derived from phytozome v7.0 (chr-ID sc affold00004; pos 1197176 to 1198022 reverse strand)
tttttaatatcatcttcagctcgtaaccagcccaggtgattatctttccaaattcctttttcaattcaaagatcttaacaatgcatgcatgcaaattccttttctgcttcaaatttgatgggttttagttaaagttttttttttttttttttttttgcccgtttatatatataaggtttgaattattaggagtttggtagaaaaggaagattcttcgattagttgttaagtgtttgttgagttgaaattgataagcatttgttcgatttgattaacaaggaaattctgggtaaagatatcaatacacaaattcaggttgatgtttgaaagagttgtgtgttgaattagcacagcttaacaaagctgacagtgtgatcttggtcattttaattggggttcgaggattgaaggttttgctttagaatattgttataccatccataaattaaactgcaatttagattctgaaatttttattgaatttatatgatggggtttattgtagttatcatatttttatgtgtagtttatgaactctgaaccccccaaaataaaattttgtcaacgaaagtgaatcttattttattttatttttggttccctcttgctctctatctctcaattttaaagatgtaatggtagatgtattgttgtctagtgctagaattttcgaatatttggaatcatcttcttgcaatgtgctttggacagttattctggttatatattgcagatgaactcaagtatagtgggactagttttgcaacacttcaattgagtttctatccaaaccaaagtttggggtaattcaggcgtccctgatattgcataatctacgagcctgtta

SEQ ID NO: 80002 - DNA, 718 bp, Citrus sinensis
  Intron number 1 from transcript orange1.1g016540m (locus o range1.1g016540m.g) derived from phytozome v7.0 (chr-ID sc affold00026; pos 388303 to 389020)
aggcaagagagtagattttacaagtacttgatacggtacgttcctcgcttttgtttccgccatagttatttgtaattttgattcccgatgagatctttagtttcatagaatttgcttttagttatttagcaaaattaattaaaattcaagtaaaagtagtagaattgaaattttctggtataatttgaatataatatttgcaattttttagcatgttggtataattatttgtttccggaaattagaaatacagaacagaagattgagaagagtcttgaaaggtagattttagatgctaatttagaattgtatatcaatttattttacaattggagcactaaagtttctgatataatttaattaggatgctggcaatctttagcattttatgtataattctttgtttctggaaattggtgaaacagaaaattgattaggagtttttagagatataattttgatgcgatcttaaaatctaattttaaatttgaagatagttttatttttctttttcgatgttgtaattttgtatctaaattgaagaagaaaggtctcaagtgtatgtttggatgaagattttgtgtttaattagtttgtgtaattgtatatgtatttgtaaattaagtggcttttttttctagtaaaaaaatgaaatagaatttaatatcacatgcaattgatgattaagaatgacgtcttggcttttgatttgttatag

SEQ ID NO: 80003 - DNA, 553 bp, Citrus sinensis
  Intron number 1 from transcript orange1.1g024116m (locus o range1.1g017679m.g) derived from phytozome v7.0 (chr-ID sc affold00036; pos 449529 to 450081 reverse strand)
gtattcttgtccagcttcctctaccacaagtaatttctacagccataacgtgatccaatttttgcttttactgatctgaaagagaagagcacgtgtcttgattttgaagccttttcaattcaaattagccctagaactgagaatgctggccaatctcaatcttagctcacctctatagagcaatattagaatttgcccctggacagaccccatcttgcaaaagtttagacaagtcatagcatgtgattattgccaagtttccttgccaaatggaaaatcaatcttaatcgcccaaaattatcgctctataccactgcttcctggtgattaaggggtatccgttagtaaaattttgtctacaatttcctgatttagaattgtttttttttttctccttttcctctcaaaaggcctactacacggtgatcattttgtttatgtgttaactgtttatattcatcagaaagaaaagagaggaagagatatctcttagatattctgaaataaacttaatgttttgacacaagcctattgatttgtgtgcagcatttgg

SEQ ID NO: 80004 - DNA, 427 bp, Citrus sinensis
  Intron number 2 from transcript orange1.1g004886m (locus o range1.1g002555m.g) derived from phytozome v7.0 (chr-ID sc affold00067; pos 85002 to 85428 reverse strand)
aagttcaagtggtgattactggtgtgtttagtttctgtttttatgaactaaaataaggttgcttatgtgattgcattgaggccacagtttatgagttgagaaaatggtgtaactttatcctctcaacggatttttgtaaattatgaagaacatttgtgtactgcctgtgtaaccttaacaacctttattttgagctaagcaagacactcttaaacttatcttatgcatccagatgcatgggatatttatattttttattttagaaattaattcttgcaacataaagtagctacggatgaagtgcagtgaattttgtttactctccgtcaactaatggttgcgagtttcaatagctgttttgattcttttttttatttttatttttatttcaggtgttgaaataggcagcgttgctccagaaagtctc

SEQ ID NO: 80005 - DNA, 432 bp, Citrus sinensis
  Intron number 2 from transcript orange1.1g012962m (locus o range1.1g012962m.g) derived from phytozome v7.0 (chr-ID sc affold08023; pos 1858 to 2289 reverse strand)
ccgagactttgaaggtaaatcaattaatttttcttgtcccgctgggtgtgtctaagattatattagtttactttcaccattactagttatggcatgtttggtattgaggtgctgtaacttttaaattataactgttgttgaatatagctattgtggaaagaaattgtaactataaaacaaaagttaatggtatgtaataaatataattttgataaaattagtaaagatataataatttttttaagtgtaaaatcaaattaacttaacttctaagttacagcaactattgtttatcaaatactttaataccataattttttaactataattgttcaatttcaatctcaaatagagttttagttaagtaaaatattagtcaatgcggttaaaagcaatgaaagatttttcttatctctacttcgtttgtagagt

SEQ ID NO: 80006 - DNA, 617 bp, Citrus sinensis
  Intron number 1 from transcript orange1.1g034682m (locus o range1.1g034171m.g) derived from phytozome v7.0 (chr-ID sc affold00690; pos 1052 to 1668)
aataccactgctctgccggcccttcaccgcccaaggtttgatttgaatttgggtttaatttttgaatttatgtttcatttttaaattacggtttgattttatttgtcttgtctatttctcccatccacaaatatctatactaggagaagtagagacggaagggttataggcagcgaaagagagaaaagggaagagaaggattatgccgaagtcagttagctgatttgatgctattcatgaaattgatttgttgaatggtaacatacatggtaaagggtcctcgtcaataatggcatatgaaaattgatcaattatatttaaatggtgattaatttatgaaatggatgcctattcagattttgtaccagttcaatggttcagtgttggagtttatgtctttggtcaataggcaaggatgagttaggttaccttcagtttccatttacgaatttttttcatagtagttttcagcgtattgtagccagtaattaatttttttggggaatttcattgttctttccccagtatatgtgagcatagttgattttttttttttttaatcttttcaccatgcttaccttctcaacaaggtttgatggttgaaatgttttttcagg

SEQ ID NO: 80007 - DNA, 999 bp, Citrus sinensis
  Intron number 1 from transcript orange1.1g006395m (locus o range1.1g005965m.g) derived from phytozome v7.0 (chr-ID sc affold00026; pos 466427 to 467425)
tctgagagttgcaaagagcgaagtgataagaccgggttctttttctcatcttcaaaatcatcttttattttcacttccatttacttgctttatacgactccgtttcagtttctgtatgtttatacttcatgcgtttcgtgcaattttactttcacgatgtctgttgagcgcgtgcctgccttgttttcgaattttattaccgtaattcgcgtatacaatccatttgaaaatcaaaattttctcacgaatttgttgtatgaatctgtcaaatttatcgcgatccgatgtgttagaattttgtaggtctagggtggaacgaatagagagtgtgaagattctgtttggattgaaatctcttgagcttaaacaagagatctcagattcgaacgataggtgggagaggatttaattaccagtagacagtagtctattcataaaacaaaaaagaaaaaggaaaagagaggacttaaacaacttggtgagagtaatcaagatcaaataagcgaaataattttcttgtggtttcagatcataaaaaccgttcctttttcaagtttctgaaaataaacatgaaatgaacatcttttttttttttttaggttgggggaggagggggaataaataaaatgattaatgtgaaaatattgattggttatcggattattttaatattcagtattgtttgtctaaagttgtgtttgaggattaggtgatatggcttttaatatgcagctgttgtggaattagttagtaaaaacatttgctaactaatgaaggcaagtgtttaacaaactatatagtcgctacgattttaaaattaagtaggagcataatagttacctggtgagttattcaaagattacatttgggatttaactactgttattgtctgtatcaacattcttggttgtaagtactacagttgtaggtttattggttgttgatgttgttgattggattttaatctgaatgctttgtcattttttagcttgaattgag

SEQ ID NO: 80008 - DNA, 432 bp, Citrus sinensis
  Intron number 1 from transcript orange1.1g037718m (locus o range1.1g037718m.g) derived from phytozome v7.0 (chr-ID sc affold00004; pos 1869268 to 1869699 reverse strand)
gctcttcgttttgaggtaaggcatttaatttttgttgctgcttttgttttcttttggtgaagattattatatctgcttcactcagacgcaagcacactcacgtaatgcacaagctgagagtactattatggaagcagtgtgcaatatggcatggtgccaagttttggctattgtaaataatgagagaaaaattgaacatatatgttttaaaatgttaacatttggagctattttgatgtggaagtttattcttggagcttctttgttagcaacttagcattgtatgaattcttttatttgtacatcctgttgtatggagcactgctttctgtagtgtttccagtgtttaactatttgttactgattcagtgatttatatatgtttgttactttttaggttttggggaggtttaatcgcgcccgtgcagctca

SEQ ID NO: 80009 - DNA, 501 bp, Citrus sinensis
  Intron number 1 from transcript orange1.1g009506m (locus o range1.1g005474m.g) derived from phytozome v7.0 (chr-ID sc affold00007; pos 2483602 to 2484102 reverse strand)
atacgaggtacaattctcttgttaaacttgccgcagatttggattcttgtagtgcgactgaagatgatgtttttagtgttttgcgttgcttgggtgatgatttcttagagcaagattgtgtcattattcttaataacatgaccaacccagatactgcagcgcttgctttgacatattttacaaataaattgaaagctagtaaagaagtgattctttacaacgtgactatgaaagtgtttagaaagtgtagagatttggataaagccgagaggttgtttgatgacatgcttgaccgaggtgttaagccagataatgttaccttttcgactttgattagttgtgctaggatgaataatttgcctaacaaggctgttgagtggtttgagaggatgcctagttttggatgtgatcctgatgcacttacttattcgtctatgattgatgcatatggtagggctggtaatgtggaaatggcttttggtttgtatgatagggcaagga

SEQ ID NO: 80010 - DNA, 371 bp, Citrus sinensis
  Intron number 2 from transcript orange1.1g044489m (locus o range1.1g044489m.g) derived from phytozome v7.0 (chr-ID sc affold09011; pos 1188 to 1558 reverse strand)
gagaattcttcagttgtaactccgtcttcatcaatgtctttgtcctcatcttcatcttcgctaatggcagtgccatagatgacaatttttgagttgtgtatagacattagaaaaaacaaactatgtatttgaagagtattttttggctattaatttgcctttacttacttattgactcattcaacctctgtatagacttgcaaaatttcgtcattcgtcttttcttttaaaaaattcaacacggttttggtcgtcttggaagtagaataaaccggacaattttatacactctctttgaatgagtctgtgttggacttggaatttacaagcaaatcaaagaaaaagaggtcgaaagaggccttcattaatca

SEQ ID NO: 80011 - DNA, 889 bp, Citrus sinensis
  Intron number 2 from transcript orange1.1g004701m (locus o range1.1g003825m.g) derived from phytozome v7.0 (chr-ID sc affold00036; pos 726492 to 727380 reverse strand)
agtatcatttgttcgacaaaggagaagtaagattttctttcttgccttatattgcaatgtaattttagtcctgtggaagctgtataattgatctggctggtgttttgtgctaaggtgattgattctttgttggcgttgaaacctacgaaacattttgcattaaattggggaggatattagtgtctgtcttttaagctgactccatcccactgaacgtatagaggacaaaaccacatgtttattagagatctgacagcaacaaaatattttttggcatccattctgtcagtgaacttttgagataaatagtaaatgattattcttggtagataggtggcaatggcgtttatttatttattggtagtttagttagaaagaataaggagaaggtttgaaagttccaatgaggaaaatgctctattttgtatgggactgaattcaatttttttcaactcgcttagcttcggacttctttcttctttgttcatcacaactaggaaattggggtctgctgtggaaattaagttgttagttattgttctttattctgataacttttagtaagttttcataaacatttaggtgcatatgcagttgcatgaatttatcttctgcatattgtgtctcttagagaaatgcagtatcttgttgggattatttatgagatatgcaaatttttttcttgatttaatttttgatggctgctgtcaaaagaaaattattgatggcatttgccattgtttctatctgtgaggctgaattattcatgttttcttttcaaattttgacttcacttttactgtctactgcataacacactcatgaggtggccctaactttttctttcttatatttggtttgcagggtttaggtttaggctctttgtctg

SEQ ID NO: 80012 - DNA, 744 bp, Citrus sinensis
  Intron number 2 from transcript orange1.1g047454m (locus o range1.1g047454m.g) derived from phytozome v7.0 (chr-ID sc affold00273; pos 81025 to 81768)
gttcaaggtgagatttcttatctacctcatgatatattgatatacatataaaagatgattctatatttacgggacacaatttgatgtttgctacacaaaaatggacgcaggcgaaatagttaaattccccattaaaatgatagtattgttcttggaaattcttggttccagcaataatgatacatttacaaatttgtggtacaatctgagatggtggctcacacgatatattggctgaaatcatagcaagaccacataattgttttcacttttcaaccaaacccttcaggccacgtaaactgccacctcatattgtaaaagaaaatttgtgtaatttacagatgtatcattactgtagttcaaaatgccattattatcttctcgtattttttgaagtgaaattttcttaattcctgaagttcgggtggaactatgttgcgtgttgggaagcccctagtcctaggtaagcgtcttagttgaaattttagtcaacttatgtatataaatttatgttttgcccctctcaagtttaatgttttctgtattatgagaaccaaaatcttgttccatcattgtctgtacgcagaaggaaaccaacattaaatgtagcgtgtctctctctctctctctctctctctctctcttcccaccttaaaaaatcaaccttgaatgtaagatagtgtctttggatttatgaattttcctgcaggcagtagaaaatcttgtccatccattcttgcgaga

SEQ ID NO: 80013 - DNA, 475 bp, Citrus sinensis
  Intron number 1 from transcript orange1.1g022946m (locus o range1.1g016605m.g) derived from phytozome v7.0 (chr-ID sc affold00796; pos 3479 to 3953)
gagtctgtatttttcacttctctcattcaatatgtttttgtttcttatttttgttttaatttagaacccccattctgctaatgtatttttttgcagttttagtgaactgttatctgtttttttgtttttccttttaatgctttgggattattttagatttgtttcttttttcacaaattattctcgagaatgaaaacaggaaacttagaatatttgaaaaatgtgttgtctaatgattttcaaaaacagtttttgacacaagtgtctggtattagtcttttggagtagaagaagagtattatgttttccaagaacataatgccctgcgtgatctttttggtttaaaatttatttgtaggcaataattcactgttgaattatttttttttttaagtaactatatgcaaacttattgttaccgattgagtaactaggtaggaggttctttttattttttaggctcaagttcacagac

SEQ ID NO: 80014 - DNA, 776 bp, Citrus sinensis
  Intron number 2 from transcript orange1.1g022946m (locus o range1.1g016605m.g) derived from phytozome v7.0 (chr-ID sc affold00796; pos 4103 to 4878)
caggcagcacaaaaggtcagcaaagttcactgtgaattgctatatccaagatgctggtggttgttgattctttaatggcatattcttttaaaattgattgtaaatgttctgtagtttgagcatgcttcacggtgtgttagagcagcaatataggaacagggttggaaaattacggagctttgaaagtaattcttgatactagtcttgcacatatgctatacatgtgaaaatggagagacttgattttaattaattgaaaagtaaatgtgattcacaagttccgcaagataatttagttggaaaagggagagaacattacaagaacaagagtactgatgaatgactatttaccctaagctattttcttatccatgtgctcatttaaggggcaataatctgatttagtttatcctgatgcggacatagcactagaaagaatgcagtgttgattaatttttttggttacactcagttactatgggggatttccaagtcatttatggatttgaatgtgaggctaattactgcaatatcatattaatatacatttgagttcaagtttatatatcgacaacttgtttgaatgactatctttatgaatgcattgagatctacccattacagctttccatattggtgaaaacttcttcaaatatctatcaaacttgtttgatgagctttgtgtttcacatgatacaatgctagtttcttagtagcttgttatcaatataattatacttttgcaggcaaaggaggccggaagtacacgattttgt

SEQ ID NO: 80015 - DNA, 712 bp, Citrus sinensis
  Intron number 1 from transcript orange1.1g045216m (locus o range1.1g045216m.g) derived from phytozome v7.0 (chr-ID sc affold01216; pos 25568 to 26279 reverse strand)
cagacgacggacttggttattttgagttccttaaagtaggtctcacatgcatttctatagatgaagtttagtttttgagtttttagaaaatgactttcatttatgttgctcaagtagataacaggataaaatttcttgattatgcagctagtggaagacattggtgtgctgcccttatgggtatttaataatggtattaagcatctgcttgattttagggctgcctttactttttccttcttgggctgtgtggttgatttatttattttccttgtgttttcgttttattaccggaatttgccatactgatcaaggtgtgcgagtctgtaggctatatttgcgcgaccactggtcagaaaaccatcttctaatttgaaaacaagataacaagaaaaactatctcctttaagctaatttcctaggaaaaaaaatggtttgagatattattagtcctttttatccccatcatgcactagaatatttttccccttctgaattttaatgtaatataggaacttgattctaaaagcccctttttcatgtggtataattatttcattcttgtccagaaaaaacttagcttcatatctggctgttaaaggtggtacttattgttaggttagagatacatattcataggggggcttttttttttctctttttggttggggttgtaggaagcccttgatagtattgagtttgcaagaagtga

SEQ ID NO: 80016 - DNA, 945 bp, Citrus sinensis
  Intron number 1 from transcript orange1.1g011995m (locus o range1.1g011995m.g) derived from phytozome v7.0 (chr-ID sc affold00036; pos 31634 to 32578)
aacttcaatttcaggtatgatcagtaatttctcttcttcttcttcttttgtttccctttgtttggtagcttattttctgaaattcctttacgttgtgtttaattggtgagttttgtcaattgggtatttatttattttaaataaaacctgggagtttcttgtttgaatttttgtctttgttgttttgtgcgtaatggaagattattcaacaagctgattggttgtggttgatgtatgaattgcgtttttctgctgattttggatctgggtattttcctggaagtttatttttttattttggtttggcgacgattttgtaactttattgtcttcttttgaaggagcattaatgtttttttcggctcaatcttgagttgcagctatttaatttgtttaggtcaaaagcagatcatatttgccttgatatgtgtatctgatgatacggcgaagttttttatttttgattatttggaaatttagttttataattataaaggttagttaccatggaaatgtaaatggataacttattatacttgagtggaattttgcattaactagtcaccatgagctgcgctacaagtctgaacctatcaactgactccttattatctttgcaagaagtagggcttttatttattttttatttttttgtggtacaggtctctaagtgaacatgtgtttttcagttaatattattggctagttggggaattggctgattaattttattggcagatgtaaatcttagtgtgactcaactgtttgtgttgttagttgatatttttgtttactaagatttgcttgttgcctttcgcagcggttgtattcttttgttaatatgtttattggaattgctaatgtccgaggcttaggttgatatgtatgttctttgctttcctttgggcagaaacgcgctgaaccttgatacattctgaagttttg

SEQ ID NO: 80017 - DNA, 446 bp, Citrus sinensis
  Intron number 2 from transcript orange1.1g004769m (locus o range1.1g004420m.g) derived from phytozome v7.0 (chr-ID sc affold00016; pos 698229 to 698674 reverse strand)
cagtctttttcctggtcattgaaggtaatgagcttattggttctaaaggaaccgtattaatattgtcacttgttatgcttcaattgcttgcattcttgataggtctgagaaacaccattttgatggtaccaatgccctactttgcattttacatgaatgaagataaaatcctgagaaggagattatgcgtttttctgtttagaatttgtagtcttcctgcttttccttttcactggtgatacaaacttttgtgctgattgacctcattgcattatcttagccaactaagattttggttttttgtatcttttattgccaactttttaaatttatatttcttatattttaatgttatgcagacgttgttgggctttatgaatggcaaggctccacaaacattattaactgaccaaaacatttggctgaaggaggctgttgctgttgaa

SEQ ID NO: 80018 - DNA, 358 bp, Citrus sinensis
  Intron number 1 from transcript orange1.1g027011m (locus o range1.1g015122m.g) derived from phytozome v7.0 (chr-ID sc affold00410; pos 67905 to 68262)
gcgctacttgcggcaaaccttgccgatcaaaaacggtaccgttttcccttcccttccctgccattccatttcatgcactttttcttcacctaactttatgctatgctgctgcaacttctatgtattcaattgagatttgatcattaactttctgcttaattgaaaccatattaggacttagaattttgcgatcgtgtttgtgaatgaatgttcctgattaacgacagattgtttctccgaaacgaactccaaaaaatgttttcttttttcttttttatgcattgtttgtaaccgttggggtttggttttgtttgattgtgtaggaaactgatctgcatagaaagagaactggtcatac

SEQ ID NO: 80019 - DNA, 484 bp, Citrus sinensis
  Intron number 2 from transcript orange1.1g027011m (locus o range1.1g015122m.g) derived from phytozome v7.0 (chr-ID sc affold00410; pos 68360 to 68843)
agtggtagccaaccagaaggtatttttaaagtttagtgttttgtatgcatcgcgattgagtagtcaattaatctctttggccaactcgtaatggattcatttatgtaatattctggaaggatttctccattattgtgtcatttcaatttccagcccttgtacacaaggtccaccatccctttggtttttgcctatttcgaatgatatgttttcttctagcaccttttcttttccaaggtctctggttgcttcaagaagtggcatatagttctagatcatgaatatttgatactggtcatcctgtcatgttggaaaaaccttgctatttaattgtttgcatttgttatgctagggttcctatgtttaggaacataatgggtttcaaggtaatttttttcttttttgcttttgaaaccaaatggttcatggtactctttatcatctttgttttgtctttagtaattgccttttttctgctgtagaa

SEQ ID NO: 80020 - DNA, 751 bp, Citrus sinensis
  Intron number 4 from transcript orange1.1g016032m (locus o range1.1g009022m.g) derived from phytozome v7.0 (chr-ID sc affold00026; pos 580934 to 581684)
gtacttgttgctgataattttggttttctctacctgtaagttattttcttttgtgctatagttacagcttaaaggtttgtgattaggatacaagagatgcagaacagcttatgaaaggcttacccacttggtgacactactaagcttgctagctatttccttgtacaacaagttgcccttttcctagtgtctgttgacaaaattcaagatcaacagcatgttgtgaatgtttgggaaaaatcaaattttattacagcaaacagaaagtggtatattgtcaatgacagttttctgaatagaaggttgttccctttgctatttgaatcattttattgatgtgtcacctataggatgagcgaggatataaaattaggttgataatcatgcccaccgagaagttaactttaacattgacagagaggtcgtcttgccaaattgtcaaacccatcaaatattagtggttgtgatcatctaattctagcagattctgctgcaaagattctgctagttagaatttgctactgtcttactcactgaatggctgcttggttctgcagcaaagttctctgttgtacttgcaatgtttgagaaactttacagtttgcgttaggtagaaacattactgaattttcagctgcatgctacacatgtatttgattatcatttttaacttaaagtaaattaattgaataatctaggattgaaaagaaagaatgtaaaagttggttgtttattccttatcttagggtgg

SEQ ID NO: 80021 - DNA, 844 bp, Citrus sinensis
  Intron number 5 from transcript orange1.1g004093m (locus o range1.1g004093m.g) derived from phytozome v7.0 (chr-ID sc affold00036; pos 514522 to 515365)
ttggtgtgttttttctttctgactgtcacaattgttattttggtactacatttcaacatgttctcactaattctctttagcaatagcaataaatttaatcctactgatatcttccgtagaaattgtgtcacttgcaaattagggttcaaggaatcaagaaattaaaaagataatttggagtaaagacacgatcaaacagagagagaagttacaagagagtgaaaagatagattaaaccgtgtctaggatttaaaaagagagaaagtgggcaaatgagagaaaatgggtcttcataattctcctccagccaaaattttgtcaccactttgacaatcctaatttagatcttaatatatgcttaatatctaacaaaacacttgaaacgaatacaaataaggtaagggctggaagttaatatttgagatacaaatccaagaaagatgtttctcctcttaaaataccagttcttttggtgaaaaggatcacttaatacaacgttaataaactgacctgcttcaaaaaattttgaacaaataaacatgaataagtaaatatctttatcaaaggtgaaataccagtcagcttgcttaccttcttgttcccagaagttggctttccggaatatgttgtcaaaaatgaagcaagatttttgcagattcatagttggtcatgttttggttgaaacaatagggtagaaaagttagcctcgtaattagtcttacaaaatccctaacaacaatttactaaaatttttttgcatgtcctttttatatcttttatgagcttatctctgctgcatttgctaccaggatcggatatatcatctgggcctatttggttggaa

SEQ ID NO: 80022 - DNA, 958 bp, Citrus sinensis
  Intron number 1 from transcript orange1.1g011738m (locus o range1.1g011738m.g) derived from phytozome v7.0 (chr-ID sc affold00010; pos 1847583 to 1848540)
gaggtaataaataagttaatttgcttgttattcttaattctttcgtcatgatataataacatataacatgcatccccttttcttgtccatcattcagccaacgctagtgttaccctgatcataaaccttttcttttaatcagttccttcttccacaaaattgaaaagtgctaatatgtttttcatctcatgcctagtttaattaactgggtaaattgcactccaccccccattgatattgacattcatcaatgtgccccagccaataaattaagttgttagttgaccagcttaaacataggtgtttgactattttatttgctaattagatttaaaaatcttattctctcatattttggtttcttatgtcttgtgatactaataattaggagcaaaattaattataatttcaggagacaaccgaggtcaataggtcgttttaaaggaaattaaacaatagcggcttggggttgcgttaatgatctacagtacattacggggacttgtttgatgaatgtcaaaattaatttccttttttttttaatcctttgggtgggggttgggggagtttgaaatttaccgtaatgagaaggtggagtattgtattcagttttaaggtttcaaaatctaaaagctcagtgattccctatattaattaaataggcaaccctctcaaaatttaattaaaaaaaaaagaaaagcacagccgtcagagagacccactgttgataattaaacagcacacttgctaataaagaattaataaaaaaaagtcctttgaggatatgtatgattgattgattgattaccctttttcctcgtctctaatttatattttcttcatttacatctaaaaccacgagcctctcgttcatcgcataattggtattgtgaaatttcttatgtattctttatgttctctaatgaggtgacaagattctgtgtgtttcaggccctgg

SEQ ID NO: 80023 - DNA, 945 bp, Citrus sinensis
  Intron number 1 from transcript orange1.1g003069m (locus o range1.1g003069m.g) derived from phytozome v7.0 (chr-ID sc affold00010; pos 254468 to 255412)
cccaaacagatcaaagtttggtttcaaaaccgcaggtgaatgcaacttctctcttttttgtttcaagtttcgttttgttcatttttccatcacatatgggttcatttgttacttgatgtggtttttcagccaatgtgtttgtgggaaaatttatctctggttcttacagtgactttggttttatttttcatcaacttcctttgtccttttaacctgggttctgtcctttgtgtttttcttgaagaatctagtttctgatgagtttgttcatttctttttttctttttggtgaaagtcttcactatttttctttgtgagaatgatctcctcttggatatatttaataggtttattatgccctatggtatcatttagaagagtgaaagttactgtctcttcagtttttttattctttttttttatttgttctttcttgttttgaagctgtaaatcttccatgagaaatgacgtgtgatctgatgttggcttttgagagtgatgcttttatgttcttctgtcccgtttcatgccttctcatttctttcacatttaaaagtctggaagaagaatttagctcagaaattcgatttcttttcagcactcgcacagtctttatgtgctttttaccactttgagtattcttgaaattaaatgaagataatgatagctagttaatagttttttttttaatttctcgcttttgcttagattcaaggaaaaaaatgaaattttttcagttgtatattagcataacttagcaaattttaccccggttacttgacatatcggggtcgttgatttttatataaaactgtcatcatatgttatagctgttcaagttttgtatgtctggccaaaagttcgcattttttttaatgatgtttctctgaagatatttgtgcctgcttgagcagtcctctgaataactcttttctttgacaatag

SEQ ID NO: 80024 - DNA, 414 bp, Citrus sinensis
  Intron number 3 from transcript orange1.1g026381m (locus o range1.1g021316m.g) derived from phytozome v7.0 (chr-ID sc affold02116; pos 11513 to 11926)
tagaaccttctaaggtaaggaagattgcttctcgtctgttaccttattagtttaatctcttctccctttatgaatgttaagatattttttcaattttcattatctggaggttgattgggatgaagttttgggttaattttgttagcttggattttcctgtgtctcaggtttcaagagtttcttttttcaaagttttgtatagcttttggtgttctacactgtagagaaggttttagcttgtggacctctggttcacttttgtaatatttattcccttctaagattctaaaaaagtttctctgtttcctataaaaagggaaatttgtttgccctaatctcctttatattcaattttttaactatcctttgcaattttgatgtcttcttctaatttttgcagcctttaagtatctt

SEQ ID NO: 80025 - DNA, 933 bp, Citrus sinensis
  Intron number 2 from transcript orange1.1g012724m (locus o range1.1g005362m.g) derived from phytozome v7.0 (chr-ID sc affold00082; pos 325420 to 326352 reverse strand)
ttgctgctgttgatttgtcatgtaagattttgttaattgcttttttactgttattatataatcatctttatagttttactcattcagttacttgagtcaattagatgaacattatgatgctaatcgtttgaactgaaagtaattttgacttaatagaagctgaatcttggatctccttgtgtttcttagatttgtttttactatttatgttgctagtatatgttcgaatgaaaggtattgttaggtttttttaaattgtagaaacatgcatggaatgtgaatttcataagtagcagtaaattgctctgcattggaagatttctatgcattacaatttcattgataaaatcatagtgagaatgtattaattgtttgcagctgatatcaattggaattcagtttgattagggatcctcgttcctttgaaatttgcattttttttcttcttatgttaattttatgttgatgatgctactcattgttgcctctccttttgcgcttaattatatctagcctagcctaagctctttatcatgaacaacatgataatgactagtatgtatttttgatactcttgataatatggggaaaaaattatgccaaataacatagaatgaatatgaatattgagctcgttcacataacaattcatgataaacttaataagaaatgacagtgttgatcttttacttgataaatctgatttaataacgtaacttttaattagaaatcgtggtgattgattctcactttacatactttacttggagcttatacttcatttaaaatatgattattcttttttgttagaacagtaacatatgtttactttttttagtgtgcatgtgtaacattgtgttcgcatataatattttaatgatcttgtatttatctgcagcttcagaagaatttttagaactcactagaagtgca

SEQ ID NO: 80026 - DNA, 849 bp, Citrus sinensis
  Intron number 1 from transcript orange1.1g014828m (locus o range1.1g014823m.g) derived from phytozome v7.0 (chr-ID sc affold00025; pos 96266 to 97114 reverse strand)
ctatttctccatcagcttcaatctcagcacgattagtacgtatttctttttaatttcaatatcctgatcagcaatttttttaacttttttcggccttttttagctcggcatttgatattactttcgatcactagtttttaccacttttttggtgtcttatgtaattttctttgatttttctgtctgcaaagctttataatcatctgatctatgtatggatttgttttttgaaatcaattttatgggattatcaatttaatatgtacacgaatttgcaatactttttttttcttaaaaaaaatagagagataaccctttttgggcctttgcaaatttgatcatagtatgtgctaggtcatttatagagttatcttcttttcgattcttattaaaagttttaggtaaatttttcatctttttgtcgctgagaaattaattttttttttgttttagttttttctttttatagatttcttgattacaggtatagttggtgaagaaacactagcttgcgatgagtgcaaggagcctaagatcgggtaattgcatctctagtgcattatcttgcttggaaacgtattcaattttgtaataaattgaaaaatatctttctttctttgttttggtttacaaaatgggatttgtaagctaaaagtggaaagctttttattgcctctttgattttataatctcctatatctcgggcgctctctctattgtgttcttcaattactttgagcgagtcaaatagactcatttgccaaagtgagattgttgaaaacaactttaaagataaattcactaacatgactgataattgatctctctattcatggtgatgtagggcac

SEQ ID NO: 80027 - DNA, 567 bp, Citrus sinensis
  Intron number 2 from transcript orange1.1g031103m (locus o range1.1g031102m.g) derived from phytozome v7.0 (chr-ID sc affold00026; pos 1200195 to 1200761 reverse strand)
gttttcaaggaagggtttcgaagccgtcgatactggtaaatgttttcttcttaacctttaactactactgctcatactcaaaagcacgaagttgttctgcataactaattatttcttaaaatttaacgatacccttacatatttcttggacatctaattactggtttttagcttttgtaatgatgtttcattcaacaatgagtctatttccattgcatcatgagtcgtgagaaaggacttgatatcaaattaagaagacctttggctaagcattcctttttttgatgttgagagcaagaaacaatgttttcccaaagcgcaaagagtattaatgcaaatctgggatcagatgaaatggaactcatgtttcttgtttactgacaaatattttttaacaaaaaaacagtaagcggtcgaataccaattgtgcttaagagctttgcaaaataaaggttgttaataaagtaaggatttatactttcccgtcaaagaatactgtatatatttttgtaatttattaatggcatttcctcctgtcctgtgcagtttggtggagtgttcagacat

SEQ ID NO: 80028 - DNA, 375 bp, Citrus sinensis
  Intron number 2 from transcript orange1.1g012211m (locus o range1.1g011440m.g) derived from phytozome v7.0 (chr-ID sc affold00007; pos 606973 to 607347 reverse strand)
cggcggaagtaccgctgaaattgttcgcgtcctcggtaattactcatcagtcatcacttctattgtaaatgcctttggttggccacttattttcttttatttggggatgaaattaataataatttacaaattttcagattctaaacattgtgttcaagttgaaaacattacaagcaaaaatatatttattttttaatgattgatattgtttaactttaacaattgattgcaaatcaaatgacagatggacgatatgctgccacattttcttcccgtttcttttttaatgattgtatttgcggttataaacttcttgatcgctaaagttgcttctgtgtgattaggtggtcctgctgtaggagatatacggtccag

SEQ ID NO: 80029 - DNA, 900 bp, Citrus sinensis
  Intron number 2 from transcript orange1.1g000740m (locus o range1.1g000464m.g) derived from phytozome v7.0 (chr-ID sc affold00151; pos 329622 to 330521 reverse strand)
ctctttctgaagagcaaaggaaaaaatttagaaaggtttgttgatatccatcttaacctgatttctggtttccagtatcttattcttgaaactttggttgtgagaatgcttttctgacatatttgggggcctcaaggttgatggtcgtgagagtactttttttatatatttcaaggccctaaggttgatgactgcatctgttttctgctcaatatgtattcaacaaaattaatcttttgtagcctcaatgcatgtcagaaatacacactgacaaagatgtatgtgcagataacatattgcatagatgtgtgtgtgtattatagaaggctttatgtagcctggttggattatatctttcttaagactgctttgctcctttagatgcacagtggctgttaaagtcccaattaatgattcttaggtggctacagagaaaaacttctgttaattactttgacattttcccttctatgcatcaaaagaatctgtgtggtgattatttatcaaagagctccagtaaagatctctctatcttattggagacctttttatcctaagatgatgctgattgcctgataatcatttcggaaaatttgcatctaaacgcatgaattccattttctagtttttgtactatactcaagggtgagatggcttttctctatatgtgttctgcaaatggtcctactcatatagcaatattcaaactttttgtaagatcttttggtgtcggtttattttggaatagagacgcttgaagatattctagtcttttataattttaatatctaatggtattttatcatgattaattatttgttttttgctgacatatgtttgaaagtaagttttaaagtgtatgtggccatccctttgtaattttacaggtgaaagaggaag

SEQ ID NO: 80030 - DNA, 412 bp, Citrus sinensis
  Intron number 1 from transcript orange1.1g015555m (locus o range1.1g015555m.g) derived from phytozome v7.0 (chr-ID sc affold00010; pos 1763011 to 1763422 reverse strand)
tgtgttgttgccgtgacagctttgaagttttgtcggttcagatttacaacttaactagtccttgttaaccgttattatttgtgttttctttttaaataaaaaaaaatgagttacagatctaacgcaatggactagagattttcttcttctccttttttggcatgtttttttttcttacaactgttatttccttttttgcatttttttataaataatatggaacttcttcagtacataaaaaaaaaaaaaatcaaagctgtcgctgaagatctgaaatgtctattttaaagtgtaaataagctgtttgtttgttaatagagcggaaaaaattaatccttcaatggtttagatggagttagctgttgctaagcattgctttgggttaatgttatttgctctcatgcagcttgtt

SEQ ID NO: 80031 - DNA, 621 bp, Citrus sinensis
  Intron number 1 from transcript orange1.1g006342m (locus o range1.1g002731m.g) derived from phytozome v7.0 (chr-ID sc affold00046; pos 749617 to 750237 reverse strand)
attaccactgctacctcttccagttcgggtaagatttgaaaatgtagtagtatttcaagaatgttgccgcagtttagatgggcatgaatgttccttgttaatgagaattttcttatcaagagtttgtgtatgttccttttaaggttgggccaaacaaataatcagatgtcacgtgaatatccatgacatttttttacatgctgattttctatggatgtttctcgcaagttcccttgctgcttatgttcttgattattttatttatttattttcttgatactactcattgatttgtaacataacctatctcttactataattaccaaacacttgtcttctctttcctgacagtggcgatggttggtttctgtctaatttattcaaaatgtttagttgatgatcatttctgtgcaacatatacctggccaaaagttccacaattgagtgagcataatcagttaacatagatgactctatatttgttgttccatttgatttctgatatatggttattaatatctcataagcctgccatttctttgctggaaaattattttttagacatgtattgatttatttgtaaagctggttctctttaatgcagagtgacgtttttctaat

SEQ ID NO: 80032 - DNA, 350 bp, Citrus sinensis
  Intron number 1 from transcript orange1.1g000123m (locus o range1.1g000123m.g) derived from phytozome v7.0 (chr-ID sc affold00004; pos 381052 to 381401)
ttgagtttcttcagttcggcctcactgaatttctggtacttcaatttaacttaatttaatctaatttcacgttatgagattaaattttttgtttattttttctttttcaaatgacagcttaaagagaaggacatgtgtctctttgtgatctgatctccgtagtttcaatcacattattcataaatcaaattccttttattcttacagagtgtatgaattgaagatctacatgaagcttttgtgtatttcgccaactctcttttatttatttatttatttttgtttgatttctatttgtttgttgttttgtgtcagagaaagcgagcgagcgagtgtttggtacgcgttgt

SEQ ID NO: 80033 - DNA, 473 bp, Citrus sinensis
  Intron number 2 from transcript orange1.1g000123m (locus o range1.1g000123m.g) derived from phytozome v7.0 (chr-ID sc affold00004; pos 381598 to 382070)
gacaagaagggggacttcttggcatttgcatttcggtaagtttttgatttgatcttcgttaaagttatcacttttacggtaatatttgctgggttgttccttttatggagaatttgtcaccaattctaccgttttttttccttttgtgaatgttttggttttgcaatcttggatattgcttgatttttggtttgtggaatcaaattgaattgtagttttctgtgtgtgggttttagaaattgggaatttttccatataattgatatgcatttgcaagtactttgcagaagtggtttcttattctattctggttttccgaaatttagcttccagtgcggggttgatgagcatattgataatggagaatgtaaaagttgttaatggggtttacgactatttgtttgcttttgatgtgataaaattgatttgttttatttgcagactgccgaggagctagctaaactggtgtattc

SEQ ID NO: 80034 - DNA, 411 bp, Citrus sinensis
  Intron number 3 from transcript orange1.1g000123m (locus o range1.1g000123m.g) derived from phytozome v7.0 (chr-ID sc affold00004; pos 382104 to 382514)
caagcgcacggattctcatctacttctcaacctaggttactacattttttttcttttacttttatatactttttcattttatttatttttctaaatgtggcaactgggctgttcttttcatacttctaggaaataaaactgtcatatgaataatagaaattttagttttcaaaatgagtgaagactgtcatctgaattgaacttttaactgtcagtaaattttttttttttaaaaaaaaacagcatcttcattataatgttactctgctaagtggagaactattctctctctctctctctctattttctttttcccctccttttaccataataaatcttattgatgttagataatcattctttcttgttgccttaaatgctttgaatttgctgttatacacagggaatcta

SEQ ID NO: 80035 - DNA, 339 bp, Citrus sinensis
  Intron number 2 from transcript orange1.1g000454m (locus o range1.1g000251m.g) derived from phytozome v7.0 (chr-ID sc affold00016; pos 861492 to 861830 reverse strand)
ccatctggttaatttacatttgactcgttgcaaaggtttttaatttagtatttgttgtaccaattgactgtatatttgattagggtgaattgattggttgagttttgatgtggatagttcaggattttgtgcaagtttgctaacgcattgtgaatttacttaacatttgtttatcaattacttgtgttttatttagggtttttaagatcttaatctttaggttcttaacttcttcattaggtcatagtgttactgcttatgtactaatgattgtaaagtaaattgttcttactttctttttccctcttcattttgcttgtaaaatttacaggaacagat

SEQ ID NO: 80036 - DNA, 593 bp, Citrus sinensis
  Intron number 1 from transcript orange1.1g042912m (locus o range1.1g042912m.g) derived from phytozome v7.0 (chr-ID sc affold00046; pos 308861 to 309453 reverse strand)
actcgcgggtttgtgatagggtgagccggtgttattgtgctccaggattcgtgggcttggcccaattttgagacttgaaatcatccgtagccgagcttccccattttctatcatgacaaagcctcctaaaactcttatcctttccttgaacgctaaataagaaattcgaacattaatagctcaaaagtcctcttctctcgtcaatggatgaacccagctcactatcagctgttaaaggtccaatgcttcttttcacataattccgtatcacaaaaaaaaaaaaaaaaaaaaaagttctcacatatgggtttttgtgatgattcaatcaattttctttgcagtctttcccccgagttgtagttatttagctgcatcagagcctctaactaaatttttttcctcttgattttattttattcttattggttttattgccctctcggtcatccatcaagcagaaaataatgtttgattgataacttgaaaaactagttatttgaagtagacgtttatatttttgatatgatgaaagtgtaccaaattgcttaattgtgttagacgtggctcagggttggcttctgaggttgcaaaga

SEQ ID NO: 80037 - DNA, 273 bp, Citrus sinensis
  Intron number 1 from transcript orange1.1g010736m (locus o range1.1g010736m.g) derived from phytozome v7.0 (chr-ID sc affold05732; pos 161 to 433)
catcgacttgttgacctctcaattgctcgtgtgtggtttctataaatttggcgtccaacatgctggttttgtgcaccgttacatgtttttcaaaagctaagaatgatcgaaagatcttttgaatctcgataaactccggtttaacattatttatttgattgtgtttttgtaatatcaatgggatcaccaaccctcaatacagttgttctttcacttgttttgttgatcttattttttgtgttaagtttttagtagctgtttcttcagaaacta

SEQ ID NO: 80038 - DNA, 1015 bp, Citrus sinensis
  Intron number 2 from transcript orange1.1g020207m (locus o range1.1g016099m.g) derived from phytozome v7.0 (chr-ID sc affold00025; pos 288002 to 289016)
taccttttgagaacctttgggaaaagttctttcatgtaagtgctcagtttcttttttattgttttcttttcatatctttcttttgcattccttatatatttatatgaacttatgatttttgatggtggcttcttattccagctagacatgtctttgagtctacatctagtttatgcagggatatctagattattagaaaatatttgatcttattttcctcgagttcaaatttctatgttcagctcctgctatattgatgtgtggggtagtaacatttttcttgacgtcagcaagtccagatctgtaatgctgattgttattactttttgatgcctctagaatgtgcctccgtgctattggtttgattttgaagatagataaatagtttactttaggtcttcatttttatcaaaatttctcatcaaagtcatggaggcgtgtaaaggttttggatatcagatgagttcgtgatggttattagcttcttatgtctttcgtgataagcttaggagtctctattggatgttggaaagagtttgatgaattggatggacttacaagaatgtgaagctacagaagttgagttaaaacatttaggaatagatataggattatatttctattactttagaagtcactttcttcatgatacagaccctccgctcttgcgcgcctttttcttttttcgacaatacaaacaatgtacactgcctagtctgttataataaaatggttgtgaagatgtaatggaatatttgattgaaatgttgtcaaattttgtgccttaagtgggactgatttgtatattgctagtgcatgtggaaactgattaaatcatggatatttttgcaaaagctttagttatagtttagatctcttgtcagtacttctaactttttactcacaggatataatgtcaatttcctttccttccaaatttagataaacgcactgttatttagcattgtttatcttgtacacgaaatgatatggcttacactcttcatacagggcc

SEQ ID NO: 80039 - DNA, 492 bp, Citrus sinensis
  Intron number 1 from transcript orange1.1g018952m (locus o range1.1g018952m.g) derived from phytozome v7.0 (chr-ID sc affold00319; pos 110014 to 110505 reverse strand)
tcctcagcagcagcagttttttcagtttctttcaggttctctctcacttcttcttcttattattgttgcttatttttatcagcaatacacttgattttggtaacaactgtgttaattttgttcatttagaatattggtttgtgaatttaagttaattttggattaacattccagagaggtttatatgtttgtttaacatcataatcgtcactactgcccacggagtccattttgagaatctttagcatgtgatgctaattttcagattcaaagtcatacgaggtcttaaattttgattaagatggaataaaatcagtaaagttctgctttatatttgttttgtgaagattttgttttgtagttctctcattgttgttgtgagtatagcaaccacgtgttaagtttaaaccaaaatagctaagatttttcttatacatgatcaatcaatcagtgatattgttctaattgaattataaattcttcattctagga

SEQ ID NO: 80040 - DNA, 779 bp, Citrus sinensis
  Intron number 2 from transcript orange1.1g008228m (locus o range1.1g004810m.g) derived from phytozome v7.0 (chr-ID sc affold00136; pos 264478 to 265256)
aatcctctttctctggctgccaatccagtcttaaggtataaacaataattgttttcatcttttttggcaatttgaagtttgtaaagaacatgcacttctccaaggtccgagcatttcagttgcatttcttttaattgttttactcgcacagtacatatcaagtttagatgattgtttgttcaacaacatcggacaatgtcgtaaagttatattatgaggcattgatgagtatactatgttcactttgaaacttgtagaactgttatattatgattcattggtgagtatactttgttcagttagaactagtagaactgttatattatgattcattggtgagtatactttgttcagttagaactagtagaactgatatcatacagatttaattggattagagctatggatgttttaagattatattcttatatccctgtttctcactgtattactttcatattgttttcttagcaacacataattgagtttggactttcatattgttttcttagtaacacgttattgaatttggggagatgttgtgatgaggtttgattacactaaacacttttgatggatattagactgtttggatggataatgaatctgcaatggaggttaatgctctaattttttgtgtgttaaaggctttatggagttaatgaagcatattttcgtgcatttgaagtcggtatgtgaaggattttaattctagattataccttacagtgtgcactatttcttgttatcaggaaatcctctgcgatacaagcaggagc

SEQ ID NO: 80041 - DNA, 279 bp, Citrus sinensis
  Intron number 1 from transcript orange1.1g021590m (locus o range1.1g021590m.g) derived from phytozome v7.0 (chr-ID sc affold00004; pos 194540 to 194818 reverse strand)
cttgtgaagtgtggggattttttcaggtactctattttttcttccctttttttcccccaatgattagcacttttgttttggggattaaatgtaaaagggtagtttaagaattctcggttgcaaacgtttgtacgtaacaaattaatcctagattctatcttgtgcactactctatatatatagccaaatgtggattttataatatgcaatattcacatgggagaaagactctcagtttaagaatgtaatgtttattttgacacatgcagctggtgaatc

SEQ ID NO: 80042 - DNA, 699 bp, Citrus sinensis; identical to SEQ ID NO: 79764
  Intron number 1 from transcript orange1.1g018380m (locus o range1.1g010724m.g) derived from phytozome v7.0 (chr-ID sc affold00067; pos 508059 to 508757 reverse strand)

SEQ ID NO: 80043 - DNA, 355 bp, Citrus sinensis
  Intron number 2 from transcript orange1.1g008954m (locus o range1.1g008954m.g) derived from phytozome v7.0 (chr-ID sc affold00007; pos 2178068 to 2178422)
gtctttcaaaactttctcggcaagaactcaagcaggttttaatttcaaaacattattgttattgaatcttttttttttccttattttgcttgttcttggttattttatctttcgaagatcatatcaatacttcaaaatataccattgttcagaaattttatgctattgtttgtcagattttttgtttttcctttaatataagttagcttttatgttgttcgcaatatgtttgtagcgaactaatcagctagaaatatatggatattttgataatatggacttttggactgattgtgttgttctgtatcatgtttgtcaagatttgggcgcttgcagattcaaagcgacaaggatt

SEQ ID NO: 80044 - DNA, 963 bp, Citrus sinensis
  Intron number 1 from transcript orange1.1g027143m (locus o range1.1g025178m.g) derived from phytozome v7.0 (chr-ID sc affold00004; pos 3029801 to 3030763)
tcggtctaattggcgccaccgccactacttttgccgtaagttaatttacttgttcttttttcattgctatgaaaaatgtaatgccgatattatggttttgtaacttcagagtttttagtaattgataggcgatgcctcttgtttctctcacaatctctgtccaaactgttacagtgcttggttgaattgcttgtctaagctaatgtcattttgtgagtgcgaatagtcgccctattgatagtgaatagaatattcatgtcttagattttaaaacttgatcttctggttatacgtgtgaaatccggaacccatttgcaatcaaatattgtcattggtagaaagttgttgtgctacacagtcaatttgattcctatagcaaatttggcaggttgggcagctccggaagactgttgactgggtctattctcaggtagaaataatatgtttccatcaaccttaaagtgggaagcctgttttactacactattacttggatgttgctgattgtttattagtgttcactggaaatcctttcaaacagatgttcaaggttctgcatttgttctgctgcattgaaggttttaatttgtgttcttgttatttggaatgtgcgtgcacatccccatgcataccagcgagtttcaattcttaagcaagattgttttctaacaacaaaatttgggtccgtagcttttgaaatttgaagactgagatctcttttcgttaagtttagtaaactcgatcctatgtttgaatttgattcttatagtaatggatggattgagtattttgtgtctctagcacggtaagttgatgaatatgatttatttatttattattgtttggtttatgttccagaaaatatcatttttcttttttaaatatcattggctgatggagctgattatgttgtaaatgcaccataaagttaagcaggccacagtcatcgtggaaaggagcaag

SEQ ID NO: 80045 - DNA, 1062 bp, Citrus sinensis
  Intron number 3 from transcript orange1.1g026969m (locus o range1.1g026203m.g) derived from phytozome v7.0 (chr-ID sc affold00271; pos 174671 to 175732 reverse strand)
gagcttgagtttgaaattgcaaggctgaggccaaggttagttcatttgtttgatttatcgttatattaaaacaacgaaatgtttttagaaatgcatgcaacttgattgacattttgcctcttccaaagtgtattaatagatgatggagtacaattcggttaaatgcgtctttcgattataatcatatgtaaatcctttttgtttcttcatttgtctatgctttaggcagaataatttatattttgatgagaatgaacggagtgtgaaagctttagtagagctctaactccttcattcgctgatagaaaatgaatttccttgatttttctgtacttgtaaagattatctactttttgaagtttgatgatgagaaacgatgagttccaactgtttggtcattcttcctttctacctcaccggggcactataccctagtgcgtaccctgggagactgggactttgattaccatttgtgccaccgtcctcattgacttccacagttccagattacaaagcttacttcctggctttggactaccccctttgacagttggagaaaaggaatagaaaaaattaacacttgtgccatgttgggtttgaagaaatggagccaaacaatggaattgaattacaccctcttttgctctcattttctctctcccgctctcctctcagtctcttcttttccaaccaaacatgggcttaatgtaagctttaagaatctgacaggcataagtttttttattcattacatttatatccaccgtttttattttgaatattacgtaaatgtaaaccaaacccctccctgtactgatgtgagcagaatttaaatcccaaacctcatgtagttcgccaggaaatcttgtcggtcaaaccaactggcaccacttttatatccacctcatttggactgttgttttcttagacaatttaatctcttgattaatgagatattttttacttcaaaatccctaacttgaagttttgccttcaataataccatggtaacccatacaatttgcagattgaaccaggaatttttctcacatctcaaatttg

SEQ ID NO: 80046 - DNA, 511 bp, Citrus sinensis
  Intron number 2 from transcript orange1.1g034622m (locus o range1.1g034622m.g) derived from phytozome v7.0 (chr-ID sc affold00287; pos 28360 to 28870 reverse strand)
gtaagttggctgagggagtggattcgacttttgaggtttgtaactcatcatgttaattgagatggcggtttcttatataacatttcataaagttactcataaattgctttccttgttctaaatcatcattgcttttgttgttattcgatttctcttcacttctcgcacttatatgtatatatgacgcatgcaaacatttttcttttaattgagcatagatgacggaaaattatatatattctctctttattcatataaaaaagtgtttgaacctcggaccttttgtattacttcaacagattttactccggacgcacaagcatcataatatttcaaactgtgtgtaccatgagcgaaaaacatgcctaactcttccatcataattaaacaaaatcaaagtatatccattttttccttgcaaaacaagtattgctgcatttttctttatttcaaggtttaatttctgtttcgattgcttcatatgtaggagaagccattacaggaagaggaa

SEQ ID NO: 80047 - DNA, 829 bp, Citrus sinensis
  Intron number 1 from transcript orange1.1g046867m (locus o range1.1g046867m.g) derived from phytozome v7.0 (chr-ID sc affold00047; pos 148452 to 149280 reverse strand)
tttttcaggctccgacgaggcataaacaaaaacaggtttacttatttattttatttgtttatttatttattgcttacagtacttgaaatctcagttttctgctttactgttactgttgttgttaaccttgaggatttgcgttggcgatcagagttgaatttagtttgatgcgatgatgattctgatgacagcaaataagtgttaattgttttggtatttataaagagcgtatgaatatttgttctttgggtatgtctgcgaatgagttgctgttaattcacaactcagtttgagtagaatgaaacgaaaatcactggctaataagtataattgggtgggtgggtagtaaaatttttttttgcttccgaaaaattaaggagaagcacagcagttgcaaacattcataccctttgttggtttgagttgttgttagaagaaacataacaaaaatgaaatgacacttaatctcaaaagatatgtttggaaatgtgcgctttcttgtttgaatgaggggaaaaaactagatttcttctgtggtttgaagtgaaccttcaaagaccattacattatactagtgaaaatgagtgtggttcttctgtctggtttgcttaaggatagcttacaagccttgtaatcagatctttaacgtttggtgaaagatttgtaggacacataataagaattcttttctatcttcctttatcagaccctgtgtagttttgttgagctgctgccagtttgttttcagttcccttgtttgtcatatggtaagagtaaattttgatagtaattattctcttttaggtctttcacgaagtcattgatcttg

SEQ ID NO: 80048 - DNA, 366 bp, Citrus sinensis
  Intron number 1 from transcript orange1.1g025851m (locus o range1.1g024917m.g) derived from phytozome v7.0 (chr-ID sc affold00004; pos 3325163 to 3325528 reverse strand)
ttacagaattgcactccctcctctgcattccactggtaatgtttctcactttgacttcacatttttgtagcctcttgagtctcataaatgatcagattttcttgccaagggtaaaagtaaacttgcaggtttaagggtcattatagtaaaaagacaagagttgagatatttacgaaaaaatggcaattctgtcattaaaacattttaaccagattggtccattttcttccatcaaaatttagtcgataatagtcagcatagaacagcagacgagtttctcttctctttctccttcgctgacggctgactcactgactataactggcgttttgagtagtgagtggtgactcgacgcaacctcaacaa

SEQ ID NO: 80049 - DNA, 1003 bp, Citrus sinensis
  Intron number 2 from transcript orange1.1g021715m (locus o range1.1g019553m.g) derived from phytozome v7.0 (chr-ID sc affold00004; pos 3627053 to 3628055)
atactgagactgaggtagcattctttttcttagattgctttaatttcgaattgatttgatggtatagtatgtgatgcatgttgaattcttgattttgggaaagtagttttggcctctttttgtatgttcgtgtgtctgtgtgtgtgtgggagaattgacagtatttattgggttttggaagaatagactgatttcatgcctggtgtgattgtgaattggcctggcgtgcatcattatttaatgagaccaggttaacatatgctagtgaaagtcaattgtagtgggttacccttggattccagataattaaaggcatgtaaaaattggacagacgagtgtaactatgaaaagatggctagaagtctgaatggaaattcgagtgttatatactgaagacttaaaatgtctttatctgatttttaaagataaacaaacagatcttcttgattgaattgtttattaactcacaatggtagctgttgatctttggctgtgaggaaacctccctgtcaactgcctttggttttagaattagaaacttaaaatgtaatattaagggaattagtctgtggatatttaactctattgagaaagaaggactggttacattttctacttattttcagaaaagtttttctttctccctttcgtgttggttgtaatgctgatgtactttggttacttgaaagtaacaaactgattggatgtatcaaacttgggaattgacttttatgacgattctgaagcttaataattatatgctttttgatacataaatagtcaagtgttaggttctggtaaattagagatatgaggtggtgaatgcaaagggtgcagacggccttttttctcaagaaacatcgttcttataatcatatgccattctcctttttcttttgtggtataattttttattctgtttcttgttagttggttaatatgttggcttttcaaatctggaactgcagaagttggcaactaattctaaagaggagcctgacaa

SEQ ID NO: 80050 - DNA, 744 bp, Citrus sinensis; identical to SEQ ID NO: 79988
  Intron number 1 from transcript orange1.1g016157m (locus o range1.1g016157m.g) derived from phytozome v7.0 (chr-ID sc affold00004; pos 1160981 to 1161724 reverse strand)

SEQ ID NO: 80051 - DNA, 601 bp, Citrus sinensis; identical to SEQ ID NO: 79630
  Intron number 1 from transcript orange1.1g015314m (locus o range1.1g015308m.g) derived from phytozome v7.0 (chr-ID sc affold00007; pos 1917123 to 1917723)

SEQ ID NO: 80052 - DNA, 541 bp, Citrus sinensis
  Intron number 2 from transcript orange1.1g013382m (locus o range1.1g009105m.g) derived from phytozome v7.0 (chr-ID sc affold00007; pos 1353744 to 1354284)
gtggttttccggccaatcacgcctggacaggtgcggtgccgtttcagttcctcagcattattcgattcctgctaattataattagtttcttcctaatcttattgtttcttgtgttgtgtttgattaacttttgtttttcttttttcatttcagtaaaatgtggttgttagctttagatcttttagatgcaacaacttctgataattctgcagattttgcttcatttttaaattgataatgcttggtgattagcggaatctgtgagtgagagcaatttgagcacactagcaaaatgagactgtacacattacaaataaaaaagaaaaggagagagaaaaatgctaatgtctagttttaatagaagttctgaagctgatggcaatcagtttctgctgctgtttctgcatattttgtttcatttggattgttattggtgtcttcatttttggtgttctgaataaactttgcctgacgtatgtaatggagtcttttgctgcacatctcaggtgtcttttctactcggaattatcccagtattcgt

SEQ ID NO: 80053 - DNA, 497 bp, Citrus sinensis
  Intron number 1 from transcript orange1.1g041082m (locus o range1.1g041082m.g) derived from phytozome v7.0 (chr-ID sc affold01249; pos 19631 to 20127 reverse strand)
actttctatttattttaataataatacactatttggcgaactcccaccaaatttttgcaatcaaatgtccaatttagaatctctatttcttaaatataacatgtttcatggcaaaataccatccacttttatcaaactgctaacagctgcgagagttatctttatcgttcaatgatttttctggaaccataccaaaagaaattggcaacgtgacaaagcttataaggttatatcttcgagagaccaaactccaatgtatggtaaatgagtttaattaattgatgaaaattaataatgtctcacttttattaatcctgtcagcctataattctttaattctatgagtaaattgtttcttatctctcttcaggcaaaattttttgtatttcatttttttttcttcttgagagctggaaaatgaattcaaaatgtttgtgcatatatgttactcatgatttttaggagaaattccagaggagctggggaatcttgcagaa

SEQ ID NO: 80054 - DNA, 920 bp, Citrus sinensis
  Intron number 1 from transcript orange1.1g040630m (locus o range1.1g040630m.g) derived from phytozome v7.0 (chr-ID sc affold00035; pos 711468 to 712387 reverse strand)
tctccgtacactctaggttttcttcttctttttgaattaataccagtagaatgtaatgcaggcttgaaatttgcctttatttttttctgtcttctaattataatttattttatagattcatttacacatatgtaaatgggtttttgtttttgaaagtaatgtttagtttagctataagctgtttttgtgcttactgtctctgctaagcttttccctgggagagaaaaattaattttagttttagtttggtactgaagttagttggttttatattgtatattctagttttagagagagcatagaattctaccctttaatatattttgaaaacccaatgaacgctcattttttctaagtgtttaaaaggaaaaaaaagaaaaaaggaagcttgaattacaagagattaaatgggaaaaatgatgtaaaattaagtgggaatttattctttgttcctctgtattatgttacaaagactgtaagttgatttttttttctggtttgtgtttgtttattatgctggagggagagcctgcaagtcaaagtccgataccgtataagtttattcaaggccatagggtttaatttgggtcggggtgcatggtaacttttagaaaaaggaaaaagctgtttgtgctgagtcattttttatcaaatttggcaatgatacatttttttttagtttctagtgcagttttctttatttttttgatttaggaatcttcccctccctcttaggtccttttaactatgtatttgttttcttcttctgtgtaattgagcctttttttatttttctttgatgcggaaaagaaaaggaaatgaatgtcaagttttaagtgcatttaacattcttaatctttagccattgttggctagtggtttgaagttttaatgaaagatgattttggcagaacatctgc

SEQ ID NO: 80055 - DNA, 855 bp, Citrus sinensis
  Intron number 1 from transcript orange1.1g042836m (locus o range1.1g042836m.g) derived from phytozome v7.0 (chr-ID sc affold01387; pos 9120 to 9974 reverse strand)
agattctgttaaagctctggttttgtttcactctagtgagtcaaggatgtttattttcttagtttgtgcgtttgctgcatccatgaatggcttttttttaagctgttattttcatttggcttgttcaagaagatttatcaggtcattcttttgagaagctatctctgggatatttgtgtttcctacatttgatcttatgctgtagaacaatttgtattcttaaactaaagatgtattaatttaccatttctgtgaactccttgtattatatgaaataaatttatgctgaatgtatcaaatattgatcatgtgtagtgtctatttccaatggtgcttgggaaagttattcttttggttcctcttttgagtcctgaaactatgcttcatctcctgcttgtgggtattcctcattcgaatcaaagtcaaagatagagccatggatcaggtttattgctgcaggcttcatgggagtttcttctgaaactgaagatttttcatcagcctccggagttagctgtgagttcagcttaggggttgctgccaacgttcatttctgaagcatgcttttatacatcatcattttaaatctgtacaggagggagcagcattcttcaatattgtgcaccttatcattggaacagaaaaatagcataagcattgaagaattaaggtctaaaggaaacaagcattgcgaatttttcacccatctcctgaccgtagtttatctactcgctggccagatagtagcagagattttattttgtttcggatgggaagattgcctgcagatccagctgctatcaacttttgccttttccctcgaaagtgataaaaggagagagcttttctgcgcgc

SEQ ID NO: 80056 - DNA, 331 bp, Citrus sinensis
  Intron number 1 from transcript orange1.1g042689m (locus o range1.1g042689m.g) derived from phytozome v7.0 (chr-ID sc affold00004; pos 2898286 to 2898616 reverse strand)
ccataaataaggtggtaaagaaaagtcttcaaaatattaatcatgcaaaatacctccatctctcaaatagattatttgatttgactagatcaaataggaaatatcttattggaaaaaaataaaaagacgattggctgtcacatctgcaaaaagtaaaagatagcacaccaagaataatagtccttatctgacacgcttaaaacctgctaagacaacatttgcagagatcttctggatcattctacaatgtacaccatttgcacaagaaaacaaaccacgttaaataacgtccttcttactcccaaaatatgttcttaacaaggaaaaaatc

SEQ ID NO: 80057 - DNA, 804 bp, Citrus sinensis
  Intron number 4 from transcript orange1.1g023972m (locus o range1.1g016755m.g) derived from phytozome v7.0 (chr-ID sc affold00010; pos 1623273 to 1624076 reverse strand)
gaaccttccagctctctggttattgaagattctgtgtacgtgagtctttaagtcctaagatcagatttctttgtttattcaagcattgggcctctgtctactgctcttcaaagaatgaaatttaaccttttgattgttcactagcctggcatgcttaatttttatttgcttaagagacaggaaaataccatttctagctgttacttcgatataaatataagatggctcttgggaatctacagcctaacaactgtgaaatgctgctttcttatattctgttgacatacctactgttgcttgaaaagttatgtggattcttactaacacggctataggaacacataggttatatttttaaagttgcaaaatcacaatacaggtgattggcagctacagtttggaatttttatttgctcttctcttgaaagacaaggactcttatgttaggttgcatttataagttagaagatagcacagagaaatgattactgtctgaaaccataatcaattcagcctcgactttccatgacatctgtgaagctttctttttcctgttttcatatataccattaaatttctatgttactttttgctgtgattgattgacagataatgttttgtaaactccatacaatttataccagtcatttgttgctttctcaaaataaataaatatgataaaaaatgcagcaaaatctttttctctggttaagacccacccacacacagacagaattcagttattgatattgcataggctttggccttctcaggataggtgtagtggccggtaaggctgctgga

SEQ ID NO: 80058 - DNA, 457 bp, Citrus sinensis
  Intron number 2 from transcript orange1.1g020772m (locus o range1.1g020772m.g) derived from phytozome v7.0 (chr-ID sc affold00025; pos 551592 to 552048 reverse strand)
cagaaatatcaccgtttttggggttgctttctcttaactttgaatttttatcacttttttttttagtagtatcagattttgtaataatttgtatactaaaatagtataatttttttagccttcttttttttctttttgccttcaaatgcagtaaagtgtgctcccaaaatacctttttgtatttgaaattttcggaacccgtcagttctgtacatttttaaaatctgaattttgatttgtttgctttcaattttcgaaataaaaactacatgggtacagaacagatttcttcaactgtagggtaaaattagtacctcatttcgaattattagtttgttttggcttgattttgcatccattctgttgcccaagtttttcaccagttaaatattaagtatatttgtactgattaagtagcttgttgtaccaaaatgcagtttgtttgctgccttatcat

SEQ ID NO: 80059 - DNA, 578 bp, Citrus sinensis
  Intron number 1 from transcript orange1.1g022552m (locus o range1.1g022480m.g) derived from phytozome v7.0 (chr-ID sc affold00433; pos 1138 to 1715)
ttttacgaacaaggaatttgtctttcgagaaaaaagtaagtaaatatttttctccttcttcttcttcttcttcttcgtttctcattttattttgtgtcttgattttattcgtaatttgattgccttagaagtactttttggagaagcactttctggattcttttttaaaagtgtttctttttttttttaaactaatgagaatatcgtttatcatgagatcatcacttaacgaggattttctctattttttttatttaagcataaaaatgaaatttaaaatttatataaaaaaaaaagttgtaagaataaaagattaatgaaaatctgatagctggattactttcaggatgatgctgttctagaatatataagaatattccgtagaaaaataatttactgtgctttttttttggtggcatctttttataatttgaagaattgcatattaatactaatgaagtataagtgctgatttgttgtggtttatgtggattgtgatgtgattttgttttttggatgcttagtatttcttcaattgttaagcaggaatattttgtttgcctctgtcaacggtacga

SEQ ID NO: 80060 - DNA, 427 bp, Citrus sinensis
  Intron number 1 from transcript orange1.1g029718m (locus o range1.1g025630m.g) derived from phytozome v7.0 (chr-ID sc affold00070; pos 254052 to 254478 reverse strand)
taccggcgcaccttcaaggacaggctctcacagaggtccctgtctcttctcttgaaatttctttagtatttgtgttgtttgttagttgtcttttttttttttactccatgaacttgagaaattatgtacagaaagtttgaacttttaacctacatatgctgccatatagaacagttaccagttaataatgaaatagaaaagctagaaggacacatatgagctgtatttctaaagactcaaatatacaacagaaatatatacatatttgtgcattcttatttacaagttaatggaaaagatttaaaacttgattatcacggcaaggaagcaaatatatatatatattttcatttgcagatatgagaatgacttgcccggggtggatatttttgtatgcacagcagaccccaagacagagcaaccaatc

SEQ ID NO: 80061 - DNA, 319 bp, Citrus sinensis
  Intron number 1 from transcript orange1.1g018099m (locus o range1.1g018099m.g) derived from phytozome v7.0 (chr-ID sc affold00007; pos 1197958 to 1198276 reverse strand)
gggcatctttcaggttagtataaatttttataattatttcttcttacttatttggacgtgatgaatctatatgatgaacagtttttttttttggttctgattttgaaggacaggtcgtacaaattggtaattgttttatatatctattatttcttcaaaagaagtttcaagaaatattggaacacgctcaaaacaaaaagttcaaataattaacaatatatagcgttaaaaagtgcacgagtattattaatatttgaaaaaacctcctaactggttgtcttattatgttttgttatgttcatgatgtagttggtgaacc

SEQ ID NO: 80062 - DNA, 644 bp, Citrus sinensis
  Intron number 1 from transcript orange1.1g016068m (locus o range1.1g016028m.g) derived from phytozome v7.0 (chr-ID sc affold00026; pos 143647 to 144290)
cttcaagcttttctcttatttgctattgttctcaggtatgatctttaatgccccctttttcttttgggaaatttgttggggtgttctggatttgctttgatgtgttttcaaatggtttttttggtaatttactttgttggatgaaatgtacgtgtgatcatgcaacatagattttacgtgctgggattttgatgctttgcccattgccgcctctatgtttgttgtttaggttggtgtcaagtgattgatgtttttgcttttgtgtttaaggacgtgaatgcaagtttaggttcttagcagtgtttgcattcaagtacgatcatgctggatgagtggtttgccggcttgagtggatttgtgcacaaaaatttgaatttttggagtttgattcgtctgaacatgtttggttgataaaatttttttttttatctgaagtgcattgtaattgtaaggaagttctatattgaagtgtggttcctgcaatgatttgcataaataattatgtaaaatggaataataaatgtgtttaaaacgtgttaatcaagttggcctttttggtcaacctctaattagttcaggattgaggagcaactgagtcaatttcagcttgattaattgcatgacattattctcagggctgaaaa

SEQ ID NO: 80063 - DNA, 273 bp, Citrus sinensis
  Intron number 3 from transcript orange1.1g006951m (locus o range1.1g006817m.g) derived from phytozome v7.0 (chr-ID sc affold00016; pos 1675805 to 1676077 reverse strand)
cattataacgtggtgaatctctttttctattctctttattcagagttcaattctgtttatttttggctttattgttgcgtaatagacttgtttagtgaatgttgatgctctatgtgctgcaccatgcataggttcgtgaatttctcttttctttcttcccttgtgtaatctcaaacctattaatgatataattgcttgcatttgaatttaattgttcgtttaagatggtttgacattagtttatatctttccaggcctgggaaggtcgtgcat

SEQ ID NO: 80064 - DNA, 701 bp, Citrus sinensis
  Intron number 1 from transcript orange1.1g026028m (locus o range1.1g026011m.g) derived from phytozome v7.0 (chr-ID sc affold00025; pos 907435 to 908135 reverse strand)
acttcaccgtcaaggtaatttattttgctccttgtggacttaaaaattttaatcctttgattgctattatttgcttcttcgcttaatagtatgtagtcgtgatgaccataagtgtttggtctaatagtttaagcttggagttaagggcctaaacaattttatttaaccttctttaacattcactttgtgtgaattcaattgtatatggaggattcgaacacaagacctttaggtcaaatttgctgtgataccgtgttctagaagttgcttgacttgacccaaaagcgtaagcttgaaggatccagacaatagtatttaagcttgtctaattctaaattatcatagcaactcaatctgctgtatgctctatgtgtttggctgtttgcgtgctggcattacttaggcttcaacttagctgctatcgtggagaaaaaagaaagaaagataccggagcttggggctgaattgctcaagctaaagtttttctctgttttgctttaactttttttttttttattgtattgaagtatgtattagtttatgaatattgaatactggtgtggatttgtgaaataaatcaaccggattgtgtcatacgctacttgagtgaaaataatttctgcttgttattatattgctcaaattggtaagaaatatttgtgttgagcatggttttatttctcttctgatgcaggatattg

SEQ ID NO: 80065 - DNA, 688 bp, Citrus sinensis
  Intron number 1 from transcript orange1.1g017494m (locus o range1.1g017494m.g) derived from phytozome v7.0 (chr-ID sc affold00036; pos 547781 to 548468 reverse strand)
cttccatcacctgtcaacttcttgtttccacgcaggtgttgtgttactcactctccatatgtatacttagtttgcttgttatgtcatgcatgttaggttctatgttttcaccttgcatctaatatgtttgtgaattacttgatctctcctatcatttgtacaaagattaacccatttaagatggcattccaagaaatatacttagatcgaccatgtgatacagagtttgactatttgattggatatggaagcgggtgtaaatgcggggagttgtatgaaatcaaatgggtaatgagagtgatcttgttgaggttatttttttgatgatgtgggagtgcacttggtagtagtgtgtttggagtttacaggtcttttaagaggtttataatggtcattggacaggtccatctagtatttttcgtagaacaaagatgccaacacgatacaatgcagttggacaaagattttactgcacagtctgacatgctaaatggcctctgtgggaagaaacaatatttcaaagattggcatgttactttatgcaactttattaacattttgcatagactgatagactaattgcatggctagtttgcacctgctggaattttagttattttattttacttagctccttgtgcaaattatttcagcttgtaaggcatcttctaccgctgacaaaacatcc

SEQ ID NO: 80066 - DNA, 722 bp, Citrus sinensis
  Intron number 2 from transcript orange1.1g006458m (locus o range1.1g006458m.g) derived from phytozome v7.0 (chr-ID sc affold00312; pos 177665 to 178386 reverse strand)
caggcccaagccgaaaatgtgagatgcttacttcttatctgccttccttattcgtgtttgaggttcttgaagagtatatttattgttgcagtgcccttagaagaatataatgttcgagttgcatgaactcgtttgttcctttattcaagttgaggctaatttttcattttaattggatactagaagtagtttgcaaagttttctatatgtagtgtttaacatgacttagttctctataaatgggattatttattgcttaggctcatatattaaattttcttgcaccgcatttgtttattctgttcaagttgggcaattttaggattaagacttgatttcctgctgtagcatggcagcattatagatgtccttttgagtatataggttgtgtgaatttgaattaataaatttcatggcttttttttttaataatactttctaaagtagtattcacatttaatttctgcaactattttcttggtgtatttactggctcgggaaagctttcacaattagtcttttaacttagaggttaaaataattggtgaaacaaagaaaaggagctggatctatttagcattcttgattacctgatctgtacataaacataattgctttatgcttccactgacttattatgttcgcctctggaacatagttaaaacatttcgtttattgaattttttactttttgcttgggcaggagaggcaaagggtaatat

SEQ ID NO: 80067 - DNA, 217 bp, Citrus sinensis
  Intron number 1 from transcript orange1.1g032393m (locus o range1.1g024847m.g) derived from phytozome v7.0 (chr-ID sc affold00007; pos 2501676 to 2501892)
ggtgaggtaagtaagtataatattattaatcctcatagtcgaagatctcaaattgttgttcatttttctttcacttgttgttgtaccttttattgttcttgttgttttaattaggtgatagctagctcaaaatatttgatatatatttgtactatttttgtttgtggggtgtgaaatcaaaggagaacaaagaggagcaaaagaaagaagaagccaa

SEQ ID NO: 80068 - DNA, 814 bp, Citrus sinensis
  Intron number 1 from transcript orange1.1g022326m (locus o range1.1g022121m.g) derived from phytozome v7.0 (chr-ID sc affold00287; pos 3003 to 3816 reverse strand)
aaagaaattcgaaattatcgataaagaggatttgagttagtcccattcacatctttttattctatttttaaatcttttttagctattttaaatttttaattggtatgagatattgctttggtgaattataattatatttggtgaagaaatttggtacgtgaagaataatattttttttaaattattattcttgatttataaatgtactgtttgatcgctgagaaaatgtaggatgaataattattgagttcctttgtttctaatgttttattttatgttgtttactcataaatgtatttgaaaaacattcataaaattttgagaaatttctaataatttcagtcgaagtttctgaaatggttaaattttaaaaaatttggtaagttttgagcattgcaaaacctgctatttaaaaaaatatatatgtattgtgaaagtgtaataaagagcagtaaaggagaggcatggaattcttaaaagatcatcctttgaattgttgttatacaatttgattgcagtatctcacatggttgtgcaattaggtggataggggatgtttaagagctagagatgttagtggtgtgtttggttgcagagaaatgttttggtgaaaaaaagaaaagaaagtgattagttcaaagtttttattttcattttccttattataatagaatcggaaattgtgcgcgttgtttggttgtgaggaatgtaactttatgttccttaattcacctgtagatgttttttggctaattggactgcttttgtatttgcttcaggtcctgtgacaattgcagatcgaacagcagaagaa

SEQ ID NO: 80069 - DNA, 859 bp, Citrus sinensis
  Intron number 3 from transcript orange1.1g014878m (locus o range1.1g014878m.g) derived from phytozome v7.0 (chr-ID sc affold00004; pos 2015538 to 2016396 reverse strand)
gaagaagtgttctgttatccctgttgaatttgtaggtgagtggcattgcttctcattttcacttgagacaccgacagtttctcacctgtggtttctgttgccaaattaataaatattgtttagtgctggatgaacacagtatgatgttcctggaattctattgtcttgtaaacaccgtggaccatttgtgctgaaactgatgaggcatgtcatgtggcagctgtattcaaagttcacgagtatcttagtgaatgcaaacttatctgcgtgtatatatatatatatatagttagaggctgtattcagtgcgctaaaaaagaatcatgtattgagtgttttgagttgttatataataatgcagggatgcttaggtgaattctctttgagtgatatggcctccattgcatttatttggggttattgaaaactcaatgcatgtctgtttcttcttttccttcttattattgttaatcaaatgaacttgggaagatattttattgatggcctgtgagataaaaatttggttggccacctgtcaaagctaatgattttctagacatcaacttgctgtgcaaatgttaacagctcaaaacttgtggttagaattgttcttccatgttcgttgactgggttttcagtttctaatgggaggattatagtgtttttaagcagacaagtgatggtgaaatcttcattttctagtgtgaatcgtcatgtatataattttcattctgttaatttatgaagtttttgcagccacctggtgtcaatttactaattctgaaattctgaaattgatcttaattacgttggtgttttaaaagtcagaggttttgtgactggaagtactgatacctct

SEQ ID NO: 80070 - DNA, 667 bp, Citrus sinensis
  Intron number 2 from transcript orange1.1g037870m (locus o range1.1g037870m.g) derived from phytozome v7.0 (chr-ID sc affold00025; pos 901787 to 902453 reverse strand)
caagatctgctaatatccgctctgagaagaagaaggttagatttttccattttccattagatattactttacatttctgtttcaagcaatcttaaacagtgctctgcatctgcatgccataacatctgtatacatacatttacaacttcaaacttaatggtaaaatgatatgatggattttcaaatcggtctgaggtgctgccatctgcgtcaactaatctgtgtgattccttcttttacacgaaaaatcttaaactgttccaagactgactttggtcatttgctatccttgaagattccacaattcatattaagaaataatgcttgtgggttaccatctgtcctagacagcagctaaacagttaagaaagctaactaaactgactaattggatgacgccggtctagttaataactcagcgtactttatctctttttcatgaccgcaaacttacaaaaatcaaattgaaattttttgctatggtattgcttcctttagatcagctagaatgtatattttggtgtgttagctcacaagctgccagtttgaaagttgatagttctaaattttgacaattttgtagtagtttagccttgacatatgtttatacctttattttttcttccaattttctgtttggcataacaatatgtactatcagcaggta

SEQ ID NO: 80071 - DNA, 735 bp, Citrus sinensis
  Intron number 1 from transcript orange1.1g011845m (locus o range1.1g011845m.g) derived from phytozome v7.0 (chr-ID sc affold00016; pos 946933 to 947667 reverse strand)
aggctacccaaggagagaatccttatatttggcaggtttgtgttcttttccttgtatgctacaatgagattgcaatttctgttcaatgctttaaatttttcttcttttcattttgcttggaaaaccaagtagccaagcaaagcactgatgacgagtatttatggtttctgtacttaatgtgtgatttggaattctagaactttgtttatgctactgataatatagtggagggcttaacatccctggattgcattcattttccactcgattggaaagggattctaatccttgttaatttatatagttttgtaagaaaacaagtaaagcaatacttattcttgatgacaataaccaaaggaaaaatgaactctgctggaagtaatttgtatttgttttgagtgttcgttaccatgttctgtggataaattttcgtcttcacctattttatgctattgatactgaaatgaggtgtgaccaccctcatagctttatttggatctggtcttgtgagatccactatcattcacttagagagcttagaaaagttgttggtgcctttgattctatcaccaggtaaatctctttaaatttggcgaaattcttttgttgtgataggattaccgaaactgattgaatgactgcattgtccacgatcatttctcacatgtgaagttgacaagtaggtattctattgcaacagtgctgggctgttttggaaaataagctagggaatat

SEQ ID NO: 80072 - DNA, 839 bp, Citrus sinensis
  Intron number 1 from transcript orange1.1g001064m (locus o range1.1g001060m.g) derived from phytozome v7.0 (chr-ID sc affold00060; pos 174213 to 175051 reverse strand)
gttctggtatgtatgtcttctctggcatggtttcttgtcgtgctgttttggtgactttttgtagtgccatttgcagattgttgtttcaaagaataatcataaaactcaaaagtgcgttgcaaattgttttagtatgaaattaattagtgatgatgttgcataaactatattatacataagtgtcttcaggattataagtgttctcatggaactttttgtgtagctggcttggttgttcatacatgtacaaactcattataagtttttgcattctcttgtgagttgcacaaaaagccagtatgacagaaggctgtaaagttcagtctgccactaaatggttatgtgtaagatttattaccactacactgaagcaatgttgcaggacatatgtaagctgaagtcatgaaatcaatgttggcatttagcttaaatgtttcttctcacactttggctgggttcgagaatcctctgttctcattcaacttgaatttatccccttttatttcttatttatgttgtcatttgttctgcatcttcatgtttcatgtttattagccattctatagatgtaatggtttctcttttgacctcaattctacatactccaatgttggggtttaattttctgccatttgatgacttcgaacatgaaacgagttatcattggctttactgtatatatcctagaacataaactgtatgccttggaattagggttgcatagcttggtgaaactgaaatgtccattgatgatattctgtagattagagttttattttaatagattctgatatcgagatattttatgttcattttgcccctgcactgtagtgccagca

SEQ ID NO: 80073 - DNA, 641 bp, Citrus sinensis
  Intron number 2 from transcript orange1.1g001118m (locus o range1.1g001118m.g) derived from phytozome v7.0 (chr-ID sc affold00004; pos 401280 to 401920)
gttttggttagtattgtgagttactttttaattaatcattaattgtacctagtttaattattttttgttggtgactacagcaaatgattatgtgtcacctttcagtttcataaaaaaataaatgtaatgtacctagtcagttttaattatatgattgagttttgtgtaatggaaatggaatattatagttaatgtattttattattattattagttataatattagaaaatgttagtgtgaggccctgagccaagctgcttttctttttgtgaaattttctgattcttggtcttgaagttttattgaatataatctttgagtactggcttgtttagttgtgaagcattcatgtggcatttgaattctgaagtagttccggtactatataagcataggctggtttttggatacacaagtctttttgaccatttgatgtgttggaagatatgataaatcttggaaaataagctttgcaaaatttagtaaatgaattaccttttatttctttcgtttcttgaaagatcttatgtttactgtatctcatggtgctcatagaaatttctttttcccctactttttggttgttctttgtgtatgtggtgcagataaggtgtttggtccggcaacaacaacacgccat

SEQ ID NO: 80074 - DNA, 667 bp, Citrus sinensis
  Intron number 1 from transcript orange1.1g015070m (locus o range1.1g015112m.g) derived from phytozome v7.0 (chr-ID sc affold00047; pos 235289 to 235955 reverse strand)
aaagattgctacttatcaagaaaaggtctgattctttttcatgtaaagttttgatctttggttggtttgagagattatcaaatgggtttatttggtttatgatctgagcttgattctgggatctgggttttttttttttgttttgttgcctactggtagctggtttatgctcatttaagggtttgtgatctatatgattaagaatgagtaatcggattcattccaagatttgggattttgtctaaacaaatggaattttaaaggccgacacatgtgacttgctggctaatttggtaataaaataatgaaaaataataattttatattctttccttggtcccttgtttgattttccaaatgcatcatttttcgttttcttgtatggtatgtttaaaatatttaataacctcttcctttccttacaagtccacacatctttaaatgtatttaaatatgcatataacattatactttaatgtgtatttaattcattatcgccggttttgatgcttcttgctcagatcaacaaagccagatgttttgccaagcttcagtttctttgtgttttggcaattaacatgattggccctggttttgtatactgattttcttgttgaatgctgatctgacagatatattttgaagtgtaatttggaattctgaggga

SEQ ID NO: 80075 - DNA, 860 bp, Citrus sinensis
  Intron number 1 from transcript orange1.1g009747m (locus o range1.1g009747m.g) derived from phytozome v7.0 (chr-ID sc affold00287; pos 90867 to 91726)
gagagatcaagattttgcggctcgcttgcagatcggtcggtaactttctttcattttttttttaatttttgagaatttttattttaattgacggagatgctgttgttttatttgtttatttattattattattcttcttgcgaagatgattctactttctttcattttggtgttgtaaataatttgcatttgtgtatattttcctctttgactataaatgtgatcatgcattgtatattttattttatttttattttttgcagcaaacgttgaggatttgctccggctgttttttatttatttattttatttttaattttgatcaattttcgagggtgggattgtgagtttcagctttcctgggaaaattgaattcataatgcaaaagaggaatttgtgtgaattgacatgcaacaattattaatgcaagaaggatatatcagtttttgtgtattagcagaaatgaattcttgggctatatattatttggcaataaatgataggattgcattacttgcttctttatgttggcaaaagtgtgcggcttctgctgaatcttttgtgcagttacgtgttatatcaaattgcaatagctaaattggcaattagattttgtttgttttcgaaatggggatgcgtgatcagtatatcgtgcagtttggaaggttcttaatgtcaaagtctatatacgtctaagtggacatgtaaccgtgttgcaaatttgtatgtatatgtaaatttactcgcatgtttctgcttttttcgctcataaaaatttgtatgtaccagcagttggttgtagttaatatttctgtcacttttcaggttataccgcacttccagggaagttggctgtgcgg

SEQ ID NO: 80076 - DNA, 819 bp, Citrus sinensis
  Intron number 1 from transcript orange1.1g014746m (locus o range1.1g014746m.g) derived from phytozome v7.0 (chr-ID sc affold00114; pos 411175 to 411993 reverse strand)
gcttcaattcttgagccttcaaaaccagtatgcatttattttcgccaatttttctttatttttctcttttttttttaattagaagtagggctgttacttgatctatgtgtttcttgacttcaatttggtgtttggctgccgagaaatttaaataactagatttttcacttgtaatgtaaaatgcaactgtttgcttttaggattttggttcaggaagtaagtagcaaacagttatatgtctttcatacttcggttacggtgtttgattgccaagaaaatgtaagaaaatggaagagaaaatgaaagactaaaattttcactagtaatttcaagtggatttttatgctttgttaggttataggttctagaaataaaaaagaaacggtcataaagaatgtagtccatgctacttagatacttctatgttatatctcttgttgattgtttggctgttaagaaagtgtaggaaaacgaaagaaaatggaagagtaaagtcaaaacttgaattttctcttgtgatttcaagtgcattttgaattctgttggcataaagattctagtttaggctactttcatactcttgtgttatatgtctcattgactgtttggttgctgagaaaatgttatcatggaaaaataactgtagtttttagttggaaaactttttaattttgtaattaagttgtattaagtttttctctgtttctgtattgacattgtgcaggtaactgtggttaagatcaagactgaagttaggtggttattatatctgagttctgattcttgtttacatgtattctgcagactttctttcctgca

SEQ ID NO: 80077 - DNA, 636 bp, Citrus sinensis
  Intron number 1 from transcript orange1.1g033403m (locus o range1.1g033403m.g) derived from phytozome v7.0 (chr-ID sc affold00007; pos 1620614 to 1621249)
agagcatcaaatcaaaagaaagggagtttacgtaggtatattatttattttcacgacgagagaaaaagttatcccgctagtttgggcagtttgttattggctgaaagcaacttagttgaagctttatcaattatcacggccagctgctcaatctgtctctaagttggtgcttacgcaagacattgcgccatcttgttgtgatcaaaattgaacggttgttttcaaccgcaaatctttgctcctcttcaagttcatgcaatccagaaaacactattattaattattagtaacttttttgacattccctcttcataaattaggttacttggcattcttccaggatttggtcttctttaaacttagtcgttgaaatttgaaaactttctgacaagtgctgctgctattggatgtcgctctcacattgaatcgtgtttattctttcggccgccaggttcactgaattcataaatgccataaatagtttcttctgctagcatatataaatcttttttatattcacaattataatattttttttttctgtttaattcactatattttgagattttatttattaaatctaaaattcatataaaacatctagggttccgtctgcaactatcttttgtttcagct

SEQ ID NO: 80078 - DNA, 614 bp, Citrus sinensis
  Intron number 1 from transcript orange1.1g002970m (locus o range1.1g002166m.g) derived from phytozome v7.0 (chr-ID sc affold00010; pos 1990651 to 1991264)
tgacaatttcaggggacccatctggcaattttgttgtaagtagtgtgaagctcaattgtgccagttttctcctaagtttatgataactatttgaacttgatagttttgctcagaaatagaaattattaacagattgtatggaagtttgaactcactggtttaagcctgcttttaggacttgctaaatttggacaatttcatagaacttgtctgatcttgacaacatgcttgccttatgatttaatggcagttgtattggcttcatcttgtcaatagatctatacttttacttgattatgatcatgctaatgttaaatgtcttggcacaagtttaattattgtctttggctttagctgaattaatggatatttaaaggagaagtagaagacttttgataacaagttttcaggtctttgtggcttcatttcattgtgcaaaatgtttatttattataattcttctgggggaattttgcatttattacatttgtttatgttcatgcaaatctgcttatttaaattacctttaattgtgaaaagtcacatgtttagattttgatatgattcttgaacatagatggtgattactgttttggtgcctacagactgcagtg

SEQ ID NO: 80079 - DNA, 643 bp, Citrus sinensis
  Intron number 2 from transcript orange1.1g029876m (locus o range1.1g029853m.g) derived from phytozome v7.0 (chr-ID sc affold00007; pos 1320520 to 1321162)
gacggtaatttacggccttaccctttttgcactcttgcttttcctttgctgggtttctattttcattcacttttgatcacaaacgtatcattcatttttcgtttttgatgggtttggattctatctgaaagcaacccagttcatgttgctttttggttttgtgttccgagcatcttcacttgtctgattgcatttttagtataagattgatgctgtgaaacattacagtagcgcacttcttgacataacaatctcaggtgaatatacgtacacaatgtttttattatattcatcacaaaataagttcatttgatcttgttctatcacgaatgagatattatgaacttgttctgttataaaaataagatcttttggcttgttatattactaaataagtattaacccactctgtatttgcctcataccatttaccatgcccttcaattctgatgctgaactactcttgtttttggaagataacatttcacttttaactttttcttcaattttgtttgtccttttaaaaaaatttagtctttatagttttccccttttcttttcctctagaattctatcatatgaaggtaaatatttgtatgtacatacagctccaatattcgagtgactgagatatttcagaatc

SEQ ID NO: 80080 - DNA, 758 bp, Citrus sinensis
  Intron number 3 from transcript orange1.1g026611m (locus o range1.1g023817m.g) derived from phytozome v7.0 (chr-ID sc affold00010; pos 96974 to 97731 reverse strand)
gaggtaatacatcatttcttgaaatcaaattgttccacatagcgatagtgtgccattcacaagtgtagagaggaatcatgaaaccatttacttgaattaactcttctgcactttcattgtttctgggcagctacctttttaaaaaaatttcaatgtttctgggcagagcacatttgagctagactttagttatatttttctcaactgaattgtgagttcacatttgtttggaagtacacatggatagggattttatcatttgcaaacttgactagaaatgattagtttgtggggccaaatagtgttggaaagataatttgtctcttttacatttacgtggacaaagaatctctcttcgtgttttacaattcttttctgcttctgccaactgctgcttctgagatgtttttttctattctgctgttggatattctctctgtctaccggttatgtgttgtcccaagtcatatacatataatcattattatgataatgcttatgagatttgataattataaatgcacattgtctttaatcaggaggtaagccatgtttcctctgcgtgcaaattgcctgaattatttatttatttatttttttcaatccattaagatgtcctgatgtgtttctttaaggcaatggctgaatcttaataccaatgcaacaacttcactgataaacatatgcactgcctttatattaacaattttctaagccttttaactgctcaacttgaaacagttcttgacccgtacaaa

SEQ ID NO: 80081 - DNA, 729 bp, Citrus sinensis
  Intron number 1 from transcript orange1.1g035740m (locus o range1.1g035740m.g) derived from phytozome v7.0 (chr-ID sc affold00286; pos 95705 to 96433 reverse strand)
ctcccctcccgccgcttctcctccgtcgctcccaggtccctttttgtttccggagaaaacaaaaaaaaaatgctgaatatcgtttatttatttttcaattacgctatattatcggataaataagtgaactttcctttaggtgcttcaccggtgtttgtagatctgtatcgttatttattatgtttcatttgtttattattagtgaattatgatttaacatttcaaataattttaattgttatgattttttataagtgtttccagttattgctttgaatagtatgaaaagataaaaaattgttctttttgtttgtgagtacatttccattatagagaatttggaatttgctgttatttgtggaattgatttgcatattgtaaacactctttttgagtctcagaatgtaataagtgggtcttctatttagatttttaaggttcctaattatcataatgaattttttttaactttactttcctttcagttagactttcttacaaacaaaagtttctttggtttttagtctctttttttgcttgttattgttgtttagtaaggctcatcttatcataatatttttgtttccagcttaacactatttgaattttgatttgtgctattctttttagagtatactgttaaatgtttttctgttctatttacattggttttgttacatatatttatttgcaggaatttgggggaactgggttgcactgcttcgtttt

SEQ ID NO: 80082 - DNA, 872 bp, Citrus sinensis
  Intron number 2 from transcript orange1.1g043995m (locus o range1.1g043995m.g) derived from phytozome v7.0 (chr-ID sc affold01021; pos 10994 to 11865 reverse strand)
gtgtcgggttaaaccctgagcccagctttcatcaggtaaaaataccttattacttgatgatttattgattttccttgttacttgatgatttattgatttttttcaaatgcatttataattccatcgtgatgttggaaaaattggaagtactatataaagaagtgaagttattagctgagcttgacagaattgtgatattgcttgagatgccattgtacaatacaacagtctggttgacctttgtctcttagaatagataaatggctgcaccaatggacatttgtcgaaataatactcaatactgagtcttttagatgtagtgtaaaatgaatctatagtttggcattttcttgattgatttatcgcttgattttgtagatactgaacatagggggaaatgaagacttctgtgctatgtgctatgaagagatttgagatgttttctcttgtctgttctttttaaatggcacaattagtttgttgggtaactttgattattggtcgaggaagttttgctcatgtgaacatttaccttaggggtggttaccatagtggaagagttgactttttaacgtctgatgttgattggttggcttatataactggatgttggaaatcatgccatcttattcattttagtactgttgtttttcctcagataaagttttggcttttgtcagtcatgtggttaaggagtcaaacttctgagtttattttattttgccagcttgacatgcgaggggatatgttttgtttgctttctgcacatccattataacctttgctgtctcttcatcatttggatgctatcgacccaattttccctaatatgaacagaagcaagctctgcaacatcttttcaaagctgtgaa

SEQ ID NO: 80083 - DNA, 376 bp, Citrus sinensis
  Intron number 2 from transcript orange1.1g025470m (locus o range1.1g025492m.g) derived from phytozome v7.0 (chr-ID sc affold00025; pos 252271 to 252646)
aggcagttttcagacgcatagtgccaacctcgtgactagcttgggtataaattttttctgctcaagttttcttatgcaggtgactgtcttggtagagcaatggatttgatgttggttactaaaatttctgttgtcaaaattagtcttattttgaatgcttgctttttgaagtatttgattttctgtgaatttaatattgctatcatgaaaacaacggattagagttataccttacattaatcgatctcggttttttgtattcagtgtagggtggaaattcttcatgcatacattgaaagtttcttattttaaatcataagagttatatttgggaaattgactggatgaatttttccaggaggggcagttgcattga

SEQ ID NO: 80084 - DNA, 569 bp, Citrus sinensis
  Intron number 1 from transcript orange1.1g028318m (locus o range1.1g028318m.g) derived from phytozome v7.0 (chr-ID sc affold06685; pos 185 to 753)
gaaggtgttgtcaatacctttctgttgcatttgtgtatatacatgatgcgcttgtacatgcttgtagcatttattgcacaatagtttagattagctttgtttgtcgttgtggtgaaatatgatttatggtttgcttacttgaaaatcagaagtgatggctggctaaacaaattatatgtgatatataagcatattaatgtttgattttaacgtaatcatttgtctttgttttgaattgatgaactgctttgaataatgatgaacaactttttgctttgaattggggattgtggtttagcaagctgtgtatttcagtttgcaattgtgaactggatactgagtgctggcaaatgcatacacaaagatgtttgttctgtgtacttccatttctccttgactgatttgtgagattagaaattcaaaattcttgagggactgctgcaatgttttaactgcttgttttctttaattgtttgttacttctatagttagttggaagacggtgatgtgcctcaattctacatcacagctcgtttgacctctttaaccggcatcatattgcagggaat

SEQ ID NO: 80085 - DNA, 650 bp, Citrus sinensis
  Intron number 2 from transcript orange1.1g046992m (locus o range1.1g046992m.g) derived from phytozome v7.0 (chr-ID sc affold03727; pos 4653 to 5302 reverse strand)
gctgaattcaaatcaactcattggccacattccaagttcatttggcaatttaatcaattttagatatttactcctctttgataattgttgtgcacggaatgtggaatcaagcgcaccaaataattataaaaaaataaaagacacaagaattacgtggttcggtaattaaacctacatccacggagggaagaaagaataattgtttatttaacaattaatagagtacaatatttgagtaacgaatctcacttcccagaaacccaaatatacccagtactctcacactctgcaggaaagataaatttcccagacacactctctcacttctctcaaaagcttagaaacttataagcttagcaattttgagatgatctcaaatgaatgaaatccttagctatttataggagaaatgaattactatgctaagaataaaataattaaaaatataatttttaattattattatttttcaaatccatcccccattctttcttttcggctttacaaaatcaacaaattgttagtgcaccaacaatttgttgacttcaacaataatgagctttctcattccattatgatagaaatatggaaattaaaagtctcttaccattctagatttgaggcaaaatcaatttaggggttttctccct

SEQ ID NO: 80086 - DNA, 955 bp, Citrus sinensis
  Intron number 2 from transcript orange1.1g036007m (locus o range1.1g036007m.g) derived from phytozome v7.0 (chr-ID sc affold12153; pos 730 to 1684)
atttcgaaggtatttttctttctctataatttttaaaaaatttgaagttctgatcaggcacgttcttgttgaaagaggaaacaactaattaatcaaactattattagtatgggacaataatagtgctcattttcgaattattttagatgattttataaggaagtgtggggtccttggtctctaacagtacaatggatgcttgctcccttacagtttacatgcactaaatttcataggttttttcgagattttgctgctttctgattcagtaatttcatatattcttgaagtttatgccagcttcagattcagtttgtttctcttgctatagcctctaatgattgactggtaaatggtacagttgaatcaccaacattggaatagggtttgattgttgattgttactaggatggcattttgtaccatttatatagatatcggggtataaaggtattaatatcatctgatatggagtaggcaaatatatcatggcttacagttagaaatcccacatgggttcatttatttttgaagttttgctgctcttaatggtacatgatgctgcctagattttgtagaattaagttatcaattttttcacttggggaaatttgcattggaactgtaacaatttcttaaaatgagttggatcgctgatgcttgataaactgccaaaatattgcaactaaatttaaggttacacaccatatggttatcttgtatacggtttaagcagtcttgatctctgataacaccctaaagaatttttagctgtttcattgtgttatatatagatgagacaagagctgaacatttgacttcagtaattaatagaattttgattatagtgtcagatttaccattttcctgttccactcttaggaattgtccttctgctatatgactcattagtttgcatttggaaattccatttcttttccagcgacttctttca

SEQ ID NO: 80087 - DNA, 643 bp, Citrus sinensis
  Intron number 1 from transcript orange1.1g034956m (locus o range1.1g034944m.g) derived from phytozome v7.0 (chr-ID sc affold00025; pos 1058977 to 1059619 reverse strand)
gaattctctgtatccctttgtaatcctctagagtggtgagtttttgtttaatccaatgtcattacgcccttgtgttgatgattatactgatactagaatctatgcctaatcgctaatttcggctctatcctatctaatcgaagcaatcgtctttgtccgttgagcctctcttctcctattgtactttagttagaacaagttttttgggtaaaattgttgtacacaattatagaaatgcagacagttttgatgttaaaggcttggtcatgatacagttgtgatgtcaaagttatgtttcaaatgatctaatgaatgaaaatactattctgtttatttctccccttctttttctgttccacgctattctactctccctgagttggttctgctctcaacctctttctggcctctgaagacaattgaggataagctacatatgaatttaatgaatgcatagaccatatattatcttctaggatattgtagtttacttctactacctccaatatgcatgccatttttatcattgcttcactgctcttagttttagttttaacttgtaaaagtttgatgtcatgatagtccatttcagtttcttatttattacatattatgtcagtgttaaaggatttactgaagtggc

SEQ ID NO: 80088 - DNA, 607 bp, Citrus sinensis
  Intron number 2 from transcript orange1.1g016049m (locus o range1.1g016049m.g) derived from phytozome v7.0 (chr-ID sc affold00004; pos 1822062 to 1822668)
ttcagaaggttaggtttctatacaatcaagtgttttgactatattgattattcatttcttggatatatttctgttaatcatatttgaacgctttagttattgataaatgtagcgcactagatttgaaaatcctctgcaagtataatgtaatacgagtattttcttggcttaaagaacgactctgaatatttgaacaggagttccaattgaactatattagatttattacgtatcttgagctaggttttgatttctttttcgttaaataaatttataaactgtttagaatgagtttattaatatgacttataaatgggtgtcagactgtttaaaacctgaacattaagtcctaatgatgcaatttaaagttcctctatttttcctgatgagacgtattagttggctagttactccattaccctaaattcaaaacctatgtggctatgatctgaagttcataagatttgttttatgattatagctcaggagaaaaaaatactaataataagtcaaacttatgaaaaaattatgaactggttttcttcttagttttatctaattgtcactcacagatagcaggaagttgataggcttcgtgaggaaagaa

SEQ ID NO: 80089 - DNA, 646 bp, Citrus sinensis
  Intron number 1 from transcript orange1.1g007301m (locus o range1.1g006454m.g) derived from phytozome v7.0 (chr-ID sc affold00175; pos 109238 to 109883)
ttttcgttaaacagaagcgcttttctggtaatataaatcttgcccattctctcgttttcttcaagatcattatctttttcatttcgaaaattgattttttcttttattttgaattcttacagattgaaaatttatctttttaatcatttttcttctttttctttttcttttctttgggtgagttttcacttgatttgtgtttatggctaatctgttttgaggtcattattctctgttcctgcataatctttttatcttctctgacattaatgaaatttcaagttttttttccttttctggtccattttagctgatttgtatatctgagtataaacaaactcaaaattcacattttcctgagaaaaacaaaaatctttgttcatgtataattctgttcatattagctcgtaatcgcaatcaaaatttcagttttagcttaacaaattaaaaaaaaaaagttggtataagtaaatccttatttgggttatttatttttttccccctaagcatccacattaaaaaaattcaaaaattttaatttttttagctccttgttgatatttcatattaagatgtttaattaatttgtttttttttttggtgttgatcagaataatcctgcgagcatatcaggctcgttccctga

SEQ ID NO: 80090 - DNA, 779 bp, Citrus sinensis
  Intron number 2 from transcript orange1.1g007301m (locus o range1.1g006454m.g) derived from phytozome v7.0 (chr-ID sc affold00175; pos 110092 to 110870)
cagcctgtcaccccttggtctgtctcagttgctaggtaattatctcaggaatttgattgtttgtgtcagattaaattgaattttagagttattgatatatactttttgatattttgtgtgttgtttgatggagttaattctgttgggattcatttgttaagtcatgtaatcttatactcaagtgcataagcttttgtgttgtagtgtcatttagttaaagagagagtaaaacctttttagttaaaccactcaatgactttttcatgggacttatgtcatcaatcccaccgttggatcaactccaatttcaatgaatgccaattactacatgtaaacaggtttttttttttttttcttaacacaatttcaattggattggccaacgtgatgagtgcaatgatttttataagaggaatgaaattccaattgtttggttttgtgattcaataacaattggtgcaaacgttctcaacttaattcaccagataagtacatcaagaatatgattaattgtctggacctttgagattactatttttgacatttgtcatcatttttggagataggtataattcatttccagctgtgactggtaataatgtaaatgtaatgcactattgttgatgccataactccataagaagggtttcttgcgttatctttaatttgttattgaagaatgatatgtaattttaccttccatttaatatatatatatataaatatttttttcctttggattagtgggtattctttgttgagagatccacaccacaaca

SEQ ID NO: 80091 - DNA, 806 bp, Citrus sinensis
  Intron number 2 from transcript orange1.1g013662m (locus o range1.1g013629m.g) derived from phytozome v7.0 (chr-ID sc affold00254; pos 187350 to 188155)
gacgttgtctttcattgccgaattgattttgacaggtttgttgttttggcctaattatgattttattttaggtgatatgttaatgcatgaccggcttaatgatgcttctcatttaccaattgaatttaatgatgtggaaaagttgttttattttctatgctgagttctattgttactaaatctcctcctgatagaattcgtaattggtttctttaatattgttaaattggagggcagttcctcgtgctactattccatagagatgtagtttttaagagagtgaagcttatcatggaaaagtttgaccatcttaagagagagagagagagaaggctgaggctcaattaaccaggtagcccagcaatgcaaatgttatcgattctgtagttcaattatgcagcatctcaaaattgtgaaatgtatatttaaacttgagcgtcaaacttaattcatggatcacaatcgaccaatagcttcaattgctcatatgcttgcaccaacgaaatatattcatggaggggtagacttgggcatgtagatagcggtttagtggtaaggtactgtactgttgaagatttctttttatgttagttttcaccaaggacttcttatgtgttcttattagattgataggaaattatcttgaagcataattttctatgttcttgcccattcccccgacccctccttctcaaccatgcttcttcagtttctagttagatttatattcaatgagctttgttttgatttttcataggctattctcttgcagttctgtttctactggagctattttggcttgcagc

SEQ ID NO: 80092 - DNA, 625 bp, Citrus sinensis
  Intron number 1 from transcript orange1.1g013715m (locus o range1.1g013715m.g) derived from phytozome v7.0 (chr-ID sc affold00258; pos 179363 to 179987 reverse strand)
ctctctgggtttaaggatgtatgtcaactagttctattttagttgtttatgtctttgaattaattctttagtggtttgcggtcatgtagatgcgattttttataggcattatctagcatagatacctggtttgttagtgatgaacgtctttaactacttctgtgaagacctcattcatttttcccctgtctattggatcctccttttactcaattccatttgcacagttttttatctaataaaacaataatagaaataatcaagagctaaataatgatggagaaacttgtacattttctgattccatcctgtgtaacttgtaatgaaatttcttttgttagaaggcacagttgtgaaccatgttctgaaaatagatgcacctatgccttctggacaactctttatgtgcccaatatcttaagaattaacctttctattctacttttgcatgttgagtttttgaaacatgttttcttgagtttgcattttcaccacgtttagattttgtgaacattgatagattcaagtgtatattagtaatcttgcttggcaattcatttttttttcttttgggacacttattctttcagagtgctgagttttagatcattggcttgattattca

SEQ ID NO: 80093 - DNA, 657 bp, Citrus sinensis
  Intron number 1 from transcript orange1.1g032383m (locus o range1.1g032383m.g) derived from phytozome v7.0 (chr-ID sc affold00115; pos 179737 to 180393 reverse strand)
gggtatgcaaatgttctttctctttgactcttaactcaactttcataatagaatggaatcagcttttggttacaaatctaggtttttatttaaaaaaaaaaaaattagcacaagtttttgagggttttggtcggttttgatgttggtttcattctacttgtaaaattcccagatgctcaaaagccaacgaagacaaaagaaacaatatttataatttttttattttcttttctctttgatgctgggcataaattgtgtgactcattgtattatttgtaatgtgagaactgctttgaactcaaaacattaagcaaattttctggtgatatgcctctgacaaccaataaatgttagttgtaattagctgtaagctcatcaagctattgctgcatgtggggggtttagtgaattagattctgggtctggttagatatgaaggttgtgggtgttctgcccgaatgtttggtatcaatttggaactttcaatttgtttattagttggtcaaattttcagaaggtctttcacacggtgcatgtgagaagtgggaaggttactgatattctttatacggctagttcaagcttgcattttttggtcatataaatttatattggttttgatatgaagatcaattggcttgcaggaagacacgtggt

SEQ ID NO: 80094 - DNA, 399 bp, Citrus sinensis
  Intron number 1 from transcript orange1.1g034629m (locus o range1.1g034629m.g) derived from phytozome v7.0 (chr-ID sc affold00407; pos 75321 to 75719 reverse strand)
actcattcacaggtctgtttatctgtcttgcatctcttttactgtctgttactgtttgtgctccatgcaaattggatgtagtggtactatggttctggcaatttagtccttgaaaacagggaactttgcagccctcagaagaaaatatgttataataatgtgtttgtcggtatggaaagtaatgtcatttatgtataacttaataggtgtcaccgtatgtagaattcaaattaaggcaataaagaaggccagaagggtgaatatctaaagggagatgacgattataatttttcccctcatgaaacttaaggggcttatttttttcctcttaattatcaaatcattttcttttttatttgcacagactgcggtaaacatgatccagaattgagtgcagaa

SEQ ID NO: 80095 - DNA, 465 bp, Citrus sinensis
  Intron number 1 from transcript orange1.1g010213m (locus o range1.1g007799m.g) derived from phytozome v7.0 (chr-ID sc affold00026; pos 748867 to 749331 reverse strand)
gccaaaagggtccgagttcttgagctctctcgcaggcaatttcctccccctcttttacatataatatcatttgaattatgtttatataggcgtgtatgtgtattactcatacactgtaattaatgttttttttttcctttttcatttcttgtatattaaatgtgaaagaggattaagcatcatcacttgattaatcaacttttggttctgaccataccgagagatgtatggatatgggacccaagatttgtcacttctttggagaaaatgttatattctggcatagtactcttctgtaaatgtatataattatgtgggggggacctccaagtatgtgtcatgtttattcattggatgcttaagatgttattatacgtgtagaagctgacgttgatgtgatagaattcttaattttgtaaaacacttgcagattgaagcatcgcggtccggactggagtggactgt

SEQ ID NO: 80096 - DNA, 1000 bp, Citrus sinensis
  Intron number 2 from transcript orange1.1g023891m (locus o range1.1g023948m.g) derived from phytozome v7.0 (chr-ID sc affold00254; pos 147288 to 148287 reverse strand)
aaggcatgtttataccagatctctctcattttttctttttggtagaggcttcttgtgtgttaggaatgctcaatctcacacaaaattttcactcaagaacttctgcttaatatacttaattgttgtagagaagtcgaagattcatagttttaataagacgcgtcgcatatacattttttcatgtctgaagtcgaggtaatctgcagccatgatgatgtaggtttagattattttttaatcttcttacgtttcttattatttaatctttcatttatgtgttctgagcttcatagtatattcatagttgttgagagttattagaaactatgtgaaagtcagtaattgaagtcctttttcactttcagtatcttatacaatcttttggtggctatattaggattcggtaccttgacatctcacattttctttttttaaataatgaaagccaatataatttgctttgtactgttcttgagtacaagaagcagaagcatcctttttgtatgaatggagggcttttctttttttattctcccctctcttttgtctagggtcatatagtttttgttaatgtattgcaaattaatgtgctagggagattttttctctttgcttttgttctcctcatatttaaccctgtgtgtaattttcttcattttatgacagattttgataaatggcacttaactattttgtatttaatctaaaattcacttgaagttttatttaagaaaagaatgctactgataaagcattaaatttttcaaaaatatttaacttctttcttttggttgcattttttactttccattacgttttctacgtgattaaattaatagtttttgttcacacacccgagacatacttgtagtttatgaaggactaaaggttagatatgcctcaaatgttcttaaaaagtatgctgtaaactttaattcctaggattcatgtctacggtgatgtaggtcaaggggttgattcttctagatcatattttcaa

SEQ ID NO: 80097 - DNA, 611 bp, Citrus sinensis
  Intron number 1 from transcript orange1.1g028359m (locus o range1.1g028249m.g) derived from phytozome v7.0 (chr-ID sc affold00004; pos 606548 to 607158 reverse strand)
acagggccgagttcaaggaaccctgcggtgtgaacgtatgtatactgtactcatagataaatcaccatggtattatttggtctttgtccagattccaggttaacgtgttttttgaattggacatcattggataagaatgaggaaagttgtacgaagttggaatctaaagtttatgctgcatctttgttgcttttgctttttctcttactagctatgggacaaactgcggaagttttctgatcttgttttcaagatcatatacctacaccctcttttcttttccttttatttttattttgaaggaaaattgtgaaactttatgtatatggccaaagatctagcttgttgaagggaaatcaaattgatttctgtaccaacagacttccatcttctaatttgttgctgtttatgtgtctgtattcctaacttttgaaacatttaatacttctcctgtgagtctgtatatatatattttttaattctagctgtttactttaatcacatgctgtaaatatacttgaactcttttttggtattccatttttcttgtagttgccctgactttctttggaacaatgctgaaaatatctccttgactatgcagattgcta

SEQ ID NO: 80098 - DNA, 756 bp, Citrus sinensis
  Intron number 1 from transcript orange1.1g014218m (locus o range1.1g014218m.g) derived from phytozome v7.0 (chr-ID sc affold00197; pos 149290 to 150045)
gccaaaggtatgtatattaataacatttaaacccactatttttcccttgaattttaactgctttcttttcattgtcttctggggttgctattgtagattttcaatccacatttgccatgaaaataaatgaagtgtctagttgattagtcattagctgtttaagtaaaactgggtgttttctcaattttctttttagctacttgggattgaggttttgcggcttttaatctctagagctgccgtggaatcgaaactctgtttctagctatcaactatgagggggtgtgtgggtgagtgttaaatattggctgccaactaaaaatttggatgtttaccaaacactttaaattgggatactaaatcccgcctggactataattataaaattaagcgggcatattggctcatggccttggccatccgtcccttacatgccagcttttaagggtgatttctacccatgggttcattttaagctgaactataagttacaaacatgccataattcttgtgcttttaatctcaagagctgccatggagtgggcttagtagccagtaggagttgttaaatatcagttgctaacataaaatatatgtggctgtttaatcaaaaccatgctttcaacattaagcacgagcgtagtagttacaaacattataatattgttttggtgccttatacaaatgggaattgagatgtgtagttttgattccattgattggtttggtgatggtgatttgtagatattgtgaggg

SEQ ID NO: 80099 - DNA, 878 bp, Citrus sinensis
  Intron number 1 from transcript orange1.1g016970m (locus o range1.1g011418m.g) derived from phytozome v7.0 (chr-ID sc affold01144; pos 33527 to 34404 reverse strand)
aaggagaagttgaaaccaatcattgattcgtttcggtaatccatctatctacagcctgcatatttgtataaatatatctgctcttgctttggctaattctgtggtgcaaatttatttattttattcgtttaattcattcgagatgaattgttttgatttgatcgaatcatcaaaccacgagtaatttattaaattattgtaatatttttagatcttagattttatattatcttagttttatatgtaatttattatttggttaattcaatatttatgtgtttatgtgatttgtgtaattcatccaattctttagcttctacagaaatcttaaggaacacagaactagctgaagtctgtagagataaccatttagagctgtgagcttttagagtttcggatattatcttagaggtgaatagcattagggaaggaagagaggtgaactaattctttggtctttgaaacaatcaggctaaaaaagctgcttaattgtaagccactaatttgatgaggtttttctttttgtcattttgaagtttatattttattgctttggtatgctagggattgaggcttcttggattcggcaacttctctgggatggaatcactagttgccaagtaaaagttctgggtggttaatgaatattagctgcgacgtattagtgggcatataccaaacactttagttgttaagctttcaaattgaaattgaagcatggcagttacgacttacccttaatgagtttggtcttttgtttcctttatttcttctttgatatgcatatttcttgtgttatggtttttgtgagaattcctttcatctttcaactttgttttgcagataaatttttgtaaattgggttgctttcgtgagcc

SEQ ID NO: 80100 - DNA, 846 bp, Citrus sinensis
  Intron number 2 from transcript orange1.1g016815m (locus o range1.1g016815m.g) derived from phytozome v7.0 (chr-ID sc affold00229; pos 40177 to 41022 reverse strand)
tttcagctcttcaggttcgacaaaatctttgaccttattgccatctttaccatcaagttgcatttgcgcttcttgaaatcatttcttcttagatgatttgttatttagagtaatggcttgtctcgtgccatgttattttactttaacatagctgggtgaataatatgcaaggtttatataagttagtttgttttcctgggcaattgagtcattcaaataagaaatattgccttgacatgaatgctgatgccttctcttagctattcacttttatatctaatgaatgacaatctgtaatcatattgaatgcacgatttttatccctttatctggtcttgaatgtttcctgtagttcttgtgcatgtaagtgcagagaacaaggcatacacatgcttgtgaattgtcatacctctatcatataaggctttttttggcattctattggtgaacccctgatccatgtcaaagaaattatataagtggtgcataatggaaattctgatgaattgtgttttgtgcaataacttctgtttcatcaggtggttgttcatatatttgattttttatgcaagtgacggtcttttgattgcaaaagaagggtgccgttttgctgttattgaaactttcatttgctttactatatgcaatcaatacaatgttctgaacctcttaaaagttatccatcaattataattagaagttcattgctcgtttatggggagaaagttctttcttattttaacactaaatattagattagatcagagttctgcagaataatgcttacatactgaagtgggttaatttgatttacacttgcagtttgagtgggcttggcagcatcca

SEQ ID NO: 80101 - DNA, 434 bp, Citrus sinensis
  Intron number 1 from transcript orange1.1g016815m (locus o range1.1g016815m.g) derived from phytozome v7.0 (chr-ID sc affold00229; pos 41113 to 41546 reverse strand)
cccccgtttcaaaggccacacctatatcgggtgagctttcaattctctctctgtctcttcaatttcaaatttttatcatctgggttactttgttgatcactaattagagctctgatcatatatttttctatcacttttttatctcaagattaatggtttctttttcttttttttcggtacgtattttaataatatatttgcatctctgatttgattcttgaaatttctgctatggtgcaagattttatccgatcttaattaataagggttcgtgaaagactagagcaaattaactgcttttattgattgtgtctgatacatatgctgttgataattcatagctaaagctaattttaggaattgggatgcttatctaatgctagtattggatcactgcagattcactgtgaacccgcgtcgtagaattaggcagc

SEQ ID NO: 80102 - DNA, 831 bp, Citrus sinensis
  Intron number 2 from transcript orange1.1g028825m (locus o range1.1g021938m.g) derived from phytozome v7.0 (chr-ID sc affold00038; pos 762461 to 763291)
attgttgttttctcattttcttttggtcaacttgaggaatgtacccctataaagacatttatcaattttgcagtatttctcagatgtaaattcataattaaggtcatatgactcattcgtgatgggcaaattatttattgattttattgtgtatcaagttgtgaatgccatagtcattgcgttgatatctttagcaatatagcttttttatgaccagtttacatgtgttttgtctaagaatttagcttactttgttgacagtattaatatgattcttatgtgctgattgttgtattattttgataggtttacctccaagatatagggattccgtccgtgctataacaccaggcttacctctttttctctacaactatactactcaccaactgcatggaatatttgaggtttgttcttaactttaagcctttttaatatattcacagccattaattcagaaaaccttgattacatcagggattaaatggaactatgattcttttcttatgctgatgtttttgaccagtggtttctactttgcccctaccttgtacacatttaatttttgtgaaacacttgagcttcacaaattgatttaatacaggcaactggttttggaggctccaacattgacccaacagcctgggaggacaaaaagtgtaaaggggaatcaaggtttcctgctcaggtaaaatctacattgatgacatttggactttgttttattcaatgcatctcacagttttttacttagcacaaatcttttttactcactgctttctgaaatcataaacaggtaaggatccgggtaagaaaactgtgcaaggcatt

SEQ ID NO: 80103 - DNA, 351 bp, Citrus sinensis
  Intron number 1 from transcript orange1.1g017147m (locus o range1.1g016950m.g) derived from phytozome v7.0 (chr-ID sc affold00007; pos 820556 to 820906)
gataattttttccccttttcttgagtttaattgtaattagttaatcactctgtttacccgatccgtgctttgagctccgttcaacttgtttttcaaatgatttttttttgtttctggtgcttgtatggatcaaacttgccttacttgcttctattaaattacttttggatttaatatgttcgatatacctgttactcgtgaatgatcgtcgacttttatttcatctgccttctaattttggtagtgtaaactaatatgagacatcaaagtaaatgatttttatttcctactagttgtcttctcagttgagtacatgatatgaaattgcccttgtaaaatgttttgcaggag

SEQ ID NO: 80104 - DNA, 827 bp, Citrus sinensis
  Intron number 1 from transcript orange1.1g041808m (locus o range1.1g041808m.g) derived from phytozome v7.0 (chr-ID sc affold00010; pos 1105328 to 1106154)
gagagtgagagcttctcattttcattaaacaatatgataaattaatgtattccttcggatttattttatatatatattccaatccgaaatttaaaagtgtgggaaagtctgaaaattaatatgtgctttaagttttaattccgcttaatttctagactttcctatattttaaaatttcggaacaaatcgggactatatatataaaatatttaccaaatttttaattatatgtacaggaaattaattgatacagaaagaataaaagtatttcattcatagtttcatgaatgaatcagttagctatatatgtacttgtatatacacaataggaagatgtcaattccaatgcgtaattgatgtatttgatttattctaaaccatttttattatttactttttttgcaaagcaatatgatttgaactcgtggtattatttttgtagtgaatctgatttaatctgcttaaattgatctatccaatagattttagtcaatttcgttaaagtcaattgaatataatcaataattgattcaatattaacgcagtccaaaagccaacagaataacaaaaagttcggtcgaagtaatggtttcataagattcaagaaccgatgattacagttggaggacaattcccgaagaagaaagaacaacaaaaacggaaaacactgctatcattggcatcgaggttttgaaaattctcgtctcgtccattgacagagactataatatttcttctgccatctcgtctgctaatttctactctggcgctgcattggctgtatgaataataacttgttctaattggcttcgaagaggtatttggtg

SEQ ID NO: 80105 - DNA, 528 bp, Citrus sinensis
  Intron number 2 from transcript orange1.1g012877m (locus o range1.1g004567m.g) derived from phytozome v7.0 (chr-ID sc affold00046; pos 345765 to 346292 reverse strand)
agctgaacatattggtctgcacccctggtaggcttcttcagcacatggatgagactccaaattttgattgttcacaacttcaggtcaccataatgttcttcttaaacttatgttgctgttattttttagcttttaatgaaagaaagtactagttagtactgctaataatttatgtgagtaaaagaccatcttattatctaaatttgacagtatgtttctaacttggccatccagatttagaggcgatcttattttactcttcctgttttcagaaactctttagtagaagcaaacttgtatccgttgtattagtatacctcattcctcaataattttcctttgcccaaccgcagccctttttacccactctttcaaccacactatgtattcactatatatgttataattcataacctccttagatataacttgttgtgcattttgttgtttgtttgtttgctgatatgagtgaaaattcctggctggggaacagattttgatccttgacgaggcagatcgtattcttga

SEQ ID NO: 80106 - DNA, 904 bp, Citrus sinensis
  Intron number 1 from transcript orange1.1g032032m (locus o range1.1g032032m.g) derived from phytozome v7.0 (chr-ID sc affold00082; pos 437998 to 438901 reverse strand)
tacaataattccccaggagaatcctgtggttacaggtactttttcttttccttaaaaatcttactcttccctcttccaattcaagaacttattgtttaagctaaacctaaattaaacaacttttatgttctaatatattgtctactctggatggtaactttgtttctatgcgtcaacataacatcttcttgtcggcaaattcatgatatatatatatatatatatatatatataggaaaccattaaggggagtttatttttcttagtatcttgtttgaattgcagttagaattttgcttctttgtttctaaaataaatgatttttttttttaaaaaaaaggtaacagattggtaaagtctaatttagtttttagttgttccttattttttaagatttgaaccgaataattaattaaataaataattaatcttttaaccttcggacaaaagagggaaattttttttgaaaatcttgttttgttttcaaatatacaagtaaagactagtttaaaatctaaaatataagaatttgttttgactctttactgtctttacgtagtgtttagtagcttctccaaacccaaaaagtaaaaaaattgtaaataattaaaaataaatcaaggaatttttgcatccccccaacatgccaagattacttggcatctgcaaaaggcaaaatattccttgcttgtggctgtggatggatcgccgtggaaactttttatgttaaaagggcatgtttatggcccaattgggccgacagatgcttgtgccctgggcccaaggcccatgcaagcaataattcgatgcggtggtagcgacaaatagtacgtccgcaatgattttacatggtgccactttttctgtagacactgataagcaacaaaacgtacgcccaatactc

SEQ ID NO: 80107 - DNA, 542 bp, Citrus sinensis
  Intron number 3 from transcript orange1.1g022546m (locus o range1.1g022546m.g) derived from phytozome v7.0 (chr-ID sc affold00007; pos 550694 to 551235)
tacctgttgctggtatgcttaattatgtcttaatattacaggtcgtttgattgttcatttgtctgcctgcctgccattttagttgacagagaatttttaaaatagggaagacatttggtgttcaggagaaatttttttgatgtgattcatgaaaccgtgcgcaaaacctgcagaatagatgctattctccatttgctgttttaataaatttaagaaaaccagttaccttgtcttcctgctttgtgatggtacagtcaattgatttaatctgttttaaacatcatatggaatgctgactccagcttttgttttggatgccaattcctattggtctgccagtatcgatgccacagtcactttcattctttaaggtcatcaggcaatggtgcttccctagtgctttacgttatcttaactgatgataaacaaatgaagtccctagatttagactaacatgcttttatttcttagggattgtcaataatccttgatctgagttctgatttgatattttgccctgtctctacttgctgcagaggtta

SEQ ID NO: 80108 - DNA, 794 bp, Citrus sinensis
  Intron number 3 from transcript orange1.1g013633m (locus o range1.1g013633m.g) derived from phytozome v7.0 (chr-ID sc affold00007; pos 2656299 to 2657092)
tcttcacagccttcagaagagcgctccagtgcagggtaagtgataagtggaattttgtttatgttatgagtcaatttttgtgtctcaacctactatttcatatgggaacattaatttaatgcagggttgttatgctacctcatattagccataagaatgctaaaatgcaactgctgtaggctataacattcaccagttcatcctttcatatacgaagaaagtaggtttttatgctcacctgattgaaattggaaattttattgtaatgactttgtttctgttttcaagataacttttatgaatgttctattttccactctagtaaagtccacattgacatttttgtatgttcaatattgtcaagaagttaggatttttcagttagtttgaaagtcttatcagaataaagttttagataattagtttagttttaaagtcttatcggaataaagttttagataatctttttttttaaattcaagtttagataagtatcctacaattaagggatatctgttaggagtttgttttctacattctatttaagtgtaacttatagaatgaatgaaataaggaaaatagtattttcagactctaaatatttacaaatatgttagctttttgatcaaattttatgcatgaagcacaagtactctgtccattttttgtagttgtttgcacagtaatatcgagtattatggtggtcttttaatttttttcttatttttaatattttaattttattgattgtacatacaggagaaatttagaaagatcaggaaaacaagagaata

SEQ ID NO: 80109 - DNA, 572 bp, Citrus sinensis
  Intron number 3 from transcript orange1.1g047406m (locus o range1.1g047406m.g) derived from phytozome v7.0 (chr-ID sc affold00027; pos 252048 to 252619 reverse strand)
ctgccggagtatccttgggattgacatcgactctagtaagattttacctaccctcttaatgtttgtttgttgcaattatgatttaagtgggaatgattcatattttactatctttataaattcttgggtttcgatttgttcagcctgttccagggaatgtgatgttgttttaatttatattctagttgggttttgaaattagagtttttactcattgcattgtcggtgccctaattgcattgtcttagccatgatattactgatgagtgcccaagaaatatcgtcaattgttcttgttggacacagcatacagattggcagacttctagtagtctgttttcatgtctagatggtaggtatgggtatatgtgcaagaattgcatgtgtgcatctgattttggatttcttgttcttaatgggtaaagggggaattggtgattgcttttgttttcagtttgtatgaatttaccatcatgactcatatggagtgctcaattattaaagttaagattgttaatttgatatgatggacatatcatacgtcttcttttctcttgcagatcgtgttgcgg

SEQ ID NO: 80110 - DNA, 720 bp, Citrus sinensis
  Intron number 1 from transcript orange1.1g030660m (locus o range1.1g026423m.g) derived from phytozome v7.0 (chr-ID sc affold00046; pos 558320 to 559039)
ttcttctctctcagcaccctattttcctttcaaaggtatgttttcattttactttttttttttttctatagttagtttgcatgtttaagcaaaagtttggacttggaatcatcttctatcttctaataagctttgttaactcagttgtttagaaataacaaataattgttatcaatgtggaatttgaagttctccaatgtttctatatgctgtctcttcaccgtctgcaattagtggccaaatcaagatctttgatttgagggttattttgttataaataataactaacagaggttacagtatgttaaagactacttatagaggacatctttgtatgatatggaggggtcattttgtggtgaatgacatttaacaggagccaaaatacaaataagatatacacgggtcctgccttcaatatttttgctacaaaattgggagaggttgagttcataatcattgatcattgatggttctgtttttagttttaatttgtagtaacaagcttcgatcatataatttgatctcagtcacttaaagtcaatatagagttggctcaatctgaccaaaataaaaatctaatgttaattacatagtgtctggttatgatttgttgaagttttaagtgattttttaatttatctgattgaatgaatacttaatatgatactgaggagttttgagatgactgaatttggtacagattacaaagaaccaaca

SEQ ID NO: 80111 - DNA, 585 bp, Citrus sinensis
  Intron number 1 from transcript orange1.1g009803m (locus o range1.1g007404m.g) derived from phytozome v7.0 (chr-ID sc affold00238; pos 98846 to 99430)
acccctgtgagtctctctctgtttttggccccgtggtaattcttttatttggttatgtgcattatgaatgccgctcgaatgggtttgtttctattgggatttctaaggattgtgttgtgtttttattttgtggattttgagtgacattcagttacatatgacttcatttgaatcagaactgaaatgggtgtgtttgtttttgtgcaaatagaagagcatttactcagtagtgccctgtcttcaattagaattcaattgggtttgtttgttctgtgatttttttttttccacatgcccgcaagctgtgttgttctctcaatgtctacatctctgttattgcataacggaattcattacctgaaattcaatttgtttttcaaattttaaatataatgctttttcttaggaaatgtcccaaaattagtggcaaagggatcaaatttgttcaagggaaaataaaccaagatttatttttactgatgttttgtatggaatcacgagttttatataaattaatttctttttctggatcttttatcgaattttgtagcaaaaagtaaagagcctatctgtttccgtacacat

SEQ ID NO: 80112 - DNA, 1066 bp, Citrus sinensis
  Intron number 1 from transcript orange1.1g011481m (locus o range1.1g011481m.g) derived from phytozome v7.0 (chr-ID sc affold00007; pos 1276414 to 1277479)
aagaaagagtcttcttagcttgtttacggaaccaggtgagtctaatgtttctttgtttgtttgtttgtttttttatttcccatttgagctgttataattcaccttttttttaattactttgaagctaaatcttttaaaagtttctatcttgatttgagttgctcttttttttttctttcttttttcaaagttaattgaattttggtttttttaactgtatggtatggcatagttggtagttgaactgtataactgtcacttgagctggttggttcttgggtttaatttgaatatgagaagctgtgctgaattgtttattgtggctttgtttgtgagtgtttgtgtatgtgtctagttttgcttttgagtgttgaaatttcatttttggatttatgacttgtttgactttcattttggtgttcgagttgacgtagttttgtgttctgtgatatgggttttcagtttaagtgctttttgcgaagtgggtatgttctctctttctctctcgttctctttaatctctttatcattggatttgtgttgagggctaaacatgctgtacagtgacaataaccataactattgtcttcttaagttttaattctcttatcgtaatttttttcttcttttctctggtaaattatttggctggtgatctggcctgttctttgaactagtattttgtgattgggctggcttgtaaggttgcttttcgtagatcctgtcttatctagtgcttaatattattattattgaactgtaaatttcatgctacatagtcagtctgttttttcagagaagtcaggtattaacagcacttttaatttagctctaggaaatttttgatgattctgctttttgaagtagtcgtatgggcattaaaaaagaaaaaagaaaaaaacatttgtatgctctcttcactgcgtaatgagttatatatcttgaataattctatatagaaatttcatttttcttgggcttctatatcttccttgatatgtttgcttctgcctctgttatctgtgacacagcctctgttgctgcttctattatttagaggggtcac

SEQ ID NO: 80113 - DNA, 948 bp, Citrus sinensis
  Intron number 1 from transcript orange1.1g034951m (locus o range1.1g034951m.g) derived from phytozome v7.0 (chr-ID sc affold00183; pos 59245 to 60192)
gaagctgcgagtctgtcatgtcaatcggcacaatcaaaatggtggtgggctggcgactgacaggctgaaacactgacgagagagggtgtgttggtgaaacgacgacaagggagagagagttaggcagcttagggttttccaattttttgacatgagggaattagattgcgaatgcccattttggttttttaataaatttacaatttaaaatatggtcaaacatggtcaaaataaatttctattaggggaaaatcaaactttgattctttgcctaagttcctattgtcatgcgcaatcttaataaagttttagtacttcatcttatcactatttattataaaaaacattatttaaaaaatcacatttttaattgatgatattaagttaaaatttataaaatatgtacaaatcaaaactagtccaatttgtacgtatccataagtgaaaagttacatttaatggattataagggataaaaatatatttttatcacggtgctatcatatatttttgttaaataataattcaatcataagtccatcattaatcttttgatagatgaaaattctattaggagtttatcatatttttatgacatggtggaaccgatcataaactgaatgtaatttattatcagtttttttttttttttgggtagtggagcttcaaaagaccataaagaatgcaaaactagtcaaccaaaagaaaaaagatataattttttggacactacactctgcacactgacgctacaaaaaattcataatctcaagtatccaacttcaccctgacactatataaaggggagactgcgagataacagattcctaccagttatcacgcatcgttggtgtttattacttttttgggttgtacgtaaacaaaacaagcaatcagctagataaggaatgttagagtatctgatgatgctgatgatattgtgcagtg
